United States Patent Application Publication US 2022/0096574 A1 - sequence listing, part 3

SEQ ID NO: 4005 - protein, 190 aa, Actinomyces massiliensis
  misc_feature (1)..(190): tr|J1HMJ5|J1HMJ5_9ACTO GTP cyclohydrolase 1 OS=Actinomy ces massiliensis F0489 OX=1125718 GN=folE PE=3 SV=1
MTYDADAVRRAVRDLLAAVGEDPDREGLRDTPERMARAYAEMFSGLDEDPGAHVERAFDVGHSEMVLVRDIPLYSVCEHHLLPFHGAAHVAYIPGEDGRVTGLSKVARLVDGYARRPQVQERLTAQAADAMVERLGCRGVLVVVEAEHLCMSMRGVRKPGANTVTSAVRGIMRNAATRSEAMSLILGRRS

SEQ ID NO: 4006 - protein, 190 aa, Actinomyces naeslundii
  misc_feature (1)..(190): tr|A0A2I1KG28|A0A2I1KG28_ACTNA GTP cyclohydrolase 1 OS= Actinomyces naeslundii OX=1655 GN=folE PE=3 SV=1
MSYDAEGVRRAVHDLLVAIGEDPDRDGLRDTPERMARAYAEMFAGLGQDPAEHVERVFDVGHEEMVLVRDIPMYSVCEHHLLPFHGSAHVGYIPSADGRVTGLSKVARLVDGYARRPQVQERLTRQIADALVERLECRGVLVVVEAEHLCMSMRGVRKPGSNTVTSAVRGIMRNAATRSEAMSLVLGRRS

SEQ ID NO: 4007 - protein, 190 aa, Actinomyces naeslundii
  misc_feature (1)..(190): tr|J3JKK9|J3JKK9_ACTNH GTP cyclohydrolase 1 OS=Actinomy ces naeslundii (strain ATCC 12104 / DSM 43013 / JCM 834 9 / NCTC 10301 / Howell 279) OX=1115803 GN=folE PE=3 SV =1
MSYDAEGVRRAVHDLLVAIGEDPDRDGLRDTPERMARAYAEMFAGLGQDPAEHVERVFDVGHEEMVLVRDIPMYSVCEHHLLPFHGSAHVGYIPSEDGRVTGLSKVARLVDGYARRPQVQERLTRQIADALVERLECRGVLVVVEAEHLCMSMRGVRKPGSNTVTSAVRGIMRNAATRSEAMSLVLGRRS

SEQ ID NO: 4008 - protein, 210 aa, Actinomyces nasicola
  misc_feature (1)..(210): tr|A0A1H3X8E7|A0A1H3X8E7_9ACTO GTP cyclohydrolase 1 OS= Actinomyces nasicola OX=208480 GN=folE PE=3 SV=1
MSRPDPERSDHFTNGVGAGPNRAYDAAGVEKAVRDLLIAVGEDPDRDGLIDTPRRMARAYAEMFAGLHENPADPLDAAFDIGHEEMILVKDIPMYSMCEHHLLPFHGLAHVGYIPNESGHVTGLSKLARLVEGHARRPQVQERLTSLVADSLVDRLHPRGVIVVVEAEHLCMSMRGVRKPGSRTITSAVRGQMRNAATRAEAMSLIMSGR

SEQ ID NO: 4009 - protein, 197 aa, Actinomyces nasicola
  misc_feature (1)..(197): tr|A0A1Q5Q2W7|A0A1Q5Q2W7_9ACTO GTP cyclohydrolase 1 OS= Actinomyces nasicola OX=208480 GN=folE PE=3 SV=1
MSEQLGAKRAYDAAGVERAIRDLLIAVGEDPERDGLRDTPKRMACAYAEMFAGLHENPSDHLDAAFDIGHEEMILVKDIPMYSMCEHHLLPFHGVAHVGYIPNASGHVTGLSKLARLVEGHARRPQVQERLTSLVADSLVERLQPRGVIVVVEAEHLCMSMRGVRKPGSRTITSAVRGQMRSAATRAEAMSLIMSGR

SEQ ID NO: 4010 - protein, 189 aa, Actinomyces neuii
  misc_feature (1)..(189): tr|A0A2I1ILP0|A0A2I1ILP0_9ACTO GTP cyclohydrolase 1 OS= Actinomyces neuii OX=33007 GN=folE PE=3 SV=1
MSREFDYERARRAAYELLCAIGEDPSRPGLEETPDRVARAWKELSVGLHEDPSEHLQKQFEVGTDEIVLIRDIPFYSVCEHHLLPFFGMANVAYLPAHGKVTGLSKIARCVEGFARKPQVQERLTAQIADALSQKLHAAGVAVVLEGEHLCMTMRGIKKPGAKTVTSALRGQMRRNQATRAEVLRLITG

SEQ ID NO: 4011 - protein, 189 aa, Actinomyces neuii
  misc_feature (1)..(189): tr|K0YPX8|K0YPX8_9ACTO GTP cyclohydrolase 1 OS=Actinomy ces neuii BVS029A5 OX=888439 GN=folE PE=3 SV=1
MSNNFDYERARQAAYDLLCAIGEDPSRPGLEETPDRVARAWRELSVGLHEDPGAHLEKQFEVGTDEIVLIRDIPFYSVCEHHLLPFFGMANVAYLPSHGKVTGLSKIARCVEGFARKPQVQERLTAQIADAIADKLHAAGVAVVLEGEHLCMTMRGIKKPGAKTVTSALRGQMRRNQATRAEVLRLITH

SEQ ID NO: 4012 - protein, 190 aa, Actinomyces oris
  misc_feature (1)..(190): tr|A0A1Q8W6S8|A0A1Q8W6S8_9ACTO GTP cyclohydrolase 1 OS= Actinomyces oris OX=544580 GN=folE PE=3 SV=1
MSYDAEGVRRAVRDLLVAIGEDPERDGLRDTPERMARAYAEMFAGLGQDPAEHVERVFDVGHEEMVLVRDIPMYSVCEHHLLPFHGAAHVGYIPSADGRVTGLSKVARLVDGYARRPQVQERLTRQIADALVERLQCRGVLVVVEAEHLCMSMRGVRKPGSNTVTSAVRGIMRNAATRSEAMSLVLGRRS

SEQ ID NO: 4013 - protein, 190 aa, Actinomyces oris
  misc_feature (1)..(190): tr|A0A1Q8XE42|A0A1Q8XE42_9ACTO GTP cyclohydrolase 1 OS= Actinomyces oris OX=544580 GN=folE PE=3 SV=1
MSYDAEGVRRAVHDLLVAIGEDPERDGLRDTPERMARAYAEMFAGLDQDPAEHVERVFDVGHEEMVLVRDIPMYSVCEHHLLPFHGSAHVGYIPGEDGRVTGLSKVARLVDGYARRPQVQERLTRQIADALVERLQCRGVLVVVEAEHLCMSMRGVRKPGSNTVTSAVRGIMRNAATRSEAMSLVLGRRS

SEQ ID NO: 4014 - protein, 183 aa, Actinomyces radicidentis
  misc_feature (1)..(183): tr|A0A0X8JGZ6|A0A0X8JGZ6_ACTRD GTP cyclohydrolase 1 OS= Actinomyces radicidentis OX=111015 GN=folE PE=3 SV=1
MRRAVRDLLVAIGEDPDRDGLVETPDRMARAYAEIFAGLAEDPGAHVEKVFDVGHEEMVLVRDIPMYSVCEHHLLPFHGVAHVAYIPSEGGRVTGLSKVARLVEGYARRPQVQERLTSQVADAMVDRLGVRGVLVVVEAEHLCMSMRGIRKPGSNTVTSAVRGQMRNAATRSEAMSLILGRRS

SEQ ID NO: 4015 - protein, 191 aa, Actinomyces ruminicola
  misc_feature (1)..(191): tr|A0A1G9RNB5|A0A1G9RNB5_9ACTO GTP cyclohydrolase 1 OS= Actinomyces ruminicola OX=332524 GN=folE PE=3 SV=1
MVSYDVDGVRRAIRDLLTAVGEDPDRDGLRDTPDRIARALAEMFSGLGEDPARHLETVFDADHQEMVLVRDIPLYSVCEHHLLPFHGVAHVGYIPGEDGRVTGLSKLARLVEGYARRPQVQERLTSQIADAMVERLGVRGVIVVIEAEHLCMSMRGVRKPGANTITSAVRGAMRNAATRSEAMSLVLGRRS

SEQ ID NO: 4016 - protein, 190 aa, Actinomyces slackii
  misc_feature (1)..(190): tr|A0A3S4U1T3|A0A3S4U1T3_9ACTO GTP cyclohydrolase 1 OS= Actinomyces slackii OX=52774 GN=folE PE=3 SV=1
MSYDAQGVRQAVRDLLVAIGEDPDRDGLRETPDRMARAYAEMFAGLEEDPAEHLERVFDVGHEEMILVRDIPLYSVCEHHLLPFHGQAHVAYIPGEGGRVTGLSKLARLVEGYARRPQVQERLTAQIADAMVERLGCRGVLTVVEAEHLCMSMRGVRKPGSNTVTSAVRGQLRNAATRAEAMSLIQGGRS

SEQ ID NO: 4017 - protein, 190 aa, Actinomyces sp.; identical to SEQ ID NO: 4001
  misc_feature (1)..(190): tr|G9PPH5|G9PPH5_9ACTO GTP cyclohydrolase 1 OS=Actinomy ces sp. oral taxon 849 str. F0330 OX=653386 GN=folE PE= 3 SV=1

SEQ ID NO: 4018 - protein, 190 aa, Actinomyces sp.
  misc_feature (1)..(190): tr|F9PHV5|F9PHV5_9ACTO GTP cyclohydrolase 1 OS=Actinomy ces sp. oral taxon 175 str. F0384 OX=944560 GN=folE PE= 3 SV=1
MSYDAEGVRRAVHDLLVAIGEDPERDGLRDTPERMARAYAEMFAGLDQDPAEHVERVFDVGHEEMVLVRDIPMYSVCEHHLLPFHGSAHVGYIPSEDGRVTGLSKVARLVDGYARRPQVQERLTRQIADALVERLQCRGVLVVVEAEHLCMSMRGVRKPGSNTVTSAVRGIMRNAATRSEAMSLVLGQRS

SEQ ID NO: 4019 - protein, 190 aa, Actinomyces succiniciruminis
  misc_feature (1)..(190): tr|A0A1L7RL75|A0A1L7RL75_9ACTO GTP cyclohydrolase 1 OS= Actinomyces succiniciruminis OX=1522002 GN=folE PE=3 SV =1
MSYDADGVRHAIRELLVAVGEDPDREGLRGTPDRIARALAEMFSGLEEDPARHLETVFDADHQEMVLVRDIPMYSVCEHHLLPFHGVAHVGYIPGEDGRVTGLSKLARLVEGYARRPQVQERLTSQIADAMVERLGVRGVIVVIEAEHLCMSMRGVHKPGANTVTSAVRGVMHNAATRSEAMSLVLGRRA

SEQ ID NO: 4020 - protein, 198 aa, Actinomyces tangfeifanii
  misc_feature (1)..(198): tr|A0A1D9MLL1|A0A1D9MLL1_9ACTO GTP cyclohydrolase 1 OS= Actinomyces tangfeifanii OX=1912795 GN=folE PE=3 SV=1
MTEATPQRQYDEAAAAAAVEAFLRAIGEDPTRDGLQETPARVARAWREITGGLHTDPAKHLERTFEIDHNEMVLVRDIPFYSVCEHHLLPFFGQAHVAYIPAGGRVTGLSKLARVVEGYARRPQVQERLTSQIADALVESLGAKGVGVVLSGEHMCMTMRGVSKPGSQTITSALRGAMRTNDATRAEFMSLVLAPNNR

SEQ ID NO: 4021 - protein, 207 aa, Actinomyces urogenitalis
  misc_feature (1)..(207): tr|C0W610|C0W610_9ACTO GTP cyclohydrolase 1 OS=Actinomy ces urogenitalis DSM 15434 OX=525246 GN=folE PE=3 SV=1
MSEDQDPGTRTRGAGPSPRPYDAEGVRRAVRDLLIAIGEDPDRDGLRETPDRMARAYEEMFAGLREDPGAHVEKVFDVGHDEMVLVRDIPMYSVCEHHLLPFHGVAHIAYIPSEDGHVTGLSKLARLVEGYARRPQVQERLTAQVADAMVERLGVRGVLVVVEAEHLCMSMRGVRKPGASTVTSAVRGQLRAAATRAEAMSLILGRH

SEQ ID NO: 4022 - protein, 219 aa, Actinomyces urogenitalis
  misc_feature (1)..(219): tr|W1VIM3|W1VIM3_9ACTO GTP cyclohydrolase 1 (Fragment) OS=Actinomyces urogenitalis DORA_12 OX=1403939 GN=Q605_ AUC00436G0001 PE=3 SV=1
GRACCAGGRGRGMSEDQDPGTRTRGAGPSPRPYDAEGVRRAVRDLLIAIGEDPDRDGLRETPDRMARAYEEMFAGLREDPGAHVEKVFDVGHDEMVLVRDIPMYSVCEHHLLPFHGVAHIAYIPSEDGHVTGLSKLARLVEGYARRPQVQERLTAQVADAMVERLGVRGVLVVVEAEHLCMSMRGVRKPGASTVTSAVRGQLRAAATRAEAMSLILGRH

SEQ ID NO: 4023 - protein, 190 aa, Actinomyces viscosus
  misc_feature (1)..(190): tr|F2V0R1|F2V0R1_ACTVI GTP cyclohydrolase 1 OS=Actinomy ces viscosus C505 OX=562973 GN=folE PE=3 SV=2
MSYDAEGVRRAVHDLLVAIGEDPERDGLRDTPERMARAYAEMFAGLDQDPAEHVERVFDVGHEEMVLVRDIPMYSVCEHHLLPFHGLAHVGYIPSEDGRVTGLSKVARLVDGYARRPQVQERLTRQIADALVERLQCRGVLVVVEAEHLCMSMRGVRKPGSNTVTSAVRGIMRNAATRSEAMSLVLGRRS

SEQ ID NO: 4024 - protein, 190 aa, Actinomyces viscosus
  misc_feature (1)..(190): tr|A0A3S4ZAH3|A0A3S4ZAH3_ACTVI GTP cyclohydrolase 1 OS= Actinomyces viscosus OX=1656 GN=folE PE=3 SV=1
MSYDAEGVRRAVRDLLVAIGEDPDRDGLRDTPERMARAYQEMFSGLGQDPAEHVERVFDVGHEEMVLVRDIPMYSVCEHHLLPFHGAAHVGYIPSPDGRVTGLSKVARLVDGYARRPQVQERLTRQIADALVERLECRGVLVVVEAEHLCMSMRGVRKPGSNTITSAVRGIMRNAATRSEAMSLVLGRRS

SEQ ID NO: 4025 - protein, 176 aa, Actinomycetaceae bacterium
  misc_feature (1)..(176): tr|A0A179B5S1|A0A179B5S1_9ACTO GTP cyclohydrolase 1 OS= Actinomycetaceae bacterium BA112 OX=1823756 GN=folE PE= 3 SV=1
MRALLRAVGENPERDGLVDTPARMARSFKEIFSGLRQDPADALEAKFDIGHQEMIIVKDIPFYSTCEHHLLPFHGHAHVAYIPNADGKVTGLSKIARLVDGYARRPQVQERIATQVAEALESRLGARGVLVVIEAEHMCMSMRGVNKPGSRTVTSAVRGVLRNQATRSEALSLIQG

SEQ ID NO: 4026 - protein, 235 aa, Actinomycetales bacterium
  misc_feature (1)..(235): tr|A0A2N1JJQ5|A0A2N1JJQ5_9ACTO GTP cyclohydrolase 1 OS= Actinomycetales bacterium SN12 OX=2058180 GN=folE PE=3 SV=1
MSVDRARVERLTRELLEAIGENPDRPGLTHTPSRMAELYAEFFAGVGEDPAVHLARTISVSRGPAPDTVPSGAVLLRDIRFRSVCEHHLLPFAGVAHLAYLPGEQVVGLGALVKVVETLASRPQVQERLGEQIADAIAENLDTRGVLVVLDASHGCVTMRGGRQPLATTVTIAARGAFTDPAARAELIALIGGPSAGSGSQGSATQAQGAATQGQGSATQAQGAAAQGQGLGSHG

SEQ ID NO: 4027 - protein, 197 aa, Actinomycetales bacterium
  misc_feature (1)..(197): tr|A0A1R4F1W1|A0A1R4F1W1_9ACTO GTP cyclohydrolase 1 OS= Actinomycetales bacterium JB111 OX=1434822 GN=folE PE=3 SV=1
MTERAPMRQPVDAARAEAAVRELLLAVGEDPDREGLRETPARVARSYSELLAGLAEDPADHLDAVFDIDHQELVIAADIPLYSMCEHHLLPFHGRAHVGYIPSLDGRVTGLSKLARVVEGYARRPQVQERLTAQVADALMERLGARGAIVVVEAEHMCMSMRGVHATGTRTVTSAVRGALRNPATRAEAMSLLRSRS

SEQ ID NO: 4028 - protein, 269 aa, Actinomycetospora cinnamomea
  misc_feature (1)..(269): tr|A0A2U1FLE7|A0A2U1FLE7_9PSEU GTP cyclohydrolase 1 OS= Actinomycetospora cinnamomea OX=663609 GN=folE PE=3 SV= 1
MTTSRDLERDAQRPEEHADSGQHADSGQHADSGQHADRGSTPTAAAAPGAGRGLTPNGDGVSPTDDGAGGPVGTAVAPEWTGFDAPRAEAAVRELLLAIGEDPDREGLRETPARVARAYQELFAGLRSDPAAVLERTFDEDHDELVLVRDIPVFSMCEHHLLPFHGQAHVAYIPAHDGRVTGLSKLARLVDLYARRPQVQERLTRQVADALDERLGARGVLVVIDAEHQCMSARGVRKPGARTTTSAVRGIMKTSASTRAEALGLIRGG

SEQ ID NO: 4029 - protein, 224 aa, Actinomycetospora succinea
  misc_feature (1)..(224): tr|A0A4R6VJA0|A0A4R6VJA0_9PSEU GTP cyclohydrolase 1 OS= Actinomycetospora succinea OX=663603 GN=folE PE=3 SV=1
MTTSQELDGDLGDTRVRPTDDGAGGPVGDVLAPEWEGFDAPRAEAAVRELLLAIGEDPDREGLRDTPARVARSYRELFAGLRTDPSLVLERTFSEDHEELVLVRDIPMFSMCEHHLLPFHGVAHVAYIPGPQGHVTGLSKLARLVDLYARRPQVQERLTSQVADALDTKLDTRGALVVIDAEHQCMSARGVRKPGARTTTSAVRGIFKTSASTRAEALNLIRSG

SEQ ID NO: 4030 - protein, 206 aa, Actinophytocola oryzae
  misc_feature (1)..(206): tr|A0A4R7UYT8|A0A4R7UYT8_9PSEU GTP cyclohydrolase 1 OS= Actinophytocola oryzae OX=502181 GN=folE PE=3 SV=1
MTVNGSRRGPLYTGGSVFDQERAERAVRELLLACGENPDRDGLQDTPQRVARAYLEMFAGLYTDPDEVLDRTFDECHDELVLVTDIPMYSTCEHHLVPFHGTAHVGYIPNEQGKVTGLSKIARLVDLYAKRPQVQERLTSQIADALVRKLSPRGVIVVVEAEHLCMAMRGVRKPGARTTTSAVRGIFRSSATSRSEALALINGRTK

SEQ ID NO: 4031 - protein, 116 aa, Actinoplanes atraurantiacus
  misc_feature (1)..(116): tr|A0A285EZ44|A0A285EZ44_9ACTN GTP cyclohydrolase 1 OS= Actinoplanes atraurantiacus OX=1036182 GN=SAMN05421748_ 101196 PE=3 SV=1
MSMCEHHLLPFKGVAHIGYVPGTHGRITGLSKLARLVEVYARRPQVQERLTSQIADLLMSKLDARGAIVVLECEHLCMEMRGIRKVGARTVTSAVRGAFQTDAKIRAEAMALINAR

SEQ ID NO: 4032 - protein, 214 aa, Actinoplanes awajinensis
  misc_feature (1)..(214): tr|A0A117MPB6|A0A117MPB6_9ACTN GTP cyclohydrolase 1 OS= Actinoplanes awajinensis subsp. mycoplanecinus OX=13594 7 GN=folE PE=3 SV=1
MSTKDELDYLAARLVDGKLTGTPVEDAVDLGRIEKAVREILIAIGEDPDRDGLVRTPSRVARAYAELFAGLRVDPATVLTTTFEADHEELVLVRDIEVQSMCEHHLLPFTGVAHIGYIPGTNGRITGLSKLVRLVEVFARRPQVQERLTSQIADLLMAKLDARGAIVVLECEHLCMEMRGIRKVGARTVTSAVRGAFQTDGKVRAEAMALINAR

SEQ ID NO: 4033 - protein, 196 aa, Actinoplanes brasiliensis
  misc_feature (1)..(196): tr|A0A4R6JLE1|A0A4R6JLE1_9ACTN GTP cyclohydrolase 1 OS= Actinoplanes brasiliensis OX=52695 GN=folE PE=3 SV=1
MTIEADLRWDLVTQRDMPAAEQAATAFLEALGVDLTAPGLAETPGRMARAYAEMLTPREFAMTTFDNDEGYDELVLAKSIPVRSLCEHHLLPFVGVAHVGYLPADRILGLSKLARVVEMFAHRTQVQERLTKQIADWLSMRLRPRGVGVVIEADHMCMSLRGVRAPAARTVTSTLLGSLRDDPRSRAEFFAVAGPG

SEQ ID NO: 4034 - protein, 208 aa, Actinoplanes derwentensis
  misc_feature (1)..(208): tr|A0A1H2CYA1|A0A1H2CYA1_9ACTN GTP cyclohydrolase 1 OS= Actinoplanes derwentensis OX=113562 GN=folE PE=3 SV=1
MDYLAARLVDGKLTGTPVEQAVDLGRIEKAVREILIAVGEDPDRDGLQRTPARVARAYAELFAGLRVDPASVLTTTFEADHEELVLVRDIELHSMCEHHLLPFKGVAHIGYIPGTDGRITGLSKLARLVEVFARRPQVQERLTSQIADLLMQQLGARGAIVVLECEHLCMEMRGIRKAGARTVTSAVRGGFKTDGKVRAEVMALINAR

SEQ ID NO: 4035 - protein, 148 aa, Actinoplanes friuliensis
  misc_feature (1)..(148): tr|U5WF77|U5WF77_9ACTN GTP cyclohydrolase 1 OS=Actinopl anes friuliensis DSM 7358 OX=1246995 GN=AFR_41535 PE=3 SV=1
MFAGLRVDPAKVLTTTFEANHEELVLVRDIELMSLCEHHLLPFKGVAHVGYIPGVDGRITGLSKLARLVEVFARRPQVQERLTSQIADLLMEKLSPRGVIVVLECEHLCMEMRGIRKVGARTVTSAVRGAFQRDGKVRAEAMALINAR

SEQ ID NO: 4036 - protein, 236 aa, Actinoplanes italicus
  misc_feature (1)..(236): tr|A0A2T0KAQ7|A0A2T0KAQ7_9ACTN GTP cyclohydrolase 1 OS= Actinoplanes italicus OX=113567 GN=folE PE=3 SV=1
MNVFQPGIEPETAGRRHVEKSSISTSGELDYLAARLVDGKLTGTPVEDAVDLGRIEKAVREILIAVGEDPDRDGLQRTPARVARAYAELFAGLRVDPATVLTTSFEADHEELVLVRDIEVQSMCEHHLLPFKGVASIGYIPGTDGRITGLSKLARLVEVFARRPQVQERLTSQIADLLMAQLGARGAIVVLECEHLCMEMRGIRKAGARTVTSAVRGAFQTDGKVRAEAMALINAR

SEQ ID NO: 4037 - protein, 137 aa, Actinoplanes lutulentus
  misc_feature (1)..(137): tr|A0A327ZC84|A0A327ZC84_9ACTN GTP cyclohydrolase 1 OS= Actinoplanes lutulentus OX=1287878 GN=B0I29_1068 PE=3 S V=1
MLTTTFEADHEELVLVRDIEVQSMCEHHLLPFKGVAHIGYIPGTDGRITGLSKLARLVEVFARRPQVQERLTSQIADLLMQKLGARGAIVVLECEHLCMEMRGIRKVGARTVTSAVRGAFQTDGKVRAEAMALINAR

SEQ ID NO: 4038 - protein, 208 aa, Actinoplanes missouriensis
  misc_feature (1)..(208): tr|I0HJ36|I0HJ36_ACTM4 GTP cyclohydrolase 1 OS=Actinopl anes missouriensis (strain ATCC 14538 / DSM 43046 / CBS 188.64 / JCM 3121 / NCIMB 12654 / NBRC 102363 / 431) O X=512565 GN=folE PE=3 SV=1
MDYLAARLVDGKVTGTPVEDAVDLGRIEKAIREILIAIGEDPDRDGLERTPARVARAYAELFAGLRVDPATVLTTTFEADHEELVLVRDIEVQSMCEHHLLPFKGVAHIGYIPGADGRITGLSKLARLVEVYARRPQVQERLTSQIADLLMEKLAARGAIVVLECEHLCMEMRGIRKVGARTVTSAVRGAFQSDGKVRAEAMALINAR

SEQ ID NO: 4039 - protein, 212 aa, Actinoplanes philippinensis
  misc_feature (1)..(212): tr|A0A1I2JDG8|A0A1I2JDG8_9ACTN GTP cyclohydrolase 1 OS= Actinoplanes philippinensis OX=35752 GN=folE PE=3 SV=1
MSDELDYLAARLVDGKLSGTPVEQAVDLGRIEKAVREILIAVGEDPDRDGLQRTPARVARAYAELFAGLRVDPASVLTTTFEADHEELVLVRDIELHSMCEHHLLPFKGVAHIGYIPGTDGRITGLSKLARLVDVFARRPQVQERLTSQIADLLMERLGARGAIVVLECEHLCMEMRGIRKAGARTVTSAVRGGFQTDGKVRAEVMALINAR

SEQ ID NO: 4040 - protein, 137 aa, Actinoplanes regularis
  misc_feature (1)..(137): tr|A0A239AP29|A0A239AP29_9ACTN GTP cyclohydrolase 1 OS= Actinoplanes regularis OX=52697 GN=SAMN06264365_10833 P E=3 SV=1
MLTTTFEADHEELVLVRDIEVQSMCEHHLLPFKGVASIGYIPGTDGRITGLSKLARLVEVYARRPQVQERLTSQIADLLMEKLEARGAIVVLECEHLCMEMRGIRKVGARTVTSAVRGAFQTDGKVRAEAMALINAR

SEQ ID NO: 4041 - protein, 222 aa, Actinoplanes sp.
  misc_feature (1)..(222): tr|A0A428X1G5|A0A428X1G5_9ACTN GTP cyclohydrolase 1 OS= Actinoplanes sp. ATCC 53533 OX=1288362 GN=folE PE=3 SV= 1
MTDGSSTEPNGADEPDYLAARLVDGKLTGTPVEQAVDLARIEKAVREILIAIGEDPDRDGLVRTPARVARAYAELFAGLRVDPAKVLTTTFEANHEELVLVRDIELMSLCEHHLLPFKGVAHIGYIPGVDGRITGLSKLARLVEVFARRPQVQERLTSQIADLLMEKLTPRGVIVVLECEHMCMEMRGIRKVGARTVTSAVRGAFQSDGKVRAEAMALINAR

SEQ ID NO: 4042 - protein, 194 aa, Actinoplanes sp.
  misc_feature (1)..(194): tr|R4L0I7|R4L0I7_9ACTN GTP cyclohydrolase 1 OS=Actinopl anes sp. N902-109 OX=649831 GN=K924_0009 PE=3 SV=1
MSVTKLDLTEDALVTTEDPLVGLARQLLTEIGEDPDRDGLRDTPVRFARWWREFINYEPGSVGTLFESVGTSQLVVVSDIQVWSLCEHHLLPFNCAVTIAYRPTGRLLGLSKFARVAHQHAHKLQVQERLVNQIALDVATLTGTPDVAVIAKGEHLCMTMRGIKAAAQMTSTAYRGGFSTDPALRSELFDLLRA

SEQ ID NO: 4043 - protein, 199 aa, Actinoplanes teichomyceticus
  misc_feature (1)..(199): tr|A0A561WQZ7|A0A561WQZ7_ACTTI GTP cyclohydrolase 1 OS= Actinoplanes teichomyceticus OX=1867 GN=FHX34_1011271 P E=3 SV=1
MSTDLDVDKGPLAMMDGLGADPLEDLARLLLKEIGEDPSRDGLRDTPARYARWWREFIEYDPGTVDTVFEATSAGQLVLVSGIEVWSLCEHHLLPFNCSLTIGYRAADRLLGLSKFARIAHHRAHRLQVQERLVADIAADVARIAGTEDVGVIGTGEHLCMTMRGIKTSARMTSSSLLGAFAEEGLLRSELLTHLQTAR

SEQ ID NO: 4044 - protein, 198 aa, Actinoplanes teichomyceticus
  misc_feature (1)..(198): tr|Q6ZZH1|Q6ZZH1_ACTTI GTP cyclohydrolase 1 OS=Actinopl anes teichomyceticus OX=1867 GN=tcp35 PE=3 SV=1
MTVTAKHVGNTRPAPDLATATAAAATFLDALGVDLSPESLQETPARMARAYADLLTAREFKLTTFDNDEGYDELVMARNIPIRSVCEHHLLPFIGVAHVGYLPAARILGLSKLARVVEMFAHGTQVQERLTKQIADWLIKELEPNGVGVVIEAEHLCMTLRGVQAVGANTITSSMLGVLRDDARSRGEFLAAAGLGGR

SEQ ID NO: 4045 - protein, 214 aa, Actinoplanes utahensis
  misc_feature (1)..(214): tr|A0A0A6UET9|A0A0A6UET9_ACTUT GTP cyclohydrolase 1 OS= Actinoplanes utahensis OX=1869 GN=folE PE=3 SV=1
MSKSDELDYLAARLVDGKLTGTPVEQAVDLGRIEKAVREILIAVGEDPDRDGLVRTPARVARAYAELFAGLRVDPATVLTTSFEADHEELVLVRDIELQSMCEHHLLPFKGVAHIGYIPGTDGRITGLSKLARLVEVFARRPQVQERLTSQIADLLMAQLGARGAIVVLECEHLCMEMRGIRKAGARTVTSAVRGGFQTDGKVRAEAMALINAR

SEQ ID NO: 4046 - protein, 212 aa, Actinoplanes xinjiangensis
  misc_feature (1)..(212): tr|A0A316FCK6|A0A316FCK6_9ACTN GTP cyclohydrolase 1 OS= Actinoplanes xinjiangensis OX=512350 GN=folE PE=3 SV=1
MSDELDYLAARLVDGKLTGTPVEQAVDLGRIEKAVREILIAVGEDPDRDGLQRTPARVARAYAELFAGLRVDPATVLTTTFEADHEELVLVRDIELHSMCEHHLLPFKGVAHIGYIPGTDGRITGLSKLARLVEVFARRPQVQERLTSQIADLLMAQLGARGAIVVLECEHLCMEMRGIRKAGARTVTSAVRGGFQTDGKVRAEVMALINAR

SEQ ID NO: 4047 - protein, 208 aa, Actinopolymorpha cephalotaxi
  misc_feature (1)..(208): tr|A0A1I2NG39|A0A1I2NG39_9ACTN GTP cyclohydrolase 1 OS= Actinopolymorpha cephalotaxi OX=504797 GN=folE PE=3 SV= 1
MTADATGVTDVTDLHAPAEIPPFDHGRAERAIRELLLAVGEDPDREGLRDTPARVARSYAEMFAGLRMTPESVLSTTFDLGHDEMVLVKDIEVWSVCEHHLVPFTGNAHIGYIPNAEGQITGLSKLARLVDVYAKRPQVQERLTTQVAEALLRILSPRGVIVVIECEHLCMTMRGVRKPGAKTVTSAVRGQLRDPATRAEAMSLIIGA

SEQ ID NO: 4048 - protein, 208 aa, Actinopolymorpha singaporensis
  misc_feature (1)..(208): tr|A0A1H1QIW4|A0A1H1QIW4_9ACTN GTP cyclohydrolase 1 OS= Actinopolymorpha singaporensis OX=117157 GN=folE PE=3 S V=1
MTAKATGVTDVRDLHEAAEIPPFDHGRAERAIRELLLAVGEDPDREGLHDTPARVARAYAEMFAGLRMTPESVLTTTFDLGHDEMVLVKDIEVWSVCEHHLVPFTGSAHIGYIPNAEGQITGLSKLARLVDVYAKRPQVQERLTTQVADALLRILSPRGVIVVIECEHLCMTMRGVRKPGAKTVTSAVRGQLRDPTTRAEAMSLIIGA

SEQ ID NO: 4049 - protein, 212 aa, Actinopolyspora alba
  misc_feature (1)..(212): tr|A0A1I1W4A3|A0A1I1W4A3_9ACTN GTP cyclohydrolase 1 OS= Actinopolyspora alba OX=673379 GN=folE PE=3 SV=1
MTGQGVPIGPDAEFGSDPAELVDEYFDRPRAEAAIRELLLAAGEDPERDGLRETPARVARAYEELFTGLYTDPDEVLDRTFDEAHEELVLVRDIPMYSQCEHHLLPFHGMAHIGYIPNEQGRVTGLSKLARLVDLYAKRPQVQERLTSQIADALTRKLEPRGVIVVVDAEHLCMGMRGIRKAGSTTTTSAVRGIFRSSSSSRAEALSLIRGK

SEQ ID NO: 4050 - protein, 201 aa, Actinopolyspora erythraea
  misc_feature (1)..(201): tr|A0A223RSS6|A0A223RSS6_9ACTN GTP cyclohydrolase 1 OS= Actinopolyspora erythraea OX=414996 GN=CDG81_12220 PE=3 SV=1
MTSFSPPRSGSDSFDDDFERGEEVGVGSDPLEEIARSLLVEIGEDPDRDGLRETPARYARWWREFIDYDPGKIETSFHSVSSDQLIEVSGIRVWSLCEHHLLPFWCDVSIAYVAHNKILGLSKFARIAHKHAHRLQVQERLTAGIADSVQEFTGSPDVAVRARGEHLCMTMRGVRTSADMSTSVLRGDFERNAELRTRLSS

SEQ ID NO: 4051 - protein, 212 aa, Actinopolyspora erythraea
  misc_feature (1)..(212): tr|A0A099DAJ5|A0A099DAJ5_9ACTN GTP cyclohydrolase 1 OS= Actinopolyspora erythraea OX=414996 GN=folE PE=3 SV=1
MTREGVPIGPDAEFGSDPAEMVDEHFDRARAEAAIRELLLAAGEDPERDGLRETPARVARAYEELFTGLYTDPDQVLDRTFDEAHEELVLVRDIPVYSQCEHHLLPFHGMAHIGYIPNEQGRVTGLSKLARLVDLYAKRPQVQERLTSQIADALTRKLEPRGVIVVVDAEHLCMGMRGIRKAGSTTTTSAVRGIFRSSSSSRAEALSLIRGK

SEQ ID NO: 4052 - protein, 207 aa, Actinopolyspora mortivallis
  misc_feature (1)..(207): tr|A0A2T0GTH2|A0A2T0GTH2_9ACTN GTP cyclohydrolase 1 OS= Actinopolyspora mortivallis OX=33906 GN=folE PE=3 SV=1
MPAGPDAEFGSDPAEFVHQRFDKPRAQAAIRELLLAAGEDPDREGLRETPERVARAYEELFTGLYTDPDEVLDRTFDESHEELVLVRDIPMYSQCEHHLLPFHGMAHIGYIPNDQGRVTGLSKLARLVDLYAKRPQVQERLTSQIADALTRKLEPRGVIVVVEAEHLCMGMRGVRKAGSVTTTSAVRGVFRSSASSRSEALSLIRGK

SEQ ID NO: 4053 - protein, 212 aa, Actinopolyspora mzabensis
  misc_feature (1)..(212): tr|A0A1G9B0V3|A0A1G9B0V3_9ACTN GTP cyclohydrolase 1 OS= Actinopolyspora mzabensis OX=995066 GN=folE PE=3 SV=1
MTGQGVPIGPDAEFGSDPAEFVEEHFDRPRAEAAIRELLLAAGEDPERDGLRETPARVARAYEELFTGLYTDPDEVLDRTFDEAHEELVLVRDIPMYSQCEHHLLPFHGMAHIGYIPNEQGRVTGLSKLARLVDLYAKRPQVQERLTSQIADALIRKLEPRGVIVVVDAEHLCMGMRGIRKAGSTTTTSAVRGIFRSSSSSRAEALSLIREK

SEQ ID NO: 4054 - protein, 212 aa, Actinopolyspora righensis; identical to SEQ ID NO: 4049
  misc_feature (1)..(212): tr|A0A1I7BNC7|A0A1I7BNC7_9ACTN GTP cyclohydrolase 1 OS= Actinopolyspora righensis OX=995060 GN=folE PE=3 SV=1

SEQ ID NO: 4055 - protein, 212 aa, Actinopolyspora saharensis
  misc_feature (1)..(212): tr|A0A1H1F587|A0A1H1F587_9ACTN GTP cyclohydrolase 1 OS= Actinopolyspora saharensis OX=995062 GN=folE PE=3 SV=1
MTGESVPVGPDAEFGADPAEFVDQKFDRPRAAAAIRELLLAAGEDPDREGLRETPERVARAYEELFTGLYTDPDEVLDRTFDESHEELVLVRDIPMYSQCEHHLLPFHGMAHIGYIPNDQGRVTGLSKLGRLVDLYAKRPQVQERLTSQIADALTRKLEPRGVIVVVEAEHLCMGMRGVRKAGSVTTTSAVRGVFRSSASSRSEALSLIRGK

SEQ ID NO: 4056 - protein, 212 aa, Actinopolyspora sp.
  misc_feature (1)..(212): tr|A0A543JSN1|A0A543JSN1_9ACTN GTP cyclohydrolase 1 OS= Actinopolyspora sp. DSM 45965 OX=2586995 GN=folE PE=3 S V=1
MTGESVPVGPDAEFGADPAEFVDQKFDRPRAAAAIRELLLAAGEDPDREGLLETPERVARAYEELFTGLYTDPDEVLDRTFDESHEELVLVRDIPMYSQCEHHLLPFHGMAHIGYIPNDQGRVTGLSKLGRLVDLYAKRPQVQERLTSQIADALTRKLEPRGVIVVVEAEHLCMGMRGVRKAGSVTTTSAVRGVFRSSASSRSEALSLIRGK

SEQ ID NO: 4057 - protein, 212 aa, Actinopolyspora sp.; identical to SEQ ID NO: 4049
  misc_feature (1)..(212): tr|A0A4Q8B2D2|A0A4Q8B2D2_9ACTN GTP cyclohydrolase 1 OS= Actinopolyspora sp. DSM 45956 OX=2512148 GN=folE PE=3 S V=1

SEQ ID NO: 4058 - protein, 201 aa, Actinopolyspora xinjiangensis
  misc_feature (1)..(201): tr|A0A1H0S1C6|A0A1H0S1C6_9ACTN GTP cyclohydrolase 1 OS= Actinopolyspora xinjiangensis OX=405564 GN=SAMN04487905 _103328 PE=3 SV=1
MTSFSPPRSGSDSFDDDFESGEEVGVDSDPLEQIARSLLVEIGEDPDRDGLRETPARYARWWREFIDYDPGKIETSFHSVSSDQLIEVSGIRVWSLCEHHLLPFWCDVSIAYVARNKILGLSKFARIAHKHAHRLQVQERLTAGIADSVQEFTGSPDVAVRARGEHLCMTMRGVRTSADMSTSVLRGDFERNAELRTRLSS

SEQ ID NO: 4059 - protein, 212 aa, Actinopolyspora xinjiangensis
  misc_feature (1)..(212): tr|A0A1H0WXD1|A0A1H0WXD1_9ACTN GTP cyclohydrolase 1 OS= Actinopolyspora xinjiangensis OX=405564 GN=folE PE=3 SV =1
MTREGVPIGPDAEFGSDPAELVDEHFDRARAEAAIRELLLAAGEDPERDGLRETPARVARAYEELFTGLYTDPDQVLDRTFDEAHEELVLVRDIPVYSQCEHHLLPFHGMAHIGYIPNEQGRVTGLSKLARLVDLYAKRPQVQERLTSQIADALTRKLEPRGVIVVVDAEHLCMGMRGIRKAGSTTTTSAVRGIFRSSSSSRAEALSLIRGK

SEQ ID NO: 4060 - protein, 207 aa, Actinorugispora endophytica
  misc_feature (1)..(207): tr|A0A4R6V4H9|A0A4R6V4H9_9ACTN GTP cyclohydrolase 1 OS= Actinorugispora endophytica OX=1605990 GN=folE PE=3 SV= 1
MSGYHEEAGDYAEPLPPAGVDQHRIEKAVREILLAIGEDPDRDGLLDTPARVARAYAEQFAGLDQRPEDVLTTVFEAGHEEMVLVRDIEMYSTCEHHLVPFYGVAHIGYIPSAEGQITGLSKLARLVDVYARRPQVQERLTTQIADALMTNLKPRGVIVVIEAEHLCMTMRGVRKPGAKTLTSAVRGGFRDSDRTRAEAMSLILGRR

SEQ ID NO: 4061 - protein, 218 aa, Actinorugispora endophytica
  misc_feature (1)..(218): tr|A0A4R6UXH4|A0A4R6UXH4_9ACTN GTP cyclohydrolase 1 OS= Actinorugispora endophytica OX=1605990 GN=folE PE=3 SV= 1
MSDQNAQRVLTEAEAPEARPVLSRLRVMRPPAETDLEAAEAAAADLLAALGLPLGGEGMAETPRRMAHAYAEMLAVPSFDMTTFPNTEGYDELVLVKGIPVRSLCEHHMLPFTGVAHVGYLPADRILGLSKFARVVDFFAHRAQTQERLTKQVTEKLQERLAPRGVGVVVEAEHTCMSLRGVRAAGARTVTSAFFGHLREDSAARAEFLALTGVRGEA

SEQ ID NO: 4062 - protein, 209 aa, Actinosynnema mirum
  misc_feature (1)..(209): tr|C6WGG7|C6WGG7_ACTMD GTP cyclohydrolase 1 OS=Actinosy nnema mirum (strain ATCC 29888 / DSM 43827 / NBRC 14064 / IMRU 3971) OX=446462 GN=folE PE=3 SV=1
MIEFDNAGLPSNGEAGVAAKRPFDQERAEAAVRELLLACGEDPEREGLRETPARVARAYREMFAGLFTEPDGVLAKTFDESHEELVLVTEIPVYSFCEHHLLPFHGVAHVGYIPNEQGRVTGLSKLARLVDLYAKRPQVQERLTSQVADALVRRLEPRGVIVVVEAEHLCMGMRGVRKPGSRTTTSAVRGLLRTSASSRAEAISLIKGR

SEQ ID NO: 4063 - protein, 209 aa, Actinosynnema pretiosum
  misc_feature (1)..(209): tr|A0A290YZH1|A0A290YZH1_9PSEU GTP cyclohydrolase 1 OS= Actinosynnema pretiosum OX=42197 GN=folE PE=3 SV=1
MIEFDNAGLPSNGEAGVAAKRPFDQKRAEAAVRELLLACGEDPEREGLRETPARVARAYREMFAGLFTEPDSVLAKTFDESHEELVLVTDIPVYSFCEHHLLPFHGVAHVGYIPNEQGRVTGLSKLARLVDLYAKRPQVQERLTSQVADALVRRLEPRGVIVVVEAEHLCMGMRGVRKPGSRTTTSAVRGLLRTSASSRAEAISLIKGR

SEQ ID NO: 4064 - protein, 209 aa, Actinosynnema pretiosum
  misc_feature (1)..(209): tr|A0A347PSD1|A0A347PSD1_9PSEU GTP cyclohydrolase 1 OS= Actinosynnema pretiosum subsp. pretiosum OX=103721 GN=f olE PE=3 SV=1
MIEFDNAGLPSNGEAGVAAKRPFDQERAEAAVRELLLACGEDPEREGLRETPARVARAYREMFAGLFTEPDGVLAKTFDESHEELVLVTDIPVYSFCEHHLLPFHGVAHVGYIPNEQGRVTGLSKLARLVDLYAKRPQVQERLTSQVADALVRRLEPRGVIVVVEAEHLCMGMRGVRKPGSRTTTSAVRGLLRTSASSRAEAISLIKGR

SEQ ID NO: 4065 - protein, 199 aa, Actinosynnema sp.
  misc_feature (1)..(199): tr|A0A1V2PTI3|A0A1V2PTI3_9PSEU GTP cyclohydrolase 1 OS= Actinosynnema sp. ALI-1.44 OX=1933779 GN=folE PE=3 SV=1
MRAVTALRVVHEPDTGVDLAAAEEAAKAFLHALGVPTDTESLRGTPGRMARAYAELFSPRPFDLTTFPNDEGYDELVLARSIPVRSVCEHHLLPFVGTAHVGYLPGERILGLSKLARIVEYFACRPQVQERLTKQVADWLDDHLRPRGIGVVIEAEHTCMTLRGVLASGSTTVTSTLLGSLRDDARSRQEFFALTGVHA

SEQ ID NO: 4066 - protein, 198 aa, Actinosynnema sp.
  misc_feature (1)..(198): tr|A0A1V2PSE0|A0A1V2PSE0_9PSEU GTP cyclohydrolase 1 OS= Actinosynnema sp. ALI-1.44 OX=1933779 GN=folE PE=3 SV=1
MDGARSVRPVFDQARAERAVRELLLACGEDPDRQGLAETPARVARAYREMFAGLYMDPDAVLAKTFDEAHEELVLVTDIPMYSYCEHHLLPFHGVAHVGYIPNEHGKVTGLSKLARLVDAYAKRPQVQERLTSQIADSLMRTLEPRGVIVVVEAEHLCMSMRGIRKPGARTTTSGVRGQFKTSASSRAEALDLIKARR

SEQ ID NO: 4067 - protein, 215 aa, Actinotalea fermentans
  misc_feature (1)..(215): tr|A0A511Z116|A0A511Z116_9CELL GTP cyclohydrolase 1 OS= Actinotalea fermentans OX=43671 GN=folE_2 PE=3 SV=1
MTSLSVTPPQTPPSAPLRVVPDAAEPDLEAATVAAGAFLAALGVPLDSPSMAASPRRMAAAWSEMLTPRAFDLTTFPNDGGYREMVLARDLPVHSICEHHLLPFVGVAHVAYLPGERLLGLSKLARLVELHARRPQVQERLTQQIADWLDRELAPRGVGVVVEAHHQCMSLRGVRTPESSTVTAAFHGALGQRDARAELLSLAGARRALDEEATA

SEQ ID NO: 4068 - protein, 209 aa, Actinotalea fermentans
  misc_feature (1)..(209): tr|A0A511YXV4|A0A511YXV4_9CELL GTP cyclohydrolase 1 OS= Actinotalea fermentans OX=43671 GN=folE_1 PE=3 SV=1
MTDLPDDVPLPGEPDLAVPPEPHYDAPRAEAAVRELLLAIGEDPDRDGLRETPARVARAYAETFAGLYQDPREILATTFELGHEEMILVKDIAVYSTCEHHLVPFHGVAHVAYIPGPDGRVTGLSKIARLVDLYARRPQVQERLTSQIADTLVEVLAPGGVLVVVDCEHLCMTMRGVRKPGSHTVTSAVRGQLRNPATRAEAMSLIIGR

SEQ ID NO: 4069 - protein, 212 aa, Actinotalea ferrariae
  misc_feature (1)..(212): tr|A0A021VMH1|A0A021VMH1_9CELL GTP cyclohydrolase 1 OS= Actinotalea ferrariae CF5-4 OX=948458 GN=folE PE=3 SV=1
MSHTADDIPIPGGTTDEEISMTPVLYDAERAERAVRELLLAVGEDPDRDGLRETPARVARAYAELFAGLYQDPADVLKVTFDIGGHDEMILVKDIEVYSTCEHHLVPFHGVAHVGYIPGEDGRVTGLSKLARLVDVFARRPQVQERLTTQIADTLVEVLRPQGVIVVLQCEHLCMSMRGVRKPGSNTLTSAVRGQMRDAATRAEAMSLILGR

SEQ ID NO: 4070 - protein, 197 aa, Actinotignum sanguinis
  misc_feature (1)..(197): tr|A0A430JT81|A0A430JT81_9ACTO GTP cyclohydrolase 1 OS= Actinotignum sanguinis OX=1445614 GN=folE PE=3 SV=1
MDTQRIDAERVDTGRVERAVRELLSAIGEDPDRPGLVDTPARVARACTEIFAGVGKDPDAVLDAQFAEDFHEMVVVRDITFYSMCEHHLLPFFGVAHIVYIPGEEGKVTGLSKLARLVEGYARRPQVQERLTTQIANALRDRLGAAGVLVVVEAEHMCMTMRGVRNSGSRTVTSAVRGMLRKPSTRAEAMSLIERGA

SEQ ID NO: 4071 - protein, 219 aa, Actinotignum schaalii
  misc_feature (1)..(219): tr|S2VP96|S2VP96_9ACTO GTP cyclohydrolase 1 OS=Actinoti gnum schaalii FB123-CNA-2 OX=883067 GN=folE PE=3 SV=1
MSAAESAGNGPVDSQSAETQRHAARQADTARVVDTERVERAVRELLSAIGEDPDRPGLVDTPARVARACTEIFAGVGKDPDAVLDAQFAEDFHEMVVVRDITFYSMCEHHLLPFFGVAHIVYIPGEEGKVTGLSKLARLVEGYARRPQVQERLTTQIANALRDRLGAAGVLVVVEAEHMCMTMRGVCNSGSRTVTSAVRGMLRKPSTRAEAMSLIERGA

SEQ ID NO: 4072 - protein, 203 aa, Actinotignum schaalii
  misc_feature (1)..(203): tr|A0A068NKA7|A0A068NKA7_9ACTO GTP cyclohydrolase 1 OS= Actinotignum schaalii OX=59505 GN=folE PE=3 SV=1
MDTQRHGTRPVDTARVVDTERVERAVRELLSAIGEDPDRPGLVDTPARVARACTEIFSGVGKDPDAVLDAQFAEDFHEMVVVRDITFYSMCEHHLLPFFGAAHIVYIPGAEGKVTGLSKLARLVEGYARRPQVQERLTTQIANALRDRLGAAGVLVVVEAEHMCMTMRGVRNSGSRTVTSAVRGMLRKPSTRAEAMSLIERGA

SEQ ID NO: 4073 - protein, 202 aa, Actinotignum timonense
  misc_feature (1)..(202): tr|A0A2I2J4W7|A0A2I2J4W7_9ACTO GTP cyclohydrolase 1 OS= Actinotignum timonense OX=1870995 GN=folE PE=3 SV=1
MDCQGVDTQRPGARQVDTARVERAVRELLSAIGEDPDRPGLVDTPARVARACTEIFSGVGKDPDAVLDAQFAEDFHEMVVVRDITFYSMCEHHLLPFFGAAHIVYIPGAEGNVTGLSKLARLVEGYARRPQVQERLTTQIANALRDRLGAAGVLVVVEAEHMCMTMRGVRNSGSRTVTSAVRGMLRKPSTRAEAMSLIERGA

SEQ ID NO: 4074 - protein, 198 aa, Actinotignum urinale
  misc_feature (1)..(198): tr|A0A2N6UYC4|A0A2N6UYC4_9ACTO GTP cyclohydrolase 1 OS= Actinotignum urinale OX=190146 GN=folE PE=3 SV=1
MSTSFVEQPQFDEERVRNAIRELLIGIGENPDREGLQETPARIARSYQEIFSGLGTDPSEVLSTTFAENFHEMIIVRDIPFTSMCEHHLLPFWGHAHVAYIPGKDGKVTGLSKLARLVEGYSRRPQIQERLTTQIAEALIGALEASGALVVIEAEHMCMNMRGVRKPGSYTVTSAVRGALRNATTRAEAMSLIQGCRS

SEQ ID NO: 4075 - protein, 188 aa, Acutalibacter muris
  misc_feature (1)..(188): tr|A0A1Z2XVH7|A0A1Z2XVH7_9FIRM GTP cyclohydrolase 1 OS= Acutalibacter muris OX=1796620 GN=folE PE=3 SV=1
MDMDKLRRAVRDILEAVGEDPEREGLQETPDRVARMYGEIFSGLASDPKEHLKIFNESGKHDELVFVKDIPLYSVCEHHLLPFIGRAHIAYIPKDGGIIGLSKFARIVDCFARRPQVQERLTGQIADFLYDNLKPQGVAVFIQAEHLCMTMRGARAAGTVTETSALRGCMRSDARTRAEVTALLKGKQ

SEQ ID NO: 4076 - protein, 204 aa, Acutalibacter sp.
  misc_feature (1)..(204): tr|A0A3A9F2A2|A0A3A9F2A2_9FIRM GTP cyclohydrolase 1 OS= Acutalibacter sp. 1XD8-33 OX=2320081 GN=folE PE=3 SV=1
MRRGRGQEAETERSVNPMDMEKIRRAVRDILEAVGEDPDREGLRETPDRVARMYGEIFSGLDADTKEHLKIFQESGKHDELVFVKDIPLYSVCEHHLLPFIGKAHIAYIPKDGRIIGLSKFSRVVDCFARRPQVQERLTGQIADFLYDNLAPRGVAVFIEAEHLCMTMRGARAAGSRTQTSALRGCMRSDARTRAEVTALLGGG

SEQ ID NO: 4077 - protein, 217 aa, Adhaeribacter aerolatus
  misc_feature (1)..(217): tr|A0A512B381|A0A512B381_9BACT GTP cyclohydrolase 1 OS= Adhaeribacter aerolatus OX=670289 GN=folE2_2 PE=3 SV=1
MDKYNLDAEDLEHENSSLHTPLREDAFKMTNDLKIELIEKHFREIMHILGLDLTDDSLQGTPHRVAKMYVNEIFRGLDPENKPHAKLFQNRFAYNQMLVERDITLYSYCEHHFVPIIGKAHVAYIPDKHVVGLSKLNRIVQYYAKRPQVQERLTMQIADELKSTLFTDNVAVYIEADHLCVMSRGVNDVSSSTITTEYSGLFQQDQYRNEFLTYIRK

SEQ ID NO: 4078 - protein, 221 aa, Adhaeribacter aerolatus
  misc_feature (1)..(221): tr|A0A512AYK7|A0A512AYK7_9BACT GTP cyclohydrolase 1 OS= Adhaeribacter aerolatus OX=670289 GN=folE2_1 PE=3 SV=1
MITLNGNIIPVKEANGKDAAHNPEKLLKLNGAEATDESKIKAISHYFRQIMLMLGLDMEDDSLKGTPDRVAKMYVQEIFRGMNPANKPAVTLFENKYHYNKMLVVKDITVYSCCEHHFLPIMGKAHVAYFSSGKVIGLSKVNRLVQYYCQRPQVQERLTEQIAQALQKALHTEDVAVIIEATHLCVAARGIRDIASTTRTSHYSGKFQNNAIKKELLSWLK

SEQ ID NO: 4079 - protein, 226 aa, Adhaeribacter sp.
  misc_feature (1)..(226): tr|A0A2T2Y9F8|A0A2T2Y9F8_9BACT GTP cyclohydrolase 1 OS= Adhaeribacter sp. HMF7605 OX=2072846 GN=folE PE=3 SV=1
MDKPLTPNIPLDLESEETDPISVHSAIETPLRPDAFALSDAEKIERITFYFREIMHTLGLDLTDDSLQGTPHRVAKMYVNEVFRGLNPENKPHAKLFENRYAYNQMLVERDITIYSYCEHHFVPIIGKAHVAYMPEKNVVGLSKLNRIVQYFAKRPQVQERLTMQIADELKQVLHTQNVAVYIEADHLCVMSRGVNDVGSSTITTEFSGLFQEDKYRQEFLQYIRK

SEQ ID NO: 4080 - protein, 225 aa, Adhaeribacter sp.
  misc_feature (1)..(225): tr|A0A369QI14|A0A369QI14_9BACT GTP cyclohydrolase 1 OS= Adhaeribacter sp. HMF7616 OX=2072847 GN=gch1 PE=3 SV=1
MDKLTPNIPLDLEPEETDPISSNTSIETPLRPDAFALSDAEKIERITFYFREIMHTLGLDLTDDSLQGTPHRVAKMYVNEVFRGLNPENKPQAKLFENRYAYNQMLVERDITIYSYCEHHFVPIIGKAHVAYIPENNVVGLSKLNRIVQYFAKRPQVQERLTMQIADELKNVLHTQNVAVYIEADHLCVMSRGVNDVGSSTITTEFTGLFQEDKYRQEFLQYIRK

SEQ ID NO: 4081 - protein, 187 aa, Adlercreutzia equolifaciens
  misc_feature (1)..(187): tr|A0A3E2EH08|A0A3E2EH08_9ACTN GTP cyclohydrolase 1 OS= Adlercreutzia equolifaciens OX=446660 GN=folE PE=3 SV=1
MDTAKIEAGVRLILEGIGEDPEREGLRETPARVARMYEEVLGGLEEDPSRHFDVTFDEGHEEIVLVGDIPFFSMCEHHLAPFFGKAHVAYIPGEDGRICGISKLARLVDGFAKRPQVQERLTGQIADTLVEALHPAGVIVVLEAEHMCMSMRGVKKPGAKTTTRAVRGCFETDADARSEALSLIFRH

SEQ ID NO: 4082 - protein, 265 aa, Advenella incenata
  misc_feature (1)..(265): tr|A0A4Q7VDV1|A0A4Q7VDV1_9BURK GTP cyclohydrolase FolE2 OS=Advenella incenata OX=267800 GN=folE2 PE=3 SV=1
MNSQIEPSVLMPDVQSTLDERHITIQRVGIRQVKQPMLLQLADGSVQATIAEWTFTVMLPAHEKGTHMSRFMALLNTWRNRPMTAETFRAMALEMLPLLHAEKGDITATFPYFINKKAPVSGVESLMDYQVTWVARAQGQQAVVEQTVLVPVMSLCPCSKAISEYGAHNQRSHVTVSLIAEQHYELDDLIRRIEAQGSCELWGLLKRTDEKYVTERSYDNPKFVEDLVRDVAAVFQKLPGVVSYRVEAENFESIHNHSAYAVVEG

SEQ ID NO: 4083 - protein, 265 aa, Advenella kashmirensis
  misc_feature (1)..(265): tr|V8QMZ6|V8QMZ6_9BURK GTP cyclohydrolase FolE2 OS=Adve nella kashmirensis W13003 OX=1424334 GN=folE2 PE=3 SV=1
MNSQIEPSVLMPDVQSTLDERHITIQRVGIRQVKQPMLLQLADGSVQATIAEWTFTVMLPAHEKGTHMSRFMALLNAWRNRPMTAETFRAMALEMLPLLHAEKGDITATFPYFINKKAPVSGVESLMDYQVTWVAMAEGDQAVVEQTMVVPVMSLCPCSKAISEYGAHNQRSHVTVSLTAQQHYELDDLIRRIEAQGSCELWGLLKRTDEKYVTERSYDNPKFVEDLVRDVAAVFQKLPGVVKYRVQAENFESIHNHSAYAVVEG

SEQ ID NO: 4084 - protein, 265 aa, Advenella kashmirensis
  misc_feature (1)..(265): tr|A0A356LCA9|A0A356LCA9_9BURK GTP cyclohydrolase FolE2 OS=Advenella kashmirensis OX=310575 GN=folE2 PE=3 SV=1
MNSQIEPSVLMPDVQSTLDERHITIQRVGIRQVKQPMLLQLADGSVQATIAEWTFTVMLPAHEKGTHMSRFMALLNTWRNRPMTAETFRAMALEMLPLLHAEKGDITATFPYFINKTAPVSGVESLMDYQVTWVAKAQGEQAVVEQTVLVPVMSLCPCSKAISEYGAHNQRSHVTVSLIAEQHYELDDLIRRIEAQGSCELWGLLKRTDEKYVTERSYDNPKFVEDLVRDVAAVFQKLPGVVSYRVEAENFESIHNHSAYAVVEG

SEQ ID NO: 4085 - protein, 246 aa, Advenella mimigardefordensis
  misc_feature (1)..(246): tr|W0PEW3|W0PEW3_9BURK GTP cyclohydrolase 1 OS=Advenell a mimigardefordensis DPN7 OX=1247726 GN=folE PE=4 SV=1
MSDSNIKKGNEQLAEQATHPDDSGYISIRIRERIRQAGARFHANDNIARFIEPGELDQLQQEVQDKMQAVLSSLVIDTDSDHNTNETAKRVAKMYLREVFAGRYTEAPQVTEFPNIEKLNELMIVGPIQVRSACSHHLCPIMGKVWIGIMPNEHSNLIGLSKYARLVAWLMERPQIQEEAVKHVADLLMKKVNPDGLAVVMDADHFCMQWRGVRDMESRMINSVMRGSFLNDSDLRKEFLSLIRAR

SEQ ID NO: 4086 - protein, 265 aa, Advenella mimigardefordensis
  misc_feature (1)..(265): tr|W0PDN6|W0PDN6_9BURK GTP cyclohydrolase FolE2 OS=Adve nella mimigardefordensis DPN7 OX=1247726 GN=folE2 PE=3 SV=1
MNSQIEPSVLMPDVQSTLDERHITIQRVGIRQVKQPMLLQLADGSVQATIAEWTFTVMLPAHEKGTHMSRFMALLNTWRNRPMTAESFRAMALEMLPLLHAEKGDITATFPYFINKKAPVSGVESLMDYQVTWVARAEGQQAVVEQTMLVPVMSLCPCSKAISEYGAHNQRSHVTVSVVAEQHYELDDLIRRIEAQGSCELWGLLKRTDEKYVTERSYDNPKFVEDLVRDVAAVFQKLPGVVRYRVEAENFESIHNHSAYAVVEG

SEQ ID NO: 4087 - protein, 265 aa, Advenella sp.
  misc_feature (1)..(265): tr|A0A2M9TP33|A0A2M9TP33_9BURK GTP cyclohydrolase FolE2 OS=Advenella sp. S44 OX=1982755 GN=folE2 PE=3 SV=1
MNSQIEPSVLMPDVQSTLDERHITIQRVGIRQVKQPMLLQLADGSVQATIAEWTFTVMLPAHEKGTHMSRFMALLNTWRNRPMTAETFRAMALEMLPLLHAEKGDITATFPYFINKKAPVSGVESLMDYQVTWVAKAQKDQAVVEQTVLVPVMSLCPCSKAISEYGAHNQRSHVTVSLIAQQHYELDDLIRRIEAQGSCELWGLLKRTDEKYVTERSYDNPKFVEDLVRDVAAVFQKLPGVVSYRVEAENFESIHNHSAYAVVEG

SEQ ID NO: 4088 - protein, 199 aa, Aequorivita antarctica
  misc_feature (1)..(199): tr|A0A5C6Z288|A0A5C6Z288_9FLAO GTP cyclohydrolase 1 OS= Aequorivita antarctica OX=153266 GN=folE PE=3 SV=1
MSSYRYFEEYDQPVTDSLIDNYSNILSTIGEDVSREGILKTPERAAKAMQFLTSGNCQDPAEILKSAMFAEAYHDMVIIKDIELYSLCEHHILPFFGKAHIAYIPDGYIVGLSKIPRIVDVFARRLQVQERLTHDILECINDTLKPKGVAVVIEASHMCMMMRGVQKQNSVTTTSGFRGQFEAIETRSEFLKLISNDLS

SEQ ID NO: 4089 - protein, 226 aa, Aequorivita antarctica
  misc_feature (1)..(226): tr|A0A5C6YXS2|A0A5C6YXS2_9FLAO GTP cyclohydrolase 1 OS= Aequorivita antarctica OX=153266 GN=folE PE=3 SV=1
MDLEKQLKEIEAMGNDHIGSSTETPMRPDAFELSDIEKIASIKKDVQNILHTLGLDLKDDSLKGTPTRVAKMFVQEIFGGLHPDRRPKASTFENKYKYKEMLVEKNITLYSTCEHHLLPIVGKAHIAYISNGSVVGLSKMNRIVDYYAKRPQVQERLTMQIVKELQQVLNTEDVACVIDAKHLCVNSRGIRDIDSSTVTSEFGGAFKNSETRREFLDYIKLDTQFQ

SEQ ID NO: 4090 - protein, 225 aa, Aequorivita lipolytica
  misc_feature (1)..(225): tr|A0A5C6YQM4|A0A5C6YQM4_9FLAO GTP cyclohydrolase 1 OS= Aequorivita lipolytica OX=153267 GN=folE PE=3 SV=1
MDLEKQLKDIEEMGNDHIGNSTETPMRHDAFELSDIEKIASIKKDVQNIMHTLGLDLTDDSLKGTPTRVAKMFVQEIFGGLHPDRRPKASTFENKYKYQEMLVEKNITLYSTCEHHLLPIVGKAHIAYISNGTVVGLSKMNRIVDYYAKRPQVQERLTMQIVKELQDVLNTEDVACVIDAKHLCVNSRGIRDIDSSTVTSEFGGAFKKPETRREFLDYIKLDTEF

SEQ ID NO: 4091 - protein, 199 aa, Aequorivita lipolytica
  misc_feature (1)..(199): tr|A0A5C6YLS8|A0A5C6YLS8_9FLAO GTP cyclohydrolase 1 OS= Aequorivita lipolytica OX=153267 GN=folE PE=3 SV=1
MASYRYFEEYDQPVTDSLIENYSKILSTIGEDVSREGILKTPERAAKAMQFLTSGNCQDPAEILKSAMFAEAYHDMVIIKDIELYSLCEHHILPFFGKAHIAYIPDGHIVGLSKIPRVVDIFSRRLQVQERLTHDILECLNNTLKPKGVAVVIEASHMCMMMRGVQKQNSVTTTSGFRGQFEAIETRNEFLKLISNDLS

SEQ ID NO: 4092 - protein, 225 aa, Aequorivita soesokkakensis
  misc_feature (1)..(225): tr|A0A1A9LGL4|A0A1A9LGL4_9FLAO GTP cyclohydrolase 1 OS= Aequorivita soesokkakensis OX=1385699 GN=folE PE=3 SV=1
MDLEKQLKDIEAMGNDHIGSSTETPMRTDAFELSDIEKIASIKKDIQNIMHTLGLDLTDDSLKGTPTRVAKMFVQEIFGGLHPDRRPKASTFENKYKYQEMLVEKNITLYSTCEHHLLPIVGKAHIAYISNGSVVGLSKMNRIVDYYAKRPQVQERLTMQIVKELQQVLNTEDVACVIDAKHLCVNSRGIRDIDSSTVTSEFGGAFKNSETRREFLDYIKLDTEF

SEQ ID NO: 4093 - protein, 199 aa, Aequorivita soesokkakensis
  misc_feature (1)..(199): tr|A0A1A9LIJ6|A0A1A9LIJ6_9FLAO GTP cyclohydrolase 1 OS= Aequorivita soesokkakensis OX=1385699 GN=folE PE=3 SV=1
MSSYRYFEEYDQPVTDNLIENYSKILSGIGEEVSREGLLKTPERAAKAMQFLTSGNCQDPAEILKSAMFAEAYHDMVIIKDIELYSLCEHHILPFFGKAHVAYIPDGYIVGLSKIPRIVDVFARRLQVQERLTHDILECINNTLKPKGVAVVIEASHMCMMMRGVQKQNSVTTTSGFRGQFEAIETRNEFLKLISSDLS

SEQ ID NO: 4094 - protein, 226 aa, Aequorivita sp.
  misc_feature (1)..(226): tr|A0A330ML95|A0A330ML95_9FLAO GTP cyclohydrolase 1 OS= Aequorivita sp. CIP111184 OX=2211356 GN=folE_1 PE=3 SV= 1
MDLEKQLKEIEAMGNDHIGSSSETPMRTDAFEMSDIEKIASIKKDVQNIMHTLGLDLNDDSLKGTPTRVAKMFVQEIFGGLHPDRKPKASTFENKYKYQEMLVEKNITLYSTCEHHLLPIVGKAHIAYISNGSVVGLSKMNRIVDYYAKRPQVQERLTMQIVKELQEVLNTEDVACVIDAKHLCVNSRGIRDIDSSTVTSEFGGAFKNSETRREFLDYIKLDTQFQ

SEQ ID NO: 4095 - protein, 225 aa, Aequorivita sp.
  misc_feature (1)..(225): tr|A0A2E5AZL3|A0A2E5AZL3_9FLAO GTP cyclohydrolase 1 OS= Aequorivita sp. OX=1872390 GN=folE PE=3 SV=1
MDLEKQLKEIEAMGNDHIGSSTETPMRTDAFELSDIEKIASIKKDVQNIMHTLGLDLSDDSLKGTPTRVAKMFVQEIFGGLHPDRRPKASTFENKYKYQEMLVEKNITLYSTCEHHLLPIVGKAHIAYISNGTVVGLSKMNRIVDYYAKRPQVQERLTMQIVKELQQVLGTEDVACVIDAKHLCVNSRGIRDIDSSTVTSEFGGAFKNVETRREFLDYIKLDTEF

SEQ ID NO: 4096 - protein, 225 aa, Aequorivita sublithincola
  misc_feature (1)..(225): tr|I3YSW7|I3YSW7_AEQSU GTP cyclohydrolase 1 OS=Aequoriv ita sublithincola (strain DSM 14238 / LMG 21431 / ACAM 643 / 9-3) OX=746697 GN=folE PE=3 SV=1
MDLEKHLKEIEAMGDDHISGSTETPMRPDAFELSDIEKIASIKKDVQNIMQTLGLDLTDDSLKGTPNRVAKMFVQEIFGGLHPDRKPKASTFENKYKYQEMLVEKNITLYSTCEHHLLPIVGRAHIAYISNGTVVGLSKMNRIVDYYAKRPQVQERLTMQIVKELQQVLNTDDVACVIDAKHLCVNSRGIRDIDSSTVTSEFGGAFKNSETRREFLDYIKMDTEF

SEQ ID NO: 4097 - protein, 199 aa, Aequorivita sublithincola
  misc_feature (1)..(199): tr|I3YZ21|I3YZ21_AEQSU GTP cyclohydrolase 1 OS=Aequoriv ita sublithincola (strain DSM 14238 / LMG 21431 / ACAM 643 / 9-3) OX=746697 GN=folE PE=3 SV=1
MASYKYFEEYSQPVTDSLIDNYSKILSTIGEDVNREGILKTPERAAKAMQFLTSGNCQDPAQILRSAMFAEAYHDMVIIKDIELYSLCEHHILPFFGKAHIAYIPNGHIVGLSKIPRVVDVFARRLQVQERLTHDILECINNTLKPKGVAVVIEAAHMCMMMRGVQKQNSVTTTSGFRGQFEAIETRNEFLKLISNDLS

SEQ ID NO: 4098 - protein, 199 aa, Aequorivita viscosa
  misc_feature (1)..(199): tr|A0A1M6GD27|A0A1M6GD27_9FLAO GTP cyclohydrolase 1 OS= Aequorivita viscosa OX=797419 GN=folE PE=3 SV=1
MGSYRYFEEYNQPVTDSLTDNYSSILKTIGEDTEREGIVKTPERAAKAIQFLTSGNCQDPAEILRSAMFKESYHDMVIVKDIELYSLCEHHILPFFGKAHIAYIPNGHIVGLSKIPRVVDVFARRLQVQERLTHDILECINDTLKPRGVAVVIEASHMCMMMRGVQKQNSVTTTSGFRGEFEALQTRNEFLKLISNDLS

SEQ ID NO: 4099 - protein, 225 aa, Aequorivita viscosa
  misc_feature (1)..(225): tr|A0A1M6D6Y3|A0A1M6D6Y3_9FLAO GTP cyclohydrolase 1 OS= Aequorivita viscosa OX=797419 GN=folE PE=3 SV=1
MDLEKTLKTIEEMGDDHISSSSETPMRPDAFELSDIEKIALIKEDVRNIMETLGLDLSDDSLKGTPNRVAKMFVQEIFGGLHPNRKPKASTFDNKYKYNEMLVEKNITLYSTCEHHLLPIVGQAHIAYISNGTVVGLSKMNRIVDYYAKRPQVQERLTMQIVKELQQVLNTEDVACVIDAKHLCVNSRGIRDIDSSTVTSEFGGAFKNSDTRKEFLDYIKLDTKF

SEQ ID NO: 4100 - protein, 188 aa, Aeribacillus composti
  misc_feature (1)..(188): tr|A0A559TX03|A0A559TX03_9BACI GTP cyclohydrolase 1 OS= Aeribacillus composti OX=1868734 GN=folE PE=3 SV=1
MPKINKEQIEQAVRLIIEAIGEDPNREGLADTPKRVANMYEEIFSGINQDPKEYFQTVFEEDHEELVLVKDIQFFSMCEHHLVPFFGKVHIAYIPKGGKVTGLSKLARAVEAVVKKPQLQERITSTIADSIVESLDPHGVMVVVEAEHMCMTMRGVKKPGSITVTSAVRGCFLNDAAARSEVLSLIKK

SEQ ID NO: 4101 - protein, 188 aa, Aeribacillus pallidus
  misc_feature (1)..(188): tr|A0A223E931|A0A223E931_9BACI GTP cyclohydrolase 1 OS= Aeribacillus pallidus OX=33936 GN=folE PE=3 SV=1
MPKINKEQIEQSVRLIIEAIGEDPNREGLADTPKRVANMYEEIFSGIDQDPKEYFQTVFEEDHEELVLVKDIQFFSMCEHHLVPFFGKVHIAYIPKGGKVTGLSKLARAVEAVVKKPQLQERITSTIADSIVESLDPHGVMVVVEAEHMCMTMRGVKKPGSITVTSAVRGCFLNDAAARSEVLSLIKK

SEQ ID NO: 4102 - protein, 188 aa, Aeribacillus pallidus
  misc_feature (1)..(188): tr|A0A165XC44|A0A165XC44_9BACI GTP cyclohydrolase 1 OS= Aeribacillus pallidus OX=33936 GN=folE PE=3 SV=1
MPKINKEQIEQAVRLIIEAIGEDPNREGLADTPKRVANMYEEIFSGIDQDPKEYFQTVFEEDHEELVLVKDIQFFSMCEHHLVPFFGKVHIAYIPKGGKVTGLSKLARAVEAVVKKPQLQERITSTIADSIVESLDPHGVMVVVEAEHMCMTMRGVKKPGSITVTSAVRGCFLNDAAARSEVLSLIKK

SEQ ID NO: 4103 - protein, 250 aa, Aeriscardovia aeriphila
  misc_feature (1)..(250): tr|A0A261FB31|A0A261FB31_9BIFI GTP cyclohydrolase 1 OS= Aeriscardovia aeriphila OX=218139 GN=folE PE=3 SV=1
MSSSCVEENSSALRLKAGEPQAAEAAQVGDAQAGDTQAGDTQVGDAQAAEDSLERQYPPVDKAKVRQAVRLYLEAIGDDPDRPGLRETPDRIARASTELFEGLTTDPREILEKRFPVNSEEMVLVRDIEFYSVCEHHLLPFFGVAHVGYFPGKEGVLGLSKLARLVDVYARRPQVQEQMTAQIADALMKYADARGVIVVTEAEHMCMAMRGVRKANARTITSAIRGRMVNPTTRAEAMSLILNSARLSNN

SEQ ID NO: 4104 - protein, 189 aa, Aerococcaceae bacterium
  misc_feature (1)..(189): tr|A0A347WM65|A0A347WM65_9LACT GTP cyclohydrolase 1 OS= Aerococcaceae bacterium ZY16052 OX=2036206 GN=folE PE=3 SV=1
MEAKHFDTEKIETAVRMLLEAIGEDPNREGLLETPERVARAMKEIFGGLGETAEAHLQKSFEHVDGGIVVVKDMSFYSMCEHHLLPFWGKAHIAYLPNDKVAGLSKLARTVETYARKPQLQERLTKEIAEAMMTYLGAKGVLVVVEGEHMCMNMRGVQKPGSKTVTSIARGALAEDTRLLDEAYRMLDR

SEQ ID NO: 4105 - protein, 185 aa, Aerococcus sanguinicola
  misc_feature (1)..(185): tr|A0A0X8FBV1|A0A0X8FBV1_9LACT GTP cyclohydrolase 1 OS= Aerococcus sanguinicola OX=119206 GN=folE PE=3 SV=1
MDKVKIEQAIRDLLIGIGEDPDREGLQETPKRVAKMYAELLDGYQRTPAQHMEKQFTAEDSELVLVKDIPFHSMCEHHLLPFYGVGHIAYVPGADKVVGLSKLARILEDISLRLQLQEQITTEVAHTIADNLEVEGVFVVLEAEHMCMSIRGVHKEGASTVTKSALGCFKENSELRKEVLSMIRA

SEQ ID NO: 4106 - protein, 185 aa, Aerococcus sp.
  misc_feature (1)..(185): tr|A0A1F1DKU3|A0A1F1DKU3_9LACT GTP cyclohydrolase 1 OS= Aerococcus sp. HMSC061A03 OX=1739396 GN=folE PE=3 SV=1
MDKEKVEQAIRDLLIGIGEDPDREGLQETPKRVAKMYAELLDGYQRTPAQHMEKQFTAEDSELVLVKDIPFHSMCEHHLLPFYGVGHIAYVPGADKVVGLSKLARILEDISLRLQLQEQITSEVAHTIADNLDVEGVFVVLEAEHMCMSIRGVHKEGASTVTKAALGCFKENSELRKEVLSMIRG

SEQ ID NO: 4107 - protein, 184 aa, Aerococcus sp.
  misc_feature (1)..(184): tr|A0A1F2EV03|A0A1F2EV03_9LACT GTP cyclohydrolase 1 OS= Aerococcus sp. HMSC10H05 OX=1581084 GN=folE PE=3 SV=1
MDTKRIEKAVREILLAIGENPDREGLVETPERVARMYAEVFDGLTRDPKIHTEKTFSESASEFVLVKDIPFHSTCEHHLLPVIGQAHVAYIPKDGQVIGLSKLARIVEDFALRPQLQERLTNQVADVLANELGAEGVYVVLEAEHMCMTLRGIKKPGSKTVTYATRGVYNDRDRRQEALDMMQL

SEQ ID NO: 4108 - protein, 193 aa, Aerococcus suis
  misc_feature (1)..(193): tr|A0A1W1YV94|A0A1W1YV94_9LACT GTP cyclohydrolase 1 OS= Aerococcus suis OX=371602 GN=folE PE=3 SV=1
MNEENLKHIEQLVREILIEIGEDPDREGLIETPKRVAKSLQEITASTTKEEFTEGKMFPTETTGNDQLVSVNNIPFYSMCEHHMLPFFGTVNVGYLPQNGQIIGLSKIPRLVDYVSKKLNVQENITREVADILMEITDAKGVAVVVDARHMCVEMRGVAKNNSVTRTTYFLGAFNEDTQLRTEFLQTLPKVGF

SEQ ID NO: 4109 - protein, 184 aa, Aerococcus urinaeequi
  misc_feature (1)..(184): tr|A0A0U4WED9|A0A0U4WED9_9LACT GTP cyclohydrolase 1 OS= Aerococcus urinaeequi OX=51665 GN=folE PE=3 SV=1
MDMERIEKAVREILLAVGENPDREGLVETPERVAKMYAEVFDGLNRDPRIHTEKTFSESASEFVLVKDIPFHSTCEHHLLPVIGQAHVAYIPKDGQVIGLSKLARIVEDFALRPQLQERLTNQVADVLAEELGAEGVFVVLEAEHMCMTLRGIKKPGAKTVTYATRGAYTDRGRRQEVLDMMNL

SEQ ID NO: 4110 - protein, 184 aa, Aerococcus urinaeequi
  misc_feature (1)..(184): tr|A0A3D4XMG4|A0A3D4XMG4_9LACT GTP cyclohydrolase 1 OS= Aerococcus urinaeequi OX=51665 GN=folE PE=3 SV=1
MDMERIEKAVREILLAVGENPDREGLVETPERVAKMYAEVFDGLNREPRIHTEKTFSESASEFVLVKDIPFHSTCEHHLLPVIGQAHVAYIPKDGQVIGLSKLARIVEDFALRPQLQERLTNQVADVLAEELGAEGVFVVLEAEHMCMTLRGIKKPGAKTVTYATRGAYTDRGRRQEVLDMMNL

SEQ ID NO: 4111 - protein, 184 aa, Aerococcus viridans
  misc_feature (1)..(184): tr|D4YFH7|D4YFH7_9LACT GTP cyclohydrolase 1 OS=Aerococc us viridans ATCC 11563 = CCUG 4311 OX=655812 GN=folE PE =3 SV=1
MDMERIEKAVREILLAVGENPDREGLIETPERVAKMYAEVFDGLNRNPRIHTEKTFSESASEFVLVKDISFHSTCEHHLLPVIGQAHVAYIPKNGQVIGLSKLARIVEDFALRPQLQERLTNQVADVLAKELGAEGVFVVLEAEHMCMTLRGIKKPGAKTVTYATRGAYTDRGRRQEVLDMMSL

SEQ ID NO: 4112 - protein, 184 aa, Aerococcus viridans; identical to SEQ ID NO: 4107
  misc_feature (1)..(184): tr|A0A2N6UD43|A0A2N6UD43_9LACT GTP cyclohydrolase 1 OS= Aerococcus viridans OX=1377 GN=folE PE=3 SV=1

SEQ ID NO: 4113 - protein, 187 aa, Aeromicrobium camelliae
  misc_feature (1)..(187): tr|A0A3N6X7Q6|A0A3N6X7Q6_9ACTN GTP cyclohydrolase 1 OS= Aeromicrobium camelliae OX=1538144 GN=folE PE=3 SV=1
MSVDLPRAEAAVRELLAAIGEDPDREGLRDTPARVARSYVELVAGLDQNPADVLTASFDVGHDELVLVKDIEVWSLCEHHLVPFFGVAHVGYIPSEGGKVTGLSKLARLVDVYARRPQVQERLTTQIAEALVTVLQPRGAIVVIEAEHLCMTMRGVRKGGAKTITSAVRGQLRDPATRAEAMGLITA

SEQ ID NO: 4114 - protein, 187 aa, Aeromicrobium choanae
  misc_feature (1)..(187): tr|A0A1T4Z1T5|A0A1T4Z1T5_9ACTN GTP cyclohydrolase 1 OS= Aeromicrobium choanae OX=1736691 GN=folE PE=3 SV=1
MPVDQPRAEAAVRELLAALGEDPERDGLEDTPARVARSYTELLGGYDQDAKEVLSAVFEVGHRELVLVRDIELWSMCEHHMVPFFGVAHVGYIPGEHGHVTGLSKLARLVDVYARRLQVQERLTTQIAESIVEVLEPRGVIVVIEAEHLCMTMRGVAKAGARTITSAVRGQLLDPATRAEAMNLISR

SEQ ID NO: 4115 - protein, 191 aa, Aeromicrobium erythreum
  misc_feature (1)..(191): tr|A0A0U4BXU9|A0A0U4BXU9_9ACTN GTP cyclohydrolase 1 OS= Aeromicrobium erythreum OX=2041 GN=folE PE=3 SV=1
MTVDLARAEAAVRELLLAVGEDPDRDGLKETPARVARSYNELLAGLDQDPREVLTATFDVGHDELVLVKDIELWSMCEHHLVPFTGVAHVGYIPRADGFVTGLSKLARLVDVFARRPQVQERLTTQIADALTDVLEPRGVIVVIEAEHLCMAMRGVRKGGARTVTSAVRGQLRDPATRAEAMGLITAGTRR

SEQ ID NO: 4116 - protein, 187 aa, Aeromicrobium flavum
  misc_feature (1)..(187): tr|A0A512HT60|A0A512HT60_9ACTN GTP cyclohydrolase 1 OS= Aeromicrobium flavum OX=416568 GN=folE PE=3 SV=1
MAVDQPRAEAAVRELLAAIGEDPDRDGLLDTPARVARSYAELLGGYDQDAREVLSAVFEVGHRELVLVRDIEVWSMCEHHMVPFFGVAHIGYIPGETGHVTGLSKLARLVDVYARRLQVQERLTTQVAEAMVEVLEPRGVIVVIEAEHLCMTMRGVAKAGARTITSAVRGQLLDPATRAEAMQLISK

SEQ ID NO: 4117 - protein, 188 aa, Aeromicrobium marinum
  misc_feature (1)..(188): tr|E2SC54|E2SC54_9ACTN GTP cyclohydrolase 1 OS=Aeromicr obium marinum DSM 15272 OX=585531 GN=folE PE=3 SV=1
MTVDQVRAAAAIRELLFAIGEDPDRDGLVDTPARVARSYVELVAGLDQDPAEVLTATFDVGHDELVLVKDIELWSMCEHHLVPFFGVAHIGYIPEDGGYVTGLSKLARLVDVFARRPQVQERLTTQIADALSDVLKPRGVIVVIEAEHLCMAMRGVRKGGAKTVTSAVRGQLRDPATRAEAMGLITGP

SEQ ID NO: 4118 - protein, 187 aa, Aeromicrobium sp.
  misc_feature (1)..(187): tr|A0A554SBH6|A0A554SBH6_9ACTN GTP cyclohydrolase 1 OS= Aeromicrobium sp. Co35 OX=2590901 GN=folE PE=3 SV=1
MSVDLPRAEAAVRELLLAVGEDPDRDGLRDTPARVARSYAELLSGMDQDPTDVLTAVFEVGHDEFVLVKDIELWSMCEHHLVPFFGVAHVGYIPGEGGNVTGLSKLARLVDVYARRPQVQERLTTQIADSLVEVLHPAGVIVVLEAEHLCMTMRGVRKGGARTVTSAVRGQLRDSATRAEAMQLITA

SEQ ID NO: 4119 - protein, 187 aa, Aeromicrobium sp.
  misc_feature (1)..(187): tr|A0A200HJ30|A0A200HJ30_9ACTN GTP cyclohydrolase 1 OS= Aeromicrobium sp. PE09-221 OX=1898043 GN=folE PE=3 SV=1
MSVDLPRAEAAVRELLLAVGEDPDRDGLRDTPARVARSYAELLSGLDQDPTDVLTAVFDVGHDEFVLVKDIELWSMCEHHLVPFFGVAHVGYIPGEGGNVTGLSKLARLVDVYARRPQVQERLTTQIADSLVEVLRPAGVIVVLEAEHLCMTMRGVRKGGARTVTSAVRGQLRDSATRAEAMQLITA

SEQ ID NO: 4120 - protein, 218 aa, Aeromonas allosaccharophila
  misc_feature (1)..(218): tr|A0A1Q5VUA3|A0A1Q5VUA3_9GAMM GTP cyclohydrolase 1 OS= Aeromonas allosaccharophila OX=656 GN=folE PE=3 SV=1
MTTLSPEALLVRAALEAQGLETPLVANDLNSQQKREKIEGHMRSIMETLGLDLTDDSLAETPHRIAKMYVNEIFSGLDYSTFPKVTVIENKMQVDEMIMVRDISLTSTCEHHFVTIDGLAHVAYIPRGKVIGLSKINRIVQFFARRPQVQERLTQQILLALQTLLGTQDVAINIRATHYCVKARGVMDSTSYTTTTSLGGVFKTQPDTRAEFLGGLRG

SEQ ID NO: 4121 - protein, 218 aa, Aeromonas allosaccharophila
  misc_feature (1)..(218): tr|A0A0T6UYZ9|A0A0T6UYZ9_9GAMM GTP cyclohydrolase 1 OS= Aeromonas allosaccharophila OX=656 GN=folE PE=3 SV=1
MTTLSPEALLVRAALEAQGLETPLVANELNSQQKREKIEGHMRSIMETLGLDLTDDSLAETPHRIAKMYVNEIFSGLDYSTFPKVTVIENKMQVDEMIMVRDISLTSTCEHHFVTIDGLAHVAYIPRGKVIGLSKINRIVQFFARRPQVQERLTQQILLALQTLLGTQDVAINIRATHYCVKARGVMDSTSYTTTTSLGGVFKTQPDTRAEFLGGLRG

SEQ ID NO: 4122 - protein, 218 aa, Aeromonas cavernicola
  misc_feature (1)..(218): tr|A0A2H9U6U7|A0A2H9U6U7_9GAMM GTP cyclohydrolase 1 OS= Aeromonas cavernicola OX=1006623 GN=folE PE=3 SV=1
MTTLSPEALLVRAALEAQGLETPLVTNELNSQQKREKIEGHMRSIMETLGLDLTDDSLAETPHRIAKMYVNEIFSGLDYSTFPKVTVIENKMQVDEMIMVRDISLTSTCEHHFVTIDGLAHVAYIPRGKVIGLSKINRIVQFFARRPQVQERLTQQILLALQTLLGTKDVAISIKATHYCVKARGVMDSTSYTTTTSLGGVFKTQPDTRAEFLAGLKR

SEQ ID NO: 4123 - protein, 218 aa, Aeromonas caviae
  misc_feature (1)..(218): tr|A0A125XZV3|A0A125XZV3_AERCA GTP cyclohydrolase 1 OS= Aeromonas caviae OX=648 GN=folE PE=3 SV=1
MTSLSQEALLVRAALEAEGLETPLVANELSGQQKKEKIEGHMRAIMETLGLDLADDSLAETPHRIAKMYVNEIFSGLDYATFPKVTVIENKMKVDEMIMVRDISLTSTCEHHFVTIDGFAHVAYIPRGKVIGLSKINRIVQFFARRPQVQERLTQQILLALQTLLGTRDVAISIKATHFCVKARGVMDSTSYTTTTSLGGVFKTQPDTRAEFLGGLKG

SEQ ID NO: 4124 - protein, 218 aa, Aeromonas dhakensis
  misc_feature (1)..(218): tr|A0A433GAQ5|A0A433GAQ5_9GAMM GTP cyclohydrolase 1 OS= Aeromonas dhakensis OX=196024 GN=folE PE=3 SV=1
MTSLSREALLVRAALEAEGLETPLVANTLDGQQKREKIEGHMRAIMETLGLDLADDSLAETPHRIAKMYVNEIFSGLDYATFPKVTVIENKMKVDEMIMVRNISLTSTCEHHFVTIDGLAHVAYIPRGKVIGLSKINRIVQFFARRPQVQERLTQQSLLALQTLLGTKDVAISIKATHFCVKARGVMDSTSYTTTTSLGGVFKTQPDTRAEFLAGLKG

SEQ ID NO: 4125 - protein, 218 aa, Aeromonas dhakensis
  misc_feature (1)..(218): tr|K1JCW9|K1JCW9_9GAMM GTP cyclohydrolase 1 OS=Aeromona s dhakensis OX=196024 GN=folE PE=3 SV=1
MTSLSREALLVRAALEAEGLETPLVANTLDGQQKREKIEGHMRAIMETLGLDLADDSLAETPHRIAKMYVNEIFSGLDYATFPKVTVIENKMKVDEMIMVRDISLTSTCEHHFVTIDGLAHVAYIPRGKVIGLSKINRIVQFFARRPQVQERLTQQILLALQTLLGTKDVAISIKATHFCVKARGVMDSTSYTTTTSLGGVFKTQPDTRAEFLAGLKG

SEQ ID NO: 4126 - protein, 220 aa, Aeromonas diversa
  misc_feature (1)..(220): tr|N9VH73|N9VH73_9GAMM GTP cyclohydrolase 1 OS=Aeromona s diversa CDC 2478-85 OX=1268237 GN=folE PE=3 SV=1
MSELSTHAKLVRDALVAQGLETPMVPSTLDRAEKQARIEEHMRAIMGLLSLDLEDDSLAETPHRIAKMYVNEIFAGLDYSTFPKVTVIENKMQVDEMIVVRDISLTSTCEHHFVTIDGLAHVAYIPRGKVIGLSKINRIVQFFARRPQVQERLTQQVLLALQTLLGTRDVAISITATHYCVKARGVMDATSATTTTSLGGVFKTQPDTRAEFLGMLRATR

SEQ ID NO: 4127 - protein, 219 aa, Aeromonas encheleia
  misc_feature (1)..(219): tr|A0A3S4UBI4|A0A3S4UBI4_9GAMM GTP cyclohydrolase 1 OS= Aeromonas encheleia OX=73010 GN=folE PE=3 SV=1
MMTNLSQEALLVRAALEAQGLETPLVANELNGQQKKEKIEGHMRAIMETLGLDLRDDSLAETPHRIAKMYVNEIFSGLDYTTFPKVTVIENKMKVDEMIMVRDISLTSTCEHHFVTIDGLAHVAYIPRGKVIGLSKINRIVQFFARRPQVQERLTQQILLALQTLLGTRDVAISIKATHFCVKARGVMDSTSHTTTTSLGGVFKTQPDTRAEFLGGLKG

SEQ ID NO: 4128 - protein, 218 aa, Aeromonas enteropelogenes
  misc_feature (1)..(218): tr|A0A175VJC9|A0A175VJC9_AEREN GTP cyclohydrolase 1 OS= Aeromonas enteropelogenes OX=29489 GN=folE PE=3 SV=1
MTTLSQEALLVRAALEAQGLETPLVANQLDSQQKREKIEGHMRAIMETLGLDLADDSLAETPHRIAKMYVNEIFSGLDYTTFPKVTVIENKMQVDEMIMVRDISLTSTCEHHFVTIDGLAHVAYIPRGKVIGLSKINRIVQFFARRPQVQERLTQQILLALQTLLGTQDVAISIKATHFCVKARGVMDSTSYTTTTSLGGVFKTQPDTRAEFLGGLRS

SEQ ID NO: 4129 - protein, 218 aa, Aeromonas hydrophila
  misc_feature (1)..(218): sp|A0KIN6|GCH1_AERHH GTP cyclohydrolase 1 OS=Aeromonas hydrophila subsp. hydrophila (strain ATCC 7966 / DSM 30 187 / JCM 1027 / KCTC 2358 / NCIMB 9240) OX=380703 GN=f olE PE=3 SV=1
MTSLSREALLVRAALEAEGLETPLVANALDGQQKREKIEGHMRAIMETLGLDLADDSLAETPHRIAKMYVNEIFSGLDYATFPKVTVIENKMKVDEMIMVRDISLTSTCEHHFVTIDGLAHVAYIPRGKVIGLSKINRIVQFFARRPQVQERLTQQILLALQTLLGTKDVAISIKATHFCVKARGVMDSTSYTTTTSLGGVFKTQPDTRAEFLAGLKR

SEQ ID NO: 4130 - protein, 218 aa, Aeromonas hydrophila; identical to SEQ ID NO: 4129
  misc_feature (1)..(218): tr|A0A081UT11|A0A081UT11_AERHY GTP cyclohydrolase 1 OS= Aeromonas hydrophila OX=644 GN=folE PE=3 SV=1

SEQ ID NO: 4131 - protein, 218 aa, Aeromonas jandaei
  misc_feature (1)..(218): tr|A0A2S5FES1|A0A2S5FES1_AERJA GTP cyclohydrolase 1 OS= Aeromonas jandaei OX=650 GN=folE PE=3 SV=1
MTTLSQEALLVRAALEAQGLETPLVANELDSQQKREKIEGHMRAIMETLGLDLADDSLAETPHRIAKMYVNEIFSGLDYATFPKVTVIENKMQVDEMIMVRDISLTSTCEHHFVTIDGLAHVAYIPRGKVIGLSKINRIVQFFARRPQVQERLTQQILLALQTLLGTRDVAISIKATHYCVKARGVMDSTSYTTTTSLGGVFKTQPDTRAEFLSGLKS

SEQ ID NO: 4132 - protein, 218 aa, Aeromonas jandaei
  misc_feature (1)..(218): tr|A0A3N6V5L1|A0A3N6V5L1_AERJA GTP cyclohydrolase 1 OS= Aeromonas jandaei OX=650 GN=folE PE=3 SV=1
MTTLSQEALLVRAALEAQGLETPLVANELDSQQKREKIEGHMRAIMETLGLDLADDSLAETPHRIAKMYVNEIFSGLDYSTFPKVTVIENKMQVDEMIMVRDISLTSTCEHHFVTIDGLAHVAYIPRGKVIGLSKINRIVQFFARRPQVQERLTQQILLALQTLLGTKDVAISIKATHYCVKARGVMDSTSYTTTTSLGGVFKTQPDTRAEFLSGLKG

SEQ ID NO: 4133 - protein, 218 aa, Aeromonas lusitana
  misc_feature (1)..(218): tr|A0A2M8HAP2|A0A2M8HAP2_9GAMM GTP cyclohydrolase 1 OS= Aeromonas lusitana OX=931529 GN=folE PE=3 SV=1
MTNLSQEALLVRAALEAQGLETPLVANELNGQQKKEKIEGHMRAIMETLGLDLADDSLAETPHRIAKMYVNEIFSGLDYSTFPKVTVIENKMKVDEMIMVRDISLTSTCEHHFVTIDGLAHVAYIPRGKVIGLSKINRIVQFFARRPQVQERLTQQILLALQTLLGTRDVAISIKATHYCVKARGVMDSTSYTTTTSLGGVFKTQPDTRAEFLGGLKG

SEQ ID NO: 4134 - protein, 218 aa, Aeromonas media
  misc_feature (1)..(218): tr|A0A023RMQ1|A0A023RMQ1_AERME GTP cyclohydrolase 1 OS= Aeromonas media WS OX=1208104 GN=folE PE=3 SV=1
MTSLSQEALLVRAALEAQGLETPLVANELNGQQKKEKIEGHMRAIMETLGLDLADDSLAETPHRIAKMYVNEIFSGLDYATFPKVTVIENKMKVDEMIMVRDISLTSTCEHHFVTIDGLAHVAYIPRGKVIGLSKINRIVQFFARRPQVQERLTQQILLALQTLLGTKDVAISIKATHFCVKARGVMDSTSYTTTTSLGGVFKTQPDTRAEFLGGLKG

SEQ ID NO: 4135 - protein, 217 aa, Aeromonas molluscorum
  misc_feature (1)..(217): tr|R1F5W4|R1F5W4_9GAMM GTP cyclohydrolase 1 OS=Aeromona s molluscorum 848 OX=1268236 GN=folE PE=3 SV=1
MSLSQEAMLVRAALEAEGLETPLVANSLSNQQKKESIEGHMRAIMETLGLDLADDSLAETPHRIAKMYVNEIFSGLDYTSFPKVTVIENKMKVDEMIMVKDISLTSTCEHHFVTIDGLAHVAYIPRGKVIGLSKINRIVQFFARRPQVQERLTQQILLALQTLLGTKDVAISIAATHYCVKARGVMDSTSYTTTTSLGGVFKTQPDTRAEFLAGLKR

SEQ ID NO: 4136 - protein, 218 aa, Aeromonas rivipollensis
  misc_feature (1)..(218): tr|A0A2P1PJ32|A0A2P1PJ32_9GAMM GTP cyclohydrolase 1 OS= Aeromonas rivipollensis OX=948519 GN=folE PE=3 SV=1
MTSFSQEALLVRAALEAEGLETPLVANGLNGQQKKENIEGHMRAIMETLGLDLADDSLAETPHRIAKMYVNEIFSGLDYATFPKVTVIENKMKVDEMIMVRDISLTSTCEHHFVTIDGLAHVAYIPRGKVIGLSKINRIVQFFARRPQVQERLTQQILLALQTLLGTRDVAISIKATHFCVKARGVMDSTSYTTTTSLGGVFKTQPDTRAEFLGGLKG

SEQ ID NO: 4137 - protein, 218 aa, Aeromonas salmonicida
  misc_feature (1)..(218): sp|A4SPE8|GCH1_AERS4 GTP cyclohydrolase 1 OS=Aeromonas salmonicida (strain A449) OX=382245 GN=folE PE=3 SV=1
MTSLSQEALLVRAALEAEGLETPLVANALNGQQKKEKIEGHMRAIMETLGLDLTDDSLAETPHRIAKMYVNEIFSGLDYSTFPKVTVIENKMKVDEMIMVRDISLTSTCEHHFVTIDGLAHVAYIPRGKVIGLSKINRIVQFFARRPQVQERLTQQILLALQTLLGTKDVAISIKATHFCVKARGVMDSTSYTTTTSLGGVFKTQPDTRAEFLGGLKG

SEQ ID NO: 4138 - protein, 218 aa, Aeromonas salmonicida
  misc_feature (1)..(218): tr|A0A4Y4XW21|A0A4Y4XW21_AERSA GTP cyclohydrolase 1 OS= Aeromonas salmonicida OX=645 GN=folE PE=3 SV=1
MTSLSQEALLVRAALEAEGLETPLVANALNGQQKKEKIEGHMRAIMETLGLDLTDDSLVETPHRIAKMYVNEIFSGLDYSTFPKVTVIENKMKVDEMIMVRDISLTSTCEHHFVTIDGLAHVAYIPRGKVIGLSKINRIVQFFARRPQVQERLTQQILLALQTLLGTKDVAISIKATHFCVKARGVMDSTSYTTTTSLGGVFKTQPDTRAEFLGGLKG

SEQ ID NO: 4139 - protein, 220 aa, Aeromonas schubertii
  misc_feature (1)..(220): tr|A0A0W7U423|A0A0W7U423_9GAMM GTP cyclohydrolase 1 OS= Aeromonas schubertii OX=652 GN=folE PE=3 SV=1
MSELSTHAKLVRDALIAQGLETPMVPSTLDRAEKQARIEEHMRAIMGLLSLDLEDDSLAETPHRIAKMYVNEIFAGLDYSTFPKVTVIENKMQVDEMIVVKDISLTSTCEHHFVTIDGMAHVAYIPRGKVIGLSKINRIVQFFARRPQVQERLTQQVLLALQTLLGTRDVAISITATHYCVKARGVMDATSATTTTSLGGVFKTQPDTRAEFLGMLRVGR

SEQ ID NO: 4140 - protein, 220 aa, Aeromonas schubertii
  misc_feature (1)..(220): tr|A0A0S2SL32|A0A0S2SL32_9GAMM GTP cyclohydrolase 1 OS= Aeromonas schubertii OX=652 GN=folE PE=3 SV=1
MSELSTHAKLVRDALIAQGLETPMVPSTLDRAEKQARIEEHMRAIMGLLSLDLEDDSLAETPHRIAKMYVNEIFAGLDYSTFPKVTVIENKMQVDEMIVVKDISLTSTCEHHFVTIDGMAHVAYIPRGKVIGLSKINRIVQFFARRPQVQERLTQQVLLALQTLLGTRDVAISITATHYCVKARGVMDATSATTTTSLGGVFKTQPDTRAEFLGMLRASR

SEQ ID NO: 4141 - protein, 220 aa, Aeromonas simiae
  misc_feature (1)..(220): tr|A0A5J6WYM0|A0A5J6WYM0_9GAMM GTP cyclohydrolase I Fol E OS=Aeromonas simiae OX=218936 GN=folE PE=4 SV=1
MSDLSPQARLVRDALVAQGLETPLAPNGLSRDEKRERIEAHMRAIMETLELDLRDDSLAETPHRIAKMYVGEIFAGLDYASFPKVTVIENKMQVDEMIMVRDITLTSTCEHHFVTIDGFAHVAYIPRGKVIGLSKINRIVQFFARRPQVQERLTQQVLLALQTLLGTQDVAISITATHYCVKARGVQDATSATTTTSLGGVFKTQPDTRAEFLGGLRAAR

SEQ ID NO: 4142 - protein, 218 aa, Aeromonas sobria
  misc_feature (1)..(218): tr|A0A1S2CRS9|A0A1S2CRS9_AERSO GTP cyclohydrolase 1 OS= Aeromonas sobria OX=646 GN=folE PE=3 SV=1
MTILSQEALLVRAALEAQGLETPLVANELNSQQKREKIEGHMRSIMETLGLDLADDSLAETPHRIAKMYVNEIFSGLDYSTFPKVTVIENKMQVDEMIMVRDISLTSTCEHHFVTIDGLAHVAYIPRGKVIGLSKINRIVQFFARRPQVQERLTQQILLALQTLLGTKDVAISIRATHYCVKARGVMDSTSHTTTTSLGGVFKTQPDTRAEFLGGLRG

SEQ ID NO: 4143 - protein, 218 aa, Aeromonas sobria
  misc_feature (1)..(218): tr|A0A2N3J2H8|A0A2N3J2H8_AERSO GTP cyclohydrolase 1 OS= Aeromonas sobria OX=646 GN=folE PE=3 SV=1
MTTLSQEALLVRAALEAQGLETPLVANELNSQQKREKIEGHMRSIMETLGLDLVDDSLAETPHRIAKMYVNEIFSGLDYATFPKVTVIENKMQVDEMIMVRDISLTSTCEHHFVTIDGLAHVAYIPRGKVIGLSKINRIVQFFARRPQVQERLTQQILLALQTLLGTKDVAISIRATHYCVKARGVMDSTSHTTTTSLGGVFKTQPDTRAEFLGGLRG

SEQ ID NO: 4144 - protein, 218 aa, Aeromonas sp.
  misc_feature (1)..(218): tr|A0A291TFI4|A0A291TFI4_9GAMM GTP cyclohydrolase 1 OS= Aeromonas sp. CU5 OX=2033033 GN=folE PE=3 SV=1
MTTLSQEALLVRAALEAQGLETPLVANELNSQQKREKIEGHMRSIMETLGLDLADDSLAETPHRIAKMYVNEIFSGLDYSTFPKVTVIENKMQVDEMIMVRDISLTSTCEHHFVTIDGLAHVAYIPRGKVIGLSKINRIVQFFARRPQVQERLTQQILLALQTLLSTKDVAISIRATHYCVKARGVMDSTSHTTTTSLGGVFKTQPDTRAEFLGGLRG

SEQ ID NO: 4145 - protein, 218 aa, Aeromonas sp.
  misc_feature (1)..(218): tr|A0A2R7MXR7|A0A2R7MXR7_9GAMM GTP cyclohydrolase 1 OS= Aeromonas sp. HMWF017 OX=2056853 GN=folE PE=3 SV=1
MTTLSPEALLVRAALEAQGLETPLVTNELNSQQKREKIEGHMRSIMETLGLDLTDDSLAETPHRIAKMYVNEIFSGLDYSTFPKVTVIENKMQVDEMIMVRDISLTSTCEHHFVTIDGMAHVAYIPRGKVIGLSKINRIVQFFARRPQVQERLTQQILLALQTLLGTKDVAISIKATHYCVKARGVMDSTSYTTTTSLGGVFKTQPDTRAEFLGGLRG

SEQ ID NO: 4146 - protein, 218 aa, Aeromonas taiwanensis
  misc_feature (1)..(218): tr|A0A5F0K9Z7|A0A5F0K9Z7_9GAMM GTP cyclohydrolase 1 OS= Aeromonas taiwanensis OX=633417 GN=folE PE=3 SV=1
MTSLSQEALLVRAALEAQGLETPLVANALNGQQKKEKIEGHMRAIMETLGLDLADDSLAETPHRIAKMYVNEIFSGLDYATFPKVTVIENKMKVDEMIMVRDISLTSTCEHHFVTIDGFAHVAYIPRGKVIGLSKINRIVQFFARRPQVQERLTQQILLALQTLLGTQDVAISIKATHFCVKARGVMDSTSYTTTTSLGGVFKTQPDTRAEFLGGLKG

SEQ ID NO: 4147 - protein, 218 aa, Aeromonas veronii
  misc_feature (1)..(218): tr|A0A494U7F0|A0A494U7F0_9GAMM GTP cyclohydrolase 1 OS= Aeromonas veronii OX=654 GN=folE PE=3 SV=1
MTTLSPEALLVRAALEAQGLETPLVTNELNSQQKREKIEGHMRSIMETLGLDLTDDSLAETPHRIAKMYVNEIFSGLDYSTFPKVTVIENKMQVDEMIMVRDISLTSTCEHHFVTIDGMAHVAYIPRGKVIGLSKINRIVQFFARRPQVQERLTQQILLALQTLLGTQDVAISIKATHYCVKARGVMDSTSYTTTTSLGGVFKTQPDTRAEFLGGLRG

SEQ ID NO: 4148 - protein, 218 aa, Aeromonas veronii; identical to SEQ ID NO: 4145
  misc_feature (1)..(218): tr|A0A165TQW1|A0A165TQW1_9GAMM GTP cyclohydrolase 1 OS= Aeromonas veronii OX=654 GN=folE PE=3 SV=1

SEQ ID NO: 4149 - protein, 227 aa, Aestuariibacter sp.
  misc_feature (1)..(227): tr|A0A506R902|A0A506R902_9ALTE GTP cyclohydrolase 1 OS= Aestuariibacter sp. GS-14 OX=2590670 GN=folE PE=3 SV=1
MLAKEAVIVRDAVKLGMSKEALMVHEALVAKGLETPMVETGLSDEAKRQRIEGAMRDIMQTLGLDLSDDSLADTPLRIAKMYVDEIFSGLDYRKFPKITQIENKMQLGQPVQVSGISLTSTCEHHFVTIDGTASVAYIPKNTVIGLSKINRLVGFFAQRPQVQERLTQQVLVALQTLTGTDDVAVSINATHYCVKARGIRDSLSYTKTSALGGKFLADAELRREFFS

SEQ ID NO: 4150 - protein, 227 aa, Aestuariibacter sp.
  misc_feature (1)..(227): tr|A0A2D6XZ52|A0A2D6XZ52_9ALTE GTP cyclohydrolase 1 OS= Aestuariibacter sp. OX=1872400 GN=folE PE=3 SV=1
  misc_feature (17)..(17): Xaa can be any naturally occurring amino acid
MLAKEAVIVRDAVKLGXSKEALMVHEALVARGLETPMLETGLSDEAKRQRIEGAMREIMETLGLDLSDDSLSETPLRIAKMYVDEIFSGLDYRKFPKITQIENKMQLGQPVHVSDVSLTSTCEHHFVTIDGTASVAYIPKDTVIGLSKINRLVGFFAQRPQVQERLTQQVLVALQTLTGTEDVAVAINATHYCVKARGIRDSLSYTKTSALGGKFLADAELRREFFS

SEQ ID NO: 4151 - protein, 209 aa, Aestuariispira insulae
  misc_feature (1)..(209): tr|A0A3D9H9K4|A0A3D9H9K4_9PROT GTP cyclohydrolase 1 OS= Aestuariispira insulae OX=1461337 GN=folE PE=3 SV=1
MTTDSKTSPSGAMTVTRADAEEAVRKLLCWAGDDPDREGLLDTPGRVVRAFEEYFAGYAEDPDTLLSRTFEETDGYDEMVVLKEIPFESHCEHHLAPILGKVHVAYLPNERVVGISKLARVVEIYAKRLQIQEKMTAQIANAITSALKPKGAAVVVQASHQCMTCRGVHKPGVDMMTSYMTGRFREDARTRSEFLTLIGRNNIRKVHSI

SEQ ID NO: 4152 - protein, 199 aa, Aestuariispira insulae
  misc_feature (1)..(199): tr|A0A3D9HIG9|A0A3D9HIG9_9PROT GTP cyclohydrolase 1 OS= Aestuariispira insulae OX=1461337 GN=folE PE=3 SV=1
MADAVKKPELVANRPTREEAEAAVKVLLAYTGDDPEREGLRDTPKRVVKAYDEYFVGYQQDPIEILQRTFGETDGYDEMVMLRDIPFESHCEHHIAPIIGRVHVAYLPSERVVGISKLARVVEAYAKRLQTQEIMTVQIADAINEALKPQGVAVVIDAVHQCMTTRGIHKPGVSTVTSRMLGVFRSNPETRAEFLAMIE

SEQ ID NO: 4153 - protein, 208 aa, Aestuariivirga litoralis
  misc_feature (1)..(208): tr|A0A2W2BGL8|A0A2W2BGL8_9RHIZ GTP cyclohydrolase 1 OS= Aestuariivirga litoralis OX=2650924 GN=folE PE=3 SV=1
MEAVVKKIPSKPVKRPTQEEAEAAVRTLLAWAGDNPEREGLLDTPKRVAKAFREYFSGYEDDPAEALSRTFNDVGGYDDIVMLRDIEFNSHCEHHIAPFIGRVHVAYLPKASVVGISKLARVVEIFARRLQTQETMTAQIANAISESLNPRGVAVLVEAVHTCMSMRGIGKRNVATITTQFTGEFKTNPVLQARFMELVRAPSNGFSL

SEQ ID NO: 4154 - protein, 206 aa, Afifella marina
  misc_feature (1)..(206): tr|A0A1G5P9P4|A0A1G5P9P4_AFIMA GTP cyclohydrolase 1 OS= Afifella marina DSM 2698 OX=1120955 GN=folE PE=3 SV=1
MDSTLKLFSSAAVAGRKPSREEAEAAVRTLIAWLGDDPDREGLRDTPRRVVSAYEELYAGYPQDPGTLLARTFKDVGGYHDMVLVRDIAFYSHCEHHMLPFFGHVHIAYYPNDGVVGLSKMARVVEAYARRLQTQETMTAQITDALENALSPRGVAVMVEAEHMCMSMRGVQKQGSSTMTSRFTGLFHDEAAEREKFLNLVRPTGR

SEQ ID NO: 4155 - protein, 210 aa, Afifella marina
  misc_feature (1)..(210): tr|A0A1G5NVE6|A0A1G5NVE6_AFIMA GTP cyclohydrolase 1 OS= Afifella marina DSM 2698 OX=1120955 GN=folE PE=3 SV=1
MTRFPATLPQEKTLGRPRPDRAAVEAAVRLIIEWAGDDPDREGLIDTPARVVRAYEEFFEGYNTDPAELLARTFEETDDYDDMIVLRNMRLESHCEHHIVPIIGKAHIAYLPNRRVVGISKLARLVEVYAKRLQIQETLTSQIANTIAEVLRPRGVAVVVEAAHMCMTTRGIRKPGVTMVTRRFIGEFKDDADLRRDFLAQIAAPSERFG

SEQ ID NO: 4156 - protein, 232 aa, Afipia broomeae
  misc_feature (1)..(232): tr|K8P908|K8P908_9BRAD GTP cyclohydrolase 1 OS=Afipia b roomeae ATCC 49717 OX=883078 GN=folE PE=3 SV=1
MDQGRSNGDEMDAIIKPIRTGKPAEKSEIPASDYMASAIDPGLVRPSRSEAEAAAKTLLAYIGENTSREGLLDTPRRMIEAYDELFQGYAQCPAEILDRTFGETAGYDDFVLMRDINFHSHCEHHVMPFYGKAHIAYAPVDRVVGLSKLARLVDAFAHRLQTQEHLTAQVAGAINAILKPRGVAVVMEAEHTCMSVRGIAKAGAKTLTSRFTGVFQDNPEEQARFLNMVRGV

SEQ ID NO: 4157 - protein, 246 aa, Afipia broomeae
  misc_feature (1)..(246): tr|A0A2M8ZK29|A0A2M8ZK29_9BRAD GTP cyclohydrolase 1 OS= Afipia broomeae OX=56946 GN=folE PE=3 SV=1
MDALIKSLRPNKPSDAKSSDAKSTETKAPESKILDTRPAELDPSEFLAAAVRADQPRPSRAEAEQAVLTLLSYIGENPDREGLIDTPRRVVEAYDELYQGYHQCPAEVLDRTFGETAGYDDFVLIRDIEFTSQCEHHMMPFYGKAHIAYTPVERVVGLSKLARLTDIFARRLQTQEHLTAQIAAAIDEILKPRGVAVMIEAEHTCMSVRGVAKHGATTFTSRFTGMFRDNPTEQARFLSMLRGPQR

SEQ ID NO: 4158 - protein, 222 aa, Afipia clevelandensis
  misc_feature (1)..(222): tr|K8PHJ8|K8PHJ8_9BRAD GTP cyclohydrolase 1 OS=Afipia c levelandensis ATCC 49720 OX=883079 GN=folE PE=3 SV=1
MDAIIKPIRSGKPADKSEIPASDYMASAIDPGIVRPSRAEAEAAAKTLLAYIGENTNREGLLDTPRRMVEAYDELFQGYAQCPAEILDRTFGETAGYDDFVLMRDISFHSHCEHHVMPFYGKAHIAYAPVDRVVGLSKLARLVDAFAHRLQTQEHLTAQVAGAINAILKPRGVAVVMEAEHTCMSVRGIAKKGALTLTSRFTGIFQDNPEEQARFLNMVRGV

SEQ ID NO: 4159 - protein, 208 aa, Afipia felis
  misc_feature (1)..(208): tr|A0A090MS99|A0A090MS99_AFIFE GTP cyclohydrolase 1 OS= Afipia felis OX=1035 GN=folE_3 PE=3 SV=1
MISNVKVLERERSMTDVSERPDRAEVEDAFRTIIRWTGDDPKRDGLIETPSRVARAFEEFFIGYSQNPVTVLQKTFEEIEGYDEMITLRGVRFESHCEHHMAPIVGKAWVAYIPNGRVVGISKLARVVEIYAKRLQIQEKMTAQIANTINDVLKPQGVAVLIKAQHHCMTTRGIHKPGTDLVTSRMLGCFRDNPATRQEFLSMTAERD

SEQ ID NO: 4160 - protein, 122 aa, Afipia felis
  misc_feature (1)..(122): tr|A0A380WCG2|A0A380WCG2_AFIFE GTP cyclohydrolase 1 OS= Afipia felis OX=1035 GN=folE_3 PE=3 SV=1
MVVLRGIAFESHCEHHLAPIVGKAWVAYVPNGRVVGLSKLARVVEAYAKRLQIQERLTSEIASTIQEVLKPQGVGVVIKATHHCMSSRGVHKVGSEMITSCMLGCFRDNASTRHEFLAMATK

SEQ ID NO: 4161 - protein, 207 aa, Afipia massiliensis
  misc_feature (1)..(207): tr|A0A4U6BTC2|A0A4U6BTC2_9BRAD GTP cyclohydrolase 1 OS= Afipia massiliensis OX=211460 GN=folE PE=3 SV=1
MLKGQNVHALERVKVSQDDTNRPDRAEVEAAVQTIIRWAGDDPQRDGLIETPSRVTRAFEEFFSGYAQDPVEILQKTFDETEGYDEMIVLRGIPFESHCEHHMAPIIGRAWVAYIPNGRVVGISKLARVVDVFAKRLQIQEKMTAQIANTINEVLKPQGVGVIIKAAHHCMATRGVHKADTDLVTSRMLGCFRDNALTRQEFLGVAV

SEQ ID NO: 4162 - protein, 222 aa, Afipia massiliensis
  misc_feature (1)..(222): tr|A0A4U6BQ98|A0A4U6BQ98_9BRAD GTP cyclohydrolase 1 OS= Afipia massiliensis OX=211460 GN=folE PE=3 SV=1
MDAIIKPIRSGKPADKSEIPASDYMASAIDPGLVRPSRSEAEAAVKTLLAYIGENTGREGLLDTPRRMVEAYDELFQGYTQCPAEILDRTFGETAGYDDFVLMRDINFHSHCEHHVMPFYGKAHIAYAPVDRVVGLSKLARLVDAFAHRLQTQEHLTAQVAGAINAILKPRGVAVVMEAEHTCMSVRGIAKEGAKTLTTRFTGVFQDNPDEQARFLNMVRGV

SEQ ID NO: 4163 - protein, 234 aa, Afipia sp.
  misc_feature (1)..(234): tr|A0A1G9Z872|A0A1G9Z872_9BRAD GTP cyclohydrolase 1 OS= Afipia sp. GAS231 OX=1882747 GN=folE PE=3 SV=1
MDALIKSLRPGKGSEIKAPDVAPEPRPAELDPSEFLAAAVRADQPRPSRAEAEAAVHTLLNYIGENPAREGLLDTPRRVVEAFDELYQGYHQCPAEVLDRTFGETAGYDDFVLIRDIEFTSQCEHHMMPFYGRAHIAYTPVERVVGLSKLARLTDIFARRLQTQEHLTAQIAAAVDEILKPRGVAVVIEAEHTCMSVRGVAKHGAMTFTSRYTGMFRDNPAEQARFLSMVRGLR

SEQ ID NO: 4164 - protein, 222 aa, Afipia sp.
  misc_feature (1)..(222): tr|A0A2D6Z1B2|A0A2D6Z1B2_9BRAD GTP cyclohydrolase 1 OS= Afipia sp. OX=1871052 GN=folE PE=3 SV=1
MDAIIKPIRTGKPAEKSEIPASDYMASAIDPGLVRPSRSEAEAAAKTLLAYIGENTSREGLLDTPRRMIEAYDELFQGYAQCPAEILDRTFGETAGYDDFVLMRDINFHSHCEHHVMPFYGKAHIAYAPVDRVVGLSKLARLVDAFAHRLQTQEHLTAQVAGAINAILKPRGVAVVMEAEHTCMSVRGIAKAGAKTLTSRFTGVFQDNPEEQARFLNMVRGV

SEQ ID NO: 4165 - protein, 226 aa, Agarivorans albus
  misc_feature (1)..(226): tr|R9PFQ9|R9PFQ9_AGAAL GTP cyclohydrolase 1 OS=Agarivor ans albus MKT 106 OX=1331007 GN=folE PE=3 SV=1
MKVALAEKQFRKDACLSPEAIQVRQALIEKGIETPLVDNQLSNEQKYNKIKASLTDVVATLGLDLSDDSLAETPHRIAKMFVDEVFSGLDYSRFPKISIIENKMAVEEMVKVSDIAFTSTCEHHFVTIDGLAKVAYIPKDHIIGLSKINRIVRFFAQRPQVQERLTQQVLVALQSLLGTEDVAISIEATHFCVKARGVMDASSSTQTSAYGGKFKTSKSARREFLA

SEQ ID NO: 4166 - protein, 307 aa, Agarivorans albus
  misc_feature (1)..(307): tr|R9PQV3|R9PQV3_AGAAL GTP cyclohydrolase FolE2 OS=Agar ivorans albus MKT 106 OX=1331007 GN=folE2 PE=3 SV=1
MSTAMPDVANSSRAQTEGKLDWVGMSQIEMPIMLAFEAQAASRVSAKIEAFVSLDDPQAKGIHMSRLYLILDQLSNEGVLDYAGLHRVLDQFIESHQDLSEQAQVRFSFDYHLRRKSLLSGKTGWKAYPVAITATRHQQQTTIELEVEVPYSSTCPCSAALSRQLIQQAFKQQFADEQVSSEAVHQWLGSSEGIVATPHSQRSIAQLKVKIATEHQDIPIISLIDEVESSLKTPVQAAVKREDEQEFARLNGQNLMFCEDAARRLQHSLNNRADLVDFWVRVNHLESLHAHDAVCVVTKGIEQGYSA

SEQ ID NO: 4167 - protein, 317 aa, Agarivorans sp.
  misc_feature (1)..(317): tr|A0A4D4IWK8|A0A4D4IWK8_9ALTE GTP cyclohydrolase FolE2 OS=Agarivorans sp. Toyoura001 OX=2283141 GN=folE2_1 PE =3 SV=1
MLRSQLPDVASSSLTTHQPSISWVGMDDISVPVYLDEPAGLTHSHASASIAVDLPGGEQAARGIHMSRLYFLLNELAQQALTRQSLEHCLAQVLSSHSDVRSTAARIELQFEFLLKRPALVSNSPAGWQRYPITLSAELIQGQALSVALQVELQYSSTCPCSAALVRESLAHQFLQHFGEDKTLSPSQAAAWLKQNGTLATPHSQRSVALVSLPLPTHSTALGLVNLIEQLEAIIATPVQTSVKRADEQAFAELNGENLMFVEDISRRLTQQLTPLYPSIAIQVRHLESLHAHNAFAQVSPRTSTVKLQPQFAQGSR

SEQ ID NO: 4168 - protein, 226 aa, Agarivorans sp.
  misc_feature (1)..(226): tr|A0A4D4ITX3|A0A4D4ITX3_9ALTE GTP cyclohydrolase 1 OS= Agarivorans sp. Toyoura001 OX=2283141 GN=folE PE=3 SV=1
MKVALAEKQFRKDACLSPEAIQVRQALIDKGIETPLLENQLTNEQKYLKIKASLTDVVATLGLDLKDDSLAETPHRIAKMFVDEVFSGLDYSRFPKISIIENKMAVEEMVKISDIAFTSTCEHHFVTIDGLAKVAYIPKDNIIGLSKINRIVRFFAQRPQVQERLTQQILVALQSLLGTDDVAITMDATHFCVKARGVMDASSSTQTSAYGGLFKTSKSVRREFLG

SEQ ID NO: 4169 - protein, 218 aa, Agathobacter ruminis
  misc_feature (1)..(218): tr|A0A2G3E2M4|A0A2G3E2M4_9FIRM GTP cyclohydrolase 1 OS= Agathobacter ruminis OX=1712665 GN=folE PE=3 SV=1
MTFDCNCSCTSLFGIRINEEYNAGKEQEMAINKDLIKESIRNIIIALGDDPNREGVKDTPDRVARMYEEVFEGMNYTNEEIAEMFNKTFDEDYYDANNQDLVYVKDIEVFSYCEHHLALMYDMKVSVAYIPNQKVIGLSKIARIADMAAKRLQLQERIGNDIAEIIERVTGSQDVAVFIEASHSCMTARGIKNASAKTYTQTLRGRFRTEPDLLARLK

SEQ ID NO: 4170 - protein, 218 aa, Aggregatibacter actinomycetemcomitans
  misc_feature (1)..(218): tr|H0KGD6|H0KGD6_AGGAC GTP cyclohydrolase 1 OS=Aggregat ibacter actinomycetemcomitans RhAA1 OX=1089447 GN=folE PE=3 SV=1
MNDISPEAEKVRTALVQKGIETPMIVSDESKDERRTKIEQHMREVLRLIGLDLRDDSIEETPSRLAKMFVDEIFSGLDYTNFPKITNIANRMKVSEMVLVNDVTLTSTCEHHFVTIDGKVSVAYYPKKWVIGLSKINRIVAFFAQRPQVQERLTEQILLAFQTILETEDVAVYVKATHFCVKCRGIKDTNSYTVTSAFGGVFLEDRETRKEFLSLINK

SEQ ID NO: 4171 - protein, 218 aa, Aggregatibacter actinomycetemcomitans
  misc_feature (1)..(218): tr|A0A5D0KYA2|A0A5D0KYA2_AGGAC GTP cyclohydrolase I Fol E OS=Aggregatibacter actinomycetemcomitans OX=714 GN=fo lE PE=4 SV=1
MNDISPEAEKVRTALVQKGIETPMIVSDESKDERRTRIEQHMREVLRLIGLDLRDDSIEETPSRLAKMFVDEIFSGLDYVNFPKITNIANRMKVSEMVLVNDVTLTSTCEHHFVTIDGKVSVAYYPKKWVIGLSKINRIVTFFAQRPQVQERLTEQILLAFQTILETEDVAVYVKATHFCVKCRGIKDANSYTVTSAFGGVFLEDRETRKEFLSLINK

SEQ ID NO: 4172 - protein, 218 aa, Aggregatibacter aphrophilus
  misc_feature (1)..(218): tr|A0A3S5ECV5|A0A3S5ECV5_AGGAP GTP cyclohydrolase 1 OS= Aggregatibacter aphrophilus ATCC 33389 OX=985008 GN=fol E PE=3 SV=1
MNHISPEAEKVRNALRQKGIETPMIVLDESKDERRTHIEQHMREVLRLIGLDLRDDSIEETPSRLAKMFVDEIFSGLDYANFPKITNIANRMKVSEMVLVNDVTLTSTCEHHFVTIDGMVSVAYYPKNWVIGLSKINRVVAFFAQRPQVQERLTEQILLAFQTILETEDVAVYVKATHFCVKCRGIKDTNSYTVTSAFGGVFLEDRETRKEFLSLINK

SEQ ID NO: 4173 - protein, 218 aa, Aggregatibacter aphrophilus; identical to SEQ ID NO: 4172
  misc_feature (1)..(218): tr|A0A0K1N403|A0A0K1N403_AGGAP GTP cyclohydrolase 1 OS= Aggregatibacter aphrophilus OX=732 GN=folE PE=3 SV=1

SEQ ID NO: 4174 - protein, 218 aa, Aggregatibacter segnis
  misc_feature (1)..(218): tr|E6KXB3|E6KXB3_9PAST GTP cyclohydrolase 1 OS=Aggregat ibacter segnis ATCC 33393 OX=888057 GN=folE PE=3 SV=1
MNDISPEAEKVRTALVQKGIETPMAVLNETKDERRTKIEQYMREVLRLIGLDLNDDSIEETPSRLAKMFVDEIFSGLDYANFPKITNIANRMKVSEMVLVNDVTLTSTCEHHFVTIDGKVSVAYYPKKWVIGLSKINRVVSFFAQRPQVQERLTEQILLAFQTILETEDVAVYVKATHFCVKCRGIKDANSYTVTSAFGGVFLEDRETRKEFLSLINK

SEQ ID NO: 4175 - protein, 218 aa, Aggregatibacter segnis
  misc_feature (1)..(218): tr|A0A369Y824|A0A369Y824_9PAST GTP cyclohydrolase 1 OS= Aggregatibacter segnis OX=739 GN=folE PE=3 SV=1
MNDISPEAEKVRTALVQKGIETPMAVLNETKDERRTKIEQHMQEVLRLIGLDLNDDSIEETPSRLAKMFVDEIFSGLDYANFPKITNIANRMKVSEMVLVNDVTLTSTCEHHFVTIDGKVSVAYYPKKWVIGLSKINRVVSFFAQRPQVQERLTEQILLAFQTILETEDVAVYVKATHFCVKCRGIKDANSYTVTSAFGGVFLEDRETRKEFLSLINK

SEQ ID NO: 4176 - protein, 218 aa, Aggregatibacter sp.
  misc_feature (1)..(218): tr|U1S7C8|U1S7C8_9PAST GTP cyclohydrolase 1 OS=Aggregat ibacter sp. oral taxon 458 str. W10330 OX=1321772 GN=fo lE PE=3 SV=1
MNHISPEAAKVREALRQKGIETPMIVLDESKDERRTHIEQHMREVLRLIGLDLRDDSIEETPARLAKMFVDEIFSGLDYANFPKITNIANRMKVSEMVLVNDVTLTSTCEHHFVTIDGMVSVAYYPKKWVIGLSKINRVVAFFAQRPQVQERLTEQILLAFQTILETEDVAVYVKATHFCVKCRGIKDANSYTVTSAFGGVFLEDRETRKEFLSLINK

SEQ ID NO: 4177 - protein, 180 aa, Agitococcus lubricus
  misc_feature (1)..(180): tr|A0A2T5IVR2|A0A2T5IVR2_9LACT GTP cyclohydrolase 1 OS= Agitococcus lubricus OX=1077255 GN=folE PE=3 SV=1
MEQAYANIITAVGEDLNRAGLLDTPKRAAKAFQYLCKGYTEDLNTIVNNAIFPSDNDQMVIVKDIELYSLCEHHLLPFIGKCHVAYLPDGNVLGLSKVARIVDMFARRLQIQENLTKQIADAIQQVTGAKGVGVIIEAKHMCMMMRGVEKQNSVMSSSVMLGRFRDNAQTRNEFLSLIKA

SEQ ID NO: 4178 - protein, 191 aa, Agreia pratensis
  misc_feature (1)..(191): tr|A0A1X7JML6|A0A1X7JML6_9MICO GTP cyclohydrolase 1 OS= Agreia pratensis OX=150121 GN=folE PE=3 SV=1
MTAFDRARVEAAVHDILIAIGEDPSRGGLDRTPARVADAYEEFFSGLGVDAVSMLGDTFAVPEGAEAEPVLVRDIEFRSVCEHHLLPFTGVAHVAYVPSNRLIGLGRIASVVDALASRPQLQERLGDEIASVIEDGVDARGVLVVLDAQHDCVRTRGPRQTRSSTVTVSSRGTLSQPAERAELMSLIGATT

SEQ ID NO: 4179 - protein, 191 aa, Agreia sp.
  misc_feature (1)..(191): tr|A0A0S9PIU0|A0A0S9PIU0_9MICO GTP cyclohydrolase 1 OS= Agreia sp. Leaf283 OX=1736321 GN=folE PE=3 SV=1
MTTFDRARIEAAVREILIGIGEDPVREGLERTPARVADAYAEFFSGLGVDAQAMLGDTFPVADESHSEPVLVRDIEFRSVCEHHLLPFTGVAHVAYVPSTRLIGLGRIASVVETLASRPQLQERLGDEIAAVIDSGVDARGVLVVLDARHDCVRTRGPRQTRSSTVTVSSRGTLSQPADRAELMSLIGAAT

SEQ ID NO: 4180 - protein, 191 aa, Agreia sp.
  misc_feature (1)..(191): tr|A0A0S9DVM4|A0A0S9DVM4_9MICO GTP cyclohydrolase 1 OS= Agreia sp. Leaf244 OX=1736305 GN=folE PE=3 SV=1
MTTFDRARIEAAVREILIAIGEDPVREGLERTPARVADAYAEFFSGLGVDAQAMLGDTFPVADESRFEPVLVRDIEFRSVCEHHLLPFTGVAHVAYVPSTRLIGLGRIASVVETLASRPQLQERLGDEIAAVIESGVDARGVLVVLDARHDCVRTRGPRQTHSSTVTVSSRGTLSQPADRAELMSLIGAAT

SEQ ID NO: 4181 - protein, 201 aa, Agrobacterium albertimagni
  misc_feature (1)..(201): tr|K2Q078|K2Q078_9RHIZ GTP cyclohydrolase 1 OS=Agrobact erium albertimagni AOL15 OX=1156935 GN=folE PE=3 SV=1
MDAIVKKLTVEAPRPTREEAEQAVRTLLLWAGDDPQREGLLDTPARVAKAYEELFSGYSADIEDVLGRTFEEVGGYDDMVLVRDISFFSHCEHHMLPVMGKAHVAYLPKGRVLGLSKIARVVDVFAKRLQTQENMTAQIAQAIDETLVPRGVAVFLEAEHMCMAMRGIQKTGSTTLTTTFTGAFKDNAAEQARFMSMVRSR

SEQ ID NO: 4182 - protein, 208 aa, Agrobacterium arsenijevicii
  misc_feature (1)..(208): tr|A0A0D8KZ24|A0A0D8KZ24_9RHIZ GTP cyclohydrolase 1 OS= Agrobacterium arsenijevicii OX=1585697 GN=folE PE=3 SV= 1
MDAIVKNFPGAGAKPEVAEARPSQAEAEEAVRVLLRWAGENPAREGLLDTPKRVAKAYRELFAGYELNVQDVLGTTFEEVGGYDDVVLVRDIPFFSHCEHHMVPIVGKAHVAYLPAGRVLGLSKIARVVEIFGRRLQTQENMTAQIARSIEETLKPRGVAVMIDAEHMCMSMRGVNKQGSTTLTTSFTGTFKNDPAEQVRFMTMVRNR

SEQ ID NO: 4183 - protein, 208 aa, Agrobacterium bohemicum
  misc_feature (1)..(208): tr|A0A135P8G7|A0A135P8G7_9RHIZ GTP cyclohydrolase 1 OS= Agrobacterium bohemicum OX=2052828 GN=folE PE=3 SV=1
MDAIVKNFPGAGTQNGTAGVRPTQAEAEDAVRVLLRWAGDNPNREGLLDTPKRVAKSYRELFSGYDLDATDVLGTTFEEVGGYDDIILVRDIPFHSHCEHHMVPIVGKAHVAYLPAGRVLGLSKIARVVEIYGRRLQTQETMTAQIATAIETTLKPRGVAVLIDAEHMCMSMRGVRKQGSTTLTTSFTGTFKTEPAQQARFMTMVYSR

SEQ ID NO: 4184 - protein, 208 aa, Agrobacterium deltaense
  misc_feature (1)..(208): tr|A0A1S7TKX4|A0A1S7TKX4_9RHIZ GTP cyclohydrolase 1 OS= Agrobacterium deltaense NCPPB 1641 OX=1183425 GN=folE P E=3 SV=1
MDAIVKNFPGAGAKPDVAEARPSQAEAEEAVRVLLRWAGENPAREGLLDTPKRVAKAYRELFAGYELNVQDVLGTTFEEVGGYDDVVLVRDIPFFSHCEHHMVPIVGKAHVAYLPAGRVLGLSKIARVVEIFGRRLQTQENMTAQIARSIEETLKPRGVAVMIDAEHMCMSMRGVNKQGSTTLTTSFTGTFKNDPAEQVRFMTMVRNR

SEQ ID NO: 4185 - protein, 208 aa, Agrobacterium deltaense; identical to SEQ ID NO: 4184
  misc_feature (1)..(208): tr|A0A1S7P6Z1|A0A1S7P6Z1_9RHIZ GTP cyclohydrolase 1 OS= Agrobacterium deltaense Zutra 3/1 OX=1183427 GN=folE PE =3 SV=1

SEQ ID NO: 4186 - protein, 208 aa, Agrobacterium fabrum; identical to SEQ ID NO: 4184
  misc_feature (1)..(208): sp|Q8UEK8|GCH1_AGRFC GTP cyclohydrolase 1 OS=Agrobacter ium fabrum (strain C58 / ATCC 33970) OX=176299 GN=folE PE=3 SV=1

SEQ ID NO: 4187 - protein, 208 aa, Agrobacterium fabrum; identical to SEQ ID NO: 4184
  misc_feature (1)..(208): tr|A0A3G2D4D3|A0A3G2D4D3_9RHIZ GTP cyclohydrolase 1 OS= Agrobacterium fabrum OX=1176649 GN=folE PE=3 SV=1

SEQ ID NO: 4188 - protein, 208 aa, Agrobacterium genomosp.
  misc_feature (1)..(208): tr|A0A1S7MIB7|A0A1S7MIB7_9RHIZ GTP cyclohydrolase 1 OS= Agrobacterium genomosp. 1 str. TT111 OX=1183430 GN=folE PE=3 SV=1
MDAIVKNFPGAGAKPDVAEARPSQTEAEEAVRVLLRWAGENPAREGLLDTPKRVAKAYRELFAGYELNVQDVLGTTFEEVGGYDDVVLVRDIPFFSHCEHHMVPIVGKAHVAYLPAGRVLGLSKIARVVEIFGRRLQTQENMTAQIARSIEETLKPRGVAVMIDAEHMCMSMRGVNKQGSTTLTTSFTGTFKNDPAEQVRFMTMVRNR

SEQ ID NO: 4189 - protein, 208 aa, Agrobacterium genomosp.; identical to SEQ ID NO: 4184
  misc_feature (1)..(208): tr|A0A1S7PFL8|A0A1S7PFL8_9RHIZ GTP cyclohydrolase 1 OS= Agrobacterium genomosp. 5 str. CFBP 6626 OX=1183435 GN= folE PE=3 SV=1

SEQ ID NO: 4190 - protein, 208 aa, Agrobacterium larrymoorei
  misc_feature (1)..(208): tr|A0A4D7DUC7|A0A4D7DUC7_9RHIZ GTP cyclohydrolase 1 OS= Agrobacterium larrymoorei OX=160699 GN=folE PE=3 SV=1
MDAIVKNFPGAGAIDDAVDSRPTQAEAEEAVRVLLRWAGDDPTREGLLDTPKRVAKSYRELFSGYDLEATSVLGTFFEEVGGYDDIILVRDIPFYSHCEHHMVPIIGKAHVAYLPSGRVLGLSKIARVVEIFGRRLQTQETMTAQIASAINDTLKPRGVAVMIDAEHMCMSMRGVQKQGSTTLTTSFTGTFKSEPAEQARFMSMVRNR

SEQ ID NO: 4191 - protein, 139 aa, Agrobacterium radiobacter
  misc_feature (1)..(139): tr|W1L450|W1L450_RHIRD GTP cyclohydrolase 1 (Fragment) OS=Agrobacterium radiobacter DSM 30147 OX=1336745 GN=L9 02_32045 PE=3 SV=1
QDVLGTTFEEVGGYDDVVLVRDIPFFSHCEHHMVPIVGKAHVAYLPAGRVLGLSKIARVVEIFGRRLQTQENMTAQIARSIEETLKPRGVAVMIDAEHMCMSMRGVNKQGSTTLTTSFTGVFKNDPAEQVRFMTMVRNR

SEQ ID NO: 4192 - protein, 207 aa, Agrobacterium radiobacter
  misc_feature (1)..(207): tr|B9JFG8|B9JFG8_AGRRK GTP cyclohydrolase 1 OS=Agrobact erium radiobacter (strain K84 / ATCC BAA-868) OX=311403 GN=folE PE=3 SV=1
MDAIVKNFPQAVESDRILDRPSQKEAEDAVRVLLRWAGDDPQREGLLDTPERVAKAYRELFAGYDMSPEDVLGRTFEEVSGYDDMVLVRDIPFFSHCEHHMVPIIGKAHVAYLPNGRVLGLSKIARTVEIFGRRLQTQEAMTAQIANAIDDSLRPRGVAVMIEAEHMCMAMRGVQKQGSSTLTTTFTGAFKADPAEQVRFMTMVRSR

SEQ ID NO: 4193 - protein, 207 aa, Agrobacterium rhizogenes; identical to SEQ ID NO: 4192
  misc_feature (1)..(207): tr|A0A546ZKM4|A0A546ZKM4_AGRRH GTP cyclohydrolase 1 OS= Agrobacterium rhizogenes OX=359 GN=folE PE=3 SV=1

SEQ ID NO: 4194 - protein, 208 aa, Agrobacterium rhizogenes
  misc_feature (1)..(208): tr|A0A546XJY2|A0A546XJY2_AGRRH GTP cyclohydrolase 1 OS= Agrobacterium rhizogenes OX=359 GN=folE PE=3 SV=1
MDAIVKNFPGAGTKPDVAEARPSQAEAEEAVRVLLRWAGENPAREGLLDTPKRVAKAYRELFAGYELNVQDVLGTTFEEVGGYDDVVLVRDIPFFSHCEHHMVPIVGKAHVAYLPAGRVLGLSKIARVVEIFGRRLQTQENMTAQIARSIEETLKPRGVAVMIDAEHMCMSMRGVNKQGSTTLTTSFTGSFKNDPAEQVRFMTMVRNR

SEQ ID NO: 4195 - protein, 208 aa, Agrobacterium rosae
  misc_feature (1)..(208): tr|A0A2S4EEU1|A0A2S4EEU1_9RHIZ GTP cyclohydrolase 1 OS= Agrobacterium rosae OX=1972867 GN=folE PE=3 SV=1
MDAIVKNFPGAGTPNGAADLRPTQAEAEDAVRVLLRWAGDDPNREGLLDTPKRVAKSYRELFSGYDLDASDVLGTTFEEVGGYDDIILVRDIPFHSHCEHHMVPIVGKAHVAYLPAGRVLGLSKIARVVEIYGRRLQTQETMTAQIANAIETTLKPRGVAVLIDAEHMCMSMRGVRKQGSTTLTTSFTGTFKAEAAQQARFMTMVYSR

SEQ ID NO: 4196 - protein, 208 aa, Agrobacterium rubi
  misc_feature (1)..(208): tr|A0A081CS13|A0A081CS13_9RHIZ GTP cyclohydrolase 1 OS= Agrobacterium rubi TR3 = NBRC 13261 OX=1368415 GN=folE PE=3 SV=1
MDAIVKNFPGAGTQDGVTAVRPTQAEAEEAVRVLLRWAGDNPNREGLLDTPKRVAKSYRELFSGYALDANDVLGTTFEEVGGYDDIILVRDIPFYSHCEHHMVPIIGKAHVAYLPEGRVLGLSKIARVVEIFGRRLQTQETMTAQIANAIESKLKPRGVAVMIDAEHMCMSMRGVQKQGSTTLTTSFTGTFKAEAAQQARFMSMVYNR

SEQ ID NO: 4197 - protein, 208 aa, Agrobacterium rubi; identical to SEQ ID NO: 4196
  misc_feature (1)..(208): tr|A0A1B9U2W8|A0A1B9U2W8_9RHIZ GTP cyclohydrolase 1 OS= Agrobacterium rubi OX=28099 GN=folE PE=3 SV=1

SEQ ID NO: 4198 - protein, 208 aa, Agrobacterium salinitolerans; identical to SEQ ID NO: 4184
  misc_feature (1)..(208): tr|A0A1S7U5C2|A0A1S7U5C2_9RHIZ GTP cyclohydrolase 1 OS= Agrobacterium salinitolerans str. Hayward 0363 OX=11834 34 GN=folE PE=3 SV=1

SEQ ID NO: 4199 - protein, 208 aa, Agrobacterium salinitolerans; identical to SEQ ID NO: 4184
  misc_feature (1)..(208): tr|A0A1S9EYL3|A0A1S9EYL3_9RHIZ GTP cyclohydrolase 1 OS= Agrobacterium salinitolerans OX=1183413 GN=folE PE=3 SV =1

SEQ ID NO: 4200 - protein, 208 aa, Agrobacterium sp.
  misc_feature (1)..(208): tr|A0A4U6APZ8|A0A4U6APZ8_9RHIZ GTP cyclohydrolase 1 OS= Agrobacterium sp. LC34 OX=1643810 GN=folE PE=3 SV=1
MDAIVKNFPGAGTKPDVAEARPSQAEAEEAVRVLLRWAGENPAREGLLDTPKRVAKAYRELFAGYELNVQDVLGTTFEEVGGYDDVVLVRDIPFFSHCEHHMVPIVGKAHVAYLPAGRVLGLSKIARVVEIFGRRLQTQENMTAQIARSIEETLKPRGVAVMIDAEHMCMSMRGVNKQGSTTLTTSFTGTFKNDPAEQVRFMTMVRNR

SEQ ID NO: 4201 - protein, 208 aa, Agrobacterium sp.; identical to SEQ ID NO: 4184
  misc_feature (1)..(208): tr|A0A357X8Q3|A0A357X8Q3_AGRSP GTP cyclohydrolase 1 OS= Agrobacterium sp. OX=361 GN=folE PE=3 SV=1

SEQ ID NO: 4202 - protein, 208 aa, Agrobacterium tumefaciens; identical to SEQ ID NO: 4184
  misc_feature (1)..(208): tr|A0A1S7QVS4|A0A1S7QVS4_RHIRD GTP cyclohydrolase 1 OS= Agrobacterium tumefaciens str. Kerr 14 OX=1183424 GN=fo lE PE=3 SV=1

SEQ ID NO: 4203 - protein, 208 aa, Agrobacterium tumefaciens; identical to SEQ ID NO: 4188
  misc_feature (1)..(208): tr|H0HB12|H0HB12_RHIRD GTP cyclohydrolase 1 OS=Agrobact erium tumefaciens 5A OX=1107544 GN=folE PE=3 SV=1

SEQ ID NO: 4204 - protein, 201 aa, Agrobacterium vitis
  misc_feature (1)..(201): sp|B9JWF1|GCH1_AGRVS GTP cyclohydrolase 1 OS=Agrobacter ium vitis (strain S4 / ATCC BAA-846) OX=311402 GN=folE PE=3 SV=1
MDATVKKMSPETSRPSREEAENAVRTLLRWAGDDPSREGLLDTPKRVAKAYGELFGGYNVNVEDVLGTTFEEVGGYNDIVLVRDIPFFSHCEHHMLPVIGKAHVAYLPNGRVLGLSKIARVVDLFARRLQTQETMTAQIADSLVQYLQPRGVAVMVDAEHMCMAMRGIQKSGSTTLTTTFTGEFKTDVPQQVRFMTMVQNR

SEQ ID NO: 4205 - protein, 201 aa, Agrobacterium vitis; identical to SEQ ID NO: 4204
  misc_feature (1)..(201): tr|A0A202F5L3|A0A202F5L3_AGRVI GTP cyclohydrolase 1 OS= Agrobacterium vitis OX=373 GN=folE PE=3 SV=1

SEQ ID NO: 4206 - protein, 188 aa, Agrococcus baldri
  misc_feature (1)..(188): tr|A0A1I6LKA0|A0A1I6LKA0_9MICO GTP cyclohydrolase 1 OS= Agrococcus baldri OX=153730 GN=folE PE=3 SV=1
MAVDRERVEAAVRELLAAIGDDPGRAGLLDTPRRVATAYTEYFAGVGADPTEQLDTLGLEGETGEMVLLRDIEFRSMCEHHLLPFTGVAHIAYLPGDRITGLGRIPAVVDVIASRPQIQERLTDEIADALDAGLEPRGVLVVIEAAHGCVQARGARQASSTTVTVASRGQLAEPIERAEIMALIGERR

SEQ ID NO: 4207 - protein, 188 aa, Agrococcus baldri
  misc_feature (1)..(188): tr|A0A510ZYU9|A0A510ZYU9_9MICO GTP cyclohydrolase 1 OS= Agrococcus baldri OX=153730 GN=folE PE=3 SV=1
MAVDRERVEAAVRELLAAIGDDPGRAGLVDTPRRVASAYAEYFAGVGADPAEQLDTIGLEGETGELVLLRDIEFRSMCEHHLLPFTGVAHVAYLPGEHIVGLGRIPAVVDVVASRPQIQERLTDEIADALEAGLEPRGVLVVVEAAHGCVAARGARQARSTTVTVASRGQLAEPIERAEIMALIGERR

SEQ ID NO: 4208 - protein, 188 aa, Agrococcus carbonis
  misc_feature (1)..(188): tr|A0A1H1QDA5|A0A1H1QDA5_9MICO GTP cyclohydrolase 1 OS= Agrococcus carbonis OX=684552 GN=folE PE=3 SV=1
MAVDRERVEAAVRELLAAIGDDPEREGLRDTPRRVATAYAEYFAGVGADPTAQLDTLGLEGETGEMVLLRDIEFRSMCEHHLLPFTGVAHIAYLPGDRIVGLGRIPAVVDVVASRPQIQERLTDEIADALVAGLAPRGVLVVIEAAHGCVQARGARQASSTAVTVASRGQLAEPLERAEIMALIGERR

SEQ ID NO: 4209 - protein, 191 aa, Agrococcus casei
  misc_feature (1)..(191): tr|A0A1R4F854|A0A1R4F854_9MICO GTP cyclohydrolase 1 OS= Agrococcus casei LMG 22410 OX=1255656 GN=folE PE=3 SV=1
MSIDRERVQRAVSELLAAIGDDPARDGLHETPRRVADAYAEFFRGVGSDPVEHLRDSLDVGEQTGEVVLLRDIEFTSMCEHHLLPFSGVAHVAYLPGAKIVGLGRIPAVVRTIAARPQIQERLTDEVADALVQGLDPAGVLVVVDASHGCLATRGANQSNASTVTLASRGSLTEPVARAELLALIGERVTR

SEQ ID NO: 4210 - protein, 189 aa, Agrococcus jejuensis
  misc_feature (1)..(189): tr|A0A1G8C1R8|A0A1G8C1R8_9MICO GTP cyclohydrolase 1 OS= Agrococcus jejuensis OX=399736 GN=folE PE=3 SV=1
MAVDRARVAAAVGELLAAIGDDPTRQGLAETPRRVAEAYADYFSGVGVDAAEQLADTTSLEGETGELVLVRGIELRSICEHHLLPFTGTAHVAYLPGERIVGLGRIPAVVDTVASRPQIQERLTDEIADALVRGLEPRGVLVVVEATHGCVTARGARQVRSSTVTMASRGVLAEPIERAEIMALIGESR

SEQ ID NO: 4211 - protein, 188 aa, Agrococcus jenensis
  misc_feature (1)..(188): tr|A0A3N2ASI4|A0A3N2ASI4_9MICO GTP cyclohydrolase 1 OS= Agrococcus jenensis OX=46353 GN=folE PE=3 SV=1
MAVDGERIAAAVRELLAAIGDDPARAGLAETPRRVAEAYADYFAGVGVDASSHLDSADLAGESGELVLLRDIEFRSMCEHHLLPFTGVAHVAYLPSDRIVGLGRIPRVVETIASRPQIQERLTDEIADALVAGLEPRGVLVVVEAAHGCVAARGARQAKSSTVTIASRGTLAEPIERAEIMALIGERR

SEQ ID NO: 4212 - protein, 188 aa, Agrococcus lahaulensis
  misc_feature (1)..(188): tr|A0A443JY04|A0A443JY04_9MICO GTP cyclohydrolase 1 OS= Agrococcus lahaulensis OX=341722 GN=folE PE=3 SV=1
MAVDRERIAAAVRELLAAIGDDPARPGLAETPRRVAEAYAEYFSGVGEDPTAHLDSADLAGESGELVLLRDIEFRSMCEHHLLPFTGVAHVAYLPSDRIVGLGRIPRVVETIASRPQIQERLTDEIADALVAGLDPRGVLVVVEAGHGCVAARGARQAKSSTVTVASRGALAEPIERAEIMALIGERR

SEQ ID NO: 4213 - protein, 188 aa, Agrococcus pavilionensis
  misc_feature (1)..(188): tr|U1LPB2|U1LPB2_9MICO GTP cyclohydrolase 1 OS=Agrococc us pavilionensis RW1 OX=1330458 GN=folE PE=3 SV=1
MAVDRARVAAAVRELLAAIGDDPARPGLAETPRRVAEAYAEYFAGVGEDASAHLDTSDLTGERGEMVLLRDIEFRSMCEHHLLPFTGIAHVAYLPGDRIVGLGRIPRVVETIASRPQIQERLTDEIADALVAGLEPEGVLVVVDAVHGCVGARGSRQVNSSTVTVASRGRLAEPIERAEIMALIGERR

SEQ ID NO: 4214 - protein, 189 aa, Agrococcus sp.
  misc_feature (1)..(189): tr|A0A4P8RG92|A0A4P8RG92_9MICO GTP cyclohydrolase 1 OS= Agrococcus sp. SGAir0287 OX=2070347 GN=folE PE=3 SV=1
MAVDRARVAAAVAELLAAIGDDPTRQGLAETPRRVAEAYADYFSGVGVDAAEPLADSTSLDGETGELVLLRGIELRSICEHHLLPFTGIAHVAYLPGDRIVGLGRIPAVVDVVASRPQIQERLTDEIADALVRGLAPRGVLVVVEATHGCVTARGARQTRSSTVTMASRGALAAPLERAEIMALIGESR

SEQ ID NO: 4215 - protein, 198 aa, Agromyces albus
  misc_feature (1)..(198): tr|A0A4Q2KU93|A0A4Q2KU93_9MICO GTP cyclohydrolase 1 OS= Agromyces albus OX=205332 GN=folE PE=3 SV=1
MAGVDARRIERAVLEILLAIGEDPDRPGLTRTPQRVAEAYAEFFAGLDVDPLSHLADTVPLGATEAGAPATSDAVILRDLAFRSVCEHHLLPFVGTAHVAYLPNERVVGLGRIPAVVDTLASRPQLQERLAEEIADTLQAGLDPKGVLVVLDAQHRCVTTRGSRQERSSTVTIASRGALASPAARAEIIALIGNSSDA

SEQ ID NO: 4216 - protein, 197 aa, Agromyces atrinae
  misc_feature (1)..(197): tr|A0A4Q2M048|A0A4Q2M048_9MICO GTP cyclohydrolase 1 OS= Agromyces atrinae OX=592376 GN=folE PE=3 SV=1
MPPVDRARVEAAVHELLLAIGEDPTRPGIERTPQRVAESYVEFFHGVSEDPLVHLADCVPLGAADDGGETTSDAVIVRDLAFRSMCEHHLLPFTGVAHVAYLPHERVIGLGRIPLVIDTLAARPQLQERLAEEIADALDAGLEPRGVLVVLDAAQQCVSTRGPRQVASSTVTIASRGELTEPAARSEIMALIGARRD

SEQ ID NO: 4217 - protein, 197 aa, Agromyces aureus
  misc_feature (1)..(197): tr|A0A191WIG1|A0A191WIG1_9MICO GTP cyclohydrolase 1 OS= Agromyces aureus OX=453304 GN=folE PE=3 SV=1
MAGVDTERIERAVLEILVAIGEDPERAGLRRTPARVAEAYADFFGGLEVDPLSHLADAVPVGTSESGAPATSDAVVLRDLAFRSVCEHHLLPFVGTAHVAYLPGDRVVGLGRIPAVVDTLAARPQLQERLAEEIADALETGLEPRGVLVVLDAQHRCVTTRGSRQERSSTITVVARGALTEAAARAEIIALIGGVAA

SEQ ID NO: 4218 - protein, 198 aa, Agromyces binzhouensis
  misc_feature (1)..(198): tr|A0A4Q2JHA0|A0A4Q2JHA0_9MICO GTP cyclohydrolase 1 OS= Agromyces binzhouensis OX=1817495 GN=folE PE=3 SV=1
MTGVDADRIERAVRELLLAIGEDPERPGLERTPRRVAEAYADYFSGVGADPLVHLAETVASGDTAAGVPATSDAVVLRDLAFRSVCEHHLLPFIGTAHVAYLPGERLVGLGRIPAVIDTIASRPQLQERIAEEVADALVAGLDPRGVLVVIDAVHGCVTARGARQDRSSTVTIASRGELAEPAARAEIIALIGSGRGA

SEQ ID NO: 4219 - protein, 198 aa, Agromyces cerinus
  misc_feature (1)..(198): tr|A0A1N6F880|A0A1N6F880_9MICO GTP cyclohydrolase 1 OS= Agromyces cerinus subsp. cerinus OX=232089 GN=folE PE=3 SV=1
MAGVDAERIQRAVHEILLAIGEDPSRPGLERTPQRVAEAYADFFGGLDVDPQSHLADTVPIGATDAGVPATSDAVVLRDLAFRSVCEHHLLPFVGTAHVAYLPGDRVVGLGRIPAVVDTLARRPQLQERLTEEIADALVAGLDPRGVLVVLDAQHRCVTTRGSRQERSSTVTIASRGALSEPAARSEIITLIGAQTNA

SEQ ID NO: 4220 - protein, 217 aa, Agromyces flavus
  misc_feature (1)..(217): tr|A0A1H1MC09|A0A1H1MC09_9MICO GTP cyclohydrolase 1 OS= Agromyces flavus OX=589382 GN=folE PE=3 SV=1
MTSIELVEPGAERPRLHAVEVAGGSETDRPRPVDRDRAAAAVADLLEALGRDIRSPHLADTPRRVADAFAEMLTPRPFAPTSFANDEGYDDLVVVAGIPFDSLCEHHLLPFSGVAHVGYVPGDRLVGLSKLARVVEHFARDLQVQERLTRQVVGWLDDELDPRGVGVVIEAEHLCMSLRGVQARGTRTVTSAYSGVVHDDARTRAEFLARCRAGGAA

SEQ ID NO: 4221 - protein, 198 aa, Agromyces flavus
  misc_feature (1)..(198): tr|A0A1H1LF89|A0A1H1LF89_9MICO GTP cyclohydrolase 1 OS= Agromyces flavus OX=589382 GN=folE PE=3 SV=1
MTGVDTGRIERAVRELLLAIGEDPDRAELERTPARVAEAYQEFFSGIGADPQAHLADSVELGAADDGEPATGDAIVLRDLHFRSVCEHHLLPFIGTAHVAYLPGAKVVGLGRIPAVVDTLASRPQLQERLAEEIADALEAGLAPRGVLVVLDAVHSCVTTRGVRQEHSSTVTVASRGALAESAARAEVIALIGSGRGV

SEQ ID NO: 4222 - protein, 198 aa, Agromyces fucosus
  misc_feature (1)..(198): tr|A0A4Q2JNH5|A0A4Q2JNH5_9MICO GTP cyclohydrolase 1 OS= Agromyces fucosus OX=41985 GN=folE PE=3 SV=1
MAGVDAERIQRAVHEILLAIGEDPSRPGLERTPQRVAEAYADFFGGLDVDPLSHLADSVPIGATDAGVPATSDAVVLRDLAFRSVCEHHLLPFVGTAHVAYLPGDRVVGLGRIPAVVDTLARRPQLQERLAEEIADALVAGLDPKGVLVVLDAQHRCVTTRGSRQERSSTVTIASRGALSEPAARSEIITLIGAQTNA

SEQ ID NO: 4223 - protein, 203 aa, Agromyces ramosus
  misc_feature (1)..(203): tr|A0A4Q7MHB7|A0A4Q7MHB7_9MICO GTP cyclohydrolase 1 OS= Agromyces ramosus OX=33879 GN=folE PE=3 SV=1
MSLVHDHDEFDLDHAVGVVATASLPDRRAEAAVSDLLLALGFDVADPDLVETPRRVVASFRELLHREPLTMTTFPNEEGYDELVLVREIPFTSLCAHHLLPFRGVAHVGYLPAERLLGLSKLARVVEHFAGDLQLQERLTVQIADFLASELAPNGVGVVLEAEHLCMSIRGANAPTARTQTARFTGALAEHGWERFRDASRHG

SEQ ID NO: 4224 - protein, 198 aa, Agromyces ramosus
  misc_feature (1)..(198): tr|A0A4Q7MDD9|A0A4Q7MDD9_9MICO GTP cyclohydrolase 1 OS= Agromyces ramosus OX=33879 GN=folE PE=3 SV=1
MAGVDTARIERAVHEILLAIGEDPTRPGLERTPQRVAEAYAEFFGGLDVDPLSHLADTVPLGATEAGVPATSDAVVLRDLAFRSVCEHHLLPFVGTAHVAYLPAERVVGLGRIPAVIDTLAARPQLQERLAEEIADALEAGLEPKGVLVVLDAQHRCVTTRGSRQERSSTVTIASRGALAEPAARAEIIALIGAAERG

SEQ ID NO: 4225 - protein, 182 aa, Agromyces sp.
  misc_feature (1)..(182): tr|A0A542JT19|A0A542JT19_9PSED GTP cyclohydrolase 1 OS= Agromyces sp. SLBN-50 OX=744977 GN=folE PE=3 SV=1
MSLEQQYTAILGQLGEDVSREGLLDTPKRAAKAMQYLCKGYQQTLEEVTNGALFSSDNSEMVLVKNIELYSLCEHHLLPFIGKAHVAYIPSGKVLGLSKVARIVDMYARRLQIQENLSRQIAEAVQQVTGALGVAVVIEAQHMCMMMRGVEKQNSSMVTSVMLGEFRENAATRSEFLSLIRD

SEQ ID NO: 4226 - protein, 179 aa, Agromyces sp.
  misc_feature (1)..(179): tr|A0A0Q9J300|A0A0Q9J300_9MICO GTP cyclohydrolase 1 OS= Agromyces sp. Soil535 OX=1736390 GN=ASG80_06230 PE=3 SV =1
MDSTTQLVSDTVAEQSIAEVLDLVGASRTGNVDKSPRRIIEAWRFACRGVDLDPAEALGQPAASSSTAEVSISGIPVLSTCEHQFLPFFGTATITYAPAGLIVGFGRIAKMVDILAGRPQLQERLTSSIADVLESVLHPIALRVELTCTQTCMMMSPAMTLDSTVRTVESRGWSLGSQP

SEQ ID NO: 4227 - protein, 321 aa, Ahniella affigens
  misc_feature (1)..(321): tr|A0A2P1PTB0|A0A2P1PTB0_9GAMM GTP cyclohydrolase FolE2 OS=Ahniella affigens OX=2021234 GN=folE2 PE=3 SV=1
MNEINQANWSLDANPADATSADATKLLPDIAAAKAAQRGVLQWVGMRNVRAPLLIAASSGAAAERVAASVDVYVNLTDADARGIHMSRLYLLLESLAEVPVSSQSLRDLLGRLIESQAGLADAARIVLRFDLMLRRRALKSQLSGWKAYPVRMDARLGADGLRVQQELRIAYSSTCPMSAALSRQIQREHFEHHFGQSSQVPVSAVAEWLEQESGLAATPHAQRSQAVLNLSWQPDVANWPVLALIDQVEQALATPVQTAVKRIDEQTFARLNAENLMFCEDAARRVATVLRGVPSLADFEVDVAHFESLHAHDAVAVAVR

SEQ ID NO: 4228 - protein, 203 aa, Ahniella affigens
  misc_feature (1)..(203): tr|A0A2P1PWT3|A0A2P1PWT3_9GAMM GTP cyclohydrolase 1 OS= Ahniella affigens OX=2021234 GN=folE PE=3 SV=1
MSSRKAGKSKAPKISRAEAEAAVRTLLAYAGEDPSREGLLETPRRVVEAYSDWFSGYKEDPEVYLARTFEEVEGYDEMIVLRDIEFESHCEHHMAPIIGKAHIGYVPNGKVVGISKLARVVEAYARRFQVQEKMTAQIARCIQDVLKPIGVGVVVEGAHECMTTRGIHKRGVSMVTSKMLGSFHDDARTRAEFLAFIDVGSGR

SEQ ID NO: 4229 - protein, 207 aa, Ahrensia marina
  misc_feature (1)..(207): tr|A0A0N0VM47|A0A0N0VM47_9RHOB GTP cyclohydrolase 1 OS= Ahrensia marina OX=1514904 GN=folE PE=3 SV=1
MDAIVNKLPGKEENMLDDSNNKPTQAEAEEAVRTLLRWMGEDITREGLLDTPKRVVKSYSELFGGYEADPSDVLGRTFEEVAGYNDIVLVKDIHFHSHCEHHMVPIIGKAHVAYLPDERVLGLSKIARVVDIFARRLQTQETLTSQVATSIDETLAPRGVAVMIEAEHMCMAMRGVRKQGSTTVTTRFTGEFEKPENQYRFLEMLRH

SEQ ID NO: 4230 - protein, 208 aa, Ahrensia sp.
  misc_feature (1)..(208): tr|A0A2E0IRL2|A0A2E0IRL2_9RHOB GTP cyclohydrolase 1 OS= Ahrensia sp. OX=1872419 GN=folE PE=3 SV=1
MDAIVSTFSKDEEDQIATPARPTREEAEAAVRTLIRWTGDNPDREGLLETPQRVVNAYREMFSGYDMDPHEVLGRTFEEVAGYDDVVLVKDIGFHSHCEHHMVPIIGKAHVAYLPDGRVLGLSKIARVIDIFAQRLQTQESITAQIASTIDEALSPRGVAVMIEAEHMCMAMRGIRKQGSTTLTTTFTGAFRNDPQEQARFISMVRGR

SEQ ID NO: 4231 - protein, 211 aa, Ahrensia sp.
  misc_feature (1)..(211): tr|E0MKZ3|E0MKZ3_9RHOB GTP cyclohydrolase 1 OS=Ahrensia sp. R2A130 OX=744979 GN=folE PE=3 SV=1
MDQIVDTDAILREGDETSTLPAKPTRAEAEAAVKTLLRWSGDDITREGLQDTPARVAKSYSELFSGYGEDPTEALGRTFEEVSGYDDMVVIRDIHFHSHCEHHMVPIIGKAHVGYLPDGKVVGLSKIARVVDIFARRLQTQEALTSQIAHTIQDVLEPRGVAVMIEAQHMCMVMRGIKKDGSTTLTTTFTGAYRDDPQEQIRYMTLLRQAA

SEQ ID NO: 4232 - protein, 185 aa, Aidingimonas halophila
  misc_feature (1)..(185): tr|A0A1H3AUY5|A0A1H3AUY5_9GAMM GTP cyclohydrolase 1 OS= Aidingimonas halophila OX=574349 GN=folE PE=3 SV=1
MSEQLTDHYYQILQGVGEDPEREGLRDTPRRAADAMRFLTRGYGQSLATLVNGAVFESETDEMVLIKDIELYSMCEHHMLPFIGKCHIAYLPNGRVLGLSKFARIVDMYARRLQIQEDLTRQIAEAIQEVTEARGVAVVIEAKHMCMMMRGVEKQNSSMTSSVMLGAFRENQPTRQEFLTLVSGR

SEQ ID NO: 4233 - protein, 267 aa, Akkermansia glycaniphila
  misc_feature (1)..(267): tr|A0A1C7PD02|A0A1C7PD02_9BACT GTP cyclohydrolase FolE2 OS=Akkermansia glycaniphila OX=1679444 GN=folE2 PE=3 S V=1
MKELKDTQNERDTRQVSIDRVGVKGLKYPIVVRDKEHRRQSTVATISLAVDLPEEFKGTHMSRFVEVLQDHKRHLDVHSAVQLPGKLLERLQAKRAHVEIEFPFFRSKAAPVTGMEGMMDYGVSFVIDERLGEPVDFLLTVTVPVTTLCPCSKAMSERGAHNQRGIVTYSVRFTSGPVWIEDLIDLIEACASCPVYSLLKRPDEKWVTDKAYDNPVFVEDLVRNIAIRTESYNAFSWYRVEAENFESIHNHQAYAVIERTLGDQKKD

SEQ ID NO: 4234 - protein, 264 aa, Akkermansia muciniphila
  misc_feature (1)..(264): sp|B2ULP4|GCH4_AKKM8 GTP cyclohydrolase FolE2 OS=Akkerm ansia muciniphila (strain ATCC BAA-835 / Muc) OX=349741 GN=folE2 PE=3 SV=1
MQELKDTQSEADTRNISIDRVGVKGLRFPIQIQDKLNRIQSTVATVSLAVDLPEEFKGTHMSRFVEALHQHGPLLDVHTALAIPRELLRRLSARRSHVEMEFPFFRSKNAPVTGIEGLMDYVVRFEMEAEANNKLADFKLTVIVPVTTLCPCSKAMSAYGAHNQRGLVTYSVRFASRPVWIEDLIDLVESCASCSLFSVLKRPDEKWVTEKAYENPVFVEDLVRNVALKTQSHSAFSWYRVEAENFESIHNHQAYAVIERDLRS

SEQ ID NO: 4235 - protein, 264 aa, Akkermansia muciniphila; identical to SEQ ID NO: 4234
  misc_feature (1)..(264): tr|A0A2N8IXS3|A0A2N8IXS3_9BACT GTP cyclohydrolase FolE2 OS=Akkermansia muciniphila OX=239935 GN=folE2 PE=3 SV= 1

SEQ ID NO: 4236 - protein, 264 aa, Akkermansia sp.
  misc_feature (1)..(264): tr|A0A4Q5HZZ2|A0A4Q5HZZ2_9BACT GTP cyclohydrolase FolE2 OS=Akkermansia sp. aa_0143 OX=2478952 GN=folE2 PE=3 SV =1
MQELKDTQSEADTRNISIDRVGVKGLRFPIQIQDKLNRIQSTVATVSLAVDLPEEFKGTHMSRFVEALHQHGSLLDVHTALSIPRELLGRLSASRSHVEMEFPFFRAKAAPVTGREGLMDYVVRFEMEAEAGDRLADFKLTVVVPVTTLCPCSKAMSSYGAHNQRGIVTYSVRFASRPVWIEDLIDLVESCASCSLFSVLKRPDEKWVTEKAYENPVFVEDLVRNVALKTQSHSAFSWYRVEAENFESIHNHQAYAVIERDLRS

SEQ ID NO: 4237 - protein, 264 aa, Akkermansia sp.
  misc_feature (1)..(264): tr|A0A139TQ72|A0A139TQ72_9BACT GTP cyclohydrolase FolE2 OS=Akkermansia sp. KLE1798 OX=1574265 GN=folE2 PE=3 SV =1
MQELKDTQSEADTRNISIDRVGVKGLRFPIQIQDKLNRIQSTVATVSLAVDLPEEFKGTHMSRFVEALHQHGPLLDVHTALSIPRELLGRLSASRSHVEMEFPFFRAKAAPVTGREGLMDYVVRFEMEAEAGDRLADFKLTVVVPVTTLCPCSKAMSSYGAHNQRGIVTYSVRFASRPVWIEDLIDLVESCASCSLFSVLKRPDEKWVTEKAYENPVFVEDLVRNVALKTQSLSAFSWYRVEAENFESIHNHQAYAVIERDLRS

SEQ ID NO: 4238 - protein, 365 aa, Albidovulum inexpectatum
  misc_feature (1)..(365): tr|A0A2S5JI49|A0A2S5JI49_9RHOB GTP cyclohydrolase FolE2 OS=Albidovulum inexpectatum OX=196587 GN=folE2 PE=3 SV =1
MNSFSKIGVAPSAEDAANALKTLREWAASADPVEVARLDPAIARLLPGAEVSNYPDLSRSYPSDFRPDEAYHASMPDLQNGPTSLIVGARAVLQHVGISNFRLPIRFHLRDGGDLTLEASVTGTVSLDADRKGINMSRIMRSFYAHSERTFSFEVLEAVIEDYKRDHDAVDARLMMRFSFPVRQKSLRSGLEGWQYYDIALELVEQAGQRKRIIHLDYVYSSTCPCSLELSEHARKVRGQLATPHSQRSVARISVVASGSKCLWFEDLIELARAAVPTETQVMVKREDEQAFAELNAANPIFVEDAARAFAQQLLADQRVGDFRIIASHQESLHSHDAVSVLIEGPTFVSESLDPRLFASLHKPG

SEQ ID NO: 4239 - protein, 376 aa, Albidovulum xiamenense
  misc_feature (1)..(376): tr|A0A1G9D0M4|A0A1G9D0M4_9RHOB GTP cyclohydrolase FolE2 OS=Albidovulum xiamenense OX=990712 GN=folE2 PE=3 SV=1
MNVHLPRAPLAGDDEKAQRDEIARALQAIEGRLAESVGEERRALIAGLERLLMRNGTEPAADGPRAGLSRDYDSDFVPDEAYRASLPDLQNGPASLIRGERGLIQHVGISNFRLPIRYHTRDNGDLTLETSVTGTVSLEAEKKGINMSRIMRSFYAHAERTFSFDVIEAALDDYKRDLESFDARIQMRFSFPMKVQSLRSGLWGYQYYDIALELVERDGVRRKFMHLDYVYSSTCPCSLELSEHAREVRGRLATPHSQRSVARISVELKGPKCLWFEDLIELCRAAVPTETQVMVKREDEQAFAELNAANPIFVEDAARLFCEKLAQDPRIGDFRIVASHQESLHSHDAVSVLTRGPSLAAESLDPRLFDTLHHAG

SEQ ID NO: 4240 - protein, 210 aa, Albimonas pacifica
  misc_feature (1)..(210): tr|A0A1I3MZC4|A0A1I3MZC4_9RHOB GTP cyclohydrolase 1 OS= Albimonas pacifica OX=1114924 GN=folE PE=3 SV=1
MNVRQTGFQPPEGPAPLDRPSREEAEAAVRTLLRWAGDDPAREGLLDTPSRVARAYGEWFAGYEDDPEAMLQRTFEEVEGYDEMVLLTDIRFESHCEHHLAPIIGKAHVAYLPTDRVVGISKLARLVDAYAKRLQVQEKLTAQIAGALDRALKPRGVAVLIEGEHHCMSTRGVHRPGVSMVTTRLTGAFQENPALRAEFMALAQPDRRSR

SEQ ID NO: 4241 - protein, 269 aa, Alcaligenaceae bacterium
  misc_feature (1)..(269): tr|A0A516W957|A0A516W957_9BURK GTP cyclohydrolase FolE2 OS=Alcaligenaceae bacterium SJ-26 OX=2593958 GN=folE2 PE=3 SV=1
MNTSAAAPAAMPDVQSSQDTRQVPIQRVGIRSVRHPLQVASASGAQATVGDWTLTVALPATEKGTHMSRFIALLEQYRSTPLDRSRFGNMASEMLELLHAEKGDIEVSFPYFVEKAAPISGVRSLLDYQVNFLARASREHGVDFVLTVLVPVTSLCPCSKTISEYGAHNQRSHVTVKVLLDSDIDLDQLIGVIEREGSCELWGLLKRPDEKYVTERAYDNPKFVEDLVRDVAVRVAAQPGVRGYQVQAENFESIHNHSAYAVVEGGAAI

SEQ ID NO: 4242 - protein, 271 aa, Alcaligenaceae bacterium
  misc_feature (1)..(271): tr|A0A4S1EH70|A0A4S1EH70_9BURK GTP cyclohydrolase FolE2 OS=Alcaligenaceae bacterium 429 OX=2562948 GN=folE2 PE =3 SV=1
MTSLTKAAGTMPDVQSSVDTRHVAIQKVGVRGVRYPLFVQMAGDAAPTVGEWELTVALPPEEKGTHMSRFMELLEKYRQTPISATLYCQIAAEMLDLLKAEAGEMTVSFPYFINKAAPVSGVQSLLDYELGWSASVMRTEDGSVDTEFELSVLVPVTSLCPCSKAISKYGAHNQRSHVTVNLVLEDPAAVDVNALIQQVEEQASCQLWGLLKRTDEKYVTEQAYENPKFVEDLVRDVAVLVRDMPSVLNYRIEAENFESIHNHSAYAVVEG

SEQ ID NO: 4243 - protein, 313 aa, Alcaligenes aquatilis
  misc_feature (1)..(313): tr|A0A427LPN4|A0A427LPN4_9BURK GTP cyclohydrolase FolE2 OS=Alcaligenes aquatilis OX=323284 GN=folE2 PE=3 SV=1
MTVVLPDPALNDSTYGLTPLSWVGMEGIDLPITVVEPGYTRQLHARVDAQVDLPLAHVKGIHMSRLYRLLNDVPPEQALSLLGLRRLLQSMVDSQEDCGTRSARLGFSFDLLLRRPALVTQDLAGWKSYPVVLEARLVDGSFVCKMQVQIGYSSTCPCSAALARQLIEQGFMQAFGRQPDLRAEEVAAWLHKHASLATAHSQRSQALVQVQVSEDSEDFGFLALIDRVEKALATPLQTAVKRADEQAFAALNGQNLMFVEDAARRIEAALVDYQNAGIQVRHLESLHPHDAVAFKTPLMSETPFARLNGGVAP

SEQ ID NO: 4244 - protein, 267 aa, Alcaligenes aquatilis
  misc_feature (1)..(267): tr|A0A3G2HZW9|A0A3G2HZW9_9BURK GTP cyclohydrolase FolE2 OS=Alcaligenes aquatilis OX=323284 GN=folE2 PE=3 SV=1
MNTVSESPLAMPDVQSSMDTRRVAIQRVGVRGVRHPMMLDLQGQAVPTVAQWELTVALPPEEKGTHMSRFVALLEEYRRQAMTPAGFVQMAQTMLPLLGAGRGDMTATFPVFLEKVAPVSGVASLMDYTVSWTARVGVDAQPEFELSVLVPVTSLCPCSKAISEYGAHNQRSHVTVQAVFADPAALDLPTLIKSVEEQASCQLWGLLKRTDEKYVTEYAYDNPKFVEDLVRDVAVSVRSLPGVLRYSIEAENFESIHNHSAYASVQG

SEQ ID NO: 4245 - protein, 267 aa, Alcaligenes faecalis
  misc_feature (1)..(267): tr|A0A2U2BJX3|A0A2U2BJX3_ALCFA GTP cyclohydrolase FolE2 OS=Alcaligenes faecalis OX=511 GN=folE2 PE=3 SV=1
MNTVSESPLAMPDVQSSMDTRRVAIQRVGVRGVRHPMMLDLQGQAVPTVAQWELTVALPPEEKGTHMSRFVALLEEYRRQAMTPAGFVQMAQAMLPLLNAGRGDMTATFPVFLEKVAPVSGVASLMDYTVSWTARVGVDALPEFELSVLVPVTSLCPCSKAISEYGAHNQRSHVTVQAVFADPAALDLPTLIKSVEEQASCQLWGLLKRTDEKYVTEYAYDNPKFVEDLVRDVAVSVRSLPGVLRYSIEAENFESIHNHSAYASVQG

SEQ ID NO: 4246 - protein, 313 aa, Alcaligenes faecalis
  misc_feature (1)..(313): tr|A0A3G6HGI6|A0A3G6HGI6_ALCFA GTP cyclohydrolase FolE2 OS=Alcaligenes faecalis OX=511 GN=folE2 PE=3 SV=1
MTVVLPDPALNDSSYGLTPLSWVGMEGIDLPITVVEPGYMRQPHARVDAQVDLPLAHVKGIHMSRLYRLLNDVPPEQALSPLRLRRLLQSMVESQEDCGTCCARLGFSFDLLVRRPALVTQNLAGWKSYPVVLEARLLDGMFVCKVQVQIGYSSTCPCSAALARQLIEQGFMQAFGKQPVLHADEVAAWLHKHASLATAHSQRSQALVQVDVAEDSENFGFLALIDRVEKALATPLQTAVKRADEQAFAALNGQNLMFVEDAARRIEAALVGYQNPGIQVRHLESLHPHDAVAFKTPLSAEMSLSGLKEGVVL

SEQ ID NO: 4247 - protein, 313 aa, Alcaligenes sp.
  misc_feature (1)..(313): tr|U1YGS8|U1YGS8_9BURK GTP cyclohydrolase FolE2 OS=Alca ligenes sp. EGD-AK7 OX=1386079 GN=folE2 PE=3 SV=1
MTVVLPDPALNDSSHGLTPLSWVGMEGVDLPITVLERGYKQQLHARVDAQVDLPLAHVKGIHMSRLYRLLNDLPPEQSLSPLGLRRLLQGMVDSQQDCGTRSARLCFRFDLLVRRPALVTQGLAGWKSYPVALEARLLDGIFICKVQVQIAYSSTCPCSAALARQLIEQGFMQAFGKQPVLHADEVAAWLHKHASLATPHSQRSQALVHIQVSEDSEDFGFLTLIDRIEESLATPLQTAVKRADEQAFAALNGQNLMFVEDAARRIEAALGGYQNPGVQVRHLESLHPHDAVAFKTPVSEGMPFLRLSGGVAP

SEQ ID NO: 4248 - protein, 267 aa, Alcaligenes sp.
  misc_feature (1)..(267): tr|U7U900|U7U900_9BURK GTP cyclohydrolase FolE2 OS=Alca ligenes sp. EGD-AK7 OX=1386079 GN=folE2 PE=3 SV=1
MNTVSESPLAMPDVQSSTDTRRVAIQRVGVRGVRHPMMLDLQGQAVPTVAQWELTVALPPEEKGTHMSRFVALLEEYRRQAMTPAGFVQMAQAMLPLLNAGRGDMTATFPVFLEKVAPVSGVASLMDYTVSWTARVGVDAQPEFELSVLVPVTSLCPCSKAISEYGAHNQRSHVTVQAVFADPATLDLPTLIKSVEEQASCQLWGLLKRTDEKYVTEYAYDNPKFVEDLVRDVAVSVRSLPGVLRYSIEAENFESIHNHSAYASVQG

SEQ ID NO: 4249 - protein, 181 aa, Alcaligenes xylosoxydans
  misc_feature (1)..(181): tr|A0A0D6HSN4|A0A0D6HSN4_ALCXX GTP cyclohydrolase 1 OS= Alcaligenes xylosoxydans xylosoxydans OX=85698 GN=folE PE=3 SV=1
MSLESHYTAILEALGEDPSREGLADTPARAAKAMRHLCRGYNQNLEEIVNGALFTSDTREIVLVKNIELYSLCEHHMLPFIGKAHVAYLPNGKVLGLSKVARIVEMYARRLQIQENLSRQVAEAVQSVTGAAGVAVVIEAQHMCMMMRGVEKQNSSMVTSVMLGEFHDNPSTRAEFLSLIR

SEQ ID NO: 4250 - protein, 265 aa, Alcaligenes xylosoxydans; identical to SEQ ID NO: 3738
  misc_feature (1)..(265): tr|A0A0D6GV23|A0A0D6GV23_ALCXX GTP cyclohydrolase FolE2 OS=Alcaligenes xylosoxydans xylosoxydans OX=85698 GN=f olE2 PE=3 SV=1

SEQ ID NO: 4251 - protein, 305 aa, Alcanivoracaceae bacterium
  misc_feature (1)..(305): tr|A0A3L8AVT4|A0A3L8AVT4_9GAMM GTP cyclohydrolase FolE2 OS=Alcanivoracaceae bacterium GenoA1_TS13_700 OX=20727 47 GN=folE2 PE=3 SV=1
MPDIATATQPKAPGLLDWVGMSEIDVPLSIPTRNGGVAHAVAKAQAYVNLINPEAKGIHMSRLYLLLDEACSQTLTAAGLRDVLARFLESHEGLSDQAFVDFRFDFLARRPALKSEFSGWKAYPARVIATEDPDGFHFELKVEIPYSSTCPCSAALARQLIQKQFREDFGNGKQISADEVYGWLGTEQGIVATPHSQRSIAEIKVRLSDDTNSFPLEELIDVVEDGLKTPVQTAVKREDEQEFALLNGQNLMFCEDAARRIQSALNEQSSYQDFWVRVNHLESLHAHNAVAVVTKGIDGGYLPQP

SEQ ID NO: 4252 - protein, 181 aa, Alcanivoracaceae bacterium
  misc_feature (1)..(181): tr|A0A3L8B6Y2|A0A3L8B6Y2_9GAMM GTP cyclohydrolase 1 OS= Alcanivoracaceae bacterium GenoA1_TS13_700 OX=2072747 G N=folE PE=3 SV=1
MKENFAAIINAIGEDLSRPGLEKTPERAAKAFEYLTRGYHQNLDDVINDALFPSDASEMVVVKDIELYSMCEHHLLPFIGRAHVAYIPSGKVLGLSKIARIVDMYARRLQIQEQLTTQIAETIQNVVNAAGVGVVIEAQHMCMMMRGVEKQNSVMKTSAMLGTFRDNQATRTEFLSLINAR

SEQ ID NO: 4253 - protein, 307 aa, Alcanivorax borkumensis
  misc_feature (1)..(307): sp|Q0VMK6|GCH4_ALCBS GTP cyclohydrolase FolE2 OS=Alcani vorax borkumensis (strain ATCC 700651 / DSM 11573 / NCI MB 13689 / SK2) OX=393595 GN=folE2 PE=3 SV=2
MPDVASNSMVDHIHTTLDWVGMSEIHLPARVSDTLAGERPVSTSIQAYVNLANADAKGIHMSRLFLMLEETFGDHSVSAGSIEQLLRNFLQTHEGLSTRGFVQLDFEYSMRRAALKSSYSGWKSYPVSIKGTLCEDGMRIELSVEVPYSSTCPCSAALSRQLIQEQFRKDFEESKVDTDAVLEWLGTEEGILATPHSQRSIAQVRVLLDHNVGDAFPITALIDSIEGALKTPVQTAVKRVDEQEFALLNGQNLMFCEDAARRLKTALNPQSCYKDFWLRVNHLESLHAHNAVAIVTKEVEGGYLPIP

SEQ ID NO: 4254 - protein, 318 aa, Alcanivorax dieselolei
  misc_feature (1)..(318): tr|K0C6R2|K0C6R2_ALCDB GTP cyclohydrolase FolE2 OS=Alca nivorax dieselolei (strain DSM 16502 / CGMCC 1.3690 / B -5) OX=930169 GN=folE2 PE=3 SV=1
MKRESGADNTKAMPDVASNSMVDHIGGTLDWVGMSEIHLPARVSDTRVGERPVSTSIQAYVNLANPDAKGIHMSRLYLMLEETFGDHSVSPASIEQLLGNFLETHEGLSTRGFVQFDFEYSMRRPALKSSYAGWKSYTVSIKASLGEEGLCTEMYVEVPYSSTCPCSAALARQLIQEQFREDFQSGKVDVDEVFEWLGTEEGIRATPHSQRSIAQVRVLLDKAAESFPITALIDAIEEALKTPVQTAVKRIDEQEFALLNGQNLMFCEDAARRLKHALDPQPCYRDFWLRVNHLESLHAHNAVAIVTKEVDGGYLPIP

SEQ ID NO: 4255 - protein, 319 aa, Alcanivorax hongdengensis
  misc_feature (1)..(319): tr|L0WJ53|L0WJ53_9GAMM GTP cyclohydrolase FolE2 OS=Alca nivorax hongdengensis A-11-3 OX=1177179 GN=folE2 PE=3 S V=1
MTRENGAGGTKQMPDVASNSMVDHIHTTLDWVGMSEIHLPARVSDTLAGERPVSTSIQAYVNLANADAKGIHMSRLFLMLEETFGDHSVSAASIEQLLRNFLETHEGLSTRGFVQLDFEYSMRRPALKSSYSGWKSYPVSIKGTLCEQGMRIEMYVEVPYSSTCPCSAALSRQLIQEQFRKDFQDGKIDAQAVFDWLGTEEGIVATPHSQRSVAQVRVLLDHTEGDAFPITALIDSIEGALKTPVQTAVKRIDEQEFALLNGQNLMFCEDAARRLKVSLDPQPCYKDFWLRVNHLESLHAHNAVAIVTKEVDGGYLPIP

SEQ ID NO: 4256 - protein, 319 aa, Alcanivorax jadensis
  misc_feature (1)..(319): tr|A0A095SCL2|A0A095SCL2_9GAMM GTP cyclohydrolase FolE2 OS=Alcanivorax jadensis T9 OX=1177181 GN=folE2 PE=3 SV =1
MTRETGAGGTKQMPDVASNSMVDHIHSTLDWVGMSEIHLPARVSDTLAGERPVSTSIQAYVNLANPDAKGIHMSRLFLMLEETFGDHSVSAASIEQLLRNFLQTHEGLSTRGFVQLDFEYSMRRPALKSSYSGWKSYPVSIKGTLCEEGMRIEMYVEVPYSSTCPCSAALSRQLIQEQFRRDFAEGKVDADAVFEWLGTEEGILATPHSQRSVAQVRVLLDHTEGDAFPITALIDSIEGSLKTPVQTAVKRVDEQEFALLNGQNLMFCEDAARRLKQALNPQGCYKDFWLRVNHLESLHAHNAVAIVTKEVDGGYLPIP

SEQ ID NO: 4257 - protein, 319 aa, Alcanivorax nanhaiticus
  misc_feature (1)..(319): tr|A0A095SIJ5|A0A095SIJ5_9GAMM GTP cyclohydrolase FolE2 OS=Alcanivorax nanhaiticus OX=1177154 GN=folE2 PE=3 SV =1
MTREKGAAGTKQMPDVASNSMVDHIHSTLDWVGMSEIHLPARVSDTLAGERPVSTSIQAYVNLANPDAKGIHMSRLFLMLEETFGDHSVSAGSIEQLLRNFLETHEGLSTRGFVQLDFEYSMRRPALKSSYSGWKSYPVSIKGTLCEEGMRIEMYVEVPYSSTCPCSAALSRQLIQEQFRKDFKEGKVDAEAVFEWLGTEEGIVATPHSQRSVAQVRVLLDHTEGDAFPITALIDSIEGALKTPVQTAVKRVDEQEFALLNGQNLMFCEDAARRLKQAIDPQPCYKDFWLRVNHLESLHAHNAVAIVTKEVDGGYLPIP

SEQ ID NO: 4258 - protein, 183 aa, Alcanivorax pacificus
  misc_feature (1)..(183): tr|A0A0B4XNE0|A0A0B4XNE0_9GAMM GTP cyclohydrolase 1 OS= Alcanivorax pacificus W11-5 OX=391936 GN=folE PE=3 SV=1
MTDSLSALYREVLTQLGEDPAREGLLDTPARVAKAMRFLTGGYQQSLEALVNGAVFSSDNDEMVVVRDIEFYSLCEHHMLPFFGKCHIAYIPDGKVLGLSKCARIVDMYARRLQIQENLTLQVAHAIGDVTGARGVGVIMDARHLCMMMRGVEKQHASTTTSVMLGTLRESAAARSEFLSLVT

SEQ ID NO: 4259 - protein, 317 aa, Alcanivorax pacificus
  misc_feature (1)..(317): tr|A0A0B4XT67|A0A0B4XT67_9GAMM GTP cyclohydrolase FolE2 OS=Alcanivorax pacificus W11-5 OX=391936 GN=folE2 PE=3 SV=1
MKREDAAPHSMPDVASMASRHKGPKLDWVGMSEIHLPARVSDSVHGERPISSRIQAYVNLADTNARGIHMSRLYLMLEETFGDHSVSTASIRTLLENFLHTHDGLSSRAFVELDFEYSVRRPSLKSQYAGWKSYPVRIAGTLCEQGLRIELSVEVPYSSTCPCSAALARQLIQDAFREKFGDVGTIDAEDAAEWLGTEQGIVATPHSQRSIAQVRVLLDHAQDDAFPITALIDLIEGALKTPVQTAVKREDEQEFARLNGQNLMFCEDAARRLQVVMDQDPQYKDFWLRVNHLESLHAHNAVAIVTKNVDGGYLPIP

SEQ ID NO: 4260 - protein, 323 aa, Alcanivorax profundi
  misc_feature (1)..(323): tr|A0A418XUE8|A0A418XUE8_9GAMM GTP cyclohydrolase FolE2 OS=Alcanivorax profundi OX=2338368 GN=folE2 PE=3 SV=1
MEKPMTRENGADSTKQMPDVASNSMVDHIHSTLDWVGMSEIHLPARVSDTLAGERPVSTSIQAYVNLANPDAKGIHMSRLFLMLEETFGDHSVSSASIEQLLRNFLETHEGLSTRGFVQLDFEYSMRRPALKSSYSGWKSYPVSIKGTLCEEGMRIEMYVEVPYSSTCPCSAALSRQLIQEQFRKDFQDGKVDAEAVLEWLGTEEGIVATPHSQRSVAQVRVLLDHNEGDAFPITALIDSIEGALKTPVQTAVKRVDEQEFALLNGQNLMFCEDAARRLKQAIDPQSCYKDFWLRVNHLESLHAHNAVAIVTKEVDGGYLPIP

SEQ ID NO: 4261 - protein, 318 aa, Alcanivorax sp.
  misc_feature (1)..(318): tr|A0A3D9IDA6|A0A3D9IDA6_9GAMM GTP cyclohydrolase FolE2 OS=Alcanivorax sp. EA2 OX=2183984 GN=folE2 PE=3 SV=1
MKRESGADNTKAMPDVASNSMVDHIGGTLDWVGMSEIHLPARVSDTRVGERPVSTSIQAYVNLANPDAKGIHMSRLYLMLEETFGDHSVSPASIEQLLGNFLETHEGLSTRGFVQFDFEYSMRRPALKSSYAGWKSYTVSIKASLGEEGLCTEMYVEVPYSSTCPCSAALARQLIQEKFREDFQSGKVDVDEVFEWLGTEEGIRATPHSQRSIAQVRVLLDKAAESFPITALIDSIEEALKTPVQTAVKRIDEQEFALLNGQNLMFCEDAARRLKHALDPQPCYRDFWLRVNHLESLHAHNAVAIVTKEVEGGYLPIP

SEQ ID NO: 4262 - protein, 320 aa, Alcanivorax sp.
  misc_feature (1)..(320): tr|A0A350FEF6|A0A350FEF6_9GAMM GTP cyclohydrolase FolE2 OS=Alcanivorax sp. OX=1872427 GN=folE2 PE=3 SV=1
MKRDSSSETTKSMPDVATNSMVEHIHSTLDWVGMSEIHLPARISDTLAGERPVSTSIQAYVNLSNPDAKGIHMSRLYLMLEETFGDHSVSAYSIRKLLQNFLDSHEGLSDRGFVQFDFEYSMRRPALKSSYSGWKSYPVTIKATLAPDGMRMELAVEVPYSSTCPCSAALARQLIQEQFRKDFEGEGSVDMEKVFEWLGTEEGIMATPHSQRSVAQVRVLLDTDCDEAFPITALIDSIEGALKTPVQTAVKRVDEQEFAKLNGQNLMFCEDSARRLKRALDGQPCYQDFWLRVNHLESLHAHNAVAIATKEVEGGYLPIP

SEQ ID NO: 4263 - protein, 223 aa, Algibacter alginicilyticus
  misc_feature (1)..(223): tr|A0A0P0DE80|A0A0P0DE80_9FLAO GTP cyclohydrolase 1 OS= Algibacter alginicilyticus OX=1736674 GN=folE PE=3 SV=1
MDNNLEKIESLGDDHIGTSENTPMRQDAFKLTTEEKMDIIKDDVRHIMETLGLDLSDDSLSGTPNRVAKMFVKEIFSGLDPNKKPKSSTFDNKYKYGEMLVEKNITVYSTCEHHLLPIVGRAHIAYISNGTVVGLSKMNRIVDYFAKRPQVQERLTIQIVRELQEVLNTKDVACIIDAKHLCVNSRGIRDIESSTVTSEFGGKFKDMATRREFLDYIKLETKF

SEQ ID NO: 4264 - protein, 195 aa, Algibacter alginicilyticus
  misc_feature (1)..(195): tr|A0A0P0D326|A0A0P0D326_9FLAO GTP cyclohydrolase 1 OS= Algibacter alginicilyticus OX=1736674 GN=folE PE=3 SV=1
MPYKQFEEFNMQVTDDVKDRYKSIIQDLGEDPKREGLLKTPERASKAMQFLTQGYHQDPVEILKGAMFKESYNEMVIVKDIELYSLCEHHILPFFGKAHIAYIPNGQIVGLSKLPRIVDVFSRRLQVQERLTEQILDCINNTLKPQGVAVVIEASHMCMMMRGVQKQNSLTTTSGFRGQFEKIETRNEFLKLIGK

SEQ ID NO: 4265 - protein, 225 aa, Algibacter amylolyticus
  misc_feature (1)..(225): tr|A0A556QF99|A0A556QF99_9FLAO GTP cyclohydrolase 1 OS= Algibacter amylolyticus OX=1608400 GN=folE PE=3 SV=1
MAFDSNIEDFDALGNDHIGTSENTPMRSDAFKLNNEEKIDIIKDDVRHILETLGLDLTDDSLKGTPNRVAKMFVNEIFGGLNPDKKPSASTFDNKYKYGEMLVEKNITVYSTCEHHLLPIVGRAHIAYISNGTVVGLSKMNRIVDYFAKRPQVQERLTIQVVRELQNVLGTKDVACVIDAKHLCVNSRGIRDIESSTVTSEFGGKFQDMETRREFLDYIKLDTKF

SEQ ID NO: 4266 - protein, 195 aa, Algibacter amylolyticus
  misc_feature (1)..(195): tr|A0A556QA79|A0A556QA79_9FLAO GTP cyclohydrolase 1 OS= Algibacter amylolyticus OX=1608400 GN=folE PE=3 SV=1
MPYKSFEEYSDDVTDNVKNKYQEIITDLGEDTSRDGLLKTPERAAKAMQFLTQGYDQDPVEILKGAMFKESYNEMVIVKDIELYSLCEHHILPFFGKVHIAYIPNGQIVGLSKLPRIVDVFARRLQVQERLTQQILDCINDTLNPQGVAVVIEASHMCMMMRGVQKQNSTTTTSGFRGQFEKIETRNEFLKLIGK

SEQ ID NO: 4267 - protein, 195 aa, Algibacter aquaticus
  misc_feature (1)..(195): tr|A0A1E5SJV0|A0A1E5SJV0_9FLAO GTP cyclohydrolase 1 OS= Algibacter aquaticus OX=1849968 GN=folE PE=3 SV=1
MPYKKFEEYNMKVTDDVKDRYKNIIQDLGEDTERDGLLKTPERAAKAMQFLTQGYDQDPVEILKSAMFKESYNEMVIVKDIELYSLCEHHILPFFGKAHIAYIPNGYIVGLSKLPRILDVFARRLQVQERLTEQVLDCINDTLKPQGVAVVIEASHMCMMMRGVQKQNSITTTSGFRGQFEKSETRNEFLKLIGK

SEQ ID NO: 4268 - protein, 225 aa, Algibacter aquaticus
  misc_feature (1)..(225): tr|A0A1E5TBN9|A0A1E5TBN9_9FLAO GTP cyclohydrolase 1 OS= Algibacter aquaticus OX=1849968 GN=folE PE=3 SV=1
MKIENNLEEFESLGDDHIGTSSNTPLRSDAFKLSNEEKIDIIKDDVRHILETLGLDLTDDSLSGTPNRVAKMFVKEIFGGLNPKKKPSASTFDNKYKYGEMLVEKNITVYSTCEHHLLPIVGRAHIAYISNGTVVGLSKMNRIVDYFAKRPQVQERLTIQIVKELQEVLNTEDVACVIDAKHLCVNSRGIRDIESSTVTSEFGGKFKKEATRREFLDYIKLDTTF

SEQ ID NO: 4269 - protein, 225 aa, Algibacter lectus
  misc_feature (1)..(225): tr|A0A090V941|A0A090V941_9FLAO GTP cyclohydrolase 1 OS= Algibacter lectus OX=221126 GN=folE PE=3 SV=1
MKMDNNIEEHDTLGEDHIGTSADTPLRNDAFTLSDSEKIDIIKDDVRHILETLGLDLTDDSLSGTPNRVAKMFVNEIFGGLDPKKKPKASTFDNKYKYGEMLVEKNITVYSTCEHHLLPIVGRAHIAYISNGTVVGLSKMNRVVDYYAKRPQVQERLTIQVVKALQEVLNTDDVACVIDAKHLCVNSRGIRDIESSTVTSEFGGKFKEESTRREFLDYIKLETKF

SEQ ID NO: 4270 - protein, 195 aa, Algibacter lectus
  misc_feature (1)..(195): tr|A0A090WLT5|A0A090WLT5_9FLAO GTP cyclohydrolase 1 OS= Algibacter lectus OX=221126 GN=folE PE=3 SV=1
MPYRKLEEYNMQVTDDVKNRYRNIIEDLGEDTEREGLVKTPERAAKAMQFLTQGYDQDPVEILKGAMFKESYNEMVIVKDIELYSLCEHHILPFFGKAHIAYIPNGHIVGLSKLPRIVDVFARRLQVQERLTEQILDCINDTLKPQGVAVVIEASHMCMMMRGVQKQNSITTTSGFRGQFEKIETRNEFLKLIGK

SEQ ID NO: 4271 - protein, 225 aa, Algibacter pectinivorans
  misc_feature (1)..(225): tr|A0A1I1REV8|A0A1I1REV8_9FLAO GTP cyclohydrolase 1 OS= Algibacter pectinivorans OX=870482 GN=folE PE=3 SV=1
MAFDSNIEDFDALGNDHIGTSENTPMRSDAFKLNNEEKIDIIKDDVRHIMETLGLDLTDDSLKGTPNRVAKMFVNEIFGGLNPDKKPSASTFDNKYKYGEMLVEKNITVYSTCEHHLLPIVGRAHIAYISNGTVVGLSKMNRIVDYFAKRPQVQERLTIQVVRELQNVLGTKDVACVIDAKHLCVNSRGIRDIESSTVTSEFGGKFQDMETRREFLDYIKLDTKF

SEQ ID NO: 4272 - protein, 231 aa, Algibacter pectinivorans
  misc_feature (1)..(231): tr|A0A1I1QFC5|A0A1I1QFC5_9FLAO GTP cyclohydrolase 1 OS= Algibacter pectinivorans OX=870482 GN=folE PE=3 SV=1
METDKLTPTKNGNTLNGFSLNDIGDDHLYTGLETPMKPDAFKLSDADKKERISILFEEIMDVMGLDLTDDSLKGTPQRVAKMYIDEIFSGLNPANKPKIALFDNKYQYNQMLVEKDITFYSNCEHHFVPIIGKAHVAYISSGKVIGLSKLNRIVQYYAKRPQVQERLTNQIANELKTILDTNDVAVIISAKHLCVSSRGIKDDTSSTVTAYYGGTFNTPEKITEFQNHINS

SEQ ID NO: 4273 - protein, 229 aa, Algibacter sp.
  misc_feature (1)..(229): tr|A0A2U2X4Q8|A0A2U2X4Q8_9FLAO GTP cyclohydrolase 1 OS= Algibacter sp. ZY111 OX=2100723 GN=folE PE=3 SV=1
MQLEKLRTNGHKLNGFSLDDIGDDHLYTGLETPMKADAFKLSDEEKKERIAILFEEIMDVMGLDLTDDSLQGTPKRVAKMYIDEIFSGLNPANKPKVALFDNKYQYNQMLVEKNITFYSNCEHHFVPIIGKAHVAYISSGKVIGLSKLNRIVQYYAKRPQVQERLTNQIANELKSILDTEDVAVIIDAKHLCVSSRGIKDDTSSTVTAFYGGQFNTSEKITELQNYLNS

SEQ ID NO: 4274 - protein, 195 aa, Algibacter sp.
  misc_feature (1)..(195): tr|A0A2U2X2S1|A0A2U2X2S1_9FLAO GTP cyclohydrolase 1 OS= Algibacter sp. ZY111 OX=2100723 GN=folE PE=3 SV=1
MPYKSFEEYNMKVTDDVKDRYKNIIKDLGEDTKRDGLIKTPERAAKAMQFLTQGYDQDPVEILKGAMFKESYNEMVIVKDIELYSLCEHHILPFFGKAHIAYIPNGQIVGLSKLPRIVDVFARRLQVQERLTEQVLDCINDTLKPQGVAVVIEASHMCMMMRGVQKQNSITTTSGFRGQFEKIETRNEFLKLIGK

SEQ ID NO: 4275 - protein, 195 aa, Algibacter wandonensis; identical to SEQ ID NO: 4270
  misc_feature (1)..(195): tr|A0A4R8MFZ3|A0A4R8MFZ3_9FLAO GTP cyclohydrolase 1 OS= Algibacter wandonensis OX=1343161 GN=folE PE=3 SV=1

SEQ ID NO: 4276 - protein, 225 aa, Algibacter wandonensis; identical to SEQ ID NO: 4269
  misc_feature (1)..(225): tr|A0A4R8MKT4|A0A4R8MKT4_9FLAO GTP cyclohydrolase 1 OS= Algibacter wandonensis OX=1343161 GN=folE PE=3 SV=1

SEQ ID NO: 4277 - protein, 225 aa, Algoriella xinjiangensis
  misc_feature (1)..(225): tr|A0A1I4UDZ7|A0A1I4UDZ7_9FLAO GTP cyclohydrolase 1 OS= Algoriella xinjiangensis OX=684065 GN=folE PE=3 SV=1
MCDKHLHDEMEDDHFSANLETPLKADAFELSAEEKVKMIEGDFRKIMETLGLDLTDDSLKGTPKRVAKMFVNEIFGGLLPERKPGMSTFENKYKYNQMLVEKDIVVYSTCEHHFLPIVGRAHVAYISKGKVIGLSKMNRIVEYYSKRPQVQERLTMQIVKAMQDALGTDDVACIIDAKHLCVNSRGIKDIESSTVTAEYGGAFKESEQLRKELIAYIGMKTAFNV

SEQ ID NO: 4278 - protein, 228 aa, Algoriphagus alkaliphilus
  misc_feature (1)..(228): tr|A0A1G5WXP6|A0A1G5WXP6_9BACT GTP cyclohydrolase 1 OS= Algoriphagus alkaliphilus OX=279824 GN=folE PE=3 SV=1
MLSTMGIDIARSSFEYLGEDHVGTSLETPLREDAFEMDDDLKVELIEKHFREIMHIMGLDLTDDSLKGTPHRVAKMYVKEVFSGLNPKNKPAAKLFENKYKYNQMLVEKDITFHSHCEHHFVPIYGRAHVAYISSGDVIGLSKINRIVQYYSKRPQVQERLTMQIGNELKEALGTEDVAVIMDAYHMCVSSRGVNDTNSSTVTSFFSGKFESEEQTRNEFLKYISLKK

SEQ ID NO: 4279 - protein, 234 aa, Algoriphagus antarcticus
  misc_feature (1)..(234): tr|A0A3E0E038|A0A3E0E038_9BACT GTP cyclohydrolase 1 OS= Algoriphagus antarcticus OX=238540 GN=folE PE=3 SV=1
MKQKETLLNTMGINIARASAEDIGDEHVGTSLETPLREDAFEMDDELKIELIEKHFREIMHIMGLDLTDDSLKGTPHRVAKMYVKEVFSGLDPKNKPVAKLFENKYKYSEMLVEKNITFFSHCEHHFVPIHGKAHVAYISNGSVIGLSKINRIVQYYSQRPQVQERLTMQIGNELIEALGTDDVAVIMDADHMCVSSRGVKDTTSSTLTSFYSGKFEKDEQTRNEFIKYISLER

SEQ ID NO: 4280 - protein, 234 aa, Algoriphagus aquaeductus
  misc_feature (1)..(234): tr|A0A326RT88|A0A326RT88_9BACT GTP cyclohydrolase 1 OS= Algoriphagus aquaeductus OX=475299 GN=folE PE=3 SV=1
MKQKETLLNTMGINIARASFEEIGEEHVGTSLETPLREDAFEMDDDLKVELIEKHFREIMHIMGLDLTDDSLKGTPHRVAKMYVKEVFSGLNPKNKPAAKLFENKYKYNEMLVEKDITFHSHCEHHFVPIYGKAHVAYISNGNVIGLSKINRIVQYYSKRPQVQERLTMQIGNELKEALGTEDVAVIMDAYHMCVSSRGVNDTNSSTVTAFYSGKFERDEQSRNEFMKYISLNK

SEQ ID NO: 4281 - protein, 234 aa, Algoriphagus aquimarinus
  misc_feature (1)..(234): tr|A0A5C7AUK7|A0A5C7AUK7_9BACT GTP cyclohydrolase 1 OS= Algoriphagus aquimarinus OX=237018 GN=folE PE=3 SV=1
MKQKETLLNTMGIKIARASFEEIGEDHVGTSLETPLREDAFEMDDELKVELIEKHFREIMNIMGLDLTDDSLKGTPHRVAKMYVKEVFSGLNPKNKPVAKLFENKYKYNEMLVEKDITVHSHCEHHFVPIYGKAHVAYISNGSVIGLSKINRIVQYFSQRPQVQERLTMQIGNELKEALGTDDVAVIIDAYHMCVSSRGVKDTQSSTVTSFYSGKFEKDEQSRNEFIQYISLEK

SEQ ID NO: 4282 - protein, 234 aa, Algoriphagus aquimarinus
  misc_feature (1)..(234): tr|A0A1I1B093|A0A1I1B093_9BACT GTP cyclohydrolase 1 OS= Algoriphagus aquimarinus OX=237018 GN=folE PE=3 SV=1
MKQKETLLNTMGIKIARASFEEIGEEHVGTSLETPLREDAFEMDDELKVELIEKHFREIMNIMGLDLTDDSLKGTPHRVAKMYVKEVFSGLNPKNKPVAKLFENKYKYNEMLVEKDITVHSHCEHHFVPIYGKAHVAYISNGSVIGLSKINRIVQYFSQRPQVQERLTMQIGNELKEALGTDDVAVIIDAYHMCVSSRGVKDTQSSTVTSFYSGKFEKDEQSRNEFMQYINLEK

SEQ ID NO: 4283 - protein, 234 aa, Algoriphagus boritolerans
  misc_feature (1)..(234): tr|A0A1H5WMD3|A0A1H5WMD3_9BACT GTP cyclohydrolase 1 OS= Algoriphagus boritolerans DSM 17298 = JCM 18970 OX=1120 964 GN=folE PE=3 SV=1
MKQKETLLSTMGINISRTSFEDLGEEHVGTSLETPLREDAFEMDDDLKVELIEKHFREIMHIMGLDLSDDSLKGTPHRVAKMYVKEVFSGLNPKNKPATKLFENKYKYNQMLVEKDITFYSHCEHHFVPIYGRAHVAYISTGEVIGLSKINRIVQYYSKRPQVQERLTMQIGNELKEAVGTEDVAVIMDAYHMCVSSRGVNDTNSSTVTSFFSGKFESDEQSRNEFLKYISLKK

SEQ ID NO: 4284 - protein, 234 aa, Algoriphagus boseongensis
  misc_feature (1)..(234): tr|A0A4V3D2C0|A0A4V3D2C0_9BACT GTP cyclohydrolase 1 OS= Algoriphagus boseongensis OX=1442587 GN=folE PE=3 SV=1
MKQKETLLNTMGINLVRASIEEIGEEHVGTSLETPLREDAFVMDDNLKVELIEKHFREIMHILGLDLTDDSLKGTPHRVAKMYVKEVFAGLNPKNKPAAKLFENKYKYAEMLVEKDITFHSHCEHHFVPIYGKAHVAYISNGNVIGLSKINRIVQYYAKRPQVQERLTMQVGNELKEVLGTEDVAVIMDAYHMCVSSRGVNDTNSSTVTSFYSGKFESDEQSRNEFLKYISLKK

SEQ ID NO: 4285 - protein, 234 aa, Algoriphagus chordae
  misc_feature (1)..(234): tr|A0A2W7R476|A0A2W7R476_9BACT GTP cyclohydrolase 1 OS= Algoriphagus chordae OX=237019 GN=folE PE=3 SV=1
MKQKETLLNTMGIKIARASFEEIGEEHVGTSLETPLREDAFEMDDDLKVELIEKHFREIMNIMGLDLTDDSLKGTPHRVAKMYVKEVFSGLNPKNKPVAKLFENKYKYNEMLVEKDITVHSHCEHHFVPIYGKAHVAYISNGNVIGLSKINRIVQYFSQRPQVQERLTMQIGNELKEALGTDDVAVIIDAYHMCVSSRGVKDTQSSTVTSFYSGKFEKDEQSRNEFMQYISLEK

SEQ ID NO: 4286 - protein, 234 aa, Algoriphagus faecimaris
  misc_feature (1)..(234): tr|A0A1G6RXT5|A0A1G6RXT5_9BACT GTP cyclohydrolase 1 OS= Algoriphagus faecimaris OX=686796 GN=folE PE=3 SV=1
MKQKETMLNTMGIDLARAAFEEIGEEHVGTSLETPLREDAFEMDDNLKVELIEKHFREIMNILGLDLTDDSLKGTPHRVAKMYVKEVFAGLNPKNKPAAKLFENKYKYSEMLVEKDITFHSHCEHHFVPIYGKAHVAYISNGNVIGLSKINRIVQYYSKRPQVQERLTVQIGNELKEVLGTEDVAVIMDAYHMCVSSRGVNDTNSSTVTSFYSGKFERDEQSRNEFLKYISMEK

SEQ ID NO: 4287 - protein, 234 aa, Algoriphagus halophilus
  misc_feature (1)..(234): tr|A0A1N6DAD4|A0A1N6DAD4_9BACT GTP cyclohydrolase 1 OS= Algoriphagus halophilus OX=226505 GN=folE PE=3 SV=1
MKQKETLLNTMGINISSASFEEIGEEHVGTSLETPLREDAFEMDDELKIELIEKHFREIMHIMGLDLTDDSLKGTPHRVAKMYVKEVFSGLNPKNKPVAKLFENKYKYNEMLVEKDITFHSHCEHHFVPIYGKAHVAYISGGEVIGLSKINRIVQYFAKRPQVQERLTMQIGNELKEVLKTDDVAIIMDANHMCVSSRGVQDVNSSTVTSFFSGKFEKDEQARNEFLKYISLEK

SEQ ID NO: 4288 - protein, 234 aa, Algoriphagus hitonicola
  misc_feature (1)..(234): tr|A0A1I2P7S0|A0A1I2P7S0_9BACT GTP cyclohydrolase 1 OS= Algoriphagus hitonicola OX=435880 GN=folE PE=3 SV=1
MKQKETMLNTMGIDLARASFEEIGEEHVGTSLETPLREDAFEMDDELKVELIEKHFREIMHILGLDLTDDSLKGTPHRVAKMYVKEVFAGLNPKNKPAAKLFENKYKYSEMLVEKDITFHSHCEHHFVPIYGKAHVAYISNGNVIGLSKINRIVQYYAQRPQVQERLTMQIGNELKEVLGTDDVAVVMDAYHMCVSSRGVNDTNSSTVTSFYSGKFERDEQSRNEFMKYISLKK

SEQ ID NO: 4289 - protein, 234 aa, Algoriphagus locisalis
  misc_feature (1)..(234): tr|A0A1I7BKW8|A0A1I7BKW8_9BACT GTP cyclohydrolase 1 OS= Algoriphagus locisalis OX=305507 GN=folE PE=3 SV=1
MKQKETLLNTMGINIARASAEDIGDEHVGTSLETPLREDAFEMDDELKVELIEKHFREIMHIMGLDLTDDSLKGTPHRVAKMYVKEVFSGLNPKNKPVAKLFENKYKYNEMLVEKNITFFSHCEHHFVPIHGKAHVAYISNGSVIGLSKINRIVQYFSQRPQVQERLTMQIGNELVEALGTDDVAVIMDADHMCVSSRGVKDTTSSTLTSFYSGKFEKDEQTRNEFLKYISLER

SEQ ID NO: 4290 - protein, 224 aa, Algoriphagus machipongonensis
  misc_feature (1)..(224): tr|A3I138|A3I138_9BACT GTP cyclohydrolase 1 OS=Algoriph agus machipongonensis OX=388413 GN=folE PE=3 SV=1
MGIDISQASLEEIGEEHVGTSLETPLREDAFEMDDDLKVELIEKHFREIMHIMGLDLTDDSLKGTPHRVAKMYVKEVFSGLNPKNKPIAKLFENKYKYKEMLVEKDITFHSHCEHHFVPIYGNAHVAYISKGEVIGLSKINRIVQYFAKRPQVQERLTMQIGNELKEVLKTDDVAVILDANHMCVSSRGVQDTNSSTVTSFYSGKFEKDEQSRNEFLKYISLEK

SEQ ID NO: 4291 - protein, 228 aa, Algoriphagus marincola
  misc_feature (1)..(228): tr|A0A0P8AKS8|A0A0P8AKS8_9BACT GTP cyclohydrolase 1 OS= Algoriphagus marincola HL-49 OX=1305737 GN=folE PE=3 SV =1
MLTSMGIDIARASYEELGEEHLASSVETPLREDAFEMDDDLKVELIEKHFKEIMNILGLDLTDDSLKGTPHRVAKMYVKEVFAGLNPKNKPVAKLFENKFQYNQMLVEKDITFFSHCEHHFVPIYGRAHVAYISNGNVIGLSKINRIVQYYSKRPQVQERLTMQIGNDLKEALGTDDVAVIMDAYHMCVSSRGINDTNSSTVTSFYSGKFDTDEQTRNEFLKYISLEK

SEQ ID NO: 4292 - protein, 234 aa, Algoriphagus ornithinivorans
  misc_feature (1)..(234): tr|A0A1I5H3Q5|A0A1I5H3Q5_9BACT GTP cyclohydrolase 1 OS= Algoriphagus ornithinivorans OX=226506 GN=folE PE=3 SV= 1
MKQKETLLNTMGINLSRASFEEIGEEHVGTSLETPLREDAFEMDDDLKVELIEKHFREIMNILGLDLTDDSLKGTPHRVAKMYVKEVFAGLNPKNKPAAKLFENKYKYNEMLVEKDITFHSHCEHHFVPIYGKAHVAYISNGNVIGLSKINRIVQYFAKRPQVQERLTMQIGNELKEVLGTEDVAIIMDAYHMCVSSRGVNDTNSSTVTSFYSGKFERDEQARNEFLKYISLEK

SEQ ID NO: 4293 - protein, 234 aa, Algoriphagus ratkowskyi
  misc_feature (1)..(234): tr|A0A2W7SE38|A0A2W7SE38_9BACT GTP cyclohydrolase 1 OS= Algoriphagus ratkowskyi OX=57028 GN=folE PE=3 SV=1
MKQKETLLNTMGINIARASSEDIGDEHVGTSLETPLREDAFEMDDELKIELIEKHFREIMHVMGLDLTDDSLKGTPHRVAKMYVKEVFSGLNPKNKPVAKLFENKYKYSEMLVEKNITFFSHCEHHFVPIYGKAHVAYISNGSVIGLSKINRIVQYFSQRPQVQERLTMQIGNELIEALGTDDVAVIMDADHMCVSSRGVKDTTSSTLTSFYGGKFEKDEQTRNEFLKYISLER

SEQ ID NO: 4294 - protein, 234 aa, Algoriphagus sp.
  misc_feature (1)..(234): tr|A0A418PUV8|A0A418PUV8_9BACT GTP cyclohydrolase 1 OS= Algoriphagus sp. N3 OX=2056311 GN=folE PE=3 SV=1
MKQKETMLNTMGIDIARASFEEIGEEHVGTSLQTPLREDAFVMDDDLKVELIEKHFREIMHIMGLDLTDDSLKGTPHRVAKMYVKEVFAGLNPKNKPAAKLFENKYKYSEMLVEKDITFHSHCEHHFVPIYGKAHVAYISNGNVIGLSKINRIVQYFSKRPQVQERLTMQIGNELKEVLGTEDVAVIMDAYHMCVSSRGVNDTNSSTVTSFYSGKFETDEQSRNEFLKYISLKK

SEQ ID NO: 4295 - protein, 234 aa, Algoriphagus sp.
  misc_feature (1)..(234): tr|A0A258ES08|A0A258ES08_9BACT GTP cyclohydrolase 1 OS= Algoriphagus sp. 32-45-6 OX=1970314 GN=folE PE=3 SV=1
MKQKETLLNTMGINLSRETFEEFGDDHVGTSLQTPLREDAFEMDDDLKVELIEKHFREIMHIMGLDLTDDSLKGTPHRVAKMYVKEVFSGLNPKNKPAAKLFENKYKYNEMLVEKDITFHSHCEHHFVPIYGKAHVAYISNGNVIGLSKINRIVQYYSKRPQVQERLTMQIGNELKEALGTEDVAVIMDAYHMCVSSRGVNDTNSSTVTAFYSGKFERDEQSRNEFMKYIQLEK

SEQ ID NO: 4296 - protein, 234 aa, Algoriphagus yeomjeoni
  misc_feature (1)..(234): tr|A0A327PAB9|A0A327PAB9_9BACT GTP cyclohydrolase 1 OS= Algoriphagus yeomjeoni OX=291403 GN=folE PE=3 SV=1
MKQKETLLNTMGINIARASAEDIGDEHVGTSLETPLREDAFEMDDELKVELIEKHFREIMHIMGLDLTDDSLKGTPHRVAKMYVKEVFSGLNPKNKPLAKLFENKYKYNEMLVEKNITFFSHCEHHFVPIHGKAHVAYISNGSVIGLSKINRIVQYFSQRPQVQERLTMQIGNELVEALGTDDVAVIMDADHMCVSSRGVKDTTSSTLTSFYSGKFEKDEQSRNEFLKYISLEK

SEQ ID NO: 4297 - protein, 234 aa, Algoriphagus zhangzhouensis
  misc_feature (1)..(234): tr|A0A1M7Z7A9|A0A1M7Z7A9_9BACT GTP cyclohydrolase 1 OS= Algoriphagus zhangzhouensis OX=1073327 GN=folE PE=3 SV= 1
MKQKETLLNTMGINISRASFEEIGEEHVGTSLETPLREDAFEMDDDLKVELIEKHFREIMNILGLDLTDDSLKGTPHRVAKMYVKEVFAGLNPKNKPTAKLFENKYKYNEMLVEKDITFHSHCEHHFVPIYGRAHVAYISNGNVIGLSKINRIVQYFAKRPQVQERLTMQIGNELKEALGTEDVAVIMDAYHMCVSSRGVQDTNSSTVTSFYSGKFEKDEQARNEFLKYISLEK

SEQ ID NO: 4298 - protein, 241 aa, Alicycliphilus denitrificans
  misc_feature (1)..(241): tr|F4G8R1|F4G8R1_ALIDK GTP cyclohydrolase I OS=Alicycli philus denitrificans (strain DSM 14773 / CIP 107495 / K 601) OX=596154 GN=Alide2_0927 PE=4 SV=1
MSSEPAAEPNAPPSDEGTPVSVKIRERLAAARRRFHANDNIAEFIEPGELELLLDEVEARMQGVLDSMVIDTAGDHNTQSTARRVAKMYLNEVFKGRYVHPPTITEFPNAEHLNELMIVGPITVRSACSHHFCPVIGKIWIGVLPNEHTNVIGLSKYARLVDWVMGRPQIQEEAVVQLADLIMEKTQPDGLAIVMEASHFCMSWRGVREMDSKMINSVMRGVFLTNSTLRREFLALIPGRN

SEQ ID NO: 4299 - protein, 241 aa, Alicycliphilus denitrificans; identical to SEQ ID NO: 4298
  misc_feature (1)..(241): tr|E8U0X8|E8U0X8_ALIDB GTP cyclohydrolase I OS=Alicycli philus denitrificans (strain DSM 18852 / JCM 14587 / BC ) OX=596153 GN=Alide_0964 PE=4 SV=1

SEQ ID NO: 4300 - protein, 191 aa, Alicyclobacillus acidocaldarius
  misc_feature (1)..(191): tr|F8IFX0|F8IFX0_ALIAT GTP cyclohydrolase 1 OS=Alicyclo bacillus acidocaldarius (strain Tc-4-1) OX=1048834 GN=f olE PE=3 SV=1
MDKPMDTARIEQAVRMILEAIGEDPDREGLVDTPARVARMYQEIFSGLHRDPQEELSARFHVEHGEVVLVRDIPFYSMCEHHLLPFFGTAHVAYLPHNNVVTGLSKLARLVDVVAKKPQVQERMTNEIADALSDALQAEGVLVVIDAEHLCMSMRGIRKPGSRTTTIAARGKYDEDTRLREEVLHLIRLGV

SEQ ID NO: 4301 - protein, 206 aa, Alicyclobacillus acidocaldarius
  misc_feature (1)..(206): tr|F8ID39|F8ID39_ALIAT GTP cyclohydrolase 1 OS=Alicyclo bacillus acidocaldarius (strain Tc-4-1) OX=1048834 GN=f olE PE=3 SV=1
MATFHVNARQVQLQHQAKSVDTARIEQAVRMILEAIGEAPDREGLVDTPARVARMYQEIFSGLHQDPRDELSARFHVEHGEVVLVRDIPFYSMCEHHLLPFFGIAHIAYLPHNHVVTGLSKLARLVDVVAKKPQVQERMTNEIADALVEALEAEGVLVVVDAEHLCMSMRGIRKPGSRTTTVATRGRYLHHPHEREEVLRLIRLGG

SEQ ID NO: 4302 - protein, 210 aa, Alicyclobacillus acidoterrestris
  misc_feature (1)..(210): tr|A0A512CMZ3|A0A512CMZ3_9BACL GTP cyclohydrolase 1 OS= Alicyclobacillus acidoterrestris OX=1450 GN=folE PE=3 S V=1
MTTHIHPHHVDAEFEDTSIQPARTMDLAKIEEAVRMILTAVGEDPDREGLLDTPARVARMYEEIFAGLHRDPKQELSARFHVEHGEMVFVRDIPFYSMCEHHLLPFFGTAHVAYLPSDNVVTGLSKLARLVDTVAKRPQVQERMTNDIADVLFTELNAEGVMVVVDAEHLCMNMRGIKKPGSKTMTLAVRGRYESDLRMREEVLQLVRYR

SEQ ID NO: 4303 - protein, 190 aa, Alicyclobacillus acidoterrestris
  misc_feature (1)..(190): tr|A0A512CKG5|A0A512CKG5_9BACL GTP cyclohydrolase 1 OS= Alicyclobacillus acidoterrestris OX=1450 GN=folE PE=3 S V=1
MSITMDKHQLITDHIRSLLQLIGENPNREGLLDTPSRVANMYEEVFAGVGIAPETALTTTFAEDYEGMVIVKDIDYYTFCEHHLIPFYGKAHIAYLPSGRVVGLSKFARLVELVSKRPQVQERMTQQIADAVMNVLAPRGVIVTLAGTHLCMCARGVKKPGTSTITTVKLGAFAEQASLVQEFEQALSRQ

SEQ ID NO: 4304 - protein, 205 aa, Alicyclobacillus ferrooxydans
  misc_feature (1)..(205): tr|A0A0P9CUH5|A0A0P9CUH5_9BACL GTP cyclohydrolase 1 OS= Alicyclobacillus ferrooxydans OX=471514 GN=folE PE=3 SV =1
MINEQSLTSSNTDPGQASQPNQERVNVAYHVRKILELLGENPDREGLLDTPDRVAKMFEEMLSGLNVDPVSVLNTTFEETSDGPVIVSDITFYSLCEHHMVPFFGKAHVGYLPGKRIVGLSKLARLVETVSQRLQVQERMTSQIVNAVTTALEPEGVIALVEAEHTCMCARGVKKPGSRTTTIAASGRYKDDVALRQEFLRMIGK

SEQ ID NO: 4305 - protein, 176 aa, Alicyclobacillus ferrooxydans
  misc_feature (1)..(176): tr|A0A0P9CS92|A0A0P9CS92_9BACL GTP cyclohydrolase 1 OS= Alicyclobacillus ferrooxydans OX=471514 GN=folE PE=3 SV =1
MILEAIGEDPTRDGLLDTPDRVARMYAEVFSGLRQDPKEVLSARFEVGDSEIVLVRDIPFYSMCEHHLVPFYGKAHVAYVPRDGVVTGLSKLARLVEAYARRPQVQERLTNEIAQTLYEELNAEGVFVMIQAEHMCMSMRGVQKPGSSTITKARRGNLTSAQEQEVFTLLQASRQL

SEQ ID NO: 4306 - protein, 185 aa, Alicyclobacillus hesperidum
  misc_feature (1)..(185): tr|J9HME2|J9HME2_9BACL GTP cyclohydrolase 1 OS=Alicyclo bacillus hesperidum URH17-3-68 OX=1200346 GN=folE PE=3 SV=1
MARIEQAVRTILEAVGENPDREGLIDTPARVARMYAEIFAGLHQDPREELSARFHVEHGEMVLVRDIPFYSMCEHHLLPFFGTAHVAYLPHANVVTGLSKLARLVDVVAKRPQVQERMTNEIADVLVSELQAEGVLVVVDAEHLCMNMRGIRKPGSRTMTLAARGRYEEDVRMREEVLQMIRYHG

SEQ ID NO: 4307 - protein, 209 aa, Alicyclobacillus hesperidum
  misc_feature (1)..(209): tr|A0A1H2RQ77|A0A1H2RQ77_9BACL GTP cyclohydrolase 1 OS= Alicyclobacillus hesperidum OX=89784 GN=folE PE=3 SV=1
MTTSHVDTNDKQEAVFPLDKPRIDMARIEQAVRTILEAVGEDPDREGLIDTPARVARMYAEIFAGLHQDPREELSARFHVEHGEMVLVRDIPFYSMCEHHLLPFFGTAHVAYLPHANVVTGLSKLARLVDVVAKRPQVQERMTNEIADVLVSELQAEGVLVVVDAEHLCMNMRGIRKPGSRTMTLAARGRYEEDVRMREEVLQMIRYHG

SEQ ID NO: 4308 - protein, 199 aa, Alicyclobacillus macrosporangiidus
  misc_feature (1)..(199): tr|A0A1I7FHV4|A0A1I7FHV4_9BACL GTP cyclohydrolase 1 OS= Alicyclobacillus macrosporangiidus OX=392015 GN=folE PE =3 SV=1
MRTETNQQVIPAPVHERDQIAEHVREILRLLGEDTTRDGLVDTPLRVAKMYEEMLGGMRMDPESVLSATFDETAQGPVIVSDITFYSLCEHHMVPFFGKAHVAYLPSQTIVGISKIARLVDVFARRLQVQERMTEQIVDTIDRVLKPHGVMALIDAEHTCMCARGIRKPGSRTITVATRGEYQHNADLRREFLQMIGRG

SEQ ID NO: 4309 - protein, 218 aa, Alicyclobacillus montanus
  misc_feature (1)..(218): tr|A0A1M6L2V6|A0A1M6L2V6_9BACL GTP cyclohydrolase 1 OS= Alicyclobacillus montanus OX=1830138 GN=folE PE=3 SV=1
MAQIKRSKALQSVATFAEDTAAIEMKRHRPTVDREKVEEAIRMLLEAVGENPNREGLLDTPARVARMYEEIFAGLHHNPSEELSARFHVDHDELVFVKDIPFYSMCEHHLLPFFGVAHVAYLPSGGVVTGLSKLARLVDMVAKRPQVQERMTNMIVDVLMQEMEPAGAMVVIEAEHLCMNMRGIKKPGSKTLTIAARGEFQEHPERREEILQMIRYAH

SEQ ID NO: 4310 - protein, 209 aa, Alicyclobacillus sacchari
  misc_feature (1)..(209): tr|A0A4R8LPY4|A0A4R8LPY4_9BACL GTP cyclohydrolase 1 OS= Alicyclobacillus sacchari OX=392010 GN=folE PE=3 SV=1
MTTSHVDTNDKQEAIFALDKPRIDMARIEQAVRTILEAVGEDPDREGLLDTPARVARMYAEIFAGLHQDPREELSARFHVEHGEMVLVRDIPFYSMCEHHLLPFFGTAHVAYLPHANVVTGLSKLARLVDVVAKRPQVQERMTNKIADVLATELQAEGVLVVVDAEHLCMNMRGIRKPGSRTMTLAARGRYEEDARMREEVLQMIRYRA

SEQ ID NO: 4311 - protein, 199 aa, Alicyclobacillus sp.
  misc_feature (1)..(199): tr|A0A1F2Y727|A0A1F2Y727_9BACL GTP cyclohydrolase 1 OS= Alicyclobacillus sp. RIFOXYA1_FULL_53_8 OX=1797236 GN=f olE PE=3 SV=1
MFQEPSTTTTASPAAEKHRAIAYHVRELLRLVGEDVDREGLLETPLRVAKMFDELLAGMNVDLASVLNTTFEERTEGPVIVQDITFYSLCEHHMVPFFGKAHIAYLPSSRIVGLSKLARLVDAASSRLQVQERMTEQLVATIDAVLEPRGVIALVEAEHTCMCARGVKKPGSKTTTLAARGVYRDDYSLRSEFLHMIGR

SEQ ID NO: 4312 - protein, 210 aa, Alicyclobacillus sp.
  misc_feature (1)..(210): tr|A0A1F2Y116|A0A1F2Y116_9BACL GTP cyclohydrolase 1 OS= Alicyclobacillus sp. RIFOXYA1_FULL_53_8 OX=1797236 GN=f olE PE=3 SV=1
MSYAWRIGVTTDMSDELIDEMTVRFDVEKIQQAVRMILEAIGEDLTRDGLRETPERVARMFQEIFTGLHTDAAAVLSAQFHTSHDELVFVKDIPFFSMCEHHLLPFFGKAHIAYIPRNGIVAGLSKLARLVDATAKRPQVQERMTDEIAQVLESALNVQGVMVVVQAEHLCMNMRGVKKPGSTTLTLATKGTFSAEPSLRQEVLQLIQLS

SEQ ID NO: 4313 - protein, 209 aa, Alicyclobacillus tengchongensis
  misc_feature (1)..(209): tr|A0A0V0PRI7|A0A0V0PRI7_9BACL GTP cyclohydrolase 1 OS= Alicyclobacillus tengchongensis OX=368812 GN=folE PE=3 SV=1
MATSHVDTNDKQEAVFALDKPRIDMARIEQAVRTILEAVGEDPDREGLIDTPARVARMYAEIFAGLHQDPREELSARFHVEHGEMVLVRDIPFYSMCEHHLLPFFGKAHVAYLPHANVVTGLSKLARLVDVVAKRPQVQERMTNEIADVLVSELQAEGVLVVVDAEHLCMNMRGIRKPGSRTMTLAARGRYEEDVRMREEVLQMIRYHG

SEQ ID NO: 4314 - protein, 206 aa, Alicyclobacillus vulcanalis
  misc_feature (1)..(206): tr|A0A1N7LI35|A0A1N7LI35_9BACL GTP cyclohydrolase 1 OS= Alicyclobacillus vulcanalis OX=252246 GN=folE PE=3 SV=1
MATFHVNTRQVRSMHERKTVDTARIEQAVRMILEAIGEAPEREGLADTPARVARMYQEIFAGLHRDPKEELSARFHVEHRDVVIVRDIPFYSMCEHHLLPFFGFAHVAYRPHDHVVTGLSKLARLVDVVAKKPQVQERMTNEIADALDEALAAEGVLVVVEAEHLCMSMRGIRKPGSRTTTIAQRGCYEESAAQREEVLHLIRFGA

SEQ ID NO: 4315 - protein, 206 aa, Alicyclobacillus vulcanalis
  misc_feature (1)..(206): tr|A0A1N7LZE1|A0A1N7LZE1_9BACL GTP cyclohydrolase 1 OS= Alicyclobacillus vulcanalis OX=252246 GN=folE PE=3 SV=1
MATSRVDSERVRASREMDKPMDTARIEQAIRMILEAIGEDPDREGLVDTPARVARMYEEIFAGLHRDPQEELSARFHVEHGEVVLVRDIPFYSMCEHHLLPFFGTAHVAYLPHGNVVTGLSKLARLVDVVAKKPQVQERMTNEIADALADALEAEGVLVVVDAEHLCMSMRGIRKPGSRTTTIAARGKYEDARLRQEILQLIRFGT

SEQ ID NO: 4316 - protein, 307 aa, Aliidiomarina haloalkalitolerans
  misc_feature (1)..(307): tr|A0A432VT20|A0A432VT20_9GAMM GTP cyclohydrolase FolE2 OS=Aliidiomarina haloalkalitolerans OX=859059 GN=folE2 PE=3 SV=1
MPTSMPDIANQVQAQTEGTLDWVGMSQIEMPMMVASETGLPQQVGARIEAFVSLDDPKAKGIHMSRLYLAVDELANDNVLSASSIKELLGKFIATHEGLSQSARVSFAFEYLLRRKSLISGKQGWKGYPVTVSAERVGDQVTLELEVGVTYSSTCPCSAALARQLIQQAFRERFSEEDVSREEIVAWLGTTEGIVATPHSQRSLAEVKVKLTDNVDILPIVAMIDRIENTLKTPVQAAVKREDEQEFARLNGQNLMFCEDAARRLQHELNRVSTVRDFRVRVNHYESLHAHDAVSITTKGISGGYRP

SEQ ID NO: 4317 - protein, 213 aa, Aliidiomarina iranensis
  misc_feature (1)..(213): tr|A0A432W0P8|A0A432W0P8_9GAMM GTP cyclohydrolase 1 OS= Aliidiomarina iranensis OX=1434071 GN=folE PE=3 SV=1
MLTKEAEQVRQALIDAGLETPMKENGLTADQKYDRIRSLMTEVVDVLGLDLADDSLSETPHRIAKMYVREIFCGLDYANFPKMALIENKMKVDEMVKVKDVSFNSTCEHHFVTIDGTARVAYIPNETVIGLSKINRIVRFFAQRPQIQERLTQQILVALQTLLGTKNVAVSIDAVHYCVKSRGVMDATSTTETSALGGIFKTDERTRYEFLAN

SEQ ID NO: 4318 - protein, 308 aa, Aliidiomarina maris
  misc_feature (1)..(308): tr|A0A327X3B9|A0A327X3B9_9GAMM GTP cyclohydrolase FolE2 OS=Aliidiomarina maris OX=531312 GN=folE2 PE=3 SV=1
MPTSMPDIANQDSAQTVGTLDWVGMSNIEMPLLVTVPGQPDRQVSAKVDAFVSLDDAQAKGIHMSRLYLAVDELSASGSLQPAQLHTLLKTFIHTHADLSSSAMVRFHFDYHLRRKSLISKKQGWKAYPVTLQAVLSEQGLEIELGVQIPYSSTCPCSAALARQIIQDAFAARFEDDSIDKDDVLAWLGTTDGVPATPHSQRSIADIKVKLREDGTDLPIEDLIDAVEDTLKTPVQAAVKREDEQEFARLNGQNLMFCEDAARRIKHCLNQRQDVRDFWVRINHYESLHAHDAVSIATKGVAGGFLAR

SEQ ID NO: 4319 - protein, 308 aa, Aliidiomarina minuta
  misc_feature (1)..(308): tr|A0A432W8S8|A0A432W8S8_9GAMM GTP cyclohydrolase FolE2 OS=Aliidiomarina minuta OX=880057 GN=folE2 PE=3 SV=1
MPTSMPDIANQTSAQTMGNLDWVGMSNIEMPLLVSVPGQPDRQVSAKVDAFVNLGDPQAKGIHMSRLYLAVDELAASGSLQPSQIDTLLKSFISSHLELSHQALVRFTFDYHLRRKSLVSKKQGWKAYPVTLQAILDDQGLEIELQVEVPYSSTCPCSAALARQLIQEAFDKKFNAASVSKEDVSAWLGTTDGIPATPHSQRSVADVKVKLNTGATDLPIEDLIDTIEDALQTPVQAAVKREDEQEFARLNGQNLMFCEDAARRLQHRLNQESQFHDFWIRVNHYESLHAHDAVSITTKGIKGGFQAR

SEQ ID NO: 4320 - protein, 307 aa, Aliidiomarina sanyensis
  misc_feature (1)..(307): tr|A0A432WIC2|A0A432WIC2_9GAMM GTP cyclohydrolase FolE2 OS=Aliidiomarina sanyensis OX=1249555 GN=folE2 PE=3 SV =1
MPTSMPDIANQAQAQTEGSLDWVGMSNIEMPVMVASESGLPQQVGARIEAFVSLDDPKAKGIHMSRLYLAVDELANDDVLSASSVRRLLDRFVETHDDLSTKAHVSFAFEYLLRRKSLISGKQGWKGYPVSVSATFNGKEYDIELKIGVTYSSTCPCSAALARQLIQEAFQKRFKDAEVNAEDVKAWLGTTEGIVATPHSQRSLAEVQVKLRDDVDILPIVAMIDRIESSLKTPVQAAVKREDEQEFARLNGQNLMFCEDAARRLQHELNKVSTVLDFKIRVNHYESLHAHDAVSVTTKGITGGYRP

SEQ ID NO: 4321 - protein, 307 aa, Aliidiomarina shirensis
  misc_feature (1)..(307): tr|A0A432WUM5|A0A432WUM5_9GAMM GTP cyclohydrolase FolE2 OS=Aliidiomarina shirensis OX=1048642 GN=folE2 PE=3 SV =1
MPTSMPDIANQAQAHIEGTLDWVGMSNIEMPFMVASESGLPQQVAARVEAFVSLDDAKAKGIHMSRLYLAVDELANDDVLSGSSIRKLLDYFIESHNDISQQARVSFAFEYLLRRKSLVSGKQGWKGYPVTISAVRNNGKTELEMQVGITYSSTCPCSAALARQLIQEAFQKQFHDEDLNIDDVVAWLGTTDGIVATPHSQRSLADIKVKLSDDTDILPIVAMIDRVEAALKTPVQAAVKREDEQEFARLNGQNLMFCEDAARLLQYELSKNSTILDFWIRVNHYESLHAHDAVSITTKGITGGYRA

SEQ ID NO: 4322 - protein, 308 aa, Aliidiomarina soli
  misc_feature (1)..(308): tr|A0A432WC52|A0A432WC52_9GAMM GTP cyclohydrolase FolE2 OS=Aliidiomarina soli OX=1928574 GN=folE2 PE=3 SV=1
MPTSMPDIANQDSAQTMGTLDWVGMSNIEMPLLVTVPGQPDRQVSAKVDAFVSLDDSQAKGIHMSRLYLAVDELSASGSLQPAQLHTLLKTFISSHADLSSQAMVRFHFDYHLRRKSLISKKQGWKAYPVTLQAILSDQGLDIELGVAVPYSSTCPCSAALARQLIQDAFNQRFDEDSMDKESVLAWLGTTEGVPATPHSQRSIADIKVKLQAEHNDLPIEELIDAIENTLKTPVQAAVKREDEQEFARLNGQNLMFCEDAARRVKHTLNQNSHIRDFWIRINHYESLHAHDAVSITTKGIPNGYSPR

SEQ ID NO: 4323 - protein, 307 aa, Aliidiomarina sp.
  misc_feature (1)..(307): tr|A0A552X5S1|A0A552X5S1_9GAMM GTP cyclohydrolase FolE2 OS=Aliidiomarina sp. IM1326 OX=2593535 GN=folE2 PE=3 S V=1
MPTSMPDIANQAQAQTEGSLDWVGMSNIEMPVMIASEAGLPQQVGARIEAFVSLDDPKAKGIHMSRLYLAVDELANDDVLSASSIRRLLDRFIETHDDLSSKARVMFSFEYLLRRKSLVSGKQGWKGYPVTVAATFNGSGYDVELSVNATYSSTCPCSAALARQLIQEAFKKRFQEQEVSAEEVAAWLGTTEGIVATPHSQRSVAEVKVKLSNDVDILPIVALIDRIEGTLKTPVQAAVKREDEQEFARLNGQNLMFCEDAARRLQHELNKLPTVLDFRVRVNHYESLHAHDAVSVTTKGISGGYRP

SEQ ID NO: 4324 - protein, 308 aa, Aliidiomarina taiwanensis
  misc_feature (1)..(308): tr|A0A432X808|A0A432X808_9GAMM GTP cyclohydrolase FolE2 OS=Aliidiomarina taiwanensis OX=946228 GN=folE2 PE=3 S V=1
MSTTMPDIAAELSTQHLGTLDWVGMSEIDMPLMLLDEQNNEHRISARIDAYVSLDVADAKGIHMSRLYLALEQLSAEGHVSISSLRSLLESFLATHQGLSQSARVVLRFDYHLRRPSLLSGNVGWKAYPVELNAEMIEGQFHCDLSLDVTYSSTCPCSAALARQLIQDAFQQKFADTAQLSKEDVTEWLGTTEGIVATPHSQRSVAEMKVRLTEDAQQLPLVTLIDSAEEALKTPVQAAVKREDEQEFARLNGQNNMFCEDAARILKHRLNNTDFVADFRVRVNHYESLHAHDAVSIVTKGLTNGFKP

SEQ ID NO: 4325 - protein, 299 aa, Aliifodinibius roseus
  misc_feature (1)..(299): tr|A0A1M5BEB8|A0A1M5BEB8_9BACT GTP cyclohydrolase FolE2 OS=Aliifodinibius roseus OX=1194090 GN=folE2 PE=3 SV=1
MISTTLKRYYDPTFTVSEDYKDSLPDLQNGPASLIEGANVPIQQVGISDFKLPLKYPRPDGELITLETSVEGYVGLEAGKKGINMSRIIRRFYDFRDEVFHPDMLRDILETYIEQLDSNAAYLKLSFNYPILQESLRSDLEGYQYYETAIEGVLSADGEFHKFMHLDFEYSSACPCSYELSEHARDKRGVASIPHSQRSVASLTVELDESIFVEDLVDHCRQALMTETQVMVKREDEQAFAEMNGAFQKFVEDAARLLYEELNRDKNILDFVIRCAHMESLHSHDAVSRICKGVPNGLR

SEQ ID NO: 4326 - protein, 202 aa, Aliifodinibius roseus
  misc_feature (1)..(202): tr|A0A1M5K7D5|A0A1M5K7D5_9BACT GTP cyclohydrolase 1 OS= Aliifodinibius roseus OX=1194090 GN=folE PE=3 SV=1
MEKILNGIDKDIKDLSEQEKIEYIQFYFSKIMQVLELDLTDDTFEDTPRRVAEMYVNEIFSGLNDDNFPEMTAFENSYEYSGMLIEKDITLFSYCAHHFVPIIGKAHVAYYPSEKVVGLSKINRLVHHFARRPQVQEKLTMEIADALKDSLETDDIAILIEADHLCVASRGVKDTNSTTQTSYYSGKFEKAEIRKEFLTSIE

SEQ ID NO: 4327 - protein, 299 aa, Aliifodinibius sediminis
  misc_feature (1)..(299): tr|A0A521BA26|A0A521BA26_9BACT GTP cyclohydrolase FolE2 OS=Aliifodinibius sediminis OX=1214077 GN=folE2 PE=3 S V=1
MISTTLKRYYDPTFTVSEDYKESLPDLQNGPASLIEGANVPIQQVGISDFKLPLKYPRPDGEIITLETSVGGYVGLEAGKKGINMSRIIRRFYDFKDEVFHPEMLREVLEAYIESLDSNSAYLKLSFNYPILQESLRSGLEGYQYYETAIEGVLSSDGEFHTYMHLDFEYSSACPCSFELAEHARDNRGVATVPHSQRSVASLTVELDESIFVEDLVNHCRKALMTETQVMVKREDEQAFAEMNGAFQKFVEDAARLLYEELNEQDKIRDFVIRCAHLESLHSHDAVSRICKGVPNGLR

SEQ ID NO: 4328 - protein, 202 aa, Aliifodinibius sediminis
  misc_feature (1)..(202): tr|A0A521ES00|A0A521ES00_9BACT GTP cyclohydrolase 1 OS= Aliifodinibius sediminis OX=1214077 GN=folE PE=3 SV=1
MEKILNGIDKDLNNLSEQEKVEYIQFYFSKIMQVLELDLTDDTFEDTSRRVAEMYVNEIFSGLNDDNFPEMTAFDNSYKYSGMLIEKDITLFSYCAHHFVPIIGKAHVAYYPSEKVVGLSKINRLVQHFARRPQVQEKLTMEIADALKDSLETDDIAILIEADHLCVASRGVKDTNSTTQTSYYSGKFEKAEIRKEFLTSIE

SEQ ID NO: 4329 - protein, 299 aa, Aliifodinibius sp.
  misc_feature (1)..(299): tr|A0A2A2G8G6|A0A2A2G8G6_9BACT GTP cyclohydrolase FolE2 OS=Aliifodinibius sp. WN023 OX=2032627 GN=folE2 PE=3 S V=1
MISTKLKRHYDPTFTVSDDYKASLPDLQNGPASLIEGADVPIQQVGISNFKLPLKYPRPDGELLTLETSVDGYVGLEAGKKGINMSRIMRSFYNFEDDVFHPDKLEEILKTYREELNTQTAYLRLSFNYPIKQESLRSGLEGYQYYTVSIEGTMDADGQFRKFMHLDFEYSSACPCSYELSEHARETREVASIPHSQRSIANLTVELNEEIFVEDLVNHCREALMTETQVMVKREDEQAFAEMNGAYQKFVEDAARLLYEQLNDEGRIHDFVIRCTHMESLHSHDAVSRICKGVKNGLR

SEQ ID NO: 4330 - protein, 184 aa, Aliiglaciecola lipolytica
  misc_feature (1)..(184): tr|K6YUT5|K6YUT5_9ALTE GTP cyclohydrolase 1 OS=Aliiglac iecola lipolytica E3 OX=1127673 GN=folE PE=3 SV=1
MSQELQDHYANILEILGEDTTREGLVDTPKRAAKAMQFLTDGYQKDIQGVVNGAIFEADTDEMVIIQDIEYYSLCEHHVLPFIGRCHIAYLPDGKVLGLSKFARIVDMFARRLQIQEGLTKQIADAVLEVTGAKGVGVIMEGKHMCMMMRGVQKQNSSMITSVMLGSFRTSPATRNEFLRLIGK

SEQ ID NO: 4331 - protein, 225 aa, Aliiglaciecola sp.
  misc_feature (1)..(225): tr|A0A553LAE2|A0A553LAE2_9ALTE GTP cyclohydrolase 1 OS= Aliiglaciecola sp. M165 OX=2593649 GN=folE PE=3 SV=1
MLNTQVVSVREALSDQAIAVRNALTEQGLETPMRETGLSDAEKRAKIQAAMGDIMRTLGLDLNDDSLCDTPSRIAKMYVDEIFSGLDYRRFPKITAIENKMNTQEMVKVSDISLTSTCEHHFVTIDGTANVAYIPKDKVLGLSKINRLVDFFSQRPQVQERLTQQVLLAIQTIVGTEDVAITINATHYCVKARGVRDNTSYTKTSALGGVFQNDPNMRAEFFAKD

SEQ ID NO: 4332 - protein, 200 aa, Aliiglaciecola sp.
  misc_feature (1)..(200): tr|A0A553L5C3|A0A553L5C3_9ALTE GTP cyclohydrolase 1 OS= Aliiglaciecola sp. M165 OX=2593649 GN=folE PE=3 SV=1
MIAHDKRLSSSRENSLMSDKLTHHYSQILSILGEDVNREGLLDTPKRAAKAMKFLTDGYQKELKDVINDAIFEADTDEMVIVQDIEYYSLCEHHVLPFIGRCHIAYIPNGKVLGLSKFARIVDMYARRLQIQEGLTKQIADAVQEVTGAKGVGVVMEGKHMCMMMRGVQKQNSSMITSVMLGSFRNSQATRTEFLRLIGK

SEQ ID NO: 4333 - protein, 212 aa, Aliikangiella marina
  misc_feature (1)..(212): tr|A0A545T7F8|A0A545T7F8_9GAMM GTP cyclohydrolase 1 OS= Aliikangiella marina OX=1712262 GN=folE PE=3 SV=1
MISPEAKLVQQTLIEKGLETPLIETNLTSEEKYARIRGFFSEIVATLGLDLTDDSLAETPHRIAKMYVDEIFSGLDYSNFPKIAVIDNKMKVDEMVKVSNIDLTSTCEHHFVTIDGSATVAYIPTNKIIGLSKINRIVGFFAQRPQVQERLTQQVLIALQTLLETDNVAVSIKATHYCVKSRGIKDVNSETSTTALGGIFKSNVHTRAEFFN

SEQ ID NO: 4334 - protein, 183 aa, Aliikangiella marina
  misc_feature (1)..(183): tr|A0A545TDF7|A0A545TDF7_9GAMM GTP cyclohydrolase 1 OS= Aliikangiella marina OX=1712262 GN=folE PE=3 SV=1
MNEKLTTLYSEILTELGEDPSREGLLDTPKRAAKAMQFLTQGYHQSLDEVVNGAIFESDNDEMVIVKDIELYSMCEHHLLPFIGKCHVAYLPTGKVIGLSKIARIVDMFGRRLQIQENMTKQIAQAIMQVTNAAGVGVIVEAKHMCMMMRGVEKQNSTMTTSVMLGAFREKSKTRAEFLNLIR

SEQ ID NO: 4335 - protein, 183 aa, Aliikangiella sp.
  misc_feature (1)..(183): tr|A0A545U613|A0A545U613_9GAMM GTP cyclohydrolase 1 OS= Aliikangiella sp. M105 OX=2592383 GN=folE PE=3 SV=1
MSDKLAGYYENILSELGEDLERDGLKDTPQRAAKAMQFLTRGYHQNLEEVVNGAIFESDNDEMVIVKDIELYSLCEHHLLPFIGKCHVAYLPTGKVIGLSKIARIVDMFGRRLQIQENMTKQIAEAIMEVTEASGVGVIIEAKHMCMMMRGVEKQNSVMSTSVMLGAFRSKPATRAEFLTLVK

SEQ ID NO: 4336 - protein, 368 aa, Aliiroseovarius crassostreae
  misc_feature (1)..(368): tr|A0A0N8IBM3|A0A0N8IBM3_9RHOB GTP cyclohydrolase FolE2 OS=Aliiroseovarius crassostreae OX=154981 GN=folE2 PE= 3 SV=1
MNQMKRGSKNNVDRASAEEALATLRAWAEAADPVEVAALDPSIARLLPGGEVSNYPALRRTYPDEFTPDADYKASMPDLQNGPASLIQGAKRHIQHVGISNFRLPIRYHTRDGSDLTLETSVTGTVSLEAGKKGINMSRIMRSFYAHAEKTFSFDVIEHALDDYKADLESLDARIEMRFSYPAKVESLRSGLMGYQYYDIALELFEHHGKRRKFLHLDYVYSSTCPCSLELSEHARQSRGQLATPHSQRSVARISVEKIHQPGNTLWFEDLIDMCRIAVPTETQVMVKREDEQAFAELNAANPIFVEDATRLFCEQLQLDPRIGDFRVVASHQESLHSHDAVSILTEGETFEAQSLDPKLFSTLFHVG

SEQ ID NO: 4337 - protein, 368 aa, Aliiroseovarius halocynthiae
  misc_feature (1)..(368): tr|A0A545SRA9|A0A545SRA9_9RHOB GTP cyclohydrolase FolE2 OS=Aliiroseovarius halocynthiae OX=985055 GN=folE2 PE= 3 SV=1
MNQMKRKGGDAVDTAQAQDALEVLRNWAAKADPVEVAALDPAIARLLPSADLPNYPELSRIYPDDFAPDADYKASMPDLQNGPASLIQGAKRHIQHVGISNFRLPIRYHTRDGSDVTLETAVTGTVSLEAGKKGINMSRIMRSFYGHAEKTFSFDVIEAALDDYKTDLESLDARIEMRFSYPARVESLRSGLSGYQYYDIALELVEHRGKRRKFIHLDYVYSSTCPCSLELSEHARQMRGQLATPHSQRSVARISVEKIHQPTGTLWFEDLIDLCRIAVPTETQVMVKREDEQAFAELNAANPIFVEDAARLFCEQLQQDDRIGDFRIVASHQESLHSHDAVSILIEGDTFEAESFDPKLFSTLFHVG

SEQ ID NO: 4338 - protein, 368 aa, Aliiroseovarius pelagivivens
  misc_feature (1)..(368): tr|A0A2R8AHW0|A0A2R8AHW0_9RHOB GTP cyclohydrolase FolE2 OS=Aliiroseovarius pelagivivens OX=1639690 GN=folE2 PE =3 SV=1
MNQMKRKGGDAVDTAQAQDALEVLRNWAAKADPVEVAALDPAIARLLPSADLPNYPELSRTYPSDFEPDADYKASMPDLQNGPASLIQGAKRHIQHVGISNFRLPIRYHTRDGSDVTLETSVTGSVSLEAGKKGINMSRIMRSFYGHAEKTFSFDVIEAALDDYKNDLESLDARIEMRFSYPARVESLRSGLSGYQYYDIALELVEHRGKRRKFLHLDYVYSSTCPCSLELSEHARQMRGQLATPHSQRSVARISVEKIHQPSGTLWFEDLIDLCRVAVPTETQVMVKREDEQAFAELNAANPIFVEDAARLFCEQLQQDDRIGDFRIVASHQESLHSHDAVSILIEGDTFEAESLDPKLFSTLFHVG

SEQ ID NO: 4339 - protein, 368 aa, Aliiroseovarius sediminilitoris
  misc_feature (1)..(368): tr|A0A1I0QP27|A0A1I0QP27_9RHOB GTP cyclohydrolase FolE2 OS=Aliiroseovarius sediminilitoris OX=1173584 GN=folE2 PE=3 SV=1
MNQMKRKGGIAPDAAAARDALDVLRDWAAKADPVEVAKLDPAIARLLPGAELPNYPDLNRDYPADFTPDAAYRATMPDLQNGPASLIQGAKRHIQHVGISNFRLPIRYHTRDGADVTLETSVTGTVSLEAGKKGINMSRIMRSFYAHAEKTFSFDVIEAALDDYKTDLESLDARIEMRFSYPARVESLRSGLSGYQYYDIALELVEHRDQRRKFMHLDYVYSSTCPCSLELSEHARQMRGQLATPHSQRSVARISIEKIHQPHHTLWFEDLIDICRNAVPTETQVMVKREDEQAFAEMNAANPIFVEDAARLFCEHLQKDARIGDFRVVASHQESLHSHDAVSILTEGETFEAESLDPKLFSTLFHVG

SEQ ID NO: 4340 - protein, 367 aa, Aliishimia ponticola
  misc_feature (1)..(367): tr|A0A4S4NF23|A0A4S4NF23_9RHOB GTP cyclohydrolase FolE2 OS=Aliishimia ponticola OX=2499833 GN=folE2 PE=3 SV=1
MNIHAPELTTIPERSEAETALETLREWAKRASAAEIAELDPSLSALLPGRSTAPYPALSRSYPDDFTVDEAYKAGLPDLQNGPSSLIRGAKRQIQHVGISNFRLPIRYATRDNGPLMLETSVTGTVSLEAEKKGINMSRIMRSFYKHAEREFSFDVIDAALDDYKADLGSFDARIQMRFSFPMKVESLRSGLSGYQYYDIALELVEQAGLRKKIVHLDYVYSSTCPCSLELSEHARATRGQLATPHSQRSVARISVVLEEDAPCLWFEDLIDACRRAVPTETQAMVKREDEQAFAELNAANPIFVEDAARLFCAQLLADHRVGDFRVIASHQESLHSHDAVSVLTEGPTFAQDSLDPRLFQSLFHIG

SEQ ID NO: 4341 - protein, 217 aa, Aliivibrio finisterrensis
  misc_feature (1)..(217): tr|A0A4Q5KQ60|A0A4Q5KQ60_9GAMM GTP cyclohydrolase 1 OS= Aliivibrio finisterrensis OX=511998 GN=folE PE=3 SV=1
MSSLSESAVLVRDALVARGLETPMKENGVSREEKKERIEEHMREILTLLSLDLSDDSLEETPHRIAKMYVDEIFSGLDYANFPKITVIENKMNCDEMVRVNDITLTSTCEHHLVTIDGKATVAYIPRGKIIGLSKINRIVRFFAQRPQVQERMTQQILVALQTLLGCDDVAITMEATHYCVKSRGVMDATSSTTTTALGGIFKRNPATRHEFLSGIR

SEQ ID NO: 4342 - protein, 217 aa, Aliivibrio finisterrensis
  misc_feature (1)..(217): tr|A0A4Q5KW22|A0A4Q5KW22_9GAMM GTP cyclohydrolase 1 OS= Aliivibrio finisterrensis OX=511998 GN=folE PE=3 SV=1
MSSLSESAVLVRDALVARGLETPMKENGVSREEKKERIEEHMREILTLLSLDLSDDSLEETPHRIAKMYVDEIFSGLDYANFPKITVIENKMNCDEMVRVNDITLTSTCEHHLVTIDGKATVAYIPRGKIIGLSKINRIVRFFAQRPQVQERMTQQILVALQTLLGSDDVAITMEATHYCVKSRGVMDATSSTTTTALGGIFKRNPATRHEFLSGIR

SEQ ID NO: 4343 - protein, 217 aa, Aliivibrio fischeri
  misc_feature (1)..(217): sp|Q5E4E4|GCH1_ALIF1 GTP cyclohydrolase 1 OS=Aliivibrio fischeri (strain ATCC 700601 / ES114) OX=312309 GN=fol E PE=3 SV=1
MSSLSESAILVRDALVARGLETPMKENGVSREEKKERIEEHMREILTLLSLDLSDDSLEETPHRIAKMYVDEIFSGLDYANFPKITVIENKMNCDEMVRVNDITLTSTCEHHLVTIDGKATVAYIPRGKIIGLSKINRIVRFFAQRPQVQERMTQQILVALQTLLGSDDVAITMEATHYCVKSRGVMDATSSTTTTALGGIFKRNPATRHEFLSGIR

SEQ ID NO: 4344 - protein, 217 aa, Aliivibrio fischeri; identical to SEQ ID NO: 4343
  misc_feature (1)..(217): tr|A0A1B9PJB7|A0A1B9PJB7_ALIFS GTP cyclohydrolase 1 OS= Aliivibrio fischeri OX=668 GN=folE PE=3 SV=1

SEQ ID NO: 4345 - protein, 217 aa, Aliivibrio logei
  misc_feature (1)..(217): tr|A0A1B9NUC5|A0A1B9NUC5_ALILO GTP cyclohydrolase 1 OS= Aliivibrio logei OX=688 GN=folE PE=3 SV=1
MSSFSESAILVRDALVARGLETPMKENGISREEKKERIEEHMREILSLLTLDLSDDSLEETPHRIAKMYVDEIFSGLDYANFPKITVIENKMNCDEMVRVNDITLTSTCEHHLVTIDGKATVAYIPREKIIGLSKINRIVRFFAQRPQVQERMTQQILVALQTLLGSDDVAITMEATHYCVKSRGVMDATSSTTTTALGGIFKRNPATRHEFLSGIR

SEQ ID NO: 4346 - protein, 217 aa, Aliivibrio salmonicida; identical to SEQ ID NO: 4345
  misc_feature (1)..(217): sp|B6EGN8|GCH1_ALISL GTP cyclohydrolase 1 OS=Aliivibrio salmonicida (strain LFI1238) OX=316275 GN=folE PE=3 SV =1

SEQ ID NO: 4347 - protein, 217 aa, Aliivibrio sifiae
  misc_feature (1)..(217): tr|A0A2S7XDR5|A0A2S7XDR5_9GAMM GTP cyclohydrolase 1 OS= Aliivibrio sifiae OX=566293 GN=folE PE=3 SV=1
MSSFSESAILVRDALIARGLETPMKENGISREEKKERIEDHMREILTLLSLDLSDDSLEETPHRIAKMYVDEIFSGLDYANFPKITVIENKMNCDEMVRVNDITLTSTCEHHLVTIDGKATVAYIPRQKIIGLSKINRIVRFFAQRPQVQERMTQQILVALQTLLGSDDVAITMEATHYCVKSRGIMDATSSTTTTALGGIFKRNPATRHEFLSGIR

SEQ ID NO: 4348 - protein, 217 aa, Aliivibrio sifiae
  misc_feature (1)..(217): tr|A0A2S7XHA6|A0A2S7XHA6_9GAMM GTP cyclohydrolase 1 OS= Aliivibrio sifiae OX=566293 GN=folE PE=3 SV=1
MSSFSESAILVRDALIARGLETPMKENGISREEKKERIEEHMREILTLLSLDLSDDSLEETPHRIAKMYVDEIFSGLDYANFPKITVIENKMNCDEMVRVNDITLTSTCEHHLVTIDGKATVAYIPRQKIIGLSKINRIVRFFAQRPQVQERMTQQILVALQTLLGSDDVAITMEATHYCVKSRGVMDATSSTTTTALGGIFKRNPATRHEFLNGIR

SEQ ID NO: 4349 - protein, 217 aa, Aliivibrio sp.
  misc_feature (1)..(217): tr|A0A1B9PN67|A0A1B9PN67_9GAMM GTP cyclohydrolase 1 OS= Aliivibrio sp. 1S175 OX=1840087 GN=folE PE=3 SV=1
MSSFSESAILVRDALIARGLETPMKENGISREEKKERIEEHMREILTLLSLDLSDDSLEETPHRIAKMYVDEIFSGLDYANFPKITVIENKMNCDEMVRVNDITLTSTCEHHLVTIDGKATVAYIPRQKIIGLSKINRIVRFFAQRPQVQERMTQQILVALQTLLGSDDVAITMEATHYCVKSRGVMDATSSTTTTALGGIFKSIPATRHEFLSGIR

SEQ ID NO: 4350 - protein, 217 aa, Aliivibrio wodanis
  misc_feature (1)..(217): tr|A0A090KJR0|A0A090KJR0_9GAMM GTP cyclohydrolase 1 OS= Aliivibrio wodanis OX=80852 GN=folE PE=3 SV=1
MSSLSESAILVRDALVARGLETPMKENGISREEKKERIEEHMREILTLLSLDLTDDSLEETPHRIAKMYVDEIFSGLDYSNFPKITVIDNKMNCDEMVRVNDITLTSTCEHHLVTIDGKATIAYIPREKIIGLSKINRIVRFFAQRPQVQERMTQQILVALQTLLGSDDVAITMEATHYCVKSRGVMDATSSTTTTALGGIFKRNPATRHEFLSGIR

SEQ ID NO: 4351 - protein, 213 aa, Alishewanella aestuarii
  misc_feature (1)..(213): tr|J1QFR8|J1QFR8_9ALTE GTP cyclohydrolase 1 OS=Alishewa nella aestuarii B11 OX=1197174 GN=folE PE=3 SV=1
MLTEEAMLVRSALEARGLETPMRDNGLSRDQKYQKINQLMTEIVQTLGLDLNDDSLRETPHRIAKMYVDEVFGGLDYRNFPKIALIENKMQVSEMVKVKDISFTSTCEHHFVTIDGSATVAYIPAKKIIGLSKINRIVRFFAQRPQVQERLTQQILIALQALLETDNVAVTMDAVHYCVKSRGVMDVNSKTQTTALGGIFKDDARTRAEFLAC

SEQ ID NO: 4352 - protein, 213 aa, Alishewanella agri
  misc_feature (1)..(213): tr|I9NY51|I9NY51_9ALTE GTP cyclohydrolase 1 OS=Alishewa nella agri BL06 OX=1195246 GN=folE PE=3 SV=1
MLTEEAMLVRSALEARGLETPMRDNGLSRDQKYQKINQLMTEIVQTLGLDLNDDSLSETPHRIAKMYVDEVFGGLDYRNFPKIALIENKMQVSEMVKVKDISFTSTCEHHFVTIDGSATVAYIPAKKIIGLSKINRIVRFFAQRPQVQERLTQQILIALQALLETDNVAVTMDAVHYCVKSRGVMDVNSKTQTTALGGIFKDDARTRAEFLAR

SEQ ID NO: 4353 - protein, 213 aa, Alishewanella jeotgali
  misc_feature (1)..(213): tr|H3ZBR5|H3ZBR5_9ALTE GTP cyclohydrolase 1 OS=Alishewa nella jeotgali KCTC 22429 OX=1129374 GN=folE PE=3 SV=1
MLTEEAMLVRSALEARGLETPMRDNGLSRDQKYQKISQLMTEIVETLGLDLTDDSLSETPHRIAKMYVDEVFSGLVYSNFPKIALIENKMQVSEMVKVKDISFTSTCEHHFVTIDGSATVAYIPGKKIIGLSKINRIVRFFAQRPQVQERLTQQVLIALQALLETDNVAVTMDAVHYCVKSRGVMDVNSKTQTTALGGIFKEDARTRAEFLAR

SEQ ID NO: 4354 - protein, 213 aa, Alishewanella sp.; identical to SEQ ID NO: 4353
  misc_feature (1)..(213): tr|A0A1C2BZN0|A0A1C2BZN0_9ALTE GTP cyclohydrolase 1 OS= Alishewanella sp. HH-ZS OX=1856684 GN=folE PE=3 SV=1

SEQ ID NO: 4355 - protein, 213 aa, Alishewanella sp.
  misc_feature (1)..(213): tr|A0A0T5PJS4|A0A0T5PJS4_9ALTE GTP cyclohydrolase 1 OS= Alishewanella sp. WH16-1 OX=1651088 GN=folE PE=3 SV=1
MLTEEAMLVRSALEARGLETPMHDNGLSRDQKYQKINQLMTEIVQTLGLDLNDDSLRETPHRIAKMYVDEVFGGLDYRNFPKIALIENKMQVSEMVKVKDISFTSTCEHHFVTIDGSATVAYIPAKKIIGLSKINRIVRFFAQRPQVQERLTQQILIALQALLETDNVAVTMDAVHYCVKSRGVMDVNSKTQTTALGGIFKDDARTRAEFLAR

SEQ ID NO: 4356 - protein, 202 aa, Alistipes finegoldii
  misc_feature (1)..(202): tr|A0A173WGT2|A0A173WGT2_9BACT GTP cyclohydrolase 1 OS= Alistipes finegoldii OX=214856 GN=folE PE=3 SV=1
MEERNYNKVERFDAKAIEELKHHYTEILRLLGEDPAREGLQKTPERVAKAMSFLTKGYDENPLEIIRSATFREEYKQMVLVKDIELYSLCEHHMLPFYGKAHVAYIPNGHITGLSKIARVVECFARRLQVQERLTVQIRDCIQEALNPMGVAVVIEASHMCMQMRGIEKQQSATTTSAFTGIFLSDHRTREEFMTLISHRYR

SEQ ID NO: 4357 - protein, 202 aa, Alistipes finegoldii
  misc_feature (1)..(202): tr|I3YLH9|I3YLH9_ALIFI GTP cyclohydrolase 1 OS=Alistipe s finegoldii (strain DSM 17242 / JCM 16770 / AHN 2437 / CCUG 46020 / CIP 107999) OX=679935 GN=folE PE=3 SV=1
MEERTYNKEERFDARTIEALKLHYAEILRLLGEDPSREGLLKTPERVAKAMAFLTKGYEENPLEIIRSATFREEYKQMVLVKDIELYSLCEHHMLPFYGKAHVAYIPNGHITGLSKIARVVECYARRLQVQERLTVQIRDCIQEALNPMGVAVVIEASHMCMQMRGIEKQQSATTTSAFTGIFLSDHRTREEFMTLISHKYR

SEQ ID NO: 4358 - protein, 198 aa, Alistipes indistinctus
  misc_feature (1)..(198): tr|A0A412SDP4|A0A412SDP4_9BACT GTP cyclohydrolase 1 OS= Alistipes indistinctus OX=626932 GN=folE PE=3 SV=1
MESNYEKEELFSPEKVAALAGHYKAILELLGEDASREGLLKTPERVAKAMSFLTQGYGQDPKEILLSAKFKEEYKQMVIVKDIELYSMCEHHMIPFYGKAHVAYIPNGYITGLSKIARVVEAFARRLQVQERLTVQIRDCIQQALNPLGVAVVIEASHMCMQMRGVQKQNCSTTTSAFTGAFLTQMQTREEFIQLIGK

SEQ ID NO: 4359 - protein, 289 aa, Alistipes indistinctus
  misc_feature (1)..(289): tr|G5H7G6|G5H7G6_9BACT GTP cyclohydrolase 1 OS=Alistipe s indistinctus YIT 12060 OX=742725 GN=folE PE=3 SV=1
MEIGRNTYFGVSINAYAPVDQTADVSSDVTVDGSERIRYRGGIGRIAIQRIYPYLCRTGAFRTRLPALFGRCMVCVSGVDEVVSAGVKFIPMESNYEKEELFSPEKVAALAGHYKAILELLGEDASREGLLKTPERVAKAMSFLTQGYGQDPKEILLSAKFKEEYKQMVIVKDIELYSMCEHHMIPFYGKAHVAYIPNGYITGLSKIARVVEAFARRLQVQERLTVQIRDCIQQALNPLGVAVVIEASHMCMQMRGVQKQNCSTTTSAFTGAFLTQMQTREEFIQLIGK

SEQ ID NO: 4360 - protein, 201 aa, Alistipes inops
  misc_feature (1)..(201): tr|A0A0B0BXV0|A0A0B0BXV0_9BACT GTP cyclohydrolase 1 OS= Alistipes inops OX=1501391 GN=folE PE=3 SV=1
MDKLYEREDIYDVRTVEELAGHYKRILELLGEDTSREGLLKTPERVAKAMAFLTKGYGEDPKEILLSAKFREDYRHMVVVKDIELYSMCEHHMLPFYGKAHVAYIPNGYITGLSKVARVVECFARRFQVQERLTVQIRDCIQEALDPMGVAVVIEAAHTCMQMRGIQKQNSVTTTSAFTGAFLKNQNTRQEFLQIISSNLR

SEQ ID NO: 4361 - protein, 165 aa, Alistipes obesi
  misc_feature (1)..(165): tr|A0A3D3YLD8|A0A3D3YLD8_9BACT GTP cyclohydrolase 1 (Fr agment) OS=Alistipes obesi OX=1118061 GN=folE PE=3 SV=1
MEKKLYEKQEIYDPATIAELSEHYAAILRLLGEDPTREGLLKTPERVAKAMAFMTKGYAEDPRDILLSAMFREEYRQMVLVRDIEVYSLCEHHMLPFYGKAHVAYIPDGYITGLSKVARVVECFARRLQVQERLTVQIRDCIHEALHPLGVAVVIEASHMCMQMR

SEQ ID NO: 4362 - protein, 196 aa, Alistipes onderdonkii
  misc_feature (1)..(196): tr|A0A4V1Z0F3|A0A4V1Z0F3_9BACT GTP cyclohydrolase 1 OS= Alistipes onderdonkii OX=328813 GN=folE PE=3 SV=1
MEAITPNAEDIIGALKTLIRAIGEDPDREGLIGTPDRIMRMWKEIFRGYDPAQKPKITTFANEEGMSDIVFDCGDYYSMCEHHILPFFGRYYFAYIPSPKGRILGISKVARVVGYCAARLQLQERLARDIVQMLSEALNNEALGFAIVMKGQHLCKTMRGVRNDGKMSVAHFTGVFNLNSDLRKEFYKLIDLNSNG

SEQ ID NO: 4363 - protein, 202 aa, Alistipes onderdonkii
  misc_feature (1)..(202): tr|A0A1Y3QTC8|A0A1Y3QTC8_9BACT GTP cyclohydrolase 1 OS= Alistipes onderdonkii OX=328813 GN=folE PE=3 SV=1
MEERNYNKEERFDAKTIEVLKHHYTEILRLLGEDPAREGLQKTPERVAKAMSFLTKGYDENPLEIIRSATFREEYKQMVLVKDIELYSLCEHHMLPFYGKAHVAYIPNGHITGLSKIARVVECFARRLQVQERLTVQIRDCIQEALNPMGVAVVIEASHMCMQMRGIEKQQSATTTSAFTGIFLSDHRTREEFMTLISHRYR

SEQ ID NO: 4364 - protein, 202 aa, Alistipes putredinis
  misc_feature (1)..(202): tr|R7JG80|R7JG80_9BACT GTP cyclohydrolase 1 OS=Alistipe s putredinis CAG:67 OX=1263036 GN=folE PE=3 SV=1
MEMKRYQKEENFSPEKIAKLREHYKAILELLGEDPAREGLLKTPERVAKAMSFLTQGYEDDPLAIIRSATFKEEYRQMVLVKDIELYSLCEHHMLPFYGKAHVAYIPNGYITGLSKIARVVESFARRLQVQERLTVQIRDCIQEALNPMGVAVVIEASHMCMQMRGVEKQGSATTTSAFTGVFLSHPPTRQEFMTLISNKYR

SEQ ID NO: 4365 - protein, 202 aa, Alistipes putredinis; identical to SEQ ID NO: 4364
  misc_feature (1)..(202): tr|B0MY26|B0MY26_9BACT GTP cyclohydrolase 1 OS=Alistipe s putredinis DSM 17216 OX=445970 GN=folE PE=3 SV=1

SEQ ID NO: 4366 - protein, 202 aa, Alistipes shahii
  misc_feature (1)..(202): tr|D4IM53|D4IM53_9BACT GTP cyclohydrolase 1 OS=Alistipe s shahii WAL 8301 OX=717959 GN=folE PE=3 SV=1
MELKNYDKEERFDPATVEALKGHYTEILRLLGEDPAREGLLKTPERVAKAMSFLTKGYDENPLEIIRSATFREEYKQMVLVKNIELYSMCEHHMLPFYGKAHVAYIPNGRITGLSKIARVVECFARRLQVQERLTVQIRDCIQEALNPMGVAVVIEASHMCMQMRGIEKQQSATTTSAFTGIFLSDHRTREEFMTLISHRYR

SEQ ID NO: 4367 - protein, 202 aa, Alistipes shahii
  misc_feature (1)..(202): tr|A0A5B3GL55|A0A5B3GL55_9BACT GTP cyclohydrolase 1 OS= Alistipes shahii OX=328814 GN=folE PE=3 SV=1
METKNYDKEERFDPATVEALKLHYAEILRLLGEDPAREGLLKTPERVAKAMAFLTKGYDENPLDIIRSAMFREEYRQMVLVKDIELYSLCEHHMLPFYGKAHVAYIPNGYITGLSKVARVVECFARRLQVQERLTVQIRDCIQEALNPMGVAVVIEASHMCMQMRGIEKQQSATTTSAFTGVFLSSQRTREEFMTLISHRYR

SEQ ID NO: 4368 - protein, 202 aa, Alistipes sp.; identical to SEQ ID NO: 4367
  misc_feature (1)..(202): tr|A0A1Q6EAT6|A0A1Q6EAT6_9BACT GTP cyclohydrolase 1 OS= Alistipes sp. 56_sp_Nov_56_25 OX=1896969 GN=folE PE=3 S V=1

SEQ ID NO: 4369 - protein, 202 aa, Alistipes sp.
  misc_feature (1)..(202): tr|A0A4Y1X0M9|A0A4Y1X0M9_9BACT GTP cyclohydrolase 1 OS= Alistipes sp. 5CPEGH6 OX=2585119 GN=folE PE=3 SV=1
MEGRNYTKEERFDAGRVEALKHHYAEILRLLGEDPAREGLLKTPERVAKAMAFLTKGYDEDPLEIIRSATFREEYRQMVLVKDIELYSLCEHHMLPFYGKAHVAYIPNGRITGLSKIARVVECFARRLQVQERLTVQIRDCIQEALDPMGVAVVIEASHMCMQMRGIEKQQSATTTSAFTGVFLSSQRTREEFMTLISHRYR

SEQ ID NO: 4370 - protein, 202 aa, Alistipes timonensis
  misc_feature (1)..(202): tr|A0A1H4BBI9|A0A1H4BBI9_9BACT GTP cyclohydrolase 1 OS= Alistipes timonensis JC136 OX=1033731 GN=folE PE=3 SV=1
MEMKNYDKEERFDPATIEALKLHYAEILRLLGEDPAREGLLKTPERVAKAMSFLTKGYDENPLEIIRSATFREEYRQMVLVKDIELYSLCEHHMLPFYGKAHVAYIPNGYITGLSKVARVVECFARRLQVQERLTVQIRDCIQEALNPMGVAVVIEASHMCMQMRGIEKQQSATTTSAFTGVFLSSQRTREEFMTLISHRYR

SEQ ID NO: 4371 - protein, 234 aa, Aliterella atlantica
  misc_feature (1)..(234): tr|A0A0D8ZTE1|A0A0D8ZTE1_9CYAN GTP cyclohydrolase 1 OS= Aliterella atlantica CENA595 OX=1618023 GN=folE PE=3 SV =1
MTNSASDRGRESMDGLNSLNRGVSTRPDRNTQNGKQPNIQPPTEELNEPMMEAVRTLLLGVGEDPEREGLLKTPKRVAEAMRFLTSGYNQSLEELVNGAIFDEGHNEMVLVRDINTFSLCEHHMLPFMGRAHVAYIPNQKVVGLSKLARIVEMYSRRLQVQERLTRQIAEAVQTILEPKGVAVVIEASHMCMVMRGVQKPGSWTVTSAMIGVFQDEQKTREEFFNLIRHQAAFF

SEQ ID NO: 4372 - protein, 308 aa, Alkalibacillus haloalkaliphilus
  misc_feature (1)..(308): tr|A0A511W1R6|A0A511W1R6_9BACI GTP cyclohydrolase FolE2 OS=Alkalibacillus haloalkaliphilus OX=94136 GN=folE2 P E=3 SV=1
MNETVKKQLPDKQERHKLFGTVEPGPKTKPIEKEQMKDLQNTRKDFLFELDAVGISNVKHPVIVNSSLTPETQTTIGTFYFASSISQDSKGTNMSRFTEQLQTYYENGLVLSLKTLKSFVYELRQRLEQKDAEVTVSFPWFFERKAPYSEKAGLNHADAWIKVHYDQDEGYDIRVGVKGKITTLCPCSKEISEYSAHNQRGNIEMEVLINEDFDEDKLDWKFILLEAAESNASARIHPVLKRPDEKMVTEQAYENPRFVEDMVRLVASDLYEIDEVERFFVKCINEESIHLHDAVASISYDKRDEQSV

SEQ ID NO: 4373 - protein, 188 aa, Alkalibacter saccharofermentans
  misc_feature (1)..(188): tr|A0A1M4TQE8|A0A1M4TQE8_9FIRM GTP cyclohydrolase 1 OS= Alkalibacter saccharofermentans DSM 14828 OX=1120975 GN =folE PE=3 SV=1
MDKERIEKAVREILFAVGENPDREGLVDTPKRIAKMYEEIFSGLNENPADHLEIYFQQEKYEELVLIKDIPFYSVCEHHLVPFFGKAHVGYLPKNGKLTGLSKLARVVETVAKRPQLQERLTATVADTIQRKLEPYGVIVVVEAEHMCMTMRGVKKPGSKTITSAVRGVFESDAKARSEVMSFINFGK

SEQ ID NO: 4374 - protein, 188 aa, Alkalibaculum bacchi
  misc_feature (1)..(188): tr|A0A366IDL7|A0A366IDL7_9FIRM GTP cyclohydrolase 1 OS= Alkalibaculum bacchi OX=645887 GN=folE PE=3 SV=1
MDKKKIEDAVRQILEAIGEDPDREGLIETPKRIAKMYEEIFSGLEQDPGEHLEKIFPGENHEELVLIKDIPFYSMCEHHLVPFFGKAHVGYLPKDGKLTGLSKLARVVETLSKKPQLQERLTSSVADIIMEKLKPYGVIVVIEAEHMCMTMRGVKKPGSKTITSAVRGGFATDAKARAEVMSFINWRN

SEQ ID NO: 4375 - protein, 187 aa, Alkalicoccus halolimnae
  misc_feature (1)..(187): tr|A0A5C7FH26|A0A5C7FH26_9BACI GTP cyclohydrolase 1 OS= Alkalicoccus halolimnae OX=1667239 GN=folE PE=3 SV=1
MAQVDHEKIEQAVTMILEAVGEDPKREGLEDTPKRVARMYEEIFQGLKQDPKEHFKTVFGEDHEELVLVKDIPFYSTCEHHLVPFFGKVHIGYLPKGGKVTGLSKMARAVEAVTKRPQLQERITSTIADSMVETLNPLGVIVIVEAEHMCMTMRGVKKPGSQTVTSAVRGAFKDNDAARAEVMALIK

SEQ ID NO: 4376 - protein, 187 aa, Alkalicoccus saliphilus
  misc_feature (1)..(187): tr|A0A2T4UB35|A0A2T4UB35_9BACI GTP cyclohydrolase 1 OS= Alkalicoccus saliphilus OX=200989 GN=folE PE=3 SV=1
MTHINHQKIEEAVTMILEAVGEDPGREGLQDTPKRVARMYEEIFQGLHQDPKEHFKTIFGEDHEELVLVKDIPFYSMCEHHLVPFFGKAHIGYLPQGGKVTGLSKLARAVEAVTKRPQLQERITSTIADSLVETLEPQGVMVIVEAEHMCMTMRGVKKPGSSTITSAVRGVFREDEAARSEVLSLIK

SEQ ID NO: 4377 - protein, 273 aa, Alkalilimnicola ehrlichii
  misc_feature (1)..(273): sp|Q0AA39|GCH4_ALKEH GTP cyclohydrolase FolE2 OS=Alkali limnicola ehrlichii (strain ATCC BAA-1101 / DSM 17681 / MLHE-1) OX=187272 GN=folE2 PE=3 SV=1
MPEAEKLATVSIEDVQARQDSRRIPINKVGIKDIRHPVRVGGRDGQEQHTVANFSMYVNLPQHFKGTHMSRFVQILEGHDTEITVQSFREMLHEVAERLEAESGHIEMAFPLFVRKTAPVTGVQSLMDYQVAFIGEIHEGEPELAIRVVVPVTSLCPCSKEISRYGAHNQRSHVTVTAKTRDLLWVEDLIDLVEEEASCELYGLLKRPDEKYVTERAYENPKFVEDLVRDVAIRLNDEDRVLAYNVTAENFESIHNHSAFAEIEHDKTGEPRR

SEQ ID NO: 4378 - protein, 267 aa, Alkalilimnicola ehrlichii
  misc_feature (1)..(267): tr|A0A3E0X2P4|A0A3E0X2P4_9GAMM GTP cyclohydrolase FolE2 OS=Alkalilimnicola ehrlichii OX=351052 GN=folE2 PE=3 S V=1
MSQAPTVERVAIEDVQSRADTRRIPINKVGIKDIRHPVRVKDRTGHEQHTVAMFNMYVNLPHDFKGTHMSRFVEILNSHDTEITVQSFNEILVEMTERLEAQSGHVEMSFPYFVRKEAPISKVSSLLDYEVSFIGEIHDGKPELWIKVLVPVTSLCPCSKQISERGAHNQRSHVTVSARTRDFVWIEELIDLVEEEASCELYGLLKRPDEKYVTERAYDNPKFVEDMVRDVAARLNADARILAYQVESENFESIHNHSAYALIEHTK

SEQ ID NO: 4379 - protein, 215 aa, Alkalimonas amylolytica
  misc_feature (1)..(215): tr|A0A1H3X022|A0A1H3X022_ALKAM GTP cyclohydrolase 1 OS= Alkalimonas amylolytica OX=152573 GN=folE PE=3 SV=1
MLSEEAIRVRSALEKKGLETPMQETGLSRDQKYQKISALMTEVVQTLGLDLADDSLAETPHRIAKMYVDEIFSGLDYRNFPKVTQIDNKMNVKEMIKVRDIGVSSTCEHHFITIDGTATVAYIPSTKVIGLSKINRIVRFFAQRPQVQERLTEQVLVALQTLLETDNVAVSIEAVHYCVKARGVMDVNSKTQTTALGGSFREDARTRAEFFSRLS

SEQ ID NO: 4380 - protein, 301 aa, Alkalimonas amylolytica
  misc_feature (1)..(301): tr|A0A1H4E903|A0A1H4E903_ALKAM GTP cyclohydrolase FolE2 OS=Alkalimonas amylolytica OX=152573 GN=folE2 PE=3 SV= 1
MQTELPDITQEMVQKTSVVLDEVGMQQLDLLLQLSDGGDAIVQPVKANIGINLPRTDARGIHMSRLYRLLNDFAGQQLCTPANLKQLLQQLLDSHLDCHSDQVVLELSFDRLCKHPALITPGLSGWRRYPVQLRASLSPKGFLLKLQLAVQYSSTCPCSAALSRQLLQQKFLADFSDVALSKANVADWLLQHGSYATPHSQRSVASIELSLAATATGFPISAVIEQAEAALATPVQTAVKRADEQEFARLNGANLMFVEDAARRLAASLRPQYPDVCIEVQHLESLHPHDAYARIHASREF

SEQ ID NO: 4381 - protein, 213 aa, Alkalinema sp.
  misc_feature (1)..(213): tr|A0A251WE39|A0A251WE39_9CYAN GTP cyclohydrolase 1 OS= Alkalinema sp. CACIAM 70d OX=1934309 GN=folE PE=3 SV=1
MSPLTSSLEAELARNALREEGDADYFASMESAVREMLIGVGEDPDREGLLKTPKRVAKAMQFLTSGYSQSLDELLNGAIFDEGHNEMVLVRDINFFSLCEHHMLPFMGRAHVAYIPNQKVVGLSKLARIVEMYSRRLQVQERLTRQIAEALQDVLQPRGVAVVMEATHMCMVMRGVQKPGSWTVTSAMVGCFQEDHKTREEFLNLIRHQPAFF

SEQ ID NO: 4382 - protein, 224 aa, Alkalinema sp.
  misc_feature (1)..(224): tr|A0A251WGS7|A0A251WGS7_9CYAN GTP cyclohydrolase 1 OS= Alkalinema sp. CACIAM 70d OX=1934309 GN=folE PE=3 SV=1
MNYPSMTESSIERSLVEPTADSAIAALKTQAHPPVSDAEMMQAVRTLLIGLGEDPDREGLRDTPKRVVKALQFLTQGYHQSLDELLNGAVFHESTNEMVLVRDIDLFSSCEHHILPIIGRVHVAYIPNGKVIGLSKIARICEMYARRLQVQERLTAQIADALQGLLKPQGVAVVVEATHMCMAMRGVQKPGSWTATSAMKGVFAEDPKTRQEFMSLIQHRPAFH

SEQ ID NO: 4383 - protein, 188 aa, Alkaliphilus metalliredigens
  misc_feature (1)..(188): tr|A6TQ51|A6TQ51_ALKMQ GTP cyclohydrolase 1 OS=Alkaliph ilus metalliredigens (strain QYMF) OX=293826 GN=folE PE =3 SV=1
MDKEKIQRAVRDILEAIGEDPDREGLIDTPKRIAKMYDEIFEGLVADPKDHLDIYFEDEKHEEMVLVKDIPFYSVCEHHLVPFFGKAHVGYIPKGGKLTGLSKLARVVDTVAKRPQLQERLTSMIAETIMDKLDPHGVIVVVEAEHMCMTMRGVKKSGSKTVTSVVRGIFKTDAKARAEAMSLIQFGS

SEQ ID NO: 4384 - protein, 184 aa, Alkaliphilus peptidifermentans
  misc_feature (1)..(184): tr|A0A1G5KKL1|A0A1G5KKL1_9CLOT GTP cyclohydrolase 1 OS= Alkaliphilus peptidifermentans DSM 18978 OX=1120976 GN= folE PE=3 SV=1
MNEGRVMEAIKIILEEIGEDPNREGLKETPKRVMNLFKEIYGHTGINPNEELNTVFSEEHDEMVVVKDIPFHSTCEHHLIPFFGKVHIGYIPNGKIVGLSKLHRLVENTSRRLQVQERMTTMISKAIVDKLSPKGVIVVVNAEHLCISMRGIKKLGSITTTFSSEGVFKNDINLKNDFYHAIKL

SEQ ID NO: 4385 - protein, 273 aa, Alkalispirillum mobile
  misc_feature (1)..(273): tr|A0A498BY08|A0A498BY08_9GAMM GTP cyclohydrolase FolE2 OS=Alkalispirillum mobile OX=85925 GN=folE2 PE=3 SV=1
MPEAEKLATCSIEDVQARQDSRRIPINKVGIKDVRHPVRVGVRDGEEQHTVATFNMYVNLPQHFKGTHMSRFVQILEGHDTEITVQSFREMLHEVAERLEAESGHIEMDFPLFVRKSAPVTGVQSLMDYQVTFIGEIHEGEPELGIRVVVPVTSLCPCSKDISRYGAHNQRSHITVTARTRDLLWVEDLIDLVEEEASCELYALLKRPDEKYVTERAYENPKFVEDLVRDVAIRLNDEDRVLAYNVTAENFESIHNHSAFAEIEHDKTGEPRR

SEQ ID NO: 4386 - protein, 188 aa, Alkalispirillum mobile
  misc_feature (1)..(188): tr|A0A498C807|A0A498C807_9GAMM GTP cyclohydrolase 1 OS= Alkalispirillum mobile OX=85925 GN=folE PE=3 SV=1
MTESIQAAYRQILLDLGEDPDREGLKDTPGRAARAMQYLTRGYHQTLDEVLNGAVFSSDNDEMVIVRNIELYSLCEHHLLPFIGRAHVAYLPDGKVIGLSKVARIVDMYARRLQIQENLTRQIALAIQEVTGGRGVAVYINARHMCMMMRGVEKQNSEMSTSVMLGDFRSNHKTRDEFLQLIRTPSAY

SEQ ID NO: 4387 - protein, 265 aa, Alkalispirochaeta americana
  misc_feature (1)..(265): tr|A0A1N6P479|A0A1N6P479_9SPIO GTP cyclohydrolase FolE2 OS=Alkalispirochaeta americana OX=159291 GN=folE2 PE=3 SV=1
MVDVQNQNDTRRIPLQKVGVRNISHPVTVLDRDHRTQHTVADLALYASLPHDYKGTHMSRFVEVFQRYAGEIRMPRFLDMLQEVRQYLDAERAFGELHFPYFMEKQAPVSRQPSLMNYRCGFSGSVSAQGRQFFVSVAVPVTTLCPCSREISSRGAHNQRGTCTVTAEVQDFFWMEDLIELIESCASAGLYTLLKRVDEKFVTEQAYDHPVFVEDLVREVTTAVEERFRFPWFCVEALNQESIHNHDAYAYVERGRPPLEKPHES

SEQ ID NO: 4388 - protein, 181 aa, Alkalispirochaeta odontotermitis
  misc_feature (1)..(181): tr|A0A0A0E1H6|A0A0A0E1H6_9SPIO GTP cyclohydrolase 1 OS= Alkalispirochaeta odontotermitis OX=1329640 GN=folE PE= 3 SV=1
MEKLIRSLLIEIGENPDREGLCGTPQRVTESWNFLSSGYRSNLEEIVRGAVFKSDSNNMILCKDIEVYSICEHHMLPFFGTCTIGYISKVKIVGVSKLARMVNHFSRRLQLQERLTTDIAKAVMRLVDADGAGVVINAKHMCMTMRGVEKQHSSMTTSSVLGSFHSDPSTRTEFLTLATKC

SEQ ID NO: 4389 - protein, 265 aa, Alkalispirochaeta sphaeroplastigenens
  misc_feature (1)..(265): tr|A0A2S4K0F8|A0A2S4K0F8_9SPIO GTP cyclohydrolase FolE2 OS=Alkalispirochaeta sphaeroplastigenens OX=1187066 GN =folE2 PE=3 SV=1
MVDVQNQNDTRRIPLQKVGVRNISHPVTVLDRDHRQQHTVADLALYASLPHDYKGTHMSRFIEVFQRYAGEIRMPRFLDMLQEVRHHLDAERAFGELHFPYFMEKEAPVSKQSSLMNYRCGFSGSVSARERHFFVSMAVPVTTLCPCSREISSRGAHNQRGTCTVTAEVQEFFWMEDVIELIESCASAGLYTLLKRVDEKFVTEQAYDHPVFVEDLVREVTTALEERFRFPWFSVEALNRESIHNHDAYAYVERGRPPLEKPHES

SEQ ID NO: 4390 - protein, 207 aa, Alkalitalea saponilacus
  misc_feature (1)..(207): tr|A0A1T5BXG5|A0A1T5BXG5_9BACT GTP cyclohydrolase 1 OS= Alkalitalea saponilacus OX=889453 GN=folE PE=3 SV=1
MEFTLNGDNGYIKKESYDDETTQRLSEVYKESLELLGEDTSREGLEKTPLRVAKAMQFLTQGYNMSPEDIIRSAMFREDYQQMVVVKDIELYSLCEHHLLPFFGKAHVAYIPRHHITGLSKVARVVEAFARRLQVQERLTTQIKECIDSTLNPLGVAVVIEAQHMCMQMRGVQKQHSVTTTSDFTGAFLKNMATRGEFFNIIGSKLH

SEQ ID NO: 4391 - protein, 185 aa, Alkanindiges illinoisensis
  misc_feature (1)..(185): tr|A0A4Y7XC89|A0A4Y7XC89_9GAMM GTP cyclohydrolase 1 OS= Alkanindiges illinoisensis OX=197183 GN=folE PE=3 SV=1
MTMQQSYANIISAIGEDLERPGLLDTPARAAKAFSFLTHGYHQSLDEVTNNAVFPSTNREMVLVKGIEFYSLCEHHLLPFMGQAHIAYLPNGHVLGLSKFARIVDMYSRRLQIQENLTQQIAQAVMDATGARGAAVVMDAAHMCMMMRGVQKQHSSTRSVSMLGEFTTNTQARQEFLMAVPNENI

SEQ ID NO: 4392 - protein, 185 aa, Alkanindiges sp.
  misc_feature (1)..(185): tr|A0A1S8CUD8|A0A1S8CUD8_9GAMM GTP cyclohydrolase 1 OS= Alkanindiges sp. H1 OX=1907941 GN=folE PE=3 SV=1
MTMQQSYANIISAIGEDLERPGLLDTPARAAKAFSFLTHGYNQSLDEVTNNAVFPSTNREMVLVKGIEFYSLCEHHLLPFMGQAHIAYLPNGHVLGLSKFARIVDMYSRRLQIQENLTQQIAQAVMDATGARGAAVVMDAAHMCMMMRGVQKQHSSTRSVSMLGEFSTNTQARQEFLMAVPGENI

SEQ ID NO: 4393 - protein, 186 aa, Allisonella histaminiformans
  misc_feature (1)..(186): tr|A0A1G5WDP1|A0A1G5WDP1_9FIRM GTP cyclohydrolase 1 OS= Allisonella histaminiformans OX=209880 GN=folE PE=3 SV= 1
MADKNKLEQAARLILEAIGEDPNREGLLETPRRFAEMMEEQMAYTTVSNEEIAREFGKTFSSSEEGPVVVKDIFIFSHCEHHLALMYHMHVSVGYIPSGRVIGLSKVARIADAVSRRLQIQERIGADIRTIIEKVTGSQDVIVRIDGEHSCMTARGIKKPGAVTTTISSSGKFNTPEYRQLFKEML

SEQ ID NO: 4394 - protein, 207 aa, Alloactinosynnema album
  misc_feature (1)..(207): tr|A0A1H0SW50|A0A1H0SW50_9PSEU GTP cyclohydrolase 1 OS= Alloactinosynnema album OX=504798 GN=folE PE=3 SV=1
MNDSRRNGAGTYDVPAPVFDQDRAEKAVRELLLACGEDPDRDGLLDTPARVARAYAELFAGLYTDPESVLNKTFDESHDELVLVTDIPMFSTCEHHLVPFHGVAHVGYIPNEQGRITGLSKLARLVDLYAKRPQVQERLTSQVADAMMKKLEPRGVIVVIEAEHLCMAMRGIRKPGARTTTSALRGILKSSPSSRAEAIELINGRTR

SEQ ID NO: 4395 - protein, 207 aa, Alloactinosynnema album
  misc_feature (1)..(207): tr|A0A1H0QX84|A0A1H0QX84_9PSEU GTP cyclohydrolase 1 OS= Alloactinosynnema album OX=504798 GN=folE PE=3 SV=1
MSLSPAPDHLDEHRRLRVVHEREAVDLPAAQRAVADLLIALGRDPASEHLADTPRRVARAYAEMLTPREFNLTTFPNDEGYDELVLAKSIPVQSLCEHHLLPFQGVAHVGYLPGERILGLSKLARVVELFARDLQVQERLTKQVADWLQHHLDPKGVGVVIEAEHLCMSLRGVRAAGARTVTSALQGALREDPRSRQEFFALAGVNG

SEQ ID NO: 4396 - protein, 204 aa, Alloactinosynnema iranicum
  misc_feature (1)..(204): tr|A0A1G6VXL8|A0A1G6VXL8_9PSEU GTP cyclohydrolase 1 OS= Alloactinosynnema iranicum OX=1271860 GN=folE PE=3 SV=1
MTNIIHNTAQILAPPGQVDTERVAGLVGELLAAIGEDSTREGLADTPTRVAAWWREFFSPEPSAAPTCFTEHHLSGQLVVVGGMSVWSLCEHHLLPMNLDVSVGYLPEGQVVGLSKFGRVAQRHAARLQVQERFTRQVADEIAEAIGGDNVAVSVRGTHLCMSARGVRMDAARTTTVETRGRFESDFVLSQQFLTLTTDRRRGA

SEQ ID NO: 4397 - protein, 214 aa, Alloactinosynnema iranicum
  misc_feature (1)..(214): tr|A0A1G6XQG2|A0A1G6XQG2_9PSEU GTP cyclohydrolase 1 OS= Alloactinosynnema iranicum OX=1271860 GN=folE PE=3 SV=1
MTAEAPSIHPTEWSADFPALIPPSAPPAYGDIDLDAARRAVADLLVALGRDPGAAHLADTPRRVAHAYAEMLTPREFTMTTFPNDEGYDELVLARDIPVQSLCEHHLLPFQGVAHVGYLPGERILGLSKLARVVELFARDLQVQERLTKQVADWLQTRLAPRGVGVVIEAEHMCMSLRGVRATGSRTVTSTLQGALREDARSRQEFFALAGVNS

SEQ ID NO: 4398 - protein, 220 aa, Alloactinosynnema sp.
  misc_feature (1)..(220): tr|A0A0H5CT04|A0A0H5CT04_9PSEU GTP cyclohydrolase 1 OS= Alloactinosynnema sp. L-07 OX=1653480 GN=folE PE=3 SV=1
MVAGIPPISEVPMNDNLSHGVGTPRDVPIPGFDQDRAEKAVRELLLACGEDPDRDGLVDTPARVARAYHELFAGLYTNPESVLDKTFDESHDELVLVTDIPMFSTCEHHLVPFHGVAHVGYIPNEQGRVTGLSKLARLVDLYSKRPQVQERLTSQIADAMMKKLEPRGVIVVIEAEHLCMAMRGIRKPGARTTTSALRGILKSSASSRAEAIELINGRTR

SEQ ID NO: 4399 - protein, 306 aa, Allobacillus sp.
  misc_feature (1)..(306): tr|A0A556PS94|A0A556PS94_9BACI GTP cyclohydrolase FolE2 OS=Allobacillus sp. SKP4-8 OX=1955272 GN=folE2 PE=3 SV =1
MDNSYNLKQLPTKEERHKLFGSVPPGPRTKPHEKEKMKDLQNTKQNFLFELDAVGISNVKHPIKIASSMTPETQTTIGTFYFASSISQDSKGTNMSRFTEQLHHYHSEGFTLSIESLKQFTRDLKDRLEQKDAEVKVEFPWFFERKAPYTDMAGMNHADAWIHVRYDEQDHHQVTVGLSGKVTTLCPCSKEISEYSAHNQRGNMKMEVELAEDFDESQTDWKVLLLEAAESNASARIHPVLKRPDEKMVTEQAYENPRFVEDMVRLVAADLYELDMIEKFYVQCVNEESIHLHDAVASITYDKRKK

SEQ ID NO: 4400 - protein, 306 aa, Allobacillus sp.
  misc_feature (1)..(306): tr|A0A556PXM3|A0A556PXM3_9BACI GTP cyclohydrolase FolE2 OS=Allobacillus sp. SKP2-8 OX=1955271 GN=folE2 PE=3 SV =1
MDNSYNPKQLPSKEERHKLFGSVPPGPRTKPHEKEKMKDLQNTKQNFLFELDAVGISNVKHPIEITSSMVPETQTTIGKFYFASSISQDSKGTNMSRFTEQLHHYHSEGFTLSIESLKQFTRDLKERLEQKDAEVKVEFPWFFERKAPYTDMAGMNHADAWIHVRYDEHDHHQITVGLSGKVTTLCPCSKEISEYSAHNQRGNMTMEVELVEDFDERQTDWKAMLLEAAESNASARIHPVLKRPDEKMVTEQAYENPRFVEDMVRLVAADLYELDIIEKFYVACENEESIHLHDAIASVTYDKRTE

SEQ ID NO: 4401 - protein, 283 aa, Allochromatium vinosum
  misc_feature (1)..(283): tr|D3RQA8|D3RQA8_ALLVD GTP cyclohydrolase FolE2 OS=Allo chromatium vinosum (strain ATCC 17899 / DSM 180 / NBRC 103801 / NCIMB 10441 / D) OX=572477 GN=folE2 PE=3 SV=1
MEPSTPSPCSTNATCEIADVQGSADTRRIAIDKVGIKDIRHPVRVLDRSGTEQHTVANFNMYVYLPHDFKGTHMSRFVEILNRHEREISVSSFKTMLSEMSERLESEAGHIEMRFPFFINKKAPVSGVESLLDYEVTFIGEIRNGQPRLELKVMVPVTSLCPCSKEISAFGAHNQRSHVTVQVRMERFMWLEELIELVEREASSELYGLLKRPDEKFVTERAYTNPKFVEDLVRDVAKRLNDDPRILAYTVEAENFESIHNHSAYALIERDKAAESRLAESAL

SEQ ID NO: 4402 - protein, 278 aa, Allochromatium warmingii
  misc_feature (1)..(278): tr|A0A1H3CKM6|A0A1H3CKM6_ALLWA GTP cyclohydrolase FolE2 OS=Allochromatium warmingii OX=61595 GN=folE2 PE=3 SV= 1
MEPSTTSSGSPAIVCDIADVQGSADTRRIAIDRVGIKDIRHPVRVLDRSGTEQHTVATFNMYVYLPHDFKGTHMSRFVEILNRHEREISVSSFKTMLADMSERLESEAGHIEMRFPFFISKQAPVSGVTSLLDYDVTFIGEIRDGQPHLELKVMVPVTSLCPCSKEISAFGAHNQRSHVTVQVRMERFMWLEELIELVEHEASSELYGLLKRPDEKFVTERAYSNPKFVEDLVRDVAKRLNEDDRILAYTVEAENFESIHNHSAYALIARDKTTEAAL

SEQ ID NO: 4403 - protein, 180 aa, Allofrancisella guangzhouensis
  misc_feature (1)..(180): tr|A0A0A8E456|A0A0A8E456_9GAMM GTP cyclohydrolase 1 OS= Allofrancisella guangzhouensis OX=594679 GN=folE PE=3 S V=1
MQQNFKNLITAIGENPNRNGLIGTPQRAAKAFSFLTRGYQQSLKEVINGALFESSIDEMVVIDNIEFFSLCEHHLLPFTGICHIAYLPTGKVLGLSKFARIVDMFAQRLQIQEQLTEEIATAIQDITGARGVGVVIEAKHFCMMMRGVRKQNSIMKTSVMLGEFKASHSTRSEFLALSMK

SEQ ID NO: 4404 - protein, 204 aa, Allofrancisella guangzhouensis
  misc_feature (1)..(204): tr|A0A0A8E4D1|A0A0A8E4D1_9GAMM GTP cyclohydrolase 1 OS= Allofrancisella guangzhouensis OX=594679 GN=SD28_05115 PE=3 SV=1
MKTTYDKELGLQIQKHLITKGLESYRDLNVDKSKQVETISNAYQEILTALRLTSIEFEKTPHRIARMFTQEIFYGLDYGNFPACGLYENEFRYDGILTQKHINIMSFCEHHFVPFEGTAEVSFIPKDNNIIGLCRINSICDFFSRRPQIQERMTAQIFETLKFILKTEDVSVKITAKHTCVSFRGKNNKDSETFTQMTGGHFKK

SEQ ID NO: 4405 - protein, 205 aa, Allofrancisella inopinata
  misc_feature (1)..(205): tr|A0A4R7L7L0|A0A4R7L7L0_9GAMM GTP cyclohydrolase 1 OS= Allofrancisella inopinata OX=1085647 GN=EDC55_11610 PE= 3 SV=1
MKTIYDKELGLQIQEYLVSKGLEAYRSLEIEKSKQIKTISNAYQEILTVLGLTTTEFEKTPHRVARMFTQEIFYGLDYDNFPACALYENKFRYDGVLTQKNINIMSFCEHHFIPFEGTAEVSFIPKDNNIIGLCRINSICDFFARRPQIQERMTAQIFETLKFILKTEDVSVKITAQHTCVSFRGKNNKDSETFTQITGGYFKNK

SEQ ID NO: 4406 - protein, 185 aa, Alloiococcus otitis
  misc_feature (1)..(185): tr|K9EPW4|K9EPW4_9LACT GTP cyclohydrolase 1 OS=Alloioco ccus otitis ATCC 51267 OX=883081 GN=folE PE=3 SV=1
MVDYQRIEKAVEEILRAVGEDPGREGLLETPKRVAKMYAERFAGLEKDPAVHTQKYFHEDNELVLVKDIEFDSTCEHHLLPIIGKAHVAYKPKDGRVIGLSKLARILEDVTKRPQLQERITNQVADVIMDNLEPEGVFVVVEGEHMCMSIRGIKKRGSITVTKAERGVFRQDKELKKEVLDMIKE

SEQ ID NO: 4407 - protein, 171 aa, Allokutzneria albata
  misc_feature (1)..(171): tr|A0A1H0AMJ3|A0A1H0AMJ3_9PSEU GTP cyclohydrolase 1 OS= Allokutzneria albata OX=211114 GN=folE PE=3 SV=1
MGEDPIREGLRDTPARVARAYQELFAGLYIDPDSVLDKTFDESHEELVLVTDIPMYSTCEHHLLPFHGVAHVGYIPNAEGQVTGLSKLARLVDLYARRPQVQERLTSQVADALVRKLNPRGVIVVMQAEHLCMGMRGIKKAGALTTTSAVRGLMRDSASTRAEAIELIKAR

SEQ ID NO: 4408 - protein, 196 aa, Allokutzneria albata
  misc_feature (1)..(196): tr|A0A1G9RZ93|A0A1G9RZ93_9PSEU GTP cyclohydrolase 1 OS= Allokutzneria albata OX=211114 GN=folE PE=3 SV=1
MTAQLRVLHGRTGVDVAAAQRAVADLLVALGRDPDSEHLADTPRRVAHAYAELLTPREFDLTTFPNEEGYDELVLAKSIPVQSLCEHHLLPFHGVAHVGYLPGERILGLSKLARVVELFARDLQVQERLTKRVADWLQDHLAPKGVGVVIEAEHMCMSLRGVRASGSRTVTSALQGVLREDLRSRQEFFALAGVGA

SEQ ID NO: 4409 - protein, 197 aa, Allonocardiopsis opalescens
  misc_feature (1)..(197): tr|A0A2T0Q242|A0A2T0Q242_9ACTN GTP cyclohydrolase 1 OS= Allonocardiopsis opalescens OX=1144618 GN=folE PE=3 SV= 1
MTEFSRPLDVDHPRIERAIREILLAIGEDPDRDGLRDTPARVARAYAEQFAGLGQDPAEVLSTVFDIDHQEMVLVKDIEMVSSCEHHLVPFYGSAHVGYIPNEKGQVTGLSKLARLVDVFARRPQVQERLTSQIADALMAHIQPAGVIVVIEAEHLCMTMRGVRKPGAKTVTSAVRGSFRDHEPTRHEAMSLILGPR

SEQ ID NO: 4410 - protein, 213 aa, Allonocardiopsis opalescens
  misc_feature (1)..(213): tr|A0A2T0Q224|A0A2T0Q224_9ACTN GTP cyclohydrolase 1 OS= Allonocardiopsis opalescens OX=1144618 GN=folE PE=3 SV= 1
MTLAHEAAPAAVRALAPGGGAEPPAEAVAHAEAMLSLLGIACDTESTRDTPRRFVRALAELTRGTRLDPGRHLRVRFPPESACQGVIAAVDVPFVAVCEHHLLPFPGRAAVAYLPAPGARIVGLSKLARLLQEYAARPQVQERLGEQVVAALTAELDTRGAACLIRAEHACMTLRGAQAHGAAMVTTHLAGEFGTDAALRAQVLALAPRPPAR

SEQ ID NO: 4411 - protein, 190 aa, Alloprevotella rava
  misc_feature (1)..(190): tr|G5G984|G5G984_9BACT GTP cyclohydrolase 1 OS=Alloprev otella rava F0323 OX=679199 GN=folE PE=3 SV=1
MIQEEKIERLKVLNAKILALLGETPQREGLLKTPERVAKAQLTLTRGYEMDASAVLNSAKFQESYQHMVIVKDINFYSLCEHHMLPFYGKAHIAYIPNGYITGLSKLARVVDIYSHRLQVQERMTQQVMECIQDALNPLGVMVVIEAKHMCMQMRGVEKENSMTVTSAFSGAFNQAKTREEFLDLIHNSK

SEQ ID NO: 4412 - protein, 188 aa, Alloprevotella sp.
  misc_feature (1)..(188): tr|A0A3P1Z0D5|A0A3P1Z0D5_9BACT GTP cyclohydrolase 1 OS= Alloprevotella sp. OH1205_COT-284 OX=2491043 GN=folE PE =3 SV=1
MTEQERLEQLQLHYTEIIKLLGEDPRREGLRKTPERVAKAMLTLLRGYAMNPVEVLNSAKFVENYKQMVIVKDIELFSLCEHHLLPFYGKAHVAYIPNGHICGLSKIPRVVDIFSHRLQVQERLTLQVMEAIQEALDPLGVMVVVEAEHMCMQMRGVEKQHSLTTTSSFCGAFEQAKTREEFLQLIHR

SEQ ID NO: 4413 - protein, 189 aa, Alloprevotella sp.
  misc_feature (1)..(189): tr|A0A496KCV6|A0A496KCV6_9BACT GTP cyclohydrolase 1 OS= Alloprevotella sp. OX=1872471 GN=folE PE=3 SV=1
MTEQERIDQLKFHYKETLQLFGEDPEREGLLKTPERVAKAMLTLTRGYAMDPVAVLNSAKFKEEYNQMVIVKDIEFFSLCEHHMLPFFGKAHVAYIPNGCICGLSKIPRVVDIFSHRLQVQERLTLQVMEAIKEALDPKGVMVVIEAEHMCMQMRGVEKQHSCTTTSSFCGAFEQAKTREEFLQLIKRA

SEQ ID NO: 4414 - protein, 190 aa, Alloprevotella tannerae
  misc_feature (1)..(190): tr|C9LDL6|C9LDL6_9BACT GTP cyclohydrolase 1 OS=Alloprev otella tannerae ATCC 51259 OX=626522 GN=folE PE=3 SV=1
MTTEDRIEGLKTLYKEALTVLGEDTEREGLLKTPERVAKAMLDLTRGYTMDAAKVLTSAKFKEDYRHMVIVKDINFYSLCEHHLLPFYGKAHIAYIPNGYITGLSKLARVVDIFSHRLQVQERMTLQIKECIEQALNPLGVMVVLEAKHMCMQMRGIEKENSITTTSDFSGAFTQAKTREEFLALIARKE

SEQ ID NO: 4415 - protein, 192 aa, Alloscardovia macacae
  misc_feature (1)..(192): tr|A0A1Y2STS9|A0A1Y2STS9_9BIFI GTP cyclohydrolase 1 OS= Alloscardovia macacae OX=1160091 GN=folE PE=3 SV=1
MSKGEYNEEGVRQAVRLFLESIGEDPDREGLLDTPDRIARAGRELFAGLSQDPKEVLAKRFSVDTEEMVLVRDIELYSVCEHHLLPFHGVAHIGYIPSGHQVTGLSKLARLVDVYARRPQVQERLTQQIADALVNELHAKGVIVVTDCEHLCMSMRGVKKSQARTLTSAVRGVMRESTTRAEAMQLILQPRG

SEQ ID NO: 4416 - protein, 192 aa, Alloscardovia macacae
  misc_feature (1)..(192): tr|A0A261F7F4|A0A261F7F4_9BIFI GTP cyclohydrolase 1 OS= Alloscardovia macacae OX=1160091 GN=folE PE=3 SV=1
MTRGEYNEEGVRKAVRLFLESIGEDPDREGLLDTPDRIARAGRELFSGLSQDPKEVLAKRFTVDTEEMVLVRDIELYSVCEHHLLPFHGVAHIGYIPSGHEVTGLSKLARLVDVYARRPQVQERLTQQIADALVNELHAKGVIVVTDCEHLCMSMRGVKKSQARTLTSAVRGVMRESTTRAEAMQLILQPRG

SEQ ID NO: 4417 - protein, 191 aa, Alloscardovia omnicolens
  misc_feature (1)..(191): tr|U1SK17|U1SK17_9BIFI GTP cyclohydrolase 1 OS=Alloscar dovia omnicolens F0580 OX=1321816 GN=folE PE=3 SV=1
MSKGEYNEEGVRQAVRLFLESIGEDPEREGLLDTPDRIARAGRELFAGLHSNPDEVLAKRFAVDTEEMVLVRDIEIYSVCEHHLLPFHGVAHIGYIPGNGEVVGLSKLARLVDMYARRPQVQERLTQQVADALVNELHAQGVIVVTDCEHLCMSMRGIKKSQAHTLTSAVRGIMRDSSTRAEAMRLILNAR

SEQ ID NO: 4418 - protein, 197 aa, Alloscardovia omnicolens
  misc_feature (1)..(197): tr|A0A2I1M5B0|A0A2I1M5B0_9BIFI GTP cyclohydrolase 1 OS= Alloscardovia omnicolens OX=419015 GN=folE PE=3 SV=1
MRRKASMSKGEYNEEGVRQAVRLFLESIGEDPEREGLLDTPDRIARAGRELFAGLHSNPDEVLAKRFAVDTEEMVLVRDIEIYSVCEHHLLPFHGVAHIGYIPGNGEVVGLSKLARLVDMYARRPQVQERLTQQVADALVNELHAQGVIVVTDCEHLCMSMRGIKKSQAHTLTSAVRGIMRDSSTRAEAMRLILNAR

SEQ ID NO: 4419 - protein, 192 aa, Alloscardovia sp.
  misc_feature (1)..(192): tr|A0A4R0QPA9|A0A4R0QPA9_9BIFI GTP cyclohydrolase 1 OS= Alloscardovia sp. GLDI4/2 OX=2496842 GN=folE PE=3 SV=1
MNNDSSYNEEGVRQAVRLFLESIGEDPNREGLLDTPDRIARAGRELFAGLHQNPHDVLEKHFSVDTEEMVLVRDIELYSVCEHHLLPFHGVAHIGYIPAKNEVVGLSKLARLVEVFARRPQVQERLTQQIADALVHEIHAKGVIVVTDCEHLCMSMRGVKKSQARTLTSAVRGAMRDSATRAEAMQLILQQR

SEQ ID NO: 4420 - protein, 197 aa, Alloscardovia sp.; identical to SEQ ID NO: 4418
  misc_feature (1)..(197): tr|A0A1F1AW24|A0A1F1AW24_9BIFI GTP cyclohydrolase 1 OS= Alloscardovia sp. HMSC034E08 OX=1739413 GN=folE PE=3 SV =1

SEQ ID NO: 4421 - protein, 203 aa, Unknown
  misc_feature (1)..(203): tr|A0A1V1PPR2|A0A1V1PPR2_9PROT GTP cyclohydrolase 1 OS= alpha proteobacterium U9-1i OX=1605283 GN=folE PE=3 SV= 1
MSEILKWRSPDEAEQKRPSREAAMEAVRTLIAWAGDDPEREGLLDTPQRVVDAYREWFRGYDLCPNEELSRTFEEVSGYDDMVMLKKIDVESHCEHHIAPFLGKAYVAYLPTDRVVGISKIARVVEIFAKRLQTQETMTAQVAHAIADALKPLGVAVLIDAEHQCMSTRGVHHKDVTTVTTSFTGAFKENVELRDRFLKLAGY

SEQ ID NO: 4422 - protein, 196 aa, Unknown
  misc_feature (1)..(196): tr|A0A061QD38|A0A061QD38_9PROT GTP cyclohydrolase 1 OS= alpha proteobacterium Q-1 OX=1492281 GN=folE PE=3 SV=1
MTKSAGVQISKEEAAARDAVRTLIRWSGEDPDREGLRDTPERVVRAFLEYFRGYEEDPVIYLSRTFEEVSGYDEVVLLRNIPFVSHCEHHLAPIIGKAHVAYLPHDKVVGISKLARVVHAYARRMQVQERLTAQIGDCITKVLEPEGVAVVIEATHGCMTCRGVETPEVIMTTSRMTGVFREDDKARREVLSLMGF

SEQ ID NO: 4423 - protein, 209 aa, Alphaproteobacteria bacterium
  misc_feature (1)..(209): tr|A0A2N3EG61|A0A2N3EG61_9PROT GTP cyclohydrolase 1 OS= Alphaproteobacteria bacterium HGW-Alphaproteobacteria-1 1 OX=2013657 GN=folE PE=3 SV=1
MNAVVDGLRARTEDDRLSAVEKPSREEAEAAVRTLIAWAGDNPDREGLIDTPGRVVRAYEEFFEGYNEDPYKELSRTFEEVEGYNDMVMLRDINIESHCEHHMVAILGRAHIAYVPTKKVVGISKLARVIEIFARRLQTQETMTAQIADTINAALQPQGVAILIEAKHQCMTTRGIKKPDVATITTQFTGVFRDDPRMEARFMQMIRGY

SEQ ID NO: 4424 - protein, 205 aa, Alphaproteobacteria bacterium
  misc_feature (1)..(205): tr|A0A3R7XIF4|A0A3R7XIF4_9PROT GTP cyclohydrolase 1 OS= Alphaproteobacteria bacterium TMED54 OX=1986640 GN=folE PE=3 SV=1
MTSYSSIKTEFQNDDAKKEVSIEDAEKAVKTLITWIGDNPDREGLIDTPKRVVRAFNEHFSGYKENPSEILSKTFKEVQGYDDIVVLKKIDFESHCEHHMLPIIGEASVGYLPNKSIVGISKLARIVNTFAKRLQTQEIMTSQIINAIQENLNPLGVGVVIEAEHHCMKTRGVYKKKSLMRTSQFKGLFLEDEKLRNRFLDFAKD

SEQ ID NO: 4425 - protein, 210 aa, Alsobacter sp.
  misc_feature (1)..(210): tr|A0A2T1HRY1|A0A2T1HRY1_9RHIZ GTP cyclohydrolase 1 OS= Alsobacter sp. SH9 OX=2109933 GN=folE PE=3 SV=1
MDAVVKSFSPRTALKPSESAPRPTREEAEAAVRTLIRWAGDDPAREGLLDTPKRVVKAYEELFRGYREDAQDIMSKVFEEVGGYDDMVVVRDIPFHSHCEHHMVPFVGAAHIGYYPSEGVVGLSKLARVVDVFARRLQTQETMTAEIVGAIDEALKPRGVAVIIEAEHMCMSMRGVQKQGARTVTTQFTGVFRDDPAEQARFLTMVRGLR

SEQ ID NO: 4426 - protein, 198 aa, Altererythrobacter aquimixticola
  misc_feature (1)..(198): tr|A0A4T3F407|A0A4T3F407_9SPHN GTP cyclohydrolase 1 OS= Altererythrobacter aquimixticola OX=2489173 GN=folE PE= 3 SV=1
MSCDIDGQDGKIPVPEDVQDAIRTLIRWSGDNPDREGLVDTPARVARAWKEYCQGYDEDPSHHLSRVFEEVGGYDEIVLLKDIPFQSHCEHHMAPIIGKAAIAYLPNDHVVGISKLARVLHGYARRLQIQERLTAEVAECIWKHLEPRGVAVVIEASHACMTARGVRTPGVNMVTSRVMGLFRSDSKSREEVLKLMGY

SEQ ID NO: 4427 - protein, 202 aa, Altererythrobacter atlanticus
  misc_feature (1)..(202): tr|A0A0F7KMH9|A0A0F7KMH9_9SPHN GTP cyclohydrolase 1 OS= Altererythrobacter atlanticus OX=1267766 GN=folE PE=3 S V=1
MSSLVGPDEDEPRGKPPVPEDVQDAIRTLIRWAGDDPSREGLVDTPARVARAWKEYCSGYEEDPAEHLGRVFEEVGGYDEIVLLKDIPFQSHCEHHMAPIIGKAAIAYLPTRRVVGISKLARVLHGYARRLQIQERLTAEVAQCIWDNLEPRGVAVVIEASHACMTARGVRTPGVNMVTSQVMGTFRRDHKSRQEVLQLMGY

SEQ ID NO: 4428 - protein, 202 aa, Altererythrobacter dongtanensis
  misc_feature (1)..(202): tr|A0A1B2AE41|A0A1B2AE41_9SPHN GTP cyclohydrolase 1 OS= Altererythrobacter dongtanensis OX=692370 GN=folE PE=3 SV=1
MSSLVGPDEDDPRGKPPVPEHVQDAIRTLIEWAGDDPTREGLLDTPARVARAWKEYCLGYGEDPSVHLSRIFEEVGGYDELVLLRDIPFQSHCEHHMAPIIGKAAIAYMPTDRVVGISKLARVLHGFARRLQVQERLTAEVAKCIWDHLKPQGVAVVIEAAHSCMTARGVRTPGVSMVTSKLYGCFLDDERSREEVLKLMGY

SEQ ID NO: 4429 - protein, 204 aa, Altererythrobacter epoxidivorans
  misc_feature (1)..(204): tr|A0A0M4MSS3|A0A0M4MSS3_9SPHN GTP cyclohydrolase 1 OS= Altererythrobacter epoxidivorans OX=361183 GN=folE PE=3 SV=1
MSCGDGYSDDPGLPSKPDVPAHVQDAIRTLIEWAGDDPSREGLLDTPKRVGRAWLEYCQGYQEDPAIHLSRVFEEVGGYDEVVLLKDIPFQSHCEHHMAPITGKAAIAYLPKNKVVGISKLARVLHGFARRLQIQERLTAEVAQCIWDNLEPHGVAVVIEAQHGCMTGRGVRTPGVGMITSRLHGCFLEDQRSRKEVLGLMGYG

SEQ ID NO: 4430 - protein, 207 aa, Altererythrobacter ishigakiensis
  misc_feature (1)..(207): tr|A0A562UW53|A0A562UW53_9SPHN GTP cyclohydrolase 1 OS= Altererythrobacter ishigakiensis OX=476157 GN=folE PE=3 SV=1
MNYMNVHDHAEFDPENPLNKPDVPEDVQEAIRTLIRWTGDDPEREGLVDTPKRVGRAWLEYCQGYQSDPAVHLSRIFEEVGGYDEIVLLKDIPFQSHCEHHMAPITGKAHIAYLPDKKVVGISKLARVLHGFANRLQVQERLTAEVADCIWQNLEPRGVAVVIEAEHGCMTGRGVKVHEVEMLTSRMMGCFLEDHRSRKEVMSLMGY

SEQ ID NO: 4431 - protein, 206 aa, Altererythrobacter marensis
  misc_feature (1)..(206): tr|A0A2W5ALV2|A0A2W5ALV2_9SPHN GTP cyclohydrolase 1 OS= Altererythrobacter marensis OX=543877 GN=folE PE=3 SV=1
MSLNDDTPDNGDLVSPPAKLPVPNEVQAAIRTLIRWAGDDPEREGLIDTPARVGRAWREYCSGYREDPAQHLSRVFEEVGGYNEIVLLKDIPFQSHCEHHMAPITGKAAIAYLPRDRVVGISKLARVLHGFARRLQVQERLTAEVADCIWDHLQPQGVAVVIEAVHGCMTARGVRTPGVGMITSRMMGTFLEDHRSREEVLRLMGY

SEQ ID NO: 4432 - protein, 202 aa, Altererythrobacter marensis
  misc_feature (1)..(202): tr|A0A0G3X975|A0A0G3X975_9SPHN GTP cyclohydrolase 1 OS= Altererythrobacter marensis OX=543877 GN=folE PE=3 SV=1
MSSLVGPDEDVSRGKLPVPDDVQEAIRTLIRWAGDDPAREGLLDTPSRVARAWKEYCLGYGEDPAIHLSRVFEEVGGYNEIVLLKDIPFQSHCEHHMAPIIGKAAIAYLPTDRVVGISKLARVLHGFARRLQVQERLTAEVADCIWEHLQPQGVAVVIEASHSCMTARGVRTPGVTMTTSRMMGTFLDDPRSREEVLKLMGY

SEQ ID NO: 4433 - protein, 202 aa, Altererythrobacter namhicola
  misc_feature (1)..(202): tr|A0A1C7D9R4|A0A1C7D9R4_9SPHN GTP cyclohydrolase 1 OS= Altererythrobacter namhicola OX=645517 GN=folE PE=3 SV= 1
MGSLVGPDEDNPIGKPPVPENVQDAIRTLIEWAGDDPTREGLLDTPARVARAWKEYCLGYTEDPSVHLSRVFEEVGGYNEIVLLKDIPFQSHCEHHMAPIIGKAAIAYLPTDRVVGISKLARVLHGFARRLQVQERLTAEVADCIWENLKPQGVAVVIDAQHACMTARGVRTPGVGMVTSRMMGTFLEDQRSRKEVLSLMGY

SEQ ID NO: 4434 - protein, 202 aa, Altererythrobacter sp.
  misc_feature (1)..(202): tr|A0A420EFG8|A0A420EFG8_9SPHN GTP cyclohydrolase 1 OS= Altererythrobacter sp. HN-Y73 OX=2320269 GN=folE PE=3 S V=1
MSSLVGPDEDDPRGKPPVPEDVQEAIRTLIRWTGDDPEREGLQDTPKRVARAWKEYCVGYEEDPAVHLSRVFEEVGGYDEIVLLKDIPFQSHCEHHMAPIIGKAAIAYLPTDHVVGISKLARVLHGYARRLQIQERLTAEVAQCIWDNLQPKGVAVVIEASHACMTARGVRTPGVGMVTSRVMGTFRKDDRSRKEVLGLMGY

SEQ ID NO: 4435 - protein, 202 aa, Altererythrobacter sp.
  misc_feature (1)..(202): tr|A0A369Q8R4|A0A369Q8R4_9SPHN GTP cyclohydrolase 1 OS= Altererythrobacter sp. HME9302 OX=2161824 GN=gch1 PE=3 SV=1
MSSLVGPDEDDPRGKPPVPENVQDAIRTLIEWSGDDPEREGLLDTPKRVARAWLEYCQGYGEDPSIHLSRVFEEVGGYNEIVLLKDIPFQSHCEHHMAPIIGKAAIAYLPSDRVVGISKLARVLHGYARRLQIQERLTAEVADCIWDNLQPQGVAVVIEASHACMTARGVRTPGVGMTTSRMMGTFLKDERSRKEVLSLMGY

SEQ ID NO: 4436 - protein, 204 aa, Altererythrobacter xiamenensis
  misc_feature (1)..(204): tr|A0A1Y6FHB9|A0A1Y6FHB9_9SPHN GTP cyclohydrolase 1 OS= Altererythrobacter xiamenensis OX=1316679 GN=folE PE=3 SV=1
MSCDDGYVDDPGAPQKPEVPEHVQDAIRTLIEWSGDDPTREGLIDTPKRVGRAWLEYCQGYQEDPAIHLSRVFEEVGGYDEIVLLKDIPFQSHCEHHMAPITGKAAIAYLPKNKVVGISKLARVLHGFARRLQIQERLTAEVASCIWDNLEPHGVAVVIEAQHGCMTGRGVRTPGVNMVTSRLCGCFLDDQRSRKEVLSLMGYG

SEQ ID NO: 4437 - protein, 189 aa, Alteribacillus bidgolensis
  misc_feature (1)..(189): tr|A0A1G8C450|A0A1G8C450_9BACI GTP cyclohydrolase 1 OS= Alteribacillus bidgolensis OX=930129 GN=folE PE=3 SV=1
MPTVDHDKIKQAVRLILEAVGEDPNREGLMDTPKRVAKMYEEVFQGIHQDPSEHLQTVFGEDHEELVLVRDIPFYSMCEHHLVPFYGKAHVGYIPKGGKVTGLSKLARTVETVAKKPQLQERITSTIANTIVETLEPHGVIVVVEAEHMCMTMRGVKKPGAETVTSAVRGTFEKDDASRAEVLALINRS

SEQ ID NO: 4438 - protein, 302 aa, Alteribacillus bidgolensis
  misc_feature (1)..(302): tr|A0A1G8CX91|A0A1G8CX91_9BACI GTP cyclohydrolase FolE2 OS=Alteribacillus bidgolensis OX=930129 GN=folE2 PE=3 SV=1
MALHLKKILPNKEERHKLFGSVPPIKGKKPTDKENMPDLQNKPNDYLFPIEKVGISNVRHPVNITSELDPGHQTTVAQFTLTTSLIQQSKGINMSRLTELLHEYHKKNWTLDLSSLSQFSKELVQWMEQDHAEVEVSFPWFFERKGPATGKGGLMHADMWMKSSYQEEEKKHSPSIGITAAVTTLCPCSKEISEYSAHNQRGMVTIKANLYEHVSFDWKKELLEAAETNASALLHPVLKRPDEKMVTEQAYENPRFVEDLCRLIAADLYEMDFIRSFQVECRNEESIHLHDAVAALSFSKEE

SEQ ID NO: 4439 - protein, 189 aa, Alteribacillus iranensis
  misc_feature (1)..(189): tr|A0A1I1ZQC0|A0A1I1ZQC0_9BACI GTP cyclohydrolase 1 OS= Alteribacillus iranensis OX=930128 GN=folE PE=3 SV=1
MPTFDHDKIESAVRLILEAIGEDPDREGLLDTPKRVARMYEEVFSGIHEDPAIHLQTVFGEDHEELVLVRDIPFYSMCEHHLVPFYGKAHVGYIPKGGKVTGLSKLARTVETVARKPQLQERITSTIANTILDTLEPHGVIVVVEAEHMCMTMRGIKKPGSETVTSAVRGVFEEDAAARAEVLSLINRS

SEQ ID NO: 4440 - protein, 175 aa, Alteribacillus persepolensis
  misc_feature (1)..(175): tr|A0A1G7ZH19|A0A1G7ZH19_9BACI GTP cyclohydrolase 1 OS= Alteribacillus persepolensis OX=568899 GN=folE PE=3 SV= 1
MILEGVGEDPDREGLLDTPKRVAKMYEEVFQGIYEDPKEHLQTVFGEDHEELVLVRDIPFHSMCEHHLVPFFGKAHVGYIPKGGKVTGLSKLARTVETVAQKPQLQERITSTIADSIVETLEPHGVIVVVEAEHMCMTMRGIKKPGAQTVTSAVRGTFEEDAAARAEVLSLINKS

SEQ ID NO: 4441 - protein, 308 aa, Alteromonadaceae bacterium
  misc_feature (1)..(308): tr|A0A420E8M3|A0A420E8M3_9ALTE GTP cyclohydrolase FolE2 OS=Alteromonadaceae bacterium ALS 81 OX=2164068 GN=fol E2 PE=3 SV=1
MPHAMPDIANSTQAQTTGTLDRVGMSKIELPIMLSFENQAPTRIEADVEAFVNLTVAEAKGIHMSRLYLLLDELSTESVLNYASLRTLLEGFISSHEDLSDVAQLSFKFDYHLRRESLISKKTGWKAYPMQINARYQNQRMQVELKVDVPYSSTCPCSAALARQLIQDAFSQQFQNKEAINFDNIHRWLGSTQGIVATPHSQRSIAEVKVILADNVKDFPFIQLINSIEDALQTPVQAAVKRADEQEFARLNGQNLMFCEDAARRLQQRLIGQTEFADFWLRVNHLESLHAHDAVSETTKGVPGGYTA

SEQ ID NO: 4442 - protein, 227 aa, Alteromonadaceae bacterium
  misc_feature (1)..(227): tr|A0A2D9KCW3|A0A2D9KCW3_9ALTE GTP cyclohydrolase 1 OS= Alteromonadaceae bacterium OX=1916082 GN=folE PE=3 SV=1
MLAKEAVIVRDAVKLGISKEALMVHEALVARGLETPMLETGLSDEAKRQRIEGAMREIMETLGLDLSDDSLSETPLRIAKMYVDEIFSGLDYRKFPKITQIENKMQLGQPVHVSDVSLTSTCEHHFVTIDGTASVAYIPKDTVIGLSKINRLVGFFAQRPQVQERLTQQVLVALQTLTGTEDVAVAINATHYCVKARGIRDSLSYTKTSALGGKFLADAELRREFFS

SEQ ID NO: 4443 - protein, 184 aa, Alteromonadales bacterium
  misc_feature (1)..(184): tr|A0Y0H2|A0Y0H2_9GAMM GTP cyclohydrolase 1 OS=Alteromo nadales bacterium TW-7 OX=156578 GN=folE PE=3 SV=1
MHNELKDSYQKIITAVGEDAEREGLLDTPKRAAKAMEYLTQGYRQTLDEITNNAVFTSDADDMVLVQNIELYSMCEHHLLPFIGRCHIAYIPNGKVLGLSKFARIVDMFSRRFQIQEQLTHQIAKAVEEVTGAKGVGVIVEAKHMCMMMRGVEKQNSSMRTSVMLGNFRSDPKTRNEFLQLIKG

SEQ ID NO: 4444 - protein, 306 aa, Alteromonadales bacterium
  misc_feature (1)..(306): tr|A0A2N0WPC3|A0A2N0WPC3_9GAMM GTP cyclohydrolase FolE2 OS=Alteromonadales bacterium alter-6D02 OX=2058087 GN= folE2 PE=3 SV=1
MPHQMPDIASTANAQTEGNIDWVGMSHIEMPLMLETQDEAPQRVSAKVETFVNIIVPQAKGIHMSRLFLRLDELSTESSLSPSTLEQMLSDFIQSHDDISDQAQVSFTFDYHLRRASLLSKKKGWKAYPATIKATIDNNRVETELVVEVPYSSTCPCSAALSRQLIQKAFSERFENSALDKQQVIEWLGTTEGIVATPHSQRSVAQVKVKLPQDLAEFPLRQLIDLIEHVMQTPVQAAVKREDEQEFARLNAANLMFCEDAVRRAKHGLNQNDFTDFWVRINHYESLHAHDAVAVAVKGVKQGYTA

SEQ ID NO: 4445 - protein, 228 aa, Alteromonas aestuariivivens
  misc_feature (1)..(228): tr|A0A3D8M7D4|A0A3D8M7D4_9ALTE GTP cyclohydrolase 1 OS= Alteromonas aestuariivivens OX=1938339 GN=folE PE=3 SV= 1
MLSNEAVIVRDALEPAYSREALLVRNALEAKGLETPMVDNPLSDDEKRGRIEAAMHDIMGALGLDLSDDSLADTPKRIAKMYVDEIFSGLDYRKFPKITQIENKMALNQPVQVSDISLTSTCEHHFVTIDGTASVAYIPKDTVIGLSKINRLVGFFAQRPQVQERLTQQVLVALQALTGTDDVAVSINATHYCVKARGIRDTNSYTRTSAVGGQFEVNSDLRREFFAL

SEQ ID NO: 4446 - protein, 227 aa, Alteromonas australica
  misc_feature (1)..(227): tr|A0A075P5Y4|A0A075P5Y4_9ALTE GTP cyclohydrolase 1 OS= Alteromonas australica OX=589873 GN=folE PE=3 SV=1
MLAKEAVIVRDALDPSISESAQRVRAALEEKGLETPMAGNGLSDEQKRLKIESAMREVMDTLGLDLSDDSLCDTPKRIAKMYVDEIFGGLDYRKFPKITQIENKMRLDQPVQVSDISLTSTCEHHFVTIDGTATVSYIPKDTVLGLSKINRLVGFFAQRPQVQERLTQQVLVAIQTLTGSEDVAVSINATHYCVKARGIRDTNSYTKTSALGGKFLEDAELRRQFFA

SEQ ID NO: 4447 - protein, 228 aa, Alteromonas confluentis
  misc_feature (1)..(228): tr|A0A1E7ZGS5|A0A1E7ZGS5_9ALTE GTP cyclohydrolase 1 OS= Alteromonas confluentis OX=1656094 GN=folE PE=3 SV=1
MLSNEAVVVRDALEPGLSASAIMVRKALEDKGLETPMVRNGLSDDEKRARIEAAMTDIMDTLGLDRADDSLADTPARIAKMYVNEIFSGLDYRNFPKITVIENKMQLNQPVQVSDISLTSTCEHHFVTIDGTATVSYIPKDTVIGLSKLNRLVGFFAQRPQVQERLTQQVLVAIQTLAGTEDVAVTINATHYCVKARGIRDTNSYTRTSALGGQFLTDPLLRQDFFRN

SEQ ID NO: 4448 - protein, 228 aa, Alteromonas lipolytica
  misc_feature (1)..(228): tr|A0A1E8F8X6|A0A1E8F8X6_9ALTE GTP cyclohydrolase 1 OS= Alteromonas lipolytica OX=1856405 GN=folE PE=3 SV=1
MLAKEAVVVRDAVKLGISKEALLVHEALVDKGLETPMLENGLSDDAKRQRIERAMRDVMETLGLDLTDDSLAETPERIAKMYVDEIFSGLDYRKFPKITQIENKMQVGQPVQVSDISLTSTCEHHFVTIDGTATVAYIPKDTVIGLSKINRLVGFFAQRPQVQERLTQQVLVALQALTGTEDVAVVINATHYCVKARGIRDSLSYTKTSALGGQFLADAQLRREFFGN

SEQ ID NO: 4449 - protein, 227 aa, Alteromonas macleodii
  misc_feature (1)..(227): tr|K0EK45|K0EK45_ALTMB GTP cyclohydrolase 1 OS=Alteromo nas macleodii (strain Balearic Sea AD45) OX=1004787 GN= folE PE=3 SV=1
MLAKEAVIVRDALDPSISEPAQRVREALEAKGLETPMVANGLTDEQKRKRIESAMRDVMDTLGLDLTDDSLCDTPTRIAKMYVNEIFGGLDYRKFPKITAIENKMQIDQPVQVSDISLTSTCEHHFVTIDGTATVSYIPKDTVIGLSKINRLVGFFAQRPQVQERLTQQVLVALQTLTNTEDVAVSINATHYCVKARGIRDTNSYTKTSALGGRFLTDSELKREFFR

SEQ ID NO: 4450 - protein, 308 aa, Alteromonas macleodii
  misc_feature (1)..(308): tr|A0A126Q3Y4|A0A126Q3Y4_ALTMA GTP cyclohydrolase FolE2 OS=Alteromonas macleodii OX=28108 GN=folE2 PE=3 SV=1
MASFNSPNTVLPDVTTEHSTAQLPVIDKVGMQGIAIPLHILGRRGERLASKATVDVTVSLDHPNAKGIHMSRLYSLLQRYLSNQDLHKSALVSLMNALIESQDGLSNSAQLNLHFDLTVSRPALISRMSGYQSYPASLCVRRSPERYETQLKLRVPYSSTCPCSASLSRKALSEVFVQQFEGKGLSVEEMGAWLASKQASIATAHAQRSFADITLDLSDNEIPDFIGIIDLIENALGTPLQTAVKREDEQAFAKRNAENLMFVEDSVRRLHEALSTYYQATYFRVKVEHQESLHAHDAIAELSGPVHR

SEQ ID NO: 4451 - protein, 227 aa, Alteromonas marina
  misc_feature (1)..(227): tr|A0A0B3YEE5|A0A0B3YEE5_9ALTE GTP cyclohydrolase 1 OS= Alteromonas marina OX=203795 GN=folE PE=3 SV=1
MLAKEAVIVRDALDPSISEPAQRVREALEAKGLETPMVANGLTDEQKRKRIESAMRDVMDTLGLDLTDDSLCDTPTRIAKMYVNEIFGGLDYRKFPKITAIENKMQIDQPVQVSDISLTSTCEHHFVTIDGTATVSYIPKDTVIGLSKINRLVGFFAQRPQVQERLTQQVLIALQTLTNTEDVAVSINATHYCVKARGIRDTNSYTKTSALGGRFHTDSELKREFFR

SEQ ID NO: 4452 - protein, 308 aa, Alteromonas marina
  misc_feature (1)..(308): tr|A0A0B3Y3X6|A0A0B3Y3X6_9ALTE GTP cyclohydrolase FolE2 OS=Alteromonas marina OX=203795 GN=folE2 PE=3 SV=1
MASFNSHNTVLPDVTTEQSTAQVPVIDKVGMQGIAIPLHILGKRGERLASKATVDVTVSLDHPNAKGIHMSRLYNLLQRYLSNQDLHKSALVSLMNSLIESQGGLSNSAQLNLHFDLTVSRPALISKMSGYQSYPASLCVRRSPTGYKAQLKLTVPYSSTCPCSASLSRQALSDAFIQQFEGKDLSLVEMGAWLASKQASIATAHAQRSFADITLDLSDNEIPDFIGIIDLVENALGTPLQTAVKREDEQAFAKRNAENLMFVEDSVRRLHEALSTYYQATYFRVKVEHQESLHAHDAIAELSGPVHR

SEQ ID NO: 4453 - protein, 227 aa, Alteromonas mediterranea
  misc_feature (1)..(227): tr|S5AK40|S5AK40_9ALTE GTP cyclohydrolase 1 OS=Alteromo nas mediterranea 615 OX=1300253 GN=folE PE=3 SV=1
MLAKEAVIVRDALDPSISEPAQRVREALEAKGLETPMVANGLSDEQKRKRIESAMRDVMDTLGLDLTDDSLCDTPTRIAKMYVNEIFGGLDYRRFPKITAIENKMQIDQPVQVSDISLTSTCEHHFVTIDGTATVSYIPKNTVIGLSKINRLVGFFAQRPQVQERLTQQVLVALQTLTNTDDVAVSINATHYCVKARGIRDTNSYTKTSALGGRFLTESELKREFFR

SEQ ID NO: 4454 - protein, 227 aa, Alteromonas mediterranea; identical to SEQ ID NO: 4453
  misc_feature (1)..(227): tr|T2DMH1|T2DMH1_ALTMD GTP cyclohydrolase 1 OS=Alteromo nas mediterranea (strain DSM 17117 / CIP 110805 / LMG 2 8347 / Deep ecotype) OX=1774373 GN=folE PE=3 SV=1

SEQ ID NO: 4455 - protein, 227 aa, Alteromonas naphthalenivorans
  misc_feature (1)..(227): tr|F5Z6C5|F5Z6C5_ALTNA GTP cyclohydrolase 1 OS=Alteromo nas naphthalenivorans OX=715451 GN=folE PE=3 SV=1
MLAKEAVIVRDALEPSISESAQRVRAALEEKGLETPMVANGLSDEQKRQKIEIAMRDVMNTLGLDLNDDSLHDTPTRIAKMYVNEVFGGLDYRNFPKITQIENKMLLDQPVQVSDISLTSTCEHHFVTIDGLATVSYIPNDTIIGLSKLNRLVSFFAQRPQVQERLTQQVLVAIQTLASTEDVAVSINATHYCVKARGIRDTNSYTKTSALGGKFLSDVELRRAFFS

SEQ ID NO: 4456 - protein, 228 aa, Alteromonas pelagimontana
  misc_feature (1)..(228): tr|A0A2A6B0C8|A0A2A6B0C8_9ALTE GTP cyclohydrolase 1 OS= Alteromonas pelagimontana OX=1858656 GN=folE PE=3 SV=1
MLAKEAVVVRGALDPAISKEALLVRHALEAKGLETPMINTGLSDEDKRSRIEAAMSDIMDTLGLDRRDDSLSDTPKRIAKMYVDEIFSGLDYRKFPKITQIENKMQLDQPVQVSDISLVSTCEHHFVTIDGTASVSYIPKHTVLGLSKINRLVGFFAQRPQVQERLTQQVMVAIQTLTGSDDVAVSINATHYCVKARGIRDTHSYTRTSALGGKFTTDADLRREFFMR

SEQ ID NO: 4457 - protein, 227 aa, Alteromonas sp.
  misc_feature (1)..(227): tr|A0A3S5CX77|A0A3S5CX77_9ALTE GTP cyclohydrolase 1 OS= Alteromonas sp. 76-1 OX=2358187 GN=folE PE=3 SV=1
MLAKEAVIVRDALEPSISESAQRVRAALEEKGLETPMVANGLSDEQKRQKIEIAMRDVMNTLGLDLNDDSLHDTPTRIAKMYVNEVFGGLDYRNFPKITQIENKMRLDQPVQVSDISLTSTCEHHFVTIDGLATVSYIPKDTIIGLSKLNRLVSFFAQRPQVQERLTQQVLVAIQTLASTEDVAVSINATHYCVKARGIRDTNSYTKTSALGGKFLSDVELRRAFFS

SEQ ID NO: 4458 - protein, 228 aa, Alteromonas sp.
  misc_feature (1)..(228): tr|A0A3N5Z4Y9|A0A3N5Z4Y9_9ALTE GTP cyclohydrolase 1 OS= Alteromonas sp. U0105 OX=2259342 GN=folE PE=3 SV=1
MLSKEAVVMRSRSEPSLTKEAVIVRDALISQGLETPMVENHLSDEAKRAKIENAMRDVMETLGLDLTDDSLMDTPNRIAKMYVNEIFSGLDYSKFPKITQIENKMRLNQPVQVSDISLTSTCEHHFVTIDGTASVSYIPKRTVLGLSKINRLVGFFAQRPQVQERLTQQVMVAIQALTGTEDVAVSINATHYCVKARGIRDSNSYTKTSALGGVFNTDPQMRREFFES

SEQ ID NO: 4459 - protein, 227 aa, Alteromonas stellipolaris
  misc_feature (1)..(227): tr|A0A0S1YR20|A0A0S1YR20_9ALTE GTP cyclohydrolase 1 OS= Alteromonas stellipolaris LMG 21856 OX=1160720 GN=folE PE=3 SV=1
MLAKEAVIVRDALEPSISESAQRVRAALEEKGLETPMVANGLSDEQKRQKIEIAMRDVMNTLGLDLTDDSLHDTPTRIAKMYVNEVFGGLDYRNFPKITQIENKMRLDQPVQVSDISLTSTCEHHFVTIDGLATVSYIPKDTIIGLSKLNRLVSFFAQRPQVQERLTQQVLVAIQTLASTDDVAVSINATHYCVKARGIRDTNSYTKTSALGGKFLSDVELRRAFFS

SEQ ID NO: 4460 - protein, 225 aa, Altibacter sp.
  misc_feature (1)..(225): tr|A0A2D9N7V0|A0A2D9N7V0_9FLAO GTP cyclohydrolase 1 OS= Altibacter sp. OX=2024823 GN=folE PE=3 SV=1
MDLEKQLRAIEAQGDDHIGSSTDTPLRPDAFELSDIEKIALIKKDVQNIMNTLGLDLTDDSLKGTPTRVAKMFVQEIFGGLHPDRKPKASTFENKYKYGEMLVEKNITLYSTCEHHLLPIVGKAHIAYISSGTVVGLSKMNRVVDYFAKRPQVQERLTMQIVEELQKVLGTEDVACVIDAKHLCVNSRGIRDIDSSTVTSEFGGKFKDPQTRREFLDYIHLDTEF

SEQ ID NO: 4461 - protein, 199 aa, Altibacter sp.
  misc_feature (1)..(199): tr|A0A2D9N5Z5|A0A2D9N5Z5_9FLAO GTP cyclohydrolase 1 OS= Altibacter sp. OX=2024823 GN=folE PE=3 SV=1
MGSYKFFEEYNHEVTDDLRNNFSEILKGVGEDITREGIVKTPERAAKAMQFLTSGHCQDPEEVLRSAMFAEGYNDMVIIKDIELYSLCEHHMLPFFGKAHIAYIPDGHIVGLSKIPRVVDIFARRLQVQERLTHDILECINTTLKPKGVAVVIEASHMCMMMRGVQKQNSVTTTSGFRGQFEKIETRSEFLKLISSDLA

SEQ ID NO: 4462 - protein, 257 aa, Alysiella crassa
  misc_feature (1)..(257): tr|A0A376BVA4|A0A376BVA4_9NEIS GTP cyclohydrolase FolE2 OS=Alysiella crassa OX=153491 GN=folE2 PE=3 SV=1
MMIPDVQSTQDLRNTPINQVGIKDLRFPIRVHSQDGTQSTVARLTMTVFLPAEQKGTHMSRFVALMEEQTAAIDFDELRRLTGEMLQRLDSHSGKISVSFPFFRQKTAPISGIKSLLDYDVTLCGEIKNGEYAYRLKVLIPVTSLCPCSKEISQYGAHNQRSHVTLSLQCSADVAIEEVIDLVENQASCQLYGLLKRPDEKYVTEKAYENPKFVEDMVRDIAVALRSDSRVQAFEVESENFESIHNHSAYAVITYPS

SEQ ID NO: 4463 - protein, 258 aa, Alysiella filiformis
  misc_feature (1)..(258): tr|A0A286EC91|A0A286EC91_9NEIS GTP cyclohydrolase FolE2 OS=Alysiella filiformis DSM 16848 OX=1120981 GN=folE2 PE=3 SV=1
MTPMPDVQSTTDVRNMPINQVGIKALRFPIRFKTAQSEQHTIAHFAMTVYLPAEQKGTHMSRFVALLEENQQAFDFQKLRQLTEQMLDKLHTHSGKISMAFPFFRKKAAPVSGIQSFLDYDVTLTSEIKNGAFSGCLKILVPITSLCPCSKEISQYGAHNQRSHVTLTLHSHNDQISIEEIIDLIEQQGSSQLYGLLKRPDEKFVTETAYENPKFVEDIVRDIAVALRQDSRIHAFEVESENFESIHNHSAYAYIAYP

SEQ ID NO: 4464 - protein, 250 aa, Amantichitinum ursilacus
  misc_feature (1)..(250): tr|A0A0N0GPU4|A0A0N0GPU4_9NEIS Putative GTP cyclohydrol ase 1 type 2 OS=Amantichitinum ursilacus OX=857265 GN=y bgI PE=4 SV=1
MSVSRQELENYIGQYLRVSLFRDYCPNGIQVEGRASIQRIATAVTASLAAIEAAHAIGADALLVHHGYFWKGEAAPITGTKKARIARLISTDINLFAYHLPLDAHPDVGNNATLGQILGARTVGQFGEQNLAWIGEFDAPVTLRQLGARLHSMLEREPLLIGDLDKPLRRIGWCTGGAQSFFHEAATLDIDCFVTGEASEFVTHTARESGVAFVAAGHHATERGGVRALGAHLAEHFGLDVTHLDIPNPV

SEQ ID NO: 4465 - protein, 268 aa, Amantichitinum ursilacus
  misc_feature (1)..(268): tr|A0A0N0XIZ8|A0A0N0XIZ8_9NEIS GTP cyclohydrolase FolE2 OS=Amantichitinum ursilacus OX=857265 GN=folE2 PE=3 SV =1
MNAPHNNVQPLTDVQSSEDTRNIAINKVGIKSIRHPVRVADRADGIQHTIATFDMYVFLPQHFKGTHMSRFVQILNSHEKEISVESFETILREMCTALEAEAGYIEMRFPYFINKTAPVSGVQSLLDYDVTLIGEIRNGEYEMKLKVLVPVTSLCPCSKQISQYGAHNQRSHVTVTATLGDHLWIEELVELVEAQASCELWGLLKRPDEKYVTERAYDNPKFVEDMVRDVAAQLNTEQRVVAYVVESENFESIHNHSAYALIEADKRG

SEQ ID NO: 4466 - protein, 360 aa, Amaricoccus sp.
  misc_feature (1)..(360): tr|A0A501WTU3|A0A501WTU3_9RHOB GTP cyclohydrolase FolE2 OS=Amaricoccus sp. HB172011 OX=2589815 GN=folE2 PE=3 S V=1
MDGPTAINEHQPTEAEARAAARLLMRWAGRAGEAGPGEVAELVARAAPYPDLSREFEAGFRPDAAYLADMPDLQNGPAALIRGARVPIQHVGISNFRLPIRYRVREGGEVQLETSVTGSVSLEADRKGINMSRIMRSFYQHAEKHFSAEVIQGVLDSYVVDLDSFDARIQMRFRYPMLRRSLRSGLEGYQYYDVALEVVRHGRDTRRIMHLDYVYSSTCPCSLELSEHARETRGRIAVPHAQRSVARVSVELVGTERLWFEDLVDLCARAIPTETQVMVKREDEQAFAELSGANPIFVEDAVRVLCAQIEAEARIGDFRVVASHQESLHSHDAVSILTRGETFRQSSYDPRLFDTLYHVG

SEQ ID NO: 4467 - protein, 267 aa, Aminivibrio pyruvatiphilus
  misc_feature (1)..(267): tr|A0A4R8MGP8|A0A4R8MGP8_9BACT GTP cyclohydrolase FolE2 OS=Aminivibrio pyruvatiphilus OX=1005740 GN=folE2 PE=3 SV=1
MRDVQSERDSRRIPIDRVGVGGVSYPIVVLDQKENIQHTVASVSMSVSLPHEYRGTHMSRFIEVLHEFQGKVTLPHMEQIAEDLRTVLSAECAEIVFSFPYFISRNAPVSGLSSFTRYDVSFTAVKGEDFFDLVTSVTVPVQTLCPCSREISEAGAHNQRAFVTIAARMNGLVWIEELVDIAERNASAPVYTLLKREDEKFVTEQAYNTPRFVEDVLRDVAVDLEAEDRITWYSIRVASSESIHNHDAFASLERDKEGKGKKREERK

SEQ ID NO: 4468 - protein, 213 aa, Aminobacter aminovorans
  misc_feature (1)..(213): tr|A0A142M7J9|A0A142M7J9_AMIAI GTP cyclohydrolase 1 OS= Aminobacter aminovorans OX=83263 GN=folE PE=3 SV=1
MDAVAKKLMPQSAYMDKPATDRPTEAEVEAAVKVLLRWTGDDPQREGLIDTPKRVTKAFREMFNGYDMCPADELGRTFEEVAGYDDLVIVRDIKFHSHCEHHMVPIIGKAHVGYLPDGKVVGLSKIARVVDIFAHRLQTQEAMTAQIAGVIQDVLNPRGVAVMIEAEHMCMAMRGIRKQGSTTLTSTFTGVFRDTPEEQVRFVTMVRAGGGGI

SEQ ID NO: 4469 - protein, 213 aa, Aminobacter aminovorans
  misc_feature (1)..(213): tr|A0A380WPR8|A0A380WPR8_AMIAI GTP cyclohydrolase 1 OS= Aminobacter aminovorans OX=83263 GN=folE PE=3 SV=1
MDAVAKKLMPQSAYMDKPATDRPTEAEVEAAVKVLLRWTGDDPQREGLIDTPKRVTKAFREMFNGYDMCPADELGRTFEEVAGYDDMVIVRDIKFHSHCEHHMVPIIGKAHVGYLPDGKVVGLSKIARVVDIFAHRLQTQEAMTAQIAGVIQDVLNPRGVAVMIEAEHMCMAMRGIRKQGSTTLTSTFTGVFRDTPEEQVRFVTMVRAGGGGI

SEQ ID NO: 4470 - protein, 212 aa, Aminobacter sp.
  misc_feature (1)..(212): tr|A0A316GPD5|A0A316GPD5_9RHIZ GTP cyclohydrolase 1 OS= Aminobacter sp. AP02 OX=2135737 GN=folE PE=3 SV=1
MDAVAKKLMPQSAYMDMPTTDRPSAAEVEAAVKVLLRWTGDNPEREGLIDTPKRVTKAFREMFNGYDMCPAEELGRTFEEVAGYDDLVIVRDIKFHSHCEHHMVPIIGKAHVGYLPDGKVVGLSKIARVVDIFAHRLQTQEAMTAQIAGVIQDVLNPRGVAVMIEAEHMCMAMRGIRKQGSTTLTSTFTGVFRDTPEEQVRFVTMVRAGGGI

SEQ ID NO: 4471 - protein, 211 aa, Aminobacter sp.
  misc_feature (1)..(211): tr|A0A562FCP5|A0A562FCP5_9RHIZ GTP cyclohydrolase 1 OS= Aminobacter sp. J15 OX=935260 GN=folE PE=3 SV=1
MDAIVKNFPPRAENPKHSEPAPTQAEVEAAVRTLLRWTGDNPDREGLIDTPKRVAKAYREMFSGYTQDPAEELGRTFEEVEGYNDLVLVRDIQFHSHCEHHMVPIIGRAHVGYLPDGKVVGLSKIARVVDIFAHRLQTQEAMTAQIAGVIQDVLNPRGVAIMIEAEHMCMAMRGIRKQGSTTLTTTFTGAFQDDPQEQARFMMMLRAGTGR

SEQ ID NO: 4472 - protein, 261 aa, Aminobacterium colombiense
  misc_feature (1)..(261): tr|D5EG48|D5EG48_AMICL GTP cyclohydrolase FolE2 OS=Amin obacterium colombiense (strain DSM 12261 / ALA-1) OX=57 2547 GN=folE2 PE=3 SV=1
MRDVQNERDSRKIPIDLVGVRNLSYPIIVLDRQQNEQRTVAEISMAVSLPHHYRGTHMSRFIEVLEEFQGKVTLSQMEHITEHLRKVLHADRAEITFQFPYFMRRYAPVTNLPSYSRYDVTFWSQKSDTFDLVTTVSVPVQTLCPCSKEISEAGAHNQRGRIDISARMKNFVWIEELVEIAERCGSAPLHTLLKREDEKYVTEEAYNNAKFVEDVLRDTALALEAEPRISWYKVRVVSSESIHNHDAFAELERHVAHGGSI

SEQ ID NO: 4473 - protein, 259 aa, Aminobacterium sp.
  misc_feature (1)..(259): tr|A0A3D0MR35|A0A3D0MR35_9BACT GTP cyclohydrolase FolE2 OS=Aminobacterium sp. OX=1872491 GN=folE2 PE=3 SV=1
MSMRDVQSERDSRRIPIDLVGIRDLSYPIVVLDREQKEQHTVANVSMAVSLPEHYRGTHMSRFIEVLEEFQGKVTLSQMEHITEHLRQTLRADRAEITFQFPYFIRRHAPVTKIPSYSRYDVIFWAQKDSSFDLITTVIVPVQTLCPCSKEISEFGAHNQRARIEVAARMKNFVWIEELVEIAERCGSAPLHSLLKREDEKYVTEQAYQNAKFVEDVLRDTALELEAESRISWYRVRVVSSESIHNHDAFAELERHVSG

SEQ ID NO: 4474 - protein, 263 aa, Aminomonas paucivorans
  misc_feature (1)..(263): tr|E3CW99|E3CW99_9BACT GTP cyclohydrolase FolE2 OS=Amin omonas paucivorans DSM 12260 OX=584708 GN=folE2 PE=3 SV =1
MRDVQNEPDLRNIPLDRVGVSDLSYPIEVRDRDHKVQRTVARIAMAVSLPRDYRGTHMSRFVEVLESMGGQVTVHRMDSLVALLQERLAAQSAEVEFRFPYFIQRHAPQSGAASLTRYDVVFRASRQEDRFDLVTTVRAPVLTLCPCSREISEAGAHNQRAHVTLSVRMASIVWIEELADLAERCASCPVYSLLKREDEKHVTEQAYHNPRFVEDVAREAALALDGDPRIPWYRVTVKSHESIHNHDAFASLERDRRSPEVAP

SEQ ID NO: 4475 - protein, 190 aa, Ammonifex degensii
  misc_feature (1)..(190): tr|C9RBW5|C9RBW5_AMMDK GTP cyclohydrolase 1 OS=Ammonife x degensii (strain DSM 10501 / KC4) OX=429009 GN=folE P E=3 SV=1
MFDQEKIKQAVRLLLEAIGEDPEREGLRDTPERVARMYAEIFAGLQEDPAVHLEKYFTENHEEMVLVRDIPVYSVCEHHLLPFFGVAHVAYIPRGVVTGLSKLARVVDGFARRPQLQERLTTQIADTIMEKLNPRGVLVVIEAEHMCMTMRGVKKPGAKTVTSAVRGIFQQNAATRAEALALIRGRDFRP

SEQ ID NO: 4476 - protein, 191 aa, Ammonifex sp.
  misc_feature (1)..(191): tr|A0A3A6MTT8|A0A3A6MTT8_9THEO GTP cyclohydrolase 1 OS= Ammonifex sp. OX=1872493 GN=folE PE=3 SV=1
MFDREKIERAVRMILEAVGEDPGREGLRETPQRVARMYEEIFCGLTEDPADHLLKYFTENHEEMVLVRDIPVYSVCEHHLLPFLGTAHVAYIPRAGSITGLSKLARVVEGYARRPQLQERLTSQVADAIMERLEPRGVLVVIEAEHMCMSMRGVMKPGAKTVTSAVRGIFQQNPATRAEAFALIRGREPRG

SEQ ID NO: 4477 - protein, 191 aa, Ammonifex thiophilus
  misc_feature (1)..(191): tr|A0A3D8P433|A0A3D8P433_9THEO GTP cyclohydrolase 1 OS= Ammonifex thiophilus OX=444093 GN=folE PE=3 SV=1
MFDQEKIKQAVRLLLEAIGEDPEREGLRDTPERVARMYAEIFAGLREDPAVHLEKYFTENHEEMVLVRDIPVYSVCEHHLLPFFGVAHVAYIPRAGVVTGLSKLARVVDGFARRPQLQERLTTQIADTIMEKLNPRGVLVVIEAEHMCMTMRGVKKPGAKTVTSAVRGIFQQNAATRAEALALIRGRDFRP

SEQ ID NO: 4478 - protein, 187 aa, Ammoniphilus oxalaticus
  misc_feature (1)..(187): tr|A0A419SN18|A0A419SN18_9BACL GTP cyclohydrolase 1 OS= Ammoniphilus oxalaticus OX=66863 GN=folE PE=3 SV=1
MAVDHEKIQQAVRMILEAVGEDPDREGLIETPARVARMYEEIFQGMFIDPTEYFKVIFSEQHEELVLVKDIPFYSTCEHHLVPFFGTAHVAYIPKGGRVVGLSKLARALEAVCRRPQLQERITSVVANSIMDELQPYGVAVVVEAEHMCMTMRGVKKPGSKTVTSAVRGCFEKDAAARAEVFSLMKD

SEQ ID NO: 4479 - protein, 187 aa, Ammoniphilus sp.
  misc_feature (1)..(187): tr|A0A4Q1T9L5|A0A4Q1T9L5_9BACL GTP cyclohydrolase 1 OS= Ammoniphilus sp. CFH 90114 OX=2493665 GN=folE PE=3 SV=1
MNVDQEKIQQAVRMILEAVGEDADREGLLDTPARVARMYEEIFQGLHIDPKEYFSVIFSEEHEELVLVKDIPFYSTCEHHLVPFFGVAHVAYIPQGGRVVGLSKLARAVEAVAKRPQLQERITSVVANSIMETLRPHGVVVVVEAEHMCMTMRGVKKPGSKTVTSAVRGCFEDDVAARAEVFSLIKN

SEQ ID NO: 4480 - protein, 187 aa, Amnibacterium kyonggiense
  misc_feature (1)..(187): tr|A0A4R7FQ49|A0A4R7FQ49_9MICO GTP cyclohydrolase 1 OS= Amnibacterium kyonggiense OX=595671 GN=CLV52_0441 PE=3 SV=1
MTPDLERAQRAVEEYLRALGLDPADPSLDRTPERVARLGAELFAGVGVDPVPDLAASAVADTDARGPVAFLDIPFRSTCEHHLLKFAGAVSLVYRPGAVAGLGAIVRVIETIAARPQVQERLTDEIAFALEHGLGATGVLVTAVAEHDCVAIRGPRIRGATVRTLAARGAYAVEPTAAEARSLVGLA

SEQ ID NO: 4481 - protein, 195 aa, Amnibacterium sp.
  misc_feature (1)..(195): tr|A0A3A1TZS3|A0A3A1TZS3_9MICO GTP cyclohydrolase 1 OS= Amnibacterium sp. DD4a OX=2306585 GN=D1781_01375 PE=3 S V=1
MTPDLERARRAVEEYLRAYGLDPEDPTLERTPDRVARLGGELFGGVGVDPLPALAASAVAEVAARGPVAFLDVPFRSICEHHLLKFAGTVSVVYLPGRAVAGLGAIVGLIETVSSRPQVQERLTDEIALALEQALGATGVLVSATAEHDCVAMRGPRIRGAAVRTLAARGAYAVEPAAAEARALLRLGPTGVPGE

SEQ ID NO: 4482 - protein, 193 aa, Amnibacterium sp.
  misc_feature (1)..(193): tr|A0A2V1HSA3|A0A2V1HSA3_9MICO GTP cyclohydrolase 1 OS= Amnibacterium sp. M8JJ-5 OX=2173173 GN=folE PE=3 SV=1
MDADRIRRAVGELLAAIGEDSTRDGLRETPDHVAAAYAELFSGVGVDAAAYLDEASDVLDLTVGAEPVILRDIPFRSTCEHHLLPFEGTVSLAYLPRARVTGLGRLARVVDAVASRPQIQERLTEEIADAIHRGLDADGALVIVTASHACLWARGSRTRGASVVTIAGRGEYSSGEGRRDVLPLLTGSSEAAG

SEQ ID NO: 4483 - protein, 305 aa, Amphibacillus marinus
  misc_feature (1)..(305): tr|A0A1H8GYV5|A0A1H8GYV5_9BACI GTP cyclohydrolase FolE2 OS=Amphibacillus marinus OX=872970 GN=folE2 PE=3 SV=1
MKQLRQLPSKTERHRIFGSVKPGKKIKPTEKEDMPDLQNKQADFLFELDQVGIANVKHPIIINSLATPTEQTSVASFSLSSSVAQDSKGTNMSRFTEQLQLYFSENKLNTDLTTLKSFTKALAERLESPDALIEIEVPWFFERRGPSSDLAGLNHADLAIRIQYREDRPFEVTVALTGTITTLCPCSKEISEYSAHNQRGTVTMEVELSADFDEDKVDWKLLLLEAAESNASARIHPVLKRPDEKMVTEQAYENPRFVEDIVRLVAADLYEASEVKAFYIACRNQESIHLHDAVASITFDKTTNE

SEQ ID NO: 4484 - protein, 309 aa, Amphibacillus xylanus
  misc_feature (1)..(309): tr|K0J4A5|K0J4A5_AMPXN GTP cyclohydrolase FolE2 OS=Amph ibacillus xylanus (strain ATCC 51415 / DSM 6626 / JCM 7 361 / LMG 17667 / NBRC 15112 / Ep01) OX=698758 GN=folE2 PE=3 SV=1
MDHKERKFRQLPNKEDRLRLFGSVKPGHKTKPSNKEDMADLQNTQADFLFKLDEVGITNVKHPILINSELLPNQQSSVGSFTFSSTVDQYNKGTNMSRFTEQLHDFYERNLLSFDLNNLKIFTKELAQRLKTKDAKLEIKAPWFFERKGPSSGLAGLNYADIKVSISYLAPDQFNIIVGLKGSVTTLCPCSKEISEYSAHNQRGEVKMEIELRDDFDESKLDWKAFLLEAAESNASARLHPVLKRPDEKMVTEQAFENPRFVEDMVRLVAADLYESDDVVAFQVRCQNHESIHLHDAIASISFDKRAIQ

SEQ ID NO: 4485 - protein, 203 aa, Amphiplicatus metriothermophilus
  misc_feature (1)..(203): tr|A0A239PQJ9|A0A239PQJ9_9PROT GTP cyclohydrolase 1 OS= Amphiplicatus metriothermophilus OX=1519374 GN=folE PE= 3 SV=1
MSVEKVTALKAPDERPRPGRQEAEEAVRTLLAYFGEDPLREGLVDTPRRFVDAYEEFLSGYAEDPVAILSRTFEEVDGYNDIVLMKNIRLESHCEHHIQPIIGVAHVAYLPSDRVVGISKLARVVDAYARRLQSQETLTSQIATAIETALAPRGVAVRIEAEHQCISTRGVRKTDVACVTQTLTGVFHADPQMEARFYRLIGV

SEQ ID NO: 4486 - protein, 196 aa, Amphiplicatus metriothermophilus
  misc_feature (1)..(196): tr|A0A239PZ38|A0A239PZ38_9PROT GTP cyclohydrolase 1 OS= Amphiplicatus metriothermophilus OX=1519374 GN=folE PE= 3 SV=1
MGNPIDRTEEDRRRAMEAVRELIRWIGDDPEREGLKDTPRRVIEAFLEYFRGYEECPETYLTRTFEQVGGYDEIVLLRDIPFHSHCEHHLAPIMGKAHVAYLPKDKVVGISKLARVVHAFAKRLQVQERLTAEIADCIQKVLEPAGVAVVIEATHACMTCRGVETPDVIMTTSRMMGVFREDDKARHEVLKLIGFN

SEQ ID NO: 4487 - protein, 179 aa, Amphritea atlantica
  misc_feature (1)..(179): tr|A0A1H9FJN9|A0A1H9FJN9_9GAMM GTP cyclohydrolase 1 OS= Amphritea atlantica OX=355243 GN=folE PE=3 SV=1
MEKEFASIIQQLGEDLTREGLVDTPKRAAKAMQFLTRGYEQNLDEVINGALFPTDNSEMVIVKDIELYSMCEHHMLPFIGKCHVGYIPKGQVIGLSKIARIVDMFARRLQIQENMTKQIADAIMQATGADGVGVVIEAQHMCMMMRGVEKQNSSMKTSMMLGSFRKSQSTRGEFLSLIN

SEQ ID NO: 4488 - protein, 179 aa, Amphritea balenae
  misc_feature (1)..(179): tr|A0A3P1SKY7|A0A3P1SKY7_9GAMM GTP cyclohydrolase 1 OS= Amphritea balenae OX=452629 GN=folE PE=3 SV=1
MEKEFASIIEQLGEDLTREGLVDTPKRAAKAMQFLTRGYQQDLDEVINGALFPTENSEMVIVKDIELYSMCEHHMLPFIGKCHVGYIPNGQVIGLSKIARIVDMFARRLQIQENMTKQVADAIMHATGAAGVGVVIEAQHMCMMMRGVEKQNSSMKTSMMLGSFRKSQATRTEFLALIH

SEQ ID NO: 4489 - protein, 179 aa, Amphritea sp.
  misc_feature (1)..(179): tr|A0A430KVR4|A0A430KVR4_9GAMM GTP cyclohydrolase 1 OS= Amphritea sp. MCCC 1K03512 OX=2490544 GN=folE PE=3 SV=1
MEKEFASIIEQLGEDITREGLVDTPKRAAKAMQFLTRGYEQNLDEVINGALFPTENSEMVIVKDIELYSMCEHHMLPFIGKCHVGYVPKGQVIGLSKIARIVDMFARRLQIQENMTKQIADAIMEATGADGVGVVIEARHMCMMMRGVEKQNSSMKTSMMLGSFRKSQPTRSEFLTLIN

SEQ ID NO: 4490 - protein, 204 aa, Amycolatopsis alba
  misc_feature (1)..(204): tr|A0A229R8P5|A0A229R8P5_9PSEU GTP cyclohydrolase 1 OS= Amycolatopsis alba DSM 44262 OX=1125972 GN=folE PE=3 SV =1
MTTDRTTPSVNGESPVFDQDRAEKAVRELLLACGEDPDRDGLLETPARVARAYREMFAGLYTEPDHVLDRTFDEAHEELVLVTDIPMFSTCEHHLVPFHGVAHVGYIPNGHGKVTGLSKLARLVDLYAKRPQVQERLTSQVADALMRKLAPRGAIVVVEAEHLCMAMRGIRKPGARTTTSAVRGLLQSSASSRAEALDLIKGRR

SEQ ID NO: 4491 - protein, 198 aa, Amycolatopsis alba
  misc_feature (1)..(198): tr|A0A229RWU8|A0A229RWU8_9PSEU GTP cyclohydrolase 1 OS= Amycolatopsis alba DSM 44262 OX=1125972 GN=folE PE=3 SV =1
MSTPALRVVHETGPGPDLEAAEAAAADLLTALGISLDSESLRGTPGRMARAYAELFTPRSFDLTTFPNDEGYDELVLARGIPVRSVCEHHLLPFVGVAHVGYLPGERILGLSKLARIVEHFACRPQVQERLTKQVADWLDEQLEPRGVGVVIEAEHSCMTLRGVQAAGSSTVTSTLLGTLREDARSRQEFFALTGING

SEQ ID NO: 4492 - protein, 195 aa, Amycolatopsis albispora
  misc_feature (1)..(195): tr|A0A344L151|A0A344L151_9PSEU GTP cyclohydrolase 1 OS= Amycolatopsis albispora OX=1804986 GN=folE PE=3 SV=1
MAAPLRVVNGRTGVDVEAAQRAVADLLVALGHDPASEHLADTPRRVADAYGELLTPREFNLTTFPNDEGYDELVLARGIPVQSLCQHHLLPFHGVAHVGYLPGERILGLSKLARVVELYARDLQVQERLTKQVADWLQQHLAPKGVGVVIEAEHMCMSLRGVRATGSSTVTSALHGVLRDDARSRQEFFGLAGIR

SEQ ID NO: 4493 - protein, 206 aa, Amycolatopsis albispora
  misc_feature (1)..(206): tr|A0A344LL97|A0A344LL97_9PSEU GTP cyclohydrolase 1 OS= Amycolatopsis albispora OX=1804986 GN=folE PE=3 SV=1
MRTASSAAEHRVSDDGPVFDQDRAEKAVRELLLACGEDPDREGLVETPARVARAYHEMFAGLYSNPDQVLDRTFDESHEELVLVTDIPLYSTCEHHLVPFHGVAHVGYIPNSHGKVTGLSKLARLVDLYAKRPQVQERLTSQVADALDRKLQPSGVIVVVEAEHLCMAMRGIRKPGARTTTSAVRGILRTSATSRAEALNLIKGRG

SEQ ID NO: 4494 - protein, 201 aa, Amycolatopsis antarctica
  misc_feature (1)..(201): tr|A0A263CXS0|A0A263CXS0_9PSEU GTP cyclohydrolase 1 OS= Amycolatopsis antarctica OX=1854586 GN=folE PE=3 SV=1
MAPSDSQDLTSPGPVDTERVADLVGQLLAAIGEDPGREGLSDTPARVAAWWRRFFSPDPSAAPTCFTEPHLSGQLVVIGGMSVWSLCEHHLLPMNLDVVVGYVPDGEVMGLSKFGRIAQQCAGRLQVQERFTRQVADEIAVVIGSTDVAVAVRGTHLCMSARGVRMEAARTTTLQTGGRFESDSVLSQQFLTLATDRWRVA

SEQ ID NO: 4495 - protein, 201 aa, Amycolatopsis antarctica
  misc_feature (1)..(201): tr|A0A263CXM3|A0A263CXM3_9PSEU GTP cyclohydrolase 1 OS= Amycolatopsis antarctica OX=1854586 GN=folE PE=3 SV=1
MSEQRAAGPGGPVFDQARAERAIRELLLACGEDPDRNGLQETPARVARAYQEMFAGLYDDPDTVLDKTFDESHEELVLVTDIPMYSTCEHHLVPFHGVAHVGYIPNELGRVTGLSKLARLVDLYARRPQVQERLTSQLADAMERKLQPRGVIVVVQAEHLCMAMRGIRKPGARTTTSAVRGQLKSSASSRAEALDLIKGRR

SEQ ID NO: 4496 - protein, 204 aa, Amycolatopsis australiensis
  misc_feature (1)..(204): tr|A0A1K1QI01|A0A1K1QI01_9PSEU GTP cyclohydrolase 1 OS= Amycolatopsis australiensis OX=546364 GN=folE PE=3 SV=1
MTWTDQRSPSDADRPVFDQDRAEKAIRELLLACGEDPERDGLKDTPARVARAYREMFAGLYTEPDAVLDRTFDESHEELVLVTDIPMFSQCEHHLVPFHGVAHVGYIPNAAGKVTGLSKLARLVDLYAKRPQVQERLTSQVADAIVRKLEPRGVIVVIEAEHLCMAMRGIRKPGARTTTSAVRGQLKNSASSRAEALDLIKARR

SEQ ID NO: 4497 - protein, 206 aa, Amycolatopsis australiensis
  misc_feature (1)..(206): tr|A0A1K1SIC7|A0A1K1SIC7_9PSEU GTP cyclohydrolase 1 OS= Amycolatopsis australiensis OX=546364 GN=folE PE=3 SV=1
MTVDPVSEPVPLRHLGVVHDRDTMDLPAAERAVADLLRALGKDPSSEHLGDTPRRVANAYAEMLRPRDFQLTTFPNDEGYDELVLAKSIPVQSLCEHHLLPFRGVAHVGYLPGERILGLSKLARVVELFARDLQVQERLTKQVADWLQEHLAPKGVGVVIEAEHLCMSLRGVRANGALTVTSSLHGLLREEPKTRQEFFALTGVSA

SEQ ID NO: 4498 - protein, 204 aa, Amycolatopsis azurea
  misc_feature (1)..(204): tr|M2Q5A3|M2Q5A3_9PSEU GTP cyclohydrolase 1 OS=Amycolat opsis azurea DSM 43854 OX=1238180 GN=folE PE=3 SV=1
MTTDRTTPSGNGAGPVFDQDRAEKAVRELLLACGEDPDRDGLLETPARVARAYREMFAGLYTEPDHVLDRTFDEAHEELVLVTDIPMFSVCEHHLVPFHGVAHVGYIPNGHGKVTGLSKLARLVDLYAKRPQVQERLTSQVADALMRKLAPRGAIVVVEAEHLCMAMRGIRKPGARTTTSAVRGLLQSSASSRAEALDLIKGRR

SEQ ID NO: 4499 - protein, 198 aa, Amycolatopsis azurea
  misc_feature (1)..(198): tr|M2QGG3|M2QGG3_9PSEU GTP cyclohydrolase 1 OS=Amycolat opsis azurea DSM 43854 OX=1238180 GN=folE PE=3 SV=1
MSTPALRVVHETGPGPDLEAAEAAAADLLTALGISLDSESLRGTPGRMARAYAELFTPRSFDLTTFPNDEGYDELVLARGIPVRSVCEHHLLPFVGVAHVGYLPGERILGLSKLARIVEHFACRPQVQERLTKQVADWLDEQLEPRGVGVVIEAEHSCMTLRGVQAVGSSTVTSTLLGTLREDARSRQEFFALTGING

SEQ ID NO: 4500 - protein, 204 aa, Amycolatopsis balhimycina
  misc_feature (1)..(204): tr|A0A428WEZ9|A0A428WEZ9_AMYBA GTP cyclohydrolase 1 OS= Amycolatopsis balhimycina DSM 5908 OX=1081091 GN=folE P E=3 SV=1
MTWMDQTSPSSADRPVFDLDRAEKAIRELLLACGEDPERDGLKDTPARVARAYKEMFAGLYTEPDSVLDRTFDEAHEELVLVTDIPMYSVCEHHLVPFHGVAHVGYIPNAAGKVTGLSKLARLVDLYAKRPQVQERLTSQVADAIVRKLEPRGVIVVIEAEHLCMAMRGIRKPGARTTTSAVRGQLKNSPSSRAEALDLIKARR

SEQ ID NO: 4501 - protein, 209 aa, Amycolatopsis balhimycina
  misc_feature (1)..(209): tr|A0A428W551|A0A428W551_AMYBA GTP cyclohydrolase 1 OS= Amycolatopsis balhimycina DSM 5908 OX=1081091 GN=folE P E=3 SV=1
MTVDPVREPVPLRHLGVVHDREAVDLQAAERAVADLLQALGKDPASEHLGDTPRRVAQAYAEMLQPRDFRLTTFPNDEGYDELVLAKSIPVQSLCEHHLLPFRGVAHVGYLPGERILGLSKLARVVEMFARDLQVQERLTKQVADWLQEHLEPQGVGVVIEAEHLCMSLRGVRATGALTVTSSLHGLLREEPKTRQEFFALTGVSAGRS

SEQ ID NO: 4502 - protein, 207 aa, Amycolatopsis bartoniae
  misc_feature (1)..(207): tr|A0A557YVB4|A0A557YVB4_9PSEU GTP cyclohydrolase 1 OS= Amycolatopsis bartoniae OX=941986 GN=folE PE=3 SV=1
MTVNDLYPADVPARHLSVVHDRETVDLPAAQRAIRDLLVALGKDPESEHLADTPRRVAKSYAELLNPREFQLTTFPNDEGYDELVLAKRIPFSSLCEHHMLPFYGVAHVGYLPGERILGLSKLARVVELFARDLQVQERLTKQVADWLQEHLAPKGVGVVLEAEHLCMSLRGVQAAGSRTVTSALHGLLREDRGTRQEFFALTGTQR

SEQ ID NO: 4503 - protein, 230 aa, Amycolatopsis cihanbeyliensis
  misc_feature (1)..(230): tr|A0A542DN47|A0A542DN47_9PSEU GTP cyclohydrolase 1 OS= Amycolatopsis cihanbeyliensis OX=1128664 GN=folE PE=3 S V=1
MGRVSTDAVTPTTRTVIIASESPNNVRPVFDEVGPERANGRVFDQVRAENAIRELLIACGEDPEREGLRETPARVARAYQEMFAGLYDDPDRVLDRTFAESHEEMVLVSDIPMYSTCEHHLVPFHGVAHVGYIPNGHGNVTGLSKLARLVDLYAKRPQVQERLTSQIADALDRRLKPRGVIVVVEAEHLCMSMRGIRKPGARTTTSAVRGLLQTSASSRAEALDLIKGRR

SEQ ID NO: 4504 - protein, 204 aa, Amycolatopsis coloradensis
  misc_feature (1)..(204): tr|A0A1R0L1P6|A0A1R0L1P6_9PSEU GTP cyclohydrolase 1 OS= Amycolatopsis coloradensis OX=76021 GN=folE PE=3 SV=1
MTTDRTTASDNGPGPVFDQERAEKAIRELLLACGEDPDRDGLLETPARVARAYREMFAGLYTEPDHVLDRTFDEAHEELVLVTDIPMFSTCEHHLLSFHGVAHVGYIPNEHGKVTGLSKLARLVDLYAKRPQVQERITSQVADALMRKLKPRGVIVVIEAEHLCMAMRGIRKPGARTTTSAVRGLLQSSASSRAEALDLIMGRR

SEQ ID NO: 4505 - protein, 198 aa, Amycolatopsis coloradensis
  misc_feature (1)..(198): tr|A0A1R0KTH5|A0A1R0KTH5_9PSEU GTP cyclohydrolase 1 OS= Amycolatopsis coloradensis OX=76021 GN=folE PE=3 SV=1
MSTPALRVVHEPGPGPDLEAAEAAAADLLTALGISLDSESLRGTPGRMARAYAELFTPRSFDLTTFPNDEGYDELVLARGIPVRSVCEHHLLPFVGVAHVGYLPGERILGLSKLARIVEHFACRPQVQERLTKQVADWLDEQLEPRGVGVVIEAEHSCMTLRGVQAAGSSTVTSTLLGTLREDARSRQEFFALTGING

SEQ ID NO: 4506 - protein, 209 aa, Amycolatopsis decaplanina
  misc_feature (1)..(209): tr|M2Z320|M2Z320_9PSEU GTP cyclohydrolase 1 OS=Amycolat opsis decaplanina DSM 44594 OX=1284240 GN=folE PE=3 SV= 1
MPPFDGVVPDSPEVDIDLAAKHAEAMLTALGLPYDSEHNDRTPRRFVRALAEMTAGRLVDPGRHLEVTFPSVSDNPTMILVVNVRFVSLCEHHLLPWVGRASVAYLPATGARIVGLSKLARLVKEFAARPQVQERLGEQVVTTIERMLDTTGVACLIRGAHSCMNLRGVEAEDASMVSSHLLGRFRDDPAVRAEFIAAVGSANSLGGGG

SEQ ID NO: 4507 - protein, 204 aa, Amycolatopsis decaplanina
  misc_feature (1)..(204): tr|M2ZAB5|M2ZAB5_9PSEU GTP cyclohydrolase 1 OS=Amycolat opsis decaplanina DSM 44594 OX=1284240 GN=folE PE=3 SV= 1
MTTNRTTPSGNGDSPVFDQDRAEKAVRELLLACGEDPDRDGLLETPARVARAYREMFAGLYTEPDHVLDRTFDEAHEELVLVTDIPVYSTCEHHLLSFHGVAHIGYIPNEHGKVTGLSKLARLVDLYAKRPQVQERLTSQVADALMRKLEPRGAIVVVEAEHLCMAMRGIRKPGARTTTSAVRGLLQSSASSRAEALDLIKGRR

SEQ ID NO: 4508 - protein, 199 aa, Amycolatopsis eurytherma
  misc_feature (1)..(199): tr|A0A3N2GQX7|A0A3N2GQX7_9PSEU GTP cyclohydrolase 1 OS= Amycolatopsis eurytherma OX=196083 GN=folE PE=3 SV=1
MQSETALRVVHEPAEGVDLAAAELHAAQFLEALGVSLESESLRGTPGRMARAYAELFSPRPFDLTTFPNDEGYDELVLARGIPVRSVCEHHLLPFVGVAHVGYLPGERILGLSKLARIVEHFARRPQVQERLTKQVADWLAEHVHPKGVGVVIEAEHTCMTLRGVQAVGSSTVTSTLLGTLREDARSRQEFFALTGVNP

SEQ ID NO: 4509 - protein, 198 aa, Amycolatopsis japonica
  misc_feature (1)..(198): tr|A0A075V184|A0A075V184_9PSEU GTP cyclohydrolase 1 OS= Amycolatopsis japonica OX=208439 GN=folE PE=3 SV=1
MSTPALRVVHETGPGPDLAAAEAAAADLLTALGISLDSESLRGTPGRMARAYAELFTPRPFDLTTFPNDEGYDELVLARGIPVRSVCEHHLLPFVGVAHVGYLPGDRILGLSKLARIVEHFACRPQVQERLTKQVADWLEEQLEPRGVGVVIEAEHSCMTLRGVQAVGSSTVTSTLLGTLREDARSRQEFFALTGING

SEQ ID NO: 4510 - protein, 528 aa, Amycolatopsis japonica
  misc_feature (1)..(528): tr|A0A075VCM2|A0A075VCM2_9PSEU GTP cyclohydrolase 1 OS= Amycolatopsis japonica OX=208439 GN=folE PE=3 SV=1
MTTDRTTPSDNGDRPVFDQDRAEKAVRELLLACGEDPDRDGLLETPARVARAYREMFAGLYTEPDHVLDRTFDEAHEELVLVTDIPMFSTCVPSKQTVNAVGGRKQAAEVEVGDKLWTLSGGKVEETTVTEISSHQTRELVEVTTAGGSFKVTPDHPLATPKGWVEAKDVEGSFIEWTHARKLCRDRWKPKFGYDFGYVIGATCSDGTVAERYVSLVVNDRDFAKKYAESLYRAFGIEAKLEPVTRPSGYLERDVPGFRVRVVSSFLADLMRQYVGGDAHHQRQRFPMVVLNDRSTFNGFLDGYIDGDGCDDKRHPGRLITSANIPFLEDLATIIGARFTPRKAPASVLYVADRWFERHGFPQDDYTTDLIESDYVEVESVRPVKATGTKPYTVYSFKCEPHPTFLIAGHLTHNCEHHLLSFHGVAHIGYIPNEHGKVTGLSKLARLVDLYAKRPQVQERLTSQVADALMRKLEPRGAIVVVEAEHLCMAMRGIRKPGARTTTSAVRGLLQSSASSRAEALDLIKGRR

SEQ ID NO: 4511 - protein, 204 aa, Amycolatopsis keratiniphila
  misc_feature (1)..(204): tr|A0A1W2M4G2|A0A1W2M4G2_9PSEU GTP cyclohydrolase 1 OS= Amycolatopsis keratiniphila subsp. keratiniphila OX=227 715 GN=folE PE=3 SV=1
MTTDRTTPSDNGDRPVFDQDRAEKAVRELLLACGEDPDRDGLLETPARVARAYREMFAGLYTEPDHVLDRTFDEAHEELVLVTDIPMFSTCEHHLLSFHGVAHIGYIPNEHGKVTGLSKLARLVDLYAKRPQVQERLTSQVADALMRKLEPRGAIVVVEAEHLCMAMRGIRKPGARTTTSAVRGLLQSSASSRAEALDLIKGRR

SEQ ID NO: 4512 - protein, 198 aa, Amycolatopsis keratiniphila
  misc_feature (1)..(198): tr|R4SU92|R4SU92_9PSEU GTP cyclohydrolase 1 OS=Amycolat opsis keratiniphila OX=129921 GN=folE PE=3 SV=1
MSTPALRVVHETGPGPDLVAAEAAAADLLTALGIPLDSESLRGTPGRMARAYAELFTPRPFDLTTFPNDEGYDELVLARGIPVRSVCEHHLLPFVGVAHVGYLPGDRILGLSKLARIVEHFACRPQVQERLTKQVADWLEEQLEPRGVGVVIEAEHSCMTLRGVQAVGSSTVTSTLLGTLREDARSRQEFFALTGING

SEQ ID NO: 4513 - protein, 198 aa, Amycolatopsis lurida
  misc_feature (1)..(198): tr|A0A2P2FY92|A0A2P2FY92_9PSEU GTP cyclohydrolase 1 OS= Amycolatopsis lurida NRRL 2430 OX=1460371 GN=folE PE=3 SV=1
MSTPALRVVHESGPGPDLVAAEAAAADLLTALGISLDSESLRGTPGRMARAYAELFTPRPFDLTTFPNDEGYDELVLARGIPVRSVCEHHLLPFVGVAHVGYLPGERILGLSKLARIVEHFACRPQVQERLTKQVADWLEEQLEPRGVGVVIEAEHSCMTLRGVQAVGSSTVTSTLLGTLREDARSRQEFFALTRING

SEQ ID NO: 4514 - protein, 313 aa, Amycolatopsis lurida
  misc_feature (1)..(313): tr|A0A2P2FVW2|A0A2P2FVW2_9PSEU GTP cyclohydrolase 1 OS= Amycolatopsis lurida NRRL 2430 OX=1460371 GN=BB31_12820 PE=3 SV=1
MVNDRDFAKKYAEALYRAFGIEAKLEPVTRPSGYLARDVPGFRVRVVSSFLADLMRQYVGGDAHHQRQRFPMVVLNDLSTFNGFLDGYVDGDGFRHKKIAGRTIVSANVPFLEDLATVIGARFTPRTGGIASQLYVADSWFRRHGFPQDDYTTDLIESEYVEVESVRPVKATGTKPYTVYSFKCEPHPTFLIAGHLTHNCEHHLVPFHGVAHVGYIPNGHGKVTGLSKLARLVDLYAKRPQVQERLTSQVADALMRKLEPRGAIVVVEAEHLCMAMRGIRKPGARTTTSAVRGLLQTSASSRAEALDLIKGRR

SEQ ID NO: 4515 - protein, 195 aa, Amycolatopsis marina
  misc_feature (1)..(195): tr|A0A1I0Y6M2|A0A1I0Y6M2_9PSEU GTP cyclohydrolase 1 OS= Amycolatopsis marina OX=490629 GN=folE PE=3 SV=1
MHATGRIFDQARAERAVRELLLACGEDPDRDGLKDTPARVARAYHEMFAGLYNDPDAVLDKTFDESHEELVLVTDIPMYSTCEHHLVPFHGVAHVGYIPNNQGKVTGLSKLARLVDLYAKRPQVQERLTSQVADALQRRLKPRGVIVVVEAEHLCMSMRGVRKPGARTTTSAVRGLLQTSASSRAEALDLIMGRR

SEQ ID NO: 4516 - protein, 270 aa, Amycolatopsis marina
  misc_feature (1)..(270): tr|A0A1I1BX53|A0A1I1BX53_9PSEU GTP cyclohydrolase FolE2 OS=Amycolatopsis marina OX=490629 GN=folE2 PE=3 SV=1
MLKDVQAEPDFRGVALNEVGIDELRYPLLVADGQGGKREVVASVTMSVSLDADVKGAHLSRFVDVLHTWRDQLGPDTALAMVDDLRRRMGSAIARASLTFPYFLERRAPVTGSVAFMDYACTLSISAEADGQDLIEQVRVPVTSVCPCSKAISDRGAHNQRGWVTIHARPRDLCGDLWFDDLIDVAEAAGSSPVYALLKRPDERHVTMAGYDNPVFVEDIARDAAGALHSDARIASYKVRVVNDESIHNHNAYAQIPWTNAAQPKNGSAS

SEQ ID NO: 4517 - protein, 204 aa, Amycolatopsis mediterranei
  misc_feature (1)..(204): tr|A0A0H3DHS5|A0A0H3DHS5_AMYMU GTP cyclohydrolase 1 OS= Amycolatopsis mediterranei (strain U-32) OX=749927 GN=f olE PE=3 SV=1
MTWMDQTSHSDADRPVFDHDRAEKAIRELLLACGEDPERDGLKDTPARVARAYQEMFAGLYTEPDSVLDRTFDESHEELVLVTDIPMFSQCEHHLVPFHGVAHVGYIPNAAGKVTGLSKLARLVDLYAKRPQVQERLTSQVADAIVRKLEPRGVIVVIEAEHLCMAMRGIRKPGARTTTSAVRGQLKNSPSSRAEALDLIRARR

SEQ ID NO: 4518 - protein, 206 aa, Amycolatopsis mediterranei
  misc_feature (1)..(206): tr|A0A0H3D580|A0A0H3D580_AMYMU GTP cyclohydrolase 1 OS= Amycolatopsis mediterranei (strain U-32) OX=749927 GN=f olE PE=3 SV=1
MSVDPVSAPVPLRHLGVVHNRDTVDLDAAERAVADLLRALGKDPSSEHLGDTPRRVAHAYAEMLQPRDFQLTTFPNDEGYDELVLAKSIPVQSLCEHHLLPFRGVAHVGYLPGERILGLSKLARVVEMFARDLQVQERLTKQVADWLQEHLAPKGVGVVIEAEHLCMSLRGVRASGALTVTSSLHGLLREEPKTRQEFFALSGVSA

SEQ ID NO: 4519 - protein, 199 aa, Amycolatopsis methanolica
  misc_feature (1)..(199): tr|A0A076MNF1|A0A076MNF1_AMYME GTP cyclohydrolase 1 OS= Amycolatopsis methanolica 239 OX=1068978 GN=folE PE=3 S V=1
MQSETALRVVHEPAEGVDLATAELHAAQFLEALGVSLESESLRGTPGRMARAYAELFSPRPFDLTTFPNDEGYDELVLARGIPVRSVCEHHLLPFVGVAHVGYLPGERILGLSKLARIVEHFARRPQVQERLTKQVADWLAEHVHPKGVGVVIEAEHTCMTLRGVQAVGSSTVTSTLLGTLREDARSRQEFFALTGVNP

SEQ ID NO: 4520 - protein, 220 aa, Amycolatopsis methanolica
  misc_feature (1)..(220): tr|A0A076MZG0|A0A076MZG0_AMYME GTP cyclohydrolase 1 OS= Amycolatopsis methanolica 239 OX=1068978 GN=folE PE=3 S V=1
MAPRRARVSTGGTPTSRTVKIDSELTPEEGPVFDQARAEKAVRELLEAVGENPDREGLRDTPARVARAYREMFAGLYTDPATVLERTFDESHEELVLVTDIPMYSTCEHHLVPFHGVAHVGYIPNSHGKVTGLSKLARLVDLYAKRPQVQERLTSQIADALVRKLEPRGVIVVVEAEHLCMSMRGIRKPGARTTTSAVRGMLQTSATSRAEALELIKGRR

SEQ ID NO: 4521 - protein, 204 aa, Amycolatopsis niigatensis
  misc_feature (1)..(204): tr|A0A2N3WI51|A0A2N3WI51_9PSEU GTP cyclohydrolase 1 OS= Amycolatopsis niigatensis OX=369932 GN=folE PE=3 SV=1
MTSTDQTSSKDGIRPVFDQDRAERAVRELLLACGEDPDRDGLQDTPARVARAYREMFAGLYTDPDEVLARTFDESHEELVLVTDIPMYSTCEHHLLAFHGVAHVGYIPNADGKVTGLSKLARLVDLYAKRPQVQERLTSQIADALVRKLEPRGVIVVIEAEHLCMSVRGIRKPGSRTTTSAVRGMLRSSATSRAEAIELIRGRR

SEQ ID NO: 4522 - protein, 200 aa, Amycolatopsis niigatensis
  misc_feature (1)..(200): tr|A0A2N3W9M6|A0A2N3W9M6_9PSEU GTP cyclohydrolase 1 OS= Amycolatopsis niigatensis OX=369932 GN=folE PE=3 SV=1
MQSSGTALRVVHEPVPGFDLAAAETAAGDFLRALGISLDSESLRGTPGRMARAYAELFTPRSFDLTTFPNDEGYDELVLARDIPVRSVCEHHLLPFTGVAHVGYLPGERILGLSKLARVVEHFACRPQVQERLTKQIAGWLGDQLSPKGVGVVIEAEHTCMTLRGVQATGSSTVTSTLMGTLREDARSRQEFFSLTGVNA

SEQ ID NO: 4523 - protein, 204 aa, Amycolatopsis orientalis
  misc_feature (1)..(204): tr|A0A193BR90|A0A193BR90_AMYOR GTP cyclohydrolase 1 OS= Amycolatopsis orientalis OX=31958 GN=folE PE=3 SV=1
MTTDRTKPSDNGASPVFDQDRAEKAVRELLLACGEDPDRDGLLETPARVARAYREMFAGLYTEPDHVLDRTFDEAHEELVLVTDIPMFSTCEHHLLSFHGVAHIGYIPNEHGKVTGLSKLARLVDLYAKRPQVQERLTSQVADALMRKLNPRGAIVVVEAEHLCMAMRGIRKPGARTTTSAVRGLLQTSASSRSEALDLIKGRR

SEQ ID NO: 4524 - protein, 198 aa, Amycolatopsis orientalis
  misc_feature (1)..(198): tr|A0A193C0T9|A0A193C0T9_AMYOR GTP cyclohydrolase 1 OS= Amycolatopsis orientalis OX=31958 GN=folE PE=3 SV=1
MSTPALRVVHEPGPGPDLEAAEAAAADLLTALGISLDSESLRGTPGRMARAYAELFTPRSFDLTTFPNDEGYDELVLARGIPVRSVCEHHLLPFVGVAHVGYLPGERILGLSKLARIVEHFACRPQVQERLTKQVADWLDEQLEPRGVGVVIEAEHSCMTLRGVQATGSSTVTSTLLGTLREDARSRQEFFALTGING

SEQ ID NO: 4525 - protein, 197 aa, Amycolatopsis panacis
  misc_feature (1)..(197): tr|A0A419I1L0|A0A419I1L0_9PSEU GTP cyclohydrolase 1 OS= Amycolatopsis panacis OX=2340917 GN=folE PE=3 SV=1
MSSALRVVHEPDPGLDLAAAEKAAGDFLRALGIQLDSESLQGTPRRMAHAYAELFTPRSFDLTTFPNDEGYDELVLARSIPVRSVCEHHLLPFTGVAHVGYLPGERILGLSKLARVVEHFACRPQVQERLTKQVAGWLSDQLSPKGVGVVIEAEHTCMTLRGVQATGSSTVTSALLGTLRQDARSRQEFFALAGVNS

SEQ ID NO: 4526 - protein, 206 aa, Amycolatopsis pretoriensis
  misc_feature (1)..(206): tr|A0A1H5Q539|A0A1H5Q539_9PSEU GTP cyclohydrolase 1 OS= Amycolatopsis pretoriensis OX=218821 GN=folE PE=3 SV=1
MTVEPVSEPVPLRHLGVVHDRDAMDLPAAERAVADLLRALGKDPSSEHLGDTPRRVANAYAEMLKPRDFQLTTFPNDEGYDELVLAKSIPVQSLCEHHLLPFRGVAHVGYLPGERILGLSKLARVVEMFARDLQVQERLTKQVADWLQEHLAPKGVGVVIEAEHLCMSLRGVRAAGALTVTSSLHGLLREEPKTRQEFFALTGVSA

SEQ ID NO: 4527 - protein, 204 aa, Amycolatopsis pretoriensis
  misc_feature (1)..(204): tr|A0A1H5QVH4|A0A1H5QVH4_9PSEU GTP cyclohydrolase 1 OS= Amycolatopsis pretoriensis OX=218821 GN=folE PE=3 SV=1
MTWMDQTSRSDADRPVFDQDRAEKAIRELLLACGEDPERDGLKETPARVARAYHEMFAGLYTEPDSVLDRTFDESHEELVLVTDIPMFSQCEHHLVPFHGVAHVGYIPNAAGKVTGLSKLARLVDLYAKRPQVQERLTSQVADAIVRKLEPRGVIVVIEAEHLCMAMRGIRKPGARTTTSAVRGQLKNSPSSRAEALDLIKARR

SEQ ID NO: 4528 - protein, 205 aa, Amycolatopsis regifaucium
  misc_feature (1)..(205): tr|A0A154MGQ9|A0A154MGQ9_9PSEU GTP cyclohydrolase 1 OS= Amycolatopsis regifaucium OX=546365 GN=folE PE=3 SV=1
MNPTDRTTPSGNGASPVFDQDRAEKAVRELLLACGEDPDRDGLLETPARVARAYREMFAGLYTEPDHVLDRTFDEAHEELVLVTDIPMFSVCEHHLLSFHGVAHVGYIPNEHGKVTGLSKLARLVDLYAKRPQVQERLTSQVADALMRKLDPRGAIVVVEAEHLCMAMRGIRKPGARTTTSAVRGLLQSSASSRAEALDLIKGRR

SEQ ID NO: 4529 - protein, 198 aa, Amycolatopsis regifaucium
  misc_feature (1)..(198): tr|A0A154MPF4|A0A154MPF4_9PSEU GTP cyclohydrolase 1 OS= Amycolatopsis regifaucium OX=546365 GN=folE PE=3 SV=1
MSTPALRVVHEPGPGPDLAAAEAAAADLLTALGISLDSESLRGTPGRMARAYAELFTPRSFDLTTFPNDEGYDELVLARGIPVRSVCEHHLLPFVGVAHVGYLPGERILGLSKLARIVEHFACRPQVQERLTKQVADWLDQQLDPRGVGVVIEAEHSCMTLRGVQATGSSTVTSTLLGTLREDARSRQEFFALTRING

SEQ ID NO: 4530 - protein, 215 aa, Amycolatopsis rhizosphaerae
  misc_feature (1)..(215): tr|A0A558AQ84|A0A558AQ84_9PSEU GTP cyclohydrolase 1 OS= Amycolatopsis rhizosphaerae OX=2053003 GN=folE PE=3 SV= 1
MRAADVPSPTSRTVNIDSELTREPGPVFDQARAEKAVRELLLAVGEDPDRDGLRDTPARVARAYQEMFAGLYEDPDKVLDRTFDESHEELVLVTDIPLYSMCEHHLAPFHGVAHVGYIPNAHGKVTGLSKLARLVDLYAKRPQVQERLTSQVADALNRKLEPRGVIVVIEAEHLCMSMRGIRKAGARTTTSAVRGVLQTQASTRAEALELIKGRR

SEQ ID NO: 4531 - protein, 198 aa, Amycolatopsis rhizosphaerae
  misc_feature (1)..(198): tr|A0A558A4A0|A0A558A4A0_9PSEU GTP cyclohydrolase 1 OS= Amycolatopsis rhizosphaerae OX=2053003 GN=folE PE=3 SV= 1
MSLNTALPVVPAPAEIDLTAAEEAAGHFLRALGVDTEGESLRDTPRRMAKAYADLFTPRPFDLTTFPNDEGYDELVLARSIPLRSVCEHHLLPFTGIAHVGYLPGERILGLSKLARVTEHFARRPQVQERLTKQIADWLDQRLSPKGVGVVIEAEHTCMTLRGVQAAGSTTVTSTLLGTLRSDARSRQEFFALTGVQR

SEQ ID NO: 4532 - protein, 201 aa, Amycolatopsis rifamycinica
  misc_feature (1)..(201): tr|A0A066TYK5|A0A066TYK5_9PSEU GTP cyclohydrolase 1 OS= Amycolatopsis rifamycinica OX=287986 GN=folE PE=3 SV=1
MDLKSPSDADRPVFDHDRAEKAIRELLLACGEDPERDGLKETPARVARAYREMFAGLYTEPDSVLDKTFDESHEELVLVTDIPMFSQCEHHLVPFHGVAHVGYIPNAHGKVTGLSKLARLVDLYAKRPQVQERLTSQVADALVRKLEPRGVIVVIEAEHLCMAMRGIRKPGARTTTSAVRGQLKTSPSSRAEALDLIKARR

SEQ ID NO: 4533 - protein, 206 aa, Amycolatopsis rifamycinica
  misc_feature (1)..(206): tr|A0A066U5G1|A0A066U5G1_9PSEU GTP cyclohydrolase 1 OS= Amycolatopsis rifamycinica OX=287986 GN=folE PE=3 SV=1
MTAEPLSAPVPLRHLGVVHNRDTVDLRAAERAVADLLRALGKDPSSEHLGDTPRRVAHAYAEMLQPRDFQLTTFPNDEGYDELVLAKSIPVQSLCEHHLLPFRGVAHVGYLPGERILGLSKLARVVEMFARDLQVQERLTKQVADWLQEHLAPKGVGVVIEAEHLCMSLRGVRANGAQTVTSSLHGMLREEPKTRQEFFALTGVLA

SEQ ID NO: 4534 - protein, 204 aa, Amycolatopsis rubida
  misc_feature (1)..(204): tr|A0A1I5GCH0|A0A1I5GCH0_9PSEU GTP cyclohydrolase 1 OS= Amycolatopsis rubida OX=112413 GN=folE PE=3 SV=1
MTSTDQTSSKDGIRPVFDQDRAERAVRELLLACGEDPDRDGLQDTPARVARAYREMFAGLYTDPDEVLARTFDESHEELVLVTDIPMYSTCEHHLLAFHGVAHVGYIPNGEGKVTGLSKIARLVDLYARRPQVQERLTSQIADALVRRLEPRGVIVVVEAEHLCMSVRGIRKPGSRTTTSAVRGMLRSSATSRAEAIELIRGRR

SEQ ID NO: 4535 - protein, 200 aa, Amycolatopsis rubida
  misc_feature (1)..(200): tr|A0A1I5R209|A0A1I5R209_9PSEU GTP cyclohydrolase 1 OS= Amycolatopsis rubida OX=112413 GN=folE PE=3 SV=1
MQSSGTALRVVHEPVPGFDLAAAEHAAGDFLRALGISLDSESLRGTPGRMARAYAELFTPRAFDLTTFPNDEGYDELVLARGIPVRSVCEHHLLPFIGVAHVGYLPGERILGLSKLARVVEHFACRPQVQERLTKQIAGWLGDQLSPKGVGVVIEAEHTCMTLRGVRATGSSTVTSTLMGTLREDARSRQEFFSLTGVNA

SEQ ID NO: 4536 - protein, 199 aa, Amycolatopsis saalfeldensis
  misc_feature (1)..(199): tr|A0A1H8X525|A0A1H8X525_9PSEU GTP cyclohydrolase 1 OS= Amycolatopsis saalfeldensis OX=394193 GN=folE PE=3 SV=1
MRSGSALHVVHEPDHGIDLAAAERAAGDFLRALGVSIESESLRGTPERMARAYAEMFTPRPFDLTTFPNDEGYDELVLARDIPVRSVCEHHLLPFTGVAHVGYLPGERILGLSKLARVVEHFACRPQVQERLTKQVAGWLSDQLGPKGVGVVIEAEHSCMTLRGVQAIGSTTVTSALLGTLREDARSRSEFFALTGVNK

SEQ ID NO: 4537 - protein, 205 aa, Amycolatopsis saalfeldensis
  misc_feature (1)..(205): tr|A0A1H8WAJ5|A0A1H8WAJ5_9PSEU GTP cyclohydrolase 1 OS= Amycolatopsis saalfeldensis OX=394193 GN=folE PE=3 SV=1
MTWTDQTSSNNGVARPVFDQDRAENAVRELLLACGEDPDRDGLKDTPARVARAYREMFSGLYLDPAEVLDKTFDESHEELVLVTDIPMFSTCEHHLLSFHGVAHVGYIPNANGKVTGLSKLARLVDLYAKRPQVQERLTSQVADALVRKLEPRGVIVVMEAEHLCMSMRGIRKPGARTTTSAVRGLLRTSASSRAEAIELIKGRR

SEQ ID NO: 4538 - protein, 189 aa, Amycolatopsis sacchari
  misc_feature (1)..(189): tr|A0A1I4C9D7|A0A1I4C9D7_9PSEU GTP cyclohydrolase 1 OS= Amycolatopsis sacchari OX=115433 GN=folE PE=3 SV=1
MFDQARAEKAVRELLLAVGEDPDRDGLRDTPARVARAYQEMFAGLYTDPDSVLDRTFDESHEEMVLVTDIPIYSTCEHHLVPFHGVAHVGYIPNGQGKVTGLSKLARLVDLYAKRPQVQERLTSQVADALERKLKPRGVIVVIEAEHLCMSMRGIRKAGARTTTSAVRGLLQSSASTRAEALELIKGRR

SEQ ID NO: 4539 - protein, 207 aa, Amycolatopsis sacchari
  misc_feature (1)..(207): tr|A0A1I4CZF0|A0A1I4CZF0_9PSEU GTP cyclohydrolase 1 OS= Amycolatopsis sacchari OX=115433 GN=folE PE=3 SV=1
MTVEELPTAAVTTRHLSVVHDRETVDLPAARRAIADLLVALGKDPASEHLADTPRRVANAYAELLNPREFQLTTFPNDEGYDELVLAKRIPFSSLCEHHMLPFHGFAHVGYLPGERILGLSKLARVVELFARDLQVQERLTKQVADWLQEHLAPRGVGVVIEAEHLCMSLRGVQATGSRTVTSALHGLLREDRGTRQEFFALTGIQA

SEQ ID NO: 4540 - protein, 204 aa, Amycolatopsis sp.; identical to SEQ ID NO: 4534
  misc_feature (1)..(204): tr|A0A178XC40|A0A178XC40_9PSEU GTP cyclohydrolase 1 OS= Amycolatopsis sp. M39 OX=1825094 GN=folE_1 PE=3 SV=1

SEQ ID NO: 4541 - protein, 200 aa, Amycolatopsis sp.
  misc_feature (1)..(200): tr|A0A4Q7J771|A0A4Q7J771_9PSEU GTP cyclohydrolase 1 OS= Amycolatopsis sp. 8-3EHSu OX=2510978 GN=folE PE=3 SV=1
MASSTARYGEPVFDQDRAEKAVRELLLACGEDPDRDGLQETPARVARAYREMFAGLYDDPDHVLDRTFDESHEELVLVTDIPMYSTCEHHLVPFHGVAHVGYIPNAHGKVTGLSKLARLVDLYAKRPQVQERLTSQIADALDRKLSPRGVIVVVEAEHLCMAMRGIRKPGARTTTSAVRGLLKTSASSRAEALDLIKGRR

SEQ ID NO: 4542 - protein, 197 aa, Amycolatopsis sulphurea
  misc_feature (1)..(197): tr|A0A2A9F5P7|A0A2A9F5P7_9PSEU GTP cyclohydrolase 1 OS= Amycolatopsis sulphurea OX=76022 GN=folE PE=3 SV=1
MSSALRVVHEPDPGLDLVAAEKAAGDFLRALGIQLDSESLQGTPGRMARAYAELFTPRSFDLTTFPNDEGYDELVLARSIPVRSVCEHHLLPFTGVAHVGYLPGERILGLSKLARVVEHFACRPQVQERLTKQVAGWLSDQLSPQGVGVVIEAEHTCMTLRGVQATGSSTVTSALLGTLRRDARSRQEFFALAGVNS

SEQ ID NO: 4543 - protein, 198 aa, Amycolatopsis thailandensis
  misc_feature (1)..(198): tr|A0A229S373|A0A229S373_9PSEU GTP cyclohydrolase 1 OS= Amycolatopsis thailandensis OX=589330 GN=folE PE=3 SV=1
MSTPALRVVHETGPGPDLEAAEAAAANLLTALGISLDSESLRGTPGRMARAYAELFTPRSFDLTTFPNDEGYDELVLARGIPVRSVCEHHLLPFVGVAHVGYLPGERILGLSKLARIVEHFACRPQVQERLTKQVADWLDEQLQPRGVGVVIEAEHSCMTLRGVQAVGSSTVTSTLLGTLREDARSRQEFFALTGING

SEQ ID NO: 4544 - protein, 206 aa, Amycolatopsis tolypomycina
  misc_feature (1)..(206): tr|A0A1H4WEP8|A0A1H4WEP8_9PSEU GTP cyclohydrolase 1 OS= Amycolatopsis tolypomycina OX=208445 GN=folE PE=3 SV=1
MTVEPVSAPIPLRHLGVVPDRDAVDLHAAERAVADLLRALGKDPSSEHLDDTPRRVAHAYAEMLRPRDFQLTTFPNDEGYDELVLAKSIPVQSLCEHHLLPFRGVAHVGYLPGERILGLSKLARVVEMFARDLQVQERLTKQVADWLQEHLAPKGVGVVIEAEHLCMSLRGVRASGALTVTSSLHGLLREEPKTRQEFFALSGVSG

SEQ ID NO: 4545 - protein, 204 aa, Amycolatopsis tolypomycina
  misc_feature (1)..(204): tr|A0A1H5DEL2|A0A1H5DEL2_9PSEU GTP cyclohydrolase 1 OS= Amycolatopsis tolypomycina OX=208445 GN=folE PE=3 SV=1
MTWMDQRSPSDADRPVFDHDRAEKAIRELLLACGEDPERDGLRETPARVARAYREMFAGLYTEPDSVLDKTFDESHEELVLVTDIPMFSSCEHHLVPFHGVAHVGYIPNAAGKVTGLSKLARVVDLYAKRPQVQERLTSQVADAIVRKLEPRGVIVVIEAEHLCMAMRGIRKPGARTTTSAVRGVLKTSPSSRAEALDLIKARR

SEQ ID NO: 4546 - protein, 201 aa, Amycolatopsis vancoresmycina
  misc_feature (1)..(201): tr|R1H1U6|R1H1U6_9PSEU GTP cyclohydrolase 1 OS=Amycolat opsis vancoresmycina DSM 44592 OX=1292037 GN=folE PE=3 SV=1
MDQTSPSDADRPVFDHDRAEKAIRELLLACGEDPERDGLKDTPARVARAYREMFSGLYTEPDSVLDKTFDESHEELVLVTDIPMYSSCEHHLVPFHGVAHVGYIPNAAGKVTGLSKLARVVDLYAKRPQVQERLTSQVADAIVRKLEPRGVIVVIEAEHLCMAMRGIRKPGARTTTSAVRGQFKNSATSRAEALDLIKARR

SEQ ID NO: 4547 - protein, 199 aa, Amycolatopsis xylanica
  misc_feature (1)..(199): tr|A0A1H3EY95|A0A1H3EY95_9PSEU GTP cyclohydrolase 1 OS= Amycolatopsis xylanica OX=589385 GN=folE PE=3 SV=1
MHASSALRVVHEPDTGVDLAAAEVAAAAFLQALGISTESESLQGTPRRMAKAYAELFTPRPFDLTTFPNEEGYDELVLARAIPVRSVCEHHLLPFVGVAHVGYLPGERILGLSKLARVVEHFACRPQVQERLTKQVADWLNDQLSPKGVGVVIEAEHNCMTLRGVQAVGSSTVTSTLLGSLRSDSRSRQEFFALTGVNA

SEQ ID NO: 4548 - protein, 208 aa, Amycolatopsis xylanica
  misc_feature (1)..(208): tr|A0A1H3PC00|A0A1H3PC00_9PSEU GTP cyclohydrolase 1 OS= Amycolatopsis xylanica OX=589385 GN=folE PE=3 SV=1
MTLTMPNTALEDPWHENALAEAAGHARAMFEALGIDCETTSTARTPHRFVKALAELTSGLRQDPARHLRVQFPAESASQGIIAAVDVPFVAVCEHHVLPFLGRATVAYRPSPGGRIVGLSKLARVLQGYAARPQVQERLGEQVVEALTTELSSDAAACLIRSEHACLTLRGAEAHGAVMVTTHLTGEFTTDPCLRAQVLALAPAHARR

SEQ ID NO: 4549 - protein, 376 aa, Amylibacter cionae
  misc_feature (1)..(376): tr|A0A2N5IJU6|A0A2N5IJU6_9RHOB GTP cyclohydrolase FolE2 OS=Amylibacter cionae OX=2035344 GN=folE2 PE=3 SV=1
MNVHDPAIETETLSEDKRKAPTEQDAREALAVLRRWASGNEVTAFANLAPAEAAGALARGVGDAYPALSTVYPENLVADKAYIAGLPDLQNGPASLIKGAKTAIQHVGISNFRLPLRYLTRDKGEMVLETSVTGTVSLEENKKGINMSRIMRSFYAHAESVFSFDVIDAALGDYVSDLDSLDARIQMRLSFPMKKQSLRSGLEGYQYYDIALESTYRNGTKTRILHLDYVYSSTCPCSLELSEHARRTRGQLATPHSQRSVARISAEVLPGDVLWFEDVVALCNSAVPTETQVMVKREDEQAFAEMNAANPIFVEDAVRLFYRALAEDARIGDFRVVASHQESLHSHDAISVLCRGEMFESSTLDPRMFETLIHRG

SEQ ID NO: 4550 - protein, 206 aa, Amylibacter kogurei
  misc_feature (1)..(206): tr|A0A2G5K668|A0A2G5K668_9RHOB GTP cyclohydrolase 1 OS= Amylibacter kogurei OX=1889778 GN=folE PE=3 SV=1
MNLPDPLKNQTGELVVEKPTKEQAEDAVRTLLRWAGDNPEREGLLDTPSRVVKAYGEWFRGYEEDPIDMLKRTFSEVEGYDEMVLLKDIRFESYCEHHMAPIIGVAHVAYIPTARVVGISKLARVVDAFAKRLQVQEKMTSQIANAIETALRPHGVAVVLEGEHHCMCTRGVNKNGVTMMTSAMRGAFKTDRNQRREFMAAIGKSA

SEQ ID NO: 4551 - protein, 216 aa, Anabaena cylindrica
  misc_feature (1)..(216): tr|K9ZP17|K9ZP17_ANACC GTP cyclohydrolase 1 OS=Anabaena cylindrica (strain ATCC 27899 / PCC 7122) OX=272123 GN =folE PE=3 SV=1
MTLSIRPDLNSAAQVVSSLSTQQQPIVTEAEMMQAVRTLLIGLGENPDREGLKDTPKRVVKALQFLTKGYNESLDELLNGAVFTEDADEMVLVRDIDIFSSCEHHILPVIGRAHVAYIPDGKVIGLSKIARICEMYARRLQVQERLTLQIADALQGLLKPKGVAVVIEATHMCMVMRGVQKPGSWTVTSAMRGVFSEDARTREEFMNLIRHNPNFH

SEQ ID NO: 4552 - protein, 235 aa, Anabaena cylindrica
  misc_feature (1)..(235): tr|K9ZHY6|K9ZHY6_ANACC GTP cyclohydrolase 1 OS=Anabaena cylindrica (strain ATCC 27899 / PCC 7122) OX=272123 GN =folE PE=3 SV=1
MTIVSSNGSNSSTSPLIPDLEEAINPRPDRNTHDGRQPDLHPPTEEHMDQMMDAVRAILVGVGEDPEREGLLKTPKRVAEAMQFLTSGYNQSLEKLVNDAIFDEGHDEMVLVRDINFFSLCEHHMLPFMGRAHVAYIPNQKVVGLSKLARIVEMYSRRLQVQERLTRQIAEAIQTILEPKGVAVVMEASHMCMVMRGVQKPGAWTVTSSMVGIFQEEQKTREEFFNLIRHQASFF

SEQ ID NO: 4553 - protein, 216 aa, Anabaena sp.
  misc_feature (1)..(216): tr|A0A1B7VUQ2|A0A1B7VUQ2_9NOST GTP cyclohydrolase 1 OS= Anabaena sp. WA113 OX=1710889 GN=folE PE=3 SV=1
MTLSIRPELTSAADIISSLSNQQQPTVTEADMMQAVRTLLIGLGENPDREGLKDTPKRVVKALKFLTSGYDQSIDELLNGAVFTEDANEMVLVRDIDLFSSCEHHILPIIGRAHIAYIPNGKVIGLSKIARICEMYARRLQVQERLTLQIANALQGLLKPQGVAVVIEATHMCMVMRGVQKPGSWTVTSAMRGVFSEDARTREEFMNLIRHSANFK

SEQ ID NO: 4554 - protein, 216 aa, Anabaena sp.
  misc_feature (1)..(216): tr|A0A1W5CHL1|A0A1W5CHL1_9NOST GTP cyclohydrolase 1 OS= Anabaena sp. 39858 OX=1710890 GN=folE PE=3 SV=1
MTLSIRPDTVSAAQMVSSLSTQQTPTVTEAEMVQAVRTLLIGLGENPDREGLLDTPKRVVKALQFLTKGYNESLDELLNGAVFTEDANEMVLIRDIDIFSSCEHHILPIIGRAHVAYIPNGKVIGLSKIARVCEMYARRLQVQERLTLQIADALQGLLKPQGVAVVVEATHMCMVMRGVQKPGSWTVTSAMRGVFAEDARTREEFMNLVRHNANFH

SEQ ID NO: 4555 - protein, 235 aa, Anabaenopsis circularis
  misc_feature (1)..(235): tr|A0A1Z4GM47|A0A1Z4GM47_9CYAN GTP cyclohydrolase 1 OS= Anabaenopsis circularis NIES-21 OX=1085406 GN=folE PE=3 SV=1
MTIASSNGSNRFQSPLISDLAEAINTRPDRNTHDGRLPDLQPPSEENMEQMMDAVRNIIVGVGEDPEREGLLKTPKRVAEAMRYLTSGYNQSLEELVNGAIFDEGHNEMVLVRDINFFSLCEHHMLPFMGRAHVAYIPNQKVVGLSKLARIVEMYSRRLQVQERLTRQIAEAIQTILEPQGVAVVMEATHMCMVMRGVQKPGSWTVTSAMLGVFHDEQKTREEFFNLIRHQPSFF

SEQ ID NO: 4556 - protein, 302 aa, Anaerobacillus alkalilacustris
  misc_feature (1)..(302): tr|A0A1S2LMR5|A0A1S2LMR5_9BACI GTP cyclohydrolase FolE2 OS=Anaerobacillus alkalilacustris OX=393763 GN=folE2 P E=3 SV=1
MHKTFDLPSKKERHKRFGSVPPIKGTKPKNKDEMKDLQNTPNDFLFSINSVGISNVKHPVILHSDLLPSVQTTIGTFSLTTSLTQMSKGINMSRLTELLQKYHEEEGFVLSFEQLRRFTKELAVIMNQTAASIEVTFPWFFERKSPALAKVGLMHADAKISVTYDQETKQFTYVTGLTAAVTTLCPCSKEISEYSAHNQRGYVRIETELYSDSIGEKDWKKILLEAAESNASASLHPVLKRPDEKMVTEKAYENPRFVEDMVRLVAADLYENNDIRAFTVECRNEESIHVHDAVATIKFEKE

SEQ ID NO: 4557 - protein, 189 aa, Anaerobacillus alkalilacustris
  misc_feature (1)..(189): tr|A0A1S2LRI8|A0A1S2LRI8_9BACI GTP cyclohydrolase 1 OS= Anaerobacillus alkalilacustris OX=393763 GN=folE PE=3 S V=1
MKKFDHQKIEQAVTMILEAIGEDPTREGLLDTPKRVAKMYEEVFQGLNQDPKEHFATVFSEDHEELVLVKDIPFYSMCEHHLVPFFGKAHVGYIPKGGKVTGLSKLARAVEAVAKRPQLQERITSTIADSMVETLQPLGVIVVVEAEHMCMTMRGVKKPGSSTVTSAVRGAFATNAAARAEVLSLINAK

SEQ ID NO: 4558 - protein, 189 aa, Anaerobacillus arseniciselenatis
  misc_feature (1)..(189): tr|A0A1S2LTI7|A0A1S2LTI7_9BACI GTP cyclohydrolase 1 OS= Anaerobacillus arseniciselenatis OX=85682 GN=folE PE=3 SV=1
MSNFDHKKIEQAVTMILEAIGEDPNREGLLDTPKRVAKMYEEVFQGLNQDPKEHFATVFSEEHEELVLVKDIPFYSMCEHHLVPFFGKAHVGYIPKGGKVTGLSKLARAVEAVAKRPQLQERITSTIADSMVETLQPLGVIVVVEAEHMCMTMRGVKKPGSSTVTSAVRGAFENNSTARAEVLSLINCK

SEQ ID NO: 4559 - protein, 301 aa, Anaerobacillus isosaccharinicus
  misc_feature (1)..(301): tr|A0A1S2MCS2|A0A1S2MCS2_9BACI GTP cyclohydrolase FolE2 OS=Anaerobacillus isosaccharinicus OX=1532552 GN=folE2 PE=3 SV=1
MIKTIGLPSKAERHKRFGSVPPIIGTKPTDKEKMPDLQNTPNDFLFAINSVGISNVKHPVIVHSELEPKVQTTIATFALTTSLNQMSKGINMSRLTELLQQYHEEGFVLSFEQLRSFTKELAEKMEQTSATIEVTFPWFFERKSPALKKIGLMHADAKISVTYNQDTDQCTYETGLTAAITTLCPCSKEISEYSAHNQRGYVSIDTTLYSDSINEIDWKAFLLEAAESNASAQLHPVLKRPDEKMVTEKAYENPRFVEDMVRLVAADLYENPLIKAFSVECRNEESIHVHDAIASITFTKE

SEQ ID NO: 4560 - protein, 190 aa, Anaerobacillus isosaccharinicus
  misc_feature (1)..(190): tr|A0A1S2KVQ4|A0A1S2KVQ4_9BACI GTP cyclohydrolase 1 OS= Anaerobacillus isosaccharinicus OX=1532552 GN=folE PE=3 SV=1
MNNFDHKKIEQAIVMILEAIGEDPTREGLLDTPKRVAKMYEEVFQGLNQDPKEHFATVFSEDHEELVLVKDIPFYSMCEHHLVPFFGKAHVGYIPKGGKVTGLSKLARAVEAVAKRPQLQERITSTIADAMVETLQPLGVIVVVEAEHMCMTMRGVKKPGSSTITSAVRGAFANNPAARAEVLSLINTRR

SEQ ID NO: 4561 - protein, 188 aa, Anaerobacillus macyae
  misc_feature (1)..(188): tr|A0A0J6CYD6|A0A0J6CYD6_9BACI GTP cyclohydrolase 1 OS= Anaerobacillus macyae OX=157733 GN=folE PE=3 SV=1
MYEVNHDKIEEAVKMILEAIGEDPEREGLLDTPKRVARMYQEIFQGLHQDPKEHFQTIFGEDHEELVLVKDIPFYSTCEHHLVPFFGKAHVAYIPKGGKVTGLSKLARAVESVTKRPQLQERITSTIANSMVETLDPHGVMVVVEAEHMCMTMRGVKKPGSSTVTSAVRGVFEHDTAARSEVLGLIKG

SEQ ID NO: 4562 - protein, 226 aa, Anaerobacterium chartisolvens
  misc_feature (1)..(226): tr|A0A369B071|A0A369B071_9FIRM GTP cyclohydrolase 1 OS= Anaerobacterium chartisolvens OX=1297424 GN=folE PE=3 S V=1
MTNGFCARKIVYMIFIDLIEKRVHLIFKKACSGDRRVSFVVDKDRIKAAVREILEAIGEDPDREGLVETPDRVARMYEEIFAGLHMDPRDVVKVFKEENHEEMVMVKDIPLYSICEHHLLPFVGSASVVYLPRKGKVMGLSKLARIVDIVAKKPQLQERLSSQVADIIMEAIDPLGVAVVIEAEHLCMTMRGIKKPGAKTVTSALRGVIKTDSKTRAEVMSLIKGI

SEQ ID NO: 4563 - protein, 216 aa, Anaerobiospirillum thomasii
  misc_feature (1)..(216): tr|A0A2X0VB06|A0A2X0VB06_9GAMM GTP cyclohydrolase 1 OS= Anaerobiospirillum thomasii OX=179995 GN=folE PE=3 SV=1
MTDKLTAEALLVKNALEACGLETPWHDNGLSPQQKREIIASHMQKIMETLGLDLSDDSLIKTPERVGKMFVNEIFSGLDYRNFPEITLIENKMHFDEMIKVKDITLTSTCEHHFVVIDGVAKVAYMPKDKIIGLSKINRIVQFFGHRPQVQERMTQQILVALQTLLDTQNVAVSISATHYCVKARGVRDPSSLTTTTALGGHFKHNSKSRHEFLTD

SEQ ID NO: 4564 - protein, 191 aa, Anaerobium acetethylicum
  misc_feature (1)..(191): tr|A0A1D3TNA0|A0A1D3TNA0_9FIRM GTP cyclohydrolase 1 OS= Anaerobium acetethylicum OX=1619234 GN=folE PE=3 SV=1
MAIDSAAIKEHIRGLLIALGDDPDREGLKDTPERVAAMYQEVFEGMNYSNHEIAEMFDKTFEDELDFDDDSKDIVVVKDIEIFSYCEHHMALMFDMKVNVAYIPNGRVIGLSKIARVADMVSKRLQLQERIGTDIAEIMQEITGSEDVAVTIEGSHSCMSARGIKKAGAKTYSTTLRGRFKTDPNLQFYLR

SEQ ID NO: 4565 - protein, 196 aa, Anaerobutyricum hallii
  misc_feature (1)..(196): tr|C0ERV3|C0ERV3_9FIRM GTP cyclohydrolase 1 OS=Anaerobu tyricum hallii DSM 3353 OX=411469 GN=folE PE=3 SV=1
MAIDKDAIREHVRGILAALGDDPDREGLKETPDRVARMYEEVFEGMNYTNHEIAMMFNKSFKDDLCVGSDKKDIVLVRDIPIFSYCEHHIALMYDMSVSVAYIPKEKVLGLSKIARICDMASKRLQLQERIGSDIAEIMCEAAETDDVAVIIHGTHSCMSARGIKKEAASTVTTTFRGRFETDATIQSQLAMMLHA

SEQ ID NO: 4566 - protein, 196 aa, Anaerobutyricum hallii
  misc_feature (1)..(196): tr|A0A174IXG8|A0A174IXG8_9FIRM GTP cyclohydrolase 1 OS= Anaerobutyricum hallii OX=39488 GN=folE PE=3 SV=1
MAIDKDAIREHVRGILAALGDDPDREGLKETPDRVARMYEEVFEGMNYTNHEIAMMFNKSFKDDLCVGSDKKDIVLVRDIPIFSYCEHHIALMYDMSVSVAYIPKEKVLGLSKIARICDMASKRLQLQERIGSDIAEIMCEAAETDDVAVIIHGTHSCMSARGIKKEAASTVTTTFRGRFETDAAIQSQLTMMLHA

SEQ ID NO: 4567 - protein, 184 aa, Anaerococcus nagyae
  misc_feature (1)..(184): tr|A0A3E2TGT7|A0A3E2TGT7_9FIRM GTP cyclohydrolase 1 OS= Anaerococcus nagyae OX=1755241 GN=folE PE=3 SV=1
MNEKKIEEAVKMILEAIGEDPSREGLVETPERVARMYKEIFSGIGSSAEDILSKTFSHNGEDTVVVKDIPFYSMCEHHLVPFFGKAHVAYIPNGKVAGLSKIARTVDHYAKKPQLQERLTLEVCEDIMKYLDAKGALVVIEAEHLCMNMRGIKKPGSSTVTSAARGDLEDEKLKNEAYLLMGLK

SEQ ID NO: 4568 - protein, 183 aa, Anaerocolumna aminovalerica
  misc_feature (1)..(183): tr|A0A1I5GGT6|A0A1I5GGT6_9FIRM GTP cyclohydrolase 1 OS= Anaerocolumna aminovalerica OX=1527 GN=folE PE=3 SV=1
MDQKKIEEGVKLLLEGIGEDVKREGLLETPRRVAKMCEEIFGGLKTDAEEYLVKTFTATNNEIIVEKEIPFYSMCEHHLLPFYGKAHIGYIPDGKVVGLSKLARTVEVYGKRPQIQEQMTAQIADDIMKYLNPKGVIVVLEAEHMCMTMRGVRKPGTLTTTLVTRGAFEQNQELKNTFFQLIK

SEQ ID NO: 4569 - protein, 200 aa, Anaerocolumna jejuensis
  misc_feature (1)..(200): tr|A0A1M7D7E7|A0A1M7D7E7_9FIRM GTP cyclohydrolase 1 OS= Anaerocolumna jejuensis DSM 15929 OX=1121322 GN=folE PE =3 SV=1
MAIDKAKIEEHIRGLLLALGENPAREGLLETPARVARMCEERFEGINYTNDEIAGMFNKSFEDGLYQPENSQDIVMVRDIDIFSCCEHHLALMYDMKVTVAYIPNGKIVGLSKIARIADMVSKRLQLQERIGSDIAEILQKAAQTEDVAVIIEGRHACMTARGIKSTNAVTMTTTSRGRFNTDRSIADKLTTLYHKNLSL

SEQ ID NO: 4570 - protein, 201 aa, Anaeroglobus geminatus
  misc_feature (1)..(201): tr|G9YHA7|G9YHA7_9FIRM GTP cyclohydrolase 1 OS=Anaerogl obus geminatus F0357 OX=861450 GN=HMPREF0080_01034 PE=3 SV=1
MAERRKTDRAAAAAGIKQFLEAFGIDLTTERMEGTPDKVAAAFSIFFSGLEEDGLSFWGDSIETKTGGLVAVRRLTYYSICEHHLLPFFGTVSIAYLPKDGRIAGFGRFAEAVRIFSRRPQLQERMTEQICESVQRGLGALGVVVVVTGRHLCLTMRNTLSDRTDIVTVAATGALAEGTILYERALKILEADKRDRKTDNL

SEQ ID NO: 4571 - protein, 210 aa, Anaerolinea sp.
  misc_feature (1)..(210): tr|A0A1W9PSW7|A0A1W9PSW7_9CHLR GTP cyclohydrolase 1 OS= Anaerolinea sp. 4484_236 OX=1968532 GN=folE PE=3 SV=1
MEKNKKIINDVANLFKQDMDLGKITQAIEEILTAIGEDPNREGLQKTPERVARAYAELLAGYRTDPIELLNEAIFHASYDEMVIVRDIEYYSLCEHHMLPFIGRAHVAYIPDGKIIGLSKIPRIVDMFARRLQIQERMTRQVADLIDELLHPQGVAVVVEGLHMCSMMRGVKKHDARMTTSAMLGAFRNSMPTRQEFLDNISRGSAPLHF

SEQ ID NO: 4572 - protein, 221 aa, Anaerolinea thermolimosa
  misc_feature (1)..(221): tr|A0A3D1JHF2|A0A3D1JHF2_9CHLR GTP cyclohydrolase 1 OS= Anaerolinea thermolimosa OX=229919 GN=folE PE=3 SV=1
MNGNKNNPRKRILPEVAQAIPEFILAPEPLAVNKPAIEDATRELLLAIGEDPERDGLLKTPERVARMWEELTAGYHTDPEKLINGALFDVDYDEMVLVKDIEYYSLCEHHLLPFFGRAHVAYIPNGRVIGLSKIPRVVEMYARRLQVQERMTAEIAHFLMDTLDARGVAVVVEGSHMCAMMRGVKKPETNMTTSTFLGAFKEDRALRQEFLDQVNRAYHRD

SEQ ID NO: 4573 - protein, 214 aa, Anaerolinea thermophila
  misc_feature (1)..(214): tr|A0A101FZ66|A0A101FZ66_9CHLR GTP cyclohydrolase 1 OS= Anaerolinea thermophila OX=167964 GN=folE PE=3 SV=1
MTRVECNESELFQFAQLFCDSEVDLKKIEKSVKDILEAIGEDPDREGLQKTPDRVARAYREMLEGYRTDPIKLVNKALFTVEYDDMVIVRDIEFFSMCEHHMLPFLGRAHVAYLPKDKVIGLSKIPRIVDMFSRRLQVQERMTRQIADFLNILLNPRGVAVVVEAVHMCAMVRGVRKHDARMTTSSMLGAFRTRDATRMEFLDNISRGARPLEF

SEQ ID NO: 4574 - protein, 209 aa, Anaerolineaceae bacterium
  misc_feature (1)..(209): tr|A0A1W9V7J3|A0A1W9V7J3_9CHLR GTP cyclohydrolase 1 OS= Anaerolineaceae bacterium 4572_5.1 OX=1971724 GN=folE P E=3 SV=1
MQKNNEIIDRVAGLIEEDMDIEKITKAAADMLEAIGEDPEREGLKRTPKRVALAYQELLAGYRTDPIELLNDAIFHVSYDEMVIVRDIEYYSLCEHHMLPFIGRAHVAYLPNGKVIGLSKIPRIVDMFARRLQVQERMTRQIADLINELLHPQGVAVVVEGMHLCSVMRGVKKHDARMTTSAMLGAFRSMPTRQEFLNNISRGAMPLHF

SEQ ID NO: 4575 - protein, 212 aa, Anaerolineaceae bacterium
  misc_feature (1)..(212): tr|A0A101ILG7|A0A101ILG7_9CHLR GTP cyclohydrolase 1 OS= Anaerolineaceae bacterium 46_22 OX=1635294 GN=folE PE=3 SV=1
MVDDCYDPLAQAADLFCEEAMDVDTIESSIAKILEAIGEDKDREGLLRTPHRVAKSYAELLAGYRMDPKALINNAVFDVAYDAMVIVRDIEFSSMCEHHMLPFIGRAHVAYIPSDKVIGLSKIPRIVDLFSKRLQVQERMTTQIAEFINVVLQPQGVAVVVEGLHMCMMLRGVKKQDARMTTSAMLGAFRDDYSTRMEFLDNISRGANSLHI

SEQ ID NO: 4576 - protein, 225 aa, Anaerolineae bacterium
  misc_feature (1)..(225): tr|A0A3D4J9D0|A0A3D4J9D0_9CHLR GTP cyclohydrolase 1 OS= Anaerolineae bacterium OX=2052143 GN=folE PE=3 SV=1
MSFLFPDDKINHLEKNMPNPEINDDVELTTNSDIDMPKIEDAVRRMLVAFGEDPNREGLLNTPKRVARMYPELLSGYKTDTEKLLNKAIFNVTYDDMVIVRDIEYFSMCEHHMLPFMGRAHVAYIPNGQVIGLSKIPRIVDMFARRLQVQEQMTRQIADFIMELLKPQGVAVVVEGLHLCAMMRGVKKHDARMTTSTMLGTFRTRVATRQEFLNHLDRGADPLRI

SEQ ID NO: 4577 - protein, 211 aa, Anaerolineae bacterium
  misc_feature (1)..(211): tr|A0A2M7KWM1|A0A2M7KWM1_9CHLR GTP cyclohydrolase 1 OS= Anaerolineae bacterium CG_4_8_14_3_um_filter_59_70 OX=1 973902 GN=folE PE=3 SV=1
MEHIDFDDNITEETLRSSKIDSQAVQDAVLQLLTAFGENPQRAGLKRTPQRVARMYAELLAGYAVDPLILVNGALFEVKYDEMVIVRDIEFYSMCEHHLLPFMGRVHVAYIPDGKVLGLSKIPRIVDMFARRLQVQERMTRQIADLIRDLLKPQGVAVVVEALHLCTMMRGVQKHNARMTTSAMHGAFRSNLATRQEFLDNISRGASPLQI

SEQ ID NO: 4578 - protein, 201 aa, Anaerolineales bacterium
  misc_feature (1)..(201): tr|A0A524AC18|A0A524AC18_9CHLR GTP cyclohydrolase 1 OS= Anaerolineales bacterium OX=2073117 GN=folE PE=3 SV=1
MKPELDTEFRIDRERIRKAVLEILLAIGEDPEREGLVGTPGRVADMYAELFCGLFQDPREELRVGFDENHREMVILKDIPFYSMCEHHLLPFHGKAHVGYIPMGRVVGISKIARVVEALARRPQLQERLTSQVADCIMEIVKPTGVGVVIEAEHLCMTMRGIRKPGSLVVTSANRGNFRARKATRDEFLSLIGHAMSGTRR

SEQ ID NO: 4579 - protein, 208 aa, Anaerolineales bacterium
  misc_feature (1)..(208): tr|A0A363UCK6|A0A363UCK6_9CHLR GTP cyclohydrolase 1 OS= Anaerolineales bacterium OX=2073117 GN=folE PE=3 SV=1
MEFDDDIDSIESRSTNIDIADAKRTVVELLKALGQDPEREGLKNTPDRVARMYTELLCGYTADPEKIVNGALFDVKYDEMVIVREIEFYSLCEHHMLPFIGRAHVAYIPDGKVLGLSKIPRIVDMYARRLQVQERMTRQIADFLRDLLEPQGVAVVVEAMHLCAMMRGVKKHDARMTTSAMHGAFRANLATRQEFLENIARGSRPLQF

SEQ ID NO: 4580 - protein, 186 aa, Anaeromicrobium sediminis
  misc_feature (1)..(186): tr|A0A267MGP1|A0A267MGP1_9CLOT GTP cyclohydrolase 1 OS= Anaeromicrobium sediminis OX=1478221 GN=folE PE=3 SV=1
MDKEKIKRAVRDILEAIGEDPDREGLQDTPDRIARMYEEIFSGLKEDPKDHLQIFFQEEKHEELVLVKDIPFYSMCEHHLVPFFGKAHVGYLPKGGKLTGLSKLARVVETVGKKPQLQERLTAQVAETIVEMLDPYGVIVVVEAEHMCMTMRGVKKSGSKTITSAVRGLFERDVKARNEAMTLIKF

SEQ ID NO: 4581 - protein, 192 aa, Anaeromicrobium sediminis
  misc_feature (1)..(192): tr|A0A267MB37|A0A267MB37_9CLOT GTP cyclohydrolase 1 OS= Anaeromicrobium sediminis OX=1478221 GN=folE PE=3 SV=1
MNIKKIEEHVRGILEALGADTESEGLRETPLRVAKMYEEVFEGMKYSNDDLAEMYGKTFEENIKSNNSENDMVLMKDIEIFSHCEHHLALMYNMKVSVAYIPKVKIIGLSKIARIADMVGRRLQLQERIGEDIADIIMKITESEDVAVIIEGEHGCMTVRGIKKTGTKTMTTTLKGRFNTDVMLNNRLFRMI

SEQ ID NO: 4582 - protein, 226 aa, Anaeromyxobacter dehalogenans
  misc_feature (1)..(226): tr|B8J840|B8J840_ANAD2 GTP cyclohydrolase I OS=Anaeromy xobacter dehalogenans (strain 2CP-1 / ATCC BAA-258) OX= 455488 GN=A2cp1_1998 PE=4 SV=1
MAARLRALRPARPRASAPAAAEATARFLDALGLPPEVRASPELAGTPRRVAEAWLEDLVDGYRIEPAEVLADAMPSAGRALVTLTGIDFHSVCPHHLLPSRGVAHVAYLPGGRVVGFGQLVRLVDCLAHRLVLAEDLAQSVADALVEHLGARGAGCVLDAEHLCLTVRGERRARARAHAEGFAGALARSGVARRSFAQAIARADGPRPARRGARRGRVRGAGPRAR

SEQ ID NO: 4583 - protein, 228 aa, Anaeromyxobacter dehalogenans
  misc_feature (1)..(228): tr|Q2IJA2|Q2IJA2_ANADE GTP cyclohydrolase I OS=Anaeromy xobacter dehalogenans (strain 2CP-C) OX=290397 GN=Adeh_ 1965 PE=4 SV=1
MAARLRALRPPRPRASAPATAEATARFLDALGLPPEVRASPELAGTPRRVAEAWLEDLVDGYRAEPAEVLADAMPSAGRALVTLTGIDFHSVCPHHLLPSRGVAHVAYLPGGRVVGFGQLVRLVDCLAHRLVLAEDLAQSVADALVEHLGARGAGCVLDAEHLCLTVRGERRARARAHAEGFAGALARSGVARRSFAQAIARAAGPRPAGAGRAARRGRARGAGTRAR

SEQ ID NO: 4584 - protein, 219 aa, Anaeromyxobacter sp.
  misc_feature (1)..(219): tr|A7HBJ5|A7HBJ5_ANADF GTP cyclohydrolase I OS=Anaeromy xobacter sp. (strain Fw109-5) OX=404589 GN=Anae109_1888 PE=4 SV=1
MAVRPLRSARARGSSAAPDAAAAAEAVERFLDALGLPPQVRASPDLQGTHRRVAQAWLEDLVDGYRRDPAEILADAIPSPSRDLVAVTGIAFHSVCPHHLLPSRGVAHVAYLPGGRVVGFGQLVRLVDALAHRLVLQEDLAHGIADALVTHLGARGAACLLDAEQLCMTVRGEKRGAARAHADAWLGALARGASRQRFLDLAGRAGATRRRPGAGRRRR

SEQ ID NO: 4585 - protein, 226 aa, Anaeromyxobacter sp.
  misc_feature (1)..(226): tr|B4UAP5|B4UAP5_ANASK GTP cyclohydrolase I OS=Anaeromy xobacter sp. (strain K) OX=447217 GN=AnaeK_1913 PE=4 SV =1
MAARLRALRPARPRASAPAAAEATARFLDALGLPPEVRASPELAGTPRRVAEAWLEDLVDGYRIEPAEVLADAMPSAGRALVTLTGIDFHSVCPHHLLPSRGVAHVAYLPGGRVVGFGQLVRLVDCLAHRLVLAEDLAQSVADALVTHLGARGAGCVLDAEHLCLTVRGERRARARAHAEGFAGALARSGVARRSFAQAIARADGPRPARRGARGGRARGAGPRAR

SEQ ID NO: 4586 - protein, 186 aa, Anaerospora hongkongensis
  misc_feature (1)..(186): tr|A0A4R1Q7V7|A0A4R1Q7V7_9FIRM GTP cyclohydrolase 1 OS= Anaerospora hongkongensis OX=244830 GN=folE PE=3 SV=1
MVDEQKARQAIALLLEALGDKAAREGLEDTPRRVAQMYAELFSGLEQDAEQELECFSSDEYDGMVLVKDISFYSMCEHHLIPFFGKAHIAYIPQAGRITGLGRLAKVVDIFAHRPQLQERLTAQVADAMENKLKPAGVMVVVEAEHLCMSMRGVLKPGALTTTLAVRGVFADDQAARAEVLALIKR

SEQ ID NO: 4587 - protein, 262 aa, Anaerosporomusa subterranea
  misc_feature (1)..(262): tr|A0A154BSU0|A0A154BSU0_ANASB GTP cyclohydrolase FolE2 OS=Anaerosporomusa subterranea OX=1794912 GN=folE2 PE= 3 SV=1
MKDVQNLNDVRGIAIQKVGVTDVHLPFQIKTKAGALQSVLARIRLTVDLPQEYKGTHMSRFIEALFAWSQKPVSYREMEQLLGDVLQRLHAQRAGIDIHFKYFIEKTAPVTGLKSILDFDCSFAGNLVQGERLEFTLGVAVPFTSLCPCSKEISDCGAHNQRGVMRVKLRQRPGTFTWIEDLVTLLEEQASCPVYPLLKREDEKYVTERAYENPKFVEDVLRDMVLVLRGIRGVSWFEAECETFESIHNHNAYAYHSEDSQP

SEQ ID NO: 4588 - protein, 195 aa, Anaerostipes caccae
  misc_feature (1)..(195): tr|B0ME51|B0ME51_ANACD GTP cyclohydrolase 1 OS=Anaerost ipes caccae (strain DSM 14662 / NCIMB 13811 / L1-92) OX =411490 GN=folE PE=3 SV=1
MAIDKEAVKKHIRGILEALGDDPDREGLKETPDRVARMYEEVFEGMNYSNDQIAEMYSKTFEDDLSVKNHKDMVVVKDIDIFSYCEHHLALMYNMKVTVAYQPKEKILGLSKIARICDMVGKRLQLQERIGSDIAEIISKVAGTEDVAVLIEGNHSCMSARGIKKNQTKTITSTLRGRFESDPAMENRFYMLADR

SEQ ID NO: 4589 - protein, 195 aa, Anaerostipes hadrus
  misc_feature (1)..(195): tr|A0A173RR45|A0A173RR45_ANAHA GTP cyclohydrolase 1 OS= Anaerostipes hadrus OX=649756 GN=folE PE=3 SV=1
MAIDKEAIKEHVRGILVALGDDPNREGLKETPDRVAKMYEEVFEGMNYSNHEIAQMFSKTFEDDLSVKDHKDMVIVKDIDIFSYCEHHMALMYDMKVSVAYLPKDKVLGLSKIARICDMVGKRLQLQERIGSDIAEIIMEVSGSEDVAVYIEGCHSCMSARGIKKHNAKTVTTTLRGAFDTDSTLKWHFMMQAGK

SEQ ID NO: 4590 - protein, 195 aa, Anaerostipes hadrus
  misc_feature (1)..(195): tr|D4MWU2|D4MWU2_ANAHA GTP cyclohydrolase 1 OS=Anaerost ipes hadrus OX=649756 GN=folE PE=3 SV=1
MAIDKEAIKEHIRGILVALGDDPNREGLKETPDRVAKMYEEVFEGMNYSNHEIAQMFSKTFEDDLSVKDHKDMVIVKDIDIFSYCEHHMALMYDMKVSVAYLPKDKVLGLSKIARICDMVGKRLQLQERIGSDIAEIIMEVSGSEDVAVYIEGCHSCMSARGIKKQNAKTVTTTLRGAFDTDSTLKWHFMMQAGK

SEQ ID NO: 4591 - protein, 195 aa, Anaerostipes rhamnosivorans
  misc_feature (1)..(195): tr|A0A4P8IBN5|A0A4P8IBN5_9FIRM GTP cyclohydrolase 1 OS= Anaerostipes rhamnosivorans OX=1229621 GN=folE PE=3 SV= 1
MAIDKEAIKTHIRGILEALGDDPEREGLVETPDRVARMYEEVFEGMNYTNTQIAEMFSKTFEDDLSVKNHKDMVIVKDIDIFSYCEHHLALMYNMKVTVAYQPKEKILGLSKIARICDMVGKRLQLQERIGSDIAEIISEVAQTEDVAVLIEGNHSCMSARGIKKNQAKTITSTLRGRFESDPFMESRFYTLADR

SEQ ID NO: 4592 - protein, 195 aa, Anaerostipes sp.
  misc_feature (1)..(195): tr|R6QFP5|R6QFP5_9FIRM GTP cyclohydrolase 1 OS=Anaerost ipes sp. CAG:276 OX=1262699 GN=folE PE=3 SV=1
MAIDKEAVKKHIRGILEALGDDPDREGLMETPDRVARMYEEVFEGMNYSNDQIAEMYSKTFEDDLSVKNHKDMVVVKDIDIFSYCEHHLALMYNMKVTVAYQPKEKILGLSKIARICDMVGKRLQLQERIGSDIAEIISKVAGTEDVAVLIEGNHSCMSARGIKKNQAKTITSTLRGRFESDSAMENRFYMLADR

SEQ ID NO: 4593 - protein, 195 aa, Anaerostipes sp.
  misc_feature (1)..(195): tr|A0A1Q9JQ13|A0A1Q9JQ13_9FIRM GTP cyclohydrolase 1 OS= Anaerostipes sp. 494a OX=1261636 GN=folE PE=3 SV=1
MAIDREAIKEHIKGILIALGDDPEREGLVETPERVAKMYEEVFEGMNYSNHQVAQMFSKTFEDDLTVKDYRDMVIVKDIDIFSYCEHHMALMYDMKVAVAYLPNQKVLGLSKIARICDMVGKRLQLQERIGSDIAEIIMEVAECEDVAVYIEGCHSCMSARGIKKNNAKTVTTTLRGAFEKDDTLKWHFMMQAGK

SEQ ID NO: 4594 - protein, 191 aa, Anaerotruncus sp.
  misc_feature (1)..(191): tr|A0A3A9J272|A0A3A9J272_9FIRM GTP cyclohydrolase 1 OS= Anaerotruncus sp. 1XD22-93 OX=2320082 GN=folE PE=3 SV=1
MCQKEEAMIDQEKIKKGVRLILEGIGEDADREGLVETPDRIARMYMELMGGMYEDAGEHLSKRFHVDKSDIVLEKDITFYSMCEHHMLPFYGRAHVAYIPNGTVVGLSKIARTVEVYAKRLQLQEQLTAQVADAFMEHLNPKGVMVMVEAEHMCMTMRGIKKPGSKTVTSATRGVFEGNPELQNTFYQMVR

SEQ ID NO: 4595 - protein, 185 aa, Anaerotruncus sp.
  misc_feature (1)..(185): tr|R5XC16|R5XC16_9FIRM GTP cyclohydrolase 1 OS=Anaerotr uncus sp. CAG:528 OX=1262700 GN=folE PE=3 SV=1
MDKKKIEKAVYDILEAVGEDPNRPGLLETPRRVANMYEEMFSGLTEDPHQHLKFFDEKSNDEMVIVRDIPFASMCEHHLLPFMGKAHIAYIPGENKIIGLSKLARIVDNFAKKPQVQERLTHDIADFLYTEMSAKGVAVIMEAEHMCMSIRGAKASGSKTQTSALRGIMKSDARTREEALALLDK

SEQ ID NO: 4596 - protein, 188 aa, Anaerovibrio lipolyticus
  misc_feature (1)..(188): tr|A0A1M6GJH9|A0A1M6GJH9_9FIRM GTP cyclohydrolase 1 OS= Anaerovibrio lipolyticus DSM 3074 OX=1120997 GN=folE PE =3 SV=1
MNKKAVQAMQGFLEAVGVDLKASGMEKTPERVAGMYEYLFNGIGVSTDDVWGELFKVENEGIVAVRDIPFYSMCEHHLVPFFGKVSIAYKPHEGSIAGFSKFTRMVEIISHRPQLQERMTEDIARAVEQGLKADGVLVIVEAQQLCMIMRGDMAHGSKTITSSTRGCFKSDRESYHQAWNMLGWDNNE

SEQ ID NO: 4597 - protein, 262 aa, Anaerovibrio lipolyticus
  misc_feature (1)..(262): tr|A0A0B2JMA5|A0A0B2JMA5_9FIRM GTP cyclohydrolase FolE2 OS=Anaerovibrio lipolyticus OX=82374 GN=folE2 PE=3 SV= 1
MKDVQNSADTRGIAIQKVGIRDAHLPLLIKTKEGDYQQVLANISFTVSLPMEYKGTHMSRFQEILNKWTRLPIAEVEMADILQEAMDKLQAETAAIHIEFKYFVDRFAPVSKRKSVLDVDCFFDGVMEREQPLQFTLGVKVPYTSLCPCSKEISEYGAHNQRGVMDVRVSFDDEHECILIEDLVALMEQQGSCQVYPLLKREDEKFVTEKAYDNPKFVEDILRDGVIALRQLEGIKWFALDCDNFESIHNHSAYASHEEFVE

SEQ ID NO: 4598 - protein, 262 aa, Anaerovibrio sp.
  misc_feature (1)..(262): tr|A0A1X1Q598|A0A1X1Q598_9FIRM GTP cyclohydrolase FolE2 OS=Anaerovibrio sp. JC8 OX=1240085 GN=folE2 PE=3 SV=1
MKDVQNSSDNRGIAIQKVGIRDAHLPLLIKTKDGDYQQVLANISFTVSLPMEYKGTHMSRFQEILNKWTSKPIAEPEMADILKEAMDKLQAETAAIRIEFKYFVDRFAPVSGRKSVLDVDCFFDGFMEREKPLQFTLGVKVPYTSLCPCSKEISEYGAHNQRGVMDVRVAFDDEHECILIEDLVALMEQQASCQVYPLLKREDEKYVTEKAYDNPKFVEDILRDGVIALRQLNGIKWFALDCDNFESIHNHSAYASHEEYVD

SEQ ID NO: 4599 - protein, 188 aa, Anaerovibrio sp.
  misc_feature (1)..(188): tr|A0A1X1Q7J7|A0A1X1Q7J7_9FIRM GTP cyclohydrolase 1 OS= Anaerovibrio sp. JC8 OX=1240085 GN=folE PE=3 SV=1
MNKKAVQAMQEFLEALGVDLKAAGMEKTPERVAGMYEYLFNGINAGTNEVWGELFKVENEGIVAVRDIPFYSMCEHHLVPFFGRVSIAYKPHEGFIAGFSKFTRMVEIISHRPQLQERMTEEVATAVEQGLKADGVLVIVEAQQLCMTMRGDMAHGTKTITSSCRGLFKDDSQSYHQAWSMLGRDNNE

SEQ ID NO: 4600 - protein, 188 aa, Anaerovirgula multivorans
  misc_feature (1)..(188): tr|A0A239JCU8|A0A239JCU8_9FIRM GTP cyclohydrolase 1 OS= Anaerovirgula multivorans OX=312168 GN=folE PE=3 SV=1
MDKAKIEKAVREILEAIGENPDREGLKDTPKRIARMYEEIFAGLEADPKQHLDIYFQDEKHEELVLVKDIPFYSVCEHHLVPFYGKAHVGYIPKNGKLTGLSKLARVVETISKRPQLQERLTSTIADTIVEKLQPHGVIVVVEAEHMCMTMRGVKKSGAQTVTSVVRGIFKKDAKARAEAMSLIQFKS

SEQ ID NO: 4601 - protein, 197 aa, Anaplasma centrale
  misc_feature (1)..(197): tr|D1AUN8|D1AUN8_ANACI GTP cyclohydrolase 1 OS=Anaplasm a centrale (strain Israel) OX=574556 GN=folE PE=3 SV=1
MHKDLHKPSDEDAKEAVEVLIRWIGDSPGREGLSLTAGRVLNTYRESFRGYALESLHDFRNSVFVNEGYSDMILLRGVNFSSTCEHHMAPMTGVANISYIPKAAVLGVGAIIRVIDIFTKRLQLQERMTVQIAHFLSELLKPAGVAVLIEARHWCAKCSGGEAVDDLKLQTSCMLGAFQDDHNVRSEFFCRVGCKFS

SEQ ID NO: 4602 - protein, 198 aa, Anaplasma marginale
  misc_feature (1)..(198): tr|B9KIK8|B9KIK8_ANAMF GTP cyclohydrolase 1 OS=Anaplasm a marginale (strain Florida) OX=320483 GN=folE PE=3 SV= 1
MHKDLARKPSDKDAKEAIEVLIRWIDDSPDREGLSLAAGRVLNAYKESFQGYALESSHDFRNSVFANEGYSDMILLRGVNFSSTCEHHMSPMAGVVNISYIPKATVIGVGTVVRVVDIFAKRLQVQERMTVQIAQFLSELLKPAGVAVLIEAKHWCAKYLGGEAVSDLKLQTSCMLGEFQNNQNVRSEFFCRIGYKFS

SEQ ID NO: 4603 - protein, 198 aa, Anaplasma marginale
  misc_feature (1)..(198): tr|A0A5D8Y8E6|A0A5D8Y8E6_ANAMA GTP cyclohydrolase 1 OS= Anaplasma marginale OX=770 GN=folE PE=3 SV=1
MHKDLARKPSDKDAKEAIEVLIRWIDDSPDREGLSLTAGRVLNAYKESFQGYALESSHDFRNSVFANEGYSDMILLRGVNFSSTCEHHMSPMAGVVNISYIPKATVIGVGTVVRVVDIFAKRLQVQERMTVQIAQFLSELLKPAGVAVLIEAKHWCAKYLGGEAVSDLKLQTSCMLGEFQNNQNVRSEFFCRIGYKFS

SEQ ID NO: 4604 - protein, 198 aa, Anaplasma ovis
  misc_feature (1)..(198): tr|A0A2N4SVD3|A0A2N4SVD3_9RICK GTP cyclohydrolase 1 OS= Anaplasma ovis OX=142058 GN=folE PE=3 SV=1
MHKDLARKPSDKDAKEAIEVLIRWIYDSPDREGLSLTAGRVLNAYKESFQGYALESSHDFRNSVFANEGYSDMILLRGVNFSSTCEHHMSPMAGVVNISYIPKATVIGVGTVVRVVDIFAKRLQVQERMTVQIAQFLSELLKPAGVAVLIEAKHWCAKYLGGEAVSDLKLQTSCMLGEFQNNQNVRSEFFCRIGYKFS

SEQ ID NO: 4605 - protein, 198 aa, Anaplasma ovis
  misc_feature (1)..(198): tr|A0A2Z2LBL4|A0A2Z2LBL4_9RICK GTP cyclohydrolase 1 OS= Anaplasma ovis str. Haibei OX=1248439 GN=AOV_02215 PE=3 SV=1
MYKDLGRKPSDKDAEEAIEVLIRWADDSPGREGLSLTAGRVLSAYKESFQGYALESSHDFRNSVFANEGYSDMILLRGVNFSSTCEHHMSPMTGVVNVSYIPKATVIGVGAIVRVVDIFAKRLQVQERMTVQIAQFLGALLKPAGVAVLIEAEHWCAKYSGGEAANGLKLQTSCMLGEFQNNQDMRSEFFCRIGCKFS

SEQ ID NO: 4606 - protein, 202 aa, Anaplasma phagocytophilum
  misc_feature (1)..(202): tr|A0A1G4LUW8|A0A1G4LUW8_ANAPH GTP cyclohydrolase 1 OS= Anaplasma phagocytophilum OX=948 GN=folE_1 PE=3 SV=1
MAEVTQCGRVCPTIEEAEEAVRVIIRWMGDDPNREGLLKTPRRVLDYYKKSCSGYAPELLSHYSILPYDGSSSEMVLVKNIGFSSNCEHHLSPICGVAHIAYMPKEKILGIGSIAHIVGCFAKRLQLQERLTNQVAEYLEKILEPHGIAVLLEAEHWCVECSNRDTASRDERLHVQTSQMLGVFEERCDLRNEFFLRIKMYK

SEQ ID NO: 4607 - protein, 98 aa, Anaplasma phagocytophilum
  misc_feature (1)..(98): tr|A0A181ZXZ0|A0A181ZXZ0_ANAPH GTP cyclohydrolase 1 OS= Anaplasma phagocytophilum OX=948 GN=folE_2 PE=3 SV=1
MPKEKILGIGSIAHIVGCFAKRLQLQERLTNQVAEYLEKILDPHGVAVLLEAEHWCVECSNRDTASRDERLNVQTSQMLGVFEERCDLRNEFFLRIKM

SEQ ID NO: 4608 - protein, 191 aa, Ancrocorticia populi
  misc_feature (1)..(191): tr|A0A2V1K974|A0A2V1K974_9ACTO GTP cyclohydrolase 1 OS= Ancrocorticia populi OX=2175228 GN=folE PE=3 SV=1
MRSERTYDEAAVEKAIRDLLFAVGEDPDRDGLRDTPGRMARAYKEMFSGLYTNPAEVLSAKFDIGHEEMVLVKDIPMYSTCEHHLLPFHGVAHVAYIPGKDGKVTGLSKIARLVDGYARRPQVQERLTSEVADALVESLEVSGVIVVIEAEHLCMSMRGVRKPGSRTITSAVRGIMRNQATRSEAMSLINS

SEQ ID NO: 4609 - protein, 212 aa, Ancylobacter aquaticus
  misc_feature (1)..(212): tr|A0A3S0GM55|A0A3S0GM55_ANCAQ GTP cyclohydrolase 1 OS= Ancylobacter aquaticus OX=100 GN=folE PE=3 SV=1
MDAVLKSLMRSAQSEMEASAARRPSREEAEAAVRTLIAWAGDDPEREGLLDTPKRVVRAYEELYSGYRAAPESILDRTFGEIGNFDDMVMVRDIEFHSHCEHHMVPFVGKAHIAYFPVERVVGLSKIARIVDIFARRLQTQEHLTSQIITAMDEILKPRGVAILIEAEHMCMAMRGVRKQGASTVTTQFTGVFRDDPQEQVRFMSLLRGMRP

SEQ ID NO: 4610 - protein, 212 aa, Ancylobacter aquaticus
  misc_feature (1)..(212): tr|A0A4R1I764|A0A4R1I764_ANCAQ GTP cyclohydrolase 1 OS= Ancylobacter aquaticus OX=100 GN=folE PE=3 SV=1
MDAVLKSLMRSAQSEMEASAARRPSREDAEAAVRTLIAWAGDDPEREGLLDTPKRVVRAYEELYSGYRAAPESILDRTFGEIGNFDDMVMVRDIEFHSHCEHHMVPFVGKAHIAYFPVERVVGLSKIARIVDIFARRLQTQEHLTSQIITAMDEILKPRGVAILIEAEHMCMAMRGVRKQGASTVTTQFTGVFRDDPQEQVRFMSLLRGMRP

SEQ ID NO: 4611 - protein, 212 aa, Ancylobacter rudongensis; identical to SEQ ID NO: 4609
  misc_feature (1)..(212): tr|A0A1G4Q5T4|A0A1G4Q5T4_9RHIZ GTP cyclohydrolase 1 OS= Ancylobacter rudongensis OX=177413 GN=folE PE=3 SV=1

SEQ ID NO: 4612 - protein, 208 aa, Ancylomarina sp.
  misc_feature (1)..(208): tr|A0A4Q1JR39|A0A4Q1JR39_9BACT GTP cyclohydrolase 1 OS= Ancylomarina sp. SHSM-M15 OX=2501299 GN=folE PE=3 SV=1
MEFSINGTENKGFTKIEKFNQETTEELMFHYKKVLELLGEDVEREGLEKTPLRVAKAMQFLTQGYHVKPEEILQSAMFKEDYRQMVIVKDIEVYSMCEHHMLPFVGRAHVAYIPDGTITGLSKIARVVDAFARRLQVQERLTTQIKDCIQDTLKPLGVAVVIEAQHMCMSMRGVQKQNAITTTSDFTGAFEKVATREEFIRLISAKTI

SEQ ID NO: 4613 - protein, 209 aa, Ancylomarina sp.
  misc_feature (1)..(209): tr|A0A425YCC8|A0A425YCC8_9BACT GTP cyclohydrolase 1 OS= Ancylomarina sp. A4 OX=2283628 GN=folE PE=3 SV=1
MEFSTNGDTNKGFTKIEKYNQDTTEQLMFHYKKVLELLGEDAEREGLLKTPLRVAKAMQFLTQGYHNNPEDILRSAMFQEDYRQMVIVKDIEVYSMCEHHMLPFVGRAHVAYIPNGTITGLSKIARVVDAFARRLQVQERLTTQIKDCIQNTLNPLGVAVVIEAQHMCMSMRGVQKQNAITTTSDFTGAFEKVATREEFIRLIANKSNY

SEQ ID NO: 4614 - protein, 208 aa, Ancylomarina subtilis; identical to SEQ ID NO: 4612
  misc_feature (1)..(208): tr|A0A4Q7VL16|A0A4Q7VL16_9BACT GTP cyclohydrolase 1 OS= Ancylomarina subtilis OX=1639035 GN=folE PE=3 SV=1

SEQ ID NO: 4615 - protein, 237 aa, Anditalea andensis
  misc_feature (1)..(237): tr|A0A074KY16|A0A074KY16_9BACT GTP cyclohydrolase 1 OS= Anditalea andensis OX=1048983 GN=folE PE=3 SV=1
MKRKETLLNTTGMDLDRDFDEIGDEHVGTSPETPLRNDAFEMDDEIKMELIEKHFKEIMHILGLDLEDDSLKGTPRRVAKMYIKEVFSGLDPKNMPVPKLFENKYKYNQMLVEKDITFYSHCEHHFVPIVGKAHVAYISNGHVIGLSKINRMVQYFAKRPQVQERLTMQIGNAFKEILGTDDVAVIVDAHHMCVSSRGIQDVNSSTVTSYYGGKFEKDEQTRNELMRYIAMDHKVGL

SEQ ID NO: 4616 - protein, 186 aa, Andreesenia angusta
  misc_feature (1)..(186): tr|A0A1S1V610|A0A1S1V610_9FIRM GTP cyclohydrolase 1 OS= Andreesenia angusta OX=39480 GN=folE PE=3 SV=1
MDRERIEKAIREILFAIGEDPDREGLVDTPKRIAKMYGEIFGGMKVDPKDHLQVFFQEEKHEELVLVKDIPFYSTCEHHLVPFFGKAHVGYLPKNGKLTGLSKLARVVDDVAKRPQLQERITCSVADAIMEVLDPHGVIVVVEAEHMCMTMRGIKKPGSKTITSAVRGIFNTDAKARSEAMTLIKF

SEQ ID NO: 4617 - protein, 187 aa, Aneurinibacillus aneurinilyticus
  misc_feature (1)..(187): tr|U1X073|U1X073_ANEAE GTP cyclohydrolase 1 OS=Aneurini bacillus aneurinilyticus ATCC 12856 OX=649747 GN=folE P E=3 SV=1
MKVNHKKIEEGVRMILEAVGENPNREGLLDTPARVARMYEEVFSGLAQDPKEYFSVVFSEDHEELVLVKDIPFYSMCEHHLVPFYGVAHVGYIPRGGRVTGLSKLARAVEAVAKRPQLQERITSTVADSIMDTLEPHGVVVVVEAEHLCMTMRGVKKPGAKTVTSAVRGIFAKDSASRAEVFSLIKG

SEQ ID NO: 4618 - protein, 200 aa, Aneurinibacillus aneurinilyticus
  misc_feature (1)..(200): tr|U1Y9N4|U1Y9N4_ANEAE GTP cyclohydrolase 1 OS=Aneurini bacillus aneurinilyticus ATCC 12856 OX=649747 GN=folE P E=3 SV=1
MNAMRAEAVKSSTSFTDPIEKHFYDIIHLIGEDPEREGLKETPKRIAKMYREIFSGLDEDPAEVLGKTFPAEGTNDIVIVQDIPFHSVCEHHFVPFFGKVHIGYIPNGRIVGLSKFARLVEILARRPQVQERITNQIVDTIEQVIEPVGVIAVIEAEHMCMSMRGIRKPGSKTRTIARRGIFDKDNDVQEQRFFRLLEKE

SEQ ID NO: 4619 - protein, 197 aa, Aneurinibacillus danicus
  misc_feature (1)..(197): tr|A0A511V5C5|A0A511V5C5_9BACL GTP cyclohydrolase 1 OS= Aneurinibacillus danicus OX=267746 GN=folE_1 PE=3 SV=1
MRAEAVKSSETFIDPIEKHFYDIIHLIGEDPEREGLKETPKRIAKMYREIFSGLDEDPAEVLGKTFPAEGANDIVIVQDIPFYSVCEHHFVPFFGKAHIGYIPNGRIVGLSKFARLVEILARRPQVQERITNQIVDALEQVIQPVGAIAVIEAEHMCMSMRGVKKPGSKTRTIARRGIFAKDNGVQEERFFRLLEKE

SEQ ID NO: 4620 - protein, 187 aa, Aneurinibacillus danicus
  misc_feature (1)..(187): tr|A0A511V7N6|A0A511V7N6_9BACL GTP cyclohydrolase 1 OS= Aneurinibacillus danicus OX=267746 GN=folE_2 PE=3 SV=1
MKVNHKKIEEAVRMILEAIGENPSREGLLDTPARVARMYEEVFTGLSQDPKEYFSVVFSEEHEELVLVKDIPFYSMCEHHLVPFYGVAHVGYIPRGGRVTGLSKLARAVEAVAKRPQLQERITSTVADSIMETLEPHGVVVVVEAEHLCMTMRGVKKPGSKTVTSAVRGIFAQDPASRAEVFSLIKG

SEQ ID NO: 4621 - protein, 197 aa, Aneurinibacillus migulanus
  misc_feature (1)..(197): tr|A0A1G8HRY8|A0A1G8HRY8_ANEMI GTP cyclohydrolase 1 OS= Aneurinibacillus migulanus OX=47500 GN=folE PE=3 SV=1
MRAEAVKSSTTFTDPIEKHFYDIIHLIGEDPEREGLKETPKRIAKMYREIFSGLNEDPAEVLGKTFPAEGTNDIVIVQDIPFHSVCEHHFVPFFGKVHIGYIPNGRIVGLSKFARLVEILARRPQVQERITNQIVDTIEQVIEPIGVIAVIEAEHMCMSMRGVRKPGSKTRTIARRGIFDKDNGVQEQRFFRLLEKE

SEQ ID NO: 4622 - protein, 187 aa, Aneurinibacillus migulanus
  misc_feature (1)..(187): tr|A0A0D1XXR8|A0A0D1XXR8_ANEMI GTP cyclohydrolase 1 OS= Aneurinibacillus migulanus OX=47500 GN=folE PE=3 SV=1
MKINHKKIEEGVRMILEAVGEDPNREGLLDTPARVARMYEEVFSGLTQDPKEYFSVVFSEDHEELVLVKDIPFYSMCEHHLVPFYGVAHVGYIPRGGRVTGLSKLARAVEAVAKRPQLQERITSTVADSIMDTLEPHGVVVVVEAEHLCMTMRGVKKPGAKTVTSAVRGIFAKDSASRAEVFSLIKG

SEQ ID NO: 4623 - protein, 196 aa, Aneurinibacillus soli
  misc_feature (1)..(196): tr|A0A0U5AZQ8|A0A0U5AZQ8_9BACL GTP cyclohydrolase 1 OS= Aneurinibacillus soli OX=1500254 GN=folE PE=3 SV=1
MRAEAVKSSKQAADPIEQHFYEVIQLIGENPEREGLQETPKRIAKMYREVFGGLQEDPEEVLGKTFPAEGASDIVIVQDIPFYSMCEHHFVPFFGKVHIGYIPDGRIVGLSKFARLVDILARRPQVQERMTNQIVEALNNVVCPIGAIAVVEAEHLCMSMRGIKKPGSRTRTIARGGVFKTDLVQEERFFRLLEKE

SEQ ID NO: 4624 - protein, 200 aa, Aneurinibacillus sp.
  misc_feature (1)..(200): tr|A0A0X8D5T3|A0A0X8D5T3_9BACL GTP cyclohydrolase 1 OS= Aneurinibacillus sp. XH2 OX=1450761 GN=folE PE=3 SV=1
MNAMRAEAVKSSRTFTDPIEKHFYDIISLIGEDPEREGLQETPKRIAKMYREIFSGLHEDPAEVLGKTFPAEGTNDIVIVQDIPFYSVCEHHFVPFFGKVHIGYIPNGRIVGLSKFARLVEILARRPQVQERITNQIVDTLEKVIEPVGAIAVVEAEHLCMSMRGVKKPGSKTRTIARRGIFEKDNGVQEERFFRLLEKE

SEQ ID NO: 4625 - protein, 189 aa, Aneurinibacillus sp.
  misc_feature (1)..(189): tr|A0A0X8D3S0|A0A0X8D3S0_9BACL GTP cyclohydrolase 1 OS= Aneurinibacillus sp. XH2 OX=1450761 GN=folE PE=3 SV=1
MNHTVLNVDLEENIKLILQYIGEIPEREGLIETPKRVIKMYDEIFKGYKEDPSSYLRKTFKEDHRELVLVKDISFYSHCEHHMVPFFGVAHIAYIPNGFVVGLSKIARMLEAYDRRLQLQERLTFQVAKTMFEVLNPLGVMVVIEAEHFCMTIRGVQKPGAKNVTTETLGIFTEDNELVHKVLDLIKTK

SEQ ID NO: 4626 - protein, 189 aa, Aneurinibacillus thermoaerophilus; identical to SEQ ID NO: 4625
  misc_feature (1)..(189): tr|A0A1G8BKJ4|A0A1G8BKJ4_ANETH GTP cyclohydrolase 1 OS= Aneurinibacillus thermoaerophilus OX=143495 GN=folE PE= 3 SV=1

SEQ ID NO: 4627 - protein, 197 aa, Aneurinibacillus thermoaerophilus
  misc_feature (1)..(197): tr|A0A1G7YPX3|A0A1G7YPX3_ANETH GTP cyclohydrolase 1 OS= Aneurinibacillus thermoaerophilus OX=143495 GN=folE PE= 3 SV=1
MRAEAVKSSRTFTDPIEKHFYDIISLIGEDPEREGLQETPKRIAKMYREIFSGLHEDPAEVLGKTFPAEGTNDIVIVQDIPFYSVCEHHFVPFFGKVHIGYIPNGRIVGLSKFARLVEILARRPQVQERITNQIVDTLEKVIEPVGAIAVVEAEHLCMSMRGVKKPGSKTRTIARRGIFEKDNGVQEERFFRLLEKE

SEQ ID NO: 4628 - protein, 188 aa, Angustibacter sp.
  misc_feature (1)..(188): tr|A0A0Q7JLD7|A0A0Q7JLD7_9ACTN GTP cyclohydrolase 1 OS= Angustibacter sp. Root456 OX=1736539 GN=folE PE=3 SV=1
MVDQERAAAAVRELLLAIGEDPERDGLRGTPERVARSFTEIYAGIGQSPADVLTTTFEIGHDELVMVRDIDMYSMCEHHLLPFHGVAHVGYIPNPDGRVTGLSKLARLVDVYARRPQIQERMTSDIADALVEHLSPRGVLVVIEAEHLCMAMRGVRRPGTTTITSAVRGQLRDAATRAEAMSLLRGRS

SEQ ID NO: 4629 - protein, 197 aa, Angustibacter sp.
  misc_feature (1)..(197): tr|A0A0Q7K0W6|A0A0Q7K0W6_9ACTN GTP cyclohydrolase 1 OS= Angustibacter sp. Root456 OX=1736539 GN=folE PE=3 SV=1
MTARVDVRAAEQAAHDLMDALGLDVDAEALVDTPRRMVEAYRELLTPRSFDLTTFANDEGYDELVLARAIPVQSVCEHHLLPFVGVAHVGYLPGERILGLSKLARVVELFARRPQVQERLTKQVADWLDDRLAPRGVGVVIEAEHTCMTLRGVRANGSTTVTSTLLGTLREDARSRAEFLALTGLTGGLTTGGGVRG

SEQ ID NO: 4630 - protein, 186 aa, Anoxybacillus amylolyticus
  misc_feature (1)..(186): tr|A0A160F3K3|A0A160F3K3_9BACI GTP cyclohydrolase 1 OS= Anoxybacillus amylolyticus OX=294699 GN=folE PE=3 SV=1
MVNYEQIEQAVRLILEAIGEDPNREGLLDTPKRVAKMYAEVFSGMNEDPKEHFQTVFSEEHEELVLVKDIPFFSMCEHHLVPFFGVAHVAYIPRGGKVTGLSKLARAVEAVARRPQLQERITATVADAIMETLEPHGALVVVEAEHMCMTMRGVKKPGAKTVTIAARGTFETDHVARGEVLSLIKG

SEQ ID NO: 4631 - protein, 188 aa, Anoxybacillus amylolyticus
  misc_feature (1)..(188): tr|A0A4R1GBB3|A0A4R1GBB3_9BACI GTP cyclohydrolase 1 OS= Anoxybacillus amylolyticus OX=294699 GN=folE PE=3 SV=1
MPEINFAQIEYAVRLILEAIGEDPNREGLVDTPKRVAKMYAEVFAGLQEDPKQHFQTVFSEEHEELVLVKDIPFYSMCEHHLVPFFGAAHVAYIPREGKVTGLSKLARAVEAVARRPQLQERITATIADSIVEALEPHGVMVVVEAEHMCMTMRGVKKPGAKTVTTAVRGVFETDANARAEVLSLIKA

SEQ ID NO: 4632 - protein, 184 aa, Anoxybacillus ayderensis
  misc_feature (1)..(184): tr|A0A0D0GYJ2|A0A0D0GYJ2_9BACI GTP cyclohydrolase 1 OS= Anoxybacillus ayderensis OX=265546 GN=folE PE=3 SV=1
MNVEQIEQAVRLILEAIGEDPNREGLLDTPKRVAKMYAEVFSGLNEDPKIHLQTVFSEDHEELVLVKDIPFYSMCEHHLVPFFGVAHVAYIPRGGKVTGLSKLARAVETVARRPQLQERITATVADAIMETLEPHGVMVVVEAEHMCMTMRGVKKPGAKTVTTAVRGTLATDEKARAEILALIK

SEQ ID NO: 4633 - protein, 187 aa, Anoxybacillus ayderensis
  misc_feature (1)..(187): tr|A0A1X6MG95|A0A1X6MG95_9BACI GTP cyclohydrolase 1 OS= Anoxybacillus ayderensis OX=265546 GN=folE PE=3 SV=1
MQQMNVEQIEQAVRLILEAIGEDPNREGLLDTPKRVAKMYAEVFSGLNEDPKIHLQTVFSEDHEELVLVKDIPFYSMCEHHLVPFFGVAHVAYIPRGGKVTGLSKLARAVETVARRPQLQERITATVADAIMETLEPHGVMVVVEAEHMCMTMRGVKKPGSKTVTTAVRGTLATDEKARAEILALIK

SEQ ID NO: 4634 - protein, 200 aa, Anoxybacillus flavithermus
  misc_feature (1)..(200): tr|B7GHP5|B7GHP5_ANOFW GTP cyclohydrolase 1 OS=Anoxybac illus flavithermus (strain DSM 21510 / WK1) OX=491915 G N=mtrA PE=3 SV=1
MLESDYVKLNARRMNQMNVQQIEQAVRLILEAIGEDPNREGLLDTPKRVAKMYAEVFSGLTEDPKVHLQTVFSEDHEELVLVKDIPFYSMCEHHLVPFFGVAHVAYIPRGGKVTGLSKLARTVETVARRPQLQERITATVADAIMETLEPHGVMVVVEAEHMCMTMRGVKKPGAKTVTTAVRGTLATDEKARAEILALIK

SEQ ID NO: 4635 - protein, 187 aa, Anoxybacillus flavithermus
  misc_feature (1)..(187): tr|R4FC45|R4FC45_9BACI GTP cyclohydrolase 1 OS=Anoxybac illus flavithermus NBRC 109594 OX=1315967 GN=folE PE=3 SV=1
MQQMNVQQIEQAVRLILEAIGEDPNREGLLDTPKRVAKMYAEVFSGLTEDPKVHLQTVFSEDHEELVLVKDIPFYSMCEHHLVPFFGVAHVAYIPRGGKVTGLSKLARTVETVARRPQLQERITATVADAIMETLEPHGVMVVVEAEHMCMTMRGVKKPGAKTVTTAVRGTLATDDKARAEILALIK

SEQ ID NO: 4636 - protein, 184 aa, Anoxybacillus gonensis
  misc_feature (1)..(184): tr|M5QQX8|M5QQX8_9BACI GTP cyclohydrolase 1 OS=Anoxybac illus gonensis OX=198467 GN=folE PE=3 SV=1
MNVEQIEQAVRLILEAIGEDPNREGLLDTPKRVAKMYAEVFSGLNEDPKIHLQTVFSEDHEELVLVKDIPFYSMCEHHLVPFFGVAHVAYIPRGGKVTGLSKLARTVETVARRPQLQERITATVADAIMETLEPHGVMVVVEAEHMCMTMRGVKKPGAKTVTTAVRGTLATDEKARAEILALIK

SEQ ID NO: 4637 - protein, 187 aa, Anoxybacillus gonensis
  misc_feature (1)..(187): tr|A0A0A2SHJ7|A0A0A2SHJ7_9BACI GTP cyclohydrolase 1 OS= Anoxybacillus gonensis OX=198467 GN=folE PE=3 SV=1
MQQMNVEQIEQAVRLILEAIGEDPNREGLLDTPKRVAKMYAEVFSGLNEDPKIHLQTVFSEDHEELVLVKDIPFYSMCEHHLVPFFGVAHVAYIPRGGKVTGLSKLARTVETVARRPQLQERITATVADAIMETLEPHGVMVVVEAEHMCMTMRGVKKPGAKTVTTAVRGTLATDEKARAEILALIK

SEQ ID NO: 4638 - protein, 299 aa, Anoxybacillus kamchatkensis
  misc_feature (1)..(299): tr|A0A4S3L6U2|A0A4S3L6U2_9BACI GTP cyclohydrolase FolE2 OS=Anoxybacillus kamchatkensis OX=196180 GN=folE2 PE=3 SV=1
MEHLHLPKKEDRLIYFGSTNPLINKTKPTEKEQMVDLQREKKDFFFHIDHVGIFNVSHPITIESSMKPHVQTTIGTFTLTTSLNRDEKGINMSRLTELLHEYYEKNWTVTLRSLQSFSKDMAERMKQRKSSVSVRYPWYYEKEAPETLHKGMVHANVLTTMTYEHEKGWKASVGIDCTVTTLCPCSKEISEYSAHNQRSIVSIIADLQHDAEWPESFKEQLLHIAESNASSQMYSVLKRPDEKYVTERAYENPRFVEDLIRLIAADLYEQAWVRSFHITCRNEESIHLHDAYAQMSFQK

SEQ ID NO: 4639 - protein, 187 aa, Anoxybacillus kamchatkensis; identical to SEQ ID NO: 4637
  misc_feature (1)..(187): tr|A0A346DIY0|A0A346DIY0_9BACI GTP cyclohydrolase 1 OS= Anoxybacillus kamchatkensis G10 OX=1212546 GN=folE PE=3 SV=1

SEQ ID NO: 4640 - protein, 184 aa, Anoxybacillus pushchinoensis
  misc_feature (1)..(184): tr|A0A1I0SNI7|A0A1I0SNI7_9BACI GTP cyclohydrolase 1 OS= Anoxybacillus pushchinoensis OX=150248 GN=folE PE=3 SV= 1
MNTQQIEQAVRLILEAIGEDPNREGLLDTPKRVAKMYAEVFAGLNEDPKVHLQTVFSEDHEELVLVKDIPFYSMCEHHLVPFFGVAHVAYIPRGGKVTGLSKLARTVETVARRPQLQERITATVADAIMDTLEPHGVMVVVEAEHMCMTMRGVKKPGAKTVTTAVRGTLAEDEKARAEILALIK

SEQ ID NO: 4641 - protein, 299 aa, Anoxybacillus sp.
  misc_feature (1)..(299): tr|A0A094JZM2|A0A094JZM2_9BACI GTP cyclohydrolase FolE2 OS=Anoxybacillus sp. KU2-6(11) OX=1535751 GN=folE2 PE= 3 SV=1
MEHLHLPKKEDRLIYFGSTNPLINKTKPTEKGQMVDLQREKKDFFFHIDHVGIFNVSHPITIESSMKPHVQTTIGTFTLTTSLNRDEKGINMSRLTELLHEYYEKNWTVTLRSLQSFSKDMAERMKQRKSSVSVRYPWYYEKEAPETLHKGMVHANVLTTMTYEHEKGWQASVGIDCTVTTLCPCSKEISEYSAHNQRSIVSIIADLQHDAEWPESFKEQLLHIAESNASSQMYSVLKRPDEKYVTERAYENPRFVEDLIRLIAADLYEQAWVRSFHITCRNEESIHLHDAYAQMSFQK

SEQ ID NO: 4642 - protein, 187 aa, Anoxybacillus sp.
  misc_feature (1)..(187): tr|A0A094M3H7|A0A094M3H7_9BACI GTP cyclohydrolase 1 OS= Anoxybacillus sp. KU2-6(11) OX=1535751 GN=folE PE=3 SV= 1
MQQMNVEQIEQAVRLILEAIGEDPNREGLLDTPKRVAKMYAEVFSGLNEDPKIHLQTVFSEDHEELVLVKDIPFYSMCEHHLVPFFGVAHVAYIPRGGKVTGLSKLARTVETVARRPQLQERITATVADAIMETLEPHGVMVVVEAEHMCMTMRGVKKPGAKTVTTAVRGTLATDDKARAEILALIK

SEQ ID NO: 4643 - protein, 184 aa, Anoxybacillus suryakundensis
  misc_feature (1)..(184): tr|A0A0K6GLB9|A0A0K6GLB9_9BACI GTP cyclohydrolase 1 OS= Anoxybacillus suryakundensis OX=1325335 GN=folE PE=3 SV =1
MNVEQIEQAVRLILEAIGEDPNREGLLDTPKRVAKMYAEVFSGLNEDPKIHLQTVFSEDHEELVLVKDIPFYSMCEHHLVPFFGVAHVAYIPRGGKVTGLSKLARTVETVARRPQLQERITATVADAIMETLEPHGVMVVVEAEHMCMTMRGVKKPGAKTVTTAVRGTLETDDKARAEILALIK

SEQ ID NO: 4644 - protein, 184 aa, Anoxybacillus thermarum; identical to SEQ ID NO: 4636
  misc_feature (1)..(184): tr|A0A0D0QVW2|A0A0D0QVW2_9BACI GTP cyclohydrolase 1 OS= Anoxybacillus thermarum OX=404937 GN=folE PE=3 SV=1

SEQ ID NO: 4645 - protein, 190 aa, Anoxybacillus vitaminiphilus
  misc_feature (1)..(190): tr|A0A327YSI3|A0A327YSI3_9BACI GTP cyclohydrolase 1 OS= Anoxybacillus vitaminiphilus OX=581036 GN=folE PE=3 SV= 1
MAQDIRLDAMEETIRTLLEQIGEDPEREGLKDTPKRVAKMYREVFAGIGVDPKTALTTTFEEAYEGIVTVKDISYYTFCEHHLIPFYGKAHIGYIPSGRVVGLSKFARLVELVSKKPQVQERMTQEIADAIMDVLNPKGVIVNIEGTHLCMCARGVKKPGAKTITSVKKGVFAEKDLLVQEFERAIYRAL

SEQ ID NO: 4646 - protein, 199 aa, Anoxybacillus vitaminiphilus
  misc_feature (1)..(199): tr|A0A327YST5|A0A327YST5_9BACI GTP cyclohydrolase 1 OS= Anoxybacillus vitaminiphilus OX=581036 GN=folE PE=3 SV= 1
MNTKLKHQSVADDPIERHFYEIIQLIGEDPEREGLIETPKRIAKMYREIFSGLHENPEEILQKTFPAEGTKDIVIVQDIPFYSVCEHHFVPFFGKVHIGYIPNERIVGLSKFARLVDVFARRPQVQERITNEIVNTIQKVVNPLGVICVVEAEHMCMTMRGIKKPGSLTRTIAKSGVFDSDELPNYYEERFFKMLNKEI

SEQ ID NO: 4647 - protein, 188 aa, Anoxybacter fermentans
  misc_feature (1)..(188): tr|A0A3Q9HQG4|A0A3Q9HQG4_9FIRM GTP cyclohydrolase 1 OS= Anoxybacter fermentans OX=1323375 GN=folE PE=3 SV=1
MVDKEKIKRAVRDILEAIGEDPEREGLKDTPRRIADMYEEIFSGLYEDPKKHLEIYFQDEKHEELVLVKDIPFYSICEHHLLPFFGKAHVAYIPRGGKLTGLSKLARVVETVAKRPQLQERITKTVADILMEQLEPYGVIVVIEAEHMCMTMRGVKKPGSKTVTSAIRGLFERNHASRAEVMSLINHK

SEQ ID NO: 4648 - protein, 214 aa, Anseongella ginsenosidimutans
  misc_feature (1)..(214): tr|A0A4V2UU28|A0A4V2UU28_9SPHI GTP cyclohydrolase 1 OS= Anseongella ginsenosidimutans OX=496056 GN=folE PE=3 SV =1
MDDKNIEGQLLDELEMDGYQKIDRYNTHKIKQLADKYREILKDIGEDPTRPGLLNTPERVAKALLYFTHGYDMDPAGIIRSALFEEEYSQMVIVKDIELYSLCEHHMVPFFGKAHIAYIPKGKIVGLSKIPRVVDVFARRLQVQERLTNDIKDCLHNTLQPAGVAVVIECTHLCMCMRGVQKQNSVTTTSAFTGEFAKETTRAEFMRLISANLV

SEQ ID NO: 4649 - protein, 225 aa, Antarcticibacterium flavum
  misc_feature (1)..(225): tr|A0A5B7X7A8|A0A5B7X7A8_9FLAO GTP cyclohydrolase 1 OS= Antarcticibacterium flavum OX=2058175 GN=folE PE=3 SV=1
MKIDQIENEIDELGDAHASSSAVNPMKEDAFNLSDTEKIAMITEDVKHILDTLGMDLNDDSLRGTPLRVAKMFVKEMFAGLDPQRKPKASTFENKYKYGEMLVEKNITVYSTCEHHLLPIVGKAHVAYISKGSVIGLSKMNRIVDYFAKRPQVQERMTMQIVQELQKALGTEDVACVIDAKHLCVNSRGIRDIESSTVTSEFGGAFKDPGVKREFLDYIKLDTTF

SEQ ID NO: 4650 - protein, 197 aa, Antarcticibacterium sp.
  misc_feature (1)..(197): tr|A0A5B8YGU3|A0A5B8YGU3_9FLAO GTP cyclohydrolase 1 OS= Antarcticibacterium sp. PAMC 28998 OX=2585771 GN=folE P E=3 SV=1
MYTFFEEYSEEVTGELTGNFENIITTLGEDTGREGIIKTPERAAKAMQFLMQGYHVDPEEVLRQAMFKENYNEMVVVKDIELYSLCEHHMLPFFGKAHIGYIPDGYIVGLSKLPRVVDVFARRMQVQERLTHDILECINRTIKPKGVAIVIEAQHMCMMMRGVQKQNSVTTTSGFRGQFEKIETRNEFMKLISSNLK

SEQ ID NO: 4651 - protein, 225 aa, Antarcticibacterium sp.
  misc_feature (1)..(225): tr|A0A5B8YMF6|A0A5B8YMF6_9FLAO GTP cyclohydrolase 1 OS= Antarcticibacterium sp. PAMC 28998 OX=2585771 GN=folE P E=3 SV=1
MKIDHLENEIEEMGDAHAFSSAENPMREDAFNLSDTDKIALITEDVKHILETLGMDLNDDSLKGTPLRVAKMFVKEIFSGLDPQRKPKASTFENKYKYGEMLVEKNITVYSTCEHHLLPIVGKAHVAYISKGRVIGLSKMNRLVDHYAKRPQVQERMTMQIVQELQQALGTPDVACVIDAKHLCVNSRGIRDIDSSTVTSEFGGAFKDPGIKREFLDYIKLDTAF

SEQ ID NO: 4652 - protein, 366 aa, Antarctobacter heliothermus
  misc_feature (1)..(366): tr|A0A239G391|A0A239G391_9RHOB GTP cyclohydrolase FolE2 OS=Antarctobacter heliothermus OX=74033 GN=folE2 PE=3 SV=1
MNIHTPAIDRKPSKEEAAEALALLRRWASKAHDAEIAALDPIVGRLSPDATPETYPALARVYPEGFTVDDAYKATLPDLQNGPSSLIRGANRAIQHVGISNFRLPIQYHTRDNGDLRLETSVTGTVSLEADKKGINMSRIMRSFYAHADKTFSFEVIEAALDDYKSDLESFDARINMRFSFPMKVDSLRSGLSGYQYYDIALELVERDGVRRKVMHLDYVYSSTCPCSLELSEHARQTRGQLATPHSQRSVARISVELREGDCLWFEDVVDMCRRAVPTETQVMVKREDEQAFAELNAANPIFVEDAARLFAEQLQADERVGDYRVVASHQESLHSHDAVSVLTEGDLFAADSLDPKLFTTLFHVG

SEQ ID NO: 4653 - protein, 366 aa, Antarctobacter heliothermus
  misc_feature (1)..(366): tr|A0A222E9T6|A0A222E9T6_9RHOB GTP cyclohydrolase FolE2 OS=Antarctobacter heliothermus OX=74033 GN=folE2 PE=3 SV=1
MNIHTPAIDRKPSKEEAAEALALLRRWASKAHDAEIAALDPIVGRLTPDATPETYPAFARVYPEGFSVDAAYKDTLPDLQNGPSSLIRGANRAIQHVGISNFRLPIQYRTRDNGDLRLETSVTGTVSLEADKKGINMSRIMRSFYAHAEKTFSFEVIEAALDDYKSDLESFDARINMRFSFPMKVDSLRSGLSGYQYYDIALELVERDGVRRKVMHLDYVYSSTCPCSLELSEHARQTRGQLATPHSQRSVARISVELREGDCLWFEDVVDMCRRAVPTETQVMVKREDEQAFAELNAANPIFVEDAARLFAEQLQADERVGDYRVVASHQESLHSHDAVSVLTEGDLFAADSLDPKLFSTLFHVG

SEQ ID NO: 4654 - protein, 193 aa, Antricoccus suffuscus
  misc_feature (1)..(193): tr|A0A2T1A3Q0|A0A2T1A3Q0_9ACTN GTP cyclohydrolase 1 OS= Antricoccus suffuscus OX=1629062 GN=folE PE=3 SV=1
MDAARPFDRDRAIAAVRELLIAIGEDPDREGLQRTPQRVANAYAEIFAGLHSDPSEVLQTVFDEGHQEMILVRDIELYSTCEHHLVPFHGVAHVGYIPGADGRITGLSKLARLVDLLAKRPQVQERLTGQIADVLVGELKPRGAIVVIECEHLCMAMRGIRKPGARTVTSAVRGIFQHNLSTRAEAMSLIVGR

SEQ ID NO: 4655 - protein, 209 aa, Antricoccus suffuscus
  misc_feature (1)..(209): tr|A0A2T1A269|A0A2T1A269_9ACTN GTP cyclohydrolase 1 OS= Antricoccus suffuscus OX=1629062 GN=folE PE=3 SV=1
MSALQTSSVEPDERRIHAVDPGRAAPTIEHDAARAAVRQLLTALGQDVDSEELRDTPRRVADAYAEMLTPALFNVTTFPNDGEYDELVLVRDIPVQSLCAHHLLPFTGTAHVAYLPGERIVGLSKLARAVEMFARGLQVQERLTTQISGWLEEVLAPKGVGVVIEAEHMCMTMRGVQARGTRTLTSSLRGLIHDDARTRSEFLALTRHT

SEQ ID NO: 4656 - protein, 216 aa, Aphanizomenon flosaquae; identical to SEQ ID NO: 4553
  misc_feature (1)..(216): tr|A0A1B7VWY2|A0A1B7VWY2_APHFL GTP cyclohydrolase 1 OS= Aphanizomenon flos-aquae LD13 OX=1710894 GN=folE PE=3 S V=1

SEQ ID NO: 4657 - protein, 235 aa, Aphanizomenon flosaquae
  misc_feature (1)..(235): tr|A0A1B7WZI9|A0A1B7WZI9_APHFL GTP cyclohydrolase 1 OS= Aphanizomenon flos-aquae WA102 OX=1710896 GN=folE PE=3 SV=1
MTIAGSNVSNNPQSPLITNLAEAINVRPDRNTHDGREPIINPPSEETMNEMMAAVRTMIIGVGEDPEREGLLKTPKRVAKAMKFLTSGYNESLEDLINGAIFDEGHDEMVLVRDINFFSLCEHHMLPFMGRAHVAYIPNQKVVGLSKLARIVEMYSRRLQVQERLTRQIAEALQTVLEPRGVAVVMEASHMCMVMRGVQKPGSWTVTSSMVGIFQEEHKTREEFFNLIRHQASFY

SEQ ID NO: 4658 - protein, 241 aa, Aphanothece hegewaldii
  misc_feature (1)..(241): tr|A0A2T1LY05|A0A2T1LY05_9CHRO GTP cyclohydrolase 1 OS= Aphanothece hegewaldii CCALA 016 OX=2107694 GN=folE PE= 3 SV=1
MTIASNGLNRPNSSPDGTNSDSGNKLSERVTTRPDRNTHNGQVPQIQENPEVSKEHLMDAVHTMLKAVGEDPEREGLLKTPKRVAEAMQFLTQGYHQSLETLVNGAIFDEGHNEMVLVRDIDFFSLCEHHMLPFMGRAHVAYIPNQKVVGLSKLARIVEMFSRRLQVQERLTRQIAEAVQDILDPQGVAVVMEATHMCMVMRGVQKPGSWTVTSAMLGVFQEEQKTREEFLNLIHHRPNFF

SEQ ID NO: 4659 - protein, 242 aa, Aphanothece sacrum
  misc_feature (1)..(242): tr|A0A401IDQ5|A0A401IDQ5_APHSA GTP cyclohydrolase 1 OS= Aphanothece sacrum FPU1 OX=1920663 GN=folE PE=3 SV=1
MTIASSNGINRTNSNPSNGSDLLSPNLAEKVYTRPDRNTHNGNPPQIHPTPDISKEKMMEAVRTMLLGVGEDPDREGLLKTPKRVAEAMQFLTQGYNQSLEELVNDAIFDEGHSEMVLVRDINFFSLCEHHMLPFMGRAHVAYIPNQKVVGLSKLARIVEMYSRRLQVQERLTRQIAEAIQEILEPQGVAVVMEATHMCMVMRGVQKPGSWTVTSAMVGLFQEEQKTREEFLNLIRHQPNFF

SEQ ID NO: 4660 - protein, 221 aa, Apibacter adventoris
  misc_feature (1)..(221): tr|A0A2S8AET0|A0A2S8AET0_9FLAO GTP cyclohydrolase 1 OS= Apibacter adventoris OX=1679466 GN=folE PE=3 SV=1
MFTEDEDIDHLSNAEYTPIRKDAFEMPIEKKQELIQDHFTEIMKILGLDMNDDSLKDTPKRVAKMYVKEIFGGLLPENKPSISTFENTYKYRQMLIEKDITVYSTCEHHFLPIIGRAHVAYISNGTVIGLSKINRIVNYYARRPQVQERLTRQIVKAMSEALNTKDVACVIDAKHLCINSRGIQDTNSSTVTAELSGMFRNNPTTRKEFLHYIGIDSHFKI

SEQ ID NO: 4661 - protein, 226 aa, Apibacter mensalis
  misc_feature (1)..(226): tr|A0A0X3AQ97|A0A0X3AQ97_9FLAO GTP cyclohydrolase 1 OS= Apibacter mensalis OX=1586267 GN=folE PE=3 SV=1
MFFIMFNKEDEESDHFSYTEYTPIRSDAFVLSPEEKQKAIQEHFAKIMHILGLEMNDDSLKDTPKRVAKMYVNEIFGGLLPENKPQVSTFKNSYKYRQMLIEKDITVYSTCEHHFLPIIGKAHVAYFSNGKVIGLSKINRIVNYYSRRPQVQERLTRQIVEAIKEVLNTKDVACVIDAKHLCVNSRGIQDTESSTVTAELSGIFLSNPTTRKEFLHYIGIDSHFKI

SEQ ID NO: 4662 - protein, 222 aa, Apibacter sp.
  misc_feature (1)..(222): tr|A0A2S8ABI8|A0A2S8ABI8_9FLAO GTP cyclohydrolase 1 OS= Apibacter sp. wkB309 OX=1679467 GN=folE PE=3 SV=1
MFNKEDEELDHFTHTEYTPIRSDAFVLSPEEKQKAIQEHFTKIMHILGLDLNDDSLKDTPKRVAKMYVNEIFGGLLPENKPEVSTFKNNYKYRQMLIEKDITVYSTCEHHFLPIIGRAHVAYFSNGKVIGLSKINRIVNYYSRRPQVQERLTRQIVEAIKEVLNTNDVACVIDAKHLCVNSRGIQDTESSTVTAELSGLFLNNPTTRKEFLHYIGIDSHFKI

SEQ ID NO: 4663 - protein, 222 aa, Apibacter sp.
  misc_feature (1)..(222): tr|A0A563DB09|A0A563DB09_9FLAO GTP cyclohydrolase 1 OS= Apibacter sp. AL1 OX=2509005 GN=folE PE=3 SV=1
MFNTDDEEQDHFSPTEYTPLREDAFTISPEKKQELIQLHFTEIMKILGLDMKDDSLQDTPKRVAKMYVNEIFGGLLPENKPAISTFDNNYKYKQMLIEKDITVYSTCEHHFLPIIGKAHVAYISNQKVIGLSKINRIVNYYARRPQVQERLTRQIVEALKEALNTKNVACVIDAKHLCVNSRGIKDTNSSTVTAELSGSFQTNPTTRKEFLHYIGIDSHFKI

SEQ ID NO: 4664 - protein, 218 aa, Aquabacter spiritensis
  misc_feature (1)..(218): tr|A0A4V2UYN3|A0A4V2UYN3_9RHIZ GTP cyclohydrolase 1 OS= Aquabacter spiritensis OX=933073 GN=folE PE=3 SV=1
MDAVVKLLKAQAELEAGADKRALVPDRAGRPSREEAEAAVRTLLAYIGENPQREGLVDTPRRVIKAYDELYSGYGHDAEEILGRTFGEIGTFDDFVLLRDIPFHSHCEHHMVPFVGKAHVAYFPVERVVGLSKIARVVDGYARRLQTQEHLTSQIVTALDEALRPRGVAVLIEAEHMCMAMRGISKAGVTTVTSQFTGAFRDDPAEQVRFITLVRGRP

SEQ ID NO: 4665 - protein, 274 aa, Aquabacterium commune
  misc_feature (1)..(274): tr|A0A4R6R752|A0A4R6R752_9BURK GTP cyclohydrolase FolE2 OS=Aquabacterium commune OX=70586 GN=folE2 PE=3 SV=1
MNAPELLPLIDIQSQIDTRQLPIQAVGVKGVRYPVRLRAGHANHIGQGRSTDTVGHWTMSVGLAATVKGTHMSRFIELLEAPRDALDLPGFAAMAREMLQRLGADSGRISVQFPYFLRKAAPVSGVESLLDIDATWACHIPTQGAEPELSMTLTVAATSLCPCSKEISAYGAHNQRSHITLNVQLRQAMSIEELARVAEDSASCAVYGLLKRVDEKHVTERAYDNPKFVEDLVRDVALALAAEPRVKAYEVEVENFESIHNHSAFATIGGHRDD

SEQ ID NO: 4666 - protein, 267 aa, Aquabacterium sp.
  misc_feature (1)..(267): tr|A0A521YFJ1|A0A521YFJ1_9BURK GTP cyclohydrolase FolE2 OS=Aquabacterium sp. OX=1872578 GN=folE2 PE=3 SV=1
MNDQTLPPLLHTIADTQSERDERHLAIQHVGIRELRYPIRLKLGAEGADYGTVATWSLDVALPAEHKGTHMSRFVSWLDGHQQPLDATAVREGMDDMLERLHATEGRIEARFTFFIRKHAPVSGVSSLLDYQGAWIAERRAGRTTVWAEVLVPVKSLCPCSKEISDYGAHNQRSHVTIRAELLADIGWHELVRIAEESASSEIWGLLKRPDEKWITERAYENPKFVEDLVRDVALRLNGETRIGRYRTTVENFESIHNHSAFAVIER

SEQ ID NO: 4667 - protein, 267 aa, Aquabacterium sp.
  misc_feature (1)..(267): tr|A0A522C753|A0A522C753_9BURK GTP cyclohydrolase FolE2 OS=Aquabacterium sp. OX=1872578 GN=folE2 PE=3 SV=1
MNDQTLPPLLHTIADTQSERDERHLAIQHVGIRELRYPIRLKLGAEGADYGTVATWSLDVALPAEHKGTHMSRFVSWLDGHQQPLDATAVREGMDDMLERLHATEGRIEARFTFFIRKHAPVSGVSSLLDYQGAWIAERRAGRTTVWAEVLVPVKSLCPCSKEISDYGAHNQRSHVTIRAELLADIGWHELVRIAEDSASSEIWGLLKRPDEKWITERAYENPKFVEDLVRDVALRLNGETRIGRYRTTVENFESIHNHSAFAVIER

SEQ ID NO: 4668 - protein, 215 aa, Aquamicrobium aerolatum
  misc_feature (1)..(215): tr|A0A1I3L588|A0A1I3L588_9RHIZ GTP cyclohydrolase 1 OS= Aquamicrobium aerolatum DSM 21857 OX=1121003 GN=folE PE =3 SV=1
MDACVKNIPLQTSPAQDLSSLQTNQRPSAAEVEAAVGVLLRWTGDNPEREGLIDTPKRVAKAYREMFSGYEQDPAEELGRTFEEVEGYDDMVLIRDISFHSHCEHHMVPIIGKAHVAYLPDGKVVGLSKIARTVDIFAHRLQTQEAMTAQIAHVIQDVLQPRGVAVLIEAEHMCMAMRGIRKQGSTTLTTTFTGAFRDHPEEQARFMMMLRGLSR

SEQ ID NO: 4669 - protein, 212 aa, Aquamicrobium defluvii
  misc_feature (1)..(212): tr|A0A011U742|A0A011U742_9RHIZ GTP cyclohydrolase 1 OS= Aquamicrobium defluvii OX=69279 GN=folE PE=3 SV=1
MDAVIKQKMPASSYLDKPVTDRPGQHEVEAAVRTLLRWTGDNPDREGLIDTPKRVAKAFREMFNGYDMCPAEELGRTFEEVAGYDDLVVVRDIQFHSHCEHHMVPIIGKAHVGYLPDGKVVGLSKIARVVDIFAHRLQTQESMTAQIANVIQDVLNPRGVAVMIEAEHMCMAMRGIRKQGSTTLTSTFTGTFSDNAEEQIRFMTMVRGGLVR

SEQ ID NO: 4670 - protein, 211 aa, Aquamicrobium sp.
  misc_feature (1)..(211): tr|A0A4U6C0P6|A0A4U6C0P6_9RHIZ GTP cyclohydrolase 1 OS= Aquamicrobium sp. LC103 OX=1120658 GN=folE PE=3 SV=1
MDAILKNFPPRADDQGKDAQRPTKEEVEAAVRTLIRWTGDNPDREGLLETPKRVAKAYREMFAGYDLDPAQELGRTFEEVAGYDDLVLVKDINFHSHCEHHMVPIVGKAHVAYLPDGKVVGLSKIARVVDIFAHRLQTQEAMTAQIAGVIQEVLNPRGVAVMIEAEHMCMAMRGIRKQGSTTLTTTFTGAFKDQPEEQARFMMMLRTGLKD

SEQ ID NO: 4671 - protein, 266 aa, Aquaspirillum sp.
  misc_feature (1)..(266): tr|A0A1U9JLN6|A0A1U9JLN6_9NEIS GTP cyclohydrolase FolE2 OS=Aquaspirillum sp. LM1 OX=1938604 GN=folE2 PE=3 SV=1
MTDSILIPDVQSSADLRNIAINKVGIKSIRHPVQVADRSGGVQHSIGLFDMYVYLPHQFKGTHMSRFVEILNSHEREISARSFEQIARQMVERLDAESGYLEMRFPYFVNKTAPVSGVKSLLDYDVTFIGELKNGQYYFTLKVLVPVTSLCPCSKKISERGAHNQRSHITLTVRTQAHMWIEELIDIAERQASCELYGLLKRPDEKYVTERAYDNPKFVEDLVRDVAAALTADPRIDGYVVESENFESIHNHSAYALIEFDRASQH

SEQ ID NO: 4672 - protein, 310 aa, Aquibacillus sp.
  misc_feature (1)..(310): tr|A0A516KFX8|A0A516KFX8_9BACI GTP cyclohydrolase FolE2 OS=Aquibacillus sp. TKL69 OX=2594883 GN=folE2 PE=3 SV= 1
MNAPNNRKKVLPNKFERHKLFGSVDPGPKTKPIEKDKMADLQNSRKDFLFEIDAVGISNVKHPIQITSQLQPQSQTTIGTFTFTSKINQDSKGTNMSRFTEQLTEYHSTKNFIVSIASMKQFTQDLAVRLKQEDAYMEVTFPWFFERKGPSSELAGLNHADATIKVSYDKKFGFDVEVGLSGTITTLCPCSKEISEYSAHNQRGIVSMTVSLTDDFDETAHDWKEVLLEAAESNASARIHPVLKRPDEKMVTEQAYENPRFVEDMVRLVAADLYEQPFIEKFSVACRNEESIHLHDAIASITYDKSKEMK

SEQ ID NO: 4673 - protein, 180 aa, Aquicella lusitana
  misc_feature (1)..(180): tr|A0A370GF21|A0A370GF21_9COXI GTP cyclohydrolase 1 OS= Aquicella lusitana OX=254246 GN=folE PE=3 SV=1
MQTYFKKIIEALGENPEREGLKNTPKRAAKAMEFLTQGYHQSIDQILNGALFETDNDEMILVKNIELYSLCEHHLLPFIGKCHVAYVPNGKIIGLSKIARIVDMHARRLQVQENLTREIAQTIFDVVGAKGVGVIIEAQHLCMMMRGVEKQNSVMSTSVMLGLLREDSRSRAEFLSLVKH

SEQ ID NO: 4674 - protein, 180 aa, Aquicella siphonis
  misc_feature (1)..(180): tr|A0A5E4PKN1|A0A5E4PKN1_9COXI GTP cyclohydrolase 1 OS= Aquicella siphonis OX=254247 GN=folE PE=3 SV=1
MKDHFKKIIEAIGENPDREGLRDTPKRAAKAMEFLTQGYHQSIDQIINGALFQSDNEEMVLVKNIELYSLCEHHMLPFIGKCHVAYLPNGKILGLSKVARIIDMHSRRLQVQENLTREIAQTMCDVTQAKGVGVIIEAQHLCMMMRGVEKQNSIMSTSVMLGAFRDDMRTRAEFLSLVKN

SEQ ID NO: 4675 - protein, 364 aa, Aquicoccus porphyridii
  misc_feature (1)..(364): tr|A0A5A9Z4J3|A0A5A9Z4J3_9RHOB GTP cyclohydrolase FolE2 OS=Aquicoccus porphyridii OX=1852029 GN=folE2 PE=3 SV= 1
MNKITPDIDKAPSREEAETALARLRQWAEQASPEERADLDPALARLIPGADYPEFSRDYPEGFTVTPAYKATLPDLQNGPASLIRGAKRVIQHVGISNFRLPIQYHTRDNGDLTLETSVTGSVSLEAEKKGINMSRIMRSFYAHADKTFSFEVIEAALDDYKSDLESFDARIQMRLSFPMKVQSLRSGLAGYQYYDIALELVEQGGARRKIIHLDYVYSSTCPCSLELSEHARSARGQLATPHSQRSVARLSVEVRDTAKCLWFEDLIDLARAAVPTETQVMVKREDEQAFAELNAANPIFVEDAARLFAQQLEDDPRIGDFRIVASHQESLHSHDAVSILTEGELFETASLDPRLFTTLFHVG

SEQ ID NO: 4676 - protein, 366 aa, Aquicoccus sp.
  misc_feature (1)..(366): tr|A0A4V6ENM6|A0A4V6ENM6_9RHOB GTP cyclohydrolase FolE2 OS=Aquicoccus sp. SCR17 OX=2541728 GN=folE2 PE=3 SV=1
MNIHTRDTDSIPSREEAETALATLRRWAQTASAEEMSTLGPVAEALDLPTGPNAYPVLSREYPEDFTVTPEYKETLPDLQNGPAALIRGAQRPIQHVGISNFRLPIRFHTRDNGDLALETSVTGTVSLEAEKKGINMSRIMRSFYEYAEKTFSFEVIEAALDAYKADLESIDARIQMRFSFPVKVESLRSGLAGYQYYDIALELVEAEGVRRKIMHLDYVYASTCPCSLELSEHARQFRGQLATPHSQRSVARLSVEVKEGDCLWFEDLIDHCRRAVPTETQVMVKREDEQAFAELNAANPIFVEDAARLFSEALMGDPRIGDFRVVASHQESLHSHDAVSVLTEGSTFAAQSLDPRLFDTLYHTG

SEQ ID NO: 4677 - protein, 184 aa, Aquifex aeolicus
  misc_feature (1)..(184): sp|O66603|GCH1_AQUAE GTP cyclohydrolase 1 OS=Aquifex ae olicus (strain VF5) OX=224324 GN=folE PE=3 SV=1
MAIDKEKIKQAVRLFLEGIGEDPDREGLKETPERVARMWEEFERMRNFDMKLFEEFGGYNEMVLVKDIKFYSLCEHHLLPFFGKVHIAYIPDKKISGLSKLVRTVRAFALRPQVQERLTEEIADFLEKELEPKGVGVVIEAEHLCMSMRGVMSPGHLTVTSALRGVFLKDIKTREEFLKLVKGV

SEQ ID NO: 4678 - protein, 184 aa, Aquifex sp.
  misc_feature (1)..(184): tr|A0A432Q0B3|A0A432Q0B3_9AQUI GTP cyclohydrolase 1 OS= Aquifex sp. OX=313370 GN=folE PE=3 SV=1
MAIDKEKIKQAIRLLLEGIGEDPDREGLKETPERVARMWEEFERMRSFDMKLFEEFGGYNEMVLVKDIRFYSLCEHHLLPFFGKVHIAYIPDKKISGLSKLVRAVRAFALRPQVQERLTEEIADFLERELEPKGVGVVIEAEHLCMSMRGVMSPGHLTVTSALRGVFLKDIRTREEFLKLIKGS

SEQ ID NO: 4679 - protein, 184 aa, Aquifex sp.
  misc_feature (1)..(184): tr|A0A432PVK7|A0A432PVK7_9AQUI GTP cyclohydrolase 1 OS= Aquifex sp. OX=313370 GN=folE PE=3 SV=1
MAIDKEKIKQAIRLFLEGIGEDPDREGLRETPERVARMWEEFERMRTFDMKLFEEFGGYNEMVLVKDIRFYSLCEHHLLPFFGKVHIAYIPNKKISGLSKLVRTVRAFALRPQVQERLTEEIADFLERELEPKGVGVVIEAEHLCMSMRGVMSPEHLTVTSALRGVFLKDIRTREEFLKLVKGK

SEQ ID NO: 4680 - protein, 324 aa, Aquificaceae bacterium
  misc_feature (1)..(324): tr|A0A432F8P5|A0A432F8P5_9AQUI GTP cyclohydrolase FolE2 OS=Aquificaceae bacterium OX=2053503 GN=folE2 PE=3 SV= 1
MSANEDCLNKQCDLPDIANEPHSGPNARLNWVGMSEIEMPVFLLNGKQERIQSVARVQAYVNLTDPESKGIHMSRLYLSVDEMLSEDTLTPALLRQVVESFAASHIGISDSAYLECRVDFFERRKSLKSDNTGWKTYKVRPIVSLRKGVINTELCVEVPYSSTCPCSAALARDLIQQGFQSQFGEQEAVDFDAVHQWLGTTAGISATPHSQRSMAQVRVKLNDSVNDLPISRLIDQIENALQTPVQAAVKREDEQEFARLNASNLMFCEDAARRLYMALDQDNTLDDFWIRVNHMESLHPHNAVSVVVKGIEEGYRDDPREFPH

SEQ ID NO: 4681 - protein, 186 aa, Aquificaceae bacterium
  misc_feature (1)..(186): tr|A0A350D1K7|A0A350D1K7_9AQUI GTP cyclohydrolase 1 OS= Aquificaceae bacterium OX=2053503 GN=folE PE=3 SV=1
MPIDKEKIKQAIRLFLEGIGEDPNREGLLETPDRVARMWEEFERQRDFDFKLFEEFGSYNEMVLVKDVNIYSLCEHHLLPFFGKAHIAYIPDGIVCGLSKLVRTVRAFALRPQVQERLTNQIADFLMEQLKPKGVAVVLEMEHLCMSMRGVMSPGHLTVTSALRGLFLSDLRTREEFLKLIGRKTL

SEQ ID NO: 4682 - protein, 140 aa, Aquificae bacterium
  misc_feature (1)..(140): tr|A0A3M1BK62|A0A3M1BK62_9BACT GTP cyclohydrolase 1 OS= Aquificae bacterium OX=2202151 GN=D6804_06555 PE=3 SV=1
MPIDRDKIKQAIRLFLEGIGEDPDREGLKETPDRIARMWEEFEGQRSFDFKLFEEFGSYNEMVLVKDITIYSLCEHHLLPFFGKAHIAYIPDGILDATRVAFHKAEPIAAFLSLSRLQRPVWARSYVGTWGAEPALLLLR

SEQ ID NO: 4683 - protein, 185 aa, Aquificae bacterium
  misc_feature (1)..(185): tr|A0A3M2B0Y3|A0A3M2B0Y3_9BACT GTP cyclohydrolase 1 OS= Aquificae bacterium OX=2202151 GN=folE PE=3 SV=1
MAIDKEKIKQAIRLFLEGIGEDPDREGLKETPERVARMWEEFERQRTFDFKLFEEFGSYNEMVVVKDISVYSLCEHHLLPFFGKAHIAYIPNGIICGLSKLVRTVRAFALRPQVQERLTNQIADFLMEQLKPKGVAVVLEMEHLCMSMRGVMSPGHITTTSALRGLFLSDLRTREEFLKLIGKRL

SEQ ID NO: 4684 - protein, 231 aa, Aquiflexum balticum
  misc_feature (1)..(231): tr|A0A1W2H2W5|A0A1W2H2W5_9BACT GTP cyclohydrolase 1 OS= Aquiflexum balticum DSM 16537 OX=758820 GN=folE PE=3 SV =1
MKQKEILLNTMGINGSRPTDEIGDEHIGTSLETPLREDAFEMDDELKIELIEKHFKEIMHILGLDLSDDSLKGTPHRVAKMYIKEIFSGLNPKNKPVAKLFENKYKYNEMLVEKDITFFSNCEHHFVPIYGKAHVAYISNGSVIGLSKINRIVQYYAKRPQVQERLTMQIGNELKEALGTDDVAVVIDAHHMCVSTRGVQDVNSSTVTSFYSGKFDRDDNTKSEFMKYISL

SEQ ID NO: 4685 - protein, 225 aa, Aquimarina aggregata
  misc_feature (1)..(225): tr|A0A163AHP3|A0A163AHP3_9FLAO GTP cyclohydrolase 1 OS= Aquimarina aggregata OX=1642818 GN=folE PE=3 SV=1
MKIDKALEAIEALGDNHVATSATTPLREDAFKLSDKEKIALIKDDVKHILETLGLDLTDDSLKGTPQRVAKMFVNEIFSGLHPQRKPDASTFENNYKYGEMLVEKNITVYSTCEHHLLPIVGRAHVAYISNGTVVGLSKMNRIVDYYAKRPQVQERMTMQIVQDLQVVLGTKDVACVIDAKHLCVNSRGIRDIESSTVTSEFGGKFKEDAVRREFLDYIKLDTTF

SEQ ID NO: 4686 - protein, 222 aa, Aquimarina aggregata
  misc_feature (1)..(222): tr|A0A162DK24|A0A162DK24_9FLAO GTP cyclohydrolase 1 OS= Aquimarina aggregata OX=1642818 GN=folE PE=3 SV=1
MNREKIEYEGDAHISSSVDTPLVKNAFETSDNDKIKNIQHHFSEIMKELGLDLTDDSLRGTPYRVAKMYVKELFYGLNPHNRPKISTFENKYGYQKMLVEQNINIDSACEHHFLPIVGTAHVGYIPKDKVVGLSKINRLVDYYSHRPQVQERLCLQILKDLQQTLETKDVIVVINAKHLCVSSRGIKDKSSFTTTLEYGGQFKEVSLRNEFLEIIKNDNNTF

SEQ ID NO: 4687 - protein, 198 aa, Aquimarina algiphila
  misc_feature (1)..(198): tr|A0A554VBV1|A0A554VBV1_9FLAO GTP cyclohydrolase 1 OS= Aquimarina algiphila OX=2047982 GN=folE PE=3 SV=1
MPYKNFEEYNIKVTEEVKQKFESIIEDLGEDVNREGIVKTPERAAKAMQFLTQGYHQDPAEILKGAMFKEGYDDMVIVKDIELYSLCEHHMLPFFGKAHIAYIPDGQIVGLSKLPRIVDVFARRLQVQERLTHDILECINDTLKPKGVAVVIEASHMCMMMRGVQKQNSVTTTSGFRGQFEKIETRTEFLRLITADLG

SEQ ID NO: 4688 - protein, 225 aa, Aquimarina algiphila
  misc_feature (1)..(225): tr|A0A554VBI2|A0A554VBI2_9FLAO GTP cyclohydrolase 1 OS= Aquimarina algiphila OX=2047982 GN=folE PE=3 SV=1
MKIDKALEAIEALGDNHVATSATNPLREDAFKLSDNEKIALIKEDVKHILETLGLDLTDDSLKGTPQRVAKMFVNEIFSGLHPQRKPDASTFKNHYKYGEMLVEKNITVYSTCEHHLLPIVGRAHVAYISNGTVVGLSKMNRIVDYYAKRPQVQERMTMQIVQDLQVVLGTKDVACVIDAKHLCVNSRGIRDIESSTVTSEFGGKFKEDSVRREFLDYIKLDTTF

SEQ ID NO: 4689 - protein, 225 aa, Aquimarina amphilecti
  misc_feature (1)..(225): tr|A0A1H7U9Z9|A0A1H7U9Z9_9FLAO GTP cyclohydrolase 1 OS= Aquimarina amphilecti OX=1038014 GN=folE PE=3 SV=1
MKIDKALEAIEALGDNHVATSATTPLREDAFKLSDQEKIASIREDVKHIMETLGLDLSDDSLKGTPQRVAKMFVNEIFSGLHPERKPDASTFDNNYKYGEMLVEKNITVYSTCEHHLLPIVGRAHVAYISNGTVVGLSKMNRIVDYYAKRPQVQERLTMQIVQDLQVVLNTKDVACVIDAKHLCVNSRGIRDIESSTVTSEFGGKFKEDAVRREFLDYIKLDTTF

SEQ ID NO: 4690 - protein, 232 aa, Aquimarina amphilecti
  misc_feature (1)..(232): tr|A0A1H7FFD1|A0A1H7FFD1_9FLAO GTP cyclohydrolase 1 OS= Aquimarina amphilecti OX=1038014 GN=folE PE=3 SV=1
MKVGIETLMNSNGYNLNGFSIEEIGDDHISTGMETPMRRDAFDISNDEKKKKISHLFKEIMEVMGLDLTDDSLKGTPDRVAKMYIEEIFSGLDPKNKPKVALFDNKYKYEQMLVEKNITFYSNCEHHFVPIIGKAHIAYVSSGKVIGLSKLNRIVQYFAKRPQVQERLTNQIAMELKQILQTEDIAVIIDAKHLCVSSRGIKDDTSATVTSYYGGVFRTSDKITELQNYLNN

SEQ ID NO: 4691 - protein, 220 aa, Aquimarina atlantica
  misc_feature (1)..(220): tr|A0A023BTQ8|A0A023BTQ8_9FLAO GTP cyclohydrolase 1 OS= Aquimarina atlantica OX=1317122 GN=folE PE=3 SV=1
MNRKKIELIGDAHISNTVETPLREDAFEKSDNEKIKTIQHHFSEIMKELGLDLTDDSLSGTPYRVAKMYVKELFYGLDPKNRPKISTFDNKYGYQKMLVEHNITIDSACEHHFLPIVGTAHVGYIPKNKVVGLSKINRLVDYYSHRPQVQERLCLQILKDLQQTLDTKDVIVVVNAKHLCVSSRGIKDKSSFTTTIEYGGQFIEPSLRNEFFGMIKKNNE

SEQ ID NO: 4692 - protein, 225 aa, Aquimarina atlantica
  misc_feature (1)..(225): tr|A0A023BRY4|A0A023BRY4_9FLAO GTP cyclohydrolase 1 OS= Aquimarina atlantica OX=1317122 GN=folE PE=3 SV=1
MKIDKALEAIEALGDNHVATSATTPLREDAFKLSDAEKIALIKEDVKHIMETLGLDLTDDSLKGTPQRVAKMFVNEIFSGLHPQRKPDASTFDNHYKYGEMLVEKNITVYSTCEHHLLPIVGRAHVAYISNGTVVGLSKMNRIVDYYAKRPQVQERLTMQIVQDLQVVLGTKDVACVIDAKHLCVNSRGIRDIESSTVTSEFGGKFKEQSVKREFLDYIKLDTTF

SEQ ID NO: 4693 - protein, 198 aa, Aquimarina brevivitae
  misc_feature (1)..(198): tr|A0A4Q7P1D6|A0A4Q7P1D6_9FLAO GTP cyclohydrolase 1 OS= Aquimarina brevivitae OX=323412 GN=folE PE=3 SV=1
MPYKNFEEYNIKVTDEVKEKFSDIITELGEDVTREGIAKTPERAAKAMLFLTQGYQQNAEEILKSAMFKEDYDDMVIVKDIELYSLCEHHMLPFFGKAHIAYIPDGYIVGLSKIPRIVDVFARRMQVQERLTHDILECINKTLKPKGVAVVIEAAHMCMMMRGVQKQNSVTTTSGFRGQFEKNETRSEFLRLITADLA

SEQ ID NO: 4694 - protein, 233 aa, Aquimarina brevivitae
  misc_feature (1)..(233): tr|A0A4Q7PHR2|A0A4Q7PHR2_9FLAO GTP cyclohydrolase 1 OS= Aquimarina brevivitae OX=323412 GN=folE PE=3 SV=1
MIEEKILPQKKINGNHLENFTINEIGDDHLYTSLETPMRSDAFKLTNDEKKERIASLFGEIMDVLGLDRSDDSLQGTPDRVAKMYVEEIFSGLDPANKPKIALFDNKYQYNQMLVEKNITFYSNCEHHFVPIIGKAHVAYISSGKVIGLSKLNRMVQYYAKRPQVQERLTNQIAKALEEILETKDIAVIIDAKHLCVASRGVKDDTSSTVTTYYGGAFNTPEKITELQNYIKE

SEQ ID NO: 4695 - protein, 198 aa, Aquimarina sp.
  misc_feature (1)..(198): tr|A0A3A9V8D5|A0A3A9V8D5_9FLAO GTP cyclohydrolase 1 OS= Aquimarina sp. AD10 OX=1714849 GN=folE PE=3 SV=1
MPYRNFEEYNIKVTDDVKDKFESIIENLGEDTTREGIVKTPERAAKAMQFLTQGYHQDPAEILRSAMFKEGYDDMVIVKDIELYSLCEHHMLPFFGKAHIAYIPDGHIVGLSKLPRVVDVFARRLQVQERLTHDILECINNTLKPKGVAVVIEASHMCMMMRGVQKQNSVTTTSGFRGQFEKIETRTEFLRLITSDLT

SEQ ID NO: 4696 - protein, 225 aa, Aquimarina sp.
  misc_feature (1)..(225): tr|A0A3A9W394|A0A3A9W394_9FLAO GTP cyclohydrolase 1 OS= Aquimarina sp. BL5 OX=1714860 GN=folE PE=3 SV=1
MKIDKALEAIEALGDNHVATSATTPLREDAFKLSDKEKIALIKDDVRHIMETLGLDLSDDSLKGTPQRVAKMFVNEIFSGLHPERKPDASTFDNHYKYGEMLVEKNITVYSTCEHHLLPIVGRAHVAYISNGTVVGLSKMNRIVDYYAKRPQVQERLTMQIVQDLQVVLNTKDVACVIDAKHLCVNSRGIRDIESSTVTSEFGGKFKDEAVRREFLDYIKLDTTF

SEQ ID NO: 4697 - protein, 198 aa, Aquimarina spongiae
  misc_feature (1)..(198): tr|A0A1M6BET4|A0A1M6BET4_9FLAO GTP cyclohydrolase 1 OS= Aquimarina spongiae OX=570521 GN=folE PE=3 SV=1
MPYKNFEEYNIEVTEEVKGKFKSIIEDIGEDTERDGILKTPERAAKAMLFLTQGYHQNPEEILKGAMFKEDYDDMVIVKDIELYSLCEHHMLPFFGKAHIAYIPNGHIVGLSKLPRIVDVFARRLQVQERLTHDILECINDTLKPKGVAVVIEASHMCMMMRGVQKQNSVTTTSGFRGQFEKIETRTEFLRLITSDLT

SEQ ID NO: 4698 - protein, 213 aa, Aquimarina spongiae
  misc_feature (1)..(213): tr|A0A1M6KZ64|A0A1M6KZ64_9FLAO GTP cyclohydrolase 1 OS= Aquimarina spongiae OX=570521 GN=folE PE=3 SV=1
MMGDSHISGATETPLRADAFEKSDDAKIERIQHHFSEIMKELGLDLTDDSLSGTPYRVAKMYVKELFYGLNPKNRPKVSTFDNKYEYQKILVEQNITIDSACEHHFLPIVGNAHVGYIPKDKVVGLSKLNRLVDYYAHRPQVQERLCLQILRDLQKTLGTEDVIVVVNAKHLCVSSRGIKDKSSFTTTVEFGGQFADPMIRKEFFDMVSFQLD

SEQ ID NO: 4699 - protein, 384 aa, Aquimixticola soesokkakensis
  misc_feature (1)..(384): tr|A0A1Y5S4P3|A0A1Y5S4P3_9RHOB GTP cyclohydrolase FolE2 OS=Aquimixticola soesokkakensis OX=1519096 GN=folE2 PE =3 SV=1
MTGKRLHPSQPPLGKDPMNLHKADLTAATPDRAEAADALAVLRAWALKATPTEVAELDPSIARLLPQEGLSNYPALRRAYPEDFAVDEAYRATLPDLQNGPESLIKGAHRQIQHVGISNFRLPIRYRTRAGGDLVLETSVTGTVSLEAEKKGINMSRIMRSFYKHAENRFSLETIEAALDDYKSDLDSFDARIMMRLSFPAKVQSLRSNLAGYQYYNIALELVEQAGVRKKILHLDYVYSSTCPCSLELSEHARQTRGQLATPHSQRSVARISVEVPKGPILWFEDLIDLCRAAVPTETQVMVKREDEQAFAELNAANPIFVEDAARLFAQALEAEQRVRDFRVVASHQESLHSHDAVSVLTEGATFASQSLDPKLFATLFHIG

SEQ ID NO: 4700 - protein, 336 aa, Aquimonas voraii
  misc_feature (1)..(336): tr|A0A1G6RRW9|A0A1G6RRW9_9GAMM GTP cyclohydrolase FolE2 OS=Aquimonas voraii OX=265719 GN=folE2 PE=3 SV=1
MTDYEETPVSPPIADNTVRAMPDIASEAKPAVAGVLDWVGMGQIEVPVSVANAEGQTVTSGARVTAFVNLKRPDVRGIHMSRLYLHVDKTLSNEALSPTSLRRLLKDFLESHADLSDRAFVRVEFEHLVRRRALKSDNSGWKSYPCVITGLMEHGQFQVELSVQIPYSSTCPCSAALARQLIQEQFQTDFPAGAGIDRESVLAWLGTERGIRATPHSQRSTAEVRVRLLPSFANFPIIDVIDRIEDALKTPVQSAVKREDEQAFALLNGENLMFCEDAARRMQAALNADERIADFWVRASHYESLHPHNAVAVAVKGVPGGYASGLDWIARLSDHH

SEQ ID NO: 4701 - protein, 307 aa, Aquisalibacillus elongatus
  misc_feature (1)..(307): tr|A0A3N5C8L2|A0A3N5C8L2_9BACI GTP cyclohydrolase FolE2 OS=Aquisalibacillus elongatus OX=485577 GN=folE2 PE=3 SV=1
MNETQSKKSLPSKNERHKLFGSVEPGPRTKPQEKSKMPDLQNTKKDFLFELDAVGISNVKHPIVVPSSIKPQNQTTIGHFYFASSISQESKGTNMSRFTQQLQAYYKKGFKVNIPTMKEFTKELQERLKQKDAELTVEFPWFFEREAPYTTEAGMNHADAWMKVMYHCEDGYDVKVGLNAKITTLCPCSKEISEYSAHNQRGNVMIEVTLDPSFNDEEIDWKALLIEAAESNASARIHPVLKRPDEKMVTEQAYENPRFVEDMVRLVSSDLYEMDMVQKFHVKCINEESIHLHDAIASITYDKRKEQ

SEQ ID NO: 4702 - protein, 185 aa, Aquisalimonas asiatica
  misc_feature (1)..(185): tr|A0A1H8U206|A0A1H8U206_9GAMM GTP cyclohydrolase 1 OS= Aquisalimonas asiatica OX=406100 GN=folE PE=3 SV=1
MSIDDMTASFEQIIRSVGEDVTRDGLEKTPERAAQAFAFLTEGYNQNLQELVNGAIFPSDNDEMVIVRDVEFYSLCEHHLLPFIGRANVAYIPNGKVIGLSKIARIIDMYARRFQIQENMTKEIADAVMSVTDAKGVAVHITANHLCMMMRGVGKQNSSMSTSVMLGTFRDSQPTRNEFLQLIRG

SEQ ID NO: 4703 - protein, 208 aa, Aquisphaera giovannonii
  misc_feature (1)..(208): tr|A0A5B9W4Z5|A0A5B9W4Z5_9BACT GTP cyclohydrolase 1 OS= Aquisphaera giovannonii OX=406548 GN=folE PE=3 SV=1
MEQTAAGDSGTGRGEPREAGRVDLERIRRAIREILLAVGEDPDREGLQETPDRVARMYAEVFQGLHQDPRVHLKKLFTQKYDEMVLVRDIRLVSFCEHHLLPVIGRAHVAYLPNGRVVGLSKIPRVIDVLAKRPQLQERLTEEVAELLMKELDAKGVAVVIEASHSCMTIRGVNKPDSSFVTSAVRGAFKERSATRAEVMSLIFGSKV

SEQ ID NO: 4704 - protein, 235 aa, Aquitalea magnusonii
  misc_feature (1)..(235): tr|A0A3G9GEJ4|A0A3G9GEJ4_9NEIS GTP cyclohydrolase I typ e 1 OS=Aquitalea magnusonii OX=332411 GN=DLM_2270 PE=4 SV=1
MSKTDNNATPTESVSSRIRYRLQNAGVRFHANDNIADFIEGDELDLLQQEVAAKMQGVLESLVIDTVNDHNTQDTARRVAKMFVREVFRGRYVASPPNTEFPNIEQLNELMIVGPITVRSACSHHLCPIMGRVWVGVMPNEHSNLIGLSKYARLIDWVMTRPQIQEEAVMQIADLLMDKLQPDGLAIVMEADHFCMHWRGVKDSNSKMTNSVMRGSFLRDANLRREFLSLLHKGN

SEQ ID NO: 4705 - protein, 198 aa, Arachidicoccus ginsenosidivorans
  misc_feature (1)..(198): tr|A0A5B8VLG9|A0A5B8VLG9_9BACT GTP cyclohydrolase 1 OS= Arachidicoccus ginsenosidivorans OX=496057 GN=folE PE=3 SV=1
MAYTKQESYDQDVTDALASHYKSALSLLGEDPEREGLLKTPDRLAKAMQYLTQGYQMDAVEILNSAKFHEPISEMVIVKDIELYSLCEHHLLPFIGKAHVAYIPNGWITGLSKVARVVDVFSHRLQVQERLTVQILEAIKEALNPLGVAVVIEAKHLCMMMRGVAKQNSYTTTSSFDGEFENDRTRSEFMKLISANLH

SEQ ID NO: 4706 - protein, 198 aa, Arachidicoccus rhizosphaerae
  misc_feature (1)..(198): tr|A0A1H3VKS2|A0A1H3VKS2_9BACT GTP cyclohydrolase 1 OS= Arachidicoccus rhizosphaerae OX=551991 GN=folE PE=3 SV= 1
MAYIKQESYDQEITDELAGHYRSALSLLGENPDREGLLKTPDRLAKAMQYLTQGYQMDAVEILNSAKFHEPISEMVIVKDIELYSLCEHHLLPFIGKAHVAYIPNGWITGLSKVARVVDVFSHRLQVQERLTVQILEAIKEALNPLGVAVVIEAKHLCMMMRGVAKQNSYTTTSSFDGEFENDRTRSEFMKLISANLH

SEQ ID NO: 4707 - protein, 198 aa, Arachidicoccus sp.
  misc_feature (1)..(198): tr|A0A386HUD9|A0A386HUD9_9BACT GTP cyclohydrolase 1 OS= Arachidicoccus sp. KIS59-12 OX=2341117 GN=folE PE=3 SV= 1
MAYKKTEHYDEDITNQLAGLYSNALELLGENSAREGLVKTPERIAKAMQYLTQGYQLDAVKILNSAKFHEPISEMVIVKDIEIYSLCEHHLLPFIGKAHIAYIPNGWITGLSKIARVVDVFARRLQVQERLTVEILESIKEALNPMGVAVVIEAKHLCMMMRGVSKQNSFTTTSAFSGEFENDRTRSEFMKLISADLH

SEQ ID NO: 4708 - protein, 198 aa, Arachidicoccus sp.
  misc_feature (1)..(198): tr|A0A191TMS9|A0A191TMS9_9BACT GTP cyclohydrolase 1 OS= Arachidicoccus sp. BS20 OX=1850526 GN=folE PE=3 SV=1
MAYRKTEHYDETVTNGLMNHYKEILNLLGENSEREGLLKTPERIAKAMQFMTQGYEQNAVEILNSAKFHEPISEMVIVKDIELYSLCEHHLLPFIGKAHVAYIPNGWITGLSKIARVVDIFSRRLQVQERLTVEILDAIKEALQPLGVAVVIEAKHLCMMMRGVSKQNSSTTTSAFFGEFENDRTRSEFMKLISAELH

SEQ ID NO: 4709 - protein, 225 aa, Arboricoccus pini
  misc_feature (1)..(225): tr|A0A212RBN3|A0A212RBN3_9PROT GTP cyclohydrolase 1 OS= Arboricoccus pini OX=1963835 GN=folE PE=3 SV=1
MSSDRSLVELLARPQGAHITKTPPRLDPRAKPSAQEAQDAVRTLLRWIGEDPSREGLQDTPTRVTKAFLEHFAGYTQEPHEILARTFSEVEGYDDVVVLKDISFESHCEHHMAPIIGRAHVAYMPNSRVVGISKLARLVEVFAKRLQIQERMTAQIADTIQEVLQPRGVAVMIEATHHCMTTRGIHKPGSLMVTSRVSGIFKTNPDTRREFLSIIGKSGAESLAR

SEQ ID NO: 4710 - protein, 197 aa, Arcanobacterium haemolyticum
  misc_feature (1)..(197): tr|D7BM61|D7BM61_ARCHD GTP cyclohydrolase 1 OS=Arcanoba cterium haemolyticum (strain ATCC 9345 / DSM 20595 / NB RC 15585 / NCTC 8452 / 11018) OX=644284 GN=folE PE=3 SV =1
MSDLPKLHIGHYDEEAVVDAIKRLLIAVGEDPNRDGLLDTPDRMGRAYKEMFAGLGEDPADVLNTTFDIRHEELVLVRDISMYSMCEHHLLPFHGVAHIGYIPGPDGLVTGLSKLARLVEGFARRPQVQERLTSQIVDAIMERLNAQGAIVVVEAEHLCMSMRGVKKPGSHTVTSAVRGKLRETATRAEAMSLIMSK

SEQ ID NO: 4711 - protein, 196 aa, Arcanobacterium phocae
  misc_feature (1)..(196): tr|A0A1H2L9V2|A0A1H2L9V2_9ACTO GTP cyclohydrolase 1 OS= Arcanobacterium phocae OX=131112 GN=folE PE=3 SV=1
MSEPAVHVGHYDEDAVVSAVRQLLIAVGEDPDRDGLQDTPARMGRAYKEIFAGLEKDPADVLNTTFDIHHEELVLVRDISMYSMCEHHLLPFHGVAHVGYIPSADGLVTGLSKLARLVDGFARRPQIQERLTSQIADAMMERLHAQGVIVVVEAEHLCMSMRGVQKPGSRTVTSAVRGILRDSATRAEAMSLIMAK

SEQ ID NO: 4712 - protein, 189 aa, Arcanobacterium sp.
  misc_feature (1)..(189): tr|A0A095X6W2|A0A095X6W2_9ACTO GTP cyclohydrolase 1 OS= Arcanobacterium sp. S3PF19 OX=1219585 GN=folE PE=3 SV=1
MYDADGVEKAVYDLLVAIGEDPGREGLRGTPLRIARSYREIFSGLQSDPAQVLQTTFDINHQELIVVRDIALYSMCEHHLLPFFGVAHIGYIPCEEGKVTGLSKLARLVEGYARRPQVQERLTGQVAEALSQVLAARGVIVVIEAEHMCMTMRGVRKPASRTVTSAVRGILHDSAARAEAMSLIMAAKR

SEQ ID NO: 4713 - protein, 188 aa, Arcanobacterium sp.
  misc_feature (1)..(188): tr|A0A4Q9V160|A0A4Q9V160_9ACTO GTP cyclohydrolase 1 OS= Arcanobacterium sp. C605018/01/1 OX=2529275 GN=folE PE= 3 SV=1
MAYDEEGVRKAIYDLLVAVGEDPQRDGLLDTPTRMARAYREIFAGLESDPSEVLDTTFDIDHQEMILVRDIPMYSVCEHHLLPFHGVAHVGYIPSDDGKVTGLSKLARLVEGFSRRPQVQERITTNVADALMDRLQARGVIVVIEAEHMCMSMRGVRKPGSRTVTSAVRGCLRDGTTRAEAMSLIMAK

SEQ ID NO: 4714 - protein, 233 aa, Arcicella aurantiaca
  misc_feature (1)..(233): tr|A0A316E8H3|A0A316E8H3_9BACT GTP cyclohydrolase 1 OS= Arcicella aurantiaca OX=591202 GN=folE PE=3 SV=1
MKPNETLLNTLLVDNNKKIMFTDEEIGDEHIMTSVDTPMRDDAFEMSDEEKMAQIEYHFRQIMETLGLDLKDDSLKGTPKRVAKMYVKEIFSGLDPKNMPSVALFDNKYQYNEMLVEKNISFYSNCEHHFVPIFGKAHVAYIANGQVIGLSKLNRIVQHFAKRPQVQERLTMQIAKELQKILGTEDVAIMIDAKHLCVASRGVKDDTSSTITSYYGGKFQDDATKAEFLKYIS

SEQ ID NO: 4715 - protein, 190 aa, Arcobacter anaerophilus
  misc_feature (1)..(190): tr|A0A4Q0Y0T0|A0A4Q0Y0T0_9PROT GTP cyclohydrolase 1 OS= Arcobacter anaerophilus OX=877500 GN=folE PE=3 SV=1
MNKETQFEDSVKNILEYIGEDANREGLIKTPSRVRKAFEFMCSGYKQDPKEIINSALFTSSNDEMVVIKDIEFYSMCEHHMLPIIGKAHVAYIPDGKVVGLSKIPRVVDVFARRLQIQEQMTEQICDALHEALNPKGVAVMIDARHMCMEMRGVEKICSTTVTSALRGLFKKEKKTKDEFLSIIAQSLHK

SEQ ID NO: 4716 - protein, 190 aa, Arcobacter aquimarinus
  misc_feature (1)..(190): tr|A0A4Q0UNA5|A0A4Q0UNA5_9PROT GTP cyclohydrolase 1 OS= Arcobacter aquimarinus OX=1315211 GN=folE PE=3 SV=1
MHSEIEFENAIKTMLEHIGEDVNREGLIDTPKRVRKAYEFMCSGYKQDPKEIIQKALFTSTNDEMVVVKDIEFYSFCEHHMLPIIGKAHVAYIPNGKVIGLSKIPRVVDVFARRLQIQEQLTEQICDALNEHLKPKGVAVMIDARHMCMEMRGVEKICSTTVTSALRGLFKSNKGTKDEFLSIIAQSLHK

SEQ ID NO: 4717 - protein, 190 aa, Arcobacter bivalviorum
  misc_feature (1)..(190): tr|A0A345IZM1|A0A345IZM1_9PROT GTP cyclohydrolase 1 OS= Arcobacter bivalviorum OX=663364 GN=folE PE=3 SV=1
MSKELEFENSVKNILEYIGEDVNREGLEKTPSRVRKAFEFMCGGYKQNPEDIINSALFTSSNDEMVVIKDIEFYSMCEHHMLPIIGKAHVAYIPDGKVVGLSKIPRVVDVFARRLQIQEQMTEQICDALHKALNPKGVAVMIDARHMCMEMRGVEKICSTTVTSALRGLFKKDKKTKDEFLSIVNSSLRK

SEQ ID NO: 4718 - protein, 190 aa, Arcobacter butzleri
  misc_feature (1)..(190): tr|A0A2W5JVY1|A0A2W5JVY1_9PROT GTP cyclohydrolase 1 OS= Arcobacter butzleri OX=28197 GN=folE PE=3 SV=1
MNKEIDFENAIKNILTYIGEDINREGLLDTPKRVRKAFEFMFSGYNQDPKEIIQKALFTSTNDEMVVVKDIEFYSFCEHHMLPIIGKAHVAYIPNGKVVGLSKIPRVVDVFARRLQIQEQMTEQICEALNEHLRPKGVAVMIDARHMCMEMRGVEKICSTTVTSSLRGLFKSDKKTKDEFLSIVASSFHK

SEQ ID NO: 4719 - protein, 190 aa, Arcobacter butzleri
  misc_feature (1)..(190): tr|A8EVB6|A8EVB6_ARCB4 GTP cyclohydrolase 1 OS=Arcobact er butzleri (strain RM4018) OX=367737 GN=folE PE=3 SV=1
MNKEIDFENAIKNILTYIGEDINREGLLDTPKRVRKAFEFMCSGYNQDPKEIIQKALFTSTNDEMVVVKDIEFYSFCEHHMLPIIGKAHVAYIPNGKVVGLSKIPRVVDVFARRLQIQEQMTEQICEALNEHLRPKGVAVMIDARHMCMEMRGVEKICSTTVTSSLRGLFKSDKKTKDEFLSIVASSFHK

SEQ ID NO: 4720 - protein, 190 aa, Arcobacter canalis
  misc_feature (1)..(190): tr|A0A2G1CSZ2|A0A2G1CSZ2_9PROT GTP cyclohydrolase 1 OS= Arcobacter canalis OX=1912871 GN=folE PE=3 SV=1
MGKEQEFEDSIRNILEYIGEDITREGLEKTPSRVRKAFEFICGGYKENPEDILKSALFTSTNDEMVVIKDIEFYSQCEHHMLPIIGKAHVAYIPNGKVVGLSKIPRVVNVFARRLQIQEQMTEQICDALNDTLKPKGVAVMIDARHMCMEMRGVEKICSTTVTSALRGLFKQNKKTKDEFLTIVSSSLQK

SEQ ID NO: 4721 - protein, 190 aa, Arcobacter cibarius
  misc_feature (1)..(190): tr|A0A5J6RIB8|A0A5J6RIB8_9PROT GTP cyclohydrolase I OS= Arcobacter cibarius OX=255507 GN=folE PE=4 SV=1
MSKEFEFENSIKNILNYIGEDIEREGLLDTPKRVRKAFEFMCSGYKECPKEIIQKALFTSTNDEMVVVKDIEFYSFCEHHMLPIIGKAHVAYIPNGKVVGLSKIPRVVDVFARRLQIQEQMTEQICDALNEHLKPKGVAVIIDARHMCMEMRGVQKICSTTITSSLRGLFKSDKKTKDEFLSIVSASFQK

SEQ ID NO: 4722 - protein, 190 aa, Arcobacter cloacae
  misc_feature (1)..(190): tr|A0A4Q0ZKI5|A0A4Q0ZKI5_9PROT GTP cyclohydrolase 1 OS= Arcobacter cloacae OX=1054034 GN=folE PE=3 SV=1
MHSEIEFENAIKTMLEHIGEDVNREGLIDTPKRVRKAYEFMCSGYKQDPKEIIQKALFTSTNDEMVVVKDIEFYSFCEHHMLPIIGKAHVAYIPNGKVIGLSKIPRVVDVFARRLQIQEQLTEQICDALNEHLKPKGVAVMIDARHMCMEMRGVEKICSTTVTSALRGLFKSNKGTKDEFLSIVAQSLHK

SEQ ID NO: 4723 - protein, 146 aa, Arcobacter cloacae
  misc_feature (1)..(146): tr|A0A4Q0UQF5|A0A4Q0UQF5_9PROT GTP cyclohydrolase 1 (Fr agment) OS=Arcobacter cloacae OX=1054034 GN=folE PE=3 S V=1
MKEIEFENSIKNILEYIDEDVNREGLLDTPKRVRKAYEFMFSGYKLDPKEIIQKALFTSTNDEMVVVKDIEFYSFCEHHMLPIIGKAHVAYIPNGKVVGLSKIPRVVDVFARRLQIQEQMTEQICDALNEHLKPKGVAVIVDARHM

SEQ ID NO: 4724 - protein, 190 aa, Arcobacter cryaerophilus
  misc_feature (1)..(190): tr|A0A494TB67|A0A494TB67_9PROT GTP cyclohydrolase 1 OS= Arcobacter cryaerophilus D2610 OX=1032071 GN=folE PE=3 SV=1
MNKELEFENSIKNILNYIDEDVTREGLLDTPKRVRKAYEFMFSGYKLDPKEIIQKALFTSTNDEMVVVKDIEFYSFCEHHMLPIIGKAHVAYIPNGKVVGLSKIPRVVDVFARRLQIQEQMTEQICDALNEHLKPKGVAVIVDARHMCMEMRGVQKICSTTITSSLRGLFKSDKKTKDEFLSIVSASFQK

SEQ ID NO: 4725 - protein, 190 aa, Arcobacter cryaerophilus
  misc_feature (1)..(190): tr|A0A5B7XBV0|A0A5B7XBV0_9PROT GTP cyclohydrolase 1 OS= Arcobacter cryaerophilus ATCC 43158 OX=1032070 GN=folE PE=3 SV=1
MDKELKFENSIKNILEYIDEDVTREGLLDTPKRVRKAYEFMFSGYKLDPKEIIQKALFTSTNDEMVVVKDIEFYSFCEHHMLPIIGKAHVAYIPNGKVVGLSKIPRVVDVFARRLQIQEQMTEQICDALNEHLKPKGVAVIVDARHMCMEMRGVQKICSTTITSSLRGLFKSDKKTKDEFLSIVSASFQK

SEQ ID NO: 4726 - protein, 190 aa, Arcobacter defluvii
  misc_feature (1)..(190): tr|A0A4Q0ULL0|A0A4Q0ULL0_9PROT GTP cyclohydrolase 1 OS= Arcobacter defluvii OX=873191 GN=folE PE=3 SV=1
MTKEIEFENAVKKILTHIGEDINREGLIDTPSRVRKAFEFMCSGYKQDPKEIIEKALFTSTNDEMVVVKDIEFYSQCEHHMLPIIGKAHIAYIPNGKVIGLSKIPRVVDVFARRLQIQEQLTEQICDALNEHLKPKGVAVMIDARHMCMEMRGVEKICSTTVTSALRGLFKTNKTTKDEFLSIVAQSLHK

SEQ ID NO: 4727 - protein, 190 aa, Arcobacter ebronensis
  misc_feature (1)..(190): tr|A0A4Q1AME0|A0A4Q1AME0_9PROT GTP cyclohydrolase 1 OS= Arcobacter ebronensis OX=1462615 GN=folE PE=3 SV=1
MTKESEFENSIKNILEYVGEDVNREGLIKTPQRVRKAFEFMCSGYNQDPKEIINSALFTSSNDEMVVIKDIEFYSMCEHHMLPIIGKAHVAYIPNGKVVGLSKIPRVVDIFAKRLQIQEQMTEQICDALHEALNPKGVAVMIDARHMCMEMRGVEKICSTTVTSALRGLFKKEKKTKDEFLSIVAHSLHK

SEQ ID NO: 4728 - protein, 190 aa, Arcobacter ellisii
  misc_feature (1)..(190): tr|A0A347UA04|A0A347UA04_9PROT GTP cyclohydrolase 1 OS= Arcobacter ellisii OX=913109 GN=folE PE=3 SV=1
MAKEVEFENAVKTILTHIGEDITREGLIDTPSRVRKAFEFMCSGYNQNPKEIIEKALFTSTNDEMVVVKDIEFYSFCEHHMLPIIGKAHVAYIPNGKVVGLSKIPRVVDVFARRLQIQEQMTEQICDALNEYLKPKGVAVMIDARHMCMEMRGVEKICSTTVTSALRGLFKSNKKTKDEFLSIVSNSLHK

SEQ ID NO: 4729 - protein, 190 aa, Arcobacter halophilus
  misc_feature (1)..(190): tr|A0A2N1J0K8|A0A2N1J0K8_9PROT GTP cyclohydrolase 1 OS= Arcobacter halophilus OX=197482 GN=folE PE=3 SV=1
MSKEQEFEDSIRNILEYIGEDVNREGLEKTPSRVRKAFEFICGGYKENPEEILNSALFTSSNDEMVVIKDIEFYSQCEHHMLPIIGKAHVAYIPNGKVVGLSKIPRVVNVFARRLQIQEQMTEQICDALNDALKPKGVAVMIDARHMCMEMRGVEKICSTTVTSALRGLFKQNKKTKDEFLTIVSSSLQK

SEQ ID NO: 4730 - protein, 190 aa, Arcobacter marinus
  misc_feature (1)..(190): tr|A0A1T5CIK6|A0A1T5CIK6_9PROT GTP cyclohydrolase 1 OS= Arcobacter marinus OX=505249 GN=folE PE=3 SV=1
MGKEQEFEDSIRNILEYIGEDVTREGLEKTPSRVRKAFEFICGGYKENPEDILKSALFTSTNDEMVVIKDIEFYSQCEHHMLPIIGKAHVAYIPNGKVVGLSKIPRVVNVFARRLQIQEQMTEQICDALNDTLKPKGVAVMIDARHMCMEMRGVEKICSTTVTSALRGLFKQNKKTKDEFLTIVSSSLQK

SEQ ID NO: 4731 - protein, 190 aa, Arcobacter molluscorum
  misc_feature (1)..(190): tr|A0A2G1DHX0|A0A2G1DHX0_9PROT GTP cyclohydrolase 1 OS= Arcobacter molluscorum LMG 25693 OX=870501 GN=folE PE=3 SV=1
MVSEKEFEDSIKKILEYVGEDVNREGLEKTPSRVRKAFEFMCGGYNQDPKEVINSALFTSTNDEMVVIKDIEFYSQCEHHMLPIIGKAHVAYIPDGKVVGLSKIPRVVDIFARRLQIQEQLTEQICDALNDALKPKGVAVIIDARHMCMEMRGVEKICSTTVTSALRGLFKQNKKTKDEFLSIVSSSFNK

SEQ ID NO: 4732 - protein, 190 aa, Arcobacter mytili
  misc_feature (1)..(190): tr|A0A345J768|A0A345J768_9PROT GTP cyclohydrolase 1 OS= Arcobacter mytili LMG 24559 OX=1032238 GN=folE PE=3 SV= 1
MISEKEFENSIKNILEYIGEDVTREGLVKTPSRVRKAFEFMCGGYKQNPEEIINSALFTSTNDEMVVIKDIEFYSQCEHHMLPIIGKAHVAYIPNGKVVGLSKIPRVVDVFARRLQIQEQMTEQICDALNNALNPKGVAVMIEARHMCMEMRGVEKICSTTVTSALRGLFKQNKKTKDEFLSIVSTASIK

SEQ ID NO: 4733 - protein, 190 aa, Arcobacter nitrofigilis
  misc_feature (1)..(190): tr|D5V1A0|D5V1A0_ARCNC GTP cyclohydrolase 1 OS=Arcobact er nitrofigilis (strain ATCC 33309 / DSM 7299 / LMG 760 4 / NCTC 12251 / CI) OX=572480 GN=folE PE=3 SV=1
MKDEKKFEDAIKSVLEYVGEDVTREGLEKTPSRVRKAFDFMCSGYKQDPKEIINSALFTSSNDEMVVIKDIEFYSMCEHHMLPIIGKAHVAYIPNGKVVGLSKIPRVVDVFARRLQIQEQMTEQICDALHEALNPKGVAVMIDARHMCMEMRGVEKICSTTVTSALRGLFKKEKKTKDEFLSIVAQSLHK

SEQ ID NO: 4734 - protein, 190 aa, Arcobacter pacificus
  misc_feature (1)..(190): tr|A0A5C2H872|A0A5C2H872_9PROT GTP cyclohydrolase 1 OS= Arcobacter pacificus OX=1080223 GN=folE PE=3 SV=1
MSSELEFENAVKKILEHIGEDVNREGLIDTPSRVRKAYEFMCSGYKEDPKEIIQKALFTSTNDEMVVVKDIEFYSQCEHHMLPIIGKAHVAYIPNGKVVGLSKIPRVVDVFARRLQIQEQMTEQICDALNEHLKPKGVAVIIDARHMCMEMRGVQKICSTTVTSALRGLFKKEKKTKDEFLSIVAQSLHK

SEQ ID NO: 4735 - protein, 250 aa, [Arcobacter] porcinus
  misc_feature (1)..(250): tr|A0A1C0B1D5|A0A1C0B1D5_9PROT GTP cyclohydrolase 1 typ e 2 OS=[Arcobacter] porcinus OX=1935204 GN=AAX28_01103 PE=4 SV=1
MQIKDIYEYLNTLSPFELQEKWDNSGLLVGNMEDNFENLYLSMDLDLELVETLKPNSLVITHHPLIFSGLKRVNYNTYSTKIVRELIKKDISLISMHTNIDKTHLNRFVIERILDFKVDNQNEFIANCSVDFSFDDLLKHLNKKLNLKNIKYVKTKEEIKKIAICTGSAMSLIDEVDADCFLTGDIKYHDAMEAKARGISLIDIRHYESENAFSLLLEELLKDYLKKNQFKAIILASKNPFEFFKGETVE

SEQ ID NO: 4736 - protein, 190 aa, [Arcobacter] porcinus
  misc_feature (1)..(190): tr|A0A5C2HDH8|A0A5C2HDH8_9PROT GTP cyclohydrolase 1 OS= [Arcobacter] porcinus OX=1935204 GN=folE PE=3 SV=1
MKNEKEFEDSIKNILNYIDEDINREGLVDTPKRVRKAYEFMFSGYKECPKEIIQKALFTSTNDEMVVVKDIEFYSFCEHHMLPIIGKVHVAYIPNGKVVGLSKIPRVVDVFARRLQIQEQMTEQICDALNEYLNPKGVAVIIDARHMCMEMRGVQKICSTTVTSSLRGLFKSDKKTKDEFLSIVSSSFSK

SEQ ID NO: 4737 - protein, 190 aa, Arcobacter skirrowii
  misc_feature (1)..(190): tr|A0A2U2BZ43|A0A2U2BZ43_9PROT GTP cyclohydrolase 1 OS= Arcobacter skirrowii OX=28200 GN=folE PE=3 SV=1
MMKEIEFENSIKNILEYIDEDVNREGLLDTPKRVRKAYEFMFSGYKLDPKEIIQKALFTSTNDEMVVVKDIEFYSFCEHHMLPIIGKAHVAYIPNGKVVGLSKIPRVVDVFARRLQIQEQMTEQICDALNEHLKPKGVAVMIDARHMCMEMRGVEKICSTTVTSSLRGLFKSDKKTKDEFLSIVSSSFNK

SEQ ID NO: 4738 - protein, 190 aa, Arcobacter skirrowii; identical to SEQ ID NO: 4737
  misc_feature (1)..(190): tr|A0A4Q0UCL4|A0A4Q0UCL4_9PROT GTP cyclohydrolase 1 OS= Arcobacter skirrowii CCUG 10374 OX=1032239 GN=folE PE=3 SV=1

SEQ ID NO: 4739 - protein, 190 aa, Arcobacter sp.
  misc_feature (1)..(190): tr|A0A4V1LTU8|A0A4V1LTU8_9PROT GTP cyclohydrolase 1 OS= Arcobacter sp. F155 OX=2044512 GN=folE PE=3 SV=1
MSKELEFENSVKNILEYIGEDINREGLEKTPSRVRKAFEFMCGGYKQNPEEIINSALFTSSNDEMVVIKDIEFYSMCEHHMLPIIGKAHIAYIPNGKVVGLSKIPRVVDVFARRLQIQEQMTEQICDALHETLNPKGVAVMIDARHMCMEMRGVEKICSTTVTSALRGLFKKDKKTKDEFLSIVAQSLHK

SEQ ID NO: 4740 - protein, 188 aa, Arcobacter sp.
  misc_feature (1)..(188): tr|A0A1Y5DW04|A0A1Y5DW04_9PROT GTP cyclohydrolase 1 OS= Arcobacter sp. 31_11_sub10_T18 OX=1856277 GN=folE PE=3 SV=1
MEEKFENAVRDMLEAIGEDVNREGLEKTPSRVRKAYEFMCSGYKQDPKEIIQKALFTSTNEEMVILKDIEFYSQCEHHMLPIIGKAHIAYIPNGKVVGLSKIPRVVDVFARRLQIQEQMTEQIADALNEHLQPKGVAVVLDARHMCMEMRGVEKICSTTVTSALRGIFKKEKKTKDEFLSIISSSFRK

SEQ ID NO: 4741 - protein, 190 aa, Arcobacter suis
  misc_feature (1)..(190): tr|A0A443TMS7|A0A443TMS7_9PROT GTP cyclohydrolase 1 OS= Arcobacter suis OX=1278212 GN=folE PE=3 SV=1
MSSEIEFENAIKKMLEHVGEDINREGLIDTPKRVRKAYEFMCSGYKQDPKEIIEKALFTSTNDEMVVVKDIEFYSQCEHHMLPIIGKAHVAYIPNGKVIGLSKIPRVVDVFARRLQIQEQLTEQICDALNEHLKPKGVAVMIDARHMCMEMRGVEKICSTTVTSALRGLFKSNKTTKDEFLSIVAQSLHK

SEQ ID NO: 4742 - protein, 190 aa, Arcobacter thereius
  misc_feature (1)..(190): tr|A0A1C0B580|A0A1C0B580_9PROT GTP cyclohydrolase 1 OS= Arcobacter thereius OX=544718 GN=folE PE=3 SV=1
MKNEKEFEDSIKNILNYIDEDINREGLIDTPKRVRKAYEFMFGGYKECPKEIIQKALFTSSNDEMVVVKDIEFYSFCEHHMLPIIGKVHVAYIPNGKVVGLSKIPRVVDVFARRLQIQEQMTEQICDALNEYLKPKGVAVIIDARHMCMEMRGVQKICSTTVTSSLRGLFKSDKKTKDEFLSIVSSSFNK

SEQ ID NO: 4743 - protein, 250 aa, Arcobacter thereius
  misc_feature (1)..(250): tr|A0A1C0ATP0|A0A1C0ATP0_9PROT GTP cyclohydrolase 1 typ e 2 OS=Arcobacter thereius OX=544718 GN=AAX27_01840 PE= 4 SV=1
MQIKDIYEYLNTISPFELQEKWDNSGLLVGNMEDNFENLYLSMDLDLELVETLKPNSLVITHHPLIFSGLKRVNYNTYSTKIVRELIKKDISLISMHTNIDKTHLNRFVIERILDFKVDNQNEFIANCSVDFSFDDLLKHLNKKLNLKNIKYVKTKEEIKKIAICTGSAMSLIDEVDADCFLTGDIKYHDAMEAKARGISLIDIRHYESENAFSLLLEELLKDYLKKNQFKAIILASKNPFEFFKGETVE

SEQ ID NO: 4744 - protein, 190 aa, Arcobacter trophiarum
  misc_feature (1)..(190): tr|A0A4Q0ZYP1|A0A4Q0ZYP1_9PROT GTP cyclohydrolase 1 OS= Arcobacter trophiarum LMG 25534 OX=1032241 GN=folE PE=3 SV=1
MNKELEFENSIKSILEYIGEDTQREGLLDTPKRVRKAYEFMCSGYKQCPKEIIQKALFTSTNDEMVVVKDIEFYSFCEHHMLPIIGKAHVAYIPNGKVVGLSKIPRVVDVFARRLQIQEQMTEQICDALNEHLKPKGVAVIIDARHMCMEMRGVEKICSTTITSSLRGLFKSDKKTKDEFLSIVSASFQK

SEQ ID NO: 4745 - protein, 190 aa, Arcobacter venerupis
  misc_feature (1)..(190): tr|A0A443TV44|A0A443TV44_9PROT GTP cyclohydrolase 1 OS= Arcobacter venerupis OX=1054033 GN=folE PE=3 SV=1
MSSEIEFENAIKKMLEHVGEDITREGLIDTPKRVRKAYEFMCSGYKQDPKEIIEKALFTSTNDEMVVVKDIEFYSQCEHHMLPIIGKAHVAYIPNGKVIGLSKIPRVVDIFARRLQIQEQLTEQICDALNEHLKPKGVAVMIDARHMCMEMRGVEKICSTTVTSALRGLFKSNKTTKDEFLSIVAQSLHK

SEQ ID NO: 4746 - protein, 212 aa, Arcticibacter pallidicorallinus
  misc_feature (1)..(212): tr|A0A2T0U7K4|A0A2T0U7K4_9SPHI GTP cyclohydrolase 1 OS= Arcticibacter pallidicorallinus OX=1259464 GN=folE PE=3 SV=1
MKEHDLDHSGEENEIGYVKVDRYDPLKIERIASHYSDILSDLGEDPQREGLLKTPERVAKALQFLTHGYDLKPEEILKSAMFKEEYSQMVVVKDIEVYSMCEHHLLPFFGKAHIAYIPNGHIVGLSKIPRVVDAFARRLQVQERLTNEIRDCIQSTLAPLGVAVVIECKHLCMSMRGIQKQNSVTTTSAFTGAFANERTRSEFLTLITASLD

SEQ ID NO: 4747 - protein, 132 aa, Arcticibacter svalbardensis
  misc_feature (1)..(132): tr|R9GRU5|R9GRU5_9SPHI GTP cyclohydrolase 1 OS=Arcticib acter svalbardensis MN12-7 OX=1150600 GN=ADIARSV_2435 P E=3 SV=1
MFKEEYSQMVVVKDIEVYSMCEHHLLPFFGKAHIAYIPNGHIVGLSKIPRVVEAYSRRLQVQERLTNEIRDCIQKTLAPLGVAVVIECKHLCMSMRGIQKQNSVTTTSAFTGAFANERTRSEFLTLITASLD

SEQ ID NO: 4748 - protein, 238 aa, Arcticibacterium luteifluviistationis
  misc_feature (1)..(238): tr|A0A2Z4G792|A0A2Z4G792_9BACT GTP cyclohydrolase 1 OS= Arcticibacterium luteifluviistationis OX=1784714 GN=fol E PE=3 SV=1
MKQKEIMSNTQDNKIERQIDEIGDDHISTNIFDTPLREDAFEMDDDTKMQKIEEHFSQIMQIMGLDLTDDSLSGTPRRVAKMYVKELFSGLNPKNLPALTHFKNHYKYNEMLVERDIMFHSNCEHHFVPIVGKAHIAYIANGHVIGLSKLHRVVNHFARRPQVQERMTIQIGEALKTVLGTDSVAVILDADHMCVSSRGINDQTSSTVTSFYGGEFNKSETRDEFIRMISLRRGELKY

SEQ ID NO: 4749 - protein, 199 aa, Ardenticatena maritima
  misc_feature (1)..(199): tr|A0A0P6Y1I4|A0A0P6Y1I4_9CHLR GTP cyclohydrolase 1 OS= Ardenticatena maritima OX=872965 GN=folE PE=3 SV=1
MRAQARTAALANTDTTAQAVRALLEAIGEDPTREGLERTPERVARMYAELTAGYYVDPEELVNDALFDISYDEMVIVRDIEFYSLCEHHLLPFFGHAHVAYIPNGRVIGLSKIPRVVDMFARRLQVQERMTVQIADFLEETLSPKGVAVVVEGMHMCSMMRGVKKANARMVSSAMRGIFRTDPRTRNEFVNLVQRGEHL

SEQ ID NO: 4750 - protein, 216 aa, Ardenticatena maritima
  misc_feature (1)..(216): tr|A0A0M9UD87|A0A0M9UD87_9CHLR GTP cyclohydrolase 1 OS= Ardenticatena maritima OX=872965 GN=folE PE=3 SV=1
MTHAHDEHPILNQLDTAIRAQARTAALANTDTTAQAVRALLEAIGEDPTREGLERTPERVARMYAELTAGYYVDPEELVNDALFDISYDEMVIVRDIEFYSLCEHHLLPFFGHAHVAYIPNGRVIGLSKIPRVVDMFARRLQVQERMTVQIADFLEETLSPKGVAVVVEGMHMCSMMRGVKKANARMVSSAMRGIFRTDPRTRNEFVNLVQRGEHL

SEQ ID NO: 4751 - protein, 216 aa, Ardenticatenia bacterium; identical to SEQ ID NO: 4750
  misc_feature (1)..(216): tr|A0A3M1BUV8|A0A3M1BUV8_9CHLR GTP cyclohydrolase 1 OS= Ardenticatenia bacterium OX=2099665 GN=folE PE=3 SV=1

SEQ ID NO: 4752 - protein, 199 aa, Arenibacter algicola
  misc_feature (1)..(199): tr|A0A221V211|A0A221V211_9FLAO GTP cyclohydrolase 1 OS= Arenibacter algicola OX=616991 GN=folE PE=3 SV=1
MTQYRNLEEYNLEITDEVKSRYSSIINEIGEDLNRDGLVKTPERAAKAMLFLTQGYKQDAVEILKGAMFKESYDEMVIIKDIEVYSLCEHHMLPFFGKAHIAYIPNGHIVGLSKIPRVVDVFARRLQVQERLTNDILECINNTLKPQGVAVVIEASHMCMMMRGVQKQNSVTTTSGFRGQFEKIETRNEFLKLISSKLS

SEQ ID NO: 4753 - protein, 226 aa, Arenibacter algicola
  misc_feature (1)..(226): tr|A0A221UYB4|A0A221UYB4_9FLAO GTP cyclohydrolase 1 OS= Arenibacter algicola OX=616991 GN=folE PE=3 SV=1
MKIDNALEKHFEELGDDHVSAAEDTPLRKDAFVLSDEEKIERIRGSVNEIMLTLGLDLDDDSLKGTPNRVAKMFVQEIFGGLNPKKRPKSSTFDNKYKYGEMLVEKNITLYSTCEHHLLPIVGKAHVAYISKGTVVGLSKMNRIVDYYAKRPQVQERLNIQIVRELQQVLGTEDVACVIDAKHLCVNSRGIRDIESSTVTAEYGGKFKEEAVRREFLDYINIDTKF

SEQ ID NO: 4754 - protein, 199 aa, Arenibacter echinorum
  misc_feature (1)..(199): tr|A0A327R722|A0A327R722_9FLAO GTP cyclohydrolase 1 OS= Arenibacter echinorum OX=440515 GN=folE PE=3 SV=1
MTQYRNLEEYNLEVTDEVKSRYSSIIKEIGEDLNRDGLIKTPERAAKAMLFLTQGYKQDAVEILKGAMFKESYDEMVIIKDIEVYSLCEHHMLPFFGKAHIAYIPNGHIVGLSKIPRVVDVFARRLQVQERLTNDILECINNTLKPQGVAVVIEASHMCMMMRGVQKQNSVTTTSGFRGQFEKIETRNEFLKLISSKLS

SEQ ID NO: 4755 - protein, 238 aa, Arenibacter echinorum
  misc_feature (1)..(238): tr|A0A327RFN4|A0A327RFN4_9FLAO GTP cyclohydrolase 1 OS= Arenibacter echinorum OX=440515 GN=folE PE=3 SV=1
MYIFAALKSNILMKIDNALEKHFEELGDDHVSAAEDTPLRKDAFVLSDEEKIARIRASVNEIMLTLGLDLEDDSLKGTPNRVAKMFVQEIFGGLNPKRRPKSSTFDNKYKYGEMLVEKNITLYSTCEHHLLPIVGKAHVAYISKGTVVGLSKMNRVVDYYAKRPQVQERLNIQIVRELQQVLGTEDVACVIDAKHLCVNSRGIRDIESSTVTAEYGGKFKEEAVRREFLDYINIDTKF

SEQ ID NO: 4756 - protein, 238 aa, Arenibacter nanhaiticus
  misc_feature (1)..(238): tr|A0A1M6JT02|A0A1M6JT02_9FLAO GTP cyclohydrolase 1 OS= Arenibacter nanhaiticus OX=558155 GN=folE PE=3 SV=1
MYIFAALKSHILMKIDNALEKQFEELGDDHVSAAEDTPLRKDAFVLSDEEKIAKIQGNVNEIMLTLGLDLEDDSLKGTPNRVAKMFVSEIFGGLNPRRKPKSSTFSNKYKYGEMLVEKNITLYSTCEHHLLPIVGKAHVAYISKGTVVGLSKMNRIVDYFAKRPQVQERLNIQIVRELQKVLGTEDVACVIDAKHLCVNSRGIRDIESSTVTAEYGGKFKDEAVRREFLDYINIDTKF

SEQ ID NO: 4757 - protein, 199 aa, Arenibacter nanhaiticus
  misc_feature (1)..(199): tr|A0A1M6DIJ6|A0A1M6DIJ6_9FLAO GTP cyclohydrolase 1 OS= Arenibacter nanhaiticus OX=558155 GN=folE PE=3 SV=1
MAPYKSLEEYNLEITDEVKNRYSSIINEIGEDVSREGLLKTPERAAKAMLFLTQGYKQDAVEILEGALFKESYDDMVIIKDIELYSLCEHHMLPFFGKAHIAYIPDGQIVGLSKIPRVVDVFARRLQVQERLTHDILECLNNTLKPKGVAVVIEASHMCMMMRGVQKQNSVTTTSGFRGQFEKIETRNEFLKLISAKLS

SEQ ID NO: 4758 - protein, 230 aa, Arenibacter palladensis
  misc_feature (1)..(230): tr|A0A543W7Q1|A0A543W7Q1_9FLAO GTP cyclohydrolase 1 OS= Arenibacter palladensis OX=237373 GN=folE PE=3 SV=1
MNIDTLNKKNGHKLNGFTHEDIGDDHLYTGLETPMKPDAFKLSDTEKKQRIALLFQEIMDVMGLDLTDDSLKGTPERVAKMYIDEIFSGLNPANKPKIALFDNKYQYNQMLVEKNITFYSNCEHHFVPIIGKAHVAYISSGKVIGLSKLNRIVQYYAKRPQVQERLTNQIAEDLKRILGTDDVAVIIDAKHLCVSSRGIKDETSATVTSYYGGKFNTPSKVAELQNYLKN

SEQ ID NO: 4759 - protein, 226 aa, Arenibacter palladensis; identical to SEQ ID NO: 4753
  misc_feature (1)..(226): tr|A0A1M5BGE5|A0A1M5BGE5_9FLAO GTP cyclohydrolase 1 OS= Arenibacter palladensis OX=237373 GN=folE PE=3 SV=1

SEQ ID NO: 4760 - protein, 232 aa, Arenibacter sp.
  misc_feature (1)..(232): tr|A0A3S0C6W4|A0A3S0C6W4_9FLAO GTP cyclohydrolase 1 OS= Arenibacter sp. GUO666 OX=2489054 GN=folE PE=3 SV=1
MKIDALVASKEKTATLNGFTHGEIGDDHLSTGLETPMKSEAFALSDSEKKERIAQLFHEIMDVMGLDLTDDSLKGTPERVAKMYIDEIFSGLNPENKPKVALFDNKYQYNQMLVEKNITFYSNCEHHFVPIIGKAHVAYISSGKVIGLSKLNRIVQYYAKRPQVQERLTNQIAEDLKQILGTNDVAVIIDAKHLCVSSRGIKDDTSATVTSFYGGAFSSPTKITELLNYINQ

SEQ ID NO: 4761 - protein, 232 aa, Arenibacter sp.
  misc_feature (1)..(232): tr|A0A318IBV2|A0A318IBV2_9FLAO GTP cyclohydrolase 1 OS= Arenibacter sp. ARW7G5Y1 OX=2135619 GN=folE PE=3 SV=1
MNTKTVAPNKINGHKLNGFTLADIGDDHLYTGLDTPLKANAFELSDTEKKQRIALLFQEIMDVMGMDLTDDSLKGTPERVAKMYIDEIFSGINPKNRPKIALFDNKYQYNQMLVEKNITFYSNCEHHFVPIIGKAHVAYISTGKVIGLSKLNRIVQYYAKRPQVQERLTNQIAEDLKTILGTEDVAVIIDAKHLCVSSRGIKDESSTTVTSYYGGKFNTASKITELQNYIKD

SEQ ID NO: 4762 - protein, 232 aa, Arenibacter troitsensis
  misc_feature (1)..(232): tr|A0A1X7ID52|A0A1X7ID52_9FLAO GTP cyclohydrolase 1 OS= Arenibacter troitsensis OX=188872 GN=folE PE=3 SV=1
MNTETLTLNKINGQNLNGFTHEDIGDDHLYTGFETPLKADAFELSDTEKKQRIALLFQEIMEVMGLDLRDDSLKGTPERVAKMYIDEIFSGLNPANKPKIALFDNKYQYNQMLVEKNITFYSNCEHHFVPIIGKAHVAYISSGKVIGLSKLNRIVQYYAKRPQVQERLTNQIAEDLKRILGTENVAVIIDAKHLCVSSRGIKDESSTTVTAFYGGKFNSSSKITELQNYIKT

SEQ ID NO: 4763 - protein, 199 aa, Arenibacter troitsensis
  misc_feature (1)..(199): tr|A0A1X7JC67|A0A1X7JC67_9FLAO GTP cyclohydrolase 1 OS= Arenibacter troitsensis OX=188872 GN=folE PE=3 SV=1
MTQYRNLEEYNLEITDEVKARYSSIINEIGEDLNRDGLIKTPERAAKAMLFLTQGYKQDAVEILKGAMFKESYDEMVIIKDIEVYSLCEHHMLPFFGKAHIAYIPNGHIVGLSKIPRVVDVFARRLQVQERLTNDILECLNNTLKPQGVAVVIEASHMCMMMRGVQKQNSVTTTSGFRGQFEKIETRNEFLKLISSNLS

SEQ ID NO: 4764 - protein, 258 aa, Arenicella xantha
  misc_feature (1)..(258): tr|A0A395JKQ9|A0A395JKQ9_9GAMM GTP cyclohydrolase FolE2 OS=Arenicella xantha OX=644221 GN=folE2 PE=3 SV=1
MEDVQGSVDTRQIPINRVGIKDIQHPITVLGKDGRRSASIATFSMSVSLPHDQKGTHMSRFIQMLNETETEISAKNFNKMLSSMVERLEAESGYIEMQFPYFIEKTAPVSGVKSLMDYQVNLVGQIEQGHIDATLEVTIPVKSLCPCSKKISEYGAHNQRSHITVGINCSSKLWLDELIKSVEAQASAELFAILKRPDEKYITERAYNNPKFVEDVVRDVADVFDQNDRILRYYVHAENFESIHNHSAFAVVEHDKSV

SEQ ID NO: 4765 - protein, 180 aa, Arenicella xantha
  misc_feature (1)..(180): tr|A0A395JHC9|A0A395JHC9_9GAMM GTP cyclohydrolase 1 OS= Arenicella xantha OX=644221 GN=folE PE=3 SV=1
MEEAYRKIIEECGEDLTRPGLVDTPKRAASAMKFLTRGYDQKLDDVINNALFPSDSREMVIVKDIELYSMCEHHLLPFIGRAHVAYIPNGKVLGLSKIARIVDMYARRMQIQEQLTTEIAETIREVTGAEGVGVIIEAKHMCMMMRGVEKQNSSMKTSSMLGIFRSNQSTRSEFLSLVSN

SEQ ID NO: 4766 - protein, 434 aa, Arenimonas caeni
  misc_feature (1)..(434): tr|A0A2P6M6L8|A0A2P6M6L8_9GAMM GTP cyclohydrolase FolE2 OS=Arenimonas caeni OX=2058085 GN=folE2 PE=3 SV=1
MASPPPRSPPAGASLCCATGPASCSPRCRRRGTRCCIVVFAAVSTVPAWPGWPPAAASTRRRPSPRCGGPGASRAPRPDTQRCIRRAGNGPRLDVTCIAPHLALTASPTRRAALAPSNHENTARVLPDIANEARAALAGALDWVGMGEIEMPVVLAGDGGRSVAKVNAFVNLTQPDVRGIHMSRLYLHVDKMLSNEPASPASLRRLLKDFLDSHAGLSDRAMVSLRFEHLVRRKALASDNSGWKAYPVSITAVMDRGHFALELGLSVAYSSTCPCSAALARQLIQEQFEADFAAGKALDREAVLAWLGSEQGIRATPHSQRSHAEVKLRLVPSFQDFPIVEAIDRIEDALKTPVQTAVKRVDEQAFALLNGQNLMFCEDAARRIQSTLRKDERIADFWLRVSHLESLHPHDAVAVATKGVAGGYTALPDGLAAR

SEQ ID NO: 4767 - protein, 194 aa, Arenimonas caeni
  misc_feature (1)..(194): tr|A0A2P6M7E5|A0A2P6M7E5_9GAMM GTP cyclohydrolase 1 OS= Arenimonas caeni OX=2058085 GN=folE PE=3 SV=1
MSKPVNQAEAEEAVRTLLRWAGEDPAREGLLDTPRRVAEAYGDWFRGYREDPTAYLARTFEEVEGYDEMIVLRDIEFESHCEHHMAPIIGKAHIGYLPSGKVVGISKLARVVEAYARRFQVQEKMTAQIARCIQDVLQPRGVGVVIEGAHECMTTRGIHKRGVSMVTSKMLGSFREDARTRAEFLRFIDVGPGR

SEQ ID NO: 4768 - protein, 194 aa, Arenimonas composti
  misc_feature (1)..(194): tr|A0A091BGB0|A0A091BGB0_9GAMM GTP cyclohydrolase 1 OS= Arenimonas composti TR7-09 = DSM 18010 OX=1121013 GN=fo lE PE=3 SV=1
MNEPVTREQAEDAVRVLLRWAGEDPAREGLVDTPKRVAKAYRDWFSGYGIDPTEYLARTFEEVAGYDEMIVLRDIEYESHCEHHMAPIIGKVHIGYLPDGKVVGISKLARVVEAYARRFQVQEKMTAQIARCIQDVLQPRGVGVVVEGAHECMTTRGIHKRGVSMITSKMLGTFRDDARTRSEFLQFIDVGPGR

SEQ ID NO: 4769 - protein, 323 aa, Arenimonas composti
  misc_feature (1)..(323): tr|A0A091BH26|A0A091BH26_9GAMM GTP cyclohydrolase FolE2 OS=Arenimonas composti TR7-09 = DSM 18010 OX=1121013 G N=folE2 PE=3 SV=1
MAPFDQTSTARALPDIAADGRPALAGALDWVGMGRIEMPVSLQADDGRVVTSPAKVDAFVNLRREDARGIHMSRLYLHVDRMLSAEPVTPAGLRRLLKDFLESHAGLSDRALLRLQFDHLVRRKALASDNSGWKAYPVTLTAVMERGHFALELGLQVQYSSTCPCSAALARQLIQQQFSADFAAGLLDREAVLAWLGSEQGIVATPHAQRSIAEVKLRLVPAFADIPIVGFIDRIEAALKTPVQTAVKRVDEQAFALLNGQNLMFCEDAARRVQQALDVDERIADFLVRVAHQESLHPHDAVAVASKGVAGGYSTLPDGLVPR

SEQ ID NO: 4770 - protein, 194 aa, Arenimonas donghaensis
  misc_feature (1)..(194): tr|A0A087MGY6|A0A087MGY6_9GAMM GTP cyclohydrolase 1 OS= Arenimonas donghaensis DSM 18148 = HO3-R19 OX=1121014 G N=folE PE=3 SV=1
MSDPVTQDQAEEAVRTLLRWAGEDPAREGLIDTPRRVAKAYGDWFSGYRVDPREYLARTFEEVEGYDELIVLRDIEFESHCEHHMAPIIGKAHIGYLPAGKVVGISKLARVVEAYARRFQVQEKMTAQIANCIQDVLQPRGVGVVVEGAHECMTTRGIHKRGVSMITSKMLGGFREDARTRAEFLRFIDVGPGR

SEQ ID NO: 4771 - protein, 324 aa, Arenimonas donghaensis
  misc_feature (1)..(324): tr|A0A087ML82|A0A087ML82_9GAMM GTP cyclohydrolase FolE2 OS=Arenimonas donghaensis DSM 18148 = HO3-R19 OX=11210 14 GN=folE2 PE=3 SV=1
MAPSNLDNTARVLPDVANEPRAALAGALDWVGMGEIEMPVTLVGDGGRQSTAAARVNAFVNLAQPDVRGIHMSRLYLHVDKLLSSEPATPTSLRRLLKEFLDSHAGLSDRAMVSLRFEHLVRRPALASDNSGWKAYPVTITAVMDRGHFAVELGLSVAYSSTCPCSAALARQLIQEQFEADFAAGKPLDRDAVLAWLGTEQGIRATPHSQRSHAEVKLRLVPSFQDFPVIDAIDRIEAALKTPVQTAVKRVDEQAFALLNGQNLMFCEDAARRIKAALQDDERISDFWLRASHLESLHPHDAVAVATKGVAGGYSALPEGLAPR

SEQ ID NO: 4772 - protein, 324 aa, Arenimonas malthae
  misc_feature (1)..(324): tr|A0A091B959|A0A091B959_9GAMM GTP cyclohydrolase FolE2 OS=Arenimonas malthae CC-JY-1 OX=1384054 GN=folE2 PE=3 SV=1
MAPSNLDNTARVLPDVAKEAQPAHAGVLDWVGMGEIEMPVSLAGDDGRTSTAGARVNAFVNLKRPDVRGIHMSRLYLHVDKALSNEPATPGAVRRLLKDFLESHADLSDRAMVSLRFEHLVRRPALASDNSGWKTYPVSITGVMDRGQFALELGLTVAYSSTCPCSAALARQLIQEQFANDFAEGGTLDREAVLAWLGTEQGIRATPHSQRSYAEVKLRLVPSFQNFPIVEIIDRIEQALKTPVQTAVKRVDEQAFALLNGQNLMFCEDAARRMQAALERDERISDFWLRASHHESLHPHDAVAVATKGVPGGYTALPDGLASR

SEQ ID NO: 4773 - protein, 194 aa, Arenimonas malthae
  misc_feature (1)..(194): tr|A0A091BGX2|A0A091BGX2_9GAMM GTP cyclohydrolase 1 OS= Arenimonas malthae CC-JY-1 OX=1384054 GN=folE PE=3 SV=1
MTKPVTQADAENAVRVLLQWAGEDPAREGLLDTPRRVAEAYGDWFSGYREDPRAYLSRTFEEVAGYDEMIVLRDIEFESHCEHHMAPIIGKAHIGYLPAGKVVGISKLARVVEAYARRFQVQEKMTAQIARCIEEVLQPRGVGVVVVGAHECMTTRGIHKRGVSMVTSKMLGDFRDDARTRSEFLKFIDVGPGR

SEQ ID NO: 4774 - protein, 312 aa, Arenimonas metalli
  misc_feature (1)..(312): tr|A0A091B1D5|A0A091B1D5_9GAMM GTP cyclohydrolase FolE2 OS=Arenimonas metalli CF5-1 OX=1384056 GN=folE2 PE=3 S V=1
MPDIAAEARPALSGVLDWVGMGEIEMPVALQADDGRTVSSGARVNAFVNLKRGDVRGIHMSRLYLHVDKALSSEPVTPASIRRLLKDFLESHADLSDRAMVSLRFDHLVRRAALASDNSGWKSYPVSITGVMDRGHFALELGVEAAYSSTCPCSAALARQLIQEQFDADFAAGKPLDRDAVMAWLGSEQGIRATPHSQRSFATVKLRLVPSFADFPIVEIIDRIENALKTPVQTAVKRVDEQAFALLNGQNLMFCEDAARRIQDALDQDERISDFWLRASHHESLHPHDAVAVATKGIPGGYTAVPDGLQSR

SEQ ID NO: 4775 - protein, 193 aa, Arenimonas metalli
  misc_feature (1)..(193): tr|A0A091AVH1|A0A091AVH1_9GAMM GTP cyclohydrolase 1 OS= Arenimonas metalli CF5-1 OX=1384056 GN=folE PE=3 SV=1
MDKPSKEEAEAAVRTLLRWAGEDPSREGLLDTPRRVVDAYGDWFSGYGEDPRGYLERTFEEVAGYDEMIVLRDIEFESHCEHHMAPIIGKAHIGYLPRGKVVGISKLARVVEAYARRFQVQEKMTAQIARCIEEVLQPRGVGVVVVGAHECMTTRGIHKRGVSMVTSKMLGDFRDDARTRAEFLRFIEVGPGR

SEQ ID NO: 4776 - protein, 314 aa, Arenimonas oryziterrae
  misc_feature (1)..(314): tr|A0A091AW92|A0A091AW92_9GAMM GTP cyclohydrolase FolE2 OS=Arenimonas oryziterrae DSM 21050 = YC6267 OX=112101 5 GN=folE2 PE=3 SV=1
MAPINQENLARVLPDIANEARPSVAGALEWVGMGEIHAPVGVVGADGQTITSGARVNAFVNLTRPEARGIHMSRLYLHVDKALSSEPVSPCSIRRLLKDFLDSHADLSDRAMLQIHFDYLVRRPALVSDNTGWKSYPVSVNALLDRGQFSLEVGVDVTYSSTCPCSAALARQLIQERFREDFAAGSPLDHDAVLQWLGSEQGIMATPHSQRSTAEVKVRLVPSFQNLPFIDIIDRIEAALKTPVQTAVKRVDEQAFARLNGQNLMFCEDAARRMQKTLDEDERVADFWVRATHFESLHAHNAVAVATKGVAGGY

SEQ ID NO: 4777 - protein, 193 aa, Arenimonas oryziterrae
  misc_feature (1)..(193): tr|A0A091AU73|A0A091AU73_9GAMM GTP cyclohydrolase 1 OS= Arenimonas oryziterrae DSM 21050 = YC6267 OX=1121015 GN =folE PE=3 SV=1
MSEPTTQAEAEAAVRVLLRWAGEDPAREGLIDTPKRVAKAYKDWFSGYGEDPAEYLARTFEEVAGYDEMIVLRDIEFESHCEHHMAPIIGKAHVGYLPDGKVVGISKLARVVETYARRFQVQEKMTAQIARCIEHVLQPRGVAVVIEGAHECMTTRGIHKRGVSMVTSKMLGAFRDDARTRMEFLQFIDMSGR

SEQ ID NO: 4778 - protein, 312 aa, Arenimonas sp.
  misc_feature (1)..(312): tr|A0A352QUR1|A0A352QUR1_9GAMM GTP cyclohydrolase FolE2 OS=Arenimonas sp. OX=1872635 GN=folE2 PE=3 SV=1
MPDVAKEAQPAHAGVLDWVGMGEIEMPVSLAGDDGRTTTAGARVNAFVNLKRPDVRGIHMSRLYLHVDKALSNEPATPGAVRRLLKDFLESHADLSDRAMVSLRFEHLVRRPALASDNSGWKTYPVSITGVMDRGQFALELGLTVAYSSTCPCSAALARQLIQEQFANDFAEGGTLDREAVLAWLGTEQGIRATPHSQRSYAEVKLRLVPSFQNFPIVEIIDRIEQALKTPVQTAVKRVDEQAFALLNGQNLMFCEDAARRMQAALERDERISDFWLRASHHESLHPHDAVAVATKGVPGGYTALPDGLASR

SEQ ID NO: 4779 - protein, 197 aa, Arenimonas sp.
  misc_feature (1)..(197): tr|A0A5B2Z5E2|A0A5B2Z5E2_9GAMM GTP cyclohydrolase 1 OS= Arenimonas sp. 3729k OX=2608255 GN=folE PE=3 SV=1
MSRKEKTVSQAEAEEAVRTLLRWAGEDPDREGLLDTPRRVVEAYGDWFRGYREDPHDYLARTFEEVAGYDEMIVLRDIEFESHCEHHMAPIIGKVHIGYLPDGKVVGISKLARVVEAYARRFQVQEKMTAQIARCIQDVLQPRGVGVVVEGAHECMTTRGIHKRGVGMVTSKMLGSFREDARTRAEFLRFIDVGPGR

SEQ ID NO: 4780 - protein, 225 aa, Arenitalea lutea
  misc_feature (1)..(225): tr|A0A1M6FZZ1|A0A1M6FZZ1_9FLAO GTP cyclohydrolase 1 OS= Arenitalea lutea OX=1178825 GN=folE PE=3 SV=1
MKFDNNLEDFDALGNEHIGTSENTPMRNDAFKLSNEEKIDIIKDDVRHIMETLGLDLTDDSLKGTPNRVAKMFVKEIFGGLDPNKKPSASTFENKYKYGEMLVEKNITVYSTCEHHLLPIVGRAHIAYISNGTVVGLSKMNRIVDYFAKRPQVQERLTIQVVRELQEVLGTKDVACVIDAKHLCVNSRGIRDIESSTVTSEFGGKFKDMATRREFLDYIKLDTKF

SEQ ID NO: 4781 - protein, 231 aa, Arenitalea lutea
  misc_feature (1)..(231): tr|A0A1M6CAY7|A0A1M6CAY7_9FLAO GTP cyclohydrolase 1 OS= Arenitalea lutea OX=1178825 GN=folE PE=3 SV=1
MEIEKLITKKNGNKLNGFTLEDIGNDHLFTGLETPMKPDAFKLSDSEKKARIAILFEEIMDVMGLDLNDDSLQGTPERVAKMYIDEIFSGLNPANKPKVALFDNKYQYNQMLIEKNITFYSNCEHHFVPIIGKAHVAYISSGKVIGLSKLNRIVQYYAKRPQVQERLTNQIANELKSILETDNVAVIIDAKHLCVSSRGIKDDTSSTVTAYYGGQFNTSEKITELQNYINT

SEQ ID NO: 4782 - protein, 260 aa, Armatimonadetes bacterium
  misc_feature (1)..(260): tr|A0A3D4ZRZ2|A0A3D4ZRZ2_9BACT GTP cyclohydrolase FolE2 OS=Armatimonadetes bacterium OX=2033014 GN=folE2 PE=3 SV=1
MKDVASEVDARGITIDRVGIRDLHLPVRIRARDGGYARVLGRVDAAVELPGIQRGTHMSRFVNTLSEWSKQPVSVIEIEHTLRAMLERFAAPAAEVVLQFKYFLAKQAPASGRVSELDYDCAFEGRISSEGFRFVLGASVPIMTLCPCSKEISERGAHSQRATLSVRVNARPGVILWLEELIPLLEQQGSCEIYPLLKRADEKVVTETAYDNPKFVEDVVRDTIVALRGIPGVIGCSAECESMESIHNHTAYAYAEHGEL

SEQ ID NO: 4783 - protein, 189 aa, Armatimonadetes bacterium
  misc_feature (1)..(189): tr|A0A1Q7QQJ5|A0A1Q7QQJ5_9BACT GTP cyclohydrolase 1 OS= Armatimonadetes bacterium 13_1_40CM_3_65_7 OX=1805024 G N=folE PE=3 SV=1
MDKPVIERAVHQIIEAIGEDPKREGLIGTPRRIAEMYEELFAGLKEDPRELLEVGFDDEDHHELVIVKDIPFYSMCEHHFLPFHGVAHVGYIPKGRILGVSKVARLVEILARRPQVQERLTTQIADFLCQGGLNAAGAGVVIEAEHLCVTMRGIKKPGSKVVTSATRGVFREDARTRAEFFAIVEGKRS

SEQ ID NO: 4784 - protein, 272 aa, Aromatoleum aromaticum
  misc_feature (1)..(272): sp|Q5P229|GCH4_AROAE GTP cyclohydrolase FolE2 OS=Aromat oleum aromaticum (strain EbN1) OX=76114 GN=folE2 PE=3 S V=2
MTSQQAHAIPDVQNLNDSRKLAIDKVGIKSIRHPVRVSDKNGGVQHTIAVFNMYVGLPHNFKGTHMSRFIEIINGNEREISVESIEPMLREMVKRLEAETGQIELTFPYFINKSAPISGVQSLMDYEVTFTAEIREGGAYTFTMKTVVPVTSLCPCSKKISEYGAHNQRSHVTVTAQTNSFLWIEELVQLVESQASCQLYGLLKRPDEKYVTEHAYDNPKFVEDMVRDVAGLLNAEARIDCYRVESENFESIHNHSAYALIECDKRLVVGAN

SEQ ID NO: 4785 - protein, 216 aa, Aromatoleum aromaticum
  misc_feature (1)..(216): tr|Q5NZ59|Q5NZ59_AROAE GTP cyclohydrolase 1 OS=Aromatol eum aromaticum (strain EbN1) OX=76114 GN=folE PE=3 SV=1
MSDIHDQHQHPQPPSAAGIGIPRSGSFDPAAFERAVNDLLRACGVAPDAIHTGKTSTRVRELWQRRLLGGYDMDPAEALGDGFDDDRTDMVVIRGIAVHGVCPHHLVPFRGVAHVAYLPGGRLHGFGRIARLVDAIGHRFTYQEWMTRDIADALLRHGHARGAACIVEAEQLCLLLGEDRRGDERVVTQAFAGEFETREHLRGEFLHAISGRTSGR

SEQ ID NO: 4786 - protein, 246 aa, Arsenicibacter rosenii
  misc_feature (1)..(246): tr|A0A1S2VFX6|A0A1S2VFX6_9BACT GTP cyclohydrolase 1 OS= Arsenicibacter rosenii OX=1750698 GN=folE PE=3 SV=1
MKPNGTLLNTRPLNGNGKHNDFELVDDLHAEEIGESHAATSIETPMRPDAFAMDDDHKIELITEHFREIMNILGLDLTDDSLKGSPRRVAKMYVKEAFSGLNPANKPKPTLFDNKFKYNEMLVEKDILVQSYCEHHFVPIIGKAHVAYISSGKVIGLSKLNRIVQYYAKRPQVQERLTVQIANELKDVLETENVAVIIDAKHLCVSTRGVRDVHSSTVTAAYHGKFEEEATRQEFLRYISGMNATL

SEQ ID NO: 4787 - protein, 205 aa, Arsenicicoccus sp.
  misc_feature (1)..(205): tr|A0A2W6WBX9|A0A2W6WBX9_9MICO GTP cyclohydrolase 1 OS= Arsenicicoccus sp. OX=1872639 GN=folE PE=3 SV=1
MSTPATPEVTAGGQPVLQGVDHARIEAAVREILLAVGEDPDRDGLQDTPARVARSYAEIFGGLRQDPRAVLGTTFDVDHDEMILVKDISLYSVCEHHLVPFHGSAHVAYIPGADGRVVGLSKLARLVDVYARRPQVQERLTTQIADALEDHLAPRGVLVVVEAEHLCMSMRGVRRPGARTLTSTVRGQLRNQATRAEAMSLITGR

SEQ ID NO: 4788 - protein, 191 aa, Arsenicicoccus sp.
  misc_feature (1)..(191): tr|A0A0K1FD91|A0A0K1FD91_9MICO GTP cyclohydrolase 1 OS= Arsenicicoccus sp. oral taxon 190 OX=1658671 GN=folE PE =3 SV=1
MVVDHARAEAAVRELLLAIGEDPDREGLRNTPARVARAYDEMFAGLRQDPGAVLDAVFEIGGHSELIMVRDIEVYSTCEHHLVPFHGVAHVGYIPGKDGRVTGLSKLARLVDVYAKRPQVQERLTTQIADALIDHLNPGGVIVVIECEHLCMSMRGVRKPGSRTLTSAVRGQLRDPATRAEAMQLALGGRG

SEQ ID NO: 4789 - protein, 207 aa, Arsenicitalea aurantiaca
  misc_feature (1)..(207): tr|A0A433XG37|A0A433XG37_9RHIZ GTP cyclohydrolase 1 OS= Arsenicitalea aurantiaca OX=1783274 GN=folE PE=3 SV=1
MDASVKTDRVTEISYADLVRPTQEEAEAAVRTLIAWAGDDPDREGLLDTPRRVARAYRELYSGYDLDAREVLARTFKEVGGYDDIVLVRDIPFASHCEHHMVPFTGKAHIAYLPHDGVVGLSKLARVVEIFARRLQTQENLTAQIIDAINEALNPRGAAVMIEAEHMCMSMRGVHAHGVSTLTHRFTGVFAEDRNEQDRFYALVGKR

SEQ ID NO: 4790 - protein, 178 aa, Arsenophonus endosymbiont
  misc_feature (1)..(178): tr|A0A3B0IVH8|A0A3B0IVH8_9GAMM GTP cyclohydrolase 1 typ e 2 OS=Arsenophonus endosymbiont of Aleurodicus floccis simus OX=2152761 GN=ybgI PE=4 SV=1
MTASQALLDEAVKLAADAIIVHHGYFWKNEATIILNMKRNRLKTLLCNDINLYGYHLLIDAQPILGNNVQLANIMVVRFEKLISPLLPMGSFAQPITADDLMSRLTNKLVRQPLYCGDNGPKEISTIDWCTGGGQNFIQQAAEAGVDAFVTGEVSEQTIHIAREMGIHFYGEGHHATE

SEQ ID NO: 4791 - protein, 219 aa, Arsenophonus endosymbiont
  misc_feature (1)..(219): tr|A0A3B0IRF6|A0A3B0IRF6_9GAMM GTP cyclohydrolase 1 OS= Arsenophonus endosymbiont of Aleurodicus floccissimus O X=2152761 GN=folE PE=3 SV=1
MSSLSQEAHLVRKALEVRGLETPLCGQSLSSSNERKQQIEGHMIEIMRLLNLDLKDDSLAETPKRVAKMYVDEIFSGLDYNNFPKITLIENKMDFDEMVTVRDITLTSVCEHHFVTIDGKATVAYIPKDKVIGLSKINRIVQFFSQRPQVQERLTQQILIALQILLGTSNVAVSIDAVHYCVKARGVRDVSSSTMTTSLGGLFKSSQNTRQEFLRNISR

SEQ ID NO: 4792 - protein, 222 aa, Arsenophonus nasoniae
  misc_feature (1)..(222): tr|A0A4P7KWL4|A0A4P7KWL4_9GAMM GTP cyclohydrolase 1 OS= Arsenophonus nasoniae OX=638 GN=folE PE=3 SV=1
MSSLSQEAHLVRKALEARGLETPLCGQSLSSNERKQQIELHMGEIMRLLNLDLSDDSLAETPKRVAKMYVDEIFSGLDYNNFPKITLIENKMDFDEMVTVRDITLTSICEHHFVTIDGKATVAYIPKEKVVGLSKINRIVQFFSQRPQVQERLTQQILIALQTLLGTANVAVSIDAVHYCVKARGVRDVSSSTMTTSLGGLFKSSQNTRQEFLRNISRLRNY

SEQ ID NO: 4793 - protein, 227 aa, Arsenophonus nasoniae
  misc_feature (1)..(227): tr|D2TY99|D2TY99_9GAMM GTP cyclohydrolase 1 OS=Arsenoph onus nasoniae OX=638 GN=folE PE=3 SV=1
MLEKCMSSLSQEAHLVRKALEARGLETPLCGQSLSSNERKQQIELHMGEIMRLLNLDLSDDSLAETPKRVAKMYVDEIFSGLDYNNFPKITLIENKMDFDEMVTVRDITLTSICEHHFVTIDGKATVAYIPKEKVVGLSKINRIVQFFSQRPQVQERLTQQILIALQTLLGTANVAVSIDAVHYCVKARGVRDVSSSTMTTSLGGLFKSSQNTRQEFLRNISRLRNY

SEQ ID NO: 4794 - protein, 222 aa, Arsenophonus sp.
  misc_feature (1)..(222): tr|A0A2A2HIP7|A0A2A2HIP7_9GAMM GTP cyclohydrolase 1 OS= Arsenophonus sp. ENCA OX=1987579 GN=folE PE=3 SV=1
MSSLSQEAHLVRKALEARGLETPLCGQSLSSNERKQQIEGHMIEIMRLLNLDLKDDSLAETPKRVAKMYVDEIFSGLDYNNFPKITLIENKMDFDEMVTVRDITLTSVCEHHFVTIDGKATVAYIPKDKVIGLSKINRIVQFFSERPQVQERLTQQILIALQTLLGTSNVAVSIDAVHYCVKARGVRDVSSSAMTTSLGGLFKSSQNTRQEFLRNISRLRYR

SEQ ID NO: 4795 - protein, 214 aa, Arsukibacterium ikkense
  misc_feature (1)..(214): tr|A0A0M2V197|A0A0M2V197_9GAMM GTP cyclohydrolase 1 OS= Arsukibacterium ikkense OX=336831 GN=folE PE=3 SV=1
MLSEEAIIVRSALEAQGLETPMLDNGLSRDEKYQKISQLMTQVVSTLGLDLADDSLRETPHRIAKMYVDEIFGGLNYQNFPKIALIENKMQVREMVKVKDISFTSTCEHHFVTIDGSATVAYIPQGRIIGLSKINRIVRFFAQRPQVQERLTQQILLALQALLQTKDVAVTMDAVHYCVKSRGVMDMNSKTQTTALGGIFKDDGRTRAEFLARY

SEQ ID NO: 4796 - protein, 214 aa, Arsukibacterium sp.
  misc_feature (1)..(214): tr|A0A0M2VG79|A0A0M2VG79_9GAMM GTP cyclohydrolase 1 OS= Arsukibacterium sp. MJ3 OX=1632859 GN=folE PE=3 SV=1
MLPDEAVLVRSALEAQGLETPMLDNGLSRDEKYQKISKLMTEVISTLGLDLTDDSLSETPHRIAKMYVDEVFSGLNYSNFPKIALIDNKMQVREMVKVKDISFTSTCEHHFVTIDGSATVAYIPQGKIIGLSKINRIVRFFAQRPQVQERLTQQILLALQTLLQTKDVAVTMDAVHYCVKSRGVMDMNSKTQTTALGGIFKDDGRTRAEFLARY

SEQ ID NO: 4797 - protein, 212 aa, Arsukibacterium sp.
  misc_feature (1)..(212): tr|A0A0M2VDI7|A0A0M2VDI7_9GAMM GTP cyclohydrolase 1 OS= Arsukibacterium sp. MJ3 OX=1632859 GN=folE PE=3 SV=1
MLSNEAELVKSALQAKGLETPMRGNGLTREQKYVKINQLMTEVISTLGLDLHDDSLRETPHRIAKMYVDEVFGGLDYGNFPKIALIDNKMRVDEMIKVKNISFNSTCEHHFVTIDGTATVAYIPAERIIGLSKINRIVRFFAQRPQVQERLTQQILIALQTLLNTDNVAVTLNAVHYCVKSRGVMDVNSSTQTTALGGIFKESSRTRAEFLC

SEQ ID NO: 4798 - protein, 205 aa, Arthrobacter agilis
  misc_feature (1)..(205): tr|A0A1Y3M0E7|A0A1Y3M0E7_9MICC GTP cyclohydrolase 1 OS= Arthrobacter agilis OX=37921 GN=folE PE=3 SV=1
MTDFDDEVVEAALVATGSPVDQPRIARAVREILAAIGEDPDRDGLLDTPNRVAKAYAEMFAGLHQDAGEVLSTSFDLNHQELVLVKDIPFYSTCEHHLVPFRGTAHIGYIPSADGRVTGLSKLARLVEVYARRPQVQERLTTQIVDAMMEHLKPKGAIVVIECEHMCMSMRGVRKPGAKTVTSAVRGQIRETATRAEAMSLILGR

SEQ ID NO: 4799 - protein, 186 aa, Arthrobacter agilis
  misc_feature (1)..(186): tr|A0A1Y3M8U1|A0A1Y3M8U1_9MICC GTP cyclohydrolase 1 OS= Arthrobacter agilis OX=37921 GN=folE PE=3 SV=1
MDQDRIQRAVREILAAIGEDPDRDGLLDTPRRVAKAYAEMFAGLHQDAGEVLSTSFDLNHQELVLVKDIPFYSTCEHHLVPFHGAAHVGYIPSEEGRVTGLSKLARLVEVYARRPQVQERLTTQIVDAMMEHLKPKGAIVVIECEHMCMSMRGIRKPGAKTVTSAVRGQIRETATRAEAMSLILGR

SEQ ID NO: 4800 - protein, 200 aa, Arthrobacter alpinus
  misc_feature (1)..(200): tr|A0A1H5E1Q6|A0A1H5E1Q6_9MICC GTP cyclohydrolase 1 OS= Arthrobacter alpinus OX=656366 GN=folE PE=3 SV=1
MSISSAPPPELLDFEDPLTGDSPIDLPRAQAAVAELLRALGRDDNDPHLRDTPRRVAAAYAQMLTPRETSWTTFPNDDGYQGLVLVKDIPFNSLCQHHLLPFRGVAHVGYLPGERLFGLSKLARGVELFARDLQVQERLTQQLANWLEDTLSPRGVGVVMEAEHMCMSLRGVQTAGTLTRTSVFTGLLSDAGPLREQFPH

SEQ ID NO: 4801 - protein, 212 aa, Arthrobacter alpinus
  misc_feature (1)..(212): tr|A0A0U3RBT3|A0A0U3RBT3_9MICC GTP cyclohydrolase 1 OS= Arthrobacter alpinus OX=656366 GN=folE PE=3 SV=1
MTYYDDEHDPTQGGASGAALPGDEFQVDLPRIEAAVREILLAIGEDPERSGLLETPKRVAKAYGEVFAGLHQDPAEVLGVTFDIAHEEMVLVKDIPFYSTCEHHLVPFHGSAHVGYIPALDGRVTGLSKLARLVDIYAKRPQVQERLTTQIADALIEHLKPRGAIVVVECEHMCMSMRGVRKPGAKTVTSAVRGLLHEPATRAEAMSLILGR

SEQ ID NO: 4802 - protein, 213 aa, Arthrobacter bacterium
  misc_feature (1)..(213): tr|A0A3D0ZKR7|A0A3D0ZKR7_9MICC GTP cyclohydrolase 1 OS= Arthrobacter bacterium OX=2053508 GN=folE PE=3 SV=1
MTHFDDDAPASAGHPAEDGSHHKKHENVDRPRIEAAVREILLAIGEDPDRGGLVDTPKRVAKAYAEVFSGLHLDPADVLSTTFDLDHEELVLVKDIPFYSTCEHHLVPFHGVAHVGYIPSHDGKVTGLSKLARLVDIYALRPQVQERLTTQIVEAMVSHLKPRGAIVVVECEHMCMSMRGVRKPGAKTVTSAVRGQLHDPATRAEAMSLILGR

SEQ ID NO: 4803 - protein, 186 aa, Arthrobacter bacterium
  misc_feature (1)..(186): tr|A0A353ZR75|A0A353ZR75_9MICC GTP cyclohydrolase 1 OS= Arthrobacter bacterium OX=2053508 GN=folE PE=3 SV=1
MDRPRIEAAVREILLAIGEDPDRGGLVDTPKRVAKAYAEVFSGLHLDPADVLSTTFDLDHEELVLVKDIPFYSTCEHHLVPFHGVAHVGYIPSHDGKVTGLSKLARLVDIYALRPQVQERLTTQIVEAMVSHLKPRGAIVVVECEHMCMSMRGVRKPGAKTVTSAVRGQLHDPATRAEAMSLILGR

SEQ ID NO: 4804 - protein, 202 aa, Arthrobacter crystallopoietes
  misc_feature (1)..(202): tr|N1UYR6|N1UYR6_9MICC GTP cyclohydrolase 1 OS=Arthroba cter crystallopoietes BAB-32 OX=1246476 GN=folE PE=3 SV =1
MTEYDDVIAELEIDTSIDLPRIEKAVREILIAVGEDPDREGLQDTPKRVARSYAEIFAGLHQDPGDLLATTFDLDHEEMVLVKDIPFYSTCEHHLVPFHGTAHIGYIPSHDGKVTGLSKLARLVEIYARRPQVQERLTTQIVDALVEHLEPKGALVVVECEHMCMSMRGVRKPGAKTVTSAVRGQLREPATRAEAMSLIIGR

SEQ ID NO: 4805 - protein, 202 aa, Arthrobacter crystallopoietes
  misc_feature (1)..(202): tr|A0A1H1CH53|A0A1H1CH53_9MICC GTP cyclohydrolase 1 OS= Arthrobacter crystallopoietes OX=37928 GN=folE PE=3 SV= 1
MTEYDDVIAELEIDSSIDLPRIERAVREILIAVGEDPDREGLVETPRRVAKSYAEVFAGLHQDPAELLATTFDIDHEEMVLVKDIPFYSTCEHHLVPFHGTAHIGYIPSHEGKVTGLSKLARLVEVFARRPQVQERLTTQIVDALMEHLEPKGAIVVVECEHMCMSMRGVRKPGAKTVTSAVRGQLRETATRAEAMSLIIGR

SEQ ID NO: 4806 - protein, 219 aa, Arthrobacter cupressi
  misc_feature (1)..(219): tr|A0A1G8QM45|A0A1G8QM45_9MICC GTP cyclohydrolase 1 OS= Arthrobacter cupressi OX=1045773 GN=folE PE=3 SV=1
MTHIDDDDFSGAFGVVSAGDSGGSAGHGKHSHKVDRPRIEAAVREILIAVGEDPDRGGLLDTPKRVAKAYAEVFAGLHQDPADVLSTTFDLDHEELVLVKDIPFYSTCEHHLVPFHGMAHVGYIPSHDGRVTGLSKLARLVDIYARRPQVQERLTTQIVEALVEHLNPRGAIVVVECEHMCMSMRGIRKPGAKTVTSAVRGQLHDPATRAEAMSLILGR

SEQ ID NO: 4807 - protein, 205 aa, Arthrobacter echini
  misc_feature (1)..(205): tr|A0A4S5E1B4|A0A4S5E1B4_9MICC GTP cyclohydrolase 1 OS= Arthrobacter echini OX=1529066 GN=folE PE=3 SV=1
MTDFDDDEMDAALAAAGQPVDQERIRRAVREILVAIGEDPDRDGLLETPTRVARAYAEIFAGLHQDAGEVLSTSFDLNHQELVLVKDIPFYSTCEHHLVPFHGTAHLGYIPSEEGRVTGLSKLARLVEVFARRPQVQERLTTQIVDAMMEHLTPKGAIVVVECEHLCMSMRGVRKPGAKTVTSAVRGQIRDTATRAEAMSLILGR

SEQ ID NO: 4808 - protein, 197 aa, Arthrobacter echini
  misc_feature (1)..(197): tr|A0A5D0XVM3|A0A5D0XVM3_9MICC GTP cyclohydrolase 1 OS= Arthrobacter echini OX=1529066 GN=folE PE=3 SV=1
MDADLQAVAQPVDQARIRRAVREILVAIGEDPDRDGLLETPTRVAKAYAEIFAGLHQDAGEVLATSFDLNHQELVLVKDIPFYSTCEHHLVPFHGTAHLGYIPSEEGRVTGLSKLARLVEVFARRPQVQERLTTQIVDAMMEHLTPKGAIVVVECEHLCMSMRGVRKPGAKTVTSAVRGQIRDTATRAEAMSLILGR

SEQ ID NO: 4809 - protein, 214 aa, Arthrobacter enclensis
  misc_feature (1)..(214): tr|A0A0V8IML4|A0A0V8IML4_9MICC GTP cyclohydrolase 1 OS= Arthrobacter enclensis OX=993070 GN=folE PE=3 SV=1
MTSFDDDAVPASAAYATEDGSSQASHQKVDRPRIEAAVREILLAIGEDPDRGGLIDTPKRVAKAYAEVFAGLHHDPADVLSTTFDLDHEELVLVKDIPFYSTCEHHLVPFHGVAHIGYIPSHDGRVTGLSKLARLVDIYARRPQVQERLTTEIVEALVQHLKPRGAIVVIECEHMCMSMRGIRKPGAKTVTSAVRGQLHDPATRAEAMSLILGR

SEQ ID NO: 4810 - protein, 186 aa, Arthrobacter glacialis
  misc_feature (1)..(186): tr|A0A2S3ZYQ2|A0A2S3ZYQ2_ARTGL GTP cyclohydrolase 1 OS= Arthrobacter glacialis OX=1664 GN=folE PE=3 SV=1
MDLPRIEAAVREILLAIGEDPERSGLIDTPKRVAKAYAEVFSGLHSDAAEILGTTFDIAHQEMVLVKDIPFYSTCEHHLVPFHGSAHVGYIPGDDGRVTGLSKLARLVDIYAKRPQVQERLTTQIADALVEHLKPRGAIVVIECEHMCMSMRGVRKPGAKTVTSAVRGSLHEPATRAEAMSLILGR

SEQ ID NO: 4811 - protein, 203 aa, Arthrobacter glacialis
  misc_feature (1)..(203): tr|A0A2S3ZZI0|A0A2S3ZZI0_ARTGL GTP cyclohydrolase 1 OS= Arthrobacter glacialis OX=1664 GN=folE PE=3 SV=1
MSISNAPLPDILAFEDPEPLTPGSGVDLPRAQAAITDFLRALGRDDSDPHLLDTPRRVAAAYAEMLTPRETSWTTFPNDDGYQGLVLVKDIPFHSLCQHHLLPFRGVAHVGYLPGERLFGLSKLARGVELFSRDLQVQERLTQQVANWLEATLAPRGVGVVMEAEHLCMSLRGVHTAGTMTRTSVFTGLLADAGPLRGQFPNH

SEQ ID NO: 4812 - protein, 212 aa, Arthrobacter globiformis
  misc_feature (1)..(212): tr|H0QJI8|H0QJI8_ARTGO GTP cyclohydrolase 1 OS=Arthroba cter globiformis NBRC 12137 OX=1077972 GN=folE PE=3 SV= 1
MTHFDDDDLTATADHSAVGGSGHHHKVDRPRIEAAVREILLAIGEDPDRGGLQDTPKRVAKAYAEVFAGLHQDPGSVLGTTFDLDHEELVLVKDIPFYSTCEHHLVPFHGVAHVGYIPSHDGRVTGLSKLARLVDIYARRPQVQERLTTQIVEALVTFLKPRGAIVVVECEHMCMSMRGIRKPGAKTVTSAVRGQLHDPATRAEAMSLILGR

SEQ ID NO: 4813 - protein, 212 aa, Arthrobacter globiformis
  misc_feature (1)..(212): tr|A0A328HLJ0|A0A328HLJ0_ARTGO GTP cyclohydrolase 1 OS= Arthrobacter globiformis OX=1665 GN=folE PE=3 SV=1
MTHFDDDDLTATAEHSAVGGSGHHHKVDKPRIEAAVREILLAIGEDPDRGGLQDTPKRVAKAYAEVFAGLHQDPGSVLGTTFDLDHEELVLVKDIPFYSTCEHHLVPFHGVAHVGYIPSHDGRVTGLSKLARLVDIYARRPQVQERLTTQIVEALVTFLKPRGAIVVVECEHMCMSMRGIRKPGAKTVTSAVRGQLHDPATRAEAMSLILGR

SEQ ID NO: 4814 - protein, 214 aa, Arthrobacter humicola
  misc_feature (1)..(214): tr|A0A315TYT1|A0A315TYT1_9MICC GTP cyclohydrolase 1 OS= Arthrobacter humicola OX=409291 GN=folE PE=3 SV=1
MTSNFDDDVPAPAAASAGGGEAPHPSTKVDRPRIEAAVREILLAIGEDPDRGGLLDTPKRVAKAYAEMFAGLHHDPAEILATTFDLDHEELVLVKDIPFYSTCEHHLVPFHGVAHVGYIPSHDGKVTGLSKLARVVDMFARRPQVQERLTTQIVEALVTHLKPRGAIVVVECEHLCMSMRGIRKPGAKTVTSAVRGQLHDPATRAEAMSLILGR

SEQ ID NO: 4815 - protein, 201 aa, Arthrobacter livingstonensis
  misc_feature (1)..(201): tr|A0A2V5LZ79|A0A2V5LZ79_9MICC GTP cyclohydrolase 1 OS= Arthrobacter livingstonensis OX=670078 GN=folE PE=3 SV= 1
MSISSATLPDLLAFEDPALEVRAPIDLPAAQAAIADFLRALGRDVNDPHLLDTPRRVAAAYAEMLTPRETNWTTFPNDEGYAGLVLVKDVPFHSLCQHHLLPFRGVAHVGYLPGDRLFGLSKLARGVELFARDLQVQERLTQQVADWLEETLSPRGVGVVLEAEHMCMSLRGVQVSGSLTRTSVFTGKLADAGPLRDQFLQ

SEQ ID NO: 4816 - protein, 186 aa, Arthrobacter livingstonensis
  misc_feature (1)..(186): tr|A0A2V5L955|A0A2V5L955_9MICC GTP cyclohydrolase 1 OS= Arthrobacter livingstonensis OX=670078 GN=folE PE=3 SV= 1
MDLPRIEAAVREILLAVGEDPDRSGLEETPKRVAKAYAEVFAGLHQDPADVLGTTFDISHEEMVLVKDIPFYSTCEHHLVPFHGSAHVGYIPSSDGRVTGLSKLARLVDIYARRPQVQERLTSQIADSLVEHLKPRGAIVVIECEHMCMSMRGVRKPGAKTVTSAVRGLLHEPATRAEAMSLILGR

SEQ ID NO: 4817 - protein, 214 aa, Arthrobacter nitrophenolicus
  misc_feature (1)..(214): tr|A0A4R5Y092|A0A4R5Y092_9MICC GTP cyclohydrolase 1 OS= Arthrobacter nitrophenolicus OX=683150 GN=folE PE=3 SV= 1
MTSFDDDDVPASADTLAEDGSSHSKHQKVDRPRIEAAVREILLAIGEDPDRGGLVDTPKRVAKAYAEVFAGLHHDPADVLSTTFDLDHEELVLVKDIPFYSTCEHHLVPFHGMAHVGYIPSHDGKITGLSKLARLVDIYARRPQVQERLTTEIVEALVRHLNPRGAIVVVECEHMCMSMRGIRKPGAKTVTSAVRGQLHDPATRAEAMSLILGR

SEQ ID NO: 4818 - protein, 214 aa, Arthrobacter nitrophenolicus
  misc_feature (1)..(214): tr|L8TMH1|L8TMH1_9MICC GTP cyclohydrolase 1 OS=Arthroba cter nitrophenolicus OX=683150 GN=folE PE=3 SV=1
MTSFDDDDVPASADTLAEDGSSHSKHQKVDRPRIEAAVREILLAIGEDPDRSGLVDTPKRVAKAYAEVFAGLHHDPADVLSTTFDLDHEELVLVKDIPFYSTCEHHLVPFHGMAHVGYIPSHDGKITGLSKLARLVDIYARRPQVQERLTTEIVEALVRHLNPRGAIVVVECEHMCMSMRGIRKPGAKTVTSAVRGQLHDPATRAEAMSLILGR

SEQ ID NO: 4819 - protein, 195 aa, Arthrobacter oryzae
  misc_feature (1)..(195): tr|A0A3N0CJD0|A0A3N0CJD0_9MICC GTP cyclohydrolase 1 OS= Arthrobacter oryzae OX=409290 GN=folE PE=3 SV=1
MTTATASKGVDGPRVEQAVREYLLAIGEDPDRPGLVDTPARVARAAAEIFGGLHEDPLAVLDKTFDLGHGEMVIVKDIPFYSTCEHHLVPFHGVAHVGYIPSAEGLVTGLSKLARLVDVFARRPQVQERLTTQVVDALVSSLRPLGAIVVIECEHLCMSMRGIRKPGAKTITSAVRGELRLPAARAEALSLIHGR

SEQ ID NO: 4820 - protein, 214 aa, Arthrobacter oryzae
  misc_feature (1)..(214): tr|A0A495ESI0|A0A495ESI0_9MICC GTP cyclohydrolase 1 OS= Arthrobacter oryzae OX=409290 GN=folE PE=3 SV=1
MTSNFDDDVPAPAAAPAGDGEAQHAKPKVDRPRIEAAVREILLAIGEDPDRGGLLDTPKRVAKAYAEMFAGLHHDPAEILATTFDLDHEELVLVKDIPFYSTCEHHLVPFHGVAHVGYIPSHDGKVTGLSKLARVVDMFARRPQVQERLTTQIVEALVTHLKPRGAIVVVECEHLCMSMRGIRKPGAKTVTSAVRGQLHDPATRAEAMSLILGR

SEQ ID NO: 4821 - protein, 205 aa, Arthrobacter pityocampae
  misc_feature (1)..(205): tr|A0A2S5IV84|A0A2S5IV84_9MICC GTP cyclohydrolase 1 OS= Arthrobacter pityocampae OX=547334 GN=folE PE=3 SV=1
MTDFDDEVVDAVLVATGSPVDLLRIERAVREILEAIGEDPGRDGLLDTPKRVAKAYAEMFAGLHQDAGEVLSTSFDIGHQELVLVKDIPFYSTCEHHLVPFHGTAHVGYIPSEEGRVTGLSKLARLVEVYARRPQIQERLTSQIVDAMMEHLKPKGAIVVIECEHMCMSMRGVRKPGAKTVTSAVRGQLRETATRAEAMSLILGR

SEQ ID NO: 4822 - protein, 201 aa, Arthrobacter psychrochitiniphilus
  misc_feature (1)..(201): tr|A0A2V3DPX5|A0A2V3DPX5_9MICC GTP cyclohydrolase 1 OS= Arthrobacter psychrochitiniphilus OX=291045 GN=folE PE= 3 SV=1
MTITSTALPDILTLDETEILAVPGIDLPRAQAAIAEFLRALGRDETSPHLLDTPRRVAGAYAEMLTPRETSWTTFPNDDGYQGLVLVKAIPFHSLCQHHLLPFRGVAHVGYLPGDRLFGLSKLARGVELFSRDLQVQERLTQQVADWLEDTLAPRGVGVVMEAEHMCMSLRGVQTAGTLTRTSVFTGLLHEDGPLQRQFPH

SEQ ID NO: 4823 - protein, 186 aa, Arthrobacter psychrochitiniphilus
  misc_feature (1)..(186): tr|A0A2V3DUS3|A0A2V3DUS3_9MICC GTP cyclohydrolase 1 OS= Arthrobacter psychrochitiniphilus OX=291045 GN=folE PE= 3 SV=1
MDLPRIEAAVREILLAIGEDPERSGLLETPKRVAKAYGEVFAGIHQDPAAVLGVTFDISHEEMVLVKDIPFYSTCEHHLVPFHGSAHVGYIPSSDGRVTGLSKLARLVDIYAKRPQVQERLTSQIADALIEHLKPRGAIVVIECEHMCMSMRGVRKPGAKTVTSAVRGLLHEPATRAEAMSLILGR

SEQ ID NO: 4824 - protein, 200 aa, Arthrobacter psychrolactophilus
  misc_feature (1)..(200): tr|A0A2V5JNE2|A0A2V5JNE2_9MICC GTP cyclohydrolase 1 OS= Arthrobacter psychrolactophilus OX=92442 GN=folE PE=3 S V=1
MSISSAQLPELLSFEDPQTENPAIDLPRAQNAIAEFLRALGRDENDPHLLDTPRRVAAAYAEMLTPRETSWTTFPNEDGYQGLVLVKDIPFHSLCQHHLLPFRGVAHVGYLPGDRLFGLSKLARGVELFARDLQVQERLTQQIANWLEDTLAPRGVGVVMEAEHMCMSLRGVQTAGTMTRTSVFTGILSDAGPLREQFPH

SEQ ID NO: 4825 - protein, 186 aa, Arthrobacter psychrolactophilus
  misc_feature (1)..(186): tr|A0A2V5IV32|A0A2V5IV32_9MICC GTP cyclohydrolase 1 OS= Arthrobacter psychrolactophilus OX=92442 GN=folE PE=3 S V=1
MDLPRIEAAVREILIAVGEDPDRGGLLETPKRVAKAYAEVFAGLHQDPAEVLGTTFDIAHEEMVLVKDIPFYSTCEHHLVPFHGSAHVGYIPSSDGKVTGLSKLARLVDIYAKRPQVQERLTTQIADALIEHLKPRGAIVVVECEHMCMSMRGVRKPGAKTVTSAVRGLLHEPATRAEAMSLILGR

SEQ ID NO: 4826 - protein, 203 aa, Arthrobacter rhombi
  misc_feature (1)..(203): tr|A0A1R4ESZ7|A0A1R4ESZ7_9MICC GTP cyclohydrolase 1 OS= Arthrobacter rhombi OX=71253 GN=folE PE=3 SV=1
MSTLEEEGTIVSETANPVDQERIARAVREILFAIGEDPDRDGLVDTPKRVAKAYTEFFAGLHGDAGELLSTTFDIDHDELVLVKDIPFYSTCEHHLVPFHGSAHIGYIPGPDGKVTGLSKLARLVELYARRPQVQERLTTQIVMALMDHLQPRGAIVVIECEHMCMSMRGVQKPGAKTVTSAMRGQLRDPATRAEAMSLILGK

SEQ ID NO: 4827 - protein, 204 aa, Arthrobacter saudimassiliensis
  misc_feature (1)..(204): tr|A0A078MP05|A0A078MP05_9MICC GTP cyclohydrolase 1 OS= Arthrobacter saudimassiliensis OX=1461584 GN=folE PE=3 SV=1
MTDFDDELAAMDLAASDAIDQPRIERAVREILLAIGEDPDRDGLQDTPKRVARAYAEVFAGLHESPEDLLATTFDLDHEEMVLVKDIPFYSTCEHHLVPFHGTAHIGYIPSHEGKVTGLSKLARLVELYARRPQVQERLTTQIVDALVENLQPRGAIVVIECEHLCMSMRGVRKPGARTVTSAVRGQLRETATRAEAMSLILGR

SEQ ID NO: 4828 - protein, 186 aa, Arthrobacter sp.
  misc_feature (1)..(186): tr|J7LKW5|J7LKW5_9MICC GTP cyclohydrolase 1 OS=Arthroba cter sp. Rue61a OX=1118963 GN=folE PE=3 SV=1
MDRPRIEAAVREILLAIGEDPERGGLLDTPKRVAKAYAEMFAGLHQHPVDVLSTTFDLDHEELVLVKDIPFYSTCEHHLVPFHGVAHVGYIPSHDGKVTGLSKLARLVDIYARRPQVQERLTTQIVEALVTHLNPRGAIVVVECEHMCMSMRGIRKPGAKTVTSAVRGQLHDPATRAEAMSLILGR

SEQ ID NO: 4829 - protein, 205 aa, Arthrobacter sp.
  misc_feature (1)..(205): tr|A0A496PG29|A0A496PG29_9MICC GTP cyclohydrolase 1 OS= Arthrobacter sp. JZ R-183 OX=2283632 GN=folE PE=3 SV=1
MSSSHDFEVIDPQTVIDPNVDQPRIAAAVHEILLAIGEDPERDGLKDTPARVAKAYAEIFSGLHQDPAAILDKSFDIGHSELVVVKDIPFYSTCEHHLVPFHGRAHVGYIPGEGGKVTGLSKLARLVDLFAKRPQVQERLTTQIVEALETHLEPRGAIVVVECEHLCMSMRGVKKPGTLTTTSAVRGQLREPATRAEAMSLILGR

SEQ ID NO: 4830 - protein, 205 aa, Arthrobacter subterraneus
  misc_feature (1)..(205): tr|A0A1G8IIU7|A0A1G8IIU7_9MICC GTP cyclohydrolase 1 OS= Arthrobacter subterraneus OX=335973 GN=folE PE=3 SV=1
MTDFDDQMVDAALAASGSTVDQPRIERAVREILAAIGEDPERDGLLDTPKRVARAYAEFFAGLHQNPKDVLSTTFELDHEELVLVKDIPFYSTCEHHLVPFHGTAHIGYIPSAEGKVTGLSKLARLVEIYARRPQVQERLTTQIVDALMHHLQPKGAIVVIECEHMCMSMRGIRKPGAKTVTSAVRGQVRDAATRAEAMSLILGR

SEQ ID NO: 4831 - protein, 200 aa, Arthrobacter subterraneus
  misc_feature (1)..(200): tr|A0A1G8H2P0|A0A1G8H2P0_9MICC GTP cyclohydrolase 1 OS= Arthrobacter subterraneus OX=335973 GN=folE PE=3 SV=1
MSSHSEVALRLLEEDIEPDVAGAIDLPAARSAVADLLRALGRDVNDPHLSDTPRRVAGAFEEMLTPRATSWTTFPNDEGYSDLVLVRNIPFNSLCQHHLLPFRGIAHIGYLPGARLLGLSKLARALEQFSRDLQVQERLTKQVADWLSDLLNPRGVGVVLEAEHLCMSLRGVQSAGTTTRTSTFYGELAVAGPLRDQFPN

SEQ ID NO: 4832 - protein, 207 aa, Arthrobacter woluwensis
  misc_feature (1)..(207): tr|A0A1H4JV43|A0A1H4JV43_9MICC GTP cyclohydrolase 1 OS= Arthrobacter woluwensis OX=156980 GN=folE PE=3 SV=1
MTHIDDDVPNTASDAASADGPMDLPRIEAAVREILIAVGEDPDRSGLADTPARVARAYAEMFSGIHQDPGSVLQTMFDMDHEELVLVKDIPFYSTCEHHLVPFHGVAHVGYIPSHDGMVTGLSKLARLVDIIARRPQVQERLTTQIVEALVTHLKPRGAIAVVECEHMCMSMRGIRKPGAKTVTSAVRGQLHDPATRAEAMSLILGR

SEQ ID NO: 4833 - protein, 186 aa, Arthrobacter woluwensis
  misc_feature (1)..(186): tr|A0A2T3BWP2|A0A2T3BWP2_9MICC GTP cyclohydrolase 1 OS= Arthrobacter woluwensis OX=156980 GN=folE PE=3 SV=1
MDLPRIEAAVREILIAVGEDPDRSGLADTPARVARAYAEMFSGIHQDPGSVLQTMFDMDHEELVLVKDIPFYSTCEHHLVPFHGVAHVGYIPSHDGMVTGLSKLARLVDIIARRPQVQERLTTQIVEALVTHLKPRGAIAVVECEHMCMSMRGIRKPGAKTVTSAVRGQLHDPATRAEAMSLILGR

SEQ ID NO: 4834 - protein, 215 aa, Arthrospira maxima
  misc_feature (1)..(215): tr|B5VY61|B5VY61_LIMMA GTP cyclohydrolase 1 OS=Arthrosp ira maxima CS-328 OX=513049 GN=folE PE=3 SV=1
MTLAQELQASINGNLPNLTTETAPLVSEEEMRQAVRTLLLGLGENPDREGLKDTPKRVVKALKFLTSGYHQSLDELLNGAVFHENTDEMVLVRDIDIFSSCEHHILPILGRAHVAYIPDGKVIGLSKVARICEMYARRLQVQERLTAQIADALQGLLKPKGVAVVVEASHMCMVMRGVQKVGSWTSTSAVRGVFSEDAKTRQEFMSLIRHTPNFS

SEQ ID NO: 4835 - protein, 239 aa, Arthrospira maxima
  misc_feature (1)..(239): tr|B5W0I2|B5W0I2_LIMMA GTP cyclohydrolase 1 OS=Arthrosp ira maxima CS-328 OX=513049 GN=folE PE=3 SV=1
MTIASSNSLNSADTSNPNGMKNVDNQSRIATRPDRSSSWHASPQTLGRREVTQEEMMGAVETILLGVGEDPEREGLLKTPKRVADAMRFLTNGYSQSLEELVNDAIFDEGHEEMVLVRDINFFSLCEHHMLPFMGKAHVAYIPNQKVIGLSKLARVVEMYSRRLQVQERLTRQVAEAIQSVLEPQGVAVVMEASHMCMAMRGVQKPGSWTVTSAMIGVFQDDQKTREEFLNLIRHQPSF

SEQ ID NO: 4836 - protein, 239 aa, Arthrospira platensis
  misc_feature (1)..(239): tr|K1X045|K1X045_ARTPT GTP cyclohydrolase 1 OS=Arthrosp ira platensis C1 OX=459495 GN=folE PE=3 SV=1
MTIASSNSFNSADTSNPNGMKNVDNQSRIATRPDRSSSWHASPQNLGRREVTQEEMMGAVETILLGVGEDPEREGLLKTPKRVAEAMRFLTNGYSQSLEELVNDAIFDEGHEEMVLVRDINFFSLCEHHMLPFMGKAHVAYIPNQKVIGLSKLARVVEMYSRRLQVQERLTRQVAEAIQSVLEPQGVAVVMEASHMCMAMRGVQKPGSWTVTSAMIGVFQDDQKTREEFLNLIRHQPSF

SEQ ID NO: 4837 - protein, 215 aa, Arthrospira platensis
  misc_feature (1)..(215): tr|D5A155|D5A155_ARTPN GTP cyclohydrolase 1 OS=Arthrosp ira platensis (strain NIES-39 / IAM M-135) OX=696747 GN =folE PE=3 SV=1
MTLAKEIPTSLNGNLPNFSTEAAPVVSEEEMRQAVRTLLLGLGENPDREGLKDTPKRVVKALKFLTSGYHQSLDELLNGAVFHENTDEMVLVRDIDIFSSCEHHILPILGRAHVAYIPDGKVIGLSKVARICEMYGRRLQVQERLTAQIADALQGLLKPKGVAVVVEASHMCMVMRGVQKVGSWTSTSAVRGVFSEDAKTRQEFMSLIRHTPNFS

SEQ ID NO: 4838 - protein, 215 aa, Arthrospira sp.; identical to SEQ ID NO: 4834
  misc_feature (1)..(215): tr|A0A328V3A9|A0A328V3A9_9CYAN GTP cyclohydrolase 1 OS= Arthrospira sp. O9.13F OX=1982223 GN=folE PE=3 SV=1

SEQ ID NO: 4839 - protein, 187 aa, Asaccharobacter celatus
  misc_feature (1)..(187): tr|A0A369P341|A0A369P341_9ACTN GTP cyclohydrolase 1 OS= Asaccharobacter celatus OX=394340 GN=folE PE=3 SV=1
MDTAKIEAGVRLILEGVGEDPEREGLRETPARVARMYEEVLGGLEEDPSRHFDVTFDEGHEEIVLVGDIPFFSMCEHHLAPFFGKAHVAYIPGEDGRICGISKLARLVDGFAKRPQVQERLTGQIADTLVEALHPAGVIVVLEAEHMCMSMRGVKKPGAKTTTRAVRGCFETDAAARAEALSLIFRH

SEQ ID NO: 4840 - protein, 187 aa, Asaccharobacter celatus
  misc_feature (1)..(187): tr|A0A369P547|A0A369P547_9ACTN GTP cyclohydrolase 1 OS= Asaccharobacter celatus OX=394340 GN=folE PE=3 SV=1
MDTAKIEAGVRLILEGVGEDPEREGLRETPARVARMYEEVLGGLEEDPSRHFDVTFDEGHEEIVLVGDIPFFSMCEHHLAPFFGKAHVAYIPGEDGRICGISKLARLVDGFAKRPQVQERLTGQIADTLVEALHPAGVIVVLEAEHMCMSMRGVKKPGAKTTTRAVRGCFETDADARSEALSLIFRH

SEQ ID NO: 4841 - protein, 191 aa, Asaccharospora irregularis
  misc_feature (1)..(191): tr|A0A1M5N8D6|A0A1M5N8D6_9FIRM GTP cyclohydrolase 1 OS= Asaccharospora irregularis DSM 2635 OX=1121321 GN=folE PE=3 SV=1
MMNNVDKEKIKNAVRDILEAIGENPDREGLLETPARVARMYEEIYSGINQDPREHLKVIFQDEKHEEMVLVKDIPFHSCCEHHLVPFFGKAHIAYIPKDGRLTGLSKLARVIETLAKRPQLQERITKEAAEILMQELKPYGVIVVVEAEHMCMTMRGVKKPGSKTITSAVRGVFETEIATRSEAMSLINMR

SEQ ID NO: 4842 - protein, 218 aa, Asaia bogorensis
  misc_feature (1)..(218): tr|A0A0P0YEG0|A0A0P0YEG0_9PROT GTP cyclohydrolase 1 OS= Asaia bogorensis NBRC 16594 OX=1231624 GN=folE PE=3 SV= 1
MTKPTADLVALDAARHKGQGGERPIAPIARPDDAETRIAGAVREILEALGEDPDREGLFETPGRVARMYLDVLGGLHEDPRDHLHKQFLADQHEGAVIVRDIGFHSMCEHHLLPFFGKAHVAYLPEGGRLTGLSKIARTVNVLARRPQLQERLTDQIAASIIEVLEPKAVMVLVEAEHMCMAMRGIRNVGSRTVTTVVRGTWQRDAALRAEIMSLLKG

SEQ ID NO: 4843 - protein, 218 aa, Asaia platycodi
  misc_feature (1)..(218): tr|A0A060QDN3|A0A060QDN3_9PROT GTP cyclohydrolase 1 OS= Asaia platycodi SF2.1 OX=1382230 GN=folE PE=3 SV=1
MTKPTADLVALDAARHKGQGGERPIAPIAKPEDAETRIAGAVREILEALGEDPDREGLFETPGRVARMYLDVLGGLHEDPRDHLHKQFLADQHEGAVIVRDIGFHSMCEHHLLPFFGKAHVAYLPEGGRLTGLSKIARTVNVLARRPQLQERLTDQIAASIIEVLEPKAVMVLVEAEHMCMAMRGIRNVGSRTVTTVVRGTWQRDAALRAEIMSLLKG

SEQ ID NO: 4844 - protein, 218 aa, Asaia sp.
  misc_feature (1)..(218): tr|A0A433WR72|A0A433WR72_9PROT GTP cyclohydrolase 1 OS= Asaia sp. W19 OX=2067395 GN=folE PE=3 SV=1
MTKPTADLVALDAARHKGQGGERPIAPIAKPEDAEARIAGAVREILQALGEDPDREGLFETPGRVARMYLDVLGGLHEDPRTHLHKQFLADQHEGAVIVRDIGFHSMCEHHLLPFFGKAHVAYLPEGGRLTGLSKIARTVNVLARRPQLQERLTDQIAASIIEVLEPKAVMVLVEAEHMCMAMRGIRNVGSRTVTTVVRGTWQRDAALRAEIMSLLKG

SEQ ID NO: 4845 - protein, 195 aa, Asanoa ferruginea
  misc_feature (1)..(195): tr|A0A3D9ZIC0|A0A3D9ZIC0_9ACTN GTP cyclohydrolase 1 OS= Asanoa ferruginea OX=53367 GN=folE PE=3 SV=1
MAGRPVEEAVDLGRIEKAVREILIAIGEDPDRDGLVKTPLRVARAYAELFAGLRVDPGQVLNTTFDAQHEELVLVRDIEVMSVCEHHLLPFKGVAHIGYIPGPNGRITGLSKLARLVEIFARRPQVQERLTSQIADILMEKLDPRGVIAVLECEHLCMAMRGIQKDGAKTVTSAVRGIFQSDAKSRSEAMALIIG

SEQ ID NO: 4846 - protein, 193 aa, Asanoa ferruginea
  misc_feature (1)..(193): tr|A0A3D9ZGY1|A0A3D9ZGY1_9ACTN GTP cyclohydrolase 1 OS= Asanoa ferruginea OX=53367 GN=folE PE=3 SV=1
MTLQRTAGDGVNLAAAEQAAGQFLRALGLRTDTESMRGTPGRMARAYAELFSPRPFDLTTFPNDEGYDELVLARAIPLRSVCEHHLLPFVGTAHVGYLPGQRILGLSKLARVVEHFACRPQVQERLTKQIADWLQTQLTPKGVGVVIEAEHTCMTLRGVQATGSTTITSTMLGLLRDDPRSRSEFLALTRVVG

SEQ ID NO: 4847 - protein, 160 aa, Asanoa hainanensis
  misc_feature (1)..(160): tr|A0A239PG30|A0A239PG30_9ACTN GTP cyclohydrolase 1 OS= Asanoa hainanensis OX=560556 GN=folE PE=3 SV=1
MKTPLRVARAYAELFAGLRVDPAQVLNTTFDASHEELVLVRDIEVMSVCEHHLLPFKGVAHIGYIPGPNGRITGLSKLARIVEIYARRPQVQERLTTQIADLLMNKLDPRGVIAVLECEHLCMAMRGIQKDGAKTITSAVRGIFQSDAKSRSEAMALIIN

SEQ ID NO: 4848 - protein, 208 aa, Asanoa hainanensis
  misc_feature (1)..(208): tr|A0A239NSS6|A0A239NSS6_9ACTN GTP cyclohydrolase 1 OS= Asanoa hainanensis OX=560556 GN=folE PE=3 SV=1
MSIERATHRTGRTPAPLRVVHESDGIDLDAAEQAAGQFLRALGVRTDTESMRRTPRRMAHAYAELFSPRPFDLTTFPNDEGYDELVLARSIPVRSVCKHHLLPFVGTAHVGYLPGQRILGLSKLARVVEHFACRPQVQERLTKQVADWLRTQLDPKGVGVVIEAEHTCMTLRGVRADGSSTITSTLLGLLRDDARSRSEFLALTGVVR

SEQ ID NO: 4849 - protein, 265 aa, Asanoa ishikariensis
  misc_feature (1)..(265): tr|A0A1H3UB73|A0A1H3UB73_9ACTN GTP cyclohydrolase FolE2 OS=Asanoa ishikariensis OX=137265 GN=folE2 PE=3 SV=1
MLPDVQGLSDERGVTLDDVGIEGLRYPLLIADGQGVKRETVATVDMSVGIEADVKGAHLSRFVEVLHAWRDQLDATSAISLAEDVRTRLGTRDARVRLSFAYFLERRAPVTGACSFSEYQCTLTVATSGGAASLLLQVRVPVTSVCPCSKAISDRGAHNQRGYVTIEVEPATGAQLWFDDLIDVAEASASSPVYALLKRPDERHVTMAGYDNPVFVEDMARHVAVVLRGDVRIARFRARVVNDESIHNHAAFARLDWTATDDGNA

SEQ ID NO: 4850 - protein, 208 aa, Asanoa ishikariensis
  misc_feature (1)..(208): tr|A0A1H3LHR0|A0A1H3LHR0_9ACTN GTP cyclohydrolase 1 OS= Asanoa ishikariensis OX=137265 GN=folE PE=3 SV=1
MSIERVAHRTGRTPAPLRVVHESDGIDLDAAEEAAGHFLRALGVRTDTESMRRTPRRMAHAYAELFSPRPFDLTTFPNDEGYDELVLARAIPVRSVCEHHLLPFVGTAHVGYLPGQRILGLSKLARVVEHFACRPQVQERLTKQIADWLQTQLDPKGVGVVIEAEHTCMTLRGVRADGSSTITSTLLGLLREDARSRSEFLALTGVIR

SEQ ID NO: 4851 - protein, 367 aa, Ascidiaceihabitans donghaensis
  misc_feature (1)..(367): tr|A0A2R8BFP0|A0A2R8BFP0_9RHOB GTP cyclohydrolase FolE2 OS=Ascidiaceihabitans donghaensis OX=1510460 GN=folE2 PE=3 SV=1
MNIHSPDITAIPERDEAEAALDVLRRWAETATTTEILELDPSVAKLVPGKTSVDYPALSRKFPDGFVVDDAYKSTLPDLQNGPSSLIKGAKQQIQHVGISNFRLPLRFKTRDAGELMLETSVTGSVSLEADKKGINMSRIMRSFYKHAEKAFSFDVIDAALNDYIADLESFDARIQMRFSFPMKVQSLRSGLSGYQYYDIALELVEKDGLRQKMVHLDYVYSSTCPCSLELSEHARATRGQLATPHSQRSVARVSVVLDNDAGPLWFEDLIEACRRAVPTETQVMVKREDEQAFAELNAANPIFVEDAARLFSEQLLADVRIGDFRVIASHQESLHSHDAVSVLTEGQTFAQDSFDPRLFETLFHTG

SEQ ID NO: 4852 - protein, 218 aa, Asticcacaulis benevestitus
  misc_feature (1)..(218): tr|V4NUP1|V4NUP1_9CAUL GTP cyclohydrolase 1 OS=Asticcac aulis benevestitus DSM 16100 = ATCC BAA-896 OX=1121022 GN=folE PE=3 SV=1
MDSLDPVSNLTTEANNLLNTSKPKSVVTYTNRPSREEAMAAVKTLLAWAGDDPEREGLLDTPKRVVDAYGEWFQGYTEDPAKELSRTFEDVQGYDDMVMLREIDVESHCEHHMAPFLGKAWVAYMPTSKVVGISKIARVVEIFAKRLQTQETMTKQVADALEESLAPLGVAVLIDAEHQCMSTRGVHHKNVTTVTTRFTGVFKTDQALQDRFLRLIHR

SEQ ID NO: 4853 - protein, 210 aa, Asticcacaulis biprosthecum
  misc_feature (1)..(210): tr|F4QM94|F4QM94_9CAUL GTP cyclohydrolase 1 OS=Asticcac aulis biprosthecum C19 OX=715226 GN=folE PE=3 SV=1
MDSLDPKSLLATSKPVSVTTFTNRPSREQAMEAVRTLLAWAGDNPDREGLIDTPKRVVDAYQEWFQGYDADPKKELSRTFEDVQGYDDMVMLREIDVESHCEHHMAPFLGKAWVAYMPTEKVVGISKIARVVEIFAKRLQTQETMTKQVADALEDSLAPLGVAVLIDAEHQCMSTRGVHHKNVSTVTTRFTGVFKTDTVLQERFLRLTQK

SEQ ID NO: 4854 - protein, 226 aa, Asticcacaulis excentricus
  misc_feature (1)..(226): tr|A0A3G9G646|A0A3G9G646_9CAUL GTP cyclohydrolase 1 OS= Asticcacaulis excentricus OX=78587 GN=folE PE=3 SV=1
MDSLDPNSRPNSEDPLTQALAQNLAQTRSKGFSEILNVERPSKEEAMAAVRTLLAWAGDDPTREGLIDTPKRVVEAYDEWFSGYQADPAKELSRTFEDVQGYDDMVMLRHIDVESHCEHHMASFLGKAYVAYMPTAKVVGISKIARVVEIFSKRLQTQETLTKQIADAIEQSLAPLGVAVLIDAEHQCMTTRGVHHKNVTTVTTRFTGVFKTDLALQDRFMRFCQA

SEQ ID NO: 4855 - protein, 222 aa, Asticcacaulis excentricus
  misc_feature (1)..(222): tr|E8RRI5|E8RRI5_ASTEC GTP cyclohydrolase 1 OS=Asticcac aulis excentricus (strain ATCC 15261 / DSM 4724 / VKM B -1370 / CB 48) OX=573065 GN=folE PE=3 SV=1
MDSLDPNSRPHSEDPLTQALAQTRSKGFSEILNVERPSKEEAMAAVRTLLAWAGDDPTREGLIDTPKRVVEAYDEWFSGYQADPAKELSRTFEDVQGYDDMVMLRHIDVESHCEHHMASFLGKAYVAYMPTAKVVGISKIARVVEIFSKRLQTQETLTKQIADAIEQSLAPLGVAVLIDAEHQCMTTRGVHHKNVTTVTTRFTGVFKADLALQDRFMRFCQA

SEQ ID NO: 4856 - protein, 240 aa, Asticcacaulis sp.
  misc_feature (1)..(240): tr|V4PDS8|V4PDS8_9CAUL GTP cyclohydrolase 1 OS=Asticcac aulis sp. AC466 OX=1282362 GN=folE PE=3 SV=1
MSRVIPEPSFRRYSALKGKFMDSLDSKATLTSSEHNLLNTSKPKSVVTYTNRPSREEAMKAVKTLLAWAGDDPEREGLIDTPKRVVDAYEEWFQGYAADPKKELSRTFEDVQGYDDMVMLREIDVESHCEHHMAPFLGKAWVAYMPTDKVVGISKIARVVEIFAKRLQTQETMTKQVADALEESLAPLGVAVLIDAEHQCMSTRGVHHKNVTTVTTRFTGVFKTDLSLQERFLRLAQPRK

SEQ ID NO: 4857 - protein, 221 aa, Asticcacaulis sp.
  misc_feature (1)..(221): tr|V4NVF4|V4NVF4_9CAUL GTP cyclohydrolase 1 OS=Asticcac aulis sp. YBE204 OX=1282363 GN=folE PE=3 SV=1
MDSFEPEHRESNDPLVAALNASRSKGFSESLNVERPTKAQAMEAVKTLLAWAGDDPSREGLIDTPKRVVEAYEEWFQGYQADPAKELSRTFEDVQGYDDMVMLRQIDVESHCEHHMAAFLGKAYVAYMPTSKVVGISKIARVVEIFSKRLQTQETLTKQIADALVDSLSPLGVAVLIDAEHQCMSTRGVHHKNVTTVTTRFTGVFKTDLALQDRFMRFCQS

SEQ ID NO: 4858 - protein, 218 aa, Asticcacaulis taihuensis
  misc_feature (1)..(218): tr|A0A1G4QPC2|A0A1G4QPC2_9CAUL GTP cyclohydrolase 1 OS= Asticcacaulis taihuensis OX=260084 GN=folE PE=3 SV=1
MDSLDPVSNLTSAENSLLNTSKPKSIVTFTNRPSREEAMKAVKTLLAWAGDDPEREGLIDTPKRVVDAYEEWFQGYQADPKKELSRTFEDVQGYDDMVMLREIDVESHCEHHMAPFLGKAWVAYMPTSKVVGISKIARVVEIFAKRLQTQETMTKQVADAIEESLAPLGVAVMIDAEHQCMSTRGVHHKNVTTVTTRFTGVFKTDIALQERFMRLTHR

SEQ ID NO: 4859 - protein, 153 aa, Atelocyanobacterium thalassa
  misc_feature (1)..(153): tr|D3EPF6|D3EPF6_ATETH GTP cyclohydrolase 1 OS=Atelocya nobacterium thalassa (isolate ALOHA) OX=1453429 GN=folE PE=3 SV=1
MKFLTEGYNQSLTQLVNEAIFDEGHNEMVLIRDINFFSLCEHHMLPFMGRAHVAYIPDGKVIGLSKIARIVEMYSRRLQVQERLTRQIANAMQEVLKPLGVAVVMEATHMCMVMRGVQKPGSWTLTSTMLGKFNEEQKTREEFLNSVRHQPKF

SEQ ID NO: 4860 - protein, 222 aa, Atlantibacter hermannii
  misc_feature (1)..(222): tr|A0A447LLI8|A0A447LLI8_ATLHE GTP cyclohydrolase 1 OS= Atlantibacter hermannii OX=565 GN=folE PE=3 SV=1
MSSLSKEAALVHEALVARGLETPLRPPLRELDNETRKRLISEHMSEIMQLLNLDLSDDSLMETPHRIAKMYVDEIFSGLDYANFPKITVIENKMKVDEMVTVRDITLTSTCEHHFVTIDGQATVAYIPKDSVIGLSKINRIVQFFAQRPQVQERLTQQILVALQTLLGTNNVAVSIDAVHYCVKARGIRDATSATTTTSLGGLFKSSQNTRQEFLRAVRHHR

SEQ ID NO: 4861 - protein, 222 aa, Atlantibacter hermannii; identical to SEQ ID NO: 4860
  misc_feature (1)..(222): tr|H5UXG0|H5UXG0_ATLHE GTP cyclohydrolase 1 OS=Atlantib acter hermannii NBRC 105704 OX=1115512 GN=folE PE=3 SV= 1

SEQ ID NO: 4862 - protein, 222 aa, Atlantibacter subterranea
  misc_feature (1)..(222): tr|A0A427V798|A0A427V798_9ENTR GTP cyclohydrolase 1 OS= Atlantibacter subterranea OX=255519 GN=folE PE=3 SV=1
MSSLSKEAALVHEALVARGLETPLRPPLRELDNETRKRLISEHMSEIMQLLNLDLSDDSLMETPHRIAKMYVDEIFSGLDYANFPKITVIENKMKVDEMVTVRDITLTSTCEHHFVTIDGKATVAYIPKESVIGLSKINRIVQFFAQRPQVQERLTQQILVALQTLLGTNNVAVSIDAVHYCVKARGIRDATSATTTTSLGGLFKSSQNTRQEFLRAVRHHS

SEQ ID NO: 4863 - protein, 356 aa, Atopobacter sp.
  misc_feature (1)..(356): tr|A0A421BG15|A0A421BG15_9LACT GTP cyclohydrolase 1 OS= Atopobacter sp. AH10 OX=2315861 GN=folE PE=3 SV=1
MIKVYLSLGSNLGNRLAYLKEAVKRLAEDPQIEVEKVSRVYETSPVGGVEQGAFLNIAVRLSTLLPPLDLLDRMQKIEQDLKRERLVHWGPRTIDLDMLYYGDQTIEHERLIVPHKEMYKRLFVLVPLTDVWTDEFFCQEEVLNTIIQLKGEKQEIQCIGEWTMEKTKQERIEAAVREILSAVGEDPNREGLLETPKRVAKMYDEILASTTEKEFTNYKLFESETAQNAQMVSVNDIPFYSMCEHHMLPFFGKVHVAYIPKAGRIIGLSKIPRLVDHVSRQLNLQERITKDIADTLEDILDPYGVAVVVDARHMCVEMRGVKKTNSVTRTTFFTGEFDRDRDLRKEFLQTVNRYRD

SEQ ID NO: 4864 - protein, 192 aa, Atopobium deltae
  misc_feature (1)..(192): tr|A0A133XUT0|A0A133XUT0_9ACTN GTP cyclohydrolase 1 OS= Atopobium deltae OX=1393034 GN=folE PE=3 SV=1
MPLDASRVEAAISELLSALGEDPTREALRETPARVARAYKELLGGMDEDPSQHLRKQFFEPHNEEMVIVKDIVFSSMCEHHMLPFVGTAAVAYIPRDGRITGLSKISRCVKGYARRLQVQERLTAQIADAFVDVLNPLGVLVVLRAEHMCMTIRGVQSFGSTTLTSAVRGAFKTNAKTCEEAMGLLGLRGQS

SEQ ID NO: 4865 - protein, 190 aa, Atopobium minutum
  misc_feature (1)..(190): tr|A0A1H4JTN4|A0A1H4JTN4_9ACTN GTP cyclohydrolase 1 OS= Atopobium minutum OX=1381 GN=folE PE=3 SV=1
MAVDKLRAQAAVRELLIAIGEDPDREGLLGTPDRVARAYEELLSGMEEDPAHHLLKQFHEQDNQEMVLVRDIPFSSMCEHHMLPFVGRAHVAYIPREGCITGLSKIARCVSGYSHRLQVQERLTAQIADALVDTLNPLGVLVVLQAEHTCMTIRGIHSAGSQTFTSAVRGCFKANVKTREEAMGLLGLRG

SEQ ID NO: 4866 - protein, 190 aa, Atopobium minutum; identical to SEQ ID NO: 4865
  misc_feature (1)..(190): tr|N2BN95|N2BN95_9ACTN GTP cyclohydrolase 1 OS=Atopobiu m minutum 10063974 OX=997872 GN=folE PE=3 SV=1

SEQ ID NO: 4867 - protein, 195 aa, Atopobium parvulum
  misc_feature (1)..(195): tr|C8WAB6|C8WAB6_ATOPD GTP cyclohydrolase 1 OS=Atopobiu m parvulum (strain ATCC 33793 / DSM 20469 / JCM 10300 / VPI 0546) OX=521095 GN=folE PE=3 SV=1
MAAENNYKELDQERVKAAVTEFLLAIGEDPEREGLLDTPDRVARACVELFGGMQEDPAVHLRKQFHEEGNKEMVIVRDIPFSSTCEHHILPFVGKAHVCYIPQNGRITGLSKIARCVSGYSRRLQVQERLTGQIADAMVEELDPLGVLVVMEAEHTCMSMRGIRASGALTTTSAVRGIFKTNEKTRAEAMRLLGL

SEQ ID NO: 4868 - protein, 221 aa, Atopobium rimae
  misc_feature (1)..(221): tr|B9CK26|B9CK26_9ACTN GTP cyclohydrolase 1 OS=Atopobiu m rimae ATCC 49626 OX=553184 GN=folE PE=3 SV=1
MTEETHATEAQKETHATEIHTKAVHTNTAHSEFAPLDQARVRAAVREFLLAIGEDPTREGLLETPDRVARACAELFSGMQEDPAAHLRKQFFEEGNHEMVIVRDIPFSSTCEHHILPFVGKAHVCYIPKGGRITGLSKIARCVMGYSRRLQVQERLCGQVADAMMAELDPLGVLVVMEAEHTCMTMRGVRSAGALTLTSAVRGIFKDNEKTRAEAMRLLGL

SEQ ID NO: 4869 - protein, 195 aa, Atopobium sp.
  misc_feature (1)..(195): tr|Z4X1L9|Z4X1L9_9ACTN GTP cyclohydrolase 1 OS=Atopobiu m sp. BS2 OX=936550 GN=folE PE=3 SV=1
MAAENNYKELDQERVKAAVKEFLLAIGEDPEREGLLDTPDRVARACVELFGGMQENPAAHLRKQFHEEGNKEMVIVRDIPFSSTCEHHILPFVGKAHVCYIPQNGRITGLSKIARCVSGYSRRLQVQERLTGQIADAMVEELDPLGVLVVMEAEHTCMSMRGIRASGALTTTSAVRGIFKTNEKTRAEAMRLLGL

SEQ ID NO: 4870 - protein, 195 aa, Atopobium sp.
  misc_feature (1)..(195): tr|Z4X2N1|Z4X2N1_9ACTN GTP cyclohydrolase 1 OS=Atopobiu m sp. ICM42b OX=1190620 GN=folE PE=3 SV=1
MAAVNNYKELDQERVKAAVKEFLLAIGEDPEREGLLDTPDRVARACVELFGGMQEDPAAHLRKQFHEEGNKEMVIVRDIPFSSTCEHHILPFVGKAHVCYIPQNGRITGLSKIARCVSGYSRRLQVQERLTGQIADAMVEELDPLGVLVVMEAEHTCMSMRGIRASGALTTTSAVRGIFKTNEKTRAEAMRLLGL

SEQ ID NO: 4871 - protein, 232 aa, Atopobium vaginae
  misc_feature (1)..(232): tr|E1L0V2|E1L0V2_9ACTN GTP cyclohydrolase 1 OS=Atopobiu m vaginae PB189-T1-4 OX=866774 GN=folE PE=3 SV=1
MNLHSNTTCADIPAVPGVAAGAKAAATTLSTTGDAAAQMNCAGGTTPYNFDQIEEGVRLILQGMGEDITRPGLRDTPNRVARALHECTAGGDVPIEDLFEKRFDSSYQDIVCVRDIEFTSVCEHHLLPFWGVAHVAYVPAQHGYVCGLSKLARLVDAYARRLQMQERLCEQVADALMSGIDAQGVYVYMDAVHACMSLRGVRMRKAHTTTQVARGILLQPEKKQEVQRLLFG

SEQ ID NO: 4872 - protein, 238 aa, Atopobium vaginae
  misc_feature (1)..(238): tr|A0A135PB71|A0A135PB71_9ACTN GTP cyclohydrolase 1 OS= Atopobium vaginae OX=82135 GN=folE PE=3 SV=1
MVRALAWVTFLKRKYCPTVYHITCLLKRIEDIHMNKKCSDSAHAPGLSADMDEQQLNKIQDGVRLILEGLGEDTTRSGLLDTPARVARALHEFIQPTRLSNQTIFEKSFNAQCNDIVVVKNIAFSSLCEHHLLPFYGVAHIAYLPSTDGHVCGLSKLARIVDKYAHRLQIQEGLTQQIAEAIMDGTHAQGVYVCMDATHTCMSLRGVCKRESTTRTQSTLGVFTNMDKKQEVMRLLFG

SEQ ID NO: 4873 - protein, 235 aa, Aulosira laxa
  misc_feature (1)..(235): tr|A0A1Z4U172|A0A1Z4U172_9CYAN GTP cyclohydrolase 1 OS= Aulosira laxa NIES-50 OX=1541988 GN=folE PE=3 SV=1
MTIASPNGSNRSQSPLIPDLAEAITLRPDRNTHDGHEPNLHPPQEEEMEQMTAAVRQILLGVGEDPEREGLLKTPKRVAEAMRFLTSGYNQSLEELVNGAIFNEGHNEMVLVRDINFFSLCEHHMLPFMGRAHIAYIPNQKVVGLSKLARIVEMYSRRLQVQERLTRQIAEAVQTILNPQGVAVVMEATHMCMVMRGVQKPGSWTVTSAMLGVFQDEQKTREEFLNLIRHQAAFF

SEQ ID NO: 4874 - protein, 194 aa, Aurantimicrobium minutum
  misc_feature (1)..(194): tr|A0A173LY35|A0A173LY35_9MICO GTP cyclohydrolase 1 OS= Aurantimicrobium minutum OX=708131 GN=folE PE=3 SV=1
MAIDRARIEAAVVELLHAIGEDPTKEGFSTTPERVAQAYSEFFAGVGEDPLVHLAESVPVDQLSDAVVVTNITVRSMCEHHLLPFLGVAHLAYLPGDRVVGLGKLPRVVNTLAARPQMQESLTEQIADALVEGLDPRGVVVVVEAKHQCVGARGVEQTDSRTITIASRGELTDPVARAEIMTLIGTSTAGHDHD

SEQ ID NO: 4875 - protein, 194 aa, Aurantimicrobium sp.
  misc_feature (1)..(194): tr|A0A2Z3RV58|A0A2Z3RV58_9MICO GTP cyclohydrolase 1 OS= Aurantimicrobium sp. MWH-Mo1 OX=1987356 GN=folE PE=3 SV =1
MAIDRARIEAAVVELLHAIGEDPTKANFSSTPVRVAEAYAEFFAGVGQDPLEHLRESVPIDQLSDAVVVTDITVRSMCEHHLLPFLGVAHVAYLPGDRVVGLGKLPRVVNTLAARPQMQESLTEQIADALVEGLDPRGVLVVVEARHQCVAARGVEQTNSRTITIASRGELTEPAARAEIMTLIGASRGEESHD

SEQ ID NO: 4876 - protein, 271 aa, Aurantimicrobium sp.
  misc_feature (1)..(271): tr|A0A344W334|A0A344W334_9MICO GTP cyclohydrolase 1 typ e 2 OS=Aurantimicrobium sp. MWH-Uga1 OX=2079575 GN=AURU GA1_00935 PE=4 SV=1
MTTLREVVDYAHTLWPLSGAEEWDAPGLVVGSLNQEVTRILLAVDAVSETVTQACDINADLLLTHHPLLMRSVTSVAEDRYKGHLVSKLIRSGVALLAAHTNADVVTDGVSDVIAQRIGLSNLKPLVASSEVGTGIGRTGELSSPMTLGALAQHLATVLPHTAGGVKVSGNFDQEVSTISLCGGAGDSLLSNHLVLSSDVYITSDLRHHPAQEFREQALLGSGPALIDISHWAAEWLWLDVAGAQLKKAFPNIHIEVSDVRTDPWDFLVVQ

SEQ ID NO: 4877 - protein, 207 aa, Aurantimonas manganoxydans
  misc_feature (1)..(207): tr|Q1YNB3|Q1YNB3_AURMS GTP cyclohydrolase 1 OS=Aurantim onas manganoxydans (strain ATCC BAA-1229 / DSM 21871 / SI85-9A1) OX=287752 GN=folE PE=3 SV=1
MESVVKKFPEAADERADDRPSRAEAEAAVKTLLRWIGEDPSREGLLETPARVVKAYEELFGGYKLEAGDVLGRTFQDVSGYDDMVLVRDIDFHSHCEHHMVPIIGKAHVAYVPDGRVLGLSKIARVVDIYGRRLQTQESMTAQIASAIAGMLVPKGIAVMIEAEHMCMSMRGIRSKGSMTITSAFQGVFAEDGEFKSRFLAQASSRS

SEQ ID NO: 4878 - protein, 207 aa, Aurantimonas sp.
  misc_feature (1)..(207): tr|A0A1X0T8J0|A0A1X0T8J0_9RHIZ GTP cyclohydrolase 1 OS= Aurantimonas sp. 22II-16-19i OX=1317114 GN=folE PE=3 SV =1
MEAVVKKFPEKPEDDDLQRPSRAEAEAAVATLLRWIGENPKREGLKETPKRVVKAYEELFGGYGHEPSEVLGRVFEEVAGYNDIVLVKDISFHTHCEHHMVPVLGKAHVAYLPDGKVLGLSKIARLVDMFGRRLQTQEAMTAQIADALDRTLKPRGVAVILEAEHLCMSMRGIRSHGSSTYTGTYRGVFADDQVQQDRILRLIGLSA

SEQ ID NO: 4879 - protein, 207 aa, Aurantimonas sp.
  misc_feature (1)..(207): tr|A0A2E2JIS4|A0A2E2JIS4_9RHIZ GTP cyclohydrolase 1 OS= Aurantimonas sp. OX=1872654 GN=folE PE=3 SV=1
MESVVKKFPEAADERADDRPSRAEAEAAVKTLLRWIGEDPSREGLLETPARVVKAYEELFGGYRLEAGDVLGRTFQDVSGYDDMVLVRDIDFHSHCEHHMVPIIGKAHVAYVPDGRVLGLSKIARVVDIYGRRLQTQESMTAQIASAIAGMLVPKGIAVMIEAEHMCMSMRGIRSKGSMTITSAFQGVFAEDGEFKSRFLAQASSRS

SEQ ID NO: 4880 - protein, 211 aa, Auraticoccus monumenti
  misc_feature (1)..(211): tr|A0A1G6RUF5|A0A1G6RUF5_9ACTN GTP cyclohydrolase 1 OS= Auraticoccus monumenti OX=675864 GN=folE PE=3 SV=1
MDDHAPSPLTARSQPSPVEPTQPPGFDHARVAAAVRELLIGIGEDPDRDGLLDTPARVARAYAEMFSGLHADPADVLSTTFELSHDELVLVTDIEVWSSCEHHLVPFTGKAHVGYIPGAGGKITGLSKLARLVDLFAKRPQVQERLTTQIADALVEHLSPRGVIVVIDCEHLCMTMRGVRKAGSRTVTSAVRGQLRDPATRAEAMALIARS

SEQ ID NO: 4881 - protein, 304 aa, Aureibacillus halotolerans
  misc_feature (1)..(304): tr|A0A4R6TUT9|A0A4R6TUT9_9BACI GTP cyclohydrolase FolE2 OS=Aureibacillus halotolerans OX=1508390 GN=folE2 PE=3 SV=1
MSSSKSLPTKADRLALFGSVPPGERTKPSKKEDMPDLQNLEKDFLFSIKSVGITNVKFPVALHSPFTPTQQTVVGTFALTSSLLQHQKGTNMSRFTEMLTQHREENGAFDVSLRSCHSFLQKLADRLAQPDASMRIDFPWGIDRKAPLSDFSAFHYVDVFIKADYDRASDQTSFSVGLQARITTLCPCSKEISEYSAHNQRGIVTMETTLYSDHALDFQWKEALLEAAESNASSILYPVLKRPDEKYVTEKAYENPRFVEDMVRLVASDLFEMDAVQSFSVHCQNEESIHLHDAVAEIEFDKEA

SEQ ID NO: 4882 - protein, 227 aa, Aureicoccus marinus
  misc_feature (1)..(227): tr|A0A2S7T4W7|A0A2S7T4W7_9FLAO GTP cyclohydrolase 1 OS= Aureicoccus marinus OX=754435 GN=folE PE=3 SV=1
MKIDEHIDQRWEENEEDHLSSAQDTPLRRDAFALSDQEKMDRIQENVKDILWTLGMDLEDDSIKGTPKRVAKMFVKEIFGGLHPDRKPTSSTFDNKYKYGEMLVEKNITLYSTCEHHLLPIVGKAHIAYISNGTVVGLSKMNRIVDYFAKRPQVQERLTMQIVKEMQAVLGTEDVACVIDAKHLCVNSRGIRDIESSTVTAEYGGVFKEEAKQRAFLDYIKLDTDFH

SEQ ID NO: 4883 - protein, 222 aa, Aureicoccus marinus
  misc_feature (1)..(222): tr|A0A2S7T4S1|A0A2S7T4S1_9FLAO GTP cyclohydrolase 1 OS= Aureicoccus marinus OX=754435 GN=folE PE=3 SV=1
MTKNASQVEELGDNHIATSVETPLRPDAFEHSDEEKIENIQGLFGQIMEELGLDLTDESLSGTPYRFAKMYVKELFYGLNPQKKPKISTFPNTYGYKQLLVEQNINIDSSCEHHFLPIVGKAHVGYIPKDRVVGLSKINRLVDYYAHRPQVQERLCLQIMKDLQKILDTPDVIVLVEAKHLCVSSRGIKDKDSFTSTLEYGGCFSEESLRKEFYDLLKPTLD

SEQ ID NO: 4884 - protein, 206 aa, Aureimonas altamirensis
  misc_feature (1)..(206): tr|A0A1M6CMA5|A0A1M6CMA5_9RHIZ GTP cyclohydrolase 1 OS= Aureimonas altamirensis DSM 21988 OX=1121026 GN=folE PE =3 SV=1
MDATVRKFSGSAGQDSHPRPTREEAEAAVQTLIRWAGDDPRREGLVDTPQRVVRAYEEIFGGYCINPADILARTFEEVSGYDDMVLVRDIDFVSHCEHHMVPIIGKAHVAYFPDGQVLGLSKVARVVDLYARRLQTQETMTEEIAAIIDGALAPRGVAVLIEAEHMCMSMRGIRSKGSITTTSSFYGVFKDDKSERDRFLSMILNR

SEQ ID NO: 4885 - protein, 206 aa, Aureimonas altamirensis
  misc_feature (1)..(206): tr|A0A0B1Q3Y9|A0A0B1Q3Y9_9RHIZ GTP cyclohydrolase 1 OS= Aureimonas altamirensis OX=370622 GN=folE PE=3 SV=1
MDATVRKFPGPTGQDSPPRPTREEAEAAVQTLIRWAGDDPRREGLVDTPQRVVRAYEEIFGGYGIDPADVLSRTFEEVSGYDDMVLVRDIDFVSHCEHHMVPIIGKAHVAYFPDGRVLGLSKVARVVDLYARRLQTQETMTEEIAAIIDGALAPRGVAVLIEAEHMCMSMRGIRSKGSITTTSSFYGVFKDDKSERDRFLSMILNR

SEQ ID NO: 4886 - protein, 206 aa, Aureimonas flava
  misc_feature (1)..(206): tr|A0A3A1WPA4|A0A3A1WPA4_9RHIZ GTP cyclohydrolase 1 OS= Aureimonas flava OX=2320271 GN=folE PE=3 SV=1
MDATIRKLAPAAAAEPVSRPSREEAEAAVETLLRWIGEDPAREGLVDTPRRVVKAYEELYGGYGQQPADVLTRTFEEVAGYQEMVLLRDIPFTSHCEHHMVPIIGKAHVAYVPDGRVLGLSKIPRVVEIFARRLQTQEKLTEQVAAVIDGALTPKGVAVMLEAEHMCMSMRGIRTHGSTTVTTSFYGVFRDDREEQTRFLAMVGRR

SEQ ID NO: 4887 - protein, 206 aa, Aureimonas frigidaquae
  misc_feature (1)..(206): tr|A0A0P0Z2B4|A0A0P0Z2B4_9RHIZ GTP cyclohydrolase 1 OS= Aureimonas frigidaquae OX=424757 GN=folE PE=3 SV=1
MDATVRSFPGLAGQEKPPRPTREEAQAAVETLIRWAGDDPRREGLIETPARVVRAYEEIFAGYRIDPADVLVRTFEEVSGYDDMVLVRDIDFVSHCEHHMVPIIGKAHVAYVPDGRVLGLSKIARVVDLYARRLQTQEAMTEEVAAIIDGALAPRGVAVLIEAEHMCMSMRGIRTRGAVTTTSAYYGVFKDDKSERDRFLSMILHR

SEQ ID NO: 4888 - protein, 205 aa, Aureimonas jatrophae
  misc_feature (1)..(205): tr|A0A1H0JNG2|A0A1H0JNG2_9RHIZ GTP cyclohydrolase 1 OS= Aureimonas jatrophae OX=1166073 GN=folE PE=3 SV=1
MDAIADKTTNQPVLDEARPSRTEAEAAVEVLLRWIGENPKREGLIDTPRRVVKAFEEIYGGYRQDPAAVLERTFEEVAGYDEMVLVRDIDFTSHCEHHMVPIIGRAHVAYLPEGRVLGLSKIARIVDIYARRLQTQEAMTEQVAAMIDGALTPRGVAVMIEAEHMCMSMRGIRTKGSSTVTTAFYGAFRNDAAQQARFTTLALKR

SEQ ID NO: 4889 - protein, 206 aa, Aureimonas phyllosphaerae
  misc_feature (1)..(206): tr|A0A1I2JH60|A0A1I2JH60_9RHIZ GTP cyclohydrolase 1 OS= Aureimonas phyllosphaerae OX=1166078 GN=folE PE=3 SV=1
MDATIRKLAPAATAEPVVRPTREEAEAAVETLLRWIGEDPAREGLIDTPRRVVKAYEELYGGYGQQPADVLSRTFEEVAGYQEMVLLRDIPFTSHCEHHMVPIIGKAHVAYVPDGRVLGLSKIPRVVEIFARRLQTQEKLTEQIAAVIDGALTPKGVAVLLEAEHMCMSMRGIRTHGSTTVTSSFYGSFRDDREEQTRFLAMVGGR

SEQ ID NO: 4890 - protein, 208 aa, Aureimonas sp.
  misc_feature (1)..(208): tr|A0A0S2EPM1|A0A0S2EPM1_9RHIZ GTP cyclohydrolase 1 OS= Aureimonas sp. AU20 OX=1349819 GN=folE PE=3 SV=1
MMDASVRKTSQTMQPDETKRPSREEAEAAVETLLRWIGEDPSREGLIDTPRRVVKAYEELFSGYNQEPAAILNRTFEEVAGYDDMVLLKNIDFTSHCEHHMVPIIGKAHVAYLPSGGRVVGLSKIPRIIDVYARRLQTQEALTEQIAGVIDGALNARGVAVMLEAEHMCMSMRGIRTKGSTTLTTSFYGAFREDKSEQARFLAMVGVK

SEQ ID NO: 4891 - protein, 206 aa, Aureimonas sp.
  misc_feature (1)..(206): tr|A0A5B0DY12|A0A5B0DY12_9RHIZ GTP cyclohydrolase 1 OS= Aureimonas sp. CAU 1482 OX=2565783 GN=folE PE=3 SV=1
MDATLSKFSGFPGQEKPARPTREEAEAAVEVLIRWAGDDPRREGLIETPARVVRAYEEIYGGYQLDPAEVLNRTFSEVSGYDDMVLVRDIDFTSHCEHHMVPIIGKAHVAYMPDGSVLGLSKIARVVDMFARRLQTQEAMTEEIAAVIDSAFAPRGVAVLIESEHMCMSMRGIRTKGSTTSTSAFYGVFKDDKAERDRFLSMILNR

SEQ ID NO: 4892 - protein, 207 aa, Aureimonas ureilytica
  misc_feature (1)..(207): tr|A0A175R901|A0A175R901_9RHIZ GTP cyclohydrolase 1 OS= Aureimonas ureilytica OX=401562 GN=folE PE=3 SV=1
MDAIVRKTSQTMQPDETNRPSREEAEAAVETLLRWIGEDPSREGLLDTPRRVVKAYEELFSGYRQEPASILNRTFDEVAGYDDMVLLKNIDFTSHCEHHMVPIIGKAHVAYLPNGGRVVGLSKIPRIVEVYARRLQTQEALTEQIAGIIDGALGARGVAVMLEAEHMCMSMRGIRTKGSTTITTSFYGTFRDDKSEQTRFLTMVGAK

SEQ ID NO: 4893 - protein, 225 aa, Aureitalea marina
  misc_feature (1)..(225): tr|A0A2S7KQH9|A0A2S7KQH9_9FLAO GTP cyclohydrolase 1 OS= Aureitalea marina OX=930804 GN=folE PE=3 SV=1
MNLEKQLQEIEAMGDDHVSSSADTPLRADAFDLSDIEKVALIKKDVERILHTLGMDLTDDSLRGTPHRVAKMFVQEIFSGLHPDNKPNAATFENKYKYGEMLVEKNITLYSTCEHHLLPIVGKAHIAYISSGSVIGLSKMNRIVDYYAKRPQVQERLTMQIVQELQQALGTEDVACVIDAKHLCVNSRGIRDIDSSTVTSEFGGVFKNTDVKREFLDYIKLETEY

SEQ ID NO: 4894 - protein, 199 aa, Aureitalea marina
  misc_feature (1)..(199): tr|A0A2S7KPC3|A0A2S7KPC3_9FLAO GTP cyclohydrolase 1 OS= Aureitalea marina OX=930804 GN=folE PE=3 SV=1
MTSYKFLEEYAQPVTEELQESFSRILTDIGEDVSRDGIQKTPERAAKAIQFLTSGYIQDAGAILESAMFDEDYHDMVIVKDIEFYSLCEHHMLPFFGKAHIAYIPNGKIVGLSKIPRIVNVFARRLQVQERLTHDILECINKTLKPAGVAVVIEASHMCMAMRGVQKQNSATTTSGFRGQFEKIETRNEFLKLIGSNLS

SEQ ID NO: 4895 - protein, 225 aa, Aureitalea sp.
  misc_feature (1)..(225): tr|A0A2S0HTQ8|A0A2S0HTQ8_9FLAO GTP cyclohydrolase 1 OS= Aureitalea sp. RR4-38 OX=2094025 GN=folE PE=3 SV=1
MDLEKQLREIEAMGNDHVGSSTDTPLRSDAFELSDIEKIAKIKEDVRNIMNTLGLDLTDDSLKGTPTRVAKMFVQEIFGGLHPDRKPKASTFENKYKYGEMLVEKNITLYSTCEHHLLPIVGKAHIAYISNGTVVGLSKMNRIVDYFAKRPQVQERLTMQIVEELQHILQTKDVACVIDAKHLCVNSRGIRDIDSSTVTSEFGGKFKDPNVRRDFLDYINLDTEF

SEQ ID NO: 4896 - protein, 215 aa, Aureitalea sp.
  misc_feature (1)..(215): tr|A0A2S0HSV6|A0A2S0HSV6_9FLAO GTP cyclohydrolase 1 OS= Aureitalea sp. RR4-38 OX=2094025 GN=folE PE=3 SV=1
MPTNKNNSSHNGVYNSNTSQVIDPCVLDHDKQKVIAFHFAKIMDSLGLDRTDPSLQETPNRVAKMYVNEVFRGLNENNFPKITLFENTSGYNEMILVDRIALYSYCEHHFVPFFGEATIAYIPNDHVIGLSKINRIVQFIASKPQIQEKLTTEIGQKFNEILQTQDVAVFIKAHHLCVASRGVEDNRSVTRTSFFSGKFQKEKMKTKFFDSMDKF

SEQ ID NO: 4897 - protein, 294 aa, Auricoccus indicus
  misc_feature (1)..(294): tr|A0A1Q1G389|A0A1Q1G389_9STAP GTP cyclohydrolase FolE2 OS=Auricoccus indicus OX=1849491 GN=folE2 PE=3 SV=1
MTEEKYDLTTRVGRFKHFGSVDPIEGTKPTQKEDMKDLQQTKKDFLFAIDHVGINQVKYPVIIDHMQSVGNFSLSTSLTRDEKGINMSRLIESLELHYHNGIELSFESLSSLTESIRTKMKQSAAQVEVKSTWFYDKASPVTQLTGRAHAQIGYTINKDENNEDRKFYMQSDVTTLCPCSKEISEYSAHNQRGTVTVSLDLYDHKDIPKNHKEIVLEIMEANASSQLYPILKRTDEKKVTERAYENPRFVEDILRLIAYDLVELDWVKGFTLICENKESIHQHDAYSQLTYNKE

SEQ ID NO: 4898 - protein, 186 aa, Auritidibacter sp.
  misc_feature (1)..(186): tr|A0A318A8E7|A0A318A8E7_9MICC GTP cyclohydrolase 1 OS= Auritidibacter sp. NML120636 OX=2170743 GN=folE PE=3 SV =1
MDLPRIEAAVREILEAIGEDPDRDGLRETPARVARSYAEIFGGLGQEPGEVLEKTFDLVHDEMVLVKDIAFYSTCEHHLLPFHGQAHIGYIPSESGKVTGLSKLARLVNVYARRPQVQERLTDQLVEALMTHLHPRGAIVVVEAEHLCMSMRGVKSPGAMTVTSAVRGQLRDASTRSEAMSLILRK

SEQ ID NO: 4899 - protein, 186 aa, Auritidibacter sp.
  misc_feature (1)..(186): tr|A0A318ABZ4|A0A318ABZ4_9MICC GTP cyclohydrolase 1 OS= Auritidibacter sp. NML120779 OX=2170744 GN=folE PE=3 SV =1
MDLPRIEAAVREILEAIGEDPDRDGLRETPARVARSYAEMFGGLGQEPGEVLEKTFDLVHDEMVLVKDIAFYSTCEHHLLPFHGQAHIGYIPSESGKVTGLSKLARLVNVYARRPQVQERLTDQLVEALMTHLHPRGAIVVVEAEHLCMSMRGVKSPGAMTVTSAVRGQLRDASTRSEAMSLILRK

SEQ ID NO: 4900 - protein, 212 aa, Austwickia chelonae
  misc_feature (1)..(212): tr|K6VJQ0|K6VJQ0_9MICO GTP cyclohydrolase 1 OS=Austwick ia chelonae NBRC 105200 OX=1184607 GN=folE PE=3 SV=1
MAEDSCAVTSARPDDVERPDRSSRVDLGRAEAAVRELLLALGEDPDRDGLRDTPGRVARAYAEMFAGTQQDPAQILERRFDIDHDEMIMVHDIEVFSTCEHHLLPFHGVAHVGYIPAQDGQVTGLSKLARLVDCFARRPQVQERLTTQVADALVTHLEARGVIVVVEAEHLCMSMRGARKPGARTTTSAVRGLLRNPATRAEAMGLILRGRG

SEQ ID NO: 4901 - protein, 218 aa, Avibacterium avium
  misc_feature (1)..(218): tr|A0A379AS02|A0A379AS02_AVIAV GTP cyclohydrolase 1 OS= Avibacterium avium OX=751 GN=folE PE=3 SV=1
MNKISPEAEKVRQALVSKGIETPMVDTQLTKSQRREGIEQHMREVMKLIGLDLRDDSLEETPVRLAKMFVDEIFSGLDYANFPKITNIENRMKVSEMVLVNDVTLTSTCEHHFVTIDGMVSVAYYPKKWVIGLSKINRVVAFFAQRPQVQERLTEQILLAFQTILETEDVAVYVKATHFCVKCRGIKDTNSYTVTSAFGGVFLDDRETRKEFLTLINK

SEQ ID NO: 4902 - protein, 218 aa, Avibacterium endocarditidis
  misc_feature (1)..(218): tr|A0A2S5AI81|A0A2S5AI81_9PAST GTP cyclohydrolase 1 OS= Avibacterium endocarditidis OX=380674 GN=folE PE=3 SV=1
MNKISPEAEKVRQALVSKGIETPMVDTQLTKSQRREGIEQHMREVMKLIGLDLRDDSLEETPVRLAKMFVDEIFSGLDYANFPKITNIENRMKVSEMVLVNDVTLTSTCEHHFVTIDGMVSVAYYPKKWVIGLSKINRVVAFFAQRPQVQERLTEQILLAFQTILETENVAVYVKATHFCVKCRGIKDTNSYTVTSAFGGVFLDDRETRKEFLTLINK

SEQ ID NO: 4903 - protein, 218 aa, Avibacterium gallinarum
  misc_feature (1)..(218): tr|A0A379AVB2|A0A379AVB2_AVIGA GTP cyclohydrolase 1 OS= Avibacterium gallinarum OX=755 GN=folE PE=3 SV=1
MNKISPEAEKVRQALVSKGIETPMVDTQLTKSQRREGIEQHMREVMKLIGLDLRDDSLEETPVRLAKMFVDEVFSGLDYANFPKITNIENRMKVSEMVLVNDVTLTSTCEHHFVTIDGMVSVAYYPKKWVIGLSKINRVVAFFAQRPQVQERLTEQILLAFQTILETEDVAVYVKATHFCVKCRGIKDTNSYTVTSAFGGVFLDDRETRKEFLTLINK

SEQ ID NO: 4904 - protein, 217 aa, Avibacterium paragallinarum
  misc_feature (1)..(217): tr|A0A0F5EQU6|A0A0F5EQU6_AVIPA GTP cyclohydrolase 1 OS= Avibacterium paragallinarum OX=728 GN=folE PE=3 SV=1
MSKISPEAEKVRQALLSKGIETPMIDTSLTKSQRREGIEQHMREVMKLIGLDLRDDSLEETPVRLAKMFVDEIFSGLDYANFPKITNIENRMKVSEMVLVNDVTLTSTCEHHFVTIDGTVSVAYYPKKWVIGLSKINRVVAFFAQRPQVQERLTEQILLAFQTILETDDVAVYVKATHFCVKCRGIKDSNSYTVTSAFGGVFLDDRETRKEFLTLLK

SEQ ID NO: 4905 - protein, 217 aa, Avibacterium paragallinarum
  misc_feature (1)..(217): tr|A0A2V4EUY3|A0A2V4EUY3_AVIPA GTP cyclohydrolase 1 OS= Avibacterium paragallinarum OX=728 GN=folE PE=3 SV=1
MSKISPEAEKVRQALLSKGIETPMIDTSLTKSQRREGIEQHMREVMKLIGLDLRDDSLEETPVRLAKMFVDEIFSGLDYANFPKITNIENRMKVSEMVLINDVTLTSTCEHHFVTIDGTVSVAYYPKKWVIGLSKINRVVAFFAQRPQVQERLTEQILLAFQTILETDDVAVYVKATHFCVKCRGIKDSNSYTVTSAFGGVFLDDRETRKEFLTLLK

SEQ ID NO: 4906 - protein, 218 aa, Avibacterium volantium
  misc_feature (1)..(218): tr|A0A3S4GZM6|A0A3S4GZM6_AVIVO GTP cyclohydrolase 1 OS= Avibacterium volantium OX=762 GN=folE PE=3 SV=1
MNKISPEAEKVRQALVSKGIETPMVDMQLTKSQRREGIEQHMREVMKLIGLDLRDDSLEETPVRLAKMFVDEIFSGLDYANFPKITNIENRMKVSEMVLVNDVTLTSTCEHHFVTIDGKVSVAYYPKKWVIGLSKINRVVAFFAQRPQVQERLTEQILLAFQTILETEDVAVYVKATHFCVKCRGIKDTNSYTVTSAFGGVFLDDRETRKEFLTLINK

SEQ ID NO: 4907 - protein, 304 aa, Azoarcus communis
  misc_feature (1)..(304): tr|A0A323UPG0|A0A323UPG0_9RHOO GTP cyclohydrolase FolE2 OS=Azoarcus communis SWub3 = DSM 12120 OX=1121029 GN=f olE2 PE=3 SV=1
MNAALPDVSLTDLAPSLSSLAWVGMQGIDLPIIIAEPGYWRDLHATADVQVDLPAAHVKGIHMSRLYRLLDVLSQGEPLSPAGIHALLQAMIDSHRDCDSRCARLRLNLTLLVRRPALVTQGLSGWKSYPVRLDTSLISGRFRFRAQVTVAYSSTCPCSAALSRQSVEQGFLQAFGQHSQVEPTKVAAWLHRHATLATPHSQRSEAQVAVDINGDDTMLGLQALIDRVEQAVGTPVQTAVKRADEQAFALLNGQNLMFVEDAARRIESALNGYANPSVHVRHKESLHPHDAVAWATPPHEGVPT

SEQ ID NO: 4908 - protein, 273 aa, Azoarcus communis
  misc_feature (1)..(273): tr|A0A323UWS3|A0A323UWS3_9RHOO GTP cyclohydrolase FolE2 OS=Azoarcus communis SWub3 = DSM 12120 OX=1121029 GN=f olE2 PE=3 SV=1
MNAPDKFFLPDVQASQDHRALAIQRVGVRGLRYPLVLLDGDSAQHTVATIEMTVGLPADVKGTHMSRFVELLEVERGGLDLSGLRALFADMLVRLEATSGRIEARFPWFMRKTAPVSGVASLLDLDVTLVFEQTEHASLSSTLIVTVPVTSLCPCSKKISEYGAHNQRSHITIAACLRGDLEIGELVRMAEEEASCEVFGLLKRPDEKWVTERAYDNPKFVEDLVRDIALRLGADRRIASWRVESENFESIHNHSAYALIEGENPEAYDHAHG

SEQ ID NO: 4909 - protein, 267 aa, Azoarcus indigens
  misc_feature (1)..(267): tr|A0A4V3BP19|A0A4V3BP19_9RHOO GTP cyclohydrolase FolE2 OS=Azoarcus indigens OX=29545 GN=folE2 PE=3 SV=1
MNAPDFLRLPDVQASADERALAIQRVGVRGLRHPLALRGADGTVAHTVATVESTVALPAAVKGAHMSRFVAVLEESRGTVFDSAAFAALHAHMLARLESERGRIQFRFPCFLEKRAPVSGIASLLDIDATVEVDGALGEPPRQTLSLVVPVTSLCPCSKEISAYGAHNQRSHITLTVAPRAPLTLEELARVAEEEASSELYGLLKRADEKWVTERAYENPKFVEDLVRDIALRLRADSRLSAWRVESENFESIHNHSAYALIESGGI

SEQ ID NO: 4910 - protein, 215 aa, Azoarcus indigens
  misc_feature (1)..(215): tr|A0A4R6EH32|A0A4R6EH32_9RHOO GTP cyclohydrolase 1 OS= Azoarcus indigens OX=29545 GN=folE PE=3 SV=1
MNARHDHDHDHAAVPPPAGIGIPRQGSFDPIAFERAVGDLLAACGVAPDSAHTGRTAQRVRELWQRRLLGGYDMDPADALGDGFEDERRDMVVVRGIAIHGVCPHHLVPFRGVAHVAYLPGGRLHGFGRIARLVDAIGHRFTYQEWMTRDIADALMHHGRAQGAACVIEAEQLCLLLGEDRRGDERVVTQAYSGVFAESDQLRNEFLRAVDRRML

SEQ ID NO: 4911 - protein, 269 aa, Azoarcus sp.
  misc_feature (1)..(269): sp|A1K4Q9|GCH4_AZOSB GTP cyclohydrolase FolE2 OS=Azoarc us sp. (strain BH72) OX=62928 GN=folE2 PE=3 SV=1
MNSPLAHAIPDVQNSEDSRQIAINKVGIKSIRHPVKVSDKNGGVQHTVANFNMYVGLPHNFKGTHMSRFIEILNSNEREISVESFEPMLREMVKRLEAETGHVEMTFPYFINKSAPVSGVQSLMDYEVTFTGEIHEGGRYEFTMKVVVPVTSLCPCSKKISAYGAHNQRSHVTVTATLNDHLWIEDVVQLVEGQASCEVYGLLKRPDEKYVTERAYDNPKFVEDMVRDVAGLLNKEVRIDAYAVESENFESIHNHSAYALIERDKRIEA

SEQ ID NO: 4912 - protein, 269 aa, Azoarcus sp.
  misc_feature (1)..(269): tr|A0A558CVQ0|A0A558CVQ0_9RHOO GTP cyclohydrolase FolE2 OS=Azoarcus sp. PHD OX=1628740 GN=folE2 PE=3 SV=1
MNTQAAQAIPDVQSSIDRREIAINKVGIKAIRHPIKVSDKSGGVQHTVATFNMYVGLPHNFKGTHMSRFVEILNSNEREISVESFEPMLREMVTRLEAETGHVEMNFPYFINKAAPVSGVQSLMDYEVTFIGTIHEGGRYAFTMRIMVPVTSLCPCSKKISEYGAHNQRSHVTVTATLNDHLWIEDVVQLVEGQASCEVYGLLKRPDEKYVTERAYENPKFVEDMVRDVAGLLNHEPRIDAYSVESENFESIHNHSAYALIERDKRQAA

SEQ ID NO: 4913 - protein, 213 aa, Azoarcus tolulyticus
  misc_feature (1)..(213): tr|A0A1N6PW94|A0A1N6PW94_9RHOO GTP cyclohydrolase 1 OS= Azoarcus tolulyticus OX=34027 GN=SAMN05421829_102228 PE =3 SV=1
MSHFDEQHPPHAPCTGIGIPRSGPFDPVAFERAVNDLVAACGIAPDTTHMGRTATRVRELWQRRLLGGYELDPAEALGDGFPDERSDMVVIRGIAVHGVCPHHLVPFRGVAHVAYLPGGRLHGFGRIARLVDAIGHRFTYQEWMTRDIADALLQHGHARGAACIIEAEQLCLLLGEDRRGDERVVTQAFAGEFETREHLRSEFLHAVAGRGAR

SEQ ID NO: 4914 - protein, 269 aa, Azoarcus tolulyticus
  misc_feature (1)..(269): tr|A0A1N6WTH0|A0A1N6WTH0_9RHOO GTP cyclohydrolase FolE2 OS=Azoarcus tolulyticus OX=34027 GN=folE2 PE=3 SV=1
MKSHESHAIPDVQNANDSRQLAINKVGIKSIRHPIRVSDKSGGVQHTIATFSMYVGLPHNFKGTHMSRFIEILNGNEREISVESIEPMLREMVKRLEAETGVIEMSFPYFINKTAPVSGVQSLMDYEVTFVAEMREGGEYVFEMKVVVPVTSLCPCSKKISEYGAHNQRSHVTVTAQTNDFLWIEELVQLVESQASCELYGLLKRTDEKFVTERAYENPKFVEDMVRDVAGLLNAEKRIDRFVVESENFESIHNHSAYALIERDKRRDA

SEQ ID NO: 4915 - protein, 192 aa, Azobacteroides pseudotrichonymphae
  misc_feature (1)..(192): tr|B6YRU3|B6YRU3_AZOPC GTP cyclohydrolase 1 OS=Azobacte roides pseudotrichonymphae genomovar. CFP2 OX=511995 GN =folE PE=3 SV=1
MKRTAEELRKEEKLAFHYTQILKLLGEDPKRQGLLNTPKRVVESIMYLTKGYAQSAEEILSSAIFVEDYRQMVIVRNIDFFSLCEHHLLPFFGKAHVAYIPNNVVSGLSKIPRVVDVYARRLQIQERMTTQIKSCIQEILNPLGVMVVIEAQHMCIQMRGVEKQNSITTTSDFTGVFNQAKTREEFIKLIKN

SEQ ID NO: 4916 - protein, 183 aa, Azomonas agilis
  misc_feature (1)..(183): tr|A0A562I276|A0A562I276_9GAMM GTP cyclohydrolase 1 OS= Azomonas agilis OX=116849 GN=folE PE=3 SV=1
MSLEQHYSAILQHLGEDITREGLIDTPKRAAKAMQYLCKGYQQTLEEVTNGALFSSDTSEMVLIKDIELYSLCEHHILPFIGKAHVAYLPAGKVLGLSKVARIVDMYARRLQIQENLTRQIAEAIQQVTEAAGVAVVIEAQHMCMMMRGVEKQNSSMVTSVMLGQFRENTATRSEFLSLVRAR

SEQ ID NO: 4917 - protein, 264 aa, Azonexus fungiphilus
  misc_feature (1)..(264): tr|A0A495WF01|A0A495WF01_9RHOO GTP cyclohydrolase FolE2 OS=Azonexus fungiphilus OX=146940 GN=folE2 PE=3 SV=1
MTATSIPDVQSSADTRQIAINKVGIKSIRHPIKVQDKSVGIQHTIATFNMYVGLPHNFKGTHMSRFVEILNSHEREISVENFPAMLQDMIVRLEAETGHIEMNFPFFINKTAPVSGVQSLLDYDVTFIGDISGGEIVTSVKVVVPVTSLCPCSKKISERGAHNQRSHVTVTARTNDFMWIEELVQLVEAEASCELYGLLKRPDEKYVTERAYDNPKFVEDMVRDVAARLNAEARIDSYVVESENFESIHNHSAYALIERDKKNA

SEQ ID NO: 4918 - protein, 264 aa, Azonexus hydrophilus
  misc_feature (1)..(264): tr|A0A1R1I581|A0A1R1I581_9RHOO GTP cyclohydrolase FolE2 OS=Azonexus hydrophilus OX=418702 GN=folE2 PE=3 SV=1
MTSTSIPDVQNSADTRQIAINKVGIKSIRHPVKVGDKAAGIQHTIAVFNMYVGLPHNFKGTHMSRFVEILNSHEREISVENFPAMLQDMIVKLEAETGHIEMNFPYFINKTAPVSGVQSLMDYDVTFIGDISNGEIVTSTRVVVPVTSLCPCSKKISERGAHNQRSHVTVTARTNDFVWIEELVQLVEAEASCELFGLLKRPDEKYVTERAYDNPKFVEDMVRDVAARLNAEARVDAYVVESENFESIHNHSAYALIERDKKNG

SEQ ID NO: 4919 - protein, 266 aa, Azonexus hydrophilus
  misc_feature (1)..(266): tr|A0A1R1ID36|A0A1R1ID36_9RHOO GTP cyclohydrolase FolE2 OS=Azonexus hydrophilus OX=418702 GN=folE2 PE=3 SV=1
MNAPEKIFLPDVQSTADHRLLAIHNVGVKGLRYPMQLQAADGETISTVATLAMSVGLPADVKGTHMSRFVELLEARRGVLSQDGLFRMLEEMLLRLDAFSGRIEMAFPYFIRKAAPVSGVESLLDYDAVLIIDKQEGRYPTLTMRVTAPVTSLCPCSKKISDYGAHNQRSHITLEATLRSLMSIEELVRIAEEEASCEVFGLLKRPDEKWVTERAYDNPKFVEDLVRDIALRLMKETRIKHWKVASENFESIHNHSAYAELYGSNA

SEQ ID NO: 4920 - protein, 218 aa, Azorhizobium caulinodans
  misc_feature (1)..(218): sp|A8HUG2|GCH1_AZOC5 GTP cyclohydrolase 1 OS=Azorhizobi um caulinodans (strain ATCC 43989 / DSM 5975 / JCM 2096 6 / NBRC 14845 / NCIMB 13405 / ORS 571) OX=438753 GN=fo lE PE=3 SV=1
MDAVVKLFKEQAETEAQRQMPVHRPVDAPRPSRAEAEAAVRTLLAYIGEDPHREGLQETPARVIRSYDEIYGGYALSPDDVLDRTFGEIGSFDDFVLLKDIPFTSHCEHHMVPFMGKAHVAYFPVERVVGLSKIARLVDLYARRLQTQEHLTSQITTALDEALKPRGVAVMIEAEHMCMSMRGILKPGVTTLTSQFTGAFRDDPAEQVRFITMLRGLR

SEQ ID NO: 4921 - protein, 214 aa, Azorhizobium sp.
  misc_feature (1)..(214): tr|A0A258K668|A0A258K668_9RHIZ GTP cyclohydrolase 1 OS= Azorhizobium sp. 32-67-21 OX=1970319 GN=folE PE=3 SV=1
MDAVVKSLMDARPAGLPAANDAQVSRPSREEAEEAVRTLLAYIGEDIGREGLQDTPRRVIRAYDELYGGYGHDAEEILGRTFGEIGTFDDFVLLHNIPFFSHCEHHMVPFVGKAHVAYFPVERVVGLSKIARVVDAYARRLQTQEHLTSQIVRALDDVLKPRGVAVMIEAEHMCMSMRGISKPGVTTITSQFTGAFRNDPAEQVRFITMVRGRS

SEQ ID NO: 4922 - protein, 214 aa, Azorhizobium sp.
  misc_feature (1)..(214): tr|A0A258JQU0|A0A258JQU0_9RHIZ GTP cyclohydrolase 1 OS= Azorhizobium sp. 35-67-5 OX=1970321 GN=folE PE=3 SV=1
MDAVVKSLMDARPAGLPAANDAQVSRPSREEAEEAVRTLLAYIGEDTGREGLQDTPRRVIRAYDELYGGYGHDAEEILGRTFGEIGTFDDFVLLHNIPFFSHCEHHMVPFVGKAHVAYFPVERVVGLSKIARVVDAYARRLQTQEHLTSQIVRALDDVLKPRGVAVMIEAEHMCMSMRGISKPGVTTITSQFTGAFRNDPAEQVRFITMVRGRS

SEQ ID NO: 4923 - protein, 267 aa, Azospira oryzae
  misc_feature (1)..(267): tr|G8QMU6|G8QMU6_AZOOP GTP cyclohydrolase FolE2 OS=Azos pira oryzae (strain ATCC BAA-33 / DSM 13638 / PS) OX=64 0081 GN=folE2 PE=3 SV=1
MNAPDKMFHLPDVQATPDQRQLAIQKVGVKGLRYPLALAAADGAVQHTVAELTMAVGLAPEVKGTHMSRFVEILERPRGALQAADLPALLQEMLGHLQAESGSIDLAFPYFIAKAAPVSGVSSLLDYDVRLQVEQQPGAPIRTTLAVTAPVTSLCPCSKKISEYGAHNQRSHITISAELRQPMAVEELVRLAEEEASCEVFGLLKRPDEKWVTERAYDNPKFVEDLVRDIALRLMAEPRVGRWSVASENFESIHNHSAYAELCGENV

SEQ ID NO: 4924 - protein, 279 aa, Azospira oryzae
  misc_feature (1)..(279): tr|A0A2W5GCQ4|A0A2W5GCQ4_9RHOO GTP cyclohydrolase FolE2 OS=Azospira oryzae OX=146939 GN=folE2 PE=3 SV=1
MNRKAEFSLMPDVQSSPDSRHLAIDRVGIKAIRHPVRVADKSGGVQHTVATFNMYVQLPHNFKGTHMSRFVEILNGQEREISVESFETMLRKMVRRLEAESGHIEMSFPYFINKSAPVSGVQSLMDYDVTFTGEIHRGQYQFTMKVVVPVTSLCPCSKKISDYGAHNQRSHVTVTARTCGFVWIEELVRIVEDQASCELYGLLKRPDEKYVTEKAYDNPKFVEDMVRDVASVLNQDPRIVAYVVESENFESIHNHSAYALIERDKTTSPASLEPRIPKA

SEQ ID NO: 4925 - protein, 268 aa, Azospira sp.
  misc_feature (1)..(268): tr|A0A2R5ECU5|A0A2R5ECU5_9RHOO GTP cyclohydrolase FolE2 OS=Azospira sp. I13 OX=1765050 GN=folE2_2 PE=3 SV=1
MNAPDKMFHLPDVQATPDQRQLAIQKVGVKGLRYPLALATPNGTIQNTVAQLTMAVGLPPEVKGTHMSRFVEILERPRGALQAAELPALLAEMLTHLQAESGSIDLAFPYFIAKVAPVSGVESLLDYDVALKVEKRQGSAQADLTLAVTAPVTSLCPCSKKISEYGAHNQRSHITITAQLRQPMAVEELVRLAEEEASCEVFGLLKRPDEKWVTERAYDNPKFVEDLVRDIALRLMAEPRIGRWSVASENFESIHNHSAYAELSGENA

SEQ ID NO: 4926 - protein, 268 aa, Azospira sp.
  misc_feature (1)..(268): tr|A0A2R5EET2|A0A2R5EET2_9RHOO GTP cyclohydrolase FolE2 OS=Azospira sp. I13 OX=1765050 GN=folE2_1 PE=3 SV=1
MHTMSTAPIPDIQNSEDTRRIPIDKVGIKDIRHPVKIRDKSGDVRHTVANFNMTVGLPHNFKGTHMSRFVEILNSHEREISVESFPAMLEAMVARLEAKTGQIEMRFPYFISKTAPVSGVPSLMDYDVTFIGDIDGGRIRSTVRVLVPVTSLCPCSKEISAYGAHNQRSHVTVTAQLNAFVWIEDLIQMVEAQASCELYGLLKRPDEKYVTERAYDNPKFVEDMVRDVAARLDADARIDHYVVESENFESIHNHSAYALIEKDKRADV

SEQ ID NO: 4927 - protein, 195 aa, Azospirillum brasilense
  misc_feature (1)..(195): tr|A0A4D8PLG3|A0A4D8PLG3_AZOBR GTP cyclohydrolase 1 OS= Azospirillum brasilense OX=192 GN=folE PE=3 SV=1
MARPTRAEAEDAVRTLIRWAGDNPSREGLVGTPDRVVRSYEEFFAGYAIDPEEILARTFEETDGYDEMVVLRDIRLESYCEHHMVPIIGKAHVAYLPRQRVVGISKLARLVEAYAKRLQIQEKMTAQIANAIDQVLQPEGVAVVIEAQHQCMTTRGVHKTGVTMVTSRMLGAFRSDPSTRREFLSMIGNPGSRAE

SEQ ID NO: 4928 - protein, 229 aa, Azospirillum brasilense
  misc_feature (1)..(229): tr|G8AEE9|G8AEE9_AZOBR GTP cyclohydrolase I OS=Azospiri llum brasilense Sp245 OX=1064539 GN=AZOBR_10095 PE=4 SV =1
MTVQANVLALVQEAMEARRSNEALDTPLDAAGEAAMIDAAARKVEELLDVLRIDHRNDHNTRDTPRRVAKMLVRELLKGRFTAAPELTEFRNAEEFDHLIVTGPIAVRSTCAHHLMPIYGTAFIGILPAKGGNILGLSKYDRIVDHFAARFQIQEELVKQIGNFIVEATRPRGLAVRISAVHMCKTHRGVRAGHDSRMVNSSFHGEMLESRDLREEFLRECATLERSAR

SEQ ID NO: 4929 - protein, 218 aa, Azospirillum doebereinerae
  misc_feature (1)..(218): tr|A0A3S1CI24|A0A3S1CI24_9PROT GTP cyclohydrolase 1 OS= Azospirillum doebereinerae OX=92933 GN=folE PE=3 SV=1
MTAPTLPPAETKLRGLQRLRAPDDRRPSRAEAEEAVRTLLRWAGDDPEREGLTGTPDRVVRSYEEFFAGYDVDPVAILQRTFEETDGYDEMVILRDIRVESYCEHHMVPIVGRAHVAYLPRRRVVGISKLARLVEAYAKRLQIQEKMTAQIANTIDEVLQPEGVAVVIEAQHQCMTTRGIHKTGVTMVTSRMLGAFRTDPSTRREFLTMIGNPVSRAE

SEQ ID NO: 4930 - protein, 202 aa, Azospirillum humicireducens
  misc_feature (1)..(202): tr|A0A160JJP6|A0A160JJP6_9PROT GTP cyclohydrolase 1 OS= Azospirillum humicireducens OX=1226968 GN=folE PE=3 SV= 1
MSRPDTIARPSRAEAEEAVRTLIRWAGDDPAREGLVGTPDRVVRSYDEFFAGYRIDPVEILSRTFEETDGYDEMVILRDIRVESYCEHHMVPIIGKAHVAYLPRRRVVGISKLARLVEAYGKRLQIQEKMTAQIANTIDEVLQPEGVAVVVEAQHQCMTTRGVHKTGVTMVTSRMLGAFRTDPSTRREFLTMIGNPSSRGGE

SEQ ID NO: 4931 - protein, 202 aa, Azospirillum lipoferum
  misc_feature (1)..(202): tr|A0A5A9GYP7|A0A5A9GYP7_AZOLI GTP cyclohydrolase 1 OS= Azospirillum lipoferum OX=193 GN=folE PE=3 SV=1
MSRPDAAARPSRAEAEEAVRTLIRWAGDDPAREGLVGTPDRVVRSYEEFFAGYGIDPVEILSRTFEETDGYDEMVVLRDIRVESYCEHHMVPIIGKAHVAYLPRRRVVGISKLARLVEAYGKRLQIQEKMTAQIANTIDEVLQPEGVAVVVEAQHQCMTTRGVHKTGVTMVTSRMLGAFRTDPSTRREFLTMIGNPSSRGME

SEQ ID NO: 4932 - protein, 224 aa, Azospirillum lipoferum
  misc_feature (1)..(224): tr|G7Z767|G7Z767_AZOL4 GTP cyclohydrolase 1 OS=Azospiri llum lipoferum (strain 4B) OX=862719 GN=folE PE=3 SV=1
MTATKTPHVNPPAVDNVLRGPGLSRPGAIVRPSRAEAEEAVRTLIRWAGDDPAREGLVGTPDRVVRSYEEFFAGYGIDPVEILSRTFEETDGYDEMVILRDIRVESYCEHHMVPIIGKAHVAYLPRRRVVGISKLARLVEAYGKRLQIQEKMTAQIANTIDEVLQPEGVAVVVEAQHQCMTTRGVHKTGVTMVTSRMLGAFRTDPSTRREFLTMIGNPTSRGMD

SEQ ID NO: 4933 - protein, 224 aa, Azospirillum oryzae
  misc_feature (1)..(224): tr|A0A1X7HDT5|A0A1X7HDT5_9PROT GTP cyclohydrolase 1 OS= Azospirillum oryzae OX=286727 GN=folE PE=3 SV=1
MTATKTPHAKPPVADNVLRGPGLSRPDAVARPSRAEAEEAVRTLIRWAGDDPAREGLVGTPDRVVRSYEEFFAGYGIDPVEILSRTFEETDGYDEMVVLRDIRVESYCEHHMVPIIGKAHVAYLPRRRVVGISKLARLVEAYGKRLQIQEKMTAQIANTIDEVLQPEGVAVVVEAQHQCMTTRGVHKTGVTMVTSRMLGAFRTDPSTRREFLTMIGNPSSRGME

SEQ ID NO: 4934 - protein, 202 aa, Azospirillum oryzae
  misc_feature (1)..(202): tr|A0A5A9FV62|A0A5A9FV62_9PROT GTP cyclohydrolase 1 OS= Azospirillum oryzae OX=286727 GN=folE PE=3 SV=1
MSRPDAVARPSRTEAEEAVRTLIRWAGDDPAREGLVGTPDRVVRSYEEFFAGYGIDPVEILSRTFEETDGYDEMVVLRDIRVESYCEHHMVPIIGKAHVAYLPRRRVVGISKLARLVEAYGKRLQIQEKMTAQIANTIDEVLQPEGVAVVVEAQHQCMTTRGVHKTGVTMVTSRMLGAFRTDPSTRREFLTMIGNPSSRGME

SEQ ID NO: 4935 - protein, 202 aa, Azospirillum palustre
  misc_feature (1)..(202): tr|A0A2B8BB89|A0A2B8BB89_9PROT GTP cyclohydrolase 1 OS= Azospirillum palustre OX=2044885 GN=folE PE=3 SV=1
MSRPDALARPSRAEAEEAVRTLIRWAGDDPAREGLVGTPDRVVRSYEEFFAGYGIDPVEILSRTFEETDGYDEMVVLRDIRVESYCEHHMVPIIGKAHVAYLPRRRVVGISKLARLVEAYGKRLQIQEKMTAQIANTIDEVLQPEGVAVVVEAQHQCMTTRGIHKTGVTMVTSRMLGAFRTDPSTRREFLTMIGNPSSRGME

SEQ ID NO: 4936 - protein, 202 aa, Azospirillum sp.
  misc_feature (1)..(202): tr|A0A2U1WL28|A0A2U1WL28_9PROT GTP cyclohydrolase 1 OS= Azospirillum sp. TSA6c OX=709813 GN=folE PE=3 SV=1
MSRPDALARPSRADAEEAVRTLIRWAGDDPAREGLVGTPDRVVRSYEEFFAGYGIDPVEILSRTFEETDGYDEMVVLRDIRVESYCEHHMVPIIGKAHVAYLPRRRVVGISKLARLVEAYGKRLQIQEKMTAQIANTIDEVLQPEGVAVVVEAQHQCMTTRGIHKTGVTMVTSRMLGAFRTDPSTRREFLTMIGNPSSRGME

SEQ ID NO: 4937 - protein, 208 aa, Azospirillum sp.
  misc_feature (1)..(208): tr|A0A2U1X7K7|A0A2U1X7K7_9PROT GTP cyclohydrolase 1 OS= Azospirillum sp. TSH20 OX=652754 GN=folE PE=3 SV=1
MLRGPGLSRPDPVARPSRTEAEEAVRTLIRWAGDDPAREGLVGTPDRVVRSYEEFFAGYGIDPVEILSRTFEETDGYDEMVVLRDIRVESYCEHHMVPIIGKAHVAYLPRRRVVGISKLARLVEAYGKRLQIQEKMTAQIANTIDEVLQPEGVAVVVEAQHQCMTTRGVHKTGVTMVTSRMLGAFRTDPSTRREFLTMIGNPSSRGME

SEQ ID NO: 4938 - protein, 210 aa, Azospirillum thiophilum
  misc_feature (1)..(210): tr|A0A0F2L3N7|A0A0F2L3N7_9PROT GTP cyclohydrolase 1 OS= Azospirillum thiophilum OX=528244 GN=folE PE=3 SV=1
MLRGLGRPRSETPAVVRPSRADAEEAVRTLIRWAGDDPTREGLAGTPDRVVRSYEEFFAGYGIDPVEILSRTFEETDGYDEMVVLRDIRVESYCEHHMVPIIGKAHVAYLPRRRVVGISKLARLVEAYGKRLQIQEKMTAQIANTIDEVLQPEGVAVVVEAQHQCMTTRGIHKTGVTMVTSRMLGAFRTDPSTRREFLTMIGNPSSRGME

SEQ ID NO: 4939 - protein, 181 aa, Azotobacter beijerinckii
  misc_feature (1)..(181): tr|A0A1H9T0K2|A0A1H9T0K2_9GAMM GTP cyclohydrolase 1 OS= Azotobacter beijerinckii OX=170623 GN=folE PE=3 SV=1
MSLEQQYTEILASLGEDIFREGLVDTPKRAAKAMQYLCRGYQQTLEEVVNGALFSSDNSEMVMVKNIELYSLCEHHILPFIGKAHVAYLPNGKVLGLSKVARIVDMYARRLQIQENLTRQIAEAVEQVTGALGVGVVIEAQHMCMMMRGVEKQNSTMVTSVMLGHFRSNAATRSEFLSLIN

SEQ ID NO: 4940 - protein, 181 aa, Azotobacter beijerinckii
  misc_feature (1)..(181): tr|A0A1I4I960|A0A1I4I960_9GAMM GTP cyclohydrolase 1 OS= Azotobacter beijerinckii OX=170623 GN=folE PE=3 SV=1
MSLEQQYTEILASLGEDISREGLIDTPKRAAKAMQYLCRGYQQTLEEVVNGALFSSDNSEMVMVKNIELYSLCEHHILPFIGKAHVAYLPNGKVLGLSKVARIVDMYARRLQIQENLTRQIAEAVEQVTGALGVGVVIEAQHMCMMMRGVEKQNSTMVTSVMLGHFRSNAATRSEFLSLIN

SEQ ID NO: 4941 - protein, 181 aa, Azotobacter chroococcum
  misc_feature (1)..(181): tr|A0A0C4WMT7|A0A0C4WMT7_9GAMM GTP cyclohydrolase 1 OS= Azotobacter chroococcum NCIMB 8003 OX=1328314 GN=folE P E=3 SV=1
MSLEQQYTAILAHLGEDISREGLVDTPKRAAKAMQYLCRGYQQTLEEVVNGALFSSDNSEMVMVKNIELYSLCEHHMLPFIGKAHVAYLPNGKVLGLSKVARIVDMYARRLQIQENLTRQIAEAVEQVTGASGVGVVIEAQHMCMMMRGVEKQNSTMVTSVMLGHFRSNAATRSEFLSLIN

SEQ ID NO: 4942 - protein, 181 aa, Azotobacter chroococcum; identical to SEQ ID NO: 4941
  misc_feature (1)..(181): tr|A0A4Q9VPX0|A0A4Q9VPX0_9GAMM GTP cyclohydrolase 1 OS= Azotobacter chroococcum OX=353 GN=folE PE=3 SV=1

SEQ ID NO: 4943 - protein, 181 aa, Azotobacter vinelandii
  misc_feature (1)..(181): sp|C1DHG2|GCH1_AZOVD GTP cyclohydrolase 1 OS=Azotobacte r vinelandii (strain DJ / ATCC BAA-1303) OX=322710 GN=f olE PE=3 SV=1
MSLEQQYTAILAQLGEDVSREGLVDTPKRAAKAMQYLCRGYQQTLEEVVNGALFSSDNSEMVMVKNIELYSLCEHHMLPFIGKAHVAYLPNGKVLGLSKVARIVDMFARRLQIQENLTRQIAEAVEQVTGASGVGVVIEAQHMCMMMRGVEKQNSTLVTSVMLGHFRSNTATRSEFLSLIK

SEQ ID NO: 4944 - protein, 298 aa, Azotobacter vinelandii
  misc_feature (1)..(298): tr|M9YKD4|M9YKD4_AZOVI GTP cyclohydrolase FolE2 OS=Azot obacter vinelandii CA6 OX=1283331 GN=folE2 PE=3 SV=1
MSIPLPDVALTELSATRAPLDWVGMDGIDVPILLDEPEFAYPVHARAEVQVDLPDPAIKGIHMSRLYRLLDGFAGRDRLNPASLAVLLREMVFSHADCNSTRARLTLAFSLLCRRPALLTQGLSGWKSYPVRLEAVWEAGRLSLDATLQIGYSSTCPCSAALTRQLIEQAFVERFSAAGQVEPAAVAAWLQRNATLATPHSQRSVAEVRVRIPEGATRLGLLALIERIETCLGTPVQTAVKRADEQAFARLNGQNLMYVEDAARKIRQAVAEGFSQFSVSVRHVESLHPHDAVASSSS

SEQ ID NO: 4945 - protein, 188 aa, Bacillaceae bacterium; identical to SEQ ID NO: 4102
  misc_feature (1)..(188): tr|A0A3E0JVR7|A0A3E0JVR7_9BACI GTP cyclohydrolase 1 OS= Bacillaceae bacterium OX=1889774 GN=folE PE=3 SV=1

SEQ ID NO: 4946 - protein, 188 aa, Bacillaceae bacterium
  misc_feature (1)..(188): tr|A0A271M7I6|A0A271M7I6_9BACI GTP cyclohydrolase 1 OS= Bacillaceae bacterium SAOS 7 OX=2015052 GN=folE PE=3 SV =1
MAEVNRAQIEEAVRLILEAVGEDPNREGLLDTPKRVAKMYEEVFSGLNKDPKEYFETVFGEDYEELVLVKDIPFYSMCEHHLVPFFGHAHVAYFPKNGKVTGLSKLARAVETVARRPQLQERITSEVADAIMETLEPHGVMVVVEAEHMCMAMRGVKKPGSKTVTTAARGKYADDVHARSELLQLIKA

SEQ ID NO: 4947 - protein, 185 aa, Bacilli bacterium
  misc_feature (1)..(185): tr|A0A0K0GDT2|A0A0K0GDT2_9FIRM GTP cyclohydrolase 1 OS= Bacilli bacterium VT-13-104 OX=1637974 GN=folE PE=3 SV= 1
MDKEKIQLAVRQILEAIGEDPDRQGLLDTPKRVANMYEEVFSGLSKNPAIHCETVFEEQHEEMVLVKDIPFSSMCEHHLVPFIGTAHVAYIPKNGRVIGLSKMARIVDDISKRPQLQERITKSVADLLMEELDPVGVMVILEAEHMCMSIRGVKKQGSKTVTSAVRGSFRENSKSRNEVLALISK

SEQ ID NO: 4948 - protein, 189 aa, Bacillus aerius
  misc_feature (1)..(189): tr|A0A3A9DH94|A0A3A9DH94_9BACI GTP cyclohydrolase 1 OS= Bacillus aerius OX=293388 GN=folE PE=3 SV=1
MREINKEQIEQAVRQILEAIGEDPNREGLLDTPKRVAKMYAEVFAGLNEDPKEHFKTIFGEDHEELVLVKDIPFYSMCEHHLVPFYGKAHVAYIPKGGKVTGLSKLARAVEAVAKRPQLQERITSTIADSIVETLTPHGVMVVVEAEHMCMTMRGVKKPGSKTVTSAVRGTFRQDVAARSEVLELIKTS

SEQ ID NO: 4949 - protein, 300 aa, Bacillus aerius
  misc_feature (1)..(300): tr|A0A3A9DBJ8|A0A3A9DBJ8_9BACI GTP cyclohydrolase FolE2 OS=Bacillus aerius OX=293388 GN=folE2 PE=3 SV=1
MERILHLPAKPERHRRFGSVEAVKGIKPTDKEQMKDIQNTPNDYFFDIDHVGVSNVSHPILIASSLKPFTQTTIGAFSFTTSLARGRKGINMSRLTEQLQRYHEANWTIDVHTLKDFAKDLADNMEQQSASVSVSFPWYFERLSPETKLSGLMHADIHMTVSYHENKGFSQTVGITAHVTTLCPCSKEISEYSAHNQRGIIKITAHINEQAEMPYDFKTELLAAAETNASAKLHPVLKRPDEKRVTEQAYENPRFVEDVIRLTAADLYEMNWISAFEIECRNEESIHMHDAVARLSFSKI

SEQ ID NO: 4950 - protein, 298 aa, Bacillus aerophilus
  misc_feature (1)..(298): tr|A0A410KT82|A0A410KT82_9BACI GTP cyclohydrolase FolE2 OS=Bacillus aerophilus OX=293389 GN=folE2 PE=3 SV=1
MCSFPSKKERHAQFGSVPPSARTKPCQKEDMIDIQQTEQDFYFDLEQVGICRVSYPVNILSKTTPQHQTASADFTLSTYLPAHQKGIHMSRLTEQLHSFYESGKPVDVDSLKELTAQLAKQMNQPSASIQVSFPWYMEKKSPISGKSGLMHADVQYDIHFHEENGWICYIGCTAQVTTLCPCSKEISEYGAHNQRGTVSIQVELFEQSQLPDDMKADLLQIIESNASAPLYPVLKRPDEKQVTEEAYENPRFVEDVARLIAAELYEQNWIKGFQIECRNEESIHQHDAYAKCSYQKKL

SEQ ID NO: 4951 - protein, 189 aa, Bacillus aerophilus
  misc_feature (1)..(189): tr|A0A410KWB4|A0A410KWB4_9BACI GTP cyclohydrolase 1 OS= Bacillus aerophilus OX=293389 GN=folE PE=3 SV=1
MSEINKELIEHAVRDILKAIGEDPDREGLLDTPKRVAKMYEEVFSGLNEDPKEHFKTIFGEDHEELVLVKDIAFHSMCEHHLVPFYGKAHVAYIPRGGKVTGLSKLARAVEAVAKRPQLQERITSTIADSMVETLNPHGVMIVVEAEHMCMTMRGVKKPGAKTVTSAVRGTFANDAAARAEVLSFIKND

SEQ ID NO: 4952 - protein, 294 aa, Bacillus akibai
  misc_feature (1)..(294): tr|W4QN73|W4QN73_BACA3 GTP cyclohydrolase FolE2 OS=Baci llus akibai (strain ATCC 43226 / DSM 21942 / JCM 9157 / 1139) OX=1236973 GN=folE2 PE=3 SV=1
MKRSLPPKAERHRHFGTVDPIIGSKPTDKEKMPDLQNKPADFYFPIQQVGISDVKYPVMIESLIAPTTQTTTATFALTTSLEQDFKGINMSRLTEQLHLFFQTHLLTDETLREFTAILAREMNQKAANVRVTFPWFFTKTSPALQKEGMAHAEVTYDVSFDETKGYTTVISLTGAVTTLCPCSKEISEYSAHNQRSFVTMTVTVDEGQAADWKVVLLEAAESNASSILYPVLKRPDEKAVTERAYENPRFVEDLVRLVSADLYENDAVQSFTVECRNEESIHQHDAIAKLSYTK

SEQ ID NO: 4953 - protein, 189 aa, Bacillus albus
  misc_feature (1)..(189): tr|A0A1J9UYD8|A0A1J9UYD8_9BACI GTP cyclohydrolase 1 OS= Bacillus albus OX=2026189 GN=folE PE=3 SV=1
MAKVNLEQIEHAVRLILEAIGDDPNREGVLDTPKRVAKMYAEVFSGMHEDPKEHLHKVFGEDHEELVLVKDIPFYSMCEHHLVPFYGVAHVAYIPQGGKVTGLSKLARTVDTIARRPQLQERITSTVANSIMEVLEPHGVMVVVEAEHMCMTMRGVKKPGAKTVTTAVRGVLENDAAARSEILSFIKTK

SEQ ID NO: 4954 - protein, 188 aa, Bacillus alcalophilus
  misc_feature (1)..(188): tr|A0A094WSV1|A0A094WSV1_BACAO GTP cyclohydrolase 1 OS= Bacillus alcalophilus ATCC 27647 = CGMCC 1.3604 OX=1218 173 GN=folE PE=3 SV=1
MQSVDHKKIQQAVTMILEAIGEDPSREGLEDTPKRVAKMYAEVFQGLNQDPKEHFQTVFGEDHEELVLVKDIPFFSMCEHHLVPFFGHAHVGYIPRGGKVTGLSKLARAVEAVAKRPQLQERITATIADSVVESLDPHGVIVVVEAEHMCMTMRGVKKPGAKTITTAVRGKYAEDASLRAEVLGFIKS

SEQ ID NO: 4955 - protein, 298 aa, Bacillus altitudinis
  misc_feature (1)..(298): tr|A0A5D4P962|A0A5D4P962_9BACI GTP cyclohydrolase FolE2 OS=Bacillus altitudinis OX=293387 GN=folE2 PE=3 SV=1
MRSFPSKKERHAQFGSVPPSARTKPCQKEDMIDIQQTEQDFYFDLEQVGICRVSYPVHILSKTAPQHQTSSADFTLSTYLPAHQKGIHMSRLTEQLHSFYESGKPVDVDSLKELTAQLAKQMHQPSASIQVSFPWYMEKKSPISGKSGLMHADVQYDIHFHEENGWLCHIGCTTQVTTLCPCSKEISEYGAHNQRGTVSIQVELFEQRQLPDDMKADLLQIIESNASAPLYPVLKRPDEKQVTEEAYENPRFVEDVTRLIAAELYEQNWIKGFQIECRNEESIHQHDAYAKCSYQKKL

SEQ ID NO: 4956 - protein, 189 aa, Bacillus altitudinis
  misc_feature (1)..(189): tr|A0A5K1NBV5|A0A5K1NBV5_9BACI GTP cyclohydrolase I typ e 1 OS=Bacillus altitudinis OX=293387 GN=B4133_0468 PE= 4 SV=1
MSDDLRMGLLEDQVRNMLELLGEDPTREGLRDTPKRVAKMYKEVFEGIGVNPETALTTTFEEEYEGMVVVKDINYYTFCEHHLIPFFGKAHIGYMPKGRVIGLSKFARLVELISKRPQVQERMTQQMANAIMNVLQPEGVIVSVEGQHLCMCARGVKKPGSSTVTTIKKGLFKEQQSLVHEFEQALTRD

SEQ ID NO: 4957 - protein, 190 aa, Bacillus amyloliquefaciens
  misc_feature (1)..(190): tr|A0A0D7XQI6|A0A0D7XQI6_BACAM GTP cyclohydrolase 1 OS= Bacillus amyloliquefaciens OX=1390 GN=folE PE=3 SV=1
MKEVNKEQIEQAVRQILEAIGEDPDREGLLDTPKRVAKMYAEVFSGLNEDPKEHFKTVFGEDHEELVLVKDIAFHSMCEHHLVPFYGKAHIAYIPRGGKVTGLSKLARAVEAVSKRPQLQERITSTIAESIVETLDPHGVMVVVEAEHMCMTMRGVRKPGAKTVTSAVRGIFKDDAAARSEVLEHIKRAD

SEQ ID NO: 4958 - protein, 190 aa, Bacillus amyloliquefaciens
  misc_feature (1)..(190): tr|A0A5C2Q8C1|A0A5C2Q8C1_BACAM GTP cyclohydrolase 1 OS= Bacillus amyloliquefaciens OX=1390 GN=folE PE=3 SV=1
MKEVNKEQIEQAVRQILEAIGEDPDREGLLDTPKRVAKMYAEVFSGLNEDPKEHFKTVFGEEHEELVLVKDIAFHSMCEHHLVPFYGKAHIAYIPRGGKVTGLSKLARAVEAVSKRPQLQERITSTIAESIVETLDPHGVMVVVEAEHMCMTMRGVRKPGAKTVTSAVRGIFKDDAAARSEVLEHIKRAD

SEQ ID NO: 4959 - protein, 189 aa, Bacillus anthracis; identical to SEQ ID NO: 4953
  misc_feature (1)..(189): sp|C3P598|GCH1_BACAA GTP cyclohydrolase 1 OS=Bacillus a nthracis (strain A0248) OX=592021 GN=folE PE=3 SV=1

SEQ ID NO: 4960 - protein, 189 aa, Bacillus anthracis; identical to SEQ ID NO: 4953
  misc_feature (1)..(189): tr|A0A0B5V284|A0A0B5V284_BACAN GTP cyclohydrolase 1 OS= Bacillus anthracis OX=1392 GN=folE PE=3 SV=1

SEQ ID NO: 4961 - protein, 188 aa, Bacillus aquimaris
  misc_feature (1)..(188): tr|A0A1J6WH89|A0A1J6WH89_9BACI GTP cyclohydrolase 1 OS= Bacillus aquimaris OX=189382 GN=folE PE=3 SV=1
MAEVNHSQIEEAVRLILEAIGENPNREGLLDTPKRVAKMYAEVFSGIDHDPKGYFETIFSEDHEELVLVKDIPFYSMCEHHLVPFYGRAHVAYIPRNGRVTGLSKLARAVESVARRPQLQERITSTVADSIMETLEPYGVMVVVEAEHMCMTMRGVKKPGSSTVTTAVRGTFKEDSQARNEVLSFIKK

SEQ ID NO: 4962 - protein, 212 aa, Bacillus aquimaris
  misc_feature (1)..(212): tr|A0A5D4TU67|A0A5D4TU67_9BACI GTP cyclohydrolase 1 OS= Bacillus aquimaris OX=189382 GN=folE PE=3 SV=1
MLMTEDQFMLQKLQDLFKGTSGDIDKDIIKAQQYMDGIKNLIEICGDDPDRDGLQETPFRVLKAFLEYTEGYREDPKVHLEKVFDVDHKELVMVKDIEFYSMCEHHFAPFFGVAHVGYVPDRKITGLSKIGRLVEGYAKRFQVQERLTNEIAQAVEEVLEPQGVMVVVEAKHMCMCGRGIKKSTASTTTTAVRGIYAEKTENRMEFLSLLNR

SEQ ID NO: 4963 - protein, 188 aa, Bacillus aryabhattai
  misc_feature (1)..(188): tr|A0A264YZ25|A0A264YZ25_9BACI GTP cyclohydrolase 1 OS= Bacillus aryabhattai OX=412384 GN=folE PE=3 SV=1
MSAVNKEQIEQAVRQILEAIGEDPNREGLLDTPKRVAKMYEEVFSGLKEDPNEHFKTIFGEEHEELVLVKDINFHSMCEHHLVPFYGKVHVAYIPKGGRVTGLSKLARAVEAVSKRPQLQERITSTVADSIVETLTPHGVMVIVEAEHMCMTMRGVRKPGAMTVTSAVRGVFEHDQAARAEVLSLIKS

SEQ ID NO: 4964 - protein, 188 aa, Bacillus aryabhattai
  misc_feature (1)..(188): tr|A0A0J6SY62|A0A0J6SY62_9BACI GTP cyclohydrolase 1 OS= Bacillus aryabhattai OX=412384 GN=folE PE=3 SV=1
MSSVNKPQIEQAVRLILEAIGEDPNREGLLDTPKRVAKMYEEVFSGLNEDPKEHFKTVFGEDHEELVLVKDIPFYSMCEHHLVPFYGKAHVAYIPKGGRVTGLSKLARAVEAVAKRPQLQERITSTVADSIVETLEPHGVMVVVEAEHMCMTMRGIKKPGAMTITSAVRGVLEHDASSRAEVLSLIKS

SEQ ID NO: 4965 - protein, 188 aa, Bacillus asahii
  misc_feature (1)..(188): tr|A0A3Q9RPV9|A0A3Q9RPV9_9BACI GTP cyclohydrolase 1 OS= Bacillus asahii OX=228899 GN=folE PE=3 SV=1
MANVNHAKIEEAVKMILEAVGEDPEREGLLDTPQRVARMYEEIFSGLKQDPKECFETVFGEDHEELVLVKDIPFYSVCEHHLVPFYGKAHVAYIPRNGRVTGLSKLARAVEAVCRRPQLQERITATVVDAIMDKLEPHGAMVVIEAEHMCMTMRGVKKPGSKTVTSAVRGVFAEDYRMRTEVLAFIKE

SEQ ID NO: 4966 - protein, 217 aa, Bacillus asahii
  misc_feature (1)..(217): tr|A0A3T0KQQ7|A0A3T0KQQ7_9BACI GTP cyclohydrolase 1 OS= Bacillus asahii OX=228899 GN=folE PE=3 SV=1
MSFNEQKLIAQKFPDIFEQDDATEIHRKIDQSQHFMEAVKGLIELCGDNPNRDGLIETPYRVLKAFLEYTEGYREDPKAHLLKTFDVNHQELVLVRDIEFYSMCEHHFAPFFGVAHVGYIPNEKITGLSKIARMVEGYAKRFQVQERLTTEIAEAIEEILQPKGTMVVIEAKHMCMCGRGIKKSNASTATSSVRGIFADKSETRAEFLSILQRPNVL

SEQ ID NO: 4967 - protein, 299 aa, Bacillus atrophaeus
  misc_feature (1)..(299): tr|A0A0H3E6X2|A0A0H3E6X2_BACA1 GTP cyclohydrolase FolE2 OS=Bacillus atrophaeus (strain 1942) OX=720555 GN=folE 2 PE=3 SV=1
MKRNIMLPKKAERHQYFGSVDPVKGEKPVEKEKMKDLQNTNKDYFFEIDHVGVSNVSHPMSITSAMEPFEQATVGNFTMATNLKRNQKGINMSRLTEQLQDYHQRGWVLSLDSLQQFTKELAEKMNQMSAAVEVRFPWYFERKSPMLQKAGLMHADITIHMTYQEDLPYLQRVGISAKVTTLCPCSKEISEYSAHNQRGTVNILADIHPEAPLPKDFKTDLLHAAESNASAMLHPVLKRPDEKAVTETAYENPRFVEDLIRLIAADLYELDWVSAFEIECHNEESIHLHDAYAKLSFSK

SEQ ID NO: 4968 - protein, 190 aa, Bacillus atrophaeus
  misc_feature (1)..(190): tr|A0A080UIG0|A0A080UIG0_BACAT GTP cyclohydrolase 1 OS= Bacillus atrophaeus OX=1452 GN=folE PE=3 SV=1
MKEVNKEQIEQAVRQILEAIGEDPNREGLLDTPKRVAKMYAEVFSGLNEDPKEHFQTVFGEDHEELVLVKDIAFHSMCEHHLVPFYGKAHIAYIPRGGKVTGLSKLARAVEAVAKRPQLQERITSTIAESIVETLDPHGVMVVVEAEHMCMTMRGVRKPGAKTVTSAVRGIFKNDAAARSEVLDHIKRHD

SEQ ID NO: 4969 - protein, 298 aa, Bacillus australimaris
  misc_feature (1)..(298): tr|A0A0N8HVR4|A0A0N8HVR4_9BACI GTP cyclohydrolase FolE2 OS=Bacillus australimaris OX=1326968 GN=folE2 PE=3 SV= 1
MRSFPPKEVRHQLFGSVPPSLGTKPCQKEDMTDIQKTEQDFYFHLEQVGICRMSYPVHIMSKTAPQHQTTAAAFTLSTSLAAHQKGIHMSRPSEQLHMFYESSKPLDVNALKELTAALALQMNQSTASVHVSFPWYMEKQSPVTGKSGLMHATIKYDVHFHEKDGWTCHVGCDAQVTTLCPCSKEISEYGAHNQRGSVSIQVKLFEHAPLPDDMKAALLQIIESNASAPLYPVLKRPDEKKVTEEAYENPRFVEDMTRLIAIELYEQPWIQGFQVECRNEESIHQHDAYAKCSYEKNL

SEQ ID NO: 4970 - protein, 189 aa, Bacillus australimaris
  misc_feature (1)..(189): tr|A0A0P7GCM6|A0A0P7GCM6_9BACI GTP cyclohydrolase 1 OS= Bacillus australimaris OX=1326968 GN=folE PE=3 SV=1
MSEVNKELIEHAVRDILKAIGEDPDREGLLDTPKRVAKMYEEVFSGLNEDPKEHFKTIFGEDHEELVLVKDIAFHSMCEHHLVPFYGKAHVAYIPRGGKVTGLSKLARAVEAVAKRPQLQERITSTIADSMVETLDPHGVMIVVEAEHMCMTMRGVKKPGAKTVTSAVRGTFANDAAARAEVLSFIKND

SEQ ID NO: 4971 - protein, 187 aa, Bacillus azotoformans
  misc_feature (1)..(187): tr|A0A072NS74|A0A072NS74_BACAZ GTP cyclohydrolase 1 OS= Bacillus azotoformans MEV2011 OX=1348973 GN=folE PE=3 S V=1
MNINHEQIEHAVRLILEAVGEDPNREGLLDTPKRVAKMYAEVFAGLRKDPKEYFDTIFSENHEELVLVKDIPFYSMCEHHLVPFFGKAHVAYIPKGGKVVGLSKLARSVEAVAGRPQLQERITTTVAESIVDKLTPYGVMVVVEAEHMCMTMRGVKKPGSKTVTSAVRGIFEKDAAARAEVLSLIKE

SEQ ID NO: 4972 - protein, 187 aa, Bacillus azotoformans
  misc_feature (1)..(187): tr|K6DGY5|K6DGY5_BACAZ GTP cyclohydrolase 1 OS=Bacillus azotoformans LMG 9581 OX=1131731 GN=folE PE=3 SV=1
MNINHEQIEHAVRLILEAVGEDPNREGLLDTPKRVAKMYAEVFAGLRKDPKEYFDTIFSENHEELVLVKDIPFYSMCEHHLVPFFGKAHVAYIPKGGKVVGLSKLARSVEAVAGRPQLQERITTTVAETIVDKLTPYGVMVVVEAEHMCMTMRGVKKPGSKTVTSAVRGIFEKDAAARAEVLSLIKE

SEQ ID NO: 4973 - protein, 188 aa, Bacillus bacterium
  misc_feature (1)..(188): tr|A0A3D0E2R4|A0A3D0E2R4_9BACI GTP cyclohydrolase 1 OS= Bacillus bacterium OX=2053512 GN=folE PE=3 SV=1
MGKFDRKQIEEAVRMILEAIGEDPNREGLLDTPKRVAKMYEEVFAGINIDPEQYFETIFGEDHEELVLVKDIPFYSLCEHHLVPFFGKAHVAYIPRNGRVTGLSKLARAVEAVARRPQLQERITSTVADAIMKKLEPHGVMVIIEAEHMCMTMRGVKKPGSKTVTSAVRGIFLKDNQSRNEVLSLIKQ

SEQ ID NO: 4974 - protein, 189 aa, Bacillus bacterium; identical to SEQ ID NO: 4953
  misc_feature (1)..(189): tr|A0A506QM61|A0A506QM61_9BACI GTP cyclohydrolase 1 OS= Bacillus bacterium OX=2053512 GN=folE PE=3 SV=1

SEQ ID NO: 4975 - protein, 188 aa, Bacillus badius
  misc_feature (1)..(188): tr|A0A0C2U5S2|A0A0C2U5S2_BACBA GTP cyclohydrolase 1 OS= Bacillus badius OX=1455 GN=folE PE=3 SV=1
MAEVNRAQIEEAVRMILEAVGEDPNREGLIDTPKRVAKMYEEVFSGLNKDPREYFETIFGEDYEELVLVKDIPFYSLCEHHLVPFFGHAHVAYLPKNGKVTGLSKLARAVETVARRPQLQERITAEVADAIMEKLQPHGVMVVVEAEHMCMAMRGVKKPGAKTVTTAARGKFANDVHSRSELLNLIKG

SEQ ID NO: 4976 - protein, 187 aa, Bacillus bataviensis
  misc_feature (1)..(187): tr|K6DMQ5|K6DMQ5_9BACI GTP cyclohydrolase 1 OS=Bacillus bataviensis LMG 21833 OX=1117379 GN=folE PE=3 SV=1
MPEVNRAQIEDAVRLILEAIGENPNREGLLDTPKRVAKMYEEVFSGLNEDPKQHFETIFSEDHEELVLVKDIPFYSMCEHHLVPFFGKAHVAYIPRNGRVTGLSKLARAVEAVAKRPQLQERITSTIAESMMEKLEPHGVMVVVEAEHMCMTMRGVKKPGSKTVTTAVRGVLADDAIARSEVLSLIK

SEQ ID NO: 4977 - protein, 188 aa, Bacillus bataviensis
  misc_feature (1)..(188): tr|A0A561DS70|A0A561DS70_9BACI GTP cyclohydrolase 1 OS= Bacillus bataviensis OX=220685 GN=folE PE=3 SV=1
MSEVNRAQIEEAVRLILEAIGEDPNREGLLDTPKRVAKMYEEVFSGLNEDPKQHFETIFSEDHEELVLVKDIPFYSMCEHHLVPFFGKAHVAYIPQNGRVTGLSKLARAVEAVAKRPQLQERITSTIADSMMEKLDPRGVMVVVEAEHMCMTMRGVKKPGSKTVTTAVRGVLADDAVARSEVLSLIKY

SEQ ID NO: 4978 - protein, 191 aa, Bacillus beveridgei
  misc_feature (1)..(191): tr|A0A1D7QV12|A0A1D7QV12_9BACI GTP cyclohydrolase 1 OS= Bacillus beveridgei OX=632773 GN=folE PE=3 SV=1
MSGNVDHEKIQQAVTMILEAVGEDPEREGLLDTPKRVARMYEEIFEGLHQDPKEHFKTVFGEDHEELVLVKDITFHSVCEHHLVPFFGKVHIGYIPKGGQVTGLSKMARAVESITRKPQLQERITSTLADSIVDTLTPLGVIVIVEAEHMCMTMRGVRKPGAKTVTSAVRGAFQRSEAARAEVMSLIRDQG

SEQ ID NO: 4979 - protein, 189 aa, Bacillus bombysepticus; identical to SEQ ID NO: 4953
  misc_feature (1)..(189): tr|A0A023P3H4|A0A023P3H4_9BACI GTP cyclohydrolase 1 OS= Bacillus bombysepticus str. Wang OX=1330043 GN=folE PE= 3 SV=1

SEQ ID NO: 4980 - protein, 188 aa, Bacillus boroniphilus
  misc_feature (1)..(188): tr|W4RHU9|W4RHU9_9BACI GTP cyclohydrolase 1 OS=Bacillus boroniphilus JCM 21738 OX=1294265 GN=folE PE=3 SV=1
MSNVNRAQIEEAVRLILEAVGEDLNREGLLDTPKRVAKMYEEVFSGLNQDPKEYFDTIFGEDHEELVLVKDIPFYSMCEHHLVPFFGKAHVAYIPRGGKVTGLSKLARAVEAVAKRPQLQERITSTIANSIMEKLDPHGVMVVVEAEHMCMTMRGVKKPGSKTVTSAVRGTLAEDVYARAEILSLIKG

SEQ ID NO: 4981 - protein, 188 aa, Bacillus butanolivorans
  misc_feature (1)..(188): tr|A0A0M0EXB1|A0A0M0EXB1_9BACI GTP cyclohydrolase 1 OS= Bacillus butanolivorans OX=421767 GN=folE PE=3 SV=1
MANVDHAKIEEAVKMLLEAVGEDPTREGLLDTPGRVARMYEEIFSGLTQDPKEYFDTVFGEDHEELVLVKDIPFYSVCEHHLVPFYGKAHVAYIPKNGKVTGLSKLARAVEAVSKRPQLQERITSTVADSIMEKLEPHGVMVVVEAEHMCMTMRGVKKPGSKTVTSAVRGTFAKDHRTRAEVLAFIKD

SEQ ID NO: 4982 - protein, 188 aa, Bacillus caldolyticus; identical to SEQ ID NO: 4631
  misc_feature (1)..(188): tr|A0A2H5KLT2|A0A2H5KLT2_BACCL GTP cyclohydrolase 1 OS= Bacillus caldolyticus OX=1394 GN=folE PE=3 SV=1

SEQ ID NO: 4983 - protein, 188 aa, Bacillus camelliae
  misc_feature (1)..(188): tr|A0A2N3LMY1|A0A2N3LMY1_9BACI GTP cyclohydrolase 1 OS= Bacillus camelliae OX=1707093 GN=folE PE=3 SV=1
MDEVSLKKIEQGVRMILEAIGENPEREGLVDTPERVAKMYKEIFSGLEQDPSEFFDTIYSEDHEELVLVKDISFYSMCEHHLIPFFGKAHIAYIPQEGKVAGLSKLARAVESIASRPQLQERMTAALADLLMNKLNPLGVFIMLEAEQLCMTMRGIKKPGTKTITTGARGIFKTNDSIRSEVLLLMKN

SEQ ID NO: 4984 - protein, 195 aa, Bacillus camelliae
  misc_feature (1)..(195): tr|A0A2N3LM33|A0A2N3LM33_9BACI GTP cyclohydrolase 1 OS= Bacillus camelliae OX=1707093 GN=folE PE=3 SV=1
MNQVTTMDYDLKKRKISEHFARIIEELGLDLDDPSIKDTPERVAKMLVNETCNGLFTEPPIITTFPIDKNTSRDLVVIENIPFNSLCEHHFQPFVGTATIAYLPNDRVMGLSKGARVLDYFASRPQIQERLTNEVAAYLYEQLNAKGVFVIMKAEHFCMKVRGVKKHQSTTITTASLGEIDKKEVLASIQLASSK

SEQ ID NO: 4985 - protein, 188 aa, Bacillus campisalis
  misc_feature (1)..(188): tr|A0A0M2SV57|A0A0M2SV57_9BACI GTP cyclohydrolase 1 OS= Bacillus campisalis OX=1408103 GN=folE PE=3 SV=1
MAKVNHAQIEEGVRLILEAVGEDPNREGLLDTPKRVARMYEEVFAGLNQDPQEYFETIFGEDHEEVVLVKDIPFYSMCEHHLVPFFGKAHVAYIPKGGKVTGLSKLARAVEAVAKRPQLQERITSSIANAIMEKLQPHGVMVVVEAEHMCMTMRGVKKPGSKTVTSAVRGTLAEDVNARAEILALIKD

SEQ ID NO: 4986 - protein, 189 aa, Bacillus canaveralius
  misc_feature (1)..(189): tr|A0A2N5GRQ7|A0A2N5GRQ7_9BACI GTP cyclohydrolase 1 OS= Bacillus canaveralius OX=1403243 GN=folE PE=3 SV=1
MSNVNRTQIEEAVRLILQAIGEDPDREGLVDTPKRVAKMYEEVFAGLNKDPKEHFETIFGEDHEELVLVKDIPFYSMCEHHLVPFFGQAHIAYIPKNGRVTGLSKLARALEDVVRRPQLQERITATVADAIMEKLEPHGVMVVVEAEHMCMTMRGVKKPGSKTITSAVRGVLQEDPRARAEVLALINKQ

SEQ ID NO: 4987 - protein, 193 aa, Bacillus canaveralius
  misc_feature (1)..(193): tr|A0A2N5GN55|A0A2N5GN55_9BACI GTP cyclohydrolase 1 OS= Bacillus canaveralius OX=1403243 GN=folE PE=3 SV=1
MAVELKKESTIDSMEENVKSILQLIGEDTSREGLKDTPKRVAKMYKEVFAGVGVNPETALTTTFEEAYDGLVVVKDITYYTFCEHHLIPFFGKAHIGYIPNGRVVGLSKFARLVELVSQRPQVQERMTQQIADSIMNVLGPEGVIVSVEGQHLCMCARGVKKPGASTVTTIKKGVFTENVSLAEEFERALLRD

SEQ ID NO: 4988 - protein, 188 aa, Bacillus caseinilyticus
  misc_feature (1)..(188): tr|A0A1H3NF12|A0A1H3NF12_9BACI GTP cyclohydrolase 1 OS= Bacillus caseinilyticus OX=1503961 GN=folE PE=3 SV=1
MTKVDHKKIEEAVVMILEAIGEDPQREGLLDTPKRVARMYEEVFQGLNQDPREHFATVFGEDHEELVLVKDIPFYSMCEHHLVPFFGKAHIGYIPRGGKVTGLSKLARAVEAVAKRPQLQERITSTIADSIVETLEPLGVIVVVEAEHMCMTMRGVKKPGSKTVTSAVRGAFGKSAAARAEVLSLIKD

SEQ ID NO: 4989 - protein, 302 aa, Bacillus caseinilyticus
  misc_feature (1)..(302): tr|A0A1H3SWI0|A0A1H3SWI0_9BACI GTP cyclohydrolase FolE2 OS=Bacillus caseinilyticus OX=1503961 GN=folE2 PE=3 SV =1
MKTKHWPDKTERQKRFGSVPPTPGNKPIHKEEMTDLQNMPHDFLFALDSVGICNVKHPLMIHSDLKPYEQTTVGTFSLTTSLEQRSKGINMSRLTEVLHEYHQAGFTLNFNNLQAFTADLAGRMEQSSAHVHVTFPWFFARHSPALNKIGLGHAEALIKVHFDQASGFTHEVGLTAAVTTLCPCSKEISEYSAHNQRGYVTMNAELYDPTVGSSDWKVTLLQAAESNASSILYPVLKRPDEKAVTEKAYENPRFVEDMVRLIAADLYEDETIKAFTVACRNEESIHQHDAIATLTYSKDRRP

SEQ ID NO: 4990 - protein, 188 aa, Bacillus cavernae
  misc_feature (1)..(188): tr|A0A433HLP5|A0A433HLP5_9BACI GTP cyclohydrolase 1 OS= Bacillus cavernae OX=1674310 GN=folE PE=3 SV=1
MANVNHAKIEEAVKMILEAVGEDPEREGLLDTPKRVARMYEEIFAGLAQDPKEYFETVFGEDHEELVLVKDIPFYSVCEHHLVPFYGKAHVAYIPRNGRVTGLSKLARAVEAVSKRPQLQERITSTVADSIMEKLEPHGVMIVVEAEHMCMTMRGVKKPGAKTVTSAVRGVFAEDARSRAEVLAFIKE

SEQ ID NO: 4991 - protein, 188 aa, Bacillus cellulosilyticus
  misc_feature (1)..(188): tr|E6TZF1|E6TZF1_BACCJ GTP cyclohydrolase 1 OS=Bacillus cellulosilyticus (strain ATCC 21833 / DSM 2522 / FERM P-1141 / JCM 9156 / N-4) OX=649639 GN=folE PE=3 SV=1
MSQVDHQKIQQAVTMILEAIGEDPNREGLLDTPKRVARMYEEVFEGVKQDPKEHFATVFGEDHEELVLVKDIPFYSMCEHHLVPFYGKAHIGYIPKGGKVTGLSKLARALEAVTRRPQLQERITSTVADSIVDTLEPLGVIVVVEAEHMCMTMRGVKKPGSKTVTSAVRGAFENNPAARAEVLSLIKE

SEQ ID NO: 4992 - protein, 189 aa, Bacillus cereus; identical to SEQ ID NO: 4953
  misc_feature (1)..(189): sp|B7JGZ6|GCH1_BACC0 GTP cyclohydrolase 1 OS=Bacillus c ereus (strain AH820) OX=405535 GN=folE PE=3 SV=1

SEQ ID NO: 4993 - protein, 189 aa, Bacillus cereus; identical to SEQ ID NO: 4953
  misc_feature (1)..(189): tr|J8FWJ6|J8FWJ6_BACCE GTP cyclohydrolase 1 OS=Bacillus cereus VD102 OX=1053228 GN=folE PE=3 SV=1

SEQ ID NO: 4994 - protein, 189 aa, Bacillus circulans
  misc_feature (1)..(189): tr|A0A0J1IAA9|A0A0J1IAA9_BACCI GTP cyclohydrolase 1 OS= Bacillus circulans OX=1397 GN=folE PE=3 SV=1
MTVEVNRNLLEEHIEAILKLVGEDPNREGLIDTPKRVAKMYREVFSGVGVDPKTALTTTFEEDYEGIVVVKDINYYTFCEHHLIPFFGRAHIGYIPKGRVVGLSKFARLVELVSKRPQVQERMTQQIANAVMNVLQPEGVIVSIEGQHLCMCARGVKKPGSSTVTTIKKGVFKESVALVDEFERALQRD

SEQ ID NO: 4995 - protein, 187 aa, Bacillus circulans
  misc_feature (1)..(187): tr|A0A0J1IM10|A0A0J1IM10_BACCI GTP cyclohydrolase 1 OS= Bacillus circulans OX=1397 GN=folE PE=3 SV=1
MSKINTPQIEEAIRLLLEAVGEDPNREGLLDTPKRVAKMYEEVFSGLTIDPKEYFETIFHEDHEELVLVKDIPFYSMCEHHLVPFYGKAHVAYIPKGGRVAGLSKLARAIEAVSKRPQLQERITSTVADTMMETLEPHGVMVVVEAEHMCMTMRGVKKPGAKTVTSAVRGVFQTDSDKRAEVFALIK

SEQ ID NO: 4996 - protein, 189 aa, Bacillus clausii
  misc_feature (1)..(189): tr|Q5WGT7|Q5WGT7_BACSK GTP cyclohydrolase 1 OS=Bacillus clausii (strain KSM-K16) OX=66692 GN=mtrA PE=3 SV=1
MVDHDKLQQAVRMILEAIGEDPEREGLADTPRRVAQMYEEMFSGLHEDPSEHLKTVFGEEHEELVLVKDIPFFSMCEHHLVPFFGKAHIAYIPKNGIVTGLSKLARTVDGIARRPQVQERMTKTLADVLMSTLDAKGAMVVLSAEHMCMAMRGIKKPGSKTVTTAVRGSFANDGEARAEVLQLIQTKEV

SEQ ID NO: 4997 - protein, 189 aa, Bacillus clausii
  misc_feature (1)..(189): tr|A0A268RZB2|A0A268RZB2_BACCS GTP cyclohydrolase 1 OS= Bacillus clausii OX=79880 GN=folE PE=3 SV=1
MVDHDKLQQAVRMILEAIGEDPEREGLADTPRRVAQMYEEMFSGLHEDPSEHLKTVFGEEHEELVLVKDIPFFSMCEHHLVPFFGKAHIAYIPQNGIVTGLSKLARTVDGIARRPQVQERMTKTLADVLMSTLDAKGAMVVLSAEHMCMAMRGIKKPGSKTVTTAVRGSFANDREARAEVLQLIQTKEA

SEQ ID NO: 4998 - protein, 227 aa, Bacillus coagulans
  misc_feature (1)..(227): tr|A0A0C5C8F8|A0A0C5C8F8_BACCO GTP cyclohydrolase 1 OS= Bacillus coagulans OX=1398 GN=folE PE=3 SV=1
MKTSLQKELYPFMIVSGQKEHQLIEETFKDQIDHHTVISKKLEQSGQFMEAVRSLIDLCGDDPDRDGLQETPYRVLKAFLEYTEGYREDPKLHLAKTFDVDHDHKELVLVKDIEFYSICEHHFAPFFGVAHVAYFPNEKITGLSKIARMVDGYARRFQVQERLTKQIADAVEEVLEPQGTMVVLEAKHMCMCGRGVKKSDASTTTMSYRGIFEGRADLRAEFLSLLK

SEQ ID NO: 4999 - protein, 215 aa, Bacillus coagulans
  misc_feature (1)..(215): tr|F7Z4J5|F7Z4J5_BACC6 GTP cyclohydrolase 1 OS=Bacillus coagulans (strain 2-6) OX=941639 GN=folE PE=3 SV=1
MIVSGQKEHQLIEETFKDQIDHPAVISKKLEQSGQFMEAVRSLIDLCGDDPGRDGLQETPYRVLKAFLEYTEGYREDPKLHLAKTFDVDHDHKELVLVKDIEFYSICEHHFAPFFGVAHVAYLPNEKITGLSKIARMVDGYARRFQVQERLTKQIADAVEEVLEPQGTMVVLEAKHMCMCGRGVKKADASTTTMSYRGIFEGRADLRAEFLSLLK

SEQ ID NO: 5000 - protein, 188 aa, Bacillus coahuilensis
  misc_feature (1)..(188): tr|A0A147K8R0|A0A147K8R0_9BACI GTP cyclohydrolase 1 OS= Bacillus coahuilensis p1.1.43 OX=1150625 GN=folE PE=3 S V=1
MKEVNREQIEQAVRLIIEAVGEDPNREGLVDTPKRVAKMYEEVFSGLNEDPKEHFETVFSEEHEELVLVKDIPFYSMCEHHLVPFFGKAHVAYIPKDGRVTGLSKLARAVEVIAKRPQLQERITATVADSIMEKLLPHGAMVMVEAEHMCMTMRGVKKPGASTITTAVRGVFADDPTKRAEIFALIKN

SEQ ID NO: 5001 - protein, 188 aa, Bacillus cohnii
  misc_feature (1)..(188): tr|A0A223KS49|A0A223KS49_9BACI GTP cyclohydrolase 1 OS= Bacillus cohnii OX=33932 GN=folE PE=3 SV=1
MGQVNKSQIEQAVRLILEAIGEDPNREGLLDTPKRVAKMYEEVFSGLNEDPKEHFKTVFGEPHEELVLVKDIPFFSMCEHHLVPFFGRAHVAYIPKGGKVTGLSKLARAVEAVAKRPQLQERITATIADSIVESLEPHGVMVVVEAEHMCMTMRGVKKPGAVTVTSAVRGTLENDSAARAEILSYIKK

SEQ ID NO: 5002 - protein, 189 aa, Bacillus cucumis
  misc_feature (1)..(189): tr|A0A2N5HFE0|A0A2N5HFE0_9BACI GTP cyclohydrolase 1 OS= Bacillus cucumis OX=1740721 GN=folE PE=3 SV=1
MKEQDINKLEQAVTMILEAIGEDPTREGLLETPKRVAKMYQEVFEGLNKDPREYFDTVFHENHDEVVLVKDIPFYSMCEHHLVPFFGVAHVAYIPRNGVVAGLSKLARAVETAARRPQLQERITSSVADAMMEKLNPHGVYIIIEAEHMCMTMRGIKKPGAKTITTVARGIYEHDDVKRAEILSLIRTN

SEQ ID NO: 5003 - protein, 188 aa, Bacillus cucumis
  misc_feature (1)..(188): tr|A0A2N5H9C9|A0A2N5H9C9_9BACI GTP cyclohydrolase 1 OS= Bacillus cucumis OX=1740721 GN=folE PE=3 SV=1
MSEFNRAQIEDAVRLILEAIGEDPNREGLLDTPKRVAKMYEEVFSGLNEDPKEHFETIFSEDHEELVLVKDIPFYSMCEHHLVPFFGKAHVAYIPQNGRVTGLSKLARAVEAVAKRPQLQERITSTIADSMMEKLEPRGVMVVVEAEHMCMTMRGVKKPGSKTVTTAVRGILADDAVARSEVLSLIKY

SEQ ID NO: 5004 - protein, 189 aa, Bacillus cytotoxicus
  misc_feature (1)..(189): sp|A7GN48|GCH1_BACCN GTP cyclohydrolase 1 OS=Bacillus c ytotoxicus (strain DSM 22905 / CIP 110041 / 391-98 / NV H 391-98) OX=315749 GN=folE PE=3 SV=1
MAKVNLEQIEHAVRLILEAIGDDPNREGVLDTPRRVAKMYAEVFSGMHEDPKEHLHKVFGEDHEELVLVKDIPFYSMCEHHLVPFYGVAHVAYIPRGGKVTGLSKLARTVDTIARRPQLQERITSTVADSIMEVLEPHGVMVVVEAEHMCMTMRGVKKPGAKTVTTAVRGVLENDAAARSEILSFIKSK

SEQ ID NO: 5005 - protein, 189 aa, Bacillus cytotoxicus; identical to SEQ ID NO: 5004
  misc_feature (1)..(189): tr|A0A2S1A8X6|A0A2S1A8X6_9BACI GTP cyclohydrolase 1 OS= Bacillus cytotoxicus OX=580165 GN=folE PE=3 SV=1

SEQ ID NO: 5006 - protein, 187 aa, Bacillus daliensis
  misc_feature (1)..(187): tr|A0A1H0AVT7|A0A1H0AVT7_9BACI GTP cyclohydrolase 1 OS= Bacillus daliensis OX=745820 GN=folE PE=3 SV=1
MSQVDHQKIQQAVTMILEAIGEDPTREGLEDTPKRVARMYEEVFQGLNEDPKEHFKTVFGEDHEELVLVKDIPFYSMCEHHLVPFFGNVHIAYIPKGGKVTGLSKLARAVEAVTRRPQLQERITSTIAESMVETLQPGGVMVVVEAEHMCMTMRGVKKPGSKTVTSAVRGTFVENDAARAEVLSFIK

SEQ ID NO: 5007 - protein, 211 aa, Bacillus deserti
  misc_feature (1)..(211): tr|A0A2N5M214|A0A2N5M214_9BACI GTP cyclohydrolase 1 OS= Bacillus deserti OX=673318 GN=folE PE=3 SV=1
MLRWDYIFTREHYIRFRANRRKKMSAVNHAQIEEAVRMILEAVGEDPSREGLMDTPKRVARMYEEIFTGINQDPAEYFETIFGEEHEELVLVKDIPFYSVCEHHLVPFFGHAHVAYIPRNGRVTGLSKLARAVEAVAKRPQLQERITSTVADTIMNKLEPHGVMVVVEAEHMCMTMRGIKKPGSKTVTSAVRGIFREDDRSRAEVLSLIKN

SEQ ID NO: 5008 - protein, 214 aa, Bacillus deserti
  misc_feature (1)..(214): tr|A0A2N5M9L4|A0A2N5M9L4_9BACI GTP cyclohydrolase 1 OS= Bacillus deserti OX=673318 GN=folE PE=3 SV=1
MNILLKNININENQLMKLQNVIGRNLNQEEIALAENIMSSIQDLIQLAGDDPSRDGLQESPYRFLKAILEYTKGYQEDPSEHLDKTFEVTHDDIVLVKNIPFNSLCEHHFAPFFGMAHIAYIPSDKITGLSKFARLVDGYANRFQVQERLTQEIADAINKVLNPKAIAVILEAEHYCMCGRGVKKAGATTVTSTMRGMFEEDRHARAEVLHLLK

SEQ ID NO: 5009 - protein, 188 aa, Bacillus enclensis
  misc_feature (1)..(188): tr|A0A0V8HLW4|A0A0V8HLW4_9BACI GTP cyclohydrolase 1 OS= Bacillus enclensis OX=1402860 GN=folE PE=3 SV=1
MAEVNHSQIEEAVRLILEAIGENPNREGLLDTPKRVAKMYAEVFSGIDHDPKEYFETIFSEDHEELVLVKDIPFYSMCEHHLVPFYGRAHVSYIPRNGRVTGLSKLARAVESVARRPQLQERITSTVADSIMETLEPYGVMVVVEAEHMCMTMRGVKKPGSSTVTTAVRGTFKEDSQARNEVLSFIKK

SEQ ID NO: 5010 - protein, 190 aa, Bacillus endophyticus
  misc_feature (1)..(190): tr|A0A329EYA7|A0A329EYA7_9BACI GTP cyclohydrolase 1 OS= Bacillus endophyticus OX=135735 GN=folE PE=3 SV=1
MSEQNVNKEQIEHAVRLILEAIGEDPNREGLLDTPKRVAKMYEEVFSGLKEDPKEHFKTVFGEDHEELVLVKDIPFYSMCEHHLVPFYGKAHIAYIPRGGRVTGLSKLARAVEAVAKRPQLQERITSTIANSIVESLDPHGVMVVVEAEHMCMTMRGVKKPGSKTVTSAVRGILESDAAARAEVLSLIKS

SEQ ID NO: 5011 - protein, 190 aa, Bacillus endophyticus
  misc_feature (1)..(190): tr|A0A3N6B5M1|A0A3N6B5M1_9BACI GTP cyclohydrolase 1 OS= Bacillus endophyticus OX=135735 GN=folE PE=3 SV=1
MSEQNVNKEQIEHAVRLILEAIGEDPNREGLLDTPKRVAKMYEEVFSGLKEDPKEHFKTVFGEDHEELVLVKDIPFYSMCEHHLVPFYGKAHIAYIPRGGRVTGLSKLARAVEAVAKRPQLQERITSTIANSIVESLDPHGVMVIVEAEHMCMTMRGVKKPGSKTVTSAVRGILESDAAARAEVLSLIKS

SEQ ID NO: 5012 - protein, 188 aa, Bacillus endozanthoxylicus
  misc_feature (1)..(188): tr|A0A5J5HVD6|A0A5J5HVD6_9BACI GTP cyclohydrolase I Fol E OS=Bacillus endozanthoxylicus OX=2036016 GN=folE PE=4 SV=1
MSNVNRTQIEEAVRLILEAIGEDPNREGIRDTPKRVAKMYEEVFSGLNQNPKEYFETIFGEDHEELVLVKDIPFYSMCEHHLVPFFGKAHVAYIPRNGKVTGLSKLARAVEAVAKRPQLQERITSTIADSIYETLEPYGVMVVIEAEHMCMTMRGVKKPGSKTVTSAVRGTFLNDAASRAEVLSLIKE

SEQ ID NO: 5013 - protein, 190 aa, Bacillus filamentosus
  misc_feature (1)..(190): tr|A0A1X7D337|A0A1X7D337_9BACI GTP cyclohydrolase 1 OS= Bacillus filamentosus OX=1402861 GN=folE PE=3 SV=1
MSEQNVNKEQIEHAVRLILEAIGEDPNREGLLDTPKRVAKMYEEVFSGLKEDPKEHFKTIFGEDHEELVLVKDIPFYSMCEHHLVPFYGKAHIAYIPRGGRVTGLSKLARAVEAVAKRPQLQERITSTIANSIVESLDPHGVMVVVEAEHMCMTMRGVKKPGSKTVTSAVRGILESDAAARAEVLSLIKS

SEQ ID NO: 5014 - protein, 188 aa, Bacillus firmus
  misc_feature (1)..(188): tr|W7KXJ6|W7KXJ6_BACFI GTP cyclohydrolase 1 OS=Bacillus firmus DS1 OX=1307436 GN=folE PE=3 SV=1
MAEVNRAQIEDAVRLILEAIGEDPNREGLLDTPKRVAKMYEEVFMGLNQDPKEYFETVFGEDHEELVLVKDIPFYSMCEHHLVPFFGVAHVAYIPRNGRVTGLSKLARAVEAVAKRPQLQERITSTVANSILEKLEPHGVMVVVEAEHMCMTMRGVKKPGSKTVTSAVRGVFAEDARARAEVLSLIKQ

SEQ ID NO: 5015 - protein, 188 aa, Bacillus firmus
  misc_feature (1)..(188): tr|A0A366JM91|A0A366JM91_BACFI GTP cyclohydrolase 1 OS= Bacillus firmus OX=1399 GN=folE PE=3 SV=1
MAEVNRAQIEDAVRLILEAIGEDPNREGLLDTPKRVAKMYEEVFMGLNQDPKEYFETVFGEDHEELVLVKDIPFYSMCEHHLVPFFGVAHVAYIPRGGRVTGLSKLARAVEAVAKRPQLQERITSTVANSILEKLEPHGVMVVVEAEHMCMTMRGVKKPGSKTVTSAVRGVFAEDARARAEVLSLIKQ

SEQ ID NO: 5016 - protein, 188 aa, Bacillus flexus
  misc_feature (1)..(188): tr|A0A4P8XC75|A0A4P8XC75_9BACI GTP cyclohydrolase 1 OS= Bacillus flexus OX=86664 GN=folE PE=3 SV=1
MSTVNKEQIEQAVRQILEAIGEDPNREGLLDTPKRVAKMYEEVFSGLNEDPNEHFKTIFGEEHEELVLVKDINFHSMCEHHLVPFYGKVHVAYIPKGGRVTGLSKLARAVEAVSKRPQLQERITSTVADSIVETLSPHGVMVIVEAEHMCMTMRGVRKPGAMTVTSAVRGVFEHDQAARAEVLSLIKS

SEQ ID NO: 5017 - protein, 300 aa, Bacillus flexus
  misc_feature (1)..(300): tr|A0A4P8XFF5|A0A4P8XFF5_9BACI GTP cyclohydrolase FolE2 OS=Bacillus flexus OX=86664 GN=folE2 PE=3 SV=1
MTTINLPSKQERHKLFGSVDPGPKTKPTKKEEMADLQNKKKDFLFDIQAVGVSNVKIPVNIYAPGGATPTIATFTLTSSIPKDSKGTNMSRFTELLEEYRKRSELNLTFASLTSFVTELSDRLRIPDAKVEISFPWFYDQVAPSSGLSGLNHSEARLKVSYTKEAGVTFEVGLTAVVKTLCPCSKEISEYSAHNQRGYVSVDVRLADSINDAIDWKHALLEAIESNASAKIHPILKRPDEKMVTEQAYENPRFVEDMVRLVAADLYEYPFVEAFTVSCRNKESIHLHDAVATITFDKQPC

SEQ ID NO: 5018 - protein, 188 aa, Bacillus foraminis
  misc_feature (1)..(188): tr|A0A4R2B8I6|A0A4R2B8I6_9BACI GTP cyclohydrolase 1 OS= Bacillus foraminis OX=279826 GN=folE PE=3 SV=1
MANVNHAQIEEAVRLILEAVGEDPNREGLLDTPKRVARMYEEVFAGLNQDPKEYFETIFGEDHEELVLVKDIPFYSMCEHHLVPFFGKAHVAYIPRGGKVTGLSKLARAVEAVAKRPQLQERITSTIANAIMEKLDPHGVMVVVEAEHMCMTMRGVKKPGSKTVTSAVRGTLAKDVSARSEILALIKE

SEQ ID NO: 5019 - protein, 188 aa, Bacillus fortis
  misc_feature (1)..(188): tr|A0A443J3T9|A0A443J3T9_9BACI GTP cyclohydrolase 1 OS= Bacillus fortis OX=254758 GN=folE PE=3 SV=1
MGKFDRKQIEEAVRMILEAIGEDPNREGLLDTPKRVAKMYEEVFAGINTDPQTYFETIFGEDHEELVLVKDIPFYSLCEHHLVPFFGKAHVAYIPRNGRVTGLSKLARAVEAVARRPQLQERITSTVADAIMKKLEPHGVMVIIEAEHMCMTMRGVKKPGSKTVTSAVRGIFLKDSQSRNEVLSLIKQ

SEQ ID NO: 5020 - protein, 211 aa, Bacillus fortis
  misc_feature (1)..(211): tr|A0A443INT5|A0A443INT5_9BACI GTP cyclohydrolase 1 OS= Bacillus fortis OX=254758 GN=folE PE=3 SV=1
MPADMKLISEKLPDLFSGDSVDIAEKIDKSQDFMEGVRNLIELCGDDPNREGLEETPYRVLKAFLEYTEGYKENPAVHLEKTFDVKHKELVLVKNIEFYSMCEHHFAPFFGVAHVGYMPDAKITGLSKIGRMVEGYAKRFQVQERLTNEIADAIEEILEPQGAMVVIEAKHMCMCGRGIKKSNSSTATTAVRGLFEERSDARMEFLSLINR

SEQ ID NO: 5021 - protein, 211 aa, Bacillus freudenreichii
  misc_feature (1)..(211): tr|A0A3S4Q0H2|A0A3S4Q0H2_9BACI GTP cyclohydrolase 1 OS= Bacillus freudenreichii OX=1783501 GN=folE_1 PE=3 SV=1
MPTDTKLITEKLPDLFSGDAVDIANKIDKSQDFMEGVRNLIELCGDDPNREGLEETPYRVLKAFLEYTEGYKENPAVHLEKTFDVKHKELVLVKNIEFHSMCEHHFAPFFGVAHVGYIPDAKITGLSKIGRMVEGYAKRFQVQERLSNEIADAIEEVLHPQGAMVVIEAKHMCMCGRGIKKTSSSTTTTSVRGLFEDRADLRMEFLSLINR

SEQ ID NO: 5022 - protein, 188 aa, Bacillus freudenreichii
  misc_feature (1)..(188): tr|A0A3S4S8Q9|A0A3S4S8Q9_9BACI GTP cyclohydrolase 1 OS= Bacillus freudenreichii OX=1783501 GN=folE_2 PE=3 SV=1
MGNFDRKQIEEAVRMILEAIGEDPNREGLLDTPKRVAKMYEEIFAGIGKDPEQYFETIFGEDHEELVLVKDIPFYSLCEHHLVPFFGKAHVAYIPRNGRVTGLSKLARAVETVARRPQLQERITSTVADAIMKKLEPHGVMVIIEAEHMCMTMRGVKKPGSKTVTSAVRGIFLKDRQSRNEVLSLIKQ

SEQ ID NO: 5023 - protein, 189 aa, Bacillus gaemokensis
  misc_feature (1)..(189): tr|A0A073K856|A0A073K856_9BACI GTP cyclohydrolase 1 OS= Bacillus gaemokensis OX=574375 GN=folE PE=3 SV=1
MAKVNLEQIEQAVRLILEAIGDDPNREGVLDTPKRVAKMYAEVFSGMHEDPKEHLHKVFGEDHEELVLVKDIPFYSMCEHHLVPFYGVAHVAYIPRGGKVTGLSKLARTVDTIARRPQLQERITSTVADSIMEVLEPHGVMIVVEAEHMCMTMRGVKKPGAKTVTTAVRGVLENDAAARSEILSFIKAK

SEQ ID NO: 5024 - protein, 211 aa, Bacillus galactosidilyticus
  misc_feature (1)..(211): tr|A0A0Q9XZA5|A0A0Q9XZA5_9BACI GTP cyclohydrolase 1 OS= Bacillus galactosidilyticus OX=217031 GN=folE PE=3 SV=1
MSTTDKKRIIVQQLIDRFGNEPGIEKVVQKSENYMEAIRDLIEICGDDPNREGLEETPYRVLKAFLEYTEGNREDPKQHLEKVFAVEHDGLIMVKDIEFHSMCEHHFAPFFGVAHIAYIPSEKITGLSKIARMVDGYAKRFQVQERLSNQIVDAMNDVLQPQGAMVVIEAKHMCMCGRGVKKSDAMTVTTATRGVFSKNPDLRKEFMSLLG

SEQ ID NO: 5025 - protein, 188 aa, Bacillus ginsengihumi
  misc_feature (1)..(188): tr|A0A0A6VDS8|A0A0A6VDS8_9BACI GTP cyclohydrolase 1 OS= Bacillus ginsengihumi OX=363870 GN=folE PE=3 SV=1
MQELKHGLLEDHIRCILELIGENPEREGLLDTPKRVAKMYKEVFAGVGVNPETALTTTFEEQYDGLVVVKDISYYTFCEHHLIPFFGKAHIGYIPNGRVVGLSKFARLVELASKRPQVQERMTQQIADAIMNVLQPAGVIVSIEGQHLCMCARGVKKPGSSTVTTVKKGIFQENTALAEEFERALLRD

SEQ ID NO: 5026 - protein, 180 aa, Bacillus ginsengihumi
  misc_feature (1)..(180): tr|A0A0A6VJX1|A0A0A6VJX1_9BACI GTP cyclohydrolase 1 OS= Bacillus ginsengihumi OX=363870 GN=folE PE=3 SV=1
MSNYFAKILAELGLDLDDPSIKDTPNRVAKMLVDETCNGLFTEPPEITTFPIDEHTSRDLIVIEDIPFSSLCEHHFQPFIGKATVAYLPNDRIMGLSKAARVLDYFAARPQVQERLTGEVAQFLYEQLNAKGVLVIVQAEHFCMKVRGVKKHGSSTITTAIRGDIDKQEVISSLKLAGKV

SEQ ID NO: 5027 - protein, 300 aa, Bacillus glycinifermentans
  misc_feature (1)..(300): tr|A0A291KUY1|A0A291KUY1_9BACI GTP cyclohydrolase FolE2 OS=Bacillus glycinifermentans OX=1664069 GN=folE2 PE=3 SV=1
MKRDLQLPAKPERHRLFGSVEEVKGTKPTVKEQMKDIQNTPNDYLFDIDQVGVTNISHPIRITSAVKPFSQTTIGSFSLTTHLARSRKGINMSRLTEQLQRYHAENWIVGLDSLKDFTKELAVNMEQQGAAVSLAFPWYFERLSPELKFPGLMHADIHMNVSYHEKEGWTGTVGITAKAATLCPCSKEISEYGAHNQRGVIKITAHINDRAAMPEDFKTELLAAAETNASAKLYPVLKRPDEKKVTEQAYENPRFVEDVIRLTAADLYEMDWISAFEIECRNEESIHLHDAIARLSYSKI

SEQ ID NO: 5028 - protein, 190 aa, Bacillus glycinifermentans
  misc_feature (1)..(190): tr|A0A0J6EW62|A0A0J6EW62_9BACI GTP cyclohydrolase 1 OS= Bacillus glycinifermentans OX=1664069 GN=folE PE=3 SV=1
MSEINKEKIEQAVRQILEAIGEDPNREGLLDTPKRVAKMYAEVFAGLNEDPKEHFKTVFGEDHEELVLVKDIPFYSMCEHHLVPFYGKAHVAYIPKGGKVTGLSKLARAVEAVAKRPQLQERITSTIADSIVESLSPHGVMVVVEAEHMCMTMRGVKKPGSKTVTSAVRGTFREDVAARSEVLELIKHHD

SEQ ID NO: 5029 - protein, 188 aa, Bacillus gobiensis
  misc_feature (1)..(188): tr|A0A0M4FG40|A0A0M4FG40_9BACI GTP cyclohydrolase 1 OS= Bacillus gobiensis OX=1441095 GN=folE PE=3 SV=1
MNEMNIEKIELAVRQILEAIGEDPNREGLEDTPKRVAKMYREVFSGLNEDPKEHFQTIFGEEHEELVLVKDIPFYSMCEHHLVPFFGKAHVAYIPRGGKVTGLSKLARAVDAVAKRPQLQERITSTIADSILDTLDPHGVMVVVEAEHMCMTMRGVKKPGSKTITSAVRGTFRDDVAARSEVLSLINN

SEQ ID NO: 5030 - protein, 188 aa, Bacillus halodurans
  misc_feature (1)..(188): sp|Q9KCC7|GCH1_BACHD GTP cyclohydrolase 1 OS=Bacillus h alodurans (strain ATCC BAA-125 / DSM 18197 / FERM 7344 / JCM 9153 / C-125) OX=272558 GN=folE PE=3 SV=1
MSKVDHEKIQQAVVMILEAIGEDPAREGLEDTPKRVAKMYEEVFAGLNQDPKEHFATIFGEDHEELVLVKDIPFFSMCEHHLVPFFGKAHVGYIPKGGKVTGLSKLARAVEAVARRPQLQERITSTVADALVETLEPHGVIVVVEAEHMCMTMRGVKKPGAATVTSAVRGTFANDAAARAEVLSLIKG

SEQ ID NO: 5031 - protein, 299 aa, Bacillus halodurans
  misc_feature (1)..(299): tr|A0A4Y7WH62|A0A4Y7WH62_BACHO GTP cyclohydrolase FolE2 OS=Bacillus halodurans OX=86665 GN=folE2 PE=3 SV=1
MKTKQWPSKTERHKRFGSVPPVAGKKPIHKEEMADLQNMPNDFLFALDSVGIHNVKHPCIIQSNLKPYEQTTVGTFSLTTGLEQMSKGINMSRLTELLQEYHQTGFILSLKNMQAFTKDLAERMEQSSAHVHVTFPWFFERESPSLNKIGLAHAEARLNVHFDETLGFTHEVGLTAAVTTLCPCSKEISEYSAHNQRGYVTIKATFYEPTEGSDDWKVTLLEAAESNASSILYPVLKRPDEKAVTEKAYENPRFVEDMVRLTAADLYENETIKAFTVECRNEESIHQHDAIATLSYSKK

SEQ ID NO: 5032 - protein, 304 aa, Bacillus halotolerans
  misc_feature (1)..(304): tr|A0A3Q9RUZ0|A0A3Q9RUZ0_9BACI GTP cyclohydrolase FolE2 OS=Bacillus halotolerans OX=260554 GN=folE2 PE=3 SV=1
MEQHILLPEKTERLQYFGSVSPVKGQKPVEKENMKDLQNIRKDYFFDIQQVGVTNVSHPVTVASAMKPCQQTTAANFTMTASLQRNQKGINMSRLTEQLQRYHQNGWILTFSSLQQFTKELAENMDQISACVEVRFPWYFERKSPMLGKAGLMHAEMLMSVTYHEDQPFKQRAGISAKVTTLCPCSKEISEYSAHNQRGTVSILADIHPTALLPVDVKADLLHVAESNASARLHPVLKRPDEKAVTETAYENPRFVEDLARLIAADLYELEWVSAFDIECRNEESIHLHDAYAKLRFSKQEECL

SEQ ID NO: 5033 - protein, 190 aa, Bacillus halotolerans
  misc_feature (1)..(190): tr|A0A2S9WIZ7|A0A2S9WIZ7_9BACI GTP cyclohydrolase 1 OS= Bacillus halotolerans OX=260554 GN=folE PE=3 SV=1
MKEVNKEQIEQAVRQILEAIGEDPNREGLLDTPKRVAKMYAEVFSGLNEDPKEHFQTIFGEDHEELVLVKDIAFHSMCEHHLVPFYGKAHVAYIPRGGKVTGLSKLARAVEAVAKRPQLQERITSTIAESIVETLDPHGVMVVVEAEHMCMTMRGVRKPGAKTVTSAVRGIFKDDAAARSEVLEHIKRQD

SEQ ID NO: 5034 - protein, 300 aa, Bacillus haynesii
  misc_feature (1)..(300): tr|A0A1R1RRZ2|A0A1R1RRZ2_9BACI GTP cyclohydrolase FolE2 OS=Bacillus haynesii OX=1925021 GN=folE2 PE=3 SV=1
MERKLHLPAKPERHRRFGSVEAVKGIKPTDKEQMKDIQNTPNDYFFDIDHVGVSNVSHPILIASSLKPFTQTTIGTFSFTTSLARDRKGINMSRLTEQLQRYYEANWTVDFHTLKDFAKDLADNMEQQSASVSVSFPWYFERLSPETKLSGLMHADIHMTVSYHENKGFSQTAGITAHVTTLCPCSKEISEYSAHNQRGIIKITAHIDAQAEMPEDFKSELLAAAETNASAKLHPVLKRPDEKRVTEQAYENPRFVEDVIRLTAADLYEMDWISAFEIECRNEESIHLHDAVARLSFSKC

SEQ ID NO: 5035 - protein, 189 aa, Bacillus haynesii; identical to SEQ ID NO: 4948
  misc_feature (1)..(189): tr|W7RGM8|W7RGM8_9BACI GTP cyclohydrolase 1 OS=Bacillus haynesii OX=1925021 GN=folE PE=3 SV=1

SEQ ID NO: 5036 - protein, 293 aa, Bacillus hemicellulosilyticus
  misc_feature (1)..(293): tr|W4QFE2|W4QFE2_9BACI GTP cyclohydrolase FolE2 OS=Baci llus hemicellulosilyticus JCM 9152 OX=1236971 GN=folE2 PE=3 SV=1
MKQLPPKAERHRHFGSVDPIVGTKPTEKEKMPDLQNKPDDFYFPIQQVGISDVKYPVMIESDLAPTTQTTTATFAMTTSLEQDFKGINMSRLTEQLHVYFQSHLLSLESLREFSAILAREMKQQAADVQVQFPWFFTKTSPSMQKEGMAHADITYNVHFDEKEGYTSEITMRAAVTTLCPCSKEISEYSAHNQRGFVTMTVRVAESADVDWKAILLEAAESNASSILYPVLKRPDEKAVTERAYENPRFVEDLIRLVASDLYEHEYIQSFDIECRNEESIHQHDAIARLSFKK

SEQ ID NO: 5037 - protein, 187 aa, Bacillus hisashii
  misc_feature (1)..(187): tr|A0A267TYL2|A0A267TYL2_9BACI GTP cyclohydrolase 1 OS= Bacillus hisashii OX=996558 GN=folE PE=3 SV=1
MKEMNLEQIEKGVRLILEGIGEDPNREGLLDTPKRVAKMYAEMFHGLNIDPREYFNTVFHEETEELVLVKDIPFYSMCEHHLVPFFGHVHVAYIPRNGKITGLSKLARAVEAVAKRPQLQERITRLVADSIMEKLDPLGVMVVVEAEHMCMTMRGVKKPGSKTVTTVARGCFDTDAEKRKEVLSLIK

SEQ ID NO: 5038 - protein, 188 aa, Bacillus horikoshii
  misc_feature (1)..(188): tr|A0A1Y0CPA0|A0A1Y0CPA0_9BACI GTP cyclohydrolase 1 OS= Bacillus horikoshii OX=79883 GN=folE PE=3 SV=1
MTEVNKAQIEEAVRMILEAIGEDPNREGLLDTPKRVAKMYTEVFAGLNEDPKEHFKTVFGEAHEELVLVKDISFFSMCEHHLVPFFGKAHVAYIPKGGKVTGLSKLARAVEAVAKRPQLQERITSTIAESIVESLDPHGVMVVVEAEHMCMTMRGVKKPGAMTITSAVRGVLENDPAARAEVLSLIKG

SEQ ID NO: 5039 - protein, 188 aa, Bacillus horikoshii
  misc_feature (1)..(188): tr|A0A5D4TG63|A0A5D4TG63_9BACI GTP cyclohydrolase 1 OS= Bacillus horikoshii OX=79883 GN=folE PE=3 SV=1
MIEVNKAQIEEAVRMILEAIGEDPNREGLLDTPKRVAKMYTEVFAGLNEDPKEHFKTVFGETHEELVLVKDISFFSMCEHHLVPFFGKAHVAYIPKGGKVTGLSKLARAVEAVAKRPQLQERITSTIAESIVESLDPHGVMVVVEAEHMCMTMRGVKKPGAMTITSAVRGVLENDPAARAEVLSLIKG

SEQ ID NO: 5040 - protein, 188 aa, Bacillus horneckiae
  misc_feature (1)..(188): tr|A0A2N0ZCT8|A0A2N0ZCT8_9BACI GTP cyclohydrolase 1 OS= Bacillus horneckiae OX=549687 GN=folE PE=3 SV=1
MSEINRPQIENAVRLILEAIGEDPSREGLLDTPKRVAKMYEEVFMGMNQDPEEYFDTVFGEDHEELVLVKDIPFYSMCEHHLVPFFGKAHVAYIPKDGKVTGLSKLARAVEAVAKRPQLQERITATVADAIVDKLKPHGVMVVVEAEHMCMTMRGVKKPGSKTITSAVRGVFAEDVSARSEVLSLIKS

SEQ ID NO: 5041 - protein, 188 aa, Bacillus hwajinpoensis
  misc_feature (1)..(188): tr|A0A4U1MHC1|A0A4U1MHC1_9BACI GTP cyclohydrolase 1 OS= Bacillus hwajinpoensis OX=208199 GN=folE PE=3 SV=1
MYEVNHDKIQEAVKMILEAIGEDPEREGLLDTPKRVARMYEEIFQGLHQDPKEHFQTIFGEDHEELVLVKDIPFYSTCEHHLVPFFGKAHVAYIPKGGKVTGLSKLARAVESVTKRPQLQERITSTIANSMVETLEPHGVMVVVEAEHMCMTMRGVKKPGSSTVTSAVRGVFESDAAARSEVLGLIKG

SEQ ID NO: 5042 - protein, 188 aa, Bacillus indicus
  misc_feature (1)..(188): tr|A0A084H0E1|A0A084H0E1_BACID GTP cyclohydrolase 1 OS= Bacillus indicus OX=246786 GN=folE PE=3 SV=1
MGQINTQQIEEAVRLILEAIGEDPNREGLLDTPKRVAKMYAEVFSGLNEDPKEHFKTVFGEDHEELVLVKDIPFHSMCEHHLVPFFGKAHIAYIPKGGKVTGLSKLARAVEAVCRRPQLQERITSTIAESIVDSLEPHGVMVVVEAEHMCMTMRGVKKPGSKTITSAVRGVFTNDPAARAEVLSFIKE

SEQ ID NO: 5043 - protein, 300 aa, Bacillus indicus
  misc_feature (1)..(300): tr|A0A084GQX8|A0A084GQX8_BACID GTP cyclohydrolase FolE2 OS=Bacillus indicus OX=246786 GN=folE2 PE=3 SV=1
MKRELQLPPKKERHRLFGSVEPGLKTKPVEKDKMPDLQNSKKDFLFHINAVGISNVKYPVVIQSSLSPEQQTTVAAFKMTSSISYEAKGTNMSRFTEQLEKYRLNGGFTMSINELYDFTKELAERLKQKDAEIDVTFPWFYERKGPSSELAGLNHATAGMKIRYEEGKGFTASAKLTCAVTTLCPCSKEISEYSAHNQRGFITMEVEFAEGYNEERDWKEALLAAAETNASAMIHPVLKRPDEKMVTETAYENPRFVEDMVRLVAADLYEFDFVSAFRVECRNEESIHLHDAIAELSFRK

SEQ ID NO: 5044 - protein, 188 aa, Bacillus infantis
  misc_feature (1)..(188): tr|U5L428|U5L428_9BACI GTP cyclohydrolase 1 OS=Bacillus infantis NRRL B-14911 OX=1367477 GN=folE PE=3 SV=1
MANVNRAQIEEAVRSILEAIGEDPNREGLLDTPKRVAKMYEEVFMGIGQDPEEYFETIFGEEHEELVLVKDIPFYSMCEHHLVPFFGKAHVAYIPRNGRVTGLSKLARAVEAVAKRPQLQERITSTVANAIMKKLEPHGVMVIVEAEHMCMTMRGVKKPGSKTVTSAVRGVLAEDARARAEVLSLIKD

SEQ ID NO: 5045 - protein, 188 aa, Bacillus infantis; identical to SEQ ID NO: 5044
  misc_feature (1)..(188): tr|A0A4Q4CD64|A0A4Q4CD64_9BACI GTP cyclohydrolase 1 OS= Bacillus infantis OX=324767 GN=folE PE=3 SV=1

SEQ ID NO: 5046 - protein, 304 aa, Bacillus intestinalis
  misc_feature (1)..(304): tr|A0A136GB20|A0A136GB20_9BACI GTP cyclohydrolase FolE2 OS=Bacillus intestinalis OX=1963032 GN=folE2 PE=3 SV=1
MNQHMPLPGKPERLQYFGSVSPIKGEKPVEKEKMKDLQNIRKDYFFDIQHVGVANVSHPVTITSAMTPAEQTTTANFTMTCDLRRNQKGINMSRLTELLQIYHQNGWILSFSSLQQFTKELAENMDQSSASVEVRFPWFFERKSPKLEKAGLMHADILMSVTYREDQPFEQRAGISAKVTTLCPCSKEISEYSAHNQRGTVSIWADIHPAVSLPSDFKADLLDAAESNASARLHPVLKRPDEKAVTETAYENPRFVEDLARLIAADLYELEWVSAFEIECRNEESIHLHDAYAKLRFSKQEDRI

SEQ ID NO: 5047 - protein, 190 aa, Bacillus intestinalis
  misc_feature (1)..(190): tr|A0A136G3G4|A0A136G3G4_9BACI GTP cyclohydrolase 1 OS= Bacillus intestinalis OX=1963032 GN=folE PE=3 SV=1
MKEVNKEQIEQAVRQILEAIGEDPNREGLLDTPKRVAKMYAEVFSGLNEDPKEHFQTIFGENHEELVLVKDIAFHSMCEHHLVPFYGKAHVAYIPRGGKVTGLSKLARAVEAVAKRPQLQERITSTIAESIVETLDPHGVMVVVEAEHMCMTMRGVRKPGAKTVTSAVRGVFKDDAAARAEVLEHIKRQD

SEQ ID NO: 5048 - protein, 188 aa, Bacillus kochii
  misc_feature (1)..(188): tr|A0A248TM39|A0A248TM39_9BACI GTP cyclohydrolase 1 OS= Bacillus kochii OX=859143 GN=folE PE=3 SV=1
MSEVNRAQIEEAVRLILDAIGEDPNREGLLDTPKRVAKMYEEVFSGIHQDPEEYFETVFGEDHEELVLVKDIPFFSMCEHHLVPFFGKAHVAYIPRNGKVTGLSKLARAVETVARRPQLQERITATVADAILHKLDPHGVMVVVEAEHMCMTMRGVKKPGSKTVTSAVRGVFAEDGNTRAEVLSFIKG

SEQ ID NO: 5049 - protein, 188 aa, Bacillus koreensis
  misc_feature (1)..(188): tr|A0A0M0KZ45|A0A0M0KZ45_9BACI GTP cyclohydrolase 1 OS= Bacillus koreensis OX=284581 GN=folE PE=3 SV=1
MSQVNKEQIEHAIRLLLEAVGEDPNREGLLDTPKRVAKMYEEVFSGLNEDPKEHFKTVFGEDHEELVLVKDIPFYSMCEHHLVPFYGKAHIAYIPKGGKVTGLSKLARAVEAVAKRPQLQERITSTVADSIVESLEPHGVMVVVEAEHMCMTMRGVKKPGASTVTSAVRGVLATDAAARSEVLSLIKS

SEQ ID NO: 5050 - protein, 294 aa, Bacillus krulwichiae
  misc_feature (1)..(294): tr|A0A1X9MBB9|A0A1X9MBB9_9BACI GTP cyclohydrolase FolE2 OS=Bacillus krulwichiae OX=199441 GN=folE2 PE=3 SV=1
MKRSLPPKAERHRHFGSVEPIIGTKPTEKEKMPDLQNKPADFYFPIQQVGISDVKYPVMIESLIAPTTQTTTATFALTTSLEQDFKGINMSRLTEQLHNFFQAHLLTDETLREFTAILAREMKQRAANVQVTFPWFFTKTSPAMEKEGMAHAEVKYDVSFDEEKGYTSVITLTGAVTTLCPCSKEISEYSAHNQRSFVTMSATVDEGHDADWKTVLLEAAESNASSILYPVLKRPDEKAVTEHAYENPRFVEDLVRLVAADLYENEAVKSFTVECRNEESIHQHDAIAKLSFTK

SEQ ID NO: 5051 - protein, 188 aa, Bacillus kyonggiensis
  misc_feature (1)..(188): tr|A0A4U1DCC5|A0A4U1DCC5_9BACI GTP cyclohydrolase 1 OS= Bacillus kyonggiensis OX=1037680 GN=folE PE=3 SV=1
MTKVNRAQIEEAVRLILEAVGDDPNREGVLDTPKRVAKMYEEVFQGLNQDPREYFETIFSEDHEELVLVKDIPFYSMCEHHLVPFYGKAHVAYIPRNGRVTGLSKLARAVEAVAKRPQLQERITSTVADAIMEKLEPHGVMIVVEAEHMCMTMRGVKKPGAKTITTAVRGTFADDSNARAEILSLIKQ

SEQ ID NO: 5052 - protein, 189 aa, Bacillus kyonggiensis
  misc_feature (1)..(189): tr|A0A4U1D2P7|A0A4U1D2P7_9BACI GTP cyclohydrolase 1 OS= Bacillus kyonggiensis OX=1037680 GN=folE PE=3 SV=1
MSVEIKKGLIEEHVRAILDLIGEDTNREGLLETPKRVAKMYGEVFAGVGVDPETALTTTFAEDYDGMVVVKDINYYTFCEHHLIPFFGKAHIGYIPKGRVIGLSKFARLVELVSQRPQVQERMTTQMADAIMNVLNPEGVIVSVEGQHLCMCARGVKKPGSATVTTVKRGAFQNNVALVEEFERALARD

SEQ ID NO: 5053 - protein, 296 aa, Bacillus lehensis
  misc_feature (1)..(296): tr|A0A4Y7WMC2|A0A4Y7WMC2_9BACI GTP cyclohydrolase FolE2 OS=Bacillus lehensis OX=300825 GN=folE2 PE=3 SV=1
MEIPLKAERHALFGSVSPSVKTKPTEKEHMQDLQNTHKDFLFDVNLVGVANVKRPVQIKSTSSPVNQTTVATFSMGAQLNRYAKGTNMSRFLTALEEFNGQNQTLSLASLKNLARSLADRLNQDMIHIHVAFPWFYSREAPTSLQSAHNHSEIEISLNYSKTLGFKTELTLACLVTTLCPCSKEISEYSAHNQRGEVKMSVELCEDFDEDKIDWKNELLVAAESNASARIHPILKRPDEKVVTEQAFENPRFVEDLVRLVAADLYEYDWVTAFKVTCQNQESIHLHDAVAKITYKK

SEQ ID NO: 5054 - protein, 296 aa, Bacillus lehensis
  misc_feature (1)..(296): tr|A0A060LPM7|A0A060LPM7_9BACI GTP cyclohydrolase FolE2 OS=Bacillus lehensis G1 OX=1246626 GN=folE2 PE=3 SV=1
MKIPLKAARHALFGSVSPSVKTKPTEKEHMQDLQNTHKDFLFDVNLVGVANVKQPVQIKSTSSPVNQTTVATFSMGAQLNRYAKGTNMSRFLTALEEFNGQNQTLSLASLKDLVRSLADRLNQDMIHIHVTFPWFYSREAPTSLQSAHNHSEIEISLNYSKTLGFKTELTLACLVTTLCPCSKEISEYSAHNQRGEVKMSVELCEDFDEDKIDWKNELLVAAESNASARIHPILKRPDEKVVTEQAFENPRFVEDLVRLVAADLYEYDWVTAFKVTCQNQESIHLHDAVAKITYKK

SEQ ID NO: 5055 - protein, 188 aa, Bacillus lentus
  misc_feature (1)..(188): tr|A0A2X4W9A8|A0A2X4W9A8_BACLE GTP cyclohydrolase 1 OS= Bacillus lentus OX=1467 GN=folE PE=3 SV=1
MKKFNHPQIEEAVRMILEAIGEDPNREGLIDTPKRVAKMYEEVFSGLDKNPEEYFETIFGEEHEELVLVKDIPFFSMCEHHLVPFFGKAHVAYIPRNGKVTGLSKLARAVETVAARPQLQERITSTVANVMMEKLEPYGVMVILEAEHMCMTMRGIKKPGAKTVTSAVRGAFANDSQARAEVLSLIKE

SEQ ID NO: 5056 - protein, 300 aa, Bacillus licheniformis
  misc_feature (1)..(300): sp|Q65ML7|GCH4_BACLD GTP cyclohydrolase FolE2 OS=Bacill us licheniformis (strain ATCC 14580 / DSM 13 / JCM 2505 / NBRC 12200 / NCIMB 9375 / NRRL NRS-1264 / Gibson 46) OX=279010 GN=folE2 PE=3 SV=1
MERKLHLPAKPERHRRFGSVEAVKGIKPTDKEQMKDIQNTPNDYFFDIDHVGVSNVSHPILIASSLKPFTQTTIGAFSFTTSLARDRKGINMSRLTEQLQRYHEANWTVDFHTLKDFAKDLAGNMEQESASVSVSFPWYFERISPETKLSGLMHADIHMTVSYHENKGFSQTAGITAHATTLCPCSKEISEYSAHNQRGIIKITAHINEQAEMPDDFKAELLAAAETNASAKLHPVLKRPDEKRVTEQAYENPRFVEDVLRLTAADLYEMDWISAFEIECRNEESIHLHDAVARLSFSKC

SEQ ID NO: 5057 - protein, 189 aa, Bacillus licheniformis
  misc_feature (1)..(189): tr|T5HNV2|T5HNV2_BACLI GTP cyclohydrolase 1 OS=Bacillus licheniformis CG-B52 OX=1368424 GN=folE PE=3 SV=1
MREINKDQIEQAVRQILEAIGEDPNREGLLDTPKRVAKMYAEVFAGLNEDPKEHFKTIFGEDHEELVLVKDIPFYSMCEHHLVPFYGKAHVAYIPKGGKVTGLSKLARAVEAVAKRPQLQERITSTIADSIVETLTPHGVMVVVEAEHMCMTMRGVKKPGSKTVTSAVRGTFRQDVAARSEVLELIKTS

SEQ ID NO: 5058 - protein, 302 aa, Bacillus litoralis
  misc_feature (1)..(302): tr|A0A179T3Y8|A0A179T3Y8_9BACI GTP cyclohydrolase FolE2 OS=Bacillus litoralis OX=152268 GN=folE2 PE=3 SV=1
MMTRKINLPPKKERHKLFGSVEPGLKLKPTEKEHMPDLQNAKMDFLFTIDSVGISNVKHPIMLKSDLNPKQQTTIASFKMTSKISHDSKGTNMSRFTEQLEKYRQNGGFTPSIKSLFDFTKELAERLKQKDASIEIKFPWFYERKGPSSELIGLNHAEATITVSYVKDVGFTSSASLTCAVTTLCPCSKEISEYSAHNQRGYVTMNVEFTEDYNEEKDWKAVLLNAAESNASAMIHPVLKRPDEKMVTETAYENPRFVEDMVRLVAADLYELDFVQAFTVECRNEESIHLHDAIASLSYRKD

SEQ ID NO: 5059 - protein, 188 aa, Bacillus litoralis
  misc_feature (1)..(188): tr|A0A179SXI8|A0A179SXI8_9BACI GTP cyclohydrolase 1 OS= Bacillus litoralis OX=152268 GN=folE PE=3 SV=1
MGQVDFGKIEQAVKLILEAIGEDPTREGLLDTPKRVAKMYGEVFSGLDEDPSEHFKTIFGEDHEELVLVKDIPFYSMCEHHLVPFYGKAHVAYIPKGGKVTGLSKLARAVEAVAKRPQLQERITSTIADSINRSLEPHGVMVVVEAEHMCMTMRGVKKPGSQTVTSAVRGIFRKDEASRAEVLSLIKG

SEQ ID NO: 5060 - protein, 188 aa, Bacillus loiseleuriae
  misc_feature (1)..(188): tr|A0A0K9GWG9|A0A0K9GWG9_9BACI GTP cyclohydrolase 1 OS= Bacillus loiseleuriae OX=1679170 GN=folE PE=3 SV=1
MTKVNHAKIEEAVRMILEAVGEDPEREGLLDTPKRVARMYEEIFAGLEQDPKEYFETVFGEDHEELVLVKDIPFYSVCEHHLVPFYGKAHVAYIPKNGKVTGLSKLARAVEAISKRPQLQERITSTIASSIMEKLEPHGVMVVVEAEHMCMTMRGVKKPGAMTVTSAVRGIFAENHSTRAEVLSFIKN

SEQ ID NO: 5061 - protein, 185 aa, Bacillus lonarensis
  misc_feature (1)..(185): tr|A0A1G6J1H5|A0A1G6J1H5_9BACI GTP cyclohydrolase 1 OS= Bacillus lonarensis OX=1464122 GN=folE PE=3 SV=1
MINHDKLQQAVKMILEAVGEDPDREGLKDTPKRVAKMYGEMFSGLYEDPSEHLKTVFAESHEELVLVKDIPFYSMCEHHLVPFFGKAHIAYIPSDGVVTGLSKLARTVDTVARRPQVQERMTKTLADTFMQALQPQGVMVIVSAEHMCMSMRGIQKPGAKTVTTAVRGMFEEDATARAEVLNLVQ

SEQ ID NO: 5062 - protein, 190 aa, Bacillus luciferensis
  misc_feature (1)..(190): tr|A0A1E2W657|A0A1E2W657_9BACI GTP cyclohydrolase 1 OS= Bacillus luciferensis OX=178774 GN=folE PE=3 SV=1
MNEVNLEKIEQAVRLILEAIGDDPNREGIYETPKRVAKMYAEVFSGMRQDEKAHLHKVFGEDHEELVLVKDIPFHSMCEHHLLPFYGVAHVAYIPRNGRVTGLSKLARTVETVAKRPQLQERITASVVDAIMDVLQPHGAMVVVEAEHMCMSMRGVRKPGSKTVTTAVRGSLKEDVQGRNEILAMIHSSK

SEQ ID NO: 5063 - protein, 189 aa, Bacillus luti
  misc_feature (1)..(189): tr|A0A1K0BD07|A0A1K0BD07_9BACI GTP cyclohydrolase 1 OS= Bacillus luti OX=2026191 GN=folE PE=3 SV=1
MAKVNLEQIEHAVRLILEAIGDDPNREGVLDTPKRVAKMYAEVFAGMHEDPKEHLHKVFGEDHEELVLVKDIPFYSMCEHHLVPFYGVAHVAYIPQGGKVTGLSKLARTVDTIARRPQLQERITSTVANSIMEVLEPHGVMVVVEAEHMCMTMRGVKKPGAKTVTTAVRGVLENDAAARSEILSFIKTK

SEQ ID NO: 5064 - protein, 189 aa, Bacillus manliponensis
  misc_feature (1)..(189): tr|A0A073K1V7|A0A073K1V7_9BACI GTP cyclohydrolase 1 OS= Bacillus manliponensis OX=574376 GN=folE PE=3 SV=1
MANVNLEQIEHAVRLILEAIGDDPNREGVLDTPKRVAKMYAEVFSGMHEEPKEHLHKVFGEDHEELVLVKDIPFFSMCEHHLVPFYGVAHVAYIPRGGKVTGLSKLARTVDTVARRPQLQERITSTVADSIMEVLEPHGVMIVVEAEHMCMTMRGVKKPGAKTVTTAVRGVLQDDAAARSEILSFIKTN

SEQ ID NO: 5065 - protein, 188 aa, Bacillus marisflavi
  misc_feature (1)..(188): tr|A0A0J5VEM5|A0A0J5VEM5_9BACI GTP cyclohydrolase 1 OS= Bacillus marisflavi OX=189381 GN=folE PE=3 SV=1
MAEVNYRQIEDAVRLILEAIGDNPNREGLLDTPKRVAKMYAEVFSGMHQDPKEYFETIFGEDHEELVLVKDIPFHSMCEHHLVPFFGKAHVAYIPRNGRVTGLSKLARAVETVAKRPQLQERITSTVADTIMETLEPHGVMVVVEAEHMCMTMRGVKKPGASTVTTAVRGSFKEDAQARNEVLSFIKD

SEQ ID NO: 5066 - protein, 188 aa, Bacillus marisflavi
  misc_feature (1)..(188): tr|A0A5D4S077|A0A5D4S077_9BACI GTP cyclohydrolase 1 OS= Bacillus marisflavi OX=189381 GN=folE PE=3 SV=1
MAEVNYRQIEDAVRLILEAIGDNPNREGLLDTPKRVAKMYAEVFSGMNQDPKEYFETIFGEDHEELVLVKDIPFHSMCEHHLVPFFGKAHVAYIPRNGRVTGLSKLARAVETVAKRPQLQERITSTVADTIMETLDPHGVMVVVEAEHMCMTMRGVKKPGASTVTTAVRGSYKEDAQARNEVLSFIKD

SEQ ID NO: 5067 - protein, 295 aa, Bacillus marmarensis
  misc_feature (1)..(295): tr|U6SRX4|U6SRX4_9BACI GTP cyclohydrolase FolE2 OS=Baci llus marmarensis DSM 21297 OX=1188261 GN=folE2 PE=3 SV= 1
MNRQLPPKAERHRHFGSVEPIEGTKPKEKDQMPDLQNKPDDYYFPIQKVGISKVKYPVMIESALAPTTQTTTAEFAMTTSLDAEFKGINMSRLTEQLHMYFQTHLLSLETLREFAAILAREMDQKASDVKVTFPWFFTKSSPSMKKEGMAHADVTFDVSFNEETGYTSKITLVAAVTTLCPCSKEISEYSAHNQRGFVTMSAVVDDVADIDWKQALLEAAESNASSILYPVLKRPDEKAVTEHAYENPRFVEDLVRLVASDLYENEAIRSFEIECRNEESIHQHDAIAQLSFSKE

SEQ ID NO: 5068 - protein, 188 aa, Bacillus megaterium; identical to SEQ ID NO: 4964
  misc_feature (1)..(188): tr|D5DL21|D5DL21_BACMD GTP cyclohydrolase 1 OS=Bacillus megaterium (strain DSM 319) OX=592022 GN=folE PE=3 SV= 1

SEQ ID NO: 5069 - protein, 188 aa, Bacillus megaterium; identical to SEQ ID NO: 4964
  misc_feature (1)..(188): tr|D5DRG3|D5DRG3_BACMQ GTP cyclohydrolase 1 OS=Bacillus megaterium (strain ATCC 12872 / QMB1551) OX=545693 GN= folE PE=3 SV=1

SEQ ID NO: 5070 - protein, 188 aa, Bacillus mesonae
  misc_feature (1)..(188): tr|A0A3Q9QY88|A0A3Q9QY88_9BACI GTP cyclohydrolase 1 OS= Bacillus mesonae OX=1193713 GN=folE PE=3 SV=1
MSEVNRAQIEEAVRLILEAFGEDPNREGLLDTPKRVAKMYEEVFSGLNEDPKKHFETIFSEDHEELVLVKDIPFYSMCEHHLVPFFGKAHVAYIPQNGRVTGLSKLARAVEAVAKRPQLQERITATIADSIMEKLEPHGVMIVVEAEHMCMTMRGVKKPGSKTVTTAVRGTLKDDATARSEILSLIKN

SEQ ID NO: 5071 - protein, 306 aa, Bacillus methanolicus
  misc_feature (1)..(306): tr|I3E3E3|I3E3E3_BACMM GTP cyclohydrolase FolE2 OS=Baci llus methanolicus (strain MGA3 / ATCC 53907) OX=796606 GN=folE2 PE=3 SV=1
MKNIKLPPKNERFKLFGSIEPGIKMKPSEKEKMPDLQNIREDFLFEIDAVGITNVKIPVSVTSTLNPKTQSTIATFTLTSTLPRDVKGTNMSRFTEQLELYRRQGFTLNFSQLHDFVKELSERLGQRDAKLEVSFPWFYEQTAPSSSLAGLNHADARILLSYQHENVVERTVELTCAVTTLCPCSKEISEYSAHNQRGFIKMTTVLTDNYDESVDWKVVLLHAAQSNASAVIHPILKRPDEKIVTEKAYENPRFVEDMVRLVAADLYEIPFIQSFIIECRNEESIHLHDAYAFVTFDKTIGSGAKS

SEQ ID NO: 5072 - protein, 188 aa, Bacillus methanolicus
  misc_feature (1)..(188): tr|I3DWR6|I3DWR6_BACMT GTP cyclohydrolase 1 OS=Bacillus methanolicus PB1 OX=997296 GN=folE PE=3 SV=1
MSNFNRAQIEEAVRLILEAIGEDPNREGLLDTPKRVAKMYEEVFAGLNKDPKEYFETVFGEEHEELVLVKDIPFYSMCEHHLVPFFGHAHVAYIPRNGKVTGLSKLARAVEAVARRPQLQERITSTIADTIMEKLDPHGVMIVVEAEHMCMTMRGVKKPGSKTVTSAVRGILQNDARARAEVLSLIKN

SEQ ID NO: 5073 - protein, 189 aa, Bacillus mobilis
  misc_feature (1)..(189): tr|A0A1J9ZR12|A0A1J9ZR12_9BACI GTP cyclohydrolase 1 OS= Bacillus mobilis OX=2026190 GN=folE PE=3 SV=1
MAKVNLEQIEHAVRLILEAIGDDPNREGVLDTPKRVAKMYAEVFAGMHEDPKEHLHKVFGEDHEELVLVKDIPFYSMCEHHLVPFYGVAHVAYIPQGGKVTGLSKLARTVDTIARRPQLQERITSTVANSIMEVLEPHGVMVVVEAEHMCMTMRGVKKPGAKTVTTAVRGVLENDAAARSEILSFIKSK

SEQ ID NO: 5074 - protein, 188 aa, Bacillus muralis
  misc_feature (1)..(188): tr|A0A1B3XQN3|A0A1B3XQN3_9BACI GTP cyclohydrolase 1 OS= Bacillus muralis OX=264697 GN=folE PE=3 SV=1
MANVDHAKIEEAVKMLLEAVGEDPNREGLLDTPGRVARMYEEIFSGLNQDPKEYFDTVFGEDHEELVLVKDIPFYSVCEHHLVPFYGKAHVAYIPKNGKVTGLSKLARAVEAVSKRPQLQERITSTVADSIMEKLEPHGVMVVVEAEHMCMTMRGVKKPGSKTITSAVRGTFAKDHRTRAEVLAFIKN

SEQ ID NO: 5075 - protein, 189 aa, Bacillus mycoides
  misc_feature (1)..(189): sp|A9VMC0|GCH1_BACMK GTP cyclohydrolase 1 OS=Bacillus m ycoides (strain KBAB4) OX=315730 GN=folE PE=3 SV=1
MAKVNLEQIEHAVRLILEAIGDDPNREGVLDTPKRVAKMYAEVFSGMHEDPKEHLHKVFGEDHEELVLVKDIPFYSMCEHHLVPFYGVAHVAYIPQGGKVTGLSKLARTVDTIARRPQLQERITSTVANSIMEVLEPHGVMVVVEAEHMCMTMRGVKKPGAKTVTTAVRGVLENDAAARSEILSFIKTN

SEQ ID NO: 5076 - protein, 189 aa, Bacillus mycoides
  misc_feature (1)..(189): tr|A0A076VZZ0|A0A076VZZ0_BACMY GTP cyclohydrolase 1 OS= Bacillus mycoides OX=1405 GN=folE PE=3 SV=1
MAKVNLEQIEQAVRLILEAIGDDPNREGVLDTPKRVAKMYAEVFSGMHEDPKEHLHKVFGEEHEELVLVKDIPFYSMCEHHLVPFYGVAHVAYIPRGGKVTGLSKLARTVDTIARRPQLQERITSTVANSIMEVLEPHGVMVVVEAEHMCMTMRGVKKPGAKTVTTAVRGVLENDAAARSEILSFIKAK

SEQ ID NO: 5077 - protein, 190 aa, Bacillus nakamurai
  misc_feature (1)..(190): tr|A0A150F994|A0A150F994_9BACI GTP cyclohydrolase 1 OS= Bacillus nakamurai OX=1793963 GN=folE PE=3 SV=1
MKEVNKEQIEQAVRQILEAIGEDPNREGLLDTPKRVAKMYAEVFSGLNEDPKEHFQTVFGEDHEELVLVKDIAFHSMCEHHLVPFYGKAHIAYIPRGGKVTGLSKLARAVEAVSKRPQLQERITSTIAESIVDTLDPHGVMVVVEAEHMCMTMRGVRKPGAKTVTSAVRGIFKDDAAARSEVLEHIKRAD

SEQ ID NO: 5078 - protein, 309 aa, Bacillus nakamurai
  misc_feature (1)..(309): tr|A0A150FDJ6|A0A150FDJ6_9BACI GTP cyclohydrolase FolE2 OS=Bacillus nakamurai OX=1793963 GN=folE2 PE=3 SV=1
MNQHILLPSKAERYRHFGSVDPKNGKKPIEKEKMKDLQNTEKEYFFAIEQVGVTNVSHPVSITSSLAPYEQTASGQFTLTAHLRRHQKGINMSRLTEQLQDYYESGWVLSLESLKPFTRELAEKMNQTSAVSEVKFPWYFERKSPMLHKTGLMHAEAVIHTEYKAGLPYKQRVGISAKVTTLCPCSKEISEYSAHNQRGIVTIMADVDPQAQLPDDFKTDLLEAAETNASAKLHPVLKRPDEKAVTETAYENPRFVEDLIRLIAADLYELPWVSAFEIECRNEESIHLHDAYAKLKYAKQNGKTGGSVS

SEQ ID NO: 5079 - protein, 294 aa, Bacillus nanhaiisediminis
  misc_feature (1)..(294): tr|A0A562QNX6|A0A562QNX6_9BACI GTP cyclohydrolase FolE2 OS=Bacillus nanhaiisediminis OX=688079 GN=folE2 PE=3 S V=1
MKRSLPPKAERHRHFGSVDPIIGTKPTDKEKMPDLQNKPDDFYFPIQQVGISKVKYPVMIESDLAPTTQTTTAEFAMTTSLDQDFKGINMSRLTEQLHLFFQTHLLSVETLREFTTILAREMKQRSSNVRVTFPWFFTKTSPSLQKEGMAHADVTYDVTFDENHGFTSAITLTAAVTTLCPCSKEISEYSAHNQRGFVTMTVTVDEAHEADWKAVLLEAAESNASSILYPVLKRPDEKAVTERAYENPRFVEDLARLVASDLYEHEAVHAFEIECRNEESIHQHDAIAKLTFTK

SEQ ID NO: 5080 - protein, 187 aa, Bacillus nealsonii
  misc_feature (1)..(187): tr|A0A2N0Z3N3|A0A2N0Z3N3_9BACI GTP cyclohydrolase 1 OS= Bacillus nealsonii OX=115979 GN=folE PE=3 SV=1
MSKVNIPKIEEAVKLILEAIGEDPDREGLIDTPTRVAKMYSEIFSGLQEDPKEYFQTIFGEDHEELVLVKDIPFYSMCEHHLVPFFGNAHVAYIPRNGKVTGLSKLARAVEVVAKRPQLQERITSTVADSIYEMLEPHGVMVVIEAEHMCMTMRGVNKPGAKTITTAVRGRYAEDSDARAEVLSLLK

SEQ ID NO: 5081 - protein, 187 aa, Bacillus nealsonii
  misc_feature (1)..(187): tr|R9CCV8|R9CCV8_9BACI GTP cyclohydrolase 1 OS=Bacillus nealsonii AAU1 OX=1202533 GN=folE PE=3 SV=1
MSKINTPQIEEAIRLLLEAVGEDPNREGLLDTPKRVAKMYEEVFSGLTIDPKEYFETIFHEDHEELVLVKDIPFYSMCEHHLVPFYGKAHVAYIPKGGRVAGLSKLARAIEAVSKRPQLQERITSTVADTMMETLEPYGVMIVVEAEHMCMTMRGVKKPGAKTVTSAVRGVFQTDSDKRAEVFAMIK

SEQ ID NO: 5082 - protein, 188 aa, Bacillus notoginsengisoli
  misc_feature (1)..(188): tr|A0A417YVB0|A0A417YVB0_9BACI GTP cyclohydrolase 1 OS= Bacillus notoginsengisoli OX=1578198 GN=folE PE=3 SV=1
MPTVNKAQIEEAVRMILQAIGEDPEREGLLDTPKRVAKMYEEVFSGLNQDPGEYFETIFGEDHEELVLVKDIPFYSMCEHHLVPFFGKAHVAYLPRNGKVTGLSKLARAVEAVAKRPQLQERITSEIANSIMDRLQPHGVMVVVEAEHMCMTMRGVKKPGSKTVTSAVRGIFVENAIARSEVLSFINN

SEQ ID NO: 5083 - protein, 188 aa, Bacillus obstructivus
  misc_feature (1)..(188): tr|A0A1L8ZLR3|A0A1L8ZLR3_9BACI GTP cyclohydrolase 1 OS= Bacillus obstructivus OX=1914540 GN=folE PE=3 SV=1
MVEINHSQIEEAIRMILEAVGENPDREGLLDTPKRVAKMYEEIFEGINLDPKESFDLVFSEEHEELVLVKDISFISMCEHHLLPFYGKAHIAYLPRNGKVTGLSKLARAIEIVAKRPQIQERMTSTVADSIYEILDPHGVMVVIEAEHMCMTMRGVKKPGAKAITTAVRGSLVNDSYARSEILNLIHN

SEQ ID NO: 5084 - protein, 326 aa, Bacillus oceanisediminis
  misc_feature (1)..(326): tr|A0A562JJB1|A0A562JJB1_9BACI GTP cyclohydrolase FolE2 OS=Bacillus oceanisediminis OX=665099 GN=folE2 PE=3 SV =1
MNLKLPSKQERHKLFGSVQPGEKLKPAIKDEMVDLQSQKNDFLFNIDSVGISNVKIPVTINSFIEPVKQGTIAAFTLTSSIPGNQKGTNMSRFIEQLEEYRLRGFTMEQEQLYQFVSDLSARLGQKNVRVEVEFPWFYERKGPSSELSGLNHATVRMTVQQDSDKNYKISGELSCAVTTLCPCSKEISEYSAHNQRGIVKISVDPTVLSEDWKEQLLYAAESNASACIHPLLKRTDEKIVTETAYENPRFVEDMVRLVAADLYEKEWINGFTVECRNEESIHLHDAIATLTYKKKIKVEQPDIKKSGWCHLVNKFSAIDFFYEIFF

SEQ ID NO: 5085 - protein, 188 aa, Bacillus oceanisediminis; identical to SEQ ID NO: 5015
  misc_feature (1)..(188): tr|A0A1S1YKR5|A0A1S1YKR5_9BACI GTP cyclohydrolase 1 OS= Bacillus oceanisediminis OX=665099 GN=folE PE=3 SV=1

SEQ ID NO: 5086 - protein, 294 aa, Bacillus okhensis
  misc_feature (1)..(294): tr|A0A0B0IGR2|A0A0B0IGR2_9BACI GTP cyclohydrolase FolE2 OS=Bacillus okhensis OX=333138 GN=folE2 PE=3 SV=1
MKRSLPPKAERHRHFGTVDPVIGTKPTDKEKMPDLQNKPDDFYFPIQQVGISDVKYPVMIESELAPTTQTTTATFALTTSLEQDFKGINMSRLTEQLHLFFQSHLLTDQTLREFTAILAREMKQKAANVRVTFPWFFTKTSPAMQKEGMAHADITYDVSFDEDQGYTSIITLTGAVTTLCPCSKEISEYSAHNQRSFVTMTVTVDDAFEADWKAVLLEAAESNASSILFPVLKRPDEKAVTERAYENPRFVEDLVRLVAADLYEHEAIRSFEVQCRNEESIHQHDAIAKLSFTK

SEQ ID NO: 5087 - protein, 299 aa, Bacillus okuhidensis
  misc_feature (1)..(299): tr|A0A0M0KMF4|A0A0M0KMF4_9BACI GTP cyclohydrolase FolE2 OS=Bacillus okuhidensis OX=136160 GN=folE2 PE=3 SV=1
MKTKQWPSKTERHKRFGSVPPVAGKKPIHKEEMADLQNMPNDFLFALDSVGIHNVKHPCIIQSNLKPYEQTTVGTFSLTTSLEQMSKGINMSRLTELLQEYHQTGFILSLKNMQAFTKDLAERMEQSRAHVHVTFPWFFERESPSLNKIGLAHAEARLNVHFDETLGFTHEVGLTAAVTTLCPCSKEISEYSAHNQRGYVTIKATFYEPTEGSDDWKVTLLEAAESNASSILYPVLKRPDEKAVTEKAYENPRFVEDMVRLTAADLYENETIKAFTVECRNEESIHQHDAIATLSYSKK

SEQ ID NO: 5088 - protein, 188 aa, Bacillus okuhidensis
  misc_feature (1)..(188): tr|A0A0M0KKN6|A0A0M0KKN6_9BACI GTP cyclohydrolase 1 OS= Bacillus okuhidensis OX=136160 GN=folE PE=3 SV=1
MSKVDHEKIQQAVVMILEAIGEDPAREGLEDTPKRVAKMYEEVFAGLNQDPKEHFATIFGEDHEELVLVKDIPFFSMCEHHLVPFFGKAHVGYIPKGGKVTGLSKLARAVEAVARRPQLQERITSTVADALVETLEPHGVIVVVEAEHMCMTMRGVKKPGATTVTSAVRGTFANDAAARAEVLSLIKG

SEQ ID NO: 5089 - protein, 187 aa, Bacillus oleivorans
  misc_feature (1)..(187): tr|A0A285CM58|A0A285CM58_9BACI GTP cyclohydrolase 1 OS= Bacillus oleivorans OX=1448271 GN=folE PE=3 SV=1
MNEINLNQIEQAVRLILEAIGEDPNREGLLDTPKRVAKMYKEVFSGLNEDPKSYFDTIFSEDHEELVLVKDIPFYSMCEHHLVPFFGHAHVAYIPKGGKVTGLSKLARAVEAVAKRPQLQERLTSTIADAIFEKLEPFGVMVVVEGEHMCMSMRGVKKPGSKTVTTAARGVFAEDQKKRAEVLTLIK

SEQ ID NO: 5090 - protein, 189 aa, Bacillus pacificus; identical to SEQ ID NO: 4953
  misc_feature (1)..(189): tr|A0A1J9ZT03|A0A1J9ZT03_9BACI GTP cyclohydrolase 1 OS= Bacillus pacificus OX=2026187 GN=folE PE=3 SV=1

SEQ ID NO: 5091 - protein, 300 aa, Bacillus paralicheniformis; identical to SEQ ID NO: 4949
  misc_feature (1)..(300): tr|A0A1Q8GSR7|A0A1Q8GSR7_9BACI GTP cyclohydrolase FolE2 OS=Bacillus paralicheniformis OX=1648923 GN=folE2 PE=3 SV=1

SEQ ID NO: 5092 - protein, 300 aa, Bacillus paralicheniformis
  misc_feature (1)..(300): tr|A0A5A9T1P0|A0A5A9T1P0_9BACI GTP cyclohydrolase FolE2 OS=Bacillus paralicheniformis OX=1648923 GN=folE2 PE=3 SV=1
MERILHLPAKPERHRRFGSVEAVKGIKPTDKEQMKDIQNTPNDYFFDIDHVGVSNVSHPILIASSLKPFTQTTIGAFSFTTSLARGRKGINMSRLTEQLQRYHEANWTIDVHTLKDFAKDLADNMEQQSASVSVSFPWYFERLSPETKLSGLMHADIHMTVSYHENKGFSQTVGITAHVTTLCPCSKEISEYSAHNQRGIIKITAHINEQAEMPDDFKTELLAAAETNASAKLHPVLKRPDEKRVTEQAYENPRFVEDVIRLTAADLYEMNWISAFEIECRNEESIHMHDAVARLSFSKI

SEQ ID NO: 5093 - protein, 189 aa, Bacillus paramycoides
  misc_feature (1)..(189): tr|A0A1J9V984|A0A1J9V984_9BACI GTP cyclohydrolase 1 OS= Bacillus paramycoides OX=2026194 GN=folE PE=3 SV=1
MAKVNLEQIEHAVRLILEAIGDDPNREGVLDTPKRVAKMYAEVFSGMHEDPKEHLHKVFGEDHEELVLVKDIPFYSMCEHHLVPFYGVAHVAYIPQGGKVTGLSKLARTVDTIARRPQLQERITSTVANSIMEVLEPHGVMVIVEAEHMCMTMRGVKKPGAKTVTTAVRGVLEKDAAARNEILSFIKTK

SEQ ID NO: 5094 - protein, 189 aa, Bacillus paranthracis; identical to SEQ ID NO: 4953
  misc_feature (1)..(189): tr|A0A1J9Y031|A0A1J9Y031_9BACI GTP cyclohydrolase 1 OS= Bacillus paranthracis OX=2026186 GN=folE PE=3 SV=1

SEQ ID NO: 5095 - protein, 188 aa, Bacillus persicus
  misc_feature (1)..(188): tr|A0A1H8BQP2|A0A1H8BQP2_9BACI GTP cyclohydrolase 1 OS= Bacillus persicus OX=930146 GN=folE PE=3 SV=1
MTKVNHAQIEEAVRLILEAVGEDPDREGLLDTPKRVARMYEEVFAGLNKDPKEYFETIFGEEHEELVLVKDIPFYSICEHHLVPFYGKAHVAYIPRGGKVTGLSKLARAVEAVAQRPQLQERITSTIANAIMEKLEPHGVMVVVEAEHMCMTMRGVKKPGSKTVTSAVRGTLAEDVSARAEILALIKE

SEQ ID NO: 5096 - protein, 188 aa, Bacillus praedii
  misc_feature (1)..(188): tr|A0A4R1B2K8|A0A4R1B2K8_9BACI GTP cyclohydrolase 1 OS= Bacillus praedii OX=1742358 GN=folE PE=3 SV=1
MAEVNRAQIEDAVRLILEAIGEDPNREGLLDTPKRVAKMYEEVFQGLNQDPKEYFETVFGEDHEEVVLVKDIPFYSMCEHHLVPFYGKAHVAYIPRNGKVTGLSKLARAVDAVAKRPQLQERITSTIADSILEKLDPHGVMVVVEAEHMCMTMRGVKKPGSQTVTTAVRGVYADDERARAEVLSLIKF

SEQ ID NO: 5097 - protein, 194 aa, Bacillus pseudofirmus
  misc_feature (1)..(194): tr|A0A1Q8V3F2|A0A1Q8V3F2_BACPF GTP cyclohydrolase 1 OS= Bacillus pseudofirmus OX=79885 GN=folE PE=3 SV=1
MEAYKLNNNFDLEKIKQGVTMILEAIGEDPNREGLLDTPKRVAKMYQEVFSGLNEDPAKHFETIFGEDHEEIVLVKDIPFFSMCEHHLVPFYGQAHVGYIPRGGKVTGLSKLARAVDAVAKRPQLQERITSTIADTLVKELDPHGVIVVVEAEHMCMTMRGVKKPGSKTVTSAVRGTFSEDATARAEVLSFIKG

SEQ ID NO: 5098 - protein, 295 aa, Bacillus pseudofirmus
  misc_feature (1)..(295): tr|D3FZ66|D3FZ66_BACPE GTP cyclohydrolase FolE2 OS=Baci llus pseudofirmus (strain OF4) OX=398511 GN=yciA PE=3 S V=1
MNRQLPPKAERHRHFGSVEPIEGTKPKEKDQMPDLQNKPDDYYFPIQKVGISKVKYPVMIESALAPTTQTTTAEFAMTTSLDAEFKGINMSRLTEQLHMYFQTHLLSIETLREFAAILAREMKQKASDVKVTFPWFFTKSSPSMKKEGMAHADVTFDVSFNEETGYTSKITLVAAVTTLCPCSKEISEYSAHNQRGFVTMSAVVDDVEDIDWKQAMLEAAESNASSILYPVLKRPDEKAVTEHAYENPRFVEDLVRLVASDLYENEAIRSFEIECRNEESIHQHDAIAQLSFSKE

SEQ ID NO: 5099 - protein, 195 aa, Bacillus pseudomycoides
  misc_feature (1)..(195): tr|C3BW12|C3BW12_9BACI GTP cyclohydrolase 1 OS=Bacillus pseudomycoides DSM 12442 OX=527000 GN=folE PE=3 SV=1
MSLKTIQSVEIDTDKIEVAVKMILEAIGEDINREGILETPKRVAKMYKEVFQGLGQNPSEHLLKIFNENHEELVLVKDIPFYSMCEHHLVPFFGRAHIGYIPNNGKVTGLSKLARALETICKRPQLQERITNELANVIFETLEPKGVIVVIEAEHMCMTMRGVKKPGSMTITSSYKGIFKDNNTLRSETLNLIEG

SEQ ID NO: 5100 - protein, 189 aa, Bacillus pseudomycoides; identical to SEQ ID NO: 5076
  misc_feature (1)..(189): tr|A0A1S9X563|A0A1S9X563_9BACI GTP cyclohydrolase 1 OS= Bacillus pseudomycoides OX=64104 GN=folE PE=3 SV=1

SEQ ID NO: 5101 - protein, 189 aa, Bacillus pumilus; identical to SEQ ID NO: 4951
  misc_feature (1)..(189): sp|A8FEL2|GCH1_BACP2 GTP cyclohydrolase 1 OS=Bacillus p umilus (strain SAFR-032) OX=315750 GN=folE PE=3 SV=1

SEQ ID NO: 5102 - protein, 298 aa, Bacillus pumilus
  misc_feature (1)..(298): tr|A0A5D4RPR5|A0A5D4RPR5_BACPU GTP cyclohydrolase FolE2 OS=Bacillus pumilus OX=1408 GN=folE2 PE=3 SV=1
MFSFPSKKERHKQFGSVQPSLGTKPCQKENMTDIQKTEQDFYFPLEQVGICRVSYPVRILSKTAPQEQTTSADFALSTSLSAHEKGIHMSRLTEQLHSFYESGKPLDVNSLKELTAALARQMSQPSASVQVSFPWYKEKQSPVSGKAGLMHATITYDIHFHEKDGWTCHVGCDAQVMTLCPCSKEISEYGAHNQRGSVSIQVELFEQVLLSGDMKEALLHIIESNASAQLYPVLKRPDEKKVTEEAYENPRFVEDLARLMAMELYEQPWIKGFQVECRNEESIHQHDAYAKCSYQKKL

SEQ ID NO: 5103 - protein, 298 aa, Bacillus safensis
  misc_feature (1)..(298): tr|A0A5C0WE13|A0A5C0WE13_9BACI GTP cyclohydrolase FolE2 OS=Bacillus safensis OX=561879 GN=folE2 PE=3 SV=1
MRSFPSKEERHQLFGSVPPSLGTKPLQKEDMTDIQKTERDFYFHLEQVGICRMSYPVHIVSKMAPQSQTTTAEFTLSTSLPAHQKGIHMSRLTEQLHSFYESSKPLDVNSLKELTAALARRMNQPSASVQVAFPWYMEKQSPVTGQSGLMHATIKYDVHFHEKDGWTCHVGCDTQVTTLCPCSKEISEYGAHNQRGSVSILVGLFEQASHPDDIKAVLLHIIESNASAPLYPVLKRPDEKKVTEEAYENPRFVEDITRLIAIELYEQPWIKGIQVECRNEESIHQHDAYAKCSYEKNL

SEQ ID NO: 5104 - protein, 189 aa, Bacillus safensis; identical to SEQ ID NO: 4951
  misc_feature (1)..(189): tr|A0A0M2ED15|A0A0M2ED15_9BACI GTP cyclohydrolase 1 OS= Bacillus safensis OX=561879 GN=folE PE=3 SV=1

SEQ ID NO: 5105 - protein, 212 aa, Bacillus salacetis
  misc_feature (1)..(212): tr|A0A3A1QRD8|A0A3A1QRD8_9BACI GTP cyclohydrolase 1 OS= Bacillus salacetis OX=2315464 GN=folE PE=3 SV=1
MLMTEDQFMIKKLQDLFKGTSGDIDKDIIKAQQYMDGIKTLIELCGDDPERDGLQDTPFRVLKAFREYTEGYREDPKLHLEKTFDVEHKELVMVKDIEFYSMCEHHFAPFFGVAHVGYVPDKKITGLSKIGRMVEGYAKRFQVQERLTNEIAQAVEDILEPQGTMVVVEAKHMCMCGRGIKKSNASTTTTAVRGLYADKADARMEFISLLNR

SEQ ID NO: 5106 - protein, 189 aa, Bacillus salarius
  misc_feature (1)..(189): tr|A0A3R9RER1|A0A3R9RER1_9BACI GTP cyclohydrolase 1 OS= Bacillus salarius OX=284579 GN=folE PE=3 SV=1
MSTVNHDKIQEAVKLILEAVGEDPDRNGLIDTPKRVAKMYEEVFQGLHEDESDHLKTVFGENHEELVLVRDIPFYSMCEHHLVPFYGKAHVGYIPKGGQVTGLSKLARTIETVAKRPQLQERITSTVADTIIDTLDPHGVIVVVEAEHMCMTMRGIQKPGTETVTSAVRGSFEKDEASRAEVLSLINRK

SEQ ID NO: 5107 - protein, 189 aa, Bacillus salarius
  misc_feature (1)..(189): tr|A0A3R9P5W7|A0A3R9P5W7_9BACI GTP cyclohydrolase 1 OS= Bacillus salarius OX=284579 GN=folE PE=3 SV=1
MSTVNHDKIQEAVKLILEAVGEDPDRNGLIDTPKRVAKMYEEVFQGLHEDEAEHLKTVFGENHEELVLVRDIPFYSMCEHHLVPFYGKAHVGYIPKGGQVTGLSKLARTVETVAKRPQLQERITSTVADTIIDTLDPHGVIVVVEAEHMCMTMRGIQKPGTETVTSAVRGSFEKDEASRAEVLSLINRS

SEQ ID NO: 5108 - protein, 187 aa, Bacillus salsus
  misc_feature (1)..(187): tr|A0A1H0Q4K9|A0A1H0Q4K9_9BACI GTP cyclohydrolase 1 OS= Bacillus salsus OX=930152 GN=folE PE=3 SV=1
MTTINHAQIEEAVRLILEAVGEDPNREGLLDTPKRVAKMYEEAFSGLKIDPREYFETIFSEDHEELVLVKDIPFHSMCEHHLVPFYGIAHVAYIPQNGRVAGLSKLARAVEAVSRRPQLQERITSTIADTMMQTLEPHGVMVVVEAEHMCMTMRGVKKPGAKTVTSAVRGVFKTDSDARKEVLSYIR

SEQ ID NO: 5109 - protein, 188 aa, Bacillus selenatarsenatis
  misc_feature (1)..(188): tr|A0A0A8X6V3|A0A0A8X6V3_9BACI GTP cyclohydrolase 1 OS= Bacillus selenatarsenatis SF-1 OX=1321606 GN=folE PE=3 SV=1
MSNVNRAQIEEAVRLILEAVGEDPNREGLLDTPKRVAKMYEEVFSGLNQDPKEYFETIFGEDHEELVLVKDIPFYSMCEHHLVPFFGKAHVAYIPRGGKVTGLSKLARAVEAVAKRPQLQERITSTIANSIMEKLDPHGVMVVVEAEHMCMTMRGVKKPGSKTVTSAVRGTLAEDVNARAEILSLIKG

SEQ ID NO: 5110 - protein, 191 aa, Bacillus selenitireducens
  misc_feature (1)..(191): tr|D6XVA4|D6XVA4_BACIE GTP cyclohydrolase 1 OS=Bacillus selenitireducens (strain ATCC 700615 / DSM 15326 / MLS 10) OX=439292 GN=folE PE=3 SV=1
MSEHVDHEKIQQAVTMILEAVGEDPNREGLLDTPKRVARMYAEIFEGLHQDPKEHFKTVFGEDHEELVLVKDITFHSVCEHHLVPFFGKVHIGYIPKGGQVTGLSKMARAVEAVTKRPQLQERITSTLADSIVETLTPLGVIVIVEAEHMCMTMRGVRKPGAKTVTSAVRGAFQKSEAARAEVMALIRDHG

SEQ ID NO: 5111 - protein, 174 aa, Bacillus shackletonii
  misc_feature (1)..(174): tr|A0A0Q3WZQ6|A0A0Q3WZQ6_9BACI GTP cyclohydrolase 1 OS= Bacillus shackletonii OX=157838 GN=folE PE=3 SV=1
MILEAIGENPEREGLVDTPERVAKMYEEIFAGLKQDPSEFFDVIYSENHEELVLVKDIAFFSMCEHHLIPFYGKAHIAYIPQDGKVAGLSKLARAVESIAGRPQLQERITTNLADVLMEKLNPMGVLIMLEAEHMCMTMRGIKKPGTKAITTAARGIFKTNNSVRSEVLSIMRD

SEQ ID NO: 5112 - protein, 200 aa, Bacillus shackletonii
  misc_feature (1)..(200): tr|A0A0Q3WX84|A0A0Q3WX84_9BACI GTP cyclohydrolase 1 OS= Bacillus shackletonii OX=157838 GN=folE PE=3 SV=1
MNHVYTVENKEIDVEIKKQKISQHFASIIEELGLDLNDPSIKDTPERVAKMLVNETCNGLFSNPPNITTFPLDKNTSRELVVIENIPFSSLCEHHFQPFVGTATIAYLPNDRVMGLSKGARVLDYFASRPQIQERLTNEVAAYLYEQLNAKGVFVMIKAEHFCMKVRGVKKHQSATITTASLGDIDKKDVLSSIQLAKMK

SEQ ID NO: 5113 - protein, 190 aa, Bacillus siamensis
  misc_feature (1)..(190): tr|A0A2K9KAU0|A0A2K9KAU0_9BACI GTP cyclohydrolase 1 OS= Bacillus siamensis OX=659243 GN=folE PE=3 SV=1
MKEVNKEQIEQAVRQILEAIGEDPDREGLLDTPKRVAKMYAEVFSGLNEDPKEHFKTVFGEDHEELVLVKDIAFHSMCEHHLVPFYGKAHIAYIPRGGKVTGLSKLARAVEAVSKRPQLQERITSTIAESIVDTLDPHGVMVVVEAEHMCMTMRGVRKPGAKTVTSAVRGIFKDDAAARSEVLEHIKRAD

SEQ ID NO: 5114 - protein, 190 aa, Bacillus siamensis
  misc_feature (1)..(190): tr|A0A268DQV7|A0A268DQV7_9BACI GTP cyclohydrolase 1 OS= Bacillus siamensis OX=659243 GN=folE PE=3 SV=1
MKEVNKEQIEQAVRQILEAIGEDPDREGLLDTPKRVAKMYAEVFSGLNEDPKEHFKTVFGEDHEELVLVKDIAFHSMCEHHLVPFYGKAHIAYIPRGGKVTGLSKLARAVEAVSKRPQLQERITSTIAESIVDTLDPHGVMVVVEAEHMCMTMRGVRKPGAKTVTSAVRGIFKEDAAARSEVLEHIKRAD

SEQ ID NO: 5115 - protein, 303 aa, Bacillus simplex
  misc_feature (1)..(303): tr|A0A3R8MER7|A0A3R8MER7_9BACI GTP cyclohydrolase FolE2 OS=Bacillus simplex OX=1478 GN=folE2 PE=3 SV=1
MPILELPNKLDRLQYFGSTYPINGVKPTDKQYMPDLQNIEKNYFFKIDNVGIKKIKYPVIVKAESEPVIQQTIGEFTLTTELCSNKKGINMSRLPEILQEAYSKGIEMNPQSLRHLAKRMAERMEQKSSAVQVSFPWFFERTSPVLSMSGLMSADVNIEVGYQEPAIWKEKIGMIATVTTLCPCSKEISEYSAHNQRGIVSIEIETYSDRGFPRNFKEIMLEVIESNASAKLYSILKRPDEKKVTEQAFENPRFVEDLIRLVAADLYELRWVQSFHIECRNEESIHLHDAYASLSYDKEKVIP

SEQ ID NO: 5116 - protein, 188 aa, Bacillus simplex
  misc_feature (1)..(188): tr|A0A127D9D6|A0A127D9D6_9BACI GTP cyclohydrolase 1 OS= Bacillus simplex OX=1478 GN=folE PE=3 SV=1
MANVNHAKIEEAVKMLLEAVGEDPTREGLLDTPGRVARMYEEIFSGLNQDPKEYFETVFGEDHEELVLVKDIPFYSVCEHHLVPFYGKAHVAYIPKNGRVTGLSKLARAVEAVSKRPQLQERITSTVADSIMEKLEPHGVMVVVEAEHMCMTMRGVKKPGSKTVTSAVRGTFAKDHRTRAEVLAFIKD

SEQ ID NO: 5117 - protein, 189 aa, Bacillus smithii
  misc_feature (1)..(189): tr|G9QP68|G9QP68_9BACI GTP cyclohydrolase 1 OS=Bacillus smithii 7_3_47FAA OX=665952 GN=folE PE=3 SV=1
MQKTEVNLTQIEQAVRLILEAIGEDPEREGLIDTPKRVARMYQEVFSGLRQDPGEYFETIFSEDHEELVLVKDIPFYSMCEHHLVPFFGKAHVAYIPKNGKVTGLSKLARAVEAVAKRPQLQERITDEVIEAIMKKLDPHGAMVVVEAEHMCMTMRGVKKPGSKTVTTAVRGIFEQDAQARAEVLALIK

SEQ ID NO: 5118 - protein, 260 aa, Bacillus smithii
  misc_feature (1)..(260): tr|A0A0H4P0F5|A0A0H4P0F5_9BACI GTP cyclohydrolase 1 OS= Bacillus smithii OX=1479 GN=folE PE=3 SV=1
METDFLKDKTFIERKKLIQIHKSLFGCLSFSIGKKNPSRSQIASLPPSYSCAIMKISICLRMKIPLGVVLYMQKTEVNLTQIEQAVRLILEAIGEDPEREGLIDTPKRVARMYQEVFSGLRQDPGEYFETIFSEDHEELVLVKDIPFYSMCEHHLVPFFGKAHVAYIPKNGKVTGLSKLARAVEAVAKRPQLQERITDEVIEAIMKKLDPHGAMVVVEAEHMCMTMRGVKKPGSKTVTTAVRGIFEQDAQARAEVLALIK

SEQ ID NO: 5119 - protein, 188 aa, Bacillus solani
  misc_feature (1)..(188): tr|A0A0Q3TAD1|A0A0Q3TAD1_9BACI GTP cyclohydrolase 1 OS= Bacillus solani OX=1637975 GN=folE PE=3 SV=1
MAEVNRAQIEDAVRLILEAIGEDPNREGLLDTPKRVAKMYEEVFQGLNQDPKEYFETVFGEDHEEVVLVKDIPFYSMCEHHLVPFYGKAHVAYIPRNGKVTGLSKLARAVDAVAKRPQLQERITSTIAESILEKLDPHGVMVVVEAEHMCMTMRGVKKPGSQTVTTAARGVFADDERARAEVLSLIKF

SEQ ID NO: 5120 - protein, 188 aa, Bacillus solimangrovi
  misc_feature (1)..(188): tr|A0A1E5LHA2|A0A1E5LHA2_9BACI GTP cyclohydrolase 1 OS= Bacillus solimangrovi OX=1305675 GN=folE PE=3 SV=1
MSKVNHEQIEQAVRLILEAIGEDPNREGLLDTPKRVAKMYAEVFRGLNQDPKEYFATIFSEDHEELVLVKDIPFYSMCEHHLVPFFGTAHVAYIPKNGKVTGLSKLARAVESVAARPQLQERITSTVVDSIMETLEPHGAMVIVEAEHMCMTMRGVKKPGSKTVTSAVRGIFQNDDVARSEVLSLIRA

SEQ ID NO: 5121 - protein, 190 aa, Bacillus sonorensis
  misc_feature (1)..(190): tr|M5PI99|M5PI99_9BACI GTP cyclohydrolase 1 OS=Bacillus sonorensis L12 OX=1274524 GN=folE PE=3 SV=1
MSEINKEQIEQAVRLILEAIGEDPNREGLLDTPKRVAKMYAEVFAGLNEDPKEHFKTIFGEDHEELVLVKDIPFYSMCEHHLVPFYGKAHVAYIPKGGKVTGLSKLARAVEAVAKRPQLQERITATIADSIVESLTPHGVMVVVEAEHMCMTMRGVKKPGAKTVTSAVRGTFRESVAARSEVLELIKHHD

SEQ ID NO: 5122 - protein, 300 aa, Bacillus sonorensis
  misc_feature (1)..(300): tr|M5PEE9|M5PEE9_9BACI GTP cyclohydrolase FolE2 OS=Baci llus sonorensis L12 OX=1274524 GN=folE2 PE=3 SV=1
MKYDLQLPAKPERHRLFGSVEAVKGTKPTDKEQMKDIQNTPNDYLFDIDQVGITNVSHPIRITSAVKPFSQTTIGSFSLMTHLARGRKGINMSRLTEQLQRYHTENWIVGLDSLKDFTKELAVNMEQQGAAVSLAFPWYFERLSPELEFPGLMHADIHMNVSYHQKEGWTGTVGITAKVATLCPCSKEISEYSAHNQRGVIKITAHINDRAAMPEDFKTELLAAAETNASAKLHPVLKRPDEKKVTEQAYENPRFVEDLIRLIAADLYEMDWIAAFEIECRNEESIHLHDAAARLAYSKI

SEQ ID NO: 5123 - protein, 189 aa, [Bacillus] sp.
  misc_feature (1)..(189): tr|A0A150YDA8|A0A150YDA8_9BACI GTP cyclohydrolase 1 OS= [Bacillus] sp. KCTC 13219 OX=1811976 GN=folE PE=3 SV=1
MSNVDLAKIEEAVKMILEAVGEDAQREGLLDTPKRVAKMYAEMFSGLAQDPREYFSTVFHEEHEELVLVKDIPFYSMCEHHLVPFYGKAHIAYIPKDGKVAGLSKLGRCVEAVARRPQLQERITSTVADTMMEMLQPKGVYVVIEAEHMCMTMRGLKKPGSKTVTSVARGIYEEDEVKRREVISFIQMS

SEQ ID NO: 5124 - protein, 188 aa, Bacillus sp.; identical to SEQ ID NO: 4964
  misc_feature (1)..(188): tr|A0A0Q9HQY5|A0A0Q9HQY5_9BACI GTP cyclohydrolase 1 OS= Bacillus sp. Root239 OX=1736499 GN=folE PE=3 SV=1

SEQ ID NO: 5125 - protein, 189 aa, Bacillus sp.; identical to SEQ ID NO: 4953
  misc_feature (1)..(189): tr|A0A2B4NVT5|A0A2B4NVT5_9BACI GTP cyclohydrolase 1 OS= Bacillus sp. AFS075960 OX=2034282 GN=folE PE=3 SV=1

SEQ ID NO: 5126 - protein, 188 aa, Bacillus sporothermodurans
  misc_feature (1)..(188): tr|A0A2T6ES15|A0A2T6ES15_9BACI GTP cyclohydrolase 1 OS= Bacillus sporothermodurans OX=46224 GN=folE PE=3 SV=1
MEEINREQIEEAIRLIIEAVGEDPNREGLLDTPKRVANMYEEIFSGINQDPKELFELVFSENYEELVLVKDIPFYSICEHHLIPFFGKAHIAYLPRNGKVTGLSRLARAIETVAKRPQLQERITSTVADAINEKLDPHGVMVVIEAEHMCMTMRGVKKPGSKTITTAVRGSFETDQCARSEILTLIKS

SEQ ID NO: 5127 - protein, 151 aa, Bacillus sporothermodurans
  misc_feature (1)..(151): tr|A0A150KKT4|A0A150KKT4_9BACI GTP cyclohydrolase 1 OS= Bacillus sporothermodurans OX=46224 GN=B4102_3932 PE=3 SV=1
MLVHETCSGLFTKPPVITTFPLDKTTSSDLVVIENIPFSSLCEHHFQPFVGTATIAYLPNDRVMGLSKGARVLDYFAARPQIQERLTNEVAAYLYEQLNAKGVFVIIKAEHYCMKVRGVKKHNSATITTASLGEIDKQDVLSSNQLATNLK

SEQ ID NO: 5128 - protein, 298 aa, Bacillus stratosphericus
  misc_feature (1)..(298): tr|A0A4Y9JRU7|A0A4Y9JRU7_9BACI GTP cyclohydrolase FolE2 OS=Bacillus stratosphericus OX=293386 GN=folE2 PE=3 SV =1
MRSFPSKEERHQLFGSVPPSLGTKPWQKEDMTDIQKTEQDFYFHLEQVGICRMSYPVHIVSKTAPQRQTTTAEFSLSTSLPAHQKGIHMSRLTEQLHSFYESSKPLDVNALKELTAALARRMNQPSASVQVAFPWYMEKQSPVTGQSGLMHATIKYDVHFHEKDGWTCHVGCDAQVTTLCPCSKEISEYGAHNQRGSVSILVGLFEQASHPDDIKAALLHIIESNASAPLYPVLKRPDEKKVTEETYENPRFVEDNTRLIAIELYEQPWIKSFQVECRNEESIHQHDAYAKCSYEKNL

SEQ ID NO: 5129 - protein, 189 aa, Bacillus stratosphericus; identical to SEQ ID NO: 4951
  misc_feature (1)..(189): tr|A0A1V9CGI6|A0A1V9CGI6_9BACI GTP cyclohydrolase 1 OS= Bacillus stratosphericus OX=293386 GN=folE PE=3 SV=1

SEQ ID NO: 5130 - protein, 188 aa, Bacillus subterraneus
  misc_feature (1)..(188): tr|A0A3R9FW27|A0A3R9FW27_9BACI GTP cyclohydrolase 1 OS= Bacillus subterraneus OX=285983 GN=folE PE=3 SV=1
MSNVNRAQIEEAVRLILEAVGEDPNREGLLDTPKRVAKMYEEVFSGLNQDPKEYFETIFGEDHEELVLVKDIPFYSMCEHHLVPFFGKAHVAYIPRGGKVTGLSKLARAVEAVAKRPQLQERITSTIANAIMEKLDPHGVMVVVEAEHMCMTMRGVKKPGSKTVTSAVRGTLAEDVNARAEILSLIKS

SEQ ID NO: 5131 - protein, 188 aa, Bacillus subterraneus
  misc_feature (1)..(188): tr|A0A0D6ZBY2|A0A0D6ZBY2_9BACI GTP cyclohydrolase 1 OS= Bacillus subterraneus OX=285983 GN=folE PE=3 SV=1
MSNVNRAQIEEAVRLILEAIGEDPDREGLLDTPKRVARMYEEVFSGMNQDPKEYFETIFGEDHEELVLVKDIPFYSMCEHHLVPFFGKAHVAYIPKGGKVTGLSKLARAVEAVARRPQLQERITSTIANAIMEKLDPHGVMVVVEAEHMCMTMRGVKKPGSKTVTSAVRGNLAEDVNARAEILSLIKD

SEQ ID NO: 5132 - protein, 190 aa, Bacillus subtilis; identical to SEQ ID NO: 5047
  misc_feature (1)..(190): sp|P19465|GCH1_BACSU GTP cyclohydrolase 1 OS=Bacillus s ubtilis (strain 168) OX=224308 GN=folE PE=1 SV=1

SEQ ID NO: 5133 - protein, 304 aa, Bacillus subtilis
  misc_feature (1)..(304): tr|A0A162RBE9|A0A162RBE9_BACIU GTP cyclohydrolase FolE2 OS=Bacillus subtilis OX=1423 GN=folE2 PE=3 SV=1
MNQHTLLPKKTERLQYFGSVSPIKGEKPVEKEKMKDLQNIRKDYFFDIQHVGVANVSHPVTITSAMMPAEQTTAANFTMTCNLPRNQKGINMSRLTELLQVYHQNGWILSFSSLQQFTKELAENMDTSSATVEVRFPWFFERKSPKLEKAGLMHADIFMSVTYRKDQPFKQRAGISAKVTTLCPCSKEISEYSAHNQRGTVSIWADIHPAASLPSDVKADLLHAAESNASARLHPVLKRPDEKAVTETAYENPRFVEDLARLIAADLFELEWVSAFEIECRNEESIHLHDAYAKLCFSKEVDKI

SEQ ID NO: 5134 - protein, 300 aa, Bacillus swezeyi
  misc_feature (1)..(300): tr|A0A5D4QB11|A0A5D4QB11_9BACI GTP cyclohydrolase FolE2 OS=Bacillus swezeyi OX=1925020 GN=folE2 PE=3 SV=1
MKHELHLPAKPERHRRFGSVEAIKGTKPTDKENMSDLQNMPNDYFFDIDHVGVSNVSHPIQIESSAIPHTQTTIGSFSFTTNLGKSRKGINMSRLTEQLQRYYEKNWTVDLNTLKDFTKELADNMEQQNAAVSVSFPWYFQRRSPETELPGLMHADIHMKVSYKENTGWAQTVGMTSRVTTLCPCSKEISEYSAHNQRGIISITAHIHDKAEMPDDFKTELLAAAETNASAKLHPVLKRPDEKRVTEQAYENPRFVEDIIRLTAADLYEMDWISAFDIECRNEESIHMHDAVARLSFSKN

SEQ ID NO: 5135 - protein, 190 aa, Bacillus swezeyi
  misc_feature (1)..(190): tr|A0A1R1S2T6|A0A1R1S2T6_9BACI GTP cyclohydrolase 1 OS= Bacillus swezeyi OX=1925020 GN=folE PE=3 SV=1
MREINKEQIEQAVRQILEAIGEDPNREGLLDTPKRVAKMYAEVFAGLNEDPKEHFKTIFGEDHEELVLVKDIPFYSMCEHHLVPFYGKAHVAYIPKGGKVTGLSKLARAVEAVAKRPQLQERITSTIADSIVETLTPHGVMVVVEAEHMCMTMRGVKKPGAKTVTSAVRGTFRQDVAARSEVLELIKYHD

SEQ ID NO: 5136 - protein, 188 aa, Bacillus taeanensis
  misc_feature (1)..(188): tr|A0A366XWK7|A0A366XWK7_9BACI GTP cyclohydrolase 1 OS= Bacillus taeanensis OX=273032 GN=folE PE=3 SV=1
MSNINHEKIQEAVKMIIEAIGDDPNREGLLDTPKRVARMYEEVFRGLNEDPKEHFQTIFGEDHEELVLVKDIPFYSMCEHHLVPFFGKAHVAYIPKGGKVTGLSKLARAVEAVSRRPQLQERITSTIADSLVETLKPHGVMVVVEAEHMCMTMRGVKKPGSKTITSAVRGVLEKDASARAEVLSLIKH

SEQ ID NO: 5137 - protein, 190 aa, Bacillus tequilensis
  misc_feature (1)..(190): tr|A0A2X0ZIY3|A0A2X0ZIY3_9BACI GTP cyclohydrolase 1 OS= Bacillus tequilensis OX=227866 GN=folEA PE=3 SV=1
MKEVNKEQIEQAVRQILEAIGEDPNREGLLDTPKRVAKMYAEVFSGLNEDPKEHFQTVFGENHEELVLVKDIAFHSMCEHHLVPFYGKAHVAYIPRGGKVTGLSKLARAVEAVAKRPQLQERITSTIAESIVETLDPHGVMVVVEAEHMCMTMRGVRKPGAKTVTSAVRGVFKDDAAARAEVLEHIKRQD

SEQ ID NO: 5138 - protein, 188 aa, Bacillus terrae
  misc_feature (1)..(188): tr|A0A429X4D7|A0A429X4D7_9BACI GTP cyclohydrolase 1 OS= Bacillus terrae OX=1914933 GN=folE PE=3 SV=1
MGNFDRKQIEEAVRMILDAIGENPNREGLLDTPKRVAKMYEEIFSGINTDPEQYFETIFGEDHEELVLVKDIPFYSLCEHHLVPFFGKAHVAYIPRNGRVTGLSKLARAVEAVARRPQLQERITSTVADAIMKKLEPHGVMVIIEAEHMCMTMRGVKKPGSKTVTSAVRGIFLKDSQSRNEVLTLIKQ

SEQ ID NO: 5139 - protein, 211 aa, Bacillus terrae
  misc_feature (1)..(211): tr|A0A429X3U4|A0A429X3U4_9BACI GTP cyclohydrolase 1 OS= Bacillus terrae OX=1914933 GN=folE PE=3 SV=1
MPADIKLISEKLPDLFSGDTDDIARKIDKSQDYMEGVRNLIELCGDDPNREGLEETPFRVLKAFLEYTEGYKENPAVHLKKTFDVQHKELVLVKNIEFYSMCEHHFAPFFGVAHVGYMPDTKITGLSKIGRMVEGYAKRFQVQERLTNEIADAITDILEPQGTMVVVEAKHMCMCGRGIKKSNSSTTTTAVRGLFEERSDARMEFLSLINR

SEQ ID NO: 5140 - protein, 187 aa, Bacillus thermoamylovorans
  misc_feature (1)..(187): tr|A0A0D0F0N3|A0A0D0F0N3_9BACI GTP cyclohydrolase 1 OS= Bacillus thermoamylovorans OX=35841 GN=folE PE=3 SV=1
MKEMNLEQIEKGVRLILEGIGEDPNREGLLDTPKRVAKMYAEMFHGLNIDPREYFNTVFHEETEELVLVKDIPFYSMCEHHLVPFFGHVHVAYIPRNGKITGLSKLARAVEAVAKRPQLQERITRLVADSIMEKLDPLGVMVIVEAEHMCMTMRGVKKPGSKTVTTVARGCFDTDAEKRKEVLSLIK

SEQ ID NO: 5141 - protein, 187 aa, Bacillus thermoamylovorans; identical to SEQ ID NO: 5037
  misc_feature (1)..(187): tr|A0A090IW37|A0A090IW37_9BACI GTP cyclohydrolase 1 OS= Bacillus thermoamylovorans OX=35841 GN=folE PE=3 SV=1

SEQ ID NO: 5142 - protein, 187 aa, Bacillus thermocopriae
  misc_feature (1)..(187): tr|A0A410XK18|A0A410XK18_9BACI GTP cyclohydrolase 1 OS= Bacillus thermocopriae OX=1215031 GN=folE PE=3 SV=1
MQQMNVQQIEQAVRLILEAIGEDPNREGLLDTPKRVAKMYAEVFSGLTEDPKVHLQTVFSEDHEELVLVKDIPFYSMCEHHLVPFFGVAHVAYIPRGGKVTGLSKLARTVETVARRPQLQERITATVADAIMETLEPHGVMVVVEAEHMCMTMRGVKKPGAKTVTTAVRGTFATDDKARSEILALIK

SEQ ID NO: 5143 - protein, 187 aa, Bacillus thermozeamaize
  misc_feature (1)..(187): tr|A0A1Y3PQU6|A0A1Y3PQU6_9BACI GTP cyclohydrolase 1 OS= Bacillus thermozeamaize OX=230954 GN=folE PE=3 SV=1
MPIDQQKIRQAVRMILEAIGEDPEREGLVETPDRVARMYAEVFSGMQEDPEEYFKVIFSEDHEELVLVKDIPFYSICEHHLVPFYGVAHVGYIPKGGRVVGLSKLARAVEAVAKRPQLQERITSTVADAIVNALQPHGVVVVIEAEHMCMTMRGVKKPGAKTVTSAVRGIFATDPMARAEAFQLIRS

SEQ ID NO: 5144 - protein, 189 aa, Bacillus thuringiensis; identical to SEQ ID NO: 4953
  misc_feature (1)..(189): sp|Q6HL44|GCH1_BACHK GTP cyclohydrolase 1 OS=Bacillus t huringiensis subsp. konkukian (strain 97-27) OX=281309 GN=folE PE=3 SV=1

SEQ ID NO: 5145 - protein, 189 aa, Bacillus thuringiensis; identical to SEQ ID NO: 4953
  misc_feature (1)..(189): tr|A0A0K0S5A9|A0A0K0S5A9_BACT3 GTP cyclohydrolase 1 OS= Bacillus thuringiensis subsp. indiana OX=180850 GN=folE PE=3 SV=1

SEQ ID NO: 5146 - protein, 188 aa, Bacillus timonensis
  misc_feature (1)..(188): tr|A0A4V3V717|A0A4V3V717_9BACI GTP cyclohydrolase 1 OS= Bacillus timonensis OX=1033734 GN=folE PE=3 SV=1
MANINCNKIEEAVRLILQAVGEDPNREGLLETPKRVAKMYEEVFSGLTIDPKEYFETIFSEDHEELVLVKDIPFYSMCEHHLVPFYGTAHVAYIPRNGRVAGLSKLARAVESVSRRPQLQERITSTVADTIMDTLEPHGVMVVVEAEHMCMTMRGVKKPGTKTITSAVRGVFVKDGNARSEILSYINN

SEQ ID NO: 5147 - protein, 189 aa, Bacillus timonensis
  misc_feature (1)..(189): tr|A0A4S3PNA7|A0A4S3PNA7_9BACI GTP cyclohydrolase 1 OS= Bacillus timonensis OX=1033734 GN=folE PE=3 SV=1
MTVELKNSLIEDHIRSILAIIGEDPTREGLLDTPKRVAKMFGEVFEGVGIDPETALTTTFEENYDGIVIVKDITYYTFCEHHLIPFFGKAHIGYIPNGRVVGLSKFARLVELVAKRPQVQERMTQQIASAVMNVLQPEGVIVSVEGQHLCMCARGIKKPGSSTVTTVKKGAFKENEALVEEFERALLRD

SEQ ID NO: 5148 - protein, 195 aa, Bacillus toyonensis
  misc_feature (1)..(195): tr|A0A4Q9YB20|A0A4Q9YB20_9BACI GTP cyclohydrolase 1 OS= Bacillus toyonensis OX=155322 GN=folE PE=3 SV=1
MSLKTIQSVEIDTDKIEVAVKMILEAIGEDINREGILETPKRVAKMYKEVFQGLGQNPSEHLLKIFNENHEELVLVKEIPFYSMCEHHLVPFFGIANIGYIPNNGKVTGLSKLARALETICKRPQLQERITNELANVIFETLEPKGVIVVIEAEHMCMTMRGVKKPGSMTITSSYKGIFKDNSTLRSETLNLIER

SEQ ID NO: 5149 - protein, 189 aa, Bacillus toyonensis; identical to SEQ ID NO: 5063
  misc_feature (1)..(189): tr|A0A420GIT8|A0A420GIT8_9BACI GTP cyclohydrolase 1 OS= Bacillus toyonensis OX=155322 GN=folE PE=3 SV=1

SEQ ID NO: 5150 - protein, 189 aa, Bacillus tropicus; identical to SEQ ID NO: 4953
  misc_feature (1)..(189): tr|A0A4Y6ER83|A0A4Y6ER83_9BACI GTP cyclohydrolase 1 OS= Bacillus tropicus OX=2026188 GN=folE PE=3 SV=1

SEQ ID NO: 5151 - protein, 301 aa, Bacillus trypoxylicola
  misc_feature (1)..(301): tr|A0A162ENW7|A0A162ENW7_9BACI GTP cyclohydrolase FolE2 OS=Bacillus trypoxylicola OX=519424 GN=folE2 PE=3 SV=1
MRAIHLPSQSKRHEHFGSTGPIKGEKPLKKSEMTDLQSMEKDYFFHINQVGVEKLHYPMLIHSSIEPKVQQTFGNFKISTSLPSHQKGINMSRIPETLHQYYSEGAILNQKLLRRFSKQLAQKMEQSEVYMKVSYPWFFTRSSPVSNFEGLVEAKIWLETKFAQDTWHEKVGLQAMITTLCPCSKEISEYSAHNQRGIVNVEVESAEGELCSEHFKEELLEVIESNASARIHSILKRPDEKKVTETAFENPRFVEDLIRLIAASLVELEWVSKFTITCNNEESIHQHDAYASLTYKKDHFN

SEQ ID NO: 5152 - protein, 188 aa, Bacillus trypoxylicola
  misc_feature (1)..(188): tr|A0A162EGU3|A0A162EGU3_9BACI GTP cyclohydrolase 1 OS= Bacillus trypoxylicola OX=519424 GN=folE PE=3 SV=1
MQSVDYKKIQEAVTMILEAIGEDPTREGLEDTPKRVAKMYAEVFQGLNEDPKEHFKTIFGEDHEELVLVKDIPFFSMCEHHLVPFFGHAHIGYIPRGGKVTGLSKLARAVEAVARRPQLQERITATIADSMIESLDPHGVIVVIEAEHMCMTMRGVKKPGAKTVTSAVRGVYAEDAQLRAEVISHIKG

SEQ ID NO: 5153 - protein, 192 aa, Bacillus urumqiensis
  misc_feature (1)..(192): tr|A0A2P6MKJ6|A0A2P6MKJ6_9BACI GTP cyclohydrolase 1 OS= Bacillus urumqiensis OX=1548213 GN=folE PE=3 SV=1
MSQVNHDKIQQAVTMILEAIGEDPSREGLQDTPQRVARMYEEVFQGLHQDPKEHFKTVFGEDHEELVLVKDIPFYSMCEHHLVPFFGKAHIGYLPQGGKVTGLSKLARAVEAVTKRPQLQERITSTIADSMVETLDPRGVMVIVEAEHMCMTMRGVKKPGSSTVTSAVRGAFRTDEAARAEVLSLIRSQGAS

SEQ ID NO: 5154 - protein, 190 aa, Bacillus vallismortis; identical to SEQ ID NO: 4957
  misc_feature (1)..(190): tr|A0A1W6HJ90|A0A1W6HJ90_BACVA GTP cyclohydrolase 1 OS= Bacillus vallismortis OX=72361 GN=folE PE=3 SV=1

SEQ ID NO: 5155 - protein, 304 aa, Bacillus vallismortis
  misc_feature (1)..(304): tr|A0A410WLA9|A0A410WLA9_BACVA GTP cyclohydrolase FolE2 OS=Bacillus vallismortis OX=72361 GN=folE2 PE=3 SV=1
MNQHTLLPEKPERLQYFGSVSPLKGDKPVEKEKMTDLQNIRKDYFFDIQHVGVANVSHPVTITSAMAPAKQTTAANFTMTCDLRRNQKGINMSRLTDLLQAYHQNGWILSFSTLQQFTKDLAENMGQSSASVEVRFPWFFERKSPKLEKAGLMHADIWMSVTYREDQPFEQRAGISAKVTTLCPCSKEISEYSAHNQRGTVSIWADIHPAASLPSDVKADLLHAAESNASARLHPVLKRPDEKAVTETAYENPRFVEDLIRLIAADLYELEWVTAFEIECRNEESIHLHDAYAKLRFSKQEDRI

SEQ ID NO: 5156 - protein, 190 aa, Bacillus velezensis; identical to SEQ ID NO: 4957
  misc_feature (1)..(190): sp|A7Z630|GCH1_BACVZ GTP cyclohydrolase 1 OS=Bacillus v elezensis (strain DSM 23117 / BGSC 10A6 / FZB42) OX=326 423 GN=folE PE=3 SV=1

SEQ ID NO: 5157 - protein, 190 aa, Bacillus velezensis; identical to SEQ ID NO: 4957
  misc_feature (1)..(190): tr|S6FHJ7|S6FHJ7_9BACI GTP cyclohydrolase 1 OS=Bacillus velezensis UCMB5033 OX=1338518 GN=folEA PE=3 SV=1

SEQ ID NO: 5158 - protein, 188 aa, Bacillus vietnamensis
  misc_feature (1)..(188): tr|A0A0P6W1S6|A0A0P6W1S6_9BACI GTP cyclohydrolase 1 OS= Bacillus vietnamensis OX=218284 GN=folE PE=3 SV=1
MAQVNHGQIEEAVRLILEAIGENPNREGLLDTPKRVAKMYAEVFSGLDHDPKEYFETIFSEEHEELVLVKDIPFYSMCEHHLVPFFGKAHVAYIPRDGKVAGLSKLARAVESVAKRPQLQERITSTVADTIMETLLPHGAMVVVEAEHMCMTMRGVKKPGSSTVTTAVRGTFKEDAQARSEVLSFIKN

SEQ ID NO: 5159 - protein, 212 aa, Bacillus vietnamensis
  misc_feature (1)..(212): tr|A0A5D4NXD7|A0A5D4NXD7_9BACI GTP cyclohydrolase 1 OS= Bacillus vietnamensis OX=218284 GN=folE PE=3 SV=1
MLMTEDQFMLQKLQDLFKGTSGDIDRDIIKAQQYMDGIKNLIEICGDDPDRDGLQETPFRVLKAFLEYTEGYREDPKTHLEKVFDVDHKELVMVKDIEFHSMCEHHFAPFFGVAHVGYVPDKKITGLSKIGRLVEGYAKRFQVQERLTNEIAQAVEEVLEPQGVMVVVEAKHMCMCGRGIKKSTASTTTTAVRGIYSEKTENRMEFLSLLNR

SEQ ID NO: 5160 - protein, 188 aa, Bacillus vireti
  misc_feature (1)..(188): tr|W1SBA0|W1SBA0_9BACI GTP cyclohydrolase 1 OS=Bacillus vireti LMG 21834 OX=1131730 GN=folE PE=3 SV=1
MSEVNRAQIEEAVRLILEAIGEDPNREGLLDTPKRVAKMYEEVFSGLNEDPKQHFETIFSEDHEELVLVKDIPFYSMCEHHLVPFFGKAHVAYIPQNGRVTGLSKLARAVEAVAKRPQLQERITSTIADSMMDKLDPHGVMVVVEAEHMCMTMRGVKKPGSKTVTTAVRGVLADDAIARSEVLSLIKY

SEQ ID NO: 5161 - protein, 294 aa, Bacillus wakoensis
  misc_feature (1)..(294): tr|W4PYM2|W4PYM2_9BACI GTP cyclohydrolase FolE2 OS=Baci llus wakoensis JCM 9140 OX=1236970 GN=folE2 PE=3 SV=1
MKRSLPPKAERHRHFGTVDPIIGTKPTDKEKMPDLQNKPDDFYFPIQQVGISEVKYPVMIESELAPTTQTTTATFALTTSLDQNFKGINMSRLTEQLHLFFQSHLLTDQTLREFTAILAREMKQRAANVRVTFPWFFTKTSPAMEKEGMAHADVTYDVTFDEDKGYTSIITLTGAVTTLCPCSKEISEYSAHNQRSFVTMTVTVDDAYEADWKTVLLEAAESNASSILFPVLKRPDEKAVTERAYENPRFVEDLVRLVAADLYEHEAIRSFEVQCRNEESIHQHDAIAKLSYTK

SEQ ID NO: 5162 - protein, 189 aa, Bacillus weihaiensis
  misc_feature (1)..(189): tr|A0A1L3MQH0|A0A1L3MQH0_9BACI GTP cyclohydrolase 1 OS= Bacillus weihaiensis OX=1547283 GN=folE PE=3 SV=1
MGQVNHEQIEHAVRLILEAIGEDPTREGLVDTPKRVAKMYAEVFSGLNEEPSEYFQTVFGEDHEELVLVKDIPFYSMCEHHLVPFFGKAHVAYIPKGGKVTGLSKLARAVEAVAKRPQLQERITSTIADSISHSLHPHGVMVVVEAEHMCMTMRGVKKPGARTITSAVRGVFQKDDASRQEVLALIKGF

SEQ ID NO: 5163 - protein, 300 aa, Bacillus weihaiensis
  misc_feature (1)..(300): tr|A0A1L3MNT3|A0A1L3MNT3_9BACI GTP cyclohydrolase FolE2 OS=Bacillus weihaiensis OX=1547283 GN=folE2 PE=3 SV=1
MSKKINLPPKKERHRLFGSVEPGVKLKPTEKDKMPDLQNSKKDFLFTIDAVGISNVKHPVIIESSLNPAQQTTIATFKMTSKISHDAKGTNMSRFTEQLEKYRQDGGFVISTQNLYDFTKELAARLKQKDASIELTFPWFYERKGPSSELVGLNHAEASISVTYDEEAGFRTTASLTCAVTTLCPCSKEISEYSAHNQRGFITMEVELSEDYQEQVDWKAALLEAAETNASAMIHPVLKRPDEKMVTETAYENPRFVEDMVRLVAADLYELDFVQAFTVKCRNEESIHLHDAIASLSYRK

SEQ ID NO: 5164 - protein, 189 aa, Bacillus wiedmannii
  misc_feature (1)..(189): tr|A0A2B5P8A2|A0A2B5P8A2_9BACI GTP cyclohydrolase 1 OS= Bacillus wiedmannii OX=1890302 GN=folE PE=3 SV=1
MAKVNLEQIEYAVRLILEAIGDDPNREGVLDTPKRVAKMYAEVFAGMHEDPKEHLHKVFGEDHEELVLVKDIPFYSMCEHHLVPFYGVAHVAYIPQGGKVTGLSKLARTVDTIARRPQLQERITSTVANSIMEVLEPHGVMVVVEAEHMCMTMRGVKKPGAKTVTTAVRGVLENDAAARSEILSFIKTK

SEQ ID NO: 5165 - protein, 189 aa, Bacillus wiedmannii
  misc_feature (1)..(189): tr|A0A4U2NKD2|A0A4U2NKD2_9BACI GTP cyclohydrolase 1 OS= Bacillus wiedmannii OX=1890302 GN=folE PE=3 SV=1
MAKVNLEQIEHAVRLILEAIGDDPNREGVLDTPKRVAKMYAEVFAGMHEDPKEHLHKVFGEDHEELVLVKDIPFYSMCEHHLVPFYGVAHVAYIPQGGKVTGLSKLARTVDTIARRPQLQERITSTVANAIMEVLEPHGVMVVVEAEHMCMTMRGVKKPGAKTVTTAVRGVLENDAAARSEILSFIKTK

SEQ ID NO: 5166 - protein, 188 aa, Bacillus wudalianchiensis
  misc_feature (1)..(188): tr|A0A1B9B9I4|A0A1B9B9I4_9BACI GTP cyclohydrolase 1 OS= Bacillus wudalianchiensis OX=1743143 GN=folE PE=3 SV=1
MAEVNRAQIEEAVRMILEAVGEDPNREGLLDTPKRVAKMYEEIFSGLNKDPKEYFETIFGEDYEELVLVKDIPFYSLCEHHLVPFFGHAHVAYLPKNGKVTGLSKLARAVETVARRPQLQERITAEVADAIMEKLQPHGVMVVIEAEHMCMAMRGVKKPGAKTVTTAARGKYANDVHLRSELLNLIKG

SEQ ID NO: 5167 - protein, 189 aa, Bacillus xiamenensis
  misc_feature (1)..(189): tr|K2N591|K2N591_9BACI GTP cyclohydrolase 1 OS=Bacillus xiamenensis OX=1178537 GN=folE PE=3 SV=1
MSDDLRMGLLEDQIRNMLELLGEDPTREGLRDTPKRVAKMYKEVFEGIGVDPETALTTTFEEEYEGMVVVKDINYYTFCEHHLIPFFGKAHIGYIPKGRVVGLSKFARLVELISKRPQVQERMTQQMANAIMNVLQPEGVIVSVEGQHLCMCARGVKKPGSSTVTTIKKGLFKEQQSLVHEFEQALIRD

SEQ ID NO: 5168 - protein, 189 aa, Bacillus xiamenensis
  misc_feature (1)..(189): tr|K2MLT9|K2MLT9_9BACI GTP cyclohydrolase 1 OS=Bacillus xiamenensis OX=1178537 GN=folE PE=3 SV=1
MSEINKERIERAVRDILEAIGEDPDREGLLDTPKRVAKMYEEVFSGLNEDPKEHFKTIFGEDHEELVLVKDIAFHSMCEHHLVPFYGKAHVAYIPRGGKVTGLSKLARAVEAVAKRPQLQERITSTIADSMVETLNPHGVMIVVEAEHMCMTMRGVKKPGAKTVTSAVRGTFANDAAARAEVLSFIKND

SEQ ID NO: 5169 - protein, 188 aa, Bacillus zeae
  misc_feature (1)..(188): tr|A0A398BEQ3|A0A398BEQ3_9BACI GTP cyclohydrolase 1 OS= Bacillus zeae OX=1917180 GN=folE PE=3 SV=1
MAEFNRAQIEEAVRLILGAVGEDPNREGLLDTPKRVARMYEEVFAGLNQDPKEYFETIFGEDHEELVLVKDIPFYSMCEHHLVPFFGVAHVAYIPKGGKVTGLSKLARAVEAVAKRPQLQERITSTIADSIMEKLQPYGTMVVIEAEHMCMTMRGVKKPGSKTVTSAVRGTLAEDVNARSEILTLIKG

SEQ ID NO: 5170 - protein, 189 aa, Bacillus zhangzhouensis
  misc_feature (1)..(189): tr|A0A081LDI9|A0A081LDI9_9BACI GTP cyclohydrolase 1 OS= Bacillus zhangzhouensis OX=1178540 GN=folE PE=3 SV=1
MSEINKQLIEHAVRDILKAIGEDPDREGLLDTPKRVAKMYEEVFSGLNEDPKEHFKTIFGEDHEELVLVKDIAFHSMCEHHLVPFYGKAHVAYIPRGGKVTGLSKLARAVEAVAKRPQLQERITSTIADSMVETLNPHGVMIVVEAEHMCMTMRGVKKPGAKTVTSAVRGTFANDAAARAEVLSFIKND

SEQ ID NO: 5171 - protein, 298 aa, Bacillus zhangzhouensis
  misc_feature (1)..(298): tr|A0A081LC87|A0A081LC87_9BACI GTP cyclohydrolase FolE2 OS=Bacillus zhangzhouensis OX=1178540 GN=folE2 PE=3 SV =1
MLSFKPKKERHQLFGSVPPTLGTKPCQKEDMMDIQKTEQDFYFHLEQVGICRVSYPVHIVSKTTPQTQTTSAVFALSTYLPAHQKGIHMSRLTEQLHSFYESGKPLDMNSLRELTAQLAKQMNQPSASVQVSFPWFIEKKSPVSGTSGLMHATVQYDIHFHEKNGWTCHVGCTAQVTTLCPCSKEISEYGAHNQRGSVSIQVELFEQALLPDDMKAVLLHIIESNASASLYPVLKRPDEKKVTEEAYENPRFVEDVARLIAVELYEQQWIRGFQVECRNEESIHQHDAYAKCSYQKKL

SEQ ID NO: 5172 - protein, 221 aa, Unknown
  misc_feature (1)..(221): tr|A0A0J8YU83|A0A0J8YU83_9GAMM GTP cyclohydrolase 1 OS= bacteria symbiont BFo2 of Frankliniella occidentalis OX =1628856 GN=folE PE=3 SV=1
MSELSQEAMLVHDALLARGLETPLNAPVNSQDSQQRKQKIAEHMREVMLLLNLDLTDDSLMETPNRLAKMYVDEIFSGLDYANFPKITVIENKMNVDEMVTVRDITLTSTCEHHFVTIDGKATVAYIPKDKVIGLSKINRIVQFFAERPQVQERLTQQVLVALQTLLGTNNVAVCIDAVHYCVKARGVKDATSATTTTSLGGLFKSSQNTRQEFLRTIRNN

SEQ ID NO: 5173 - protein, 221 aa, Unknown
  misc_feature (1)..(221): tr|A0A0J8YN34|A0A0J8YN34_9GAMM GTP cyclohydrolase 1 OS= bacteria symbiont BFo1 of Frankliniella occidentalis OX =1628855 GN=folE PE=3 SV=1
MATLSQEATLVHEALLARGLETPLRSPVRDMDDDTRKALIAGHMTEIMQLLNLDLEDDSLAETPQRIAKMYVNEVFSGLDYANFPKITLIENKMKVDEMVTVRDITLTSTCEHHFVIIDGQATVAYIPKDKVIGLSKINRIVQFFSSRPQVQERLTQQILLALQTLLGTNNVAVSIDAVHYCVKARGIRDATSATTTTSLGGLFKSSQNTRQEFLRSVRHR

SEQ ID NO: 5174 - protein, 207 aa, Bacteriodetes bacterium
  misc_feature (1)..(207): tr|A0A521WKI8|A0A521WKI8_9BACT GTP cyclohydrolase 1 OS= Bacteriodetes bacterium OX=2507565 GN=folE PE=3 SV=1
MKHQLTTRSTGDRMRKKNLNKKDELEILISKLLSLIGEDSSREGLLKTPERVARSWRFLTKGYQEQVDEILNKAIFKEKYDEMVIVKDIDFFSMCEHHLLPFYGRAHIAYIPNGKIVGLSKIPRIVEIFSRRLQVQERMTQQIAETLFNALEPDGVGVVIEAKHLCMVMRGVEKQNSVATTSAMLGSFRDDERTRVEFLKLLNTKLL

SEQ ID NO: 5175 - protein, 200 aa, Bacteriodetes bacterium
  misc_feature (1)..(200): tr|A0A522F5D9|A0A522F5D9_9BACT GTP cyclohydrolase 1 OS= Bacteriodetes bacterium OX=2507565 GN=folE PE=3 SV=1
MSNYKKIDEYDQKITQKLSEHYKGILKLSGDDIDREGVLKTPERAAKAMQFLTHGNCINPADILKSAIFKEEYKQMVLIKDIEVYSLCEHHLLPFFGKAHIAYIPNGKIVGLSKIPRVVDAFARRLQVQERLTTQIRDCIQETLNPLGVAVVIEAKHLCMLMRGVQKQNSVATTSAFTGEFLENSKTRDEFIQLVSGKLH

SEQ ID NO: 5176 - protein, 184 aa, Bacterioplanes sanyensis
  misc_feature (1)..(184): tr|A0A222FLH7|A0A222FLH7_9GAMM GTP cyclohydrolase 1 OS= Bacterioplanes sanyensis OX=1249553 GN=folE PE=3 SV=1
MSKLESLYHDVLSELGEDVEREGLLDTPKRAAKAMQFLTSGYDMDLQEVVNGAVFTSDNDEMVVVQGIEFYSLCEHHTLPFLGRCHIGYLPSGKVLGLSKFARIVDMFARRLQIQENMTKQIADAVIEATDCRGVGVIVEAQHMCMMMRGVQKQNSMMRTSVMRGAFREDQATRQEFMGLIDKA

SEQ ID NO: 5177 - protein, 216 aa, Bacteriovorax stolpii
  misc_feature (1)..(216): tr|A0A2K9NU54|A0A2K9NU54_9PROT GTP cyclohydrolase 1 OS= Bacteriovorax stolpii OX=960 GN=folE PE=3 SV=1
MIDPKKILKKVTPTPMIANDLTAAEKKEKITALFTEIMETLGLDLNDDSLKETPHRVAKMYVDEVFYGLESSSFPKITVVDNKFEYDHPVMEINIVTNSHCEHHFVPIIGKTHIAYIPNKKVLGLSKLNRIVDYFAKRPQIQERLTLQIHQALVEILETQNVAVVTDAMHACVKTRGIKDVTSMTRTSKLSGVFLQDSSHRAEFMSAIPRVQEVIY

SEQ ID NO: 5178 - protein, 191 aa, Unknown
  misc_feature (1)..(191): tr|A0A539D0A1|A0A539D0A1_9BACT GTP cyclohydrolase 1 OS= bacterium OX=1869227 GN=folE PE=3 SV=1
MTKPPVSQSDAEAAVRTLIEWAGDNPDREGLLDTPARVVRSYKELFAGYEVEPRAYLERTFEEVGGYNQLVVLKDIRFVSFCEHHMLPVVGVAHVGYLPTDRVVGISKLARVVRGFARRLQIQEKMTSEIANAIDEVLKPQGVGVVIEAEHSCMTLRGVDVPGASLTTSALLGVVRDDARTREEFLRLVRG

SEQ ID NO: 5179 - protein, 189 aa, Unknown
  misc_feature (1)..(189): tr|A0A520WG03|A0A520WG03_9BACT GTP cyclohydrolase 1 OS= bacterium OX=1869227 GN=folE PE=3 SV=1
MKPNQKLEELTQKLLVEIGEDPNREGLERTPVRVSKAWQYFSKGYTQDLDKIVNKAIFNESSRDMVVVRDVEFFSLCEHHLLPFFGKAHVGYIPDGRVIGLSKIPRIIDMFSRRLQVQERLTNQIAEAVHTVLKPVGVAIVMEGRHMCMQMRGVEKQNSLATTSTMLGKFRESVRTRNEFMSLINRYST

SEQ ID NO: 5180 - protein, 186 aa, Unknown
  misc_feature (1)..(186): tr|A0A532UEB1|A0A532UEB1_9BACT GTP cyclohydrolase 1 OS= bacterium (candidate division B38) B3_B38 OX=2012999 GN =folE PE=3 SV=1
MYMDLEKIERGMRLILEGIGEDPNRPGLVDTPRRYARMCQEIFGGLEQDPAPLMTVVPGESHDEMVIIKKLPLYSVCEHHLLPFIGEAHIAYIPDGGRIVGLSKLARVLEILSRRPQIQERLTTQMAGLVNETLKPMGVMVVIEAEHLCMSMRGVKRPHSKVVTSALQGVFRKNRVTRQEALELFK

SEQ ID NO: 5181 - protein, 187 aa, Unknown
  misc_feature (1)..(187): tr|A0A532TZV4|A0A532TZV4_9BACT GTP cyclohydrolase 1 OS= bacterium (candidate division B38) B3_B38 OX=2012999 GN =folE PE=3 SV=1
MFDESKIRAAVVSMIEAIGENPEREGLVDTPGRVAEMYAELFMGLEVDPRKELQVGYELGHREMVVVRDIPFYSMCEHHLLPFYGVAHIGYIPSADGRVVGISKLARVVEIIAKRPQIQERMTTEIADAIMDGLKPDGVAVVIQAEHLCMIMRGIKKQGSSIITSALRGTFRSKTETRTEFFSLLHG

SEQ ID NO: 5182 - protein, 162 aa, Unknown
  misc_feature (1)..(162): tr|A0A2M7M3P8|A0A2M7M3P8_9BACT GTP cyclohydrolase 1 (Fr agment) OS=bacterium (Candidatus Ratteibacteria) CG_4_1 0_14_3_um_filter_41_18 OX=2014287 GN=folE PE=3 SV=1
EGLKQTPERVARMAEELFSGPGRNPREELKPIFREDYDELVLIRDIPIFSICEHHLLPFMGKAHIAYIPEKNRVVGLSKLIRVIDIFAKRLQLQERLTTQIANTIMKILKPKGVLVIIEAEHLCLTMRGVKKPGSFTVTSAVRGIFLRDIRTRNEAMSLINK

SEQ ID NO: 5183 - protein, 189 aa, Unknown
  misc_feature (1)..(189): tr|A0A2G9YAM5|A0A2G9YAM5_9BACT GTP cyclohydrolase 1 (Fr agment) OS=bacterium (Candidatus Ratteibacteria) CG23_c ombo_of_CG06-09_8_20_14_all_48_7 OX=2014292 GN=folE PE= 3 SV=1
MDKKKIMRAVRLFLEGIGENPARPELVETPRRIANMAEELFAGIDKKPETALEVVFIEEYNELVLVRDIPLYSMCEHHLLPFLGKAHIAYIPDNHRITGLSKIARVVEILSRRLQLQERLTSQIADTIMKTLKPRGVMVVVEAEHLCMTMRGVKKPGSRATTSVMRGIFLDDARTRNEALNLIHKVPAL

SEQ ID NO: 5184 - protein, 199 aa, Unknown
  misc_feature (1)..(199): tr|A0A3A9A1T7|A0A3A9A1T7_9BACT GTP cyclohydrolase 1 OS= bacterium 0.1xD8-71 OX=2320099 GN=folE PE=3 SV=1
MVDQNKIKEAVKLLLEGIGEDAGREGLRETPDRIARMYGEIFAGMEEDAADHLSKTFPVDSNEIVVVKDITFYSVCEHHLMPFYGRAHIAYLPAGRVVGLSKLARTVEVFARRPQIQEQMTIQIVDAIMQHLHPQGAMVMLEAEHMCMTMRGVKKPGSKTVTVASRGCFQEDPKWQRLFFEIQQQQEGGNGNEDWTEGL

SEQ ID NO: 5185 - protein, 310 aa, Unknown
  misc_feature (1)..(310): tr|A0A3A9FV67|A0A3A9FV67_9BACT GTP cyclohydrolase FolE2 OS=bacterium 1XD42-44 OX=2320106 GN=folE2 PE=3 SV=1
MDHQTKAFPIKQLPSKEKRHQLFGSVKPAPRTKPVDKMHMADLQNTKKDFLFDLDAVGVTKVKNPIMIYSSLAPYTQTSIGQFTFTSSLKQTNKGTNMSRFMEQLAHYQKNGFSTELNVLKKFTKEIAKRVEQPDATLEVNFPWFFERQAPDTSLTGLNHADAGIRIEYHELKGFYIYLSLSVAITTLCPCSKEISEYSAHNQRGNVIMEISVSEDYQEENLDWKKILLEAAESNASARLHPILKRTDEKMVTEQAYENPRFVEDMVRLIAADLYETSFITKFKVTCQNEESIHLHDAIAAVTYDKTKDV

SEQ ID NO: 5186 - protein, 188 aa, Unknown
  misc_feature (1)..(188): tr|A0A3A9ELQ5|A0A3A9ELQ5_9BACT GTP cyclohydrolase 1 OS= bacterium 1XD42-8 OX=2320102 GN=folE PE=3 SV=1
MVNRQKVEEGVRLLLEGLGENLKREGLLETPSRIARMYEEIFGGTEEDPKDHLKKTFHLPNNELIVEKDIFFHSMCEHHMMPFFGKAHVAYIPDGKAVGLSKLARTVDTYAKRLQVQERMTAQIADALMEHLQPKGAAVFIEAEHMCMTMRGIKKPGSKTVTFVTRGEFVDNDILQRRFFLMVRRNEG

SEQ ID NO: 5187 - protein, 194 aa, Unknown
  misc_feature (1)..(194): tr|A0A3A8ZK68|A0A3A8ZK68_9BACT GTP cyclohydrolase 1 OS= bacterium 1xD42-87 OX=2320113 GN=folE PE=3 SV=1
MVDQTKIKEAVRLLLEGIGEDVDRAGLRETPDRIARMYGEIFAGMDEDAGEHLAKTFAVASNEIVLVKDITFYSICEHHLMPFYGKAHIAYLPDGKVVGLSKLARTVEVYARRPQIQEQMTIQIVEAVMEHLKPQGAIVMLEAEHLCMTMRGVEKPGSRTMTLASRGCFQEDPKWQALFFSMIGEKGYNQDLAK

SEQ ID NO: 5188 - protein, 191 aa, Unknown
  misc_feature (1)..(191): tr|A0A3A8YC25|A0A3A8YC25_9BACT GTP cyclohydrolase 1 OS= bacterium 1xD8-6 OX=2320116 GN=folE PE=3 SV=1
MAVDTEAIKEHIRGILIALGDDPDREGLKETPDRVARMYEEVFEGMNYSNHEIAQMFDKTFEDKMDFTDAGQDMVMVKDIEIFSYCEHHLALMYDMHVTVAYIPKGKVIGLSKIARIADMVGKRLQLQERIGADIAEILQEILGSEDVAVVIEGTHSCMTARGIKKGSASTKTYTLRGAFREDRFLQMRLG

SEQ ID NO: 5189 - protein, 185 aa, Unknown
  misc_feature (1)..(185): tr|A0A3A9F0R1|A0A3A9F0R1_9BACT GTP cyclohydrolase 1 OS= bacterium 1XD8-76 OX=2320115 GN=folE PE=3 SV=1
MVDQEKIKEAVKLLLEGIGEDGEREGLLETPDRIARMYGEICGGMEADAAEVLSKTFATEKTEMVLEKDIVFYSMCEHHMLPFFGKVHIAYIPDGKIAGLSKLARCVEIYAKRLQLQERMTEQIAEAVMKHLSARGVMVLTEAEHLCMTMRGVKKPGSRTVTYAVKGVFREDAQLQQNFFRMLER

SEQ ID NO: 5190 - protein, 184 aa, Unknown
  misc_feature (1)..(184): tr|A0A4Q2BQX8|A0A4Q2BQX8_9BACT GTP cyclohydrolase 1 OS= bacterium 1XD8-92 OX=2320884 GN=folE PE=3 SV=1
MVNREKIEEAIRLLLEGVGEDADREGLRETPERVARMYEELLAGMEADAGVHLSKTFEADNNEMVIEKDITFYSTCEHHLMPFFGKVHIAYIPDGQVVGLSKLARTVEVFAGRLQIQERMTVQIADAIMDSLKPKGVMVMAQAEHMCMTMRGVKKPGSCTVTIAARGEFERDEKLKDRFLMLVK

SEQ ID NO: 5191 - protein, 278 aa, Unknown
  misc_feature (1)..(278): tr|A0A0S4M0W1|A0A0S4M0W1_9BACT GTP cyclohydrolase FolE2 OS=bacterium 2013Arg42i OX=1561003 GN=folE2 PE=3 SV=1
MSSQIFEKMPDVMDKIDSRRLDIQRVGVRSVRRPISFEDRKGIIVPTIGNFGTYVRLDNRKRGTHMSRFIQLLEEIEEPLSVESFIPLVKSMIKRLESVEGVITVDFPFFLVKKAPITAIAGHMDYDVGLTGFVNKQGSRVQLTLRVPVSTLCPCSREISEYGAHNQRSSVRLTIQTNLHIWITDLIELIEKSASCDLFSVLKRPDEKFVTEYAYDNPKFVEDIVRDIARILTRDPRILFFEVESENFESIHNHSAYAYLRHGIPFKPLEESFTPHNH

SEQ ID NO: 5192 - protein, 234 aa, Unknown
  misc_feature (1)..(234): tr|A0A0M9DTD5|A0A0M9DTD5_9BACT GTP cyclohydrolase 1 OS= bacterium 336/3 OX=1664068 GN=folE PE=3 SV=1
MKQNETSLNTLPKNWTTEDLGDNHVATSLETPLREDAFELDDDLKIELIEKHFKEIMHILGLDLTDDSLSGTPHRVAKMYIKEIFSGLNPANKPKISLFENKYQYNQMLVEKDITFFSNCEHHFVPIVGKAHIAYISNGQVIGLSKLNRIVQYYAKRPQVQERLTMQIGKELQDILQTDNVAVVIDAKHLCVSSRGVQDVNSATITAFYEGKFKEEATKNEFLKYLSLGTEYGI

SEQ ID NO: 5193 - protein, 213 aa, Unknown
  misc_feature (1)..(213): tr|A0A1H8JJ98|A0A1H8JJ98_9BACT GTP cyclohydrolase 1 OS= bacterium A37T11 OX=1855384 GN=folE PE=3 SV=1
MNPINQNTPNHDEDMDGYIKIDRYNDEKINRIKEHYTDILQVLGEDPSREGLQKTPERVAKALQFLTHGYDLDPAAVLHTAMFKEDYSQMVVVKDIEVFSMCEHHMLPFFGKAHIAYIPNGYIVGLSKIPRVVDIYARRLQVQERLTNEIRDCIQETLKPAGVAVVIECKHLCMAMRGVQKQNSVTTTSAFTGEFANDKTRAEFLRLITASLH

SEQ ID NO: 5194 - protein, 255 aa, Unknown
  misc_feature (1)..(255): tr|A0A1V6C3C7|A0A1V6C3C7_9BACT Putative GTP cyclohydrol ase 1 type 2 OS=bacterium ADurb.Bin132 OX=1866923 GN=BW X90_01179 PE=4 SV=1
MGILPGQIAKWLNEALVVSQAANDSSVNGLQVDALEPVTKLGFAVDACMDAFTEAKDQGCQMLLCHHGLYWKGDDQRAIGLMGNRISYLVKNGISLWACHLPLDMHPEYGNNAGLATTLQIKNRKPFGFYHDLAIGFYGEVEANPTCSELVQRLNKDIPECKPWVWSFGKKSCKNIGVVSGGGSYAIEEAARLGLDCLVTGEVFHQDYHTAKELGVNVIVAGHWATETVGILSVGKAAATFFGLESVFINKPTGL

SEQ ID NO: 5195 - protein, 260 aa, Unknown
  misc_feature (1)..(260): tr|A0A1V6AF11|A0A1V6AF11_9BACT Putative GTP cyclohydrol ase 1 type 2 OS=bacterium ADurb.Bin157 OX=1866935 GN=BW Y02_00140 PE=4 SV=1
MKKQIKVTREDIVKHLNMLFAEVMMPDYSYNGLQFEGKKEVKKIVSGVDANVEFFKEAAKRKADFALVHHGLFWKGGEWTKLDRINTAVVKILVQADLNLYAMHLPLDAHPVFGNNVMLAKLIGSEVTAPFGAGKSGAVGCLCKLTKPMKIADFKKLVEKNIGKVMVHLDFGKPTVQNIAIVSGGGSSYLTANEIYNGEVDVLLTGEVLHQNVGTCREREVHLVSAGHYNTEIWGVKELGKIVAEEFKLEYEFIDMPTGL

SEQ ID NO: 5196 - protein, 190 aa, Unknown
  misc_feature (1)..(190): tr|A0A1V5VB60|A0A1V5VB60_9BACT GTP cyclohydrolase 1 OS= bacterium ADurb.Bin236 OX=1866925 GN=folE PE=3 SV=1
MEKKNKKKIEKAIRDILEAIGEDPDRGELVETPARVAAMYEEIFAGMNCDPKEVLKVLPDDFFDEIIMVRDIPIYSMCEHHMLPFFGKAHIAYIPSDGRITGLSKLVRVTHMYSRRLQLQERLTNQIATAINEILQPKGVMVVIEAEHLCMAMRGVREAGTMTVTSSVKGAFRTHQKTRMETLALLRDKK

SEQ ID NO: 5197 - protein, 257 aa, Unknown
  misc_feature (1)..(257): tr|A0A1V5V4B8|A0A1V5V4B8_9BACT Putative GTP cyclohydrol ase 1 type 2 OS=bacterium ADurb.Bin236 OX=1866925 GN=yb gI PE=4 SV=1
MVKRDELINFINDCFGREFRANAKRKDNYVNGVQIRGRSEVNTVALGVSASLDFLKLCRKSGADLVIIHHGIGLDGLDHHISPLLKNRLRELIDGDMTLLAFHYMLDAHPVFGNNAQIIEKAGARIVAPFHDDWGFVGELPSPLTLDSVIATLSRVFGSEPTLFRNGPKRVRRIGTVSGGGAPRMSNVAEIIDSGVDLYVTGEAKEEIPAISKEININYAAFGHYNTEKFGVTALGDLIKKQYPALDVRFIDVPCAL

SEQ ID NO: 5198 - protein, 285 aa, Unknown
  misc_feature (1)..(285): tr|A0A1V5UHF2|A0A1V5UHF2_9BACT GTP cyclohydrolase FolE2 OS=bacterium ADurb.Bin243 OX=1866936 GN=folE2 PE=3 SV= 1
MNSEKKLKVKKIEKASKSSDFSALADVQSERDLRDMDIDKVGVSGLSYPVCVLDRNNEKQNTVASVSMYVDLPKHFRGTHMSRFVEILSEYRGLITMHNIDKILKRMIKKFEATSAHFQMNFNYFIEKTAPVSKVKSLMNYDCEFIGNYSAADGYDFVLGVKTPVNTLCPCSKEISPGAGAHNQRSFINIHVRFKKLAWIEDIAAVAENAASAPVFALLKRPDEKYITELAYTNPRFVEDVVRNVAKAFMEDDNITWFTVEAENYESIHAHNAYAIIKRDKRNKT

SEQ ID NO: 5199 - protein, 189 aa, Unknown
  misc_feature (1)..(189): tr|A0A1V5T260|A0A1V5T260_9BACT GTP cyclohydrolase 1 OS= bacterium ADurb.Bin270 OX=1866926 GN=folE PE=3 SV=1
MSSAGLKGIPMEKIIRDLLIAIGEDPDREGLLKTPGRVKHSLAFLMEGYLQDPRSLIMNSVFSDKHEEMILVKNIPLYSMCEHHLLPFFGHAHVGYLPNDKIVGISKIARMVDLFARRLQLQERLTNQIADTLMDVLQPKGVAVVVEAEHLCMQMRGVQKRGTSVITSAMHGAFRRRPETRSEFMNLIK

SEQ ID NO: 5200 - protein, 244 aa, Unknown
  misc_feature (1)..(244): tr|A0A1V5PBC5|A0A1V5PBC5_9BACT Putative GTP cyclohydrol ase 1 type 2 OS=bacterium ADurb.Bin363 OX=1866927 GN=BW Y64_03151 PE=4 SV=1
MNLYEITQYLDDLLKIKDIEDKSLNGLLVENGGDVESLTAGVDISIKLVESSPDNSLILVHHGIFWGKPLPITRNIYKIIHSLITKNCALYVSHLPLDNHEEFGNNYGFYKLAGWDKYKIEKFDLSGIIEFSQERTIEDVLEEVYKVLGKDIILWNFGKKGVKRVLFVSGGAAYQIPEVLSKNVDLYITGETSHNSYWIAKDNNINVVFGGHYNTEKIGVNLLVKHLAEKFVLKYKFIDLPTGF

SEQ ID NO: 5201 - protein, 405 aa, Unknown
  misc_feature (1)..(405): tr|A0A1V5PIG0|A0A1V5PIG0_9BACT GTP cyclohydrolase FolE2 OS=bacterium ADurb.Bin363 OX=1866927 GN=folE2 PE=3 SV= 1
MLDIQNQQDNRNINIQRVGVKRVYLPLQILEKTGTYQTVTAEISLCADLAKDLRGTHMSRFMEILHRWSKEKISSREIKIILQEVLNKLNADRSEISIKFRYFIEKPAPKSQIKGLLDYICEFKGLYDSNSFCFILGVEVPVTTVCPCSKEISDYGAHNQRAIVRVNIEYLPDEFIWLEDLISDIEKTGSSELFPILKRNDEKYVTENAYENPKFVEDVVRDIVIILRQDKKLCRFKVECEASESIHNHNAFACHREEVKEKIRKVVVKYATSEHLDQIKVIADKNRDSLGFIIRSAVVKAIDNKEVFVALYNDNVVGFLIFHLRKDQQATLYDICISKNFRGRSVGKKLAKRLIVEAKKHNKLYIQLKCPENLPSNEFYKALNFELVGKETGKKRNLNIWKLSI

SEQ ID NO: 5202 - protein, 220 aa, Unknown
  misc_feature (1)..(220): tr|A0A1V5M8V4|A0A1V5M8V4_9BACT GTP cyclohydrolase 1 OS= bacterium ADurb.Bin425 OX=1866929 GN=folE PE=3 SV=1
MKTECQDRTIQGDVFFAQAEKLQLAKTCRSQPAAFDSNRIEKAVKEILIAIGEDPEREGLLETPSRVARMLKELTEGLHKNEKEELSCRFHEEKAGVVLVKDITFSSTCEHHMLPFTGVAHVAYLPKEGQITGLSKLARVVECVSKRLQVQERMTSQIADAIETTLDPLGVFVMVEAEHSCMVLRGIKKPGSLTVTMESRGVYKEDQDLRRELLSLVTRA

SEQ ID NO: 5203 - protein, 188 aa, Unknown
  misc_feature (1)..(188): tr|A0A1V5LMW7|A0A1V5LMW7_9BACT GTP cyclohydrolase 1 OS= bacterium ADurb.Bin429 OX=1866930 GN=folE PE=3 SV=1
MNIKRVEELIRELLIEIGEDPEREGLEKTPLRVAGAYEYLTSGYHMNTERLINGAVFEAESNNMIIVRDIELYSLCEHHMLPFYGRCHIGYIPKEKIFGVSKLARLVDMYSRRLQIQERLTEQIASAIMDSIDPEGVGVIIEARHLCMMMRGVQKQNSLMTTSSVIGSFRNSIATRNEFLTLIGRERP

SEQ ID NO: 5204 - protein, 246 aa, Unknown
  misc_feature (1)..(246): tr|A0A1V5LIV0|A0A1V5LIV0_9BACT Putative GTP cyclohydrol ase 1 type 2 OS=bacterium ADurb.Bin431 OX=1866931 GN=BW Y77_00857 PE=4 SV=1
MLLRDDVVTYLADYLRVGEIKDYGPVGLQVEGRTQVRRIVTGVSASLALFEEAFKREADMILVHHGILWDKESRVVQGPFKQRLKALLDHDVSLLAYHLCLDVHEEVGNNALAAKALGMHNVAPLGEIGLKGSIEELDFAELQQLLLYVFDHEPFAFSFGPAKIRHIGYCSGGAAGDLALAIEEGLDAFITGDVREPTMHLAQEAGIHFFAAGHYATERLGIRALGENLMRKTGVEVEFIDIPNPA

SEQ ID NO: 5205 - protein, 246 aa, Unknown
  misc_feature (1)..(246): tr|A0A1V5KTF1|A0A1V5KTF1_9BACT Putative GTP cyclohydrol ase 1 type 2 OS=bacterium ADurb.Bin478 OX=1866932 GN=BW Y83_00885 PE=4 SV=1
MVPRDDLIQYVNDYLQVDQVKDYSPAGLQVEGKEQVHKIVTAVSAGARLFQQAVEWQADMIIVHHGLFWDREPRVVQGPLKGRLKILLQNDITLLGYHLALDKHPVLGNNALAARALGLEQVTPLGEVGVQGRVAGLTIGQLTQQVEAVFQHSALVFAAGPEQIQRIGFCSGGAARDLSDAVEAGLDAFITGEAKEETMNLAEENAVHFIAAGHYATERMGIRALGEHLARTFPVQVRFIERNNPV

SEQ ID NO: 5206 - protein, 186 aa, Unknown
  misc_feature (1)..(186): tr|A0A1V5KLP6|A0A1V5KLP6_9BACT GTP cyclohydrolase 1 OS= bacterium ADurb.Bin478 OX=1866932 GN=folE PE=3 SV=1
MENEIKPLIRQLLGRLGEDPDREGLLRTPQRVENALHYLTRGYSMDLNELLNNALFHETCDEMVLVRNIELYSLCEHHLLPFIGKAHVAYIPTGKVLGLSKVARIVDMFARRLQIQENLTRQIADAIQKVTNAAGVAVVIEAQHMCMMMRGVEKQNSLVTSSAMLGSFKTERATRMEFLNLIKCWS

SEQ ID NO: 5207 - protein, 190 aa, Unknown
  misc_feature (1)..(190): tr|A0A1V5JIG5|A0A1V5JIG5_9BACT GTP cyclohydrolase 1 OS= bacterium ADurb.BinA028 OX=1866933 GN=folE_1 PE=3 SV=1
MPVDHPRAQAAVRELLCAIGEDPDREGLRETPARVARALGEFFAGLDQRPEDILSTTFDIDHDEMILVRDIEVYSTCEHHLVPFHGVAHVGYIPAKDGKVTGLSKIARLVDVFAKRPQVQERLTTQVADALVDHLGVQGCIVVLECEHLCMSMRGVKKPGSRTITSAVRGQLRNPATRAEAMALLLGGKR

SEQ ID NO: 5208 - protein, 189 aa, Unknown
  misc_feature (1)..(189): tr|A0A1V5JH52|A0A1V5JH52_9BACT GTP cyclohydrolase 1 OS= bacterium ADurb.BinA028 OX=1866933 GN=folE_2 PE=3 SV=1
MPVAYRESVANRVSEILSKWGDVTNAEVLENTPARVERALDELLSGYDLDPEAILARTFETDCDDMVIVADIPVCSMCEHHMMPFIGHAHVGYIPDGRLLGVSKVARLVECYSRRLQLQERITSQVADAIMSHLAPKGVGVVIAAEHTCMTTRGVNRPGTRTITSATRGLFRDDEKTRAEFMSLIGVSP

SEQ ID NO: 5209 - protein, 203 aa, Unknown
  misc_feature (1)..(203): tr|A0A244C067|A0A244C067_9BACT GTP cyclohydrolase 1 OS= bacterium AM6 OX=1954209 GN=folE PE=3 SV=1
MSKNNEKAAPQGEVTQVQAEDAVRTLLRWAGEDPTREGLLDTPRRVAEAYGDWFSGYRDDPRAYMERTFEEVAGYDELIVLRDIEYESHCEHHMAPIIGRVHVGYLPAGKVVGISKLARVVEAYARRFQVQEKMTAQIAQCIQDVLQPVGVGVVVEGAHECMTTRGIHKRGVSMVTSKMLGSFREDARTRAEFLRFIEVGGKR

SEQ ID NO: 5210 - protein, 190 aa, Unknown
  misc_feature (1)..(190): tr|A0A202DCK6|A0A202DCK6_9BACT GTP cyclohydrolase 1 OS= bacterium B17 OX=1932704 GN=folE PE=3 SV=1
MKDDNTNIERMTAAYKELLEGLGEDLSRPGLDNTPNRAAKALSFIAGGYNQNVEEIINEALFESPADDMIIVKDIELYSLCEHHMLPFIGKCHVGYLPRGKVLGLSKVARIVDVFARRLQIQENLTRQIGETIMKHTDALGVGVVVEAQHLCMMMRGVSKQNSSMKTSCMLGDFRSCTDTRMEFLSLIEK

SEQ ID NO: 5211 - protein, 186 aa, Unknown
  misc_feature (1)..(186): tr|A0A2N5Z9B6|A0A2N5Z9B6_9BACT GTP cyclohydrolase 1 OS= bacterium BM706 OX=2053465 GN=folE PE=3 SV=1
MNKEVIIKSVRAILEAIGEDPEREGLVRTPERVANMYVELFSGMGVDPEKVINVQFNEPHEEMIIVKDIPFSSMCEHHMIPFIGKAHIVYIPQDNKITGLSKLIRLVDLYSKRLQLQERLTTQVADSLMKTLNPLGVVVVIEAEHMCMSIRGVKKPGSKTITSAVRGIFHNDIAARSEALSLIREY

SEQ ID NO: 5212 - protein, 190 aa, Unknown
  misc_feature (1)..(190): tr|A0A2H6K2R4|A0A2H6K2R4_9BACT GTP cyclohydrolase 1 OS= bacterium BMS3Abin01 OX=2005709 GN=folE PE=3 SV=1
MDLEKIRNGTRLILEGIGEDADRDGLKNTPARVASMYEDVLSGLKVEPASILEPMPSDRHQEMVLLKDISFFSMCEHHLLPFFGMAHVAYIPSEGGMITGLSKLSRLVQVVARRPQLQERMTSVIADSMVEALQPLGVMVLVSAEHLCMSMRGIRSPGTQTITSAVRGIFRSNAATRAEVLSVINARSDI

SEQ ID NO: 5213 - protein, 188 aa, Unknown
  misc_feature (1)..(188): tr|A0A2H6EF63|A0A2H6EF63_9BACT GTP cyclohydrolase 1 OS= bacterium BMS3Abin03 OX=2005711 GN=folE PE=3 SV=1
MDIPKIENLVGELLLEIGEEPQREGLLNTPTRVAKAYEFLTRGYRQDICEVMNKAIFNEKYDEMVLVKNIDFYSLCEHHILPFYGKVHVAYIPDGKIVGLSKIPRIVEVFSRRLQVQERMTQQIADTFDKYLQPRGVAVVSEAYHMCMMMRGVEKQNSSATTSAMHGVFKEDARTRMEFLDLISHRNL

SEQ ID NO: 5214 - protein, 189 aa, Unknown
  misc_feature (1)..(189): tr|A0A2H6EJP1|A0A2H6EJP1_9BACT GTP cyclohydrolase 1 OS= bacterium BMS3Abin04 OX=2005712 GN=folE PE=3 SV=1
MNLEKVEKNVESILVEIGEDPSRQGLVKTPKRVAKAYEFLTQGYHKDIDKILNGAVFDEKYDEMVIVKDIDFYSLCEHHMIPFYGKVHVAYIPNGKIVGLSKIPRIVDVFARRLQVQERMTQQIADTINKYLSPIGVAVVAEGYHMCMMMRGVEKQNSYSITSAVHGIFKEDLRTRSEFLDLISHQRLK

SEQ ID NO: 5215 - protein, 180 aa, Unknown
  misc_feature (1)..(180): tr|A0A2H6EW88|A0A2H6EW88_9BACT GTP cyclohydrolase 1 OS= bacterium BMS3Abin05 OX=2005713 GN=folE PE=3 SV=1
MEKLVYELLKKIGEDPDRKGLKYTPERVAKAYKYFMRGYRQNLKDILNGALFEEKYDEMVIVKNIDYYSMCEHHLLPFFGKAHVAYIPNGKIIGISKIPRIVDMYARRLQVQERMTTQIADALQGLLNPLGVAVVVEGQHLCMMMRGVEKQNSVMITSAMYGAFRNRTSTREEFLRLIKS

SEQ ID NO: 5216 - protein, 247 aa, Unknown
  misc_feature (1)..(247): tr|A0A2H6EYT8|A0A2H6EYT8_9BACT Putative GTP cyclohydrol ase 1 type 2 OS=bacterium BMS3Abin05 OX=2005713 GN=ybgI PE=4 SV=1
MNRNTLIAYLNDLLEIDNFQDYCVNGLQVGGNPEVGKIAGGVSISRRFLKQAIDWGADLALLHHGLFWRSDPHPFYLTGVQKARLEMVIKHDLNLAAYHLPLDAHKVFGNNIQILKNLALQPVESLEIGFIGKFKKGLSQDAFLKLVNEKLDCNATPFFYGKKKIETVLAISGASSSAFEEAAAGGVDAFIGGDIREENVRGIEEVGLNYIAAGHYNTERFGVRALLNHLSEKFGLQTKFIEIPNPV

SEQ ID NO: 5217 - protein, 187 aa, Unknown
  misc_feature (1)..(187): tr|A0A2H6F276|A0A2H6F276_9BACT GTP cyclohydrolase 1 OS= bacterium BMS3Abin06 OX=2005714 GN=folE PE=3 SV=1
MNKSKIKKGVRMILEGIGEDPDRPGLKDTPKRIANLYEEIFSGLKTPTKEILKPIEGESHDEMVLLKDIPFYSICEHHLLPFIGKAHVAYIPSGGKIVGISKLARAVEIFAKRPQVQERLTAQLADMIMEKLKPKGAMVIVDAEHLCMSMRGVKKLHTKTVTSAVRGLFRTKESTRMELLALIKKSD

SEQ ID NO: 5218 - protein, 187 aa, Unknown
  misc_feature (1)..(187): tr|A0A2H6FCK1|A0A2H6FCK1_9BACT GTP cyclohydrolase 1 OS= bacterium BMS3Abin07 OX=2005715 GN=folE PE=3 SV=1
MDRKKIEKGVRLILEGIGEEPERPGLRNTPGRVASMCEEIFAGLESSPEDILKHIEGESHDEMVMLKDIPFYSVCEHHLLPFFGRAHIGYIPAGGRIVGIGELAKALEMLARRPQVQERLNTQLADMIMDKLNPKGAMVIIDAEHLCLSMRGIKKPGSKTVTSAVRGIFRSKQSTREEMLELLKRRD

SEQ ID NO: 5219 - protein, 187 aa, Unknown
  misc_feature (1)..(187): tr|A0A2H6FM01|A0A2H6FM01_9BACT GTP cyclohydrolase 1 OS= bacterium BMS3Abin08 OX=2005716 GN=folE PE=3 SV=1
MNTKKIEKGVRLIIEGIGEDPERPGLKRTPQRVASMFEEIFSGLVTQPEDILTPIEGETHDEMVILKDIPFYSVCEHHLLPFFGRAHIAYIPEKGRIVGIGELARALEILAKRPQVQERLSAQLVDMIMKRLKPKGAMVIIDAEHLCLSMRGIKKPGSRTVTSAVRGLFRSKQSTREEMLSLIKSRN

SEQ ID NO: 5220 - protein, 187 aa, Unknown
  misc_feature (1)..(187): tr|A0A2H6FWM5|A0A2H6FWM5_9BACT GTP cyclohydrolase 1 OS= bacterium BMS3Abin10 OX=2005718 GN=folE PE=3 SV=1
MDRKKIMKGVKLILEGIGEDPERPGLKDTPGRIAGMYEEIFSGLQTPTEEILKPIEGESHDEMVLLKDIPFYSVCEHHLLPFLGRAHVAYIPSGGKIVGLSSLAKAVEIFAKRPQVQERLTTQLADLIMERLKPRGAMVIVDAEHLCLSMRGTKKPGARTVTSAVRGIFRTKESTRVELLELIKKRD

SEQ ID NO: 5221 - protein, 295 aa, Unknown
  misc_feature (1)..(295): tr|A0A2H6G095|A0A2H6G095_9BACT GTP cyclohydrolase FolE2 OS=bacterium BMS3Abin11 OX=2005719 GN=folE2 PE=3 SV=1
MLNPPKIRPPFKPKPRIPDVTEDSNTRDSDNDSEIADVQSRHDSRQITIDKVGIKDIRHPVRVKDRSEGEQHTVATFNMYVELPHNFKGTHMSRFVEILNQHEREISIKSFHDMLEEMRERLEAETGRIEMSFPYFISKKAPVTGVQSLMDYQVSFNGEIEKGETSIELKVIVPVTSLCPCSKKISDYGAHNQRSHVTVTIRANSFIWIEELIEMVEKQASSELYGLLKRPDEKHVTEYAYDHPKFVEDMVRDVAATLNTDDRVDAYIVESENFESIHNHSAYALIERDKLSETT

SEQ ID NO: 5222 - protein, 189 aa, Unknown
  misc_feature (1)..(189): tr|A0A2H6GJP8|A0A2H6GJP8_9BACT GTP cyclohydrolase 1 OS= bacterium BMS3Abin14 OX=2005722 GN=folE PE=3 SV=1
MDRKKIERGMRLILEGIGEDPERPGLQGTPGRVADLFSEVFAGVDVDAMQFLVPVAGETHDEMVLVKDISMHSMCEHHLLPFIGVAHVAYIPEGGRIVGLSKIVRVLDTFAHQPQVQERLTTQVAEAVMNGLRPKGVMVVIEAEHMCMSMRGVNKPNSRTVTSAVRGSFRRDERTRSETLSLIYGSRSR

SEQ ID NO: 5223 - protein, 191 aa, Unknown
  misc_feature (1)..(191): tr|A0A2H6H8M7|A0A2H6H8M7_9BACT GTP cyclohydrolase 1 OS= bacterium BMS3Bbin01 OX=2005724 GN=folE PE=3 SV=1
MDNVPDVEAIVGAVRTILEAIGEDPEREGLAKTPERVARMYAEVFDGLHRDPKEILEMVFVQEEHREIVMVKDIPFYSMCEHHLMPFHGRAHVAYLPKGTLTGLSKLARLVEVFARRPQLQERLTTQIADTLMDAVDPYGVLVVVEAEHLCMSMRGVKKPGSITTTSAVRGAFAESAATRSEAFALLFGNR

SEQ ID NO: 5224 - protein, 187 aa, Unknown
  misc_feature (1)..(187): tr|A0A2H6IER5|A0A2H6IER5_9BACT GTP cyclohydrolase 1 OS= bacterium BMS3Bbin07 OX=2005730 GN=folE PE=3 SV=1
MDIKKIEKGVKLILEGIGEDPERPGLRRTPQRVSAMFQEIFSGLQTPPEDLLQHIEGETHDEMVMLKDIPFYSVCEHHLLPFFGRAHIAYIPEKGRIVGIGELAKALEMLAKRPQVQERLTAQLADMIMERLRPRGAMVIIDAEHLCLSMRGIKKPGARTVTSAVRGIFRSKQSTREEMLELIKKRD

SEQ ID NO: 5225 - protein, 185 aa, Unknown
  misc_feature (1)..(185): tr|A0A2H6IRV9|A0A2H6IRV9_9BACT GTP cyclohydrolase 1 OS= bacterium BMS3Bbin09 OX=2005732 GN=folE PE=3 SV=1
MDKNKIKKGVKLILEGIGENPDRPGLKDTPKRVANLYEEIFSGLSTPTEEILKPIEGESHDEMVLVKDIPFYSVCEHHLLPFIGKAHVAYVPSKGKIVGLSKLARAVEIFAKRPQVQERLTAQLADLIMKKLKPKGAMVIVDAEHLCMSMRGVKKPGSRTVTSAVRGIFRTKKSTRTEVLELIKK

SEQ ID NO: 5226 - protein, 211 aa, Unknown
  misc_feature (1)..(211): tr|A0A2H6J0Y6|A0A2H6J0Y6_9BACT GTP cyclohydrolase 1 OS= bacterium BMS3Bbin10 OX=2005733 GN=folE PE=3 SV=1
MDALVKKIPAAGPQLGAGPDIQRPERAEAEEAVRTLIAWAGDDPAREGLLDTPGRVVNAFREFFQGYDECPIEALSRTFDDVGGYDDIVMLRDIDLNSHCEHHMVPFVGNAHVAYIPDNAVVGISKLARVVDIYSRRLQTQETMTAQITLTIDKVLKPLGVAVMIEAVHQCMSMRGVRKPNVATITTQFTGIFKENQAQQDRFMMLARGKD

SEQ ID NO: 5227 - protein, 288 aa, Unknown
  misc_feature (1)..(288): tr|A0A2H6JBJ5|A0A2H6JBJ5_9BACT GTP cyclohydrolase FolE2 OS=bacterium BMS3Bbin12 OX=2005735 GN=folE2 PE=3 SV=1
MKATNPAPGDPATIADVQSSADTRRIAINKVGIKAIRHPVRVKDRSEGEQHTIATFNMYVNLPHDFKGTHMSRFVEILNRHEREISVQSFKDMLREMTGVLEVGSGHIEMRFPYFVTKTAPVTKVKSLMDYDVSLIGEIRDGAVHTHIRVVVPVTSLCPCSKEISDYGAHNQRSHVTIMARTRGFIWIEELIDLVEKEASCELYGLLKRPDEKYITERAYDNPKFVEDMVRDVAVRLNEDGRIEAYVVESENFESIHNHSAYAMIQRDKTLDDDGTDDPRSPSRPPAG

SEQ ID NO: 5228 - protein, 252 aa, Unknown
  misc_feature (1)..(252): tr|A0A2H6JCN5|A0A2H6JCN5_9BACT Putative GTP cyclohydrol ase 1 type 2 OS=bacterium BMS3Bbin12 OX=2005735 GN=BMS3 Bbin12_01687 PE=4 SV=1
MVALLELVSYTDRLLDSAAFADYCPNGLQVEGRAQVRRLISGVSASRALIEAGIAAGADLLLVHHGYFWKGEDPRITGMKRARLAALLGAQMSLMAYHLPLDAHPELGNNAQLARRLGLEVAGRFGHGPGPAVGCRGRLEPGLAPAVLAQRITEVLGRAPLHVPGRADSIRTVAWCSGAAQSYIEEAAALGVDAYLTGEVSESTVHVARETGMHFFAAGHHATERYGVQALGAHLAGRFSLEHEFVDIDNPA

SEQ ID NO: 5229 - protein, 244 aa, Unknown
  misc_feature (1)..(244): tr|A0A2H6JLY2|A0A2H6JLY2_9BACT GTP cyclohydrolase FolE2 OS=bacterium BMS3Bbin14 OX=2005737 GN=folE2_1 PE=4 SV= 1
MKLQTVGIKNFTCPVSIREKIGSRQQTVATISMQAAMPSRLRESCVPVFTHVLGKYREDISATIFPAMLAEVRERLQAEKARMTMSFPYFIAKQAPVTQTGSLMEYQCSFIGSINETAGLQLSVQVPLTTLCPCSKEISSAGAHNQRAEVTLTVRAPRFIWLEDLISLVEHCGSCELYALLKRPDEKFVTEAAYANPMFVEDVARMVAQQALAHPDIARFSVSVESFESIHKHSAYALVNSDDL

SEQ ID NO: 5230 - protein, 267 aa, Unknown
  misc_feature (1)..(267): tr|A0A2H6JS89|A0A2H6JS89_9BACT Putative GTP cyclohydrol ase 1 type 2 OS=bacterium BMS3Bbin14 OX=2005737 GN=BMS3 Bbin14_02083 PE=4 SV=1
MSATVQDILNIIETLAPANLAEPWDNVGLMIGSPAGPVTSILLGLDPTAALLDEAGSLNADLAITHHPVIFHPLKSISLNQPDGRFIQQALIRKINVISCHTNLDSTVNGVSDTLAGQLGLDDVTVLVAGGKTDKTCGLGRIGDYSAPISAAEFVRRLKETCHPPWLLTAGPRPEKISRVAVCGGSCSEYAEIALQSGAQVFVTAEVKHNVARWAEQAGLWIIDAGHYATENPAMHQFARRLARAAKPLGHIDIHVTERQASPLQLL

SEQ ID NO: 5231 - protein, 189 aa, Unknown
  misc_feature (1)..(189): tr|A0A101VQU1|A0A101VQU1_9BACT GTP cyclohydrolase 1 OS= bacterium BRH_c32 OX=1734400 GN=folE PE=3 SV=1
MDSNKIEKCITSILEEIGEDTKREGLIKTPHRVAKAYEFLTQGYNTNIEDVLNGAIFEEEYDEMVVVKDIDFYSMCEHHMLPFYGKVHVAYLPQGKIVGLSKIPRIVDVFARRLQVQERMTTQIAETLEKYLEPRGVAVVIEGFHMCMMMRGVQKQNSITTTSSMCGVFKNTMRTRAEFLDLIKLQNLR

SEQ ID NO: 5232 - protein, 184 aa, Unknown
  misc_feature (1)..(184): tr|A0A3A9C949|A0A3A9C949_9BACT GTP cyclohydrolase 1 OS= bacterium C-53 OX=2320109 GN=folE PE=3 SV=1
MDKEKIEQGIRLILEGIGENIEREGLLDTPERVSRMYEEIYGGLTEDAKVHLSRTFRAEKNEMVVERDITFYSMCEHHLMPFYGKAHVAYLPDGRVVGLSKLARTVEVYAKRPQIQEQLTAQIADALMEYLEPRGAMVMIEAEHMCMTMRGVKKPGSTTVTVASRGAFEGNESLQNMFFQMIKV

SEQ ID NO: 5233 - protein, 182 aa, Unknown
  misc_feature (1)..(182): tr|A0A2M7YW04|A0A2M7YW04_9BACT GTP cyclohydrolase 1 OS= bacterium CG_4_9_14_3_um_filter_65_15 OX=1975567 GN=fol E PE=3 SV=1
MEDLVRGMLEAIGEDPQREGLIDTPARVSRSWGELAAGYAMDPGAMVRGALFAAESRDMIVVNDIDFYSVCEHHMLPFFGKAHVAYIPDGRIVGLSKIARVVEAFARRLQVQERMTAQIAACLMENLEPLGVAVTLHAQHLCMMMRGIQKQNSYAVTSEMLGCFRTDSKTRSEYLTLIRETP

SEQ ID NO: 5234 - protein, 188 aa, Unknown
  misc_feature (1)..(188): tr|A0A3A9BBT2|A0A3A9BBT2_9BACT GTP cyclohydrolase 1 OS= bacterium D16-34 OX=2320120 GN=folE PE=3 SV=1
MDRAKIEQGVRLILEGVGEDPSREGLRKTPERVAKMYEEVFAGMNEDPAVHFETTFDEHHEEMVLVRDIPFYSMCEHHLAPFFGHAHIAYIPSPDGRICGLSKLARLLDVFARRPQVQERLTSQVADTLMKELKPQGAIVVLEAEHLCMSMRGVKKPGTQTTTSAIRGIFDEDTAARAEALSLIFARR

SEQ ID NO: 5235 - protein, 185 aa, Unknown
  misc_feature (1)..(185): tr|A0A3A9D0X5|A0A3A9D0X5_9BACT GTP cyclohydrolase 1 OS= bacterium D16-50 OX=2320112 GN=folE PE=3 SV=1
MVDQGKIREAVRLLLEGIGEDASRPGLEDTPDRVARMYTEIFEGMDKEASEPLSRVFPMDSGQMVLEKDIVFYSMCEHHMMPFYGKAHIAYIPEDRVVGLSKLARTVEIYARRLQIQERMTGQIADALMEYLAPCGVMVMVEAEHMCMTMRGIKKPGSKTVSIASRGCFEKDAALQDRFFQLLKP

SEQ ID NO: 5236 - protein, 192 aa, Unknown
  misc_feature (1)..(192): tr|A0A3A8WBM3|A0A3A8WBM3_9BACT GTP cyclohydrolase 1 OS= bacterium D16-59 OX=2320098 GN=folE PE=3 SV=1
MAIDTEAIKKHVRGILMALGDDPDREGLKETPDRVAKMYEEVFEGMNYSNHEIAQMFNKTFTDKMEFAGGSQDMVMVKDIEIFSYCEHHLALMYDMKVSVAYIPQEKVIGLSKIARIADMVGKRLQLQERIGSDIAEILQEILGSEDVAVIIEGTHSCMTARGIKKGTASTKTYTLRGAFREDRYLQMRLEG

SEQ ID NO: 5237 - protein, 186 aa, Unknown
  misc_feature (1)..(186): tr|A0A3A9BF20|A0A3A9BF20_9BACT GTP cyclohydrolase 1 OS= bacterium D16-63 OX=2320119 GN=folE PE=3 SV=1
MDKTKIEEGVRLILEGVGEDPDREGLRETPARVARMYEEVFAGLSENPARHFEVTFDEHHEEMVLVKDIPFYSMCEHHLVPFFGKAHVAYIPATDGRICGLSKLARLVDAFAKRPQVQERLTSQIADTLIEQLNPQGVIVVLEAEHMCMSMRGVKKPGSQTVTSAVRGVFEKSAPARSEALSLILR

SEQ ID NO: 5238 - protein, 182 aa, Unknown
  misc_feature (1)..(182): tr|A0A2G6G274|A0A2G6G274_9BACT GTP cyclohydrolase 1 OS= bacterium DOLZORAL124_64_63 OX=2044883 GN=folE PE=3 SV= 1
MEKLVREMLVKIGEDPDREGLVKTPERVVRAWRENTVGYRVDPGEMVRSALFQAEGQEMVIVSDIDFYSVCEHHLLPFFGKAHVAYIPNGKIVGLSKIARVVEAYARRLQVQERMTAQIAGCLMDNLQPLGVAVTLHAQHLCMMMRGIQKQNSFATTSEMLGCFQNDPKTRGEFLTLIRHKP

SEQ ID NO: 5239 - protein, 260 aa, Unknown
  misc_feature (1)..(260): tr|A0A202DK14|A0A202DK14_9BACT GTP cyclohydrolase FolE2 OS=bacterium E08(2017) OX=1932693 GN=folE2 PE=3 SV=1
MKDVQNSPDNRNIPIKKAGIKSLQYPITVLDRQNKSQETTAIVSMYVDLPHNFKGTHMSRFVEVLNKHHGRISVEETDSILYTMLERFDCETAHFDITFPYFIEKEAPSSKARSLMNYNCSLLTSLEMKSGTEVFDRIIEVSVPVTMLCPCSKEISDEGAHNQRSIVTVRVRSSELVWLEELIEIAESEASAPVFSLLKREDEKALTEAAYQNPLFAEDAVRAVASRLKEDERIIWYQVESENQESIHNHNAYAMVEETK

SEQ ID NO: 5240 - protein, 218 aa, Unknown
  misc_feature (1)..(218): tr|A0A1V8NDA6|A0A1V8NDA6_9BACT GTP cyclohydrolase 1 OS= bacterium endosymbiont of Pedicinus badii OX=1719126 GN =AOQ89_00935 PE=3 SV=1
MNSIIKKIKNILVKKKLENPILKKKTNFLKSQKKIQNCIEKILIYLNLDSKNSNIIDTPKRISSMLIKEIFSGLYYENFPKISFIKNTIQVEEMIKIFNISFTSFCEHHFLITEGKAFIAYFPNRKILGISTVNKIVNFFAKRPQIQERMTKQIAICLQTLLQIEDVAVLIQAKHFCAQIRKMENQKNYVITSNFCGKFEKSYSIKKEFYKFINVKFY

SEQ ID NO: 5241 - protein, 270 aa, Unknown
  misc_feature (1)..(270): tr|A0A497TJ46|A0A497TJ46_9BACT GTP cyclohydrolase FolE2 OS=bacterium endosymbiont of Escarpia laminata OX=1221 601 GN=folE2 PE=3 SV=1
MAENTPHTGTQIADVQSSEDTRRIAIDKVGIKDIRHPVRIKDRSEGEQHTIANFNMYVNLPHNFKGTHMSRFVEILNSHDYEITVESFKDMLTEMAERLEAESGHIEMSFPFFINKTAPVSNVQSLLDYDVTLIGEIHSGVAHIDIKVVVPVTSLCPCSKKISDRGAHNQRSHVTIQARTRGFIWIEEIIDMVEQEASCELFGLLKRPDEKHVTERAYDNPKFVEDMVRDVAVRLNNEDRIGAYIIESENFESIHNHSAYALIERDKTAE

SEQ ID NO: 5242 - protein, 201 aa, Unknown
  misc_feature (1)..(201): tr|A0A132HZ97|A0A132HZ97_9BACT GTP cyclohydrolase 1 OS= bacterium F083 OX=1768114 GN=folE PE=3 SV=1
MEKGYLKIDQYDEACVKEMAGHYREILRLLGEDPEREGLRKSPERIAKAMLFFTNGYDLDPEEILRSAMFHEDYKQMVVVKDIELYSLCEHHMVPFVGKAHVAYIPNGTIVGLSKLPRVVDAYARRLQVQERLTKQIKDCIQRTLNPLGVAVVIEAQHMCMSMRGVQKQNSVTTTSDFTGAFLNSPKTREEFMHIIGVNLH

SEQ ID NO: 5243 - protein, 192 aa, Unknown
  misc_feature (1)..(192): tr|A0A202DLF2|A0A202DLF2_9BACT GTP cyclohydrolase 1 OS= bacterium F11 OX=1932698 GN=folE PE=3 SV=1
MTVEALESKVHKLPSLVTEILTMLGEDPNREGLKKTPGRVARALMELTRGYDADVDSLINKAIFHENYNEMVVVKDIRFYSLCEHHLLPFFGTVHIAYIPNGKIVGLSKLPRLVEVFSKRLQVQERMTQQIANILKDKLDPMGVGVVIKARHLCMEMRGIESQDSPTVTSAMLGAFRSDPRTRKEFLSFIHE

SEQ ID NO: 5244 - protein, 204 aa, Unknown
  misc_feature (1)..(204): tr|A0A3D8UPP5|A0A3D8UPP5_9BACT GTP cyclohydrolase 1 OS= bacterium HD9-500m-PIT-SAG08 OX=2283597 GN=folE PE=3 SV =1
MKLVKDIDNNQNSKKISDKDAEEAFKTILSWMGEDPNREGLLETPKRVVKAFKEYFKGYKEDPIQVLDKTFGDVDGYDDMVIQKNISVQSHCEHHMAPIIGKAHVAYIPNERVVGLSKLARVVEVFSKRLQTQERLTMQIANTLMQSLDAKGVAVTIDSTHQCMTMRGIKKEQATTVTNYYLGQFKEDLSYQNRYLRLISNSKD

SEQ ID NO: 5245 - protein, 191 aa, Unknown
  misc_feature (1)..(191): tr|A0A2H5VKS6|A0A2H5VKS6_9BACT GTP cyclohydrolase 1 OS= bacterium HR08 OX=2035403 GN=folE PE=3 SV=1
MEPTRETRLREIRRHVAEILRLLRLDPTRDPELRHTPERVAEWYVDFFGDADREEEPEIAPLAREGNEEEMIVVANVPFYSVCAHHLLPFFGKAHIGYVPDRALLGLGSVGRLLEHYARRPQLQERLTEQVAEALMRAARPHGVIVLLQARQLCMEMRGARRPGRVTTSAARGCCQEPSWREEFFRRLSTR

SEQ ID NO: 5246 - protein, 206 aa, Unknown
  misc_feature (1)..(206): tr|A0A2H5VTR9|A0A2H5VTR9_9BACT GTP cyclohydrolase 1 OS= bacterium HR09 OX=2035404 GN=folE PE=3 SV=1
MRPELLRKSKASAPASEEELIKRLAPHVEAILDQLGVDRSDPNLQDTPRRVAAMFLEMFHGLKEGAEPSVTVFPNEERYSAMVMERDIPFYSMCAHHLVPFYGHAHIAYIPGKHIVGLSKIPRILEFYAKRPQIQERLTEQVADYLWQRLEPLGVMVVIEARHLCMEMRGVKKPGTLTVTSAIRGAFENAKVREEFLGFLNRSQKW

SEQ ID NO: 5247 - protein, 191 aa, Unknown
  misc_feature (1)..(191): tr|A0A2H5W282|A0A2H5W282_9BACT GTP cyclohydrolase 1 OS= bacterium HR10 OX=2035405 GN=folE PE=3 SV=1
MERTRETTLRELRWHIAEILRLLHLDPTRDPELRDTPERVAEWYVDFFGGADREEEPEIVPLAREGGEGEMIVVADVPFYSVCAHHLLPFFGKAHVGYVPDRALLGLGSVGRLLEHYARRPQLQERLTEQVADALVRTAHPRGAIVLLQARQLCMEMRGARKPGWVTTSAARGCFQEPSWREEFFRRLRTR

SEQ ID NO: 5248 - protein, 187 aa, Unknown
  misc_feature (1)..(187): tr|A0A2H5WE37|A0A2H5WE37_9BACT GTP cyclohydrolase 1 OS= bacterium HR12 OX=2035407 GN=folE PE=3 SV=1
MDRAKIERAVRMIIEAIGDDPEREGVQDTPARVAEMYEEIFAGIGRDPEELITVVRGAEHDEMIMVKDIPLYSVCEHHLLPWVGRAHVAYIPSKDGRITGLSKIARVVDLCAKRLQVQERLTTEIADAIERALEPRGVFVVIEAEHLCMTMRGIRKPGSRTVTSAVRGLFRTDARTRQEAMNLIGAP

SEQ ID NO: 5249 - protein, 186 aa, Unknown
  misc_feature (1)..(186): tr|A0A2H5WH58|A0A2H5WH58_9BACT GTP cyclohydrolase 1 OS= bacterium HR13 OX=2035408 GN=folE PE=3 SV=1
MAVDKEKIKQAVRLFLEGIGEDPNREGLKETPDRVARMWEEFDSMREFDFKLFEEFGSYNEMVLVKDINIYSICEHHLLPFFGKAHVAYIPDGIVCGLSKLVRTVRAFALRPQLQEKLTNQIADFLMEQLKPKGVAVVLEMEHLCMSMRGVMSPGHITTTSALRGIFLSDIRTREEFLKLIKRGRE

SEQ ID NO: 5250 - protein, 268 aa, Unknown
  misc_feature (1)..(268): tr|A0A2H5WSD6|A0A2H5WSD6_9BACT GTP cyclohydrolase FolE2 OS=bacterium HR15 OX=2035410 GN=folE2 PE=3 SV=1
MRSVFEQLPDVAMEMDSRGVALQAVGIRELRLPLRLLTPTGAEQAVVASVELSVDIEANQRGTHMSRLVETLYEWTAQPLSPADVRTLLQLTQERLGSRRAHLRMRFPYFLPLAAPVTGAPGLLDVEVEWDAQLNNGASCSTTSFEVPALTLCPCSKAIADFGAHNQRALVRLWLQTKERTLLLPDDYLPLIEQSVSALVYPVLKRPDEKFVTEKTYETPRFVEDVVRELVLRLQGREELRWFRVECESIESIHNHNAFAVYEEPRPK

SEQ ID NO: 5251 - protein, 272 aa, Unknown
  misc_feature (1)..(272): tr|A0A2H5X8E0|A0A2H5X8E0_9BACT GTP cyclohydrolase FolE2 OS=bacterium HR16 OX=2035411 GN=folE2 PE=3 SV=1
MSEIGVALSLPDVANQEDLRQIPIPRVGVRGVQLPVQIANSDGSAFHTIASVDFAVSLQPNKKGTHMSRLMQILDETSRAPLTLHELQRMLDRARDALDADQAEVTMRFKYFLRKHAPVTGATGWLDADAEWVVMLENGTCTRLVRVNVPVKSLCPCSKQIALYGAHNQRAYIRAEIELLPSTREPDMEELCRLLEEQGSSPLYPVLKRPDEKHVTESAYDNAKFVEDMLRDSVLALRRLPGIRRFKVECESIESIHNHNAFAATEEWLSPL

SEQ ID NO: 5252 - protein, 266 aa, Unknown
  misc_feature (1)..(266): tr|A0A2H5XA77|A0A2H5XA77_9BACT GTP cyclohydrolase FolE2 OS=bacterium HR17 OX=2035412 GN=folE2 PE=4 SV=1
MAFKVPADELEAQKQALPDIQSERPEHAIALTRVGVAHFRYPVTLRRKGEVLRTFVTIEAAVNLPSEQRGAHMSRFAEEIVQAFSLPMEAALFEELAERLANELLDAHDYAHHCTVTLEAEAHVDGHPYKLFASYNTATQQRILGVEVHGALACPCAMAMTGGLSHNQRGRLRIELQTNGYHIPAEELVAIAESAFSTPVRLLLKRPQEKAIVEAMHRNPKFVEDVVRDCVVALKARYLGVWARVRCDSFESIHPYDVFAEWEGVL

SEQ ID NO: 5253 - protein, 219 aa, Unknown
  misc_feature (1)..(219): tr|A0A2H5XIL0|A0A2H5XIL0_9BACT GTP cyclohydrolase 1 OS= bacterium HR18 OX=2035413 GN=folE PE=3 SV=1
MATNNKQHAHSDVWPEAFDGHPVGRYERQDLYCPEATAAIERHVREILRWIGEDPDREGLQRTPERVAMAFQYLTQGYHQDPRAILESALFEEDYNEMILVKDIQIYSLCEHHLLPFFGKAHVAYIPNRKIVGLSKIPRVVDVFARRLQVQERLTIQIRDALESVLQPLGVAVVIEAQHLCMMMRGVEKQHAVTTTSAMSGAFLKEATRAEFMRLINGG

SEQ ID NO: 5254 - protein, 219 aa, Unknown
  misc_feature (1)..(219): tr|A0A2H5XSX5|A0A2H5XSX5_9BACT GTP cyclohydrolase 1 OS= bacterium HR19 OX=2035414 GN=folE PE=3 SV=1
MSKGNSKDTLENSADGKVRSIEETLSLDQRVEIIKKSVENIIYALGDDPKREGLLKTPQRYAKAILEILWGYFADPEDIIGDAIFEQDYSGIVLVRHIKFFSMCEHHLLPFFGNCSIAYIPDGKIIGLSKLPRVVKFFAGRLQVQERLTEDIGKFIEKVLKPRGVAIYVSAYHLCLAMRGVKKEGVKMDTVFFSGKFQHDDNLKNFFLKQIREDRKIEI

SEQ ID NO: 5255 - protein, 222 aa, Unknown
  misc_feature (1)..(222): tr|A0A2H5XXT8|A0A2H5XXT8_9BACT GTP cyclohydrolase 1 OS= bacterium HR20 OX=2035415 GN=folE PE=4 SV=1
MNLEQKNGNGCVAIEQLQSFDANGNMPIPDHERQRMIEQLEQKFAEMMDILRIDRTRDPNSRETPRRLARMWVNELFIGRYTPPPPVTIFPNRKNVNELIISKGIKVMSVCSHHWQPISGTCTIGYMPGDYIIGLSKLTRIVEWFSRRGQIQEEMGEQIADYLESMLKPRALGVIITAKHYCMIARGVEADHEQSDMITSVLRGALQHDANLRNEFFRLAQS

SEQ ID NO: 5256 - protein, 228 aa, Unknown
  misc_feature (1)..(228): tr|A0A2H5XZ12|A0A2H5XZ12_9BACT GTP cyclohydrolase 1 OS= bacterium HR21 OX=2035416 GN=folE PE=4 SV=1
MQGNGCRQALREITPGFADANGNLRLSPEELQQMEAALEEHFAAILRVLRIDPTDPNSADTPKRLARMWVRELFRGRYEPPPRCTVFPNRRKVSGLVMSRGIDVRSVCSHHWQPIIGQCTIGYVPDQHIIGLSKLNRVVEWFSRRGQVQEELTEQIADFLHEKLRPRALGVVLACRHYCMILRGVEGDQEQAVMVTAAWRGELAENAQLRTEFLRLAALEVPQHDVVR

SEQ ID NO: 5257 - protein, 205 aa, Unknown
  misc_feature (1)..(205): tr|A0A2H5Y9T1|A0A2H5Y9T1_9BACT GTP cyclohydrolase 1 OS= bacterium HR22 OX=2035417 GN=folE PE=3 SV=1
MEPQEGITKAPWIAHPPDPIRLARVIRELLAALGEDPEREGLQRTPARVAEMLQEVLAGYWMDPVDLVNGAIFEVEDNDLVLVRDIEFYSMCEHHLLPFYGRAHVAYIPSGRIIGLSKIPRVVELFARRLQVQERMTRQIADFLETVLHPQGVAVIVEAAHLCAMMRGVRKSQARMVTQALTGVFRTDPRHRSELLAHLRRPLEK

SEQ ID NO: 5258 - protein, 188 aa, Unknown
  misc_feature (1)..(188): tr|A0A2H5YCN6|A0A2H5YCN6_9BACT GTP cyclohydrolase 1 OS= bacterium HR23 OX=2035418 GN=folE PE=3 SV=1
MFQAERIQRAIRDILEAVGEDPQREGLRETPQRVAEMLGELLRGLQEDPKAHLAQGFTAEGPQGMVLVRDIPFYSLCEHHLLPFFGHAHIGYLPRERIVGASKLVRAFDALARRPQLQERLTNQTADAIYEALRPRGVFVLVSAEHLCMSMRGVQKPGTRLVTQAIRGDEARSPEQFREFLALLRQSV

SEQ ID NO: 5259 - protein, 196 aa, Unknown
  misc_feature (1)..(196): tr|A0A2H5YIU4|A0A2H5YIU4_9BACT GTP cyclohydrolase 1 OS= bacterium HR24 OX=2035419 GN=folE PE=3 SV=1
MQGTPAKTTPDLERVAQAVRQIIEAIGEDPERPGLTDTPRRIARLYAEMFSGLQEDPLSVLATTFPEPHQEMVVLRDIPFYSLCEHHFLPFFGHAHVGYVPDGRIVGASKIARLVDILARRPQVQERLTSQIADCLMEGLRPQGAAVVIEAEHLCMSMRGVKKPGTLMVTSAVRGVFRRRGVTRAEFLALLREGKR

SEQ ID NO: 5260 - protein, 198 aa, Unknown
  misc_feature (1)..(198): tr|A0A2H5YL41|A0A2H5YL41_9BACT GTP cyclohydrolase 1 OS= bacterium HR25 OX=2035420 GN=folE PE=3 SV=1
METSEPLARPTVDLHRIADAVRQIIEAIGEDPGRPGLADTPRRIADLYAEMFAGLREDPLVLLQRTFPEPHQEMVILRQIPFYSLCEHHFVPFFGQAHVGYVPKGQIVGASKIARLVDVLARRPQVQERLTSQIADYLMEGLRPQGVAVVVEAEHLCMSMRGIKKPGSVLVTSAVRGVFRGSGVTRSEFLALVRGSAS

SEQ ID NO: 5261 - protein, 184 aa, Unknown
  misc_feature (1)..(184): tr|A0A2H5YV16|A0A2H5YV16_9BACT GTP cyclohydrolase 1 OS= bacterium HR26 OX=2035421 GN=folE PE=3 SV=1
MREIDRARLETAVRMILEAVGEDLDRPELRETPRRAAEMLRELLGGLELDPASFLAEPLAEQHEGLVVIRDIPVRSVCEHHLVPMVGRAHVAYLPAGRIVGSDRIIKLVDALARRPQLQERLTRQIAEAIERALQPQGVAVQLELEQMCMTIRGVQARESRVVTAVYHGAFEDDPSLRPLLASW

SEQ ID NO: 5262 - protein, 207 aa, Unknown
  misc_feature (1)..(207): tr|A0A2H5YWE3|A0A2H5YWE3_9BACT GTP cyclohydrolase 1 OS= bacterium HR27 OX=2035422 GN=folE PE=3 SV=1
MRRQERIVEFEDTGLRFATACDLERLQELVAEWLQLIGEDPQREGLQRTPQRVAETWAFLTRGYRQDLNEIVNGAVFHVDHDTMVVVKGIEFYSLCEHHLLPFFGHVHIGYVPRGRILGLSKFARVVDLYARRLQVQERLTQQIAQAIQEVLDPQGVAVVADGIHLCMMMRGVEKQHARTTTSAMLGIFESSAGARDEFYRLLSTTT

SEQ ID NO: 5263 - protein, 207 aa, Unknown
  misc_feature (1)..(207): tr|A0A2H5Z4N8|A0A2H5Z4N8_9BACT GTP cyclohydrolase 1 OS= bacterium HR28 OX=2035423 GN=folE PE=3 SV=1
MTQPERVIEAEDTGLRFTTSCDLARLQELVAEWLELIGEDPQREGLERTPQRVAEAWAFLTRGYRQNLQEIVNGAIFHVEENTMVVVKGIEFYSMCEHHLLPFFGHIHIGYLPQGKILGLSKFARIVDLYARRLQVQERLTQQVAQAIQDLLAPQGVAVVADGIHLCMMMRGVEKQHARTTTSAMLGIFRESSEARDEFYRLLSTTT

SEQ ID NO: 5264 - protein, 206 aa, Unknown
  misc_feature (1)..(206): tr|A0A2H5ZF75|A0A2H5ZF75_9BACT GTP cyclohydrolase 1 OS= bacterium HR29 OX=2035424 GN=folE PE=3 SV=1
MAFEPRAIGLDGRGAVTERGVDRERIQAAVRELILAIGEDPARDGLRDTPRRIADMYAEIFEGLTIDPREYLRVGFEVPHDEMVILRNIPFYSMCEHHFLPFHGEAHVGYVPDSRVVGISKLARVVEAYARRPQIQEKLTSQIAEAIMEVLEPDGVAVVIEAEHLCMTMRGVKKPGSRMVTSAMRGQFRRSAVTRSEFLALVRGTV

SEQ ID NO: 5265 - protein, 207 aa, Unknown
  misc_feature (1)..(207): tr|A0A2H5ZN95|A0A2H5ZN95_9BACT GTP cyclohydrolase 1 OS= bacterium HR30 OX=2035425 GN=folE PE=3 SV=1
MILKPTLLRRTGVSLTCRHMAEQTRLEQVVSELLRLIGENPDREGLRKTPARVARALKYLTKGYAEDPKHVINNALFTEDYSEMIVMKDVDFFSLCEHHILPFFGRATIAYIPRHKIVGISKLARLVDVYARRLQVQERMTTQIATTLMEELDPLGVGVVLRAEHLCMRMRGVEKQNSVVVTSAMLGVFRTHQETREEFMTLVNGTR

SEQ ID NO: 5266 - protein, 204 aa, Unknown
  misc_feature (1)..(204): tr|A0A2H5ZV35|A0A2H5ZV35_9BACT GTP cyclohydrolase 1 OS= bacterium HR32 OX=2035427 GN=folE PE=3 SV=1
MDGREPTARLVPNPRRGTVDRERIEAAVLEILRAIGEDPEREGLRETPRRIAEMYAELFSGLHRDPAVHLEVGFEDEEHHEMVVLKDIPFYSSCEHHLLPFHGVAHVGYVPNGRIVGISKVARVVETLARRPQVQERLTSQIADLLMDRLHAKGAAVVIEAEHLCMTMRGVKKPGSVMVTSAMRGLFRDDARTRAEFLSLIRAR

SEQ ID NO: 5267 - protein, 205 aa, Unknown
  misc_feature (1)..(205): tr|A0A2H6A0Z2|A0A2H6A0Z2_9BACT GTP cyclohydrolase 1 OS= bacterium HR33 OX=2035428 GN=folE PE=3 SV=1
MSGSKTKSASVEVVPAGARPIAPLVREILEILGEDPRRPGLRRTPERVEQTLRTLTRGYTESVDEVVGGAVFEEKHENMVLVRDIEIYSLCEHHLLPFFGKAHVAYLPNGKIVGLSKIPRLVDVFARRLQIQERLTDEIADALMSVVNPLGVGVVIEAYHLCMMMRGVEKQNSKAVTSAMRGVFRDDAKTRDEFLRLVHGGSWLE

SEQ ID NO: 5268 - protein, 151 aa, Unknown
  misc_feature (1)..(151): tr|A0A2H6AHB2|A0A2H6AHB2_9BACT GTP cyclohydrolase 1 OS= bacterium HR36 OX=2035431 GN=folE PE=3 SV=1
MYAELFGGLHEDPRRHLEKCFVEKYDEIVLVKGISFESLCEHHLLPFLGQAHIAYIPNGKIVGLSKLARVVEVLAHRPQVQERLTEQLADLLMQELEPKGVAVIMEATHTCMTIRGIRKPTSVCTTSAMRGVFKSNLSTRTELMSLIYGSK

SEQ ID NO: 5269 - protein, 184 aa, Unknown
  misc_feature (1)..(184): tr|A0A2H6ALC9|A0A2H6ALC9_9BACT GTP cyclohydrolase 1 OS= bacterium HR37 OX=2035432 GN=folE PE=3 SV=1
MSIEDAVREILVEIGENPERQGLKDTPLRIARMYKELTSGYRMSPHDIINGAIFDIKYDEMVVVKDIEFYSLCEHHLLPFFGTCHVAYIPNGKIIGLSKIPRIVELFSRRLQVQERLTVEIADFLNRILNPDGVAVVMEAYHLCMAMRGIKKAKASMLTSAMHGVFKEDERTRIEFLSLIGKKA

SEQ ID NO: 5270 - protein, 200 aa, Unknown
  misc_feature (1)..(200): tr|A0A2H6AZT5|A0A2H6AZT5_9BACT GTP cyclohydrolase 1 OS= bacterium HR40 OX=2035435 GN=folE PE=3 SV=1
MTRERPSRAEAEAAVRTLLAFSGDDPGREELRATPARVVEAFEEYFSGYRREAAELFRDRMPAGPMRGQPVVLRGIDFASHCEHHLAPFFGTAQVGFIAGENLVGLGQLVELVRIYSRRLQIQERLTRQIADALEAHLAPLGVGVLLEATHTCAAVRGPCQPRGRFVTACFRGAFAEDSALRELLRSGTTGSSSPSVVCG

SEQ ID NO: 5271 - protein, 334 aa, Unknown
  misc_feature (1)..(334): tr|A0A2H6B7Z2|A0A2H6B7Z2_9BACT GTP cyclohydrolase FolE2 OS=bacterium HR41 OX=2035436 GN=folE2 PE=3 SV=1
MSQLPTTDAPDVQARRPQATVSLTRVGVIGVEKVLRIRSNGDEQLFYAQLECFVDLPPDQKGAHMSRFEEVVNEAIDTVVLGEAFRAETLAAHIAERVRERQGGLRAEARIAARYPISRPAPASGVPTQEIYTMFGVAIASERGTRRLVGVQAQGMTACPCAQELVRDRAERRLREAGVDAAVVEEVLREVPVATHNQRGIGTLYIGAVEACREGIEATDLLEIVESSMSAEIYELMKRSDEALVVERAHRTPRFVEDCVREMVRQAVARYEPLGPEAFVYARQENLETIHRHNVVAERSGLLGELASELAGEQHVLHHVTMREWLEGREASAT

SEQ ID NO: 5272 - protein, 190 aa, Unknown
  misc_feature (1)..(190): tr|A0A3L8A266|A0A3L8A266_9BACT GTP cyclohydrolase 1 OS= bacterium J10(2018) OX=2320122 GN=folE PE=3 SV=1
MDKDQVIARIAEHYEGIIRLLGDDPSRHGLEKTPVRAAKALYYATQGYRENADDIMKSAIFEYAGSQMVIVKDIEFYSFCEHHILPFFGRVSVGYIPDGEMIGLSKLARAVNVYARRLQVQERLTAEICASISRSLHTKGVIVACNAQHLCMKMRGVEKQDSSTTTIEYNGLFSTPEMRAEFFSLLRDIH

SEQ ID NO: 5273 - protein, 200 aa, Unknown
  misc_feature (1)..(200): tr|A0A202DZQ3|A0A202DZQ3_9BACT GTP cyclohydrolase 1 OS= bacterium K02(2017) OX=1932696 GN=folE PE=3 SV=1
MNPKIIQIKEKENNTNNQIISESVTSILNAIGENTQREGLLKTPHRVAKSLQFLTKGYQEDPYEIINNAIFEEEIDEMVVVKDIQLYSLCEHHLLPFVGKAHIAYIPNGKIIGLSKVARLVEIFARRLQVQERLTKQIAEIIDETLQPQGVAVVIQAAHMCMQMRGVQKQNSLMITSSMKGAFQQPATRNEFMNFVKGSL

SEQ ID NO: 5274 - protein, 203 aa, Unknown
  misc_feature (1)..(203): tr|A0A4S1HG26|A0A4S1HG26_9BACT GTP cyclohydrolase 1 OS= bacterium M00.F.Ca.ET.141.01.1.1 OX=2563898 GN=folE PE= 3 SV=1
MSKNNEKAAPQGDVTQDQAEDAVRTLLRWAGEDPSREGLLDTPRRVAEAYGDWFSGYRDDPRAYMERTFEEVAGYDELIVLRDIEYESHCEHHMAPIIGRVHVGYLPAGKVVGISKLARVVEAYARRFQVQEKMTAQIAQCIQDVLQPIGVGVVVEGAHECMTTRGIHKRGVSMVTSKMLGSFRDDARTRAEFLRFIEVGGKR

SEQ ID NO: 5275 - protein, 211 aa, Unknown
  misc_feature (1)..(211): tr|A0A4S1IBW4|A0A4S1IBW4_9BACT GTP cyclohydrolase 1 OS= bacterium M00.F.Ca.ET.141.01.1.1 OX=2563898 GN=folE PE= 3 SV=1
MDAVIKKLMPQSAYMEKPVTDRPSEAEVEAAVHTLLRWTGDNPDREGLIDTPKRVAKAYREMFGGYDMCPADELGRTFEEVAGYDDLVIVKDIQFHSHCEHHMVPIIGKAHVGYLPDGKVVGLSKIARVVDIFAHRLQTQEALTAQIAGVIQDVLNPRGVAVMIEAEHMCMAMRGIRKQGSTTLTSTFTGVFKDTPEEQVRFVTMVRGGGA

SEQ ID NO: 5276 - protein, 210 aa, Unknown
  misc_feature (1)..(210): tr|A0A4S1AYK9|A0A4S1AYK9_9BACT GTP cyclohydrolase 1 OS= bacterium M00.F.Ca.ET.146.01.1.1 OX=2563899 GN=folE PE= 3 SV=1
MDAVIKKIMPPSEYMEKPVTDRPTEAEVEAAVRTLLRWTGDNPDREGLIDTPKRVTKAFREMFNGYDMCAADELGRTFEEVAGYDDLVIVRNIKFHSHCEHHMVPIIGKAHVGYLPDGKVVGLSKIARVVDIFAHRLQTQEAMTAQIAGVIQDVLNPRGVAVMLEAEHMCMAMRGIRKQDSTTLTSTFTGVFKDAPEEQVRFVTMVRAGG

SEQ ID NO: 5277 - protein, 211 aa, Unknown
  misc_feature (1)..(211): tr|A0A4S1B3X8|A0A4S1B3X8_9BACT GTP cyclohydrolase 1 OS= bacterium M00.F.Ca.ET.152.01.1.1 OX=2563900 GN=folE PE= 3 SV=1
MDAVIKKLMPQSAYMEKPVTDRPSEAEVEAAVHTLLRWTGDNPDREGLIDTPKRVAKAFREMFGGYDMCPAEELGRTFEEVAGYDDLVIVRDIKFHSHCEHHMVPIIGKAHVGYLPDGKVVGLSKIARVVDIFAHRLQTQEALTAQIAGVIQDVLNPRGVAVMIEAEHMCMAMRGIRKQGSTTLTSTFTGVFKDTPEEQVRFVTMVRGGGA

SEQ ID NO: 5278 - protein, 212 aa, Unknown
  misc_feature (1)..(212): tr|A0A4S0YSR3|A0A4S0YSR3_9BACT GTP cyclohydrolase 1 OS= bacterium M00.F.Ca.ET.155.01.1.1 OX=2563901 GN=folE PE= 3 SV=1
MTSSNKEHTTPAAGNGRPSREEAEAAVRVLLRWAGDDPSREGLIDTPARVVRSYEEFFAGYQVDPREILARTFSEVDGYDEMIVLKDIRFESYCEHHMVPIIGRAHVAYLPGHRVVGISKLARLVDAFAKRLQIQEKMTVQIADTLNEVLQPVGVGVILEAAHQCMSTRGVHKAGVTMVTSRMLGSFRTDPSTRREFLSIVGNPGAVAVPNT

SEQ ID NO: 5279 - protein, 268 aa, Unknown
  misc_feature (1)..(268): tr|A0A4S0XWQ8|A0A4S0XWQ8_9BACT GTP cyclohydrolase FolE2 OS=bacterium M00.F.Ca.ET.155.01.1.1 OX=2563901 GN=folE 2 PE=3 SV=1
MNQMNPAFVMPDVQSTHDTRQIPIQRVGVKAVRHPLTVRTASGEVQPTVGTWNLDVHLPADQKGTHMSRFVALLEEHKAPLEAATFRTMLAAMLEKLEAEAGRIEVSFPYFVNKTAPVSGVQSLLDYEVTLTGDTRNGATRLYLKVLVPVTSLCPCSKKISQYGAHNQRSHVTINAELAGEVAVEDLIRIAEEEASCELWGLLKRPDEKFVTERAYENPKFVEDLVRDVAQRLNADERIVAYVLEAENFESIHNHSAYALIERDKRVL

SEQ ID NO: 5280 - protein, 210 aa, Unknown; identical to SEQ ID NO: 5276
  misc_feature (1)..(210): tr|A0A4S1A3C1|A0A4S1A3C1_9BACT GTP cyclohydrolase 1 OS= bacterium M00.F.Ca.ET.156.01.1.1 OX=2563902 GN=folE PE= 3 SV=1

SEQ ID NO: 5281 - protein, 211 aa, Unknown; identical to SEQ ID NO: 5275
  misc_feature (1)..(211): tr|A0A4S0ZLG3|A0A4S0ZLG3_9BACT GTP cyclohydrolase 1 OS= bacterium M00.F.Ca.ET.156.01.1.1 OX=2563902 GN=folE PE= 3 SV=1

SEQ ID NO: 5282 - protein, 210 aa, Unknown; identical to SEQ ID NO: 5276
  misc_feature (1)..(210): tr|A0A4V3NEM8|A0A4V3NEM8_9BACT GTP cyclohydrolase 1 OS= bacterium M00.F.Ca.ET.157.01.1.1 OX=2563903 GN=folE PE= 3 SV=1

SEQ ID NO: 5283 - protein, 210 aa, Unknown; identical to SEQ ID NO: 5276
  misc_feature (1)..(210): tr|A0A4S0W9A2|A0A4S0W9A2_9BACT GTP cyclohydrolase 1 OS= bacterium M00.F.Ca.ET.159.01.1.1 OX=2563904 GN=folE PE= 3 SV=1

SEQ ID NO: 5284 - protein, 211 aa, Unknown; identical to SEQ ID NO: 5277
  misc_feature (1)..(211): tr|A0A4S2JUI6|A0A4S2JUI6_9BACT GTP cyclohydrolase 1 OS= bacterium M00.F.Ca.ET.162.01.1.1 OX=2563905 GN=folE PE= 3 SV=1

SEQ ID NO: 5285 - protein, 210 aa, Unknown; identical to SEQ ID NO: 5276
  misc_feature (1)..(210): tr|A0A4S0YXJ9|A0A4S0YXJ9_9BACT GTP cyclohydrolase 1 OS= bacterium M00.F.Ca.ET.163.01.1.1 OX=2563906 GN=folE PE= 3 SV=1

SEQ ID NO: 5286 - protein, 203 aa, Unknown; identical to SEQ ID NO: 5274
  misc_feature (1)..(203): tr|A0A4S0YDT9|A0A4S0YDT9_9BACT GTP cyclohydrolase 1 OS= bacterium M00.F.Ca.ET.163.01.1.1 OX=2563906 GN=folE PE= 3 SV=1

SEQ ID NO: 5287 - protein, 208 aa, Unknown; identical to SEQ ID NO: 4184
  misc_feature (1)..(208): tr|A0A4S1H9Y8|A0A4S1H9Y8_9BACT GTP cyclohydrolase 1 OS= bacterium M00.F.Ca.ET.168.01.1.1 OX=2563907 GN=folE PE= 3 SV=1

SEQ ID NO: 5288 - protein, 203 aa, Unknown; identical to SEQ ID NO: 5274
  misc_feature (1)..(203): tr|A0A4S0QN68|A0A4S0QN68_9BACT GTP cyclohydrolase 1 OS= bacterium M00.F.Ca.ET.177.01.1.1 OX=2563908 GN=folE PE= 3 SV=1

SEQ ID NO: 5289 - protein, 208 aa, Unknown
  misc_feature (1)..(208): tr|A0A4S0QRP4|A0A4S0QRP4_9BACT GTP cyclohydrolase 1 OS= bacterium M00.F.Ca.ET.177.01.1.1 OX=2563908 GN=folE PE= 3 SV=1
MDAVIKKLMPPSSYMEKPVTDRPSEAEVEAAVRTLLRWTGDNPDREGLVDTPKRVTKAFREMFNGYDMCPAEELGRTFEEVAGYDDLVIVRDIKFHSHCEHHMVPIIGKAHVGYLPDGKVVGLSKIARVVDIFAHRLQTQEAMTAQIAGVIQDVLNPRGVAVMIEAEHMCMAMRGIRKQDSTTLTSTFTGVFKDTPEEQVRFVTMVRG

SEQ ID NO: 5290 - protein, 208 aa, Unknown; identical to SEQ ID NO: 4184
  misc_feature (1)..(208): tr|A0A4V3MJ35|A0A4V3MJ35_9BACT GTP cyclohydrolase 1 OS= bacterium M00.F.Ca.ET.179.01.1.1 OX=2563909 GN=folE PE= 3 SV=1

SEQ ID NO: 5291 - protein, 210 aa, Unknown
  misc_feature (1)..(210): tr|A0A4S0LS29|A0A4S0LS29_9BACT GTP cyclohydrolase 1 OS= bacterium M00.F.Ca.ET.180.01.1.1 OX=2563910 GN=folE PE= 3 SV=1
MEDKGLEEKVNDLISNNFVNNVEEKKRQMNLAMESVRNIIELCGDDPERDGLIDTPYRFIKAFLEYTEGYNEDPKTHLTKTFDVKQDDMVLVKDIEFYSMCEHHFAPFYGVVHVGYIPNEKVTGLSKIARVVEGYARRFQVQERLTTQIAQAINEVLEPRGVMVVIEAKHMCMCSRGIKKEQSSTITSAVHGLFHKNYNTRNEFLTLINK

SEQ ID NO: 5292 - protein, 292 aa, Unknown
  misc_feature (1)..(292): tr|A0A4S0LTR2|A0A4S0LTR2_9BACT GTP cyclohydrolase FolE2 OS=bacterium M00.F.Ca.ET.180.01.1.1 OX=2563910 GN=folE 2 PE=3 SV=1
MTEFDLSTREGRWKHFGSVDPIEGTKPTVKEEMTDLQSTNKNYLFEIEEVGIKNLVYPVLVDRFQTAGNFSFSTSLNQDEKGINMSRILESVEKHYDNGIELDFDSLYRLLRSLQERMEQNAAGVDVSAKWFFDRHSPITNIKAVGHADVTYGMAIDKDSITRKEITLQAAVTTLCPCSKEISEYSAHNQRGIITVKAILNNEAILTDDYKEKILDAMEANASSILYPILKRPDEKSVTERAYENPRFVEDLIRLIAADLVDFDWIEGFDIECRNEESIHQHDAFAKIKYRK

SEQ ID NO: 5293 - protein, 212 aa, Unknown; identical to SEQ ID NO: 5278
  misc_feature (1)..(212): tr|A0A4S0JB81|A0A4S0JB81_9BACT GTP cyclohydrolase 1 OS= bacterium M00.F.Ca.ET.191.01.1.1 OX=2563911 GN=folE PE= 3 SV=1

SEQ ID NO: 5294 - protein, 268 aa, Unknown; identical to SEQ ID NO: 5279
  misc_feature (1)..(268): tr|A0A4V3M3P8|A0A4V3M3P8_9BACT GTP cyclohydrolase FolE2 OS=bacterium M00.F.Ca.ET.191.01.1.1 OX=2563911 GN=folE 2 PE=3 SV=1

SEQ ID NO: 5295 - protein, 208 aa, Unknown; identical to SEQ ID NO: 4184
  misc_feature (1)..(208): tr|A0A4S0GR64|A0A4S0GR64_9BACT GTP cyclohydrolase 1 OS= bacterium M00.F.Ca.ET.194.01.1.1 OX=2563912 GN=folE PE= 3 SV=1

SEQ ID NO: 5296 - protein, 203 aa, Unknown; identical to SEQ ID NO: 5274
  misc_feature (1)..(203): tr|A0A4S0EAM8|A0A4S0EAM8_9BACT GTP cyclohydrolase 1 OS= bacterium M00.F.Ca.ET.199.01.1.1 OX=2563913 GN=folE PE= 3 SV=1

SEQ ID NO: 5297 - protein, 211 aa, Unknown; identical to SEQ ID NO: 5275
  misc_feature (1)..(211): tr|A0A4S0EE85|A0A4S0EE85_9BACT GTP cyclohydrolase 1 OS= bacterium M00.F.Ca.ET.199.01.1.1 OX=2563913 GN=folE PE= 3 SV=1

SEQ ID NO: 5298 - protein, 211 aa, Unknown; identical to SEQ ID NO: 5277
  misc_feature (1)..(211): tr|A0A4R9ZAK4|A0A4R9ZAK4_9BACT GTP cyclohydrolase 1 OS= bacterium M00.F.Ca.ET.205.01.1.1 OX=2563914 GN=folE PE= 3 SV=1

SEQ ID NO: 5299 - protein, 210 aa, Unknown; identical to SEQ ID NO: 5276
  misc_feature (1)..(210): tr|A0A4R9V6H6|A0A4R9V6H6_9BACT GTP cyclohydrolase 1 OS= bacterium M00.F.Ca.ET.221.01.1.1 OX=2563915 GN=folE PE= 3 SV=1

SEQ ID NO: 5300 - protein, 210 aa, Unknown; identical to SEQ ID NO: 5276
  misc_feature (1)..(210): tr|A0A4R9VCK3|A0A4R9VCK3_9BACT GTP cyclohydrolase 1 OS= bacterium M00.F.Ca.ET.222.01.1.1 OX=2563916 GN=folE PE= 3 SV=1

SEQ ID NO: 5301 - protein, 210 aa, Unknown; identical to SEQ ID NO: 5276
  misc_feature (1)..(210): tr|A0A4R9TKJ1|A0A4R9TKJ1_9BACT GTP cyclohydrolase 1 OS= bacterium M00.F.Ca.ET.227.01.1.1 OX=2563917 GN=folE PE= 3 SV=1

SEQ ID NO: 5302 - protein, 268 aa, Unknown; identical to SEQ ID NO: 5279
  misc_feature (1)..(268): tr|A0A4R9R6N8|A0A4R9R6N8_9BACT GTP cyclohydrolase FolE2 OS=bacterium M00.F.Ca.ET.228.01.1.1 OX=2563918 GN=folE 2 PE=3 SV=1

SEQ ID NO: 5303 - protein, 212 aa, Unknown; identical to SEQ ID NO: 5278
  misc_feature (1)..(212): tr|A0A4V6QPR6|A0A4V6QPR6_9BACT GTP cyclohydrolase 1 OS= bacterium M00.F.Ca.ET.228.01.1.1 OX=2563918 GN=folE PE= 3 SV=1

SEQ ID NO: 5304 - protein, 292 aa, Unknown; identical to SEQ ID NO: 5292
  misc_feature (1)..(292): tr|A0A4R9SH55|A0A4R9SH55_9BACT GTP cyclohydrolase FolE2 OS=bacterium M00.F.Ca.ET.229.01.1.1 OX=2563919 GN=folE 2 PE=3 SV=1

SEQ ID NO: 5305 - protein, 210 aa, Unknown; identical to SEQ ID NO: 5291
  misc_feature (1)..(210): tr|A0A4R9SES3|A0A4R9SES3_9BACT GTP cyclohydrolase 1 OS= bacterium M00.F.Ca.ET.229.01.1.1 OX=2563919 GN=folE PE= 3 SV=1

SEQ ID NO: 5306 - protein, 210 aa, Unknown; identical to SEQ ID NO: 5276
  misc_feature (1)..(210): tr|A0A4V6QPU4|A0A4V6QPU4_9BACT GTP cyclohydrolase 1 OS= bacterium M00.F.Ca.ET.230.01.1.1 OX=2563920 GN=folE PE= 3 SV=1

SEQ ID NO: 5307 - protein, 194 aa, Unknown
  misc_feature (1)..(194): tr|A0A4V3KEI3|A0A4V3KEI3_9BACT GTP cyclohydrolase 1 OS= bacterium M00.F.Ca.ET.230.01.1.1 OX=2563920 GN=folE PE= 3 SV=1
MTMPANFDEIIQQNSDAYRTLIASTGEDLTREGLLNTPERAAKAFSFLTQGYHQDLVEITNNAIFPTDNNELVMVKNIEFYSMCEHHMLPFYGVAHVAYLPDGKVIGLSKMARIVDMYARRLQIQENLTRQIAQAVMDMTGAKGAAVVMDAAHMCMMMRGVMKQKSDTRSMSLLGEFKHNTEARQALLMAIPSA

SEQ ID NO: 5308 - protein, 214 aa, Unknown
  misc_feature (1)..(214): tr|A0A5J4DY61|A0A5J4DY61_9BACT GTP cyclohydrolase 1 OS= bacterium MnTg02 OX=2080452 GN=folE PE=4 SV=1
MDAIVKKMPSSKPSVLGSARKHARPSREEAEQAVRTLIRWAGDDPEREGLMDTPKRVVNAYSEFFRGYDECPIDALSRTFEEVGGYDDIVMLRDIDVNSHCEHHMIPFVGKVHLAYFPTKRVVGISKLARVVEIFARRLQTQETMTAQIAEAINVALEPKGVAVMIEAVHQCMSLRGVQKPNVATITTQYLGLFKEEPNRQANFLNLVRSGITG

SEQ ID NO: 5309 - protein, 268 aa, Unknown
  misc_feature (1)..(268): tr|A0A5J4E6M8|A0A5J4E6M8_9BACT GTP cyclohydrolase FolE2 OS=bacterium MnTg03 OX=2080453 GN=folE2 PE=4 SV=1
MSQTATTTPGIPDIQGSADTRRLAINKVGIKDIRHPIIVKDRSDGVQHTIATFNMFVYLPHQFKGTHMSRFVKILNDHEKEISVSSFRDMLAEMASMLEAESGNVEMNFPYFVNKKAPISGVESLLDYDVTLIGEIDKGVTSTRIKVQVPVTSLCPCSKSISDYGAHNQRSHVTVNARTSGFIWIEEIIDIVEKQASCELYGLLKRPDEKYVTERAYDNPKFVEDMVRDIAVELNKDERIRQYVLESENFESIHNHSAYAMIEYDKDG

SEQ ID NO: 5310 - protein, 269 aa, Unknown
  misc_feature (1)..(269): tr|A0A5J4ECM2|A0A5J4ECM2_9BACT GTP cyclohydrolase FolE2 OS=bacterium MnTg04 OX=2080454 GN=folE2 PE=4 SV=1
MAREQQKHEAGAIEDVQGSADLRQIPINKVGIKDIYHPVIVGDRSGREQHTIANFNMYVNLPHNFKGTHMSRFVEILNLHEREITVKSFKEMLSELTDRLDADAGHIEMSFPYFVNKTAPVSGVQSLLDYQVTFAGERRNGKNSIWIKVVVPVTSLCPCSKSISDRGAHNQRSHVTINARIEGFMWLEELIDLAESEASCQLYGILKRPDEKYVTEQAYDNPKFVEDMVRDIAARLNADDRVRAYVIESENFESIHNHSAYALIEYDKD

SEQ ID NO: 5311 - protein, 183 aa, Unknown
  misc_feature (1)..(183): tr|A0A0S8HT10|A0A0S8HT10_9BACT GTP cyclohydrolase 1 OS= bacterium SM23_31 OX=1703762 GN=folE PE=3 SV=1
MEALIRELLAKIGEDPTREGLINTPGRVAAAYEYFSEGYRADLNEIVNGAIFQENYDEMVLVKNIDIFSLCEHHLLPFYGVCHVGYIPDGKIIGLSKIPRIVEVFAKRLQIQERLTDQIAETIENILNPKGIGVVISARHLCMIMRGVKKQNTVVTTSSMLGCFKSDQRTRAEFLSLINQTQM

SEQ ID NO: 5312 - protein, 194 aa, Unknown
  misc_feature (1)..(194): tr|A0A1Z8MYL0|A0A1Z8MYL0_9BACT GTP cyclohydrolase 1 OS= bacterium TMED15 OX=1986651 GN=folE PE=3 SV=1
MSSYNFDEKTALVDNSIEEHYQNLLQQIGEDPERQGLVKTPKRAALAMQYLTQGYQQDIGKIVNQAIFDEEYDDMVIVKDIEFYSLCEHHILPFFGKCHVGYLPQNKIIGLSKIPRLVDVFARRLQVQERLTYQVAQILDEVLSPKGVAVVIEAQHMCMMVRGVEKQSSSTVTNVMLGEFREGHATRAEFMNCL

SEQ ID NO: 5313 - protein, 179 aa, Unknown
  misc_feature (1)..(179): tr|A0A1Z9IT15|A0A1Z9IT15_9BACT GTP cyclohydrolase 1 OS= bacterium TMED161 OX=1986652 GN=folE PE=3 SV=1
  misc_feature (17)..(17): Xaa can be any naturally occurring amino acid
  misc_feature (19)..(19): Xaa can be any naturally occurring amino acid
  misc_feature (26)..(26): Xaa can be any naturally occurring amino acid
MEKITKELLIELGEDPXRXGLIKTPXRVSKSWKFLTGGYNQTIDQVVNDAIFSVDNQDMIIVKDINYYSLCEHHLLPFMGKVHVGYIPNGKVLGLSKIPRIIDIYARRLQLQEQLTHQIAQGITEFLNPKGVGVVIEGEHMCMRMRGVQKQNASMQTSTMTGIFRKEKKTREEFLNLIN

SEQ ID NO: 5314 - protein, 221 aa, Unknown
  misc_feature (1)..(221): tr|A0A1Z9VRA5|A0A1Z9VRA5_9BACT GTP cyclohydrolase 1 OS= bacterium TMED178 OX=1986653 GN=folE PE=3 SV=1
MEFKIKSLLEKLQNYISIFRKKEKKKNHGEKNEETVEKMESAVRTILEGIGEDPTRAGLVDTPSRVTKALLYMTKGYHEGLSNIVGNAVFDEHHSEMVLLRDIDIFSLCEHHMVPFLGKVHIAYIPRSKVLGLSKLARIAEIFSRRLQVQERLTKQIAEAVEEAISPRGVAVVIQSTHMCMVMRGVEKSGSSTMTSSMRGCFKKQRYQEEFFALLGHPSLT

SEQ ID NO: 5315 - protein, 189 aa, Unknown
  misc_feature (1)..(189): tr|A0A1Z9VSB4|A0A1Z9VSB4_9BACT GTP cyclohydrolase 1 OS= bacterium TMED178 OX=1986653 GN=folE PE=3 SV=1
MSTKVSRTEAKKAIETLLKYIGEDLKREGLVDTPERVIKSFDTFYGGYQQDPKAPLQKTFRYYKDYNEVVLVKDIDIMSHCEHHLVPIIGKAHIAYIPHKKIVGLSKLARVADIFSRRLQTQESLTVSIAETIYECLEPKGVAVYINAVHQCMTTRGIQNKHSSTTTTHFKGIFTEIQHRQEFLALLRS

SEQ ID NO: 5316 - protein, 231 aa, Unknown
  misc_feature (1)..(231): tr|A0A1Z9M5X9|A0A1Z9M5X9_9BACT GTP cyclohydrolase 1 OS= bacterium TMED198 OX=1986779 GN=folE PE=3 SV=1
MSKKSIDKVLKEEQLKFENQGDDHSVKSIDTPMREGAFEKSSSEKINLIKDHFYEIMDILGLDMSDDSLKGTPYRVAKMYVSEIFNGLDEEHKPKVTLFDNKYQYGKMLVERDISYYSMCEHHFMPIYGKAHIAYISSGKVIGLSKLHRIVKYFASRPQVQERMTVQVFQELKKVLNTEDVAVMIDGFHMCVSARGTKDITSSTVTMESGGSFREDRKWAEFMELVKPSKR

SEQ ID NO: 5317 - protein, 187 aa, Unknown
  misc_feature (1)..(187): tr|A0A1Z9RVQ7|A0A1Z9RVQ7_9BACT GTP cyclohydrolase 1 OS= bacterium TMED250 OX=1986657 GN=folE PE=3 SV=1
MNDKIEKISQITADLIESIGEDKNREGLLKTPMRSAKAWDFFTQGYSAKIDEVINDAIFDEDCNDMVVVRDIEFFSMCEHHMVPFFGRAHVGYIPNGKVIGLSKIPRIVDMFSRRLQVQERLTHQVANTVQETLEPTGVAVVMEGRHMCMQMRGVAKQNSFTTTSAMLGQFRKSNETRAEFLSFIGK

SEQ ID NO: 5318 - protein, 202 aa, Unknown
  misc_feature (1)..(202): tr|A0A1Z9TJS8|A0A1Z9TJS8_9BACT GTP cyclohydrolase 1 OS= bacterium TMED277 OX=1986659 GN=folE PE=3 SV=1
MDKNVKKETTSNKINNGVSEDDARHAIKTLLQWIGEDSEREGLVETPKRVLKAYKEWFAGYNQDPKEILSKTFSEVDGYDSLIVLRDISFSSYCEHHIAPITGKVSIGYLPKEKVVGLSKLARLVNVFAKRLQVQEKMTAQIANALQLNLQCDGVGVVMEAEHHCMCTRGVNKLGASMKTSYFTGELKKDLARREEFFRSII

SEQ ID NO: 5319 - protein, 189 aa, Unknown
  misc_feature (1)..(189): tr|A0A3R7V5Z0|A0A3R7V5Z0_9BACT GTP cyclohydrolase 1 OS= bacterium TMED46 OX=1986782 GN=folE PE=3 SV=1
MSNKQTIEQLTKALLENIGENPDREGLIKTPTRVAKAWEFISRGYNQNIDDIINGAIFNEDAKDMVIVRDIEFFSLCEHHLLPFFGKAHVGYIPNGKVIGLSKIPRIIDMYSRRLQVQERLTHQIADAIKAVLEPKGVAMVMEGRHMCMQMRGVEKQNSLASTSAMSGQFKKSAETRSEFLSIINRRSD

SEQ ID NO: 5320 - protein, 232 aa, Unknown
  misc_feature (1)..(232): tr|A0A1Z8KNU1|A0A1Z8KNU1_9BACT GTP cyclohydrolase 1 OS= bacterium TMED6 OX=1986783 GN=folE PE=3 SV=1
  misc_feature (212)..(212): Xaa can be any naturally occurring amino acid
MSKNLSDDIEILDSIKKKIDEEGDDHILTNIETPILDNAFDMSDEEKIERIQSHFEEIMLILGLDLSDDSLKGTPYRVAKMYVKEMFSGLNPSNKPNYSLFDNKYEYDKMIIEKNITFYSNCEHHFLPIIGKVHIGYISSGNVIGLSKMHRIVNYFAKRPQVQERMTVQIFNELKLVLNTDNVGLIVDADHLCVSSRGIKDITSSTITVEAXGKFKDKNHWNEFLVLTNSDK

SEQ ID NO: 5321 - protein, 188 aa, Unknown
  misc_feature (1)..(188): tr|A0A1Z8ZAC4|A0A1Z8ZAC4_9BACT GTP cyclohydrolase 1 OS= bacterium TMED80 OX=1986784 GN=folE PE=3 SV=1
MENKNIEKLTIQLLKEIGEDPSREGLLRTPKRVSKAWQFFAKGYNQDLEKIINNAIFNEDAKDMVIVRDIEFFSLCEHHLIPFFGRAHVGYLPNGKVVGLSKIPRIIDMFSRRLQVQERLTRQIAETVKDILDPVGVAVIMEGQHMCMQMRGVEKQNSWTTTSSMLGKFRESDRTRTEFLSIIGLNRT

SEQ ID NO: 5322 - protein, 210 aa, Unknown
  misc_feature (1)..(210): tr|A0A0A1PHQ4|A0A0A1PHQ4_9BACT GTP cyclohydrolase 1 OS= bacterium YEK0313 OX=1522316 GN=folE_2 PE=3 SV=1
MDAAVSTLPVHKGPEARRRRRPTREEAEAAVRTLIEWVGDDPGREGLVDTPRRMVKAWDDLFRGYHLSAAEELGTVFEEVGGYGDVVLVRDIPFFSHCEHHIVPIMGKAHIAYYPREGVVGLSKLARVVDIYARRLQTQENLTAEIVGAIEASLKPRGLAVLIEAEHMCMAMRGIQKQGVSTVTTGFTGLFKDDATEQVRFMTMVRGFRA

SEQ ID NO: 5323 - protein, 197 aa, Bacteroidaceae bacterium
  misc_feature (1)..(197): tr|A0A5C6HRZ0|A0A5C6HRZ0_9BACT GTP cyclohydrolase 1 OS= Bacteroidaceae bacterium HV4-6-C5C OX=2600309 GN=folE P E=3 SV=1
MSKKEEVVSPASVELQEHYKRIITLLGEDADREGLLRTPERVAKAMMSLTKGYRLDPHAVLRSAKFKEAYSQMVIVKDIDFFSLCEHHMLPFYGKAHVAYIPNGYITGLSKIARVVDIFSHRLQVQERMTLQIKECIQETLNPLGVMVVVEAKHMCMQMRGVEKQNSITTTSDFTGAFNQAKTREEFMNLIRHNSPI

SEQ ID NO: 5324 - protein, 199 aa, Bacteroidales bacterium
  misc_feature (1)..(199): tr|U5Q3Y7|U5Q3Y7_9BACT GTP cyclohydrolase 1 OS=Bacteroi dales bacterium CF OX=1400053 GN=folE PE=3 SV=1
MAYTKIEHYDEEVTQKLALLYKEVLHLIGEDPEREGLQLTPIRVARSIQFLTQGYEMDGAAILNSAKFKEDYKQMVIVKDIELYSMCEHHMLPFYGKAHVAYIPNGYITGLSKIARVVESYARRLQVQERLTVQIRDCIQNTLNPLGVAVVIEASHMCMQIRGVQKQNSVTTTSAFTGAFLKDIRTREEFMSLIGTSLH

SEQ ID NO: 5325 - protein, 191 aa, Bacteroidales bacterium
  misc_feature (1)..(191): tr|A0A4U1FW35|A0A4U1FW35_9BACT GTP cyclohydrolase 1 OS= Bacteroidales bacterium OX=2030927 GN=folE PE=3 SV=1
MTNQDEKIISEIAGHYREILKLIGENPDREGLQKTPLRAAKAIYDITAGYRQNPDKIATQAIFEHDGSRIVIVKDIEFYSMCEHHILPFFGKIAVGYIPKGKMIGLSKLARIVDCYARRLQVQERLTSQICKLLTTSLPNEGVIVACEAGHLCMKMRGVEKQESTTVTFDYSGKFVEDYNIRSEFLSLIKS

SEQ ID NO: 5326 - protein, 196 aa, Bacteroides acidifaciens
  misc_feature (1)..(196): tr|A0A3L8A991|A0A3L8A991_9BACE GTP cyclohydrolase 1 OS= Bacteroides acidifaciens OX=85831 GN=folE PE=3 SV=1
MLGKEEIISPNLEELKSHYHSIITLLGEDTEREGLLKTPERVAKAMLSLTKGYHMDPHEVLQSAKFQEEYSQMVIVKDIDFFSLCEHHMLPFYGKAHVAYIPNGYITGLSKIARVVDIFSHRLQVQERMTLQIKECIQETLNPLGVMVVVEAKHMCMQMRGVEKQNSITTTSDFTGAFNQAKTREEFMNLIQHGTL

SEQ ID NO: 5327 - protein, 197 aa, Bacteroides caccae
  misc_feature (1)..(197): tr|R5U1L3|R5U1L3_9BACE GTP cyclohydrolase 1 OS=Bacteroi des caccae CAG:21 OX=1263037 GN=folE PE=3 SV=1
MLGKEEIVSPNLEELKSHYHSIITLLGEDAEREGLLKTPERVAKAMLSLTKGYHMDPHEVLRSAKFQEEYSQMVIVKDIDFFSLCEHHMLPFYGKAHVAYIPNGYITGLSKIARVVDIFSHRLQVQERMTLQIKECIQETLNPLGVMVVVEAKHMCMQMRGVEKQNSITTTSDFTGAFNQAKTREEFMNLIQHGTTL

SEQ ID NO: 5328 - protein, 197 aa, Bacteroides caccae; identical to SEQ ID NO: 5327
  misc_feature (1)..(197): tr|A0A174VYI9|A0A174VYI9_9BACE GTP cyclohydrolase 1 OS= Bacteroides caccae OX=47678 GN=folE PE=3 SV=1

SEQ ID NO: 5329 - protein, 196 aa, Bacteroides caecimuri
  misc_feature (1)..(196): tr|A0A4S2DEX9|A0A4S2DEX9_9BACE GTP cyclohydrolase 1 OS= Bacteroides caecimuri OX=2516958 GN=folE PE=3 SV=1
MLEKEEIVSPNLEELKSHYRSIITLLGEDAEREGLLKTPERVAKAMLSLTKGYHMDPHEVLRSAKFQEEYSQMVIVKDIDFFSLCEHHMLPFYGKAHVAYIPNGYITGLSKIARVVDIFSHRLQVQERMTLQIKECIQETLNPLGVMVVVEAKHMCMQMRGVEKQNSITTTSDFTGAFNQAKTREEFMNLIQHGTL

SEQ ID NO: 5330 - protein, 188 aa, Bacteroides caecimuris; identical to SEQ ID NO: 5234
  misc_feature (1)..(188): tr|A0A3A9BRP8|A0A3A9BRP8_9BACE GTP cyclohydrolase 1 OS= Bacteroides caecimuris OX=1796613 GN=folE PE=3 SV=1

SEQ ID NO: 5331 - protein, 196 aa, Bacteroides caecimuris; identical to SEQ ID NO: 5329
  misc_feature (1)..(196): tr|A0A1C7GXF5|A0A1C7GXF5_9BACE GTP cyclohydrolase 1 OS= Bacteroides caecimuris OX=1796613 GN=folE PE=3 SV=1

SEQ ID NO: 5332 - protein, 197 aa, Bacteroides cellulosilyticus
  misc_feature (1)..(197): tr|E2N8U8|E2N8U8_9BACE GTP cyclohydrolase 1 OS=Bacteroi des cellulosilyticus DSM 14838 OX=537012 GN=folE PE=3 S V=1
MLGKEEIVSPALDELKEHYQRIITLLGEDAEREGLLKTPERVAKAMLSLTKGYFMDPHEVLRSAKFKEEYSQMVIVKDIDFFSLCEHHMLPFYGKAHVAYIPNGYITGLSKIARVVDIFSHRLQVQERMTLQIKECIQETLNPLGVMVVVEAKHMCMQMRGVEKQNSITTTSDFTGAFNQAKTREEFMNLIRQNSFT

SEQ ID NO: 5333 - protein, 197 aa, Bacteroides cellulosilyticus; identical to SEQ ID NO: 5332
  misc_feature (1)..(197): tr|R6L6I1|R6L6I1_9BACE GTP cyclohydrolase 1 OS=Bacteroi des cellulosilyticus CAG:158 OX=1263038 GN=folE PE=3 SV =1

SEQ ID NO: 5334 - protein, 195 aa, Bacteroides clarus
  misc_feature (1)..(195): tr|F3PKV1|F3PKV1_9BACE GTP cyclohydrolase 1 OS=Bacteroi des clarus YIT 12056 OX=762984 GN=folE PE=3 SV=1
MLGKEEIVSPSLDELKEHYHRILTLLGEDPEREGLLKTPERVAKAMLTLTKGYSMDPHEVLRSAKFKEDYNQMVIVKDIDFFSLCEHHMLPFYGKAHVAYIPNGYITGLSKIARVVDIFSHRLQVQERMTLQIKECIQETLNPLGVMVVVEAKHMCMQMRGVEKQNSITTTSDFTGAFNQAKTREEFMNLIRHNS

SEQ ID NO: 5335 - protein, 195 aa, Bacteroides clarus; identical to SEQ ID NO: 5334
  misc_feature (1)..(195): tr|A0A1Y4JM78|A0A1Y4JM78_9BACE GTP cyclohydrolase 1 OS= Bacteroides clarus OX=626929 GN=folE PE=3 SV=1

SEQ ID NO: 5336 - protein, 189 aa, Bacteroides coprocola
  misc_feature (1)..(189): tr|A0A412GVN3|A0A412GVN3_9BACE GTP cyclohydrolase 1 OS= Bacteroides coprocola OX=310298 GN=folE PE=3 SV=1
MKFPEEKVQKLMSHYKEILSLLGEDPEREGLLKTPERVAKAMLTLTRGYEVDPKEVLRAAKFKEEYSQMVIVKDIDFFSMCEHHMLPFYGKAHVAYIPNGYITGLSKIARVVDIFSHRLQVQERMTLQIKECIQETLNPLGVMVVVEAKHMCMQMRGVEKQNSVTTTSDFTGAFNQAKTREEFMNLIGR

SEQ ID NO: 5337 - protein, 195 aa, Bacteroides coprocola
  misc_feature (1)..(195): tr|B3JJU4|B3JJU4_9BACE GTP cyclohydrolase 1 OS=Bacteroi des coprocola DSM 17136 OX=470145 GN=folE PE=3 SV=1
MIDTNLMKFPEEKVQKLMSHYKEILSLLGEDPEREGLLKTPERVAKAMLTLTRGYEVDPKEVLRAAKFKEEYSQMVIVKDIDFFSMCEHHMLPFYGKVHVAYIPNGYITGLSKIARVVDIFSHRLQVQERMTLQIKECIQETLNPLGVMVVVEAKHMCMQMRGVEKQNSVTTTSDFTGAFNQAKTREEFMNLIGR

SEQ ID NO: 5338 - protein, 197 aa, Bacteroides coprophilus
  misc_feature (1)..(197): tr|R6T4X3|R6T4X3_9BACE GTP cyclohydrolase 1 OS=Bacteroi des coprophilus CAG:333 OX=1263041 GN=folE PE=3 SV=1
MIDTNLVNWPEERVAKLMSHYKEILSLLGEDPEREGLLKTPERVAKAMLTLTRGYEVDPKAVLNAAKFKEPYSQMVIVKDIDFFSMCEHHMLPFYGKAHVAYIPNGYITGLSKIARVVDIFSHRLQVQERMTLQIKECIQETLNPLGVMVVVEAKHMCMQMRGVEKQNSVTTTSDFTGAFNQAKTREEFMNLIRNRQ

SEQ ID NO: 5339 - protein, 197 aa, Bacteroides coprophilus; identical to SEQ ID NO: 5338
  misc_feature (1)..(197): tr|S0FAB3|S0FAB3_9BACE GTP cyclohydrolase 1 OS=Bacteroi des coprophilus DSM 18228 = JCM 13818 OX=547042 GN=folE PE=3 SV=1

SEQ ID NO: 5340 - protein, 196 aa, Bacteroides coprosuis
  misc_feature (1)..(196): tr|F3ZPJ8|F3ZPJ8_9BACE GTP cyclohydrolase 1 OS=Bacteroi des coprosuis DSM 18011 OX=679937 GN=folE PE=3 SV=1
MQNKDNFDALQSEIKSLKEHYTEVLSLLGEDPEREGLIKTPERVAKAMLTLTRGYRMDPHEVLMSARFKEDYKQMVIVKDIDFFSLCEHHMLPFYGKAHVAYIPSGYITGLSKIARVVDVFSHRLQVQERMTLQIKECIQEALNPLGVMVVIEAKHMCMQMRGVEKQNSITTTSDFTGAFNQAKTREEFMNLIRQK

SEQ ID NO: 5341 - protein, 197 aa, Bacteroides dorei
  misc_feature (1)..(197): tr|A0A5C6L192|A0A5C6L192_9BACE GTP cyclohydrolase 1 OS= Bacteroides dorei OX=357276 GN=folE PE=3 SV=1
MEELLHPEWSAEKIEQLKGHYQSILSLLGEDVEREGLLKTPERVAKAMLTLTRGYEQDPHAILLGAKFKEEYSQMVIVKDIDFFSLCEHHMLPFYGKAHVAYIPNGYITGLSKIARVVDVFSHRLQVQERMTLQIKECIQETLNPLGVMVVVEAKHMCMQMRGVEKQNAITTTSDFTGAFNQAKTREEFMNLIRHNR

SEQ ID NO: 5342 - protein, 197 aa, Bacteroides dorei
  misc_feature (1)..(197): tr|I9QH88|I9QH88_9BACE GTP cyclohydrolase 1 OS=Bacteroi des dorei CL02T12C06 OX=997876 GN=folE PE=3 SV=1
MEELLHPEWSAEKIEQLKGHYQSILSLLGEDVEREGLLKTPERVAKAMLTLTRGYEQDPHAILLGAKFKEEYSQMVIVKDIDFFSLCEHHMLPFYGKAHVAYIPNGYITGLSKIARVVDVFSHRLQVQERMTLQIKECIQETLNPLGVMVVVEAKHMCMQMRGVEKQNAITTTSDFTGAFNQAKTREEFMDLIRHNR

SEQ ID NO: 5343 - protein, 195 aa, Bacteroides eggerthii; identical to SEQ ID NO: 5334
  misc_feature (1)..(195): tr|R5K6Y2|R5K6Y2_9BACE GTP cyclohydrolase 1 OS=Bacteroi des eggerthii CAG:109 OX=1263043 GN=folE PE=3 SV=1

SEQ ID NO: 5344 - protein, 195 aa, Bacteroides eggerthii; identical to SEQ ID NO: 5334
  misc_feature (1)..(195): tr|A0A380ZCW8|A0A380ZCW8_9BACE GTP cyclohydrolase 1 OS= Bacteroides eggerthii OX=28111 GN=folE PE=3 SV=1

SEQ ID NO: 5345 - protein, 196 aa, Bacteroides faecichinchillae
  misc_feature (1)..(196): tr|A0A1M5AQ96|A0A1M5AQ96_9BACE GTP cyclohydrolase 1 OS= Bacteroides faecichinchillae OX=871325 GN=folE PE=3 SV= 1
MLEKEEIDSPNLEELKSHYRSIITLLGEDVEREGLLKTPERVAKAMLSLTKGYHMDPHEVLRSAKFKEEYSQMVIVKDIDFFSLCEHHMLPFYGKAHVAYIPNGYITGLSKIARVVDIFSHRLQVQERMTLQIKECIQETLNPLGVMVVVEAKHMCMQMRGVEKQNSITTTSDFTGAFNQAKTREEFMNLIQHGYL

SEQ ID NO: 5346 - protein, 196 aa, Bacteroides faecis
  misc_feature (1)..(196): tr|A0A1H2QJ79|A0A1H2QJ79_9BACE GTP cyclohydrolase 1 OS= Bacteroides faecis MAJ27 OX=1077285 GN=folE PE=3 SV=1
MLEKEEIVSPNLEELKSHYHSIITLLGEDAGREGLLKTPERVAKAMLSLTKGYHMDPHEVLRSAKFQEEYSQMVIVKDIDFFSLCEHHMLPFYGKAHVAYIPNGYITGLSKIARVVDIFSHRLQVQERMTLQIKDCIQETLNPLGVMVVVEAKHMCMQMRGVEKQNSITTTSDFTGAFNQAKTREEFMNLIQHGRV

SEQ ID NO: 5347 - protein, 196 aa, Bacteroides faecis; identical to SEQ ID NO: 5346
  misc_feature (1)..(196): tr|R6UTX0|R6UTX0_9BACE GTP cyclohydrolase 1 OS=Bacteroi des faecis CAG:32 OX=1263044 GN=folE PE=3 SV=1

SEQ ID NO: 5348 - protein, 195 aa, Bacteroides finegoldii
  misc_feature (1)..(195): tr|A0A174BE39|A0A174BE39_9BACE GTP cyclohydrolase 1 OS= Bacteroides finegoldii OX=338188 GN=folE PE=3 SV=1
MLEKEEIVSPNLEELKNHYRSIITLLGEDAEREGLLKTPERVAKAMLSLTKGYHIDPHEVLRSAKFKEEYSQMVIVKDIDFFSLCEHHMLPFYGKAHVAYIPNGYITGLSKIARVVDIFSHRLQVQERMTLQIKECIQETLNPLGVMVVVEAKHMCMQMRGVEKQNSITTTSDFTGAFNQAKTREEFMNLIQHGS

SEQ ID NO: 5349 - protein, 195 aa, Bacteroides finegoldii
  misc_feature (1)..(195): tr|R6RPN5|R6RPN5_9BACE GTP cyclohydrolase 1 OS=Bacteroi des finegoldii CAG:203 OX=1263045 GN=folE PE=3 SV=1
MLEKEEIVSPNLEELKNHYRSIITLLGEDAEREGLLKTPERVAKAMLSLTKGYHIDPHEVLRSAKFKEEYSQMVIVKDIDFFSLCEHHMLPFYGKAHVAYIPNGYITGLSKIARVVDIFSHRLQVQERMTLQIKECIQETLNPLGVMVVVEAKHMCMQMRGVEKQNSITTTSDFTGAFNQAKTREEFMNLIQHRS

SEQ ID NO: 5350 - protein, 195 aa, Bacteroides fluxus
  misc_feature (1)..(195): tr|F3PUH4|F3PUH4_9BACE GTP cyclohydrolase 1 OS=Bacteroi des fluxus YIT 12057 OX=763034 GN=folE PE=3 SV=1
MLGKEEIVSPSLDELKEHYQRILTLLGEDPGREGLLKTPERVAKAMLSLTKGYYMDPHEVLRSAKFQEEYSQMVIVKDIDFFSLCEHHMLPFYGKAHVAYIPNGYITGLSKIARVVDIFSHRLQVQERMTLQIKECIQETLNPLGVMVVVEAKHMCMQMRGVEKQNSVTTTSDFTGAFNQAKTREEFMNLIRHNS

SEQ ID NO: 5351 - protein, 194 aa, Bacteroides fragilis
  misc_feature (1)..(194): sp|Q64P85|GCH1_BACFR GTP cyclohydrolase 1 OS=Bacteroide s fragilis (strain YCH46) OX=295405 GN=folE PE=3 SV=1
MLEKEEIISPALEDLKNHYRSIITLLGEDAEREGLLKTPERVAKAMLTLTKGYHMDPHEVLRSAKFQEEYSQMVIVKDIDFFSLCEHHMLPFYGKAHVAYIPNGYITGLSKIARVVDIFSHRLQVQERMTLQIKECIQETLNPLGVMVVVEAKHMCMQMRGVEKQNSVTTTSDFTGAFNQAKTREEFMNLIRQR

SEQ ID NO: 5352 - protein, 194 aa, Bacteroides fragilis
  misc_feature (1)..(194): tr|A0A081TUQ8|A0A081TUQ8_BACFG GTP cyclohydrolase 1 OS= Bacteroides fragilis OX=817 GN=folE PE=3 SV=1
MLEKEEINSPALEDLKKHYRSIITLLGEDAEREGLLKTPERVAKAMLTLTKGYHMDPHEVLRSAKFQEEYSQMVIVKDIDFFSLCEHHMLPFYGKAHVAYIPNGYITGLSKIARVVDIFSHRLQVQERMTLQIKECIQETLNPLGVMVVVEAKHMCMQMRGVEKQNSVTTTSDFTGAFNQAKTREEFMNLIRQR

SEQ ID NO: 5353 - protein, 194 aa, Bacteroides graminisolvens
  misc_feature (1)..(194): tr|A0A069D3H9|A0A069D3H9_9BACE GTP cyclohydrolase 1 OS= Bacteroides graminisolvens DSM 19988 = JCM 15093 OX=112 1097 GN=folE PE=3 SV=1
MLDKEEVNSPHLEELMGHYRGIISLLGEDVQREGLLKTPERVAKAMLTLTKGYTMDPHEVLRSAKFKEEYSQMVIVKDIDFFSLCEHHMLPFYGKVHVAYIPNGYITGLSKIARVVDIFSHRLQVQERMTLQIKECIQQTLNPLGVMVVVEAKHMCMQMRGVEKQNSITTTSDFTGAFNQAKTREEFMNLIMHK

SEQ ID NO: 5354 - protein, 194 aa, Bacteroides graminisolvens
  misc_feature (1)..(194): tr|A0A351M2J6|A0A351M2J6_9BACE GTP cyclohydrolase 1 OS= Bacteroides graminisolvens OX=477666 GN=folE PE=3 SV=1
MLDKEEVNSPHLEELMGHYHSIISLLGEDAQREGLLKTPERVAKAMLTLTKGYTMNPHEVLSSAKFKEEYSQMVIVKDIDFFSLCEHHMLPFYGKVHVAYIPNGYITGLSKIARVVDIFSHRLQVQERMTLQIKECIQQTLNPLGVMVVVEAKHMCMQMRGVEKQNAITTTSDFTGAFNQAKTREEFMNLIMHK

SEQ ID NO: 5355 - protein, 195 aa, Bacteroides helcogenes
  misc_feature (1)..(195): tr|E6SRU9|E6SRU9_BACT6 GTP cyclohydrolase 1 OS=Bacteroi des helcogenes (strain ATCC 35417 / DSM 20613 / JCM 629 7 / P 36-108) OX=693979 GN=folE PE=3 SV=1
MLGKEEIVSPSLDELKEHYHRILTLLGEDPSREGLLKTPERVAKAMLSLTKGYFMDPHEVLRSAKFQEEYSQMVIVKDIDFFSLCEHHMLPFYGKAHVAYIPNGYITGLSKIARVVDIFSHRLQVQERMTLQIKDCIQETLNPLGVMVVVEAKHMCMQMRGVEKQNSVTTTSDFTGAFNQAKTREEFMNLIRHNS

SEQ ID NO: 5356 - protein, 195 aa, Bacteroides heparinolyticus
  misc_feature (1)..(195): tr|A0A3P2AEW7|A0A3P2AEW7_9BACE GTP cyclohydrolase 1 OS= Bacteroides heparinolyticus OX=28113 GN=folE PE=3 SV=1
MLGKEEIVSPSLDELKEHYHRILTLLGEDAGREGLQKTPERVAKAMLSLTKGYYMDPHEVLRSAKFQEEYSQMVIVKDIDFFSLCEHHMLPFYGRAHVAYIPNGYITGLSKIARVVDIFSHRLQVQERMTLQIKECIQDTLNPLGVMVVVEAKHMCMQMRGVEKQNSITTTSDFTGAFNQAKTREEFMNLIRNNS

SEQ ID NO: 5357 - protein, 195 aa, Bacteroides heparinolyticus
  misc_feature (1)..(195): tr|A0A2R3MQX9|A0A2R3MQX9_9BACE GTP cyclohydrolase 1 OS= Bacteroides heparinolyticus OX=28113 GN=folE PE=3 SV=1
MLGKEEIVSPSLDELKEHYHRILTLLGEDAEREGLQKTPERVAKAMLSLTKGYYMDPHEVLRSAKFQEEYSQMVIVKDIDFFSLCEHHMLPFYGRAHVAYIPNGYITGLSKIARVVDIFSHRLQVQERMTLQIKECIQDTLNPLGVMVVVEAKHMCMQMRGVEKQNSITTTSDFTGAFNQAKTREEFMNLIRNNS

SEQ ID NO: 5358 - protein, 197 aa, Bacteroides intestinalis
  misc_feature (1)..(197): tr|A0A415A9F8|A0A415A9F8_9BACE GTP cyclohydrolase 1 OS= Bacteroides intestinalis OX=329854 GN=folE PE=3 SV=1
MLGKEEIVSPALDELKEHYQRIITLLGEDAEREGLLKTPERVAKAMLSLTKGYFMDPHEVLRSAKFKEEYSQMVIVKDIDFFSLCEHHMLPFYGKAHVAYIPNGYITGLSKIARVVDIFSHRLQVQERMTLQIKECIQETLNPLGVMVVVEAKHMCMQMRGVEKQNSITTTSDFTGAFNQAKTREEFMNLIRQNSFI

SEQ ID NO: 5359 - protein, 197 aa, Bacteroides intestinalis; identical to SEQ ID NO: 5332
  misc_feature (1)..(197): tr|A0A139LST1|A0A139LST1_9BACE GTP cyclohydrolase 1 OS= Bacteroides intestinalis OX=329854 GN=folE PE=3 SV=1

SEQ ID NO: 5360 - protein, 194 aa, Bacteroides luti
  misc_feature (1)..(194): tr|A0A1M5FIZ5|A0A1M5FIZ5_9BACE GTP cyclohydrolase 1 OS= Bacteroides luti OX=1297750 GN=folE PE=3 SV=1
MMTKEEALNFQIEELKKNYHNILEILGEDVNREGLLKTPERVAKAMITLTRGYGEDPHEVLRSAKFKEDYNQMVIVKDIDFFSLCEHHIIPFYGKVHVAYIPNGYITGLSKIARVVDIFSHRLQVQERMTLQIKECIQQTLNPLGVMVVVEAKHMCMQMRGVEKQNAITTTSDFSGAFKNATTRSEFMDLIAHK

SEQ ID NO: 5361 - protein, 197 aa, Bacteroides massiliensis
  misc_feature (1)..(197): tr|U6RBW3|U6RBW3_9BACE GTP cyclohydrolase 1 OS=Bacteroi des massiliensis B84634 = Timone 84634 = DSM 17679 = JC M 13223 OX=1121098 GN=folE PE=3 SV=1
MEELLHPEWSAEKIEQLKGHYESILSLLGEDVEREGLLKTPERVAKAMLTLTRGYEQDPHAILLGAKFKEEYSQMVIVKDIDFFSLCEHHMLPFYGKAHVAYIPNGYITGLSKIARVVDVFSHRLQVQERMTLQIKECIQETLNPLGVMVVVEAKHMCMQMRGVEKQNAITTTSDFTGAFNQAKTREEFMNLIRHQR

SEQ ID NO: 5362 - protein, 193 aa, Bacteroides nordii
  misc_feature (1)..(193): tr|I9RPS8|I9RPS8_9BACE GTP cyclohydrolase 1 OS=Bacteroi des nordii CL02T12C05 OX=997884 GN=folE PE=3 SV=1
MLGKEEIVSPALEDLKSHYRSIITLLGEDAEREGLLKTPERVAKAMLSLTKGYHLDPHEVLRSAKFKEEYSQMVIVKDIDFFSLCEHHMLPFYGKAHVAYIPNGYITGLSKIARVVDIFSHRLQVQERMTLQIKECIQETLNPLGVMVVVEAQHMCMQMRGVEKQNSITTTSDFTGAFNQAKTREEFMNLINR

SEQ ID NO: 5363 - protein, 193 aa, Bacteroides nordii; identical to SEQ ID NO: 5362
  misc_feature (1)..(193): tr|A0A413VAM1|A0A413VAM1_9BACE GTP cyclohydrolase 1 OS= Bacteroides nordii OX=291645 GN=folE PE=3 SV=1

SEQ ID NO: 5364 - protein, 199 aa, Bacteroides oleiciplenus
  misc_feature (1)..(199): tr|A0A3E5BRU3|A0A3E5BRU3_9BACE GTP cyclohydrolase 1 OS= Bacteroides oleiciplenus OX=626931 GN=folE PE=3 SV=1
MLGKEEIVSPALDELKEHYHRIITLLGEDAEREGLLKTPERVAKAMLSLTKGYFMDPHEVLRSAKFKEEYSQMVIVKDIDFFSLCEHHMLPFYGKAHVAYIPNGYITGLSKIARVVDIFSHRLQVQERMTLQIKECIQETLNPLGVMVVVEAKHMCMQMRGVEKQNSVTTTSDFTGAFNQAKTREEFMNLIRQNSFTLL

SEQ ID NO: 5365 - protein, 197 aa, Bacteroides oleiciplenus
  misc_feature (1)..(197): tr|A0A1Q6G2W5|A0A1Q6G2W5_9BACE GTP cyclohydrolase 1 OS= Bacteroides oleiciplenus OX=626931 GN=folE PE=3 SV=1
MLGKEEIVSPALDELKEHYHRIITLLGEDAEREGLLKTPERVAKAMLSLTKGYYMDPHEVLRSAKFKEEYSQMVIVKDIDFFSLCEHHMLPFYGKAHVAYIPNGYITGLSKIARVVDIFSHRLQVQERMTLQIKECIQETLNPLGVMVVVEAKHMCMQMRGVEKQNSITTTSDFTGAFNQAKTREEFMNLIHHKAGF

SEQ ID NO: 5366 - protein, 196 aa, Bacteroides ovatus
  misc_feature (1)..(196): tr|I9H6M7|I9H6M7_BACOV GTP cyclohydrolase 1 OS=Bacteroi des ovatus CL02T12C04 OX=997885 GN=folE PE=3 SV=1
MLEKEEIVSPNLEELKSHYRSIITLLGEDAEREGLLKTPERVAKAMLSLTKGYHMDPHEVLRSAKFQEEYSQMVIVKDIDFFSLCEHHMLPFYGKAHVAYIPNGYITGLSKIARVVDIFSHRLQVQERMTLQIKECIQETLNPLGVMVVVEAKHMCMQMRGVEKQNSITTTSDFTGAFNQAKTREEFMNLIQHGRV

SEQ ID NO: 5367 - protein, 197 aa, Bacteroides ovatus
  misc_feature (1)..(197): tr|A0A413VFQ2|A0A413VFQ2_BACOV GTP cyclohydrolase I Fol E OS=Bacteroides ovatus OX=28116 GN=DW890_01905 PE=4 SV =1
METKSTDTKDIECAVRTILSYIGDNPEREGLKGTPERIVRMWKELFRGYDPEQAPKITTFPNGKDGLSFNSIVADSGNYYSMCEHHMMPFFGKYWFAYIPNSEGSILGISKIGRVIDYCAARLQVQERLAQDVVTMIVDALGKEHPPLAVGIIMEGEHLCKTMRGVKKQGKMRSSFYFDNGRLPELKAELSQFASFG

SEQ ID NO: 5368 - protein, 197 aa, Bacteroides plebeius
  misc_feature (1)..(197): tr|A0A3E4MT38|A0A3E4MT38_9BACE GTP cyclohydrolase 1 OS= Bacteroides plebeius OX=310297 GN=folE PE=3 SV=1
MTDTNSINWPQEKVEKLVGHYKEILSLLGEDPEREGLLKTPERVAKAMLTLTRGYEMDPREVLNAAKFKEPYSQMVIVKDIDFFSMCEHHMLPFYGKAHVAYIPNGYITGLSKIARVVDIFSHRLQVQERMTLQIKECIQETLNPLGVMVVVDAKHMCMQMRGVEKQNSVTTTSDFTGAFNQAKTREEFMNLIRAKY

SEQ ID NO: 5369 - protein, 197 aa, Bacteroides plebeius
  misc_feature (1)..(197): tr|A0A3E4Z6J2|A0A3E4Z6J2_9BACE GTP cyclohydrolase 1 OS= Bacteroides plebeius OX=310297 GN=folE PE=3 SV=1
MTDTSSINWPQEKVEKLVGHYKEILSLLGEDPEREGLLKTPERVAKAMLTLTRGYEMDPREVLNAAKFKEPYSQMVIVKDIDFFSMCEHHMLPFYGKAHVAYIPNEYITGLSKIARVVDIFSHRLQVQERMTLQIKECIQETLNPLGVMVVVEAKHMCMQMRGVEKQNSVTTTSDFTGAFNQAKTREEFMNLIRAKY

SEQ ID NO: 5370 - protein, 196 aa, Bacteroides pyogenes
  misc_feature (1)..(196): tr|W4P9I2|W4P9I2_9BACE GTP cyclohydrolase 1 OS=Bacteroi des pyogenes JCM 6292 OX=1235809 GN=folE PE=3 SV=1
MFEKEKNYSPNLEELKSHYRSVITLLGEDADREGLLKTPERVAKAMLNLTHGYRVDPHEVLLSAKFKEEYSQMVIVKDIDFFSLCEHHMLPFYGKAHVAYIPNGYITGLSKIARVVDIFSHRLQVQERMTLQIKQCIQDTLNPLGVMVVVEAKHMCMQMRGVEKQNSITTTSDFTGAFNQAKTREEFMNLIQHGSL

SEQ ID NO: 5371 - protein, 196 aa, Bacteroides pyogenes; identical to SEQ ID NO: 5370
  misc_feature (1)..(196): tr|A0A5D3FF99|A0A5D3FF99_9BACE GTP cyclohydrolase 1 OS= Bacteroides pyogenes OX=310300 GN=folE PE=3 SV=1

SEQ ID NO: 5372 - protein, 196 aa, Bacteroides reticulotermitis
  misc_feature (1)..(196): tr|W4UMT5|W4UMT5_9BACE GTP cyclohydrolase 1 OS=Bacteroi des reticulotermitis JCM 10512 OX=1445607 GN=folE PE=3 SV=1
MLEKEEIISPNLEELKSHYRSIIGLLGEDVEREGLLKTPERVAKAMLSLTKGYHMNPHEVLLSAKFKEEYSQMVIVKDIDFFSLCEHHMLPFYGKAHVAYIPNGYITGLSKIARVVDIFSHRLQVQERMTLQIKECIQQTLNPLGVMVVIEAKHMCMQMRGVEKQNSITTTSDFTGAFNQAKTREEFMNLIQHGTL

SEQ ID NO: 5373 - protein, 195 aa, Bacteroides salanitronis
  misc_feature (1)..(195): tr|F0R868|F0R868_BACSH GTP cyclohydrolase 1 OS=Bacteroi des salanitronis (strain DSM 18170 / JCM 13567 / BL78) OX=667015 GN=folE PE=3 SV=1
MIDTDLLKFPEEKVQKLMAHYKEILALLGEDTGREGLLKTPERVAKAMLTLTRGYDVDPKEILLGAKFKEEYSQMVVVKDIDFFSMCEHHMLPFYGKAHVAYIPNGYITGLSKIARVVDVFSHRLQVQERMTLQIKECIQETLHPLGVMVVVEAKHMCMQMRGVEKQNSITTTSDFTGAFNQAKTREEFMNLIRK

SEQ ID NO: 5374 - protein, 193 aa, Bacteroides salyersiae
  misc_feature (1)..(193): tr|I9SLG3|I9SLG3_9BACE GTP cyclohydrolase 1 OS=Bacteroi des salyersiae CL02T12C01 OX=997887 GN=folE PE=3 SV=1
MLEKEEIVSPALEDLKSHYRSIITLLGEDAEREGLLKTPERVAKAMLSLTKGYHMDPHEVLRSAKFKEEYSQMVIVKDIDFFSLCEHHMLPFYGKAHVAYIPNGYITGLSKIARVVDIFSHRLQVQERMTLQIKECIQETLNPLGVMVVVEAKHMCMQMRGVEKQNSITTTSDFTGAFNQAKTREEFMNLINR

SEQ ID NO: 5375 - protein, 193 aa, Bacteroides salyersiae; identical to SEQ ID NO: 5374
  misc_feature (1)..(193): tr|A0A4Q5FBH8|A0A4Q5FBH8_9BACE GTP cyclohydrolase 1 OS= Bacteroides salyersiae OX=291644 GN=folE PE=3 SV=1

SEQ ID NO: 5376 - protein, 197 aa, Bacteroides sartorii; identical to SEQ ID NO: 5341
  misc_feature (1)..(197): tr|R9IKF0|R9IKF0_9BACE GTP cyclohydrolase 1 OS=Bacteroi des sartorii OX=671267 GN=folE PE=3 SV=1

SEQ ID NO: 5377 - protein, 195 aa, Bacteroides sp.
  misc_feature (1)..(195): tr|A0A285SE22|A0A285SE22_9BACE GTP cyclohydrolase 1 OS= Bacteroides sp. AR29 OX=93975 GN=folE PE=3 SV=1
MLGKEEIVSPSLDELKEHYHRILTLLGEDAEREGLQKTPERVAKAMLSLTKGYYMDPHEVLRSAKFQEEYSQMVIVKDIDFFSLCEHHMLPFYGKAHVAYIPNGYITGLSKIARVVDIFSHRLQVQERMTLQIKECIQETLNPLGVMVVVEAKHMCMQMRGVEKQNSITTTSDFTGAFNQAKTREEFMNLIRHNS

SEQ ID NO: 5378 - protein, 196 aa, Bacteroides sp.
  misc_feature (1)..(196): tr|R6CV98|R6CV98_9BACE GTP cyclohydrolase 1 OS=Bacteroi des sp. CAG:530 OX=1262741 GN=folE PE=3 SV=1
MIDTNLLKFPEDKIQKLMGHYKEILTLLGEDPEREGLVKTPERVAKAMLTLTRGYEVDPKEVLLAAKFKEEYSQMVIVKDIDFFSMCEHHMLPFYGKVHVAYIPNGYITGLSKIARVVDIFSHRLQVQERMTLQIKECIQETLNPLGVMVVVEAKHMCMQMRGVEKQNSITTTSDFTGAFNRATTREEFMNLINRK

SEQ ID NO: 5379 - protein, 197 aa, Bacteroides stercorirosoris; identical to SEQ ID NO: 5365
  misc_feature (1)..(197): tr|A0A1M6K8D6|A0A1M6K8D6_9BACE GTP cyclohydrolase 1 OS= Bacteroides stercorirosoris OX=871324 GN=folE PE=3 SV=1

SEQ ID NO: 5380 - protein, 195 aa, Bacteroides stercoris
  misc_feature (1)..(195): tr|S3YCI9|S3YCI9_BACSE GTP cyclohydrolase 1 OS=Bacteroi des stercoris CC31F OX=1073351 GN=folE PE=3 SV=1
MLGKEEIVSPSLDELKEHYHHILTLLGEDPEREGLLKTPERVAKAMLALTKGYSMDPHEVLRSAKFKEDYNQMVIVKDIDFFSLCEHHMLPFYGKAHVAYIPNGYITGLSKIARVVDIFSHRLQVQERMTLQIKECIQETLNPLGVMVVVEAKHMCMQMRGVEKQNSITTTSDFTGAFNQAKTREEFMNLIRHTS

SEQ ID NO: 5381 - protein, 195 aa, Bacteroides stercoris; identical to SEQ ID NO: 5380
  misc_feature (1)..(195): tr|B0NVZ6|B0NVZ6_BACSE GTP cyclohydrolase 1 OS=Bacteroi des stercoris ATCC 43183 OX=449673 GN=folE PE=3 SV=1

SEQ ID NO: 5382 - protein, 196 aa, Bacteroides thetaiotaomicron; identical to SEQ ID NO: 5346
  misc_feature (1)..(196): sp|Q8A0U0|GCH1_BACTN GTP cyclohydrolase 1 OS=Bacteroide s thetaiotaomicron (strain ATCC 29148 / DSM 2079 / NCTC 10582 / E50 / VPI-5482) OX=226186 GN=folE PE=3 SV=1

SEQ ID NO: 5383 - protein, 196 aa, Bacteroides thetaiotaomicron; identical to SEQ ID NO: 5346
  misc_feature (1)..(196): tr|R7KI31|R7KI31_9BACE GTP cyclohydrolase 1 OS=Bacteroi des thetaiotaomicron CAG:40 OX=1263054 GN=folE PE=3 SV= 1

SEQ ID NO: 5384 - protein, 195 aa, Bacteroides uniformis
  misc_feature (1)..(195): tr|A7V6P7|A7V6P7_BACUC GTP cyclohydrolase 1 OS=Bacteroi des uniformis (strain ATCC 8492 / DSM 6597 / CIP 103695 / JCM 5828 / NCTC 13054 / VPI 0061) OX=411479 GN=folE PE=3 SV=1
MLGKEEIVSPSLDELKEHYHRILTLLGEDAGREGLQKTPERVAKAMLSLTKGYHMDPHEVLRSAKFQEEYSQMVIVKDIDFFSLCEHHMLPFYGKAHVAYIPNGYITGLSKIARVVDIFSHRLQVQERMTLQIKECIQETLNPLGVMVVVEAKHMCMQMRGVEKQNSITTTSDFTGAFNQAKTREEFMNLIRHNS

SEQ ID NO: 5385 - protein, 195 aa, Bacteroides uniformis; identical to SEQ ID NO: 5384
  misc_feature (1)..(195): tr|A0A078S2W1|A0A078S2W1_BACUN GTP cyclohydrolase 1 OS= Bacteroides uniformis str. 3978 T3 ii OX=1339349 GN=fol E PE=3 SV=1

SEQ ID NO: 5386 - protein, 193 aa, Bacteroides vulgatus
  misc_feature (1)..(193): tr|A0A069SGW6|A0A069SGW6_BACVU GTP cyclohydrolase 1 OS= Bacteroides vulgatus str. 3975 RP4 OX=1339352 GN=folE P E=3 SV=1
MHPEWSAEKIEQLKGHYQSILSLLGEDVEREGLLKTPERVAKAMLTLTRGYEQDPHAILLGAKFKEEYSQMVIVKDIDFFSLCEHHMLPFYGKAHVAYIPNGYITGLSKIARVVDVFSHRLQVQERMTLQIKECIQETLNPLGVMVVVEAKHMCMQMRGVEKQNAITTTSDFTGAFNQAKTREEFMNLIRHNR

SEQ ID NO: 5387 - protein, 197 aa, Bacteroides vulgatus; identical to SEQ ID NO: 5341
  misc_feature (1)..(197): tr|A0A0P0M623|A0A0P0M623_BACVU GTP cyclohydrolase 1 OS= Bacteroides vulgatus OX=821 GN=folE PE=3 SV=1

SEQ ID NO: 5388 - protein, 196 aa, Bacteroides xylanisolvens; identical to SEQ ID NO: 5366
  misc_feature (1)..(196): tr|D4VHK8|D4VHK8_9BACE GTP cyclohydrolase 1 OS=Bacteroi des xylanisolvens SD CC 1b OX=702447 GN=folE PE=3 SV=1

SEQ ID NO: 5389 - protein, 196 aa, Bacteroides xylanisolvens; identical to SEQ ID NO: 5329
  misc_feature (1)..(196): tr|I9ALB9|I9ALB9_9BACE GTP cyclohydrolase 1 OS=Bacteroi des xylanisolvens CL03T12C04 OX=997892 GN=folE PE=3 SV= 1

SEQ ID NO: 5390 - protein, 188 aa, Bacteroides xylanolyticus
  misc_feature (1)..(188): tr|A0A2S6HN02|A0A2S6HN02_9BACE GTP cyclohydrolase 1 OS= Bacteroides xylanolyticus OX=384636 GN=folE PE=3 SV=1
MDKERIRFAVRELLIAIGEDPDREGLKETPERISNMYSEIFAGLETSPQSVLKYFGESCTEEMVVVKDIPFYSMCEHHLLPFYGTASICYIPAPGRLLGLSKLARVVDICAKKPQLQERLGAEIVNILENDAQAIGAAILIKAEHLCMNMRGIRKPGTKTVTTCFAGIFKTDDKARKEALQLLSLEKD

SEQ ID NO: 5391 - protein, 188 aa, Bacteroides xylanolyticus
  misc_feature (1)..(188): tr|A0A2S6HN84|A0A2S6HN84_9BACE GTP cyclohydrolase 1 OS= Bacteroides xylanolyticus OX=384636 GN=folE PE=3 SV=1
MAIDTEAIQTHVRGILKALGEDPDREGLKETPSRVAKMYGEVFEGINYSNQEIALMFGKTFEEDMDTNGAGDDMVVVKDIEVFSYCEHHMALMYDMKVAVAYIPNGKVIGLSKIARIADMVARRLQLQERIGSDIAEIMAEVTGSEDIEVVIEGSHSCMTARGIKSFSARTKTVTLRGRFKTEPELRI

SEQ ID NO: 5392 - protein, 195 aa, Bacteroides zoogleoformans
  misc_feature (1)..(195): tr|A0A562UZR3|A0A562UZR3_9BACE GTP cyclohydrolase 1 OS= Bacteroides zoogleoformans OX=28119 GN=folE PE=3 SV=1
MLEKEEIASPSLNQLKEHYHRILTLLGEDAEREGLLKTPERVAKAMLSLTKGYHMDPHEVLRSAKFQEEYSQMVIVKDIDFFSLCEHHMLPFYGKAHVAYIPNGYITGLSKIARVVDIFSHRLQVQERMTLQIKECIQATLNPLGVMVVVEAKHMCMQMRGVEKQNSITTTSDFTGAFNQAKTREEFMNLIRNNS

SEQ ID NO: 5393 - protein, 219 aa, Bacteroidetes bacterium
  misc_feature (1)..(219): tr|A0A2T2TRW5|A0A2T2TRW5_9BACT GTP cyclohydrolase 1 OS= Bacteroidetes bacterium QH_2_63_10 OX=1919092 GN=folE P E=3 SV=1
MAEKKIPSDTLRENGTPDGGPPKLYERRDVYDEETTEALADHVSSILDILGEDPSREGLEETPERVARAYQFLMHGYALDPKDILRQAMFEEEYDEMILVKDIEVYSLCEHHMLPFYGKAHVAYIPDGKIVGLSKIPRTVEVFARRLQVQERLTLQIRNAIDEVVEPLGTAVVIEARHLCMMMRGAEKQNSMTTTSSVSGEFDEHATRAEFMRLTQTTE

SEQ ID NO: 5394 - protein, 199 aa, Bacteroidetes bacterium
  misc_feature (1)..(199): tr|A0A2N2W348|A0A2N2W348_9BACT GTP cyclohydrolase 1 OS= Bacteroidetes bacterium HGW-Bacteroidetes-8 OX=2013698 GN=folE PE=3 SV=1
MAYTKIEQYDEETTQSIAKHYKEILRLLGEDTSREGLILTPVRIARSVQFLTQGYEMDGPSILNSAKFKEEYQQMVLVKDIELYSLCEHHMLPFYGKAHIAYIPNGYITGLSKIARVVEAYARRLQVQERLTVQIRDCIQETLNPLGVAVVIEASHMCMQIRGVQKQNSVTTTSAFTGAFLKDIRTREEFIHLIGVSLH

SEQ ID NO: 5395 - protein, 196 aa, Bacteroidetes oral
  misc_feature (1)..(196): tr|D7JCV3|D7JCV3_9BACT GTP cyclohydrolase 1 OS=Bacteroi detes oral taxon 274 str. F0058 OX=575590 GN=folE PE=3 SV=1
MEKEFVFNDLNEEVTQKLSKYYSDVITALGEDVGREGLQKTPRRVAKAMQFLTSGYRQDPAEVLLSARFHEDYRQMVIVKDIEFFSMCEHHLLPFFGKAHVAYIPNGTVTGLSKIARVVDIFAHRLQLQERLTSQIKDCIQETLNPMGVMVVIEAQHLCMQMRGVQKQHSTTTTSDFTGIFKVQKTREEFISLINK

SEQ ID NO: 5396 - protein, 190 aa, Bacteroidia bacterium
  misc_feature (1)..(190): tr|A0A1M3FPC5|A0A1M3FPC5_9BACT GTP cyclohydrolase 1 OS= Bacteroidia bacterium 44-10 OX=1895721 GN=folE PE=3 SV= 1
MSSEELEVKKSAIADRMRDILTLLGEDAHREGLVKTPDRVAKAYQYLTKGYWQDPEAILRSALFKENYRQMVIVKDIDLFSLCEHHMLPFFGKAHVAYIPDGYITGLSKIARVVDVFARRLQVQERLTTQIKECIQKTLNPMGVMVVIEAQHMCMQMRGVEKQNSITTTSDFTGVFREQRTREEFIALIK

SEQ ID NO: 5397 - protein, 190 aa, Bacteroidia bacterium
  misc_feature (1)..(190): tr|A0A1Q3QF08|A0A1Q3QF08_9BACT GTP cyclohydrolase 1 OS= Bacteroidia bacterium 43-41 OX=1895720 GN=folE PE=3 SV= 1
MSPEETENRKLIIADHIKEVISLLGEDVTRDGLVKTPDRVAKAWQYLTRGYYQDPEEILRSALFRENYRQMVIVKDIDLFSLCEHHILPFFGKAHVAYIPDGYITGLSKIARVVEVYARRLQVQERLTTQIKECIQKTLNPMGVMVVIEAQHMCMQMRGVEKQNSITTTSDFTGVFKEQKTREEFIALIK

SEQ ID NO: 5398 - protein, 207 aa, Baekduia soli
  misc_feature (1)..(207): tr|A0A5B8UCA1|A0A5B8UCA1_9ACTN GTP cyclohydrolase 1 OS= Baekduia soli OX=496014 GN=folE PE=3 SV=1
MVSIQELTDGPETLHLDPRHGAGGRRIDLPAAQRAAADLLIALGADLGHEGLADTPRRMAEAYAELLTPEPFTVTTFPNEGAYDELVLVRDVPFHSLCMHHLLPFQGVAHIAYLPGERIVGLSKLARVVEHVARDLQVQERMTRQIADWIDTTLQPRGVGVVLEAEHLCMTLRGVRKAGSRTVTSALHGLVRQDPRTRQEFLELVRG

SEQ ID NO: 5399 - protein, 211 aa, Baekduia soli
  misc_feature (1)..(211): tr|A0A5B8U6G5|A0A5B8U6G5_9ACTN GTP cyclohydrolase 1 OS= Baekduia soli OX=496014 GN=folE PE=3 SV=1
MTAPHQHLTGLALAPLHDAGDQGRDIDQGALVRAARDLLSALGADVDAEGLRETPRRVAEALTELLTPQPFRATTFANDDGYDQLIVARRIPFHSLCMHHMLPFHGVAHIGYLPGGRILGLSKLARVVELYARDLQTQERLTTQIAGWLQRELEPVGIGVVLEAEHMCMTLRGVQKSGSTTVTSALYGLVRDDARTRQEFLALATSSCPDR

SEQ ID NO: 5400 - protein, 192 aa, Baia soyae
  misc_feature (1)..(192): tr|A0A4V2SYD7|A0A4V2SYD7_9BACL GTP cyclohydrolase 1 OS= Baia soyae OX=1544746 GN=folE PE=3 SV=1
MKHVDHDKIEQAVRMILEAVGEDPEREGLLDTPARVARMYAEVFQGLDQDPKEHFSVVFGEDHEEVVLVKDIPFFSTCEHHLVPFFGHAHIAYIPRGGRVTGLSKLARAVDSVTKRPQLQERITSTIADSMMETLDPHGVFVVLEAEHMCMTMRGVKKPGSKTVTSVARGIYAEDVVKRDEVFKMIRMGSLT

SEQ ID NO: 5401 - protein, 186 aa, Balnearium lithotrophicum
  misc_feature (1)..(186): tr|A0A521C8H0|A0A521C8H0_9BACT GTP cyclohydrolase 1 OS= Balnearium lithotrophicum OX=223788 GN=folE PE=3 SV=1
MIDRERIEKAVKEILIAIGEDPDREGLKETPKRVAKMYEEVLSGYSDNPENHLVLFTEKYDEMIIVKDIPIYSMCEHHMLPFFGRAHVAYIPNDNKVTGLSKIARIVDVYAKRLQLQERMTEQIANAIMEKLRAKGVMVVIEAQHLCMIMRGVKKTGSYTVTSAVKGVMRNEPTRMEALFLIKGRQ

SEQ ID NO: 5402 - protein, 228 aa, Balneola sp.
  misc_feature (1)..(228): tr|A0A2D9FX60|A0A2D9FX60_9BACT GTP cyclohydrolase 1 OS= Balneola sp. OX=2024824 GN=folE PE=3 SV=1
MKTLDLDKITAEEIGEDHIGTSVKTPLREDAFDKTDAEKIEIIEEHFAEIMKTLGLDLDDDSLKGTPYRVAKMYVKEIFEGLNPKNKPIARQFSNSYDYNGMVIEKNIEVTSFCEHHFLPFLGKAHVAYIPSGKKVIGLSKINRIVDYYSRRPQVQERLTLQIADELQGALETDDVAVFIDSKHLCVSTRGIKDHSSTTITAEYRGAFQDKDTQQKFIDYIRTNTQID

SEQ ID NO: 5403 - protein, 226 aa, Balneola sp.
  misc_feature (1)..(226): tr|A0A3D2IJI0|A0A3D2IJI0_9BACT GTP cyclohydrolase 1 OS= Balneola sp. OX=2024824 GN=folE PE=3 SV=1
MDNLDLDKITAEDLGEAHIGTSELTPLRDDAFDLSDSEKIDIIQDHFKEIMETLGLDLNDDSLKGTPYRVAKMFVKEIFNGLDPKNKPEARTFSNNYDYNDMVMEKNIQVTSFCEHHFLPFIGKAHVAYIASGKVIGLSKINRLVDYFSRRPQVQERLTLQIADALSEAMETDDVAVFIDSKHLCVSTRGIRDVSSSTITTEFRGAFKEEATQRKFIDFIKTDTEL

SEQ ID NO: 5404 - protein, 299 aa, Balneolaceae bacterium
  misc_feature (1)..(299): tr|A0A3D1G899|A0A3D1G899_9BACT GTP cyclohydrolase FolE2 OS=Balneolaceae bacterium OX=2053516 GN=folE2 PE=3 SV= 1
MISNQVQRFYDPTFTVTPEYKASLPDLQNGPASLIEGANVPIQQVGISNFKLPLQIKKRDGKPVTLEVSVDGYVSLDAGKKGINMSRIMRTFYKFKDEVFSLDMLERVLKAYKEDLESQESFLRLSFSYPMVMESLRSGMEGYQYYDVSFEGHLDNYDQFHKHMHLSFVYSSACPCSYELAEHAREDRGVAAIPHSQRSIADVTVALKDEFFVEDLVQVCRAALKTETQVMVKREDEQAFAELNGAYQKFVEDAARLLYEELDSYNSVRDFVVRCAHLESLHSHDAVSRICKGLPNGLR

SEQ ID NO: 5405 - protein, 145 aa, Balneolaceae bacterium
  misc_feature (1)..(145): tr|A0A359E8R8|A0A359E8R8_9BACT GTP cyclohydrolase 1 (Fr agment) OS=Balneolaceae bacterium OX=2053516 GN=DEG32_1 6015 PE=3 SV=1
NPKNKPVARQFNNDYDYNGMVVEKNIQVTSFCEHHFLPFIGKAHVGYISSGKKVIGLSKINRIVDYYSRRPQVQERLTLQIADELSAALETDDIAVFIDSKHLCVSTRGIKDITSTTITSEYRGAFKEEATQQKFIDYIKTNTDI

SEQ ID NO: 5406 - protein, 202 aa, Barnesiella intestinihominis
  misc_feature (1)..(202): tr|K0XPV0|K0XPV0_9BACT GTP cyclohydrolase 1 OS=Barnesie lla intestinihominis YIT 11860 OX=742726 GN=folE PE=3 S V=1
MEEEQSVWASEEQRRICKELAEHYRAIISLLGDDPDREGLRKTPERTAKAMMQLTRGYRQSAQEIISSAVFEHTGSRIVVVRDIEFYSFCEHHLLPFFGKVHVGYIPSGGIVGLSKVARLVEVFARRFQVQERLTAQICQSLTDTLSTEGVMVVVEARHLCMQMRGVEKQGAVTVTYDSSGKFEQEEWRREFYSLIGKNSIG

SEQ ID NO: 5407 - protein, 195 aa, Barnesiella sp.
  misc_feature (1)..(195): tr|A0A1Y3WKI3|A0A1Y3WKI3_9BACT GTP cyclohydrolase 1 OS= Barnesiella sp. An55 OX=1965646 GN=folE PE=3 SV=1
MSPEEQQRVCKELAEHYRAIISLLGDDPDREGMRKTPERAAKAMMKLTKGYHQSARDIISSAVFEHTGSRIVIVRDIEFYSFCEHHLLPFFGKVHVGYIPTNGIVGLSKVARVVDAFARRFQVQERLTAQICQSLAEALATEGVMVMVEARHLCMQMRGVEKQGAVTVTYDCTGKFEQEEWRREFYSLIGKNSCQ

SEQ ID NO: 5408 - protein, 201 aa, Barnesiella sp.
  misc_feature (1)..(201): tr|A0A1Y4GXQ3|A0A1Y4GXQ3_9BACT GTP cyclohydrolase 1 OS= Barnesiella sp. An22 OX=1965590 GN=folE PE=3 SV=1
MDEQVMSPEEQQRVCKELAEHYRAIISLLGDDPDREGLRKTPERAAKAMMKLTKGYRQSAHDVISSAIFEHTGSRIVIVRDIEFYSFCEHHLLPFFGKVHVGYIPTKGIVGLSKVARLVEVYARRFQVQERLTAQICHSLADTLEAEGVIVMVEARHLCMQMRGVEKQGAVTVTYDCTGKFEQPEWRREFYSLIGKNSCEQ

SEQ ID NO: 5409 - protein, 201 aa, Barnesiella viscericola
  misc_feature (1)..(201): tr|W0ER22|W0ER22_9BACT GTP cyclohydrolase 1 OS=Barnesie lla viscericola DSM 18177 OX=880074 GN=folE PE=3 SV=1
MEEQVVMSPEEQQRVCKELAEHYRAIISLLGDDPNREGLLKTPERAAKAMMKLTKGYRQSASDVISSAIFEHTGSRIVIVRDIEFYSFCEHHLLPFFGKVHVGYIPSKGIVGLSKVARVVDVFARRFQVQERLTAQICHSLAEALSTEGVIVMVEARHLCMQMRGVEKQGAVTVTYDCTGKFEQEEWRREFYSLIGKNSCE

SEQ ID NO: 5410 - protein, 192 aa, Barrientosiimonas humi
  misc_feature (1)..(192): tr|A0A542X7Y0|A0A542X7Y0_9MICO GTP cyclohydrolase 1 OS= Barrientosiimonas humi OX=999931 GN=folE PE=3 SV=1
MSTRAKIDHRRAAAAVRELLIAVGEDPEREGLRDTPDRVARAYAEMFAGLQQDPAEVLQRTFEIDHDELVMVKDIEVYSTCEHHLLPFHGVAHVSYIPAKDGRVTGLSKLARLVDVYAKRPQVQERLTSQIADAIMRHLKAQGALVVLDCEHLCMSMRGVRKPGARTQTSAVRGLLRDSATRAEAMSLVTGR

SEQ ID NO: 5411 - protein, 206 aa, Bartonella alsatica
  misc_feature (1)..(206): tr|J1IV41|J1IV41_9RHIZ GTP cyclohydrolase 1 OS=Bartonel la alsatica IBS 382 OX=1094551 GN=folE PE=3 SV=1
MHNVVKGGTIDPFLPGEKHPSLEEVKEAIRTLLLWVGENPNREGLLDTPERVAKAYRELFIGYSKSIEETLDTVFEEVSGYNEAIIVKNIPFYSHCEHHMIPIVGKAYIGYFPDIKIVGLSKIARVVDIFSRRLQTQEAMTAQIADALEVYLKPRGVAVLVEAEHMCMAMRGIQKQGTTTITTCFHGCYKKDQAVQTNFMMMVQGS

SEQ ID NO: 5412 - protein, 200 aa, Bartonella ancashensis
  misc_feature (1)..(200): tr|A0A0M3T321|A0A0M3T321_9RHIZ GTP cyclohydrolase 1 OS= Bartonella ancashensis OX=1318743 GN=folE PE=3 SV=1
MKKNVANQFLSEKESPDLEKVQEAIRTLLSWIGEDPNREGLLDTPKRVIKVYSELFGGYNESAEEILGTVFEEVSGYDEAVLVKDISFYSHCEHHMLPIIGKAHVAYFPDTKIVGLSKIARIVDVFARRLQTQEAMTAQIADALKIHLQPRGVAVLVEAEHTCMSMRGVQKQGAITVTTRFLDCYEKNQSVQANFMEMIR

SEQ ID NO: 5413 - protein, 206 aa, Bartonella apis
  misc_feature (1)..(206): tr|A0A1R0F766|A0A1R0F766_9RHIZ GTP cyclohydrolase 1 OS= Bartonella apis OX=1686310 GN=folE PE=3 SV=1
MQSVRKSAPHSVNQAMNQRPSREEAEAAVRTLLLWVGENPEREGLVNTPKRVIKAYEEMFAGYNQSPEEILGTVFDEVSGYNDPVLIKDIPFYSHCEHHMVPIIGKAHVAYLPDGKVVGLSKIPRVVDVYAKRLQTQESITAQVADALYKYLKPRGVAVLIEAEHMCMAMRGVKKQGSTTITATYRGYYKDNVEAQVNFVKMIRGF

SEQ ID NO: 5414 - protein, 206 aa, Bartonella apis
  misc_feature (1)..(206): tr|A0A1U9MB71|A0A1U9MB71_9RHIZ GTP cyclohydrolase 1 OS= Bartonella apis OX=1686310 GN=folE PE=3 SV=1
MQSAQKNATDAAHQTKNKRPSREEAEAAVRTLLLWAGENPDREGLVNTPKRVVKAYEEMFAGYNQSAEEILGTVFDEVSGYNDPVLIKDIPFYSHCEHHMVPIIGKAHIAYMPDGRVVGLSKIPRVVDVYAKRLQTQESITAEVADALYRYLKPRGVAVLIEAEHMCMAMRGVKKQGSTTVTATYRGFYKDNVEAQVNFLKMIRGL

SEQ ID NO: 5415 - protein, 203 aa, Bartonella australis
  misc_feature (1)..(203): tr|M1NT47|M1NT47_BARAA GTP cyclohydrolase 1 OS=Bartonel la australis (strain Aust/NH1) OX=1094489 GN=folE PE=3 SV=1
MQGKAANLFLSKKERPSFEEVKVAIRTLLLWVGEDPNREGLLDTPSRVAKAYSELFTGYNESAEEILGTVFEEISGYNEPVVAKGIPFYSHCEHHMLPIIGKAHVAYLPGEKVVGLSKIARVVDIFSRRLQTQEAMTAQVANALEKHLKPRGVAVLIEAEHMCMAMRGVQKQGAKAITMSFHGYYETDRVARANFITMTHGTQ

SEQ ID NO: 5416 - protein, 206 aa, Bartonella bacilliformis
  misc_feature (1)..(206): sp|A1USJ5|GCH1_BARBK GTP cyclohydrolase 1 OS=Bartonella bacilliformis (strain ATCC 35685 / NCTC 12138 / KC583) OX=360095 GN=folE PE=3 SV=1
MHSAVEKVAEDLSLSRENLSLEEVEKAIRTLLLWVGENPDREGLLETPKRIAKVYKELFSGYGESVDEILGVVFEEVAGYDEPVIVKDIFFYSHCEHHMIPIIGKAHVAYLPDKKIVGLSKIARVVDVFAHRLQTQETMTAQVANSLKKYLKPRGLAVLIEAEHMCMAMRGVQKQGAATITTSFHGYYKKDQVAQANFMTITRGIR

SEQ ID NO: 5417 - protein, 206 aa, Bartonella bacilliformis
  misc_feature (1)..(206): tr|A0A072R2I0|A0A072R2I0_BARBA GTP cyclohydrolase 1 OS= Bartonella bacilliformis Ver097 OX=1293911 GN=folE PE=3 SV=1
MHSAVEKVAADLSLSGECPSLKEVEKAIRTLLLWVGENPDREGLLETPKRIAKVYKELFSGYGESVDEILGVVFEEVGGYNEPVIVKDISFYSHCEHHMIPIIGKVHVAYLPDKKIVGLSKIARVIDVFARRLQTQETMTAQVANSLKKYLKPRGLAVLIEAEHMCMAMRGVQKQGATTITTSFHGYYEKDQVAQANFMRIIRGIH

SEQ ID NO: 5418 - protein, 206 aa, Bartonella birtlesii
  misc_feature (1)..(206): tr|J0YRZ8|J0YRZ8_9RHIZ GTP cyclohydrolase 1 OS=Bartonel la birtlesii LL-WM9 OX=1094552 GN=folE PE=3 SV=1
MHNVVKGSKRDSFLPREERPSFEEVKEAVRTLLLWVGENPNREGLLDTPERVVRAYRELFLGYEKSVEKILGTVFKEVSGYNEAIILKDIPFYSHCEHHMIPIVGKAYIGYLPDTKVVGLSKIARVVDIFSRRLQTQEAMTAQIADALAVHLQPCGVAVLIEAEHMCMAMRGIQKQGATTITTCFRGCYEEDRAVQDNFIKMIQRA

SEQ ID NO: 5419 - protein, 206 aa, Bartonella bovis
  misc_feature (1)..(206): tr|N6UU26|N6UU26_9RHIZ GTP cyclohydrolase 1 OS=Bartonel la bovis m02 OX=1094492 GN=folE PE=3 SV=1
MHNLTEGIATNLSLSEKKRPSFEEVEAAVRTLLLWVGENPDREGLLDTPKRVAKVYSELFSGYDESVEEILGTVFEEVSGYNEPIIMKDINFYSHCEHHVLPIVGKVHIAYLPDTKIVGLSKIARVIDIFSHRLQTQEAMTAQVANALKTQLKPRGVAVVIEAEHMCMAMRGIRKYGTTTITTSFHGSYKEDQVIQANLMMLLRPL

SEQ ID NO: 5420 - protein, 206 aa, Bartonella bovis
  misc_feature (1)..(206): tr|N6UIJ6|N6UIJ6_9RHIZ GTP cyclohydrolase 1 OS=Bartonel la bovis 91-4 OX=1094491 GN=folE PE=3 SV=1
MHNLTEGIATDFSLSEKKRPSFEEVEAAVRTLLLWVGENPNREGLLDTPKRVAKVYSELFSGYDESIEEILGTVFEEVSGYNEPIIMKDISFYSHCEHHILPIVGKVHIAYLPDTKIVGLSKVARVIDIFSHRLQTQEAMTAQVANALKTQLKPRGVAVVIEAEHMCMAMRGIRKYGTTTITTSFHGSYKEDQIAQANLMMVLRSL

SEQ ID NO: 5421 - protein, 204 aa, Bartonella clarridgeiae
  misc_feature (1)..(204): tr|E6YI05|E6YI05_BARC7 GTP cyclohydrolase 1 OS=Bartonel la clarridgeiae (strain CIP 104772 / 73) OX=696125 GN=f olE PE=3 SV=1
MRDVIEEGATNSFLSEQKKPSVEEIEMAIHTLLLWIGENPNREGLLNTPSRVAKAYRELFTGYNESVEEILGTVFEEVSGYNEPVIMKNISFYSHCEHHMLPIIGKAHIAYLPDKKVVGLSKIARVVDAFSRRLQTQETMTAQIVDALETHLKPHGVAVVVEAEHMCMNMRGIRKQGTTTITTSFHGYYQSDQVAQASFMSLIR

SEQ ID NO: 5422 - protein, 205 aa, Bartonella doshiae
  misc_feature (1)..(205): tr|A0A380ZDJ1|A0A380ZDJ1_BARDO GTP cyclohydrolase 1 OS= Bartonella doshiae OX=33044 GN=folE PE=3 SV=1
MHNIVKKGGATDLSEKRRPCFEEVEAAVRTLLLWVGENPDREGLLDTPKRVAKAYNELFAGYSESVEEILGTAFEEVSDYKEPVIVKNIPFYSHCEHHMIPIIGKAYIAYLPDAKIVGLSKIARIVDVFSRRLQTQETMTAQIAHTLEMYLKPRGVAVLIEAEHMCMAMRGIQKHGATTITTSFHGYYEKDQVAQDHFMMMVHRS

SEQ ID NO: 5423 - protein, 207 aa, Bartonella elizabethae
  misc_feature (1)..(207): tr|J0RIG2|J0RIG2_BAREL GTP cyclohydrolase 1 OS=Bartonel la elizabethae F9251 = ATCC 49927 OX=1094555 GN=folE PE =3 SV=1
MRNGVKRGAKDSLLSEKKHPSLEEVEEAIRTLLLWVGENPRREGLLETPKRIAKAYRELFNGYHQSVEETLGTVFEEVSGYNEAVIVKNIPFYSHCEHHMIPIIGKAHIGYLPDAKIVGLSKIARIVDIFSRRLQTQEAMTAQVADALEMHLKPRGVAVLIEAEHMCMVMRGIQKQGSTTITKKFHGYYEKDQAAQAHFMMMVQRSS

SEQ ID NO: 5424 - protein, 206 aa, Bartonella grahamii
  misc_feature (1)..(206): tr|C6ADY3|C6ADY3_BARGA GTP cyclohydrolase 1 OS=Bartonel la grahamii (strain as4aup) OX=634504 GN=folE PE=3 SV=1
MRNIVKEDAKDSFLSEEKRPSIEEVEEAIRTLLLWIGENPNREGLLDTPRRIAKAYRELFSGYSQSVKETLGTVFEEVSGYNEAVIVKNIPFYSHCEHHMIPIIGKAHIAYLPNEKIVGLSKIVRVVDTFSRRLQTQEAMTAQVAHALKTYLKPHGVAVLIEAEHMCMAMRGIQKQGSTTITKNFHGYYEKDHVAQAHFMMMIQRS

SEQ ID NO: 5425 - protein, 206 aa, Bartonella grahamii; identical to SEQ ID NO: 5424
  misc_feature (1)..(206): tr|A0A336NJ81|A0A336NJ81_BARGR GTP cyclohydrolase 1 OS= Bartonella grahamii OX=33045 GN=folE PE=3 SV=1

SEQ ID NO: 5426 - protein, 206 aa, Bartonella henselae
  misc_feature (1)..(206): sp|Q6G3J8|GCH1_BARHE GTP cyclohydrolase 1 OS=Bartonella henselae (strain ATCC 49882 / DSM 28221 / Houston 1) O X=283166 GN=folE PE=3 SV=1
MHNIKVGTKNPFLSGRKRPPFEEVEAAIRTFLLWIGENPNREGLLDTPGRVAKAYRDLFTGYDESVEEILGTVFEEVSGYNEPVIMKDLSFYSHCEHHMIPIVGKAHIAYFPDEKIVGLSKIARVVNVFSRRLQTQEAMTAQIANALETHLKPRGVAVLIEAEHMCMTMRGVQKQGAKTITTSFHGSYEKDQVAQAHFMMIVRRSS

SEQ ID NO: 5427 - protein, 206 aa, Bartonella henselae; identical to SEQ ID NO: 5426
  misc_feature (1)..(206): tr|X5MH33|X5MH33_BARHN GTP cyclohydrolase 1 OS=Bartonel la henselae OX=38323 GN=folE_1 PE=3 SV=1

SEQ ID NO: 5428 - protein, 206 aa, Bartonella koehlerae
  misc_feature (1)..(206): tr|A0A067W862|A0A067W862_9RHIZ GTP cyclohydrolase 1 OS= Bartonella koehlerae C-29 OX=1134510 GN=folE PE=3 SV=1
MHNIKVGTKNLFLSGRKRPPFEEVEAAIRTFLLWIGENPNREGLLETPERVAKTYRDLFTGYDESVEEILGTIFEEVSGYNQPVIVKDISFYSHCEHHMIPIVGKAHIAYLPDTKVVGLSKIARVVNVFSRRLQTQEAMTAQIANALETHLRPRGVAVLIEAEHMCMAMRGVQKQGAKTITTSFHGSYEKDQVAQAHFMMMVRRSS

SEQ ID NO: 5429 - protein, 206 aa, Bartonella melophagi
  misc_feature (1)..(206): tr|J0QVH5|J0QVH5_9RHIZ GTP cyclohydrolase 1 OS=Bartonel la melophagi K-2C OX=1094557 GN=folE PE=3 SV=1
MHSPTKGIAKNLSLSEKKRPSFEEVEAAVRTLLLWVGENPDREGLLNTPKRVAKVYSELFSGYDKSVKEILGTVFEEVSGYNEPIIMKDISFYSHCEHHVLPIVGKAHIAYLPDTKIVGLSKVARVIDIFSRRLQTQEAMTAQIANALETYLRPRGVAVVIEAEHMCMAMRGIRKHGTTTITTSFHGFYKKDQVARANLMMVLLQL

SEQ ID NO: 5430 - protein, 206 aa, Bartonella quintana
  misc_feature (1)..(206): sp|Q6FZZ4|GCH1_BARQU GTP cyclohydrolase 1 OS=Bartonella quintana (strain Toulouse) OX=283165 GN=folE PE=3 SV=1
MHNIKGGTKNPFLSGRKRPHFEEVEAAIRTLLLWIGENPNREGLLDTPRRVAKAYRDLFIGYGESVEEILGTVFEEVSGYNEPVIVKDISFYSHCEHHMIPIVGKAHIAYLPDEKVVGLSKIARIVDVFSRRLQTQETMTAQIADALEEYLKPCGIAVLIEAEHMCMTMRGVQKQGATTITTSFHGSYEKDQVAQTNFMMIVRRSS

SEQ ID NO: 5431 - protein, 206 aa, Bartonella quintana; identical to SEQ ID NO: 5430
  misc_feature (1)..(206): tr|W3TZT7|W3TZT7_BARQI GTP cyclohydrolase 1 OS=Bartonel la quintana JK 73 OX=1402976 GN=folE PE=3 SV=1

SEQ ID NO: 5432 - protein, 206 aa, Bartonella rattimassiliensis
  misc_feature (1)..(206): tr|J0ZGM7|J0ZGM7_9RHIZ GTP cyclohydrolase 1 OS=Bartonel la rattimassiliensis 15908 OX=1094556 GN=folE PE=3 SV=1
MRNVVKEGAKDSLLFEEKRPSIEEVEDAIRTLLLWVGENPNREGLLDTPRRIAKAYRELFNGYTQSVEETLGTVFEEVSGYNESVIVKNIPFYSHCEHHMIPIIGKAHIAYLPKAKIVGLSKIARVVDIFSRRLQTQESMTAQVANALKMYLKPRGVAVLIEAEHMCMAMRGIQKQGVTTITKNFHGYYEKDQAAQTHFMMTVQRS

SEQ ID NO: 5433 - protein, 204 aa, Bartonella rochalimae
  misc_feature (1)..(204): tr|E6YLZ5|E6YLZ5_9RHIZ GTP cyclohydrolase 1 OS=Bartonel la rochalimae ATCC BAA-1498 OX=685782 GN=folE PE=3 SV=1
MCDIIKGGATNSFFSEQKKPSVEEVEMAIHTLLLWIGENPNREGLLDTPSRVAKAYRELFSGYNESVKEILATVFEEVSGYSEPVILKNISFYSHCEHHMLPIIGKAHVAYLPDKKVVGLSKIARIVDVFSRRLQTQETMTAQIVDALKTHLKPRGIAVVIEAEHMCMGMRGIRKQGATTITTSFHGYYQTNQMAQDSFMSLIR

SEQ ID NO: 5434 - protein, 206 aa, Bartonella schoenbuchensis
  misc_feature (1)..(206): tr|N6UND6|N6UND6_9RHIZ GTP cyclohydrolase 1 OS=Bartonel la schoenbuchensis m07a OX=1094496 GN=folE PE=3 SV=1
MHSPTKGIAKDLSLSKKKRPSFEKVEAAVRTLLLWVGENPDREGLLNTPKRVAKVYSELFSGYDESVEEILGTVFEEVSGYNEPIIMKDISFYSHCEHHVLPIVGKAHIAYLPDTKIVGLSKIARVIDIFSRRLQTQEAMTAQVANALKTHLKPRGVAVVIEAEHMCMAMRGIRKQGATTITTSFHGSYKEDQVAQANLMMVLRQL

SEQ ID NO: 5435 - protein, 206 aa, Bartonella schoenbuchensis
  misc_feature (1)..(206): tr|E6YYV5|E6YYV5_BARSR GTP cyclohydrolase 1 OS=Bartonel la schoenbuchensis (strain DSM 13525 / NCTC 13165 / R1) OX=687861 GN=folE PE=3 SV=1
MHSPTKGIAKDLSLSEKKRPSFKEVEAAVRTLLLWVGENPDREGLLNTPKRVAKVYSELFSGYDESVEEILGTVFEEVSGYNEPIIMKDISFYSHCEHHVLPIVGKAHIAYLPDTKIVGLSKIARVIDVFSRRLQTQEAMTAQVANALKTHLKPRGVAVVIEAEHMCMAMRGIRKQGATTITTSFHGSYKEDQVAQANLMMVLRQL

SEQ ID NO: 5436 - protein, 207 aa, Bartonella sp.
  misc_feature (1)..(207): tr|A0A5B9D229|A0A5B9D229_9RHIZ GTP cyclohydrolase 1 OS= Bartonella sp. OE 1-1 OX=545612 GN=folE PE=3 SV=1
MRNVVKEGAKDSFLSKEECPSIEEVEEAIRTLLLWVGENPRREGLLETPKRIAKAYRELFNGYRQSVEETLGTVFEEVSGYNESVIVKNIPFYSHCEHHMIPIIGKAHIAYLPDAKIVGLSKIARIVDIFSRRLQTQEAMTAQVAHALEVHLKPRGVAVLIEAEHMCMAMRGIQKQGSTTITKKFHGYYEKDQAARAHFMMMVQKSS

SEQ ID NO: 5437 - protein, 206 aa, Bartonella sp.
  misc_feature (1)..(206): tr|A0A1S6WTI5|A0A1S6WTI5_9RHIZ GTP cyclohydrolase 1 OS= Bartonella sp. WD16.2 OX=1933904 GN=folE PE=3 SV=1
MHSPMKGIAKDLFLSEKKRPSFEEVEAAVRTLLLWVGENPDREGLLNTPKRVAKVYSELFSGYDESVEEILGTVFEEVSGYNEPIIMKDIGFYSHCEHHVLPIVGKAHIAYLPDTKIVGLSKIARVIDIFSRRLQTQEAMTAQVANALETHLKPRGVAVVIEAEHMCMAMRGIRKHGATTITTSFHGSYKKDQVAQANLMMVLRQL

SEQ ID NO: 5438 - protein, 207 aa, Bartonella tamiae
  misc_feature (1)..(207): tr|J0ZQ50|J0ZQ50_9RHIZ GTP cyclohydrolase 1 OS=Bartonel la tamiae Th239 OX=1094558 GN=folE PE=3 SV=1
MQPVVTNAAILSDDSDRNKPTREEAEEAVRVLLRWAGENPDREGLKDTPKRVTKAYDELFAGYRQSAKDILGTVFEEVSGYNDPVLIRDIPFYSHCEHHMVPIIGKAHVAYLPNGQVVGLSKIPRVVDVFARRLQTQETITAQIADALMNYLKPRGVAVLIEAEHMCMAMRGVQKQGSTTLTATFRGVYETEFHLQADFMTMLRGFK

SEQ ID NO: 5439 - protein, 206 aa, Bartonella taylorii
  misc_feature (1)..(206): tr|J0RJ16|J0RJ16_BARTA GTP cyclohydrolase 1 OS=Bartonel la taylorii 8TBB OX=1094560 GN=folE PE=3 SV=1
MHNVIKGATIDPFLSGKRRPSSEEVEAAIRTLLLWVGENPNREGLLDTPRRVTKAYRELFIGYSKSVEEILGTVFEEVSGYNESIIVKDISFYSHCEHHMIPIVGRAHIGYLPDKKVVGLSKIARVVDVFSRRLQTQEAMTAQVARALEEHLEPRGVAVLIEAEHMCMAMRGIQKQGATTITTSFHGCYAKDQGIQAHFMTMVQRL

SEQ ID NO: 5440 - protein, 206 aa, Bartonella tribocorum
  misc_feature (1)..(206): tr|A9IVA6|A9IVA6_BART1 GTP cyclohydrolase 1 OS=Bartonel la tribocorum (strain CIP 105476 / IBS 506) OX=382640 G N=folE PE=3 SV=1
MRNVVKEGAKDSFLSEEKRPSIEEVEEAIRTLLLWVGENPRREGLLETPKRIAKAYHELFNGYRQSVEETLGTVFEEVSGYNESVIVKNIPFYSHCEHHMIPIIGKAHIAYLPDTKIVGLSKIARVVDIFSRRLQTQEAMTAQVAHALEMHLKPRGVAVLIEAEHMCMAMRGIQKQGSTTITKKFHGYYEKDQAAQAHFMMMVQSS

SEQ ID NO: 5441 - protein, 206 aa, Bartonella tribocorum
  misc_feature (1)..(206): tr|A0A2M6UTG1|A0A2M6UTG1_9RHIZ GTP cyclohydrolase 1 OS= Bartonella tribocorum OX=85701 GN=folE PE=3 SV=1
MRNILKEGAKDSFLSEEKRPSIEEVEEAIRTLLLWIGENPSREGLLETPKRITKAYRELFNGYRQSVEETLGTVFEEVSGYNESVIVKNIPFYSHCEHHMIPIIGKAHIAYLPDAKIVGLSKIARVVDIFSRRLQTQEAMTAQVAHALEMHLKPRGVAVLIEAEHMCMAMRGIQKQGSTTITKKFHGYYEKDQAAQAHFMLMVQKS

SEQ ID NO: 5442 - protein, 205 aa, Bartonella vinsonii
  misc_feature (1)..(205): tr|J0QXP3|J0QXP3_BARVI GTP cyclohydrolase 1 OS=Bartonel la vinsonii subsp. arupensis OK-94-513 OX=1094562 GN=fo lE PE=3 SV=1
MQDVIKGGVIDPFLSGKRPSIEEVEAAIRTLLLWVGENPNREGLVDTPKRVAKAYCELFTGYSKSVEEILDTVFEEVAGYNEAIIVKNIPFYSHCEHHMIPIVGKAHIGYFPDTKIVGLSKIARVVDVFARRLQTQEAMTAQIANALGVHLKPRGVAVLIEAEHMCMAMRGIQKQGATTITTNFLGCYEKDQGAQANFMMMVQRS

SEQ ID NO: 5443 - protein, 205 aa, Bartonella vinsonii
  misc_feature (1)..(205): tr|A0A3S4ZCM2|A0A3S4ZCM2_BARVI GTP cyclohydrolase 1 OS= Bartonella vinsonii OX=33047 GN=folE PE=3 SV=1
MRDVIKGGSRDPFLSEKRPSVEEVEAAIRTLLLWVGENPNREGLVDTPKRVAKAYRDLFTGYSKSVEEILDTVFEEASGYHEAIIVKNIPFYSHCEHHMIPIVGKAHIGYFPDTKIVGLSKIARVVDVFARRLQTQEAMTAQIAHALGVHLKPRGVAVLIEAEHMCMAMRGVQKQGATTITTSFQGCYEKDQGLQANFMRMVQRS

SEQ ID NO: 5444 - protein, 205 aa, Bartonella washoeensis
  misc_feature (1)..(205): tr|J0Q7Q8|J0Q7Q8_9RHIZ GTP cyclohydrolase 1 OS=Bartonel la washoeensis Sb944nv OX=1094563 GN=folE PE=3 SV=1
MHNVQGDNKNPFLSGGKRPSFEEVEAAIRTLLLWIGEDPNREGLLDTPSRVAKAYRNLFTGYSESVEEILGTVFEEVSGYNESVIMKDLSFYSHCEHHMIPIVGKAHIAYLPDKKVVGLSKIARVVDAFSRRLQTQEAMTAQIANALEVHLKPRGVAVLIEAEHMCMAMRGVQKQGATTITTSFHGSYEKDKVAQANFMMMVCRP

SEQ ID NO: 5445 - protein, 205 aa, Bartonella washoeensis
  misc_feature (1)..(205): tr|J0QLM9|J0QLM9_9RHIZ GTP cyclohydrolase 1 OS=Bartonel la washoeensis 085-0475 OX=1094564 GN=folE PE=3 SV=1
MHNVQGDTKNPFLSGGKRPSFEEVKAAIRTLLLWMGENPNREGLLDTPTRVAKAYRHLFTGYSESVEEILGTVFEEVSGYNESVIVKDLSFYSHCEHHMIPIVGKAHIAYLPDKKVVGLSKIARVVDAFSRRLQTQEAMTAQIANALDVHLKPRGVAVLIEAEHMCMAMRGVQKQGATTITTSFHGSYEKDKVAQANFMMMVCRP

SEQ ID NO: 5446 - protein, 259 aa, Basilea psittacipulmonis
  misc_feature (1)..(259): tr|A0A077DCA8|A0A077DCA8_9BURK GTP cyclohydrolase FolE2 OS=Basilea psittacipulmonis DSM 24701 OX=1072685 GN=fo lE2 PE=3 SV=1
MQTQNMPDVQSSKDLRATPIQKVGVRGVKYPIIIKTGKEIQHSVGNWTMTVYLPAEEKGTHMSRFLALLEEHDKQAMNPHDFMQLTEKMKGLLQSQKANIKVTFPYFMQKVAPVSGVTSPMDYEVTWHANVEEGVSDFEVTVVVPVMSLCPCSKAISKYGAHNQRSYITVTLGCSPDLDLDELIRQIEAQGSCQLWGLLKRPDEKYVTEHSYDNPKFVEDLIRDVAVTIQSLPSIRYYHIEVENLESIHNHSAYASISG

SEQ ID NO: 5447 - protein, 264 aa, Bathymodiolus azoricus
  misc_feature (1)..(264): tr|A0A1H6KHB8|A0A1H6KHB8_9GAMM GTP cyclohydrolase FolE2 OS=Bathymodiolus azoricus thioautotrophic gill symbion t OX=235205 GN=folE2 PE=3 SV=1
MSAANLPDTQNNADTRQIVIDKVGIKDISHPITFIDRDGNKNPTIGNFTMTVTLPEHVKGTHMSRFIEILNDGPCEFNSGNFDKIIDKVCERLESDTAHITLDFPFFRKKKAPSSGVESLMDYQVTLYGILNQGTSEVMIKVVVPVTSLCPCSKSISKYGAHNQRSHITIKARVVKGKTLHLEDLIELAEQKASCELYAILKRDDEKVVTERAYDNPAFVEDLVRDIAVGLNANDNIDYYRLESENFESIHNHSAYALIENNKY

SEQ ID NO: 5448 - protein, 264 aa, Bathymodiolus brooksi
  misc_feature (1)..(264): tr|A0A482YQX4|A0A482YQX4_9BACT GTP cyclohydrolase FolE2 OS=Bathymodiolus brooksi thiotrophic gill symbiont OX= 1052209 GN=folE2 PE=3 SV=1
MNASSLPDTQNNPDSRQIVIDKVGIKDISHPIIFIDRDGKKNPTVGNFTMTVELPEHVKGTHMSRFIEILNEGPCEFNSENFNKIIDKVREKLESKTAHIVLEFPFFRTKKAPSSGVESLMDYQVTLYGILNQGISEVMMKVVVPVTSLCPCSKSISKYGAHNQRSHITIKVRIAKGKTLYLEDLIELAEQKASCELYAILKRDDEKVVTERAYENPAFVEDLVRDIAVGLNINDNLDYYRLESENFESIHNHSAYAVIENYKC

SEQ ID NO: 5449 - protein, 264 aa, Bathymodiolus heckerae
  misc_feature (1)..(264): tr|A0A483A316|A0A483A316_9BACT GTP cyclohydrolase FolE2 OS=Bathymodiolus heckerae thiotrophic gill symbiont OX =1052212 GN=folE2 PE=3 SV=1
MSATNLPDTQNNTDIRQIVIDKVGIKDILHPITFIDRDGNKNATIGNFTMTVTLPECVKGTHMSRFIEILNEGPCEFNSGNFGKIITKVCEKLNSETAYIALDFPFFRKKKAPSSGVESLMDYQVTLYGILNQDKSEVMMKVVVPVTSLCPCSKSISKYGAHNQRSHITIKARIAEGKTLYLEDLIDLAEQKASCELYAILKRDDEKVVTERAYDNPAFVEDLVRDIAVGLNANDNIDYYRLESENFESIHNHSAYALIENNKC

SEQ ID NO: 5450 - protein, 263 aa, Bathymodiolus heckerae
  misc_feature (1)..(263): tr|A0A482YZN0|A0A482YZN0_9BACT GTP cyclohydrolase FolE2 OS=Bathymodiolus heckerae thiotrophic gill symbiont OX =1052212 GN=folE2 PE=3 SV=1
MKSCDLPDTQNNLDTRQIVIDRVGIKDISHPITYVDRDGNKSPTVGNFTMTVTLPENVKGTHMSRFIQILNEGPCEFNSGDFGKIIEKVRDRLESETAYITVNFPFFRKKKAPSSGVESLMDYQVTLYGSLENGVVEVMMKVVVPVTSLCPCSKSISKYGAHNQRSHITIKAKASTGKTLYLEDLIDLAEKKASCELYAILKREDEKVVTERAYDNPAFVEDLVRDIAVALNANKHISYYRLESENFESIHNHSAYALIENQK

SEQ ID NO: 5451 - protein, 181 aa, Bathymodiolus platifrons
  misc_feature (1)..(181): tr|A0A1Z5H7R9|A0A1Z5H7R9_9GAMM GTP cyclohydrolase 1 OS= Bathymodiolus platifrons methanotrophic gill symbiont O X=113268 GN=folE PE=3 SV=1
MMEEYFSKIIEEIGEDVTREGLVDTPKRAAKAFKFLNNGYEKNLEEVLNGAIFEADTEDMVIVKDIELYSLCEHHLLPFVGKCHIAYLPQGHVLGLSKLARIVDMYARRLQIQERLTKQIADAVNEAVNAKGVAVVIEAKHMCMMMRGVEKQNSVMTTSVMTGIFRDEMSTRAEFLSLINR

SEQ ID NO: 5452 - protein, 264 aa, Bathymodiolus thermophilus
  misc_feature (1)..(264): tr|A0A1J5TXH7|A0A1J5TXH7_9GAMM GTP cyclohydrolase FolE2 OS=Bathymodiolus thermophilus thioautotrophic gill sym biont OX=2360 GN=folE2 PE=3 SV=1
MNASSLPDTQNNPDSRQIVIDKVGIKDISHPIVFIDRDGKKNPTVGNFTMTVELPEHVKGTHMSRFIEILNEGPCEFNSDNFNKIIDKVREKLESNTAHIVLEFPFFRTKKAPSSGVESLMDYQVTLYGILNQGVTEVMMKVVVPVTSLCPCSKSISKYGAHNQRSHITIKVRIAKGKTLHLEDLIELAEQKASCELYAILKRDDEKVVTERAYDNPAFVEDLVRDIAVGLNANDNLDYYCLESENFESIHNHSAYAVIENYKC

SEQ ID NO: 5453 - protein, 208 aa, Bauldia litoralis
  misc_feature (1)..(208): tr|A0A1G6DIF2|A0A1G6DIF2_9RHIZ GTP cyclohydrolase 1 OS= Bauldia litoralis OX=665467 GN=folE PE=3 SV=1
MDVPLKKPASDGVIAPRPWARPDRAEAEAAVRTLIAWAGDDPDRDGLRDTPRRVTEAFGEFYSGYDADPSALLERTFEDLGGYDDIVVVRDIPFSSHCEHHMVPFVGKAHVAYYPGEAVVGLSKLARVVDVYARRLQTQERLTGQVVAAIDETLKPRGIAVMIEAEHQCMTLRGAHKHGASTVTTQFTGVFRDDPAEQQRFVSLVRSG

SEQ ID NO: 5454 - protein, 220 aa, Baumannia cicadellinicola
  misc_feature (1)..(220): sp|Q1LT77|GCH1_BAUCH GTP cyclohydrolase 1 OS=Baumannia cicadellinicola subsp. Homalodisca coagulata OX=374463 GN=folE PE=3 SV=1
MVILTKEASMVRQALLANGLEPFLRGEERLGIEARKRRIAAHMKKIMTLLNLDLADDSLAKTPYRIAYMYIEEIFPGLDYANFPQITLISNKMKADEMVTVRNITLTSTCEHHFLMIDGKATVSYIPKSNVIGLSKINRIVRFFAQRPQVQERLTQQILLALQTILGTNNVAVSIYAVHYCVKARGICDSTSTTTTTSLGGIFKSSQNTRQEFLRTINQT

SEQ ID NO: 5455 - protein, 304 aa, Bdellovibrio bacteriovorus
  misc_feature (1)..(304): sp|Q6MKE9|GCH4_BDEBA GTP cyclohydrolase FolE2 OS=Bdello vibrio bacteriovorus (strain ATCC 15356 / DSM 50701 / N CIB 9529 / HD100) OX=264462 GN=folE2 PE=3 SV=1
MTKQSLPDVAKETHSERFAPIDWVGMGAIELPVMLKQADGVYRIPARVDAKVSLDKKPSRGIHMSRLYLLSQELLTKSELSLGLLGTVTSEFLRTHEDLSTKALVQVQFEAPLVRKALKSNNQAWRSYPVITSAFNEEGQISYFVEVVVTYSSTCPASAALSRQLIQDGFKQNFSTDKPLDFDVVHSWLGTPQGIVATPHAQRSFARVKAEVGANYNYGDLIDIVEEALQTAVQGAVKREDEQEFALRNGQNLMFCEDAARRVKEALDAKADVLDYVAEFSHVESLHPHNAVSHISKGLKLRSF

SEQ ID NO: 5456 - protein, 216 aa, Bdellovibrio bacteriovorus
  misc_feature (1)..(216): tr|A0A150WDF1|A0A150WDF1_BDEBC GTP cyclohydrolase 1 OS= Bdellovibrio bacteriovorus OX=959 GN=folE PE=3 SV=1
METLEIPVSVKKILQNVRPTPTIENGLTNEEKIEQITTKFTEIMEILGLDLEDDSLNQTPHRVAKMYVNEVFSGLDPKKFPKMTVIDNKMKYDQMIVVQKISCLSFCEHHFLPIDGFATVAYIPNEKVIGLSKINRIVQYFGRRPQVQERLTKQIADSLQYILGTEHVAVHINAKHYCVVMRGIEDTTSITGTADLRGHFKSRQETREEFLHHCRS

SEQ ID NO: 5457 - protein, 227 aa, Bdellovibrio exovorus
  misc_feature (1)..(227): tr|M4V705|M4V705_9PROT GTP cyclohydrolase 1 OS=Bdellovi brio exovorus JSS OX=1184267 GN=folE PE=3 SV=1
MSKATNKSNTTGTEIALEILTNVRPSPTVTSNLSDEEKISTIQKHFSEIMKVLGLDLEDDSLKDTPKRMAKMYVNEIFGGLSPQNFPKITVIENKMQYDQMVCVQDIEVMSVCEHHFQPIDGFATVAYIPKNKVIGLSKLNRIVSYFAKRPQVQERLTKQVADCLQYILDTEDVAVHINAKHYCVISRGIQDTHSTTTTSDLRGAFKSSESTRLEFLKQCRSRFNNG

SEQ ID NO: 5458 - protein, 240 aa, Bdellovibrio sp.
  misc_feature (1)..(240): tr|A0A514XJZ6|A0A514XJZ6_9PROT GTP cyclohydrolase 1 OS= Bdellovibrio sp. ZAP7 OX=2231053 GN=folE PE=3 SV=1
MSKAKAKKITKQGAGKKALKKVVDSEIEHVLSTKDILDNVRPTPMIDNGLSNEEKIEKITEKFTEILEVLGLDLNDDSLADTPKRVAKMYVNEVFGGLDPHKFPKMTVIDNKMNYDQMIVVQNIKCLSFCEHHLLPIDGFATVAYIPYKKVIGLSKINRIVQYFARRPQVQERLTKQIADCLQYVLDTDHVAVHINAKHYCVMMRGIEDTDSTTATSDVRGHFKTLPETREEFLHHCRLK

SEQ ID NO: 5459 - protein, 239 aa, Bdellovibrio sp.
  misc_feature (1)..(239): tr|A0A514WXU7|A0A514WXU7_9PROT GTP cyclohydrolase 1 OS= Bdellovibrio sp. NC01 OX=2220073 GN=folE PE=3 SV=1
MAKKKNSKKTPKKQIEIAPEETHIIPMSVKKILDNVRPTPMIHNGLSNEQKIEKITTKFTEILEVLGLDLNDDSLVDTPKRIAKMYVNEVFGGLDPHKFPKMTVIENTMKYDQMIVVQNIECLSFCEHHFLPIDGIATVAYIPNKKVIGLSKINRIVQYFSRRPQVQERLTKQIADCLQYVLETDHVAVHINAKHYCVMMRGIEDTHSTTATSDLRGHFKTLPHTREEFLRHCHLQHKG

SEQ ID NO: 5460 - protein, 307 aa, Bdellovibrionaceae bacterium
  misc_feature (1)..(307): tr|A0A2E3UTM1|A0A2E3UTM1_9PROT GTP cyclohydrolase FolE2 OS=Bdellovibrionaceae bacterium OX=2026715 GN=folE2 PE =3 SV=1
MNKDQPDVTSDMLIKRDSLKSKLKKVGMESVEVPVRLELPEAGSGFQVASADIYVNLDSSRAKGIHMSRLYISLHKNLESQPLSFKLIRQILSEFLVSHKGLSTCSYLNLRFDLPLERKSLISSNKSWRKYPVEIIGKYDGKNFDINCSFGVLYSSTCPCSAALSRQLIQQHFLESFKVLKDNDQVSTHDIFEWLGEEKNILATPHSQRSKATVTVKIQQQDLSCIENYINMVEEGLQTPVQGIVKREDEQAFAKQNGQNLMFAEDACRTIKAQLASQPDLEDFQIKVSHYESLHPHNAVSYASKSF

SEQ ID NO: 5461 - protein, 185 aa, Bdellovibrionaceae bacterium
  misc_feature (1)..(185): tr|A0A2E7GCJ0|A0A2E7GCJ0_9PROT GTP cyclohydrolase 1 OS= Bdellovibrionaceae bacterium OX=2026715 GN=folE PE=3 SV =1
MQEQIKHILNQIGENPERQGLLSTPKRVEKSYEFLTSGYHQTVEEVIGEGVFDAESNDMVVVRDIEFYSLCEHHMIPFFGKAHVAYIPDQKILGLSKIPRVVDVFARRLQVQERLTNQVAEGLMNTLAPQGVGVVIEAYHLCMMMRGVQKQNSKTITSAMKGDFYDDPATRKEFFDILKSGPIIS

SEQ ID NO: 5462 - protein, 197 aa, Bdellovibrionales bacterium
  misc_feature (1)..(197): tr|A0A1F3STN7|A0A1F3STN7_9PROT GTP cyclohydrolase 1 OS= Bdellovibrionales bacterium GWA2_49_15 OX=1797384 GN=fo lE PE=3 SV=1
MFEAHKLMASGYKTVLQALKMAYPAFDLNDPNITDSHNRMARALLEMCSGLGATNGDTVNATFPSEKYNEVILLKDIDFTSLCAHHFIPFTGVAHVAYLPDVTQQDGRVVGLSKLARIVDVHAQRPQLQERMCYSIMEALKSELRPAGVMVVVQAAHGCLTCRGARKANAIMLTSALDGKFKEDPKLRQEFLALIHP

SEQ ID NO: 5463 - protein, 317 aa, Bdellovibrionales bacterium
  misc_feature (1)..(317): tr|A0A1F3S8H7|A0A1F3S8H7_9PROT GTP cyclohydrolase FolE2 OS=Bdellovibrionales bacterium RBG_16_40_8 OX=1797388 GN=folE2 PE=3 SV=1
MRLDAQQTPQNNKDLPDISLGQETEFSGSLSQVGMGKIEMPILYTLDNNEPILLPALISAFVSLDKPEAKGIHMSRLYLELKNNLHIKPITQENLQTTLKNFIFSHEGMSESAYIEIRFSVPLERKALISGELGFRQYPVVINAELIKNKFAFTITTEILYSSTCPCSAALARQLIQQAFIEKFKDKNELKKNDVVKWLMGSDSIVAFPHAQRSLARISLRVKEGVELSLLEIINAAENAVGTPVQSAVKRIDEQEFARLNASNLMFCEDAARRLRGAFESDLRVTDYRIYVEHQESLHPHDAVSTVVKSVPGGFTV

SEQ ID NO: 5464 - protein, 272 aa, Beggiatoa alba
  misc_feature (1)..(272): tr|I3CFV5|I3CFV5_9GAMM GTP cyclohydrolase FolE2 OS=Begg iatoa alba B18LD OX=395493 GN=folE2 PE=3 SV=1
MNKPLTLTPEMLIPDTQRYKDTRQLVINKVGIKSIRHPILISDRAQQAQPTIATFNMYVMLAADNKGTHMSRFVKLLNELQTPLSVDNFPHLLAEMTTLLEAEQGFIEAQFPYFVNKSAPITGVKSLLDYTVTLTGEYKNGMSTQTTQVLVPVTSLCPCSKEISEYGAHNQRAHITVAVKTQETLWIEEIIDIVEAEASSELFGLLKRPDEKAVTERAYENPKFVEDVVRDVAARLNAEPRILAYTVESENFESIHNHSAYALIERDKRNRI

SEQ ID NO: 5465 - protein, 202 aa, Beggiatoa alba
  misc_feature (1)..(202): tr|I3CHL7|I3CHL7_9GAMM GTP cyclohydrolase 1 OS=Beggiato a alba B18LD OX=395493 GN=folE PE=3 SV=1
MFQDASKYPIQDNAVDVLTSVYRDIITNVGEDVTRDGLLKTPERAAKAILRLTSGYQQDLQSIVNGALFESDSDQVVLVRDIEFYSLCEHHLLPFFGKCHVGYLPRGKVLGLSKVARIVDMFSRRLQIQEQLTHQVALAIQECTDAYGVGVVMDARHMCMIMRGVEKQSSSTTTSAMLGTFRQNPAARAEFLSLIASSNSSL

SEQ ID NO: 5466 - protein, 270 aa, Beggiatoa leptomitoformis
  misc_feature (1)..(270): tr|A0A2N9YAW3|A0A2N9YAW3_9GAMM GTP cyclohydrolase FolE2 OS=Beggiatoa leptomitoformis OX=288004 GN=folE2 PE=3 S V=1
MNKPLTSIPDLSIPDTQRYKDTRQLVINKVGIKSIRHPICISDRAKRSQPTIATFNMYVMLSADNKGTHMSRFVKLLNELETPLSVETFPTLLAEMTKRLEAEQGFIETQFTYFVNKAAPITGVKSLLDYTVTLTGDYQNGITTQTTQVLVPVTSLCPCSKEISEYGAHNQRAHITVAVKTQATVWIEEIIEMVEAEASSELFGLLKRPDEKAVTERAYENPKFVEDVVRDVAARLNAESRILAYTVESENFESIHNHSAYALIERDKRK

SEQ ID NO: 5467 - protein, 207 aa, Beggiatoa leptomitoformis
  misc_feature (1)..(207): tr|A0A2N9YIM9|A0A2N9YIM9_9GAMM GTP cyclohydrolase 1 OS= Beggiatoa leptomitoformis OX=288004 GN=folE PE=3 SV=1
MSQETPENKKSQYIVGENAVENLTTMYRNIIVNVGENVERDGLLKTPERAAKAILRLTSGYQQNLNAIVNDALFESDSDQVVLVRDIEFYSLCEHHLLPFFGKCHVGYLPCGKVLGLSKVARIVDMFSRRLQIQEQLTHQVALAIQECTGAYGVGVVMDARHMCMIMRGVEKQSSSTTTSAMLGTFRQNPAARAEFLSLIASSNSSL

SEQ ID NO: 5468 - protein, 265 aa, Beggiatoa sp.
  misc_feature (1)..(265): tr|A7C3Q8|A7C3Q8_9GAMM GTP cyclohydrolase FolE2 OS=Begg iatoa sp. PS OX=422289 GN=folE2 PE=3 SV=1
MMNKPVTFDMPDVQNSEDTRRIAIDKVGIKDIKYPVQVKDRSGREQHTIANFNMYVNLPHNFKGTHMSRFVEILNEHEYEITVESFKDMLVEMTERLEAESGHIEMTFTYFVIKTAPISKVKSLLDYEVTFIGEIINENPSITVKVIVPVTSLCPCSKEISDYGAHNQRSHVTITAKTNGFLWIEDIIDLVEKQASSELYGLLKRPDEKYVTQNAYENPKFVEDMVRDIATQLNKDNRVAAYIVESENFESIHNHSAYAMIQNDK

SEQ ID NO: 5469 - protein, 270 aa, Beggiatoa sp.
  misc_feature (1)..(270): tr|A0A1W9L6E9|A0A1W9L6E9_9GAMM GTP cyclohydrolase FolE2 OS=Beggiatoa sp. IS2 OX=1934247 GN=folE2 PE=3 SV=1
MNKPMIIPDVQSSTDNRCLAIDKVGIKSIKHPVCVKDRSGREQNTIATFSMYVSLPHNFKGTHMSRFVEILNEHEYAITVESFKRMLIEMTLRLEAESGHIEMTFTYFVRKVAPISGVKSLLDYEVTFIGEITDNVPSLAVKVVVPVTSLCPCSKKISKYGAHNQRSHVTVSVKTNGFLWIEDIIDLVEKEASCELYGLLKRSDEKRVTERAYENPKFVEDMVRDVAAKLNVDDRVAAYMVESENFESIHNHSAYAMIQRDKQIATNLSC

SEQ ID NO: 5470 - protein, 213 aa, Beijerinckia indica
  misc_feature (1)..(213): sp|B2IBC4|GCH1_BEII9 GTP cyclohydrolase 1 OS=Beijerinck ia indica subsp. indica (strain ATCC 9039 / DSM 1715 / NCIB 8712) OX=395963 GN=folE PE=3 SV=1
MDDVVKSLLQRTTSSLTKPAPARPSREEAEAAVEVLLRWTGDDPSREGLRDTPKRVVKAFEEFFSGYNADASDVLSRVFEEVHGYDNMVLVRDIPFSSHCEHHMVPFFGVAHIGYYPSEAGVIGLSKLARLVDIFAKRLQTQEALTAQIIGAIDEHLQPRGCAIMLEAEHMCMSMRGVQKHGTSTLTTQFTGVFKNDPAEQVRFFGMVRNPKS

SEQ ID NO: 5471 - protein, 217 aa, Beijerinckia sp.
  misc_feature (1)..(217): tr|A0A1H5AJE0|A0A1H5AJE0_9RHIZ GTP cyclohydrolase 1 OS= Beijerinckia sp. 28-YEA-48 OX=1882748 GN=folE PE=3 SV=1
MDAVVKTSTRQPIEERHTSPAEASTKHTLRPTREEAEEAVRTLLRWVGENPGREGLIDTPKRVVKAYEEFFQGYNQDPDEVLDKVFEEVDGYDDMVLVRDIPFSSHCEHHMVPFIGTAHVAYYPNGGVVGLSKLARIVDVFARRLQTQETMTAQIADALEQSLKPFGVAVLVDAEHMCMSLRGVRKAGSSTVTSRFTGRFRDPAEQARFFTMVRGAR

SEQ ID NO: 5472 - protein, 84 aa, Beijerinckiaceae bacterium
  misc_feature (1)..(84): tr|A0A539CVR3|A0A539CVR3_9RHIZ GTP cyclohydrolase 1 OS= Beijerinckiaceae bacterium OX=1978229 GN=folE_1 PE=4 SV =1
MNSNVHALEGITPLRTEVGRPDRADVEAAFRTIIRWAGDDPEREGLIETPARMARSFEEFFVGYAQTQSNSCKKLSRKSKVMTK

SEQ ID NO: 5473 - protein, 221 aa, Beijerinckiaceae bacterium
  misc_feature (1)..(221): tr|A0A522GYH8|A0A522GYH8_9RHIZ GTP cyclohydrolase 1 OS= Beijerinckiaceae bacterium OX=1978229 GN=folE PE=3 SV=1
MDDVVKSLFERQPPKAPVPKSGTPTIKAATLARPTREEAEAAVRTLLLWAGDDPNREGLLATPQRVVKAYEEFYAGYRADPSDVLARIFEEVQGYDDLVLVRDIPFSSHCEHHMVPFIGKAHIAYYPSTHGVVGLSKLARLVDVFAHRLQTQEALTAQIVDAIDRYLQPRGCAVMIEAEHMCMSMRGVLKQGSTTVTNQFTGVFRDDPAEQVRFLTLVRDK

SEQ ID NO: 5474 - protein, 231 aa, Belliella baltica
  misc_feature (1)..(231): tr|I3Z0U7|I3Z0U7_BELBD GTP cyclohydrolase 1 OS=Belliell a baltica (strain DSM 15883 / CIP 108006 / LMG 21964 / BA134) OX=866536 GN=folE PE=3 SV=1
MKQKETLLNTMGINISRDIDEIGDEHVGTSFETPLREDAFEMDDELKIELIEKHFREIMHVLGLDLTDDSLKGTPRRVAKMYIQEIFSGLDPKNKPDAKLFENKYKYNEMLVEKDITFFSNCEHHFVPIYGKAHVAYISNGTVIGLSKINRIVQYFAKRPQVQERLTMQIGNELKEILGTDDVAVVIDAHHMCVSSRGIKDVNSSTVTSFYSGKFEKEEHTRNEFMKYISL

SEQ ID NO: 5475 - protein, 231 aa, Belliella buryatensis
  misc_feature (1)..(231): tr|A0A239G3J4|A0A239G3J4_9BACT GTP cyclohydrolase 1 OS= Belliella buryatensis OX=1500549 GN=folE PE=3 SV=1
MKQKETLLNTMEINVNRDIDEIGDEHVGTSYDTPLREDAFEMDDELKIELIEKHFKEIMLIMGLDLTDDSLKGTPKRVAKMYVKEIFSGLNPKNKPAAKLFENKYKYNEMLVEKDITFFSNCEHHFVPIYGKAHVAYISNGNVIGLSKINRIVQYFAKRPQVQERLTMQIGNELKEILGTDDVAVVIDANHMCVSSRGINDVNSSTVTSYYSGKFERDEQSRNEFMKYISM

SEQ ID NO: 5476 - protein, 231 aa, Belliella pelovolcani; identical to SEQ ID NO: 5475
  misc_feature (1)..(231): tr|A0A1N7PV80|A0A1N7PV80_9BACT GTP cyclohydrolase 1 OS= Belliella pelovolcani OX=529505 GN=folE PE=3 SV=1

SEQ ID NO: 5477 - protein, 215 aa, Bellilinea caldifistulae
  misc_feature (1)..(215): tr|A0A0P6X2L0|A0A0P6X2L0_9CHLR GTP cyclohydrolase 1 OS= Bellilinea caldifistulae OX=360411 GN=folE PE=3 SV=1
MEKQLIIPGEDIYQAAELFNDGGIDYETIRQNVESILKAVGENPERDGLKRTPERVARMYEELLAGYRTDPVALVNDALFEVDYDEMVIVRDIEFYSLCEHHMLPFLGRAHVAYIPRGRVIGLSKIPRIVDMFARRLQVQERMTRQIADFLQEVLHPRGVAVVIEAIHMCSMIRGVKKHDSRMTTSSMLGAFRNNMATRMEFLDNISRSSEPLHF

SEQ ID NO: 5478 - protein, 198 aa, Belnapia rosea
  misc_feature (1)..(198): tr|A0A1G6M9K4|A0A1G6M9K4_9PROT GTP cyclohydrolase 1 OS= Belnapia rosea OX=938405 GN=folE PE=3 SV=1
MTAPAEMPSRPSRSEAEAAVRTLIRWACDDPTREGLLDTPSRVVRAYEELFSGYQVDPVALLERTFDEVEGYDEIVLLKNIRLESYCEHHMVPIIGHCHVAYLPDRRVVGISKLARVVEAYGKRLQIQEKLTAQIANTIDAVLQPRGVAVVIESAHQCMTTRGVHQTGVTMVTSRMLGAFRDNFDTRRELLSLIQSSS

SEQ ID NO: 5479 - protein, 237 aa, Belnapia rosea
  misc_feature (1)..(237): tr|A0A1G6JSD1|A0A1G6JSD1_9PROT GTP cyclohydrolase 1 OS= Belnapia rosea OX=938405 GN=folE PE=3 SV=1
MSEYNTGLLPGPRARQIRELRGIGTVNIQTPNHIIDAKATLEGRPSRAEAEAAIRTLLRWTGDDPDREGLIDTPARVARAYEEFFAGYAVDPVDLLARSFEETDGYDEMVVLRDIRIESHCEHHMVPIIGRAHIAYLPAGRVVGISKLARVLEVYAKRLQIQEKLTAQVANCINDVLKPKGVAVVVEAAHQCMTTRGIHKPGVTMVTSRMLGAFRDDASTRREFLAIIGGQRGVAEG

SEQ ID NO: 5480 - protein, 257 aa, Bergeriella denitrificans
  misc_feature (1)..(257): tr|A0A378UJF2|A0A378UJF2_BERDE GTP cyclohydrolase FolE2 OS=Bergeriella denitrificans OX=494 GN=folE2 PE=3 SV=1
MNAIADVQSTRDLRNLPINQVGIKDLRFPITLRSDDGEQSTVARLTMTVYLPAEQKGTHMSRFVALMEQDTEALSFGHLQKLTRDMVTLLESRAGKITAAFPFFRKKTAPVSGIQSLLDYDVTLSGELADGAYRHTVKVMVPVTSLCPCSKEISAYGAHNQRSHVTVTLTVNEEVGIEEIIDCVENQASCQLYGLLKRPDEKYVTEKAYENPKFVEDMVRDVATALMADKRIDSFTVESENFESIHNHSAYAYIAYP

SEQ ID NO: 5481 - protein, 221 aa, Bergeyella zoohelcum
  misc_feature (1)..(221): tr|A0A376BYN1|A0A376BYN1_9FLAO GTP cyclohydrolase 1 OS= Bergeyella zoohelcum OX=1015 GN=folE PE=3 SV=1
MNDFFDNDDDVFSGKEHTPLRADAFEKTPEEKIAIIEKHFAEIMHTLGMDMTDDSLKDSPKRVAKMYVNEIFGGLLPENKPGISTFSNKYKYRQMLVEKDITVYSFCEHHFLPIIGRAHVAYISNGEVIGLSKINRIVNYYAKRPQVQERLTMQIVDAMKEALNTKDVACVIDAKHLCVNCRGIRDTASSTITAELSGIFRTNPITRQEFLHYVGIHSKLD

SEQ ID NO: 5482 - protein, 221 aa, Bergeyella zoohelcum; identical to SEQ ID NO: 5481
  misc_feature (1)..(221): tr|K1MU02|K1MU02_9FLAO GTP cyclohydrolase 1 OS=Bergeyel la zoohelcum ATCC 43767 OX=883096 GN=folE PE=3 SV=1

SEQ ID NO: 5483 - protein, 318 aa, Bermanella marisrubri
  misc_feature (1)..(318): tr|Q1N6S8|Q1N6S8_9GAMM GTP cyclohydrolase FolE2 OS=Berm anella marisrubri OX=207949 GN=folE2 PE=3 SV=1
MSDKRQNEMPDVAASQAPQVNGTLNWVGMNRIALPVMLRDSQLGDSKVDAFVQTYVNICNENVKGIHMSRLYLLLAKFSDEQVLSAGNLREFLTHMLDSHEDISDRATLHFSFDYVIQRKALKSQFSGWKDYPTEIKATLEEGGNVAIELAVHVPYSSTCPCSAALARQLIQEQFAKDFGDRTDLSSEEVQAWIRSDKGTFATPHSQRSIAKVWVKLDQQTQDFPITELIEHIEQALQTPVQTAVKREDEQEFARLNGHNLMFCEDAARRAKNALNQQEGLYKDFWLRIEHLESLHAHDAVAIATKGIQGGYEPLLSR

SEQ ID NO: 5484 - protein, 214 aa, Bermanella marisrubri
  misc_feature (1)..(214): tr|Q1MZB6|Q1MZB6_9GAMM GTP cyclohydrolase 1 OS=Bermanel la marisrubri OX=207949 GN=folE PE=3 SV=1
MTELSAEAVMVRDMLVEKGLETPLNDNGLSSEVKRERIEGYFTEILGTLGLDLDDDSLNETPHRMAKLYVNEIFSGLDYSNFPRISVIENKMSVDEMVKISEIQVSSTCEHHLITIDGKAKVAYIPNKKIIGLSKINRLVRFFAQRPQVQERLTQQILVALQALLETDNVAVSIDATHYCVKARGVMDVNSETSTTALGGIFKTNIHTRAEFLN

SEQ ID NO: 5485 - protein, 317 aa, Bermanella sp.
  misc_feature (1)..(317): tr|A0A1Y5DFI3|A0A1Y5DFI3_9GAMM GTP cyclohydrolase FolE2 OS=Bermanella sp. 47_1433_sub80_T6 OX=1856278 GN=folE2 PE=3 SV=1
MTDKRLTEMPDVASTQAPQINGTLDWVGMNRIALPLTVRDSDLGDSKVNAFVQTYVNLFNPDVKGIHMSRLYLLLTEFSDNQVLSASNLREFLSHMLDSHHDISDQATLNFEFDYVIKRKALKSQFSGWKDYPAQIKATLKDNKVSLELGIEVTYSSTCPCSAALARQIIQEAFHADFKDKEQVSPSEVEAWLRSEKGTHATPHSQRSTAMVWVKLNDNLDDFPITDVIGVIEDALQTPVQTAVKREDEQEFARLNGQNLMFCEDAARRVKNALNKQEDMFKDFWLRIEHLESLHAHDAVALATKGIREGYEPLLAR

SEQ ID NO: 5486 - protein, 212 aa, Bermanella sp.
  misc_feature (1)..(212): tr|A0A2D4S210|A0A2D4S210_9GAMM GTP cyclohydrolase 1 OS= Bermanella sp. OX=2024825 GN=folE PE=3 SV=1
MISDSALLVRDTLIARGLETPMKDTGLSNDEKYARIKDAMTTVVETLGLDLNDDSLNETPHRIAKMYVNEIFGGLDYANFPKMSVIENKMQVDEMVKVNDIHLTSTCEHHFVTIDGFAKVAYIPKNKIIGLSKINRLVRFFAQRPQVQERLTQQVLISLQTLLETEHVAVSIDATHYCVKSRGVMDTHSTTSTTALGGIFKSNVHTRAEFLA

SEQ ID NO: 5487 - protein, 226 aa, Bernardetia litoralis
  misc_feature (1)..(226): tr|I4AJN6|I4AJN6_BERLS GTP cyclohydrolase 1 OS=Bernarde tia litoralis (strain ATCC 23117 / DSM 6794 / NBRC 1598 8 / NCIMB 1366 / Sio-4) OX=880071 GN=folE PE=3 SV=1
MPIINKEQIEIIETIGDNHIFSGIETPLLSDAFEKSDDEKIKNIEHYFGQIMNELGLDLSDDSLSGTPYRVAKMYVKELFYGLDPKNKPKISTFLNKYGYKKMLVEQNITIDSACEHHFLPITGHAHVGYIPKDKVIGLSKINRLVDYYAHRPQVQERLALQILNDLQTSLETEDVIVMLSAKHLCVSSRGIKDKDSFTTTIEYGGCFENKSNREEFFGIVGNTSI

SEQ ID NO: 5488 - protein, 264 aa, Bernardetia litoralis
  misc_feature (1)..(264): tr|I4AMN4|I4AMN4_BERLS GTP cyclohydrolase 1 OS=Bernarde tia litoralis (strain ATCC 23117 / DSM 6794 / NBRC 1598 8 / NCIMB 1366 / Sio-4) OX=880071 GN=folE PE=3 SV=1
MKLKETSSNAQPKKVNGIHNHDKQDSQNFTTSTNKKKQVKKTKEKLLTHKQEDLEIIGENHIATSIETPLRKDAFELDDDTKIEKIAVHFKEIMDILGLDLTDDSLQGTPKRVAKMYVQEIFKGLNPENKPATKMFENKFGYNQLLVEKNISFHSHCEHHFVPIHGKAHIAYISNEGVIGLSKLHRIVDYFARRPQVQERLTNQIGEELKKMLGTEDIAVVLDAAHMCVSMRGIKDQTSTTITSFYSGKFNEEATRTEFLKYIQ

SEQ ID NO: 5489 - protein, 275 aa, Unknown
  misc_feature (1)..(275): tr|A0A0N1L038|A0A0N1L038_9PROT GTP cyclohydrolase FolE2 OS=beta proteobacterium AAP51 OX=1523421 GN=folE2 PE=3 SV=1
MNTLTDALHIPDTQSERDDRHLAIQRVGVKDVRYPLQIEVAGAVQQTAALWALDVALPAEKKGTHMSRLIAWLDALALSGDVLDAATLRERHAAMLDKLGASEGRIEAAFSFFIRKRAPVSGLQSLLDYQGRWISETRHSLAPDGQPTSKTSVWAEVAVPVKSLCPCSKEISDYGAHNQRSLVTVRVELLQPVPWQELVRFAEDSASSEIWPMLKRPDEKWVTERAYENPKFVEDLVRDVALRLNGDARIGRYRVDVENFESIHNHSAYARIERN

SEQ ID NO: 5490 - protein, 266 aa, Unknown
  misc_feature (1)..(266): tr|A0A0N0JES2|A0A0N0JES2_9PROT GTP cyclohydrolase FolE2 OS=beta proteobacterium AAP65 OX=1523424 GN=folE2 PE=3 SV=1
MTNMTDALHIPDTQSERDDRHLAIQRVGVKDVRYPLSIEVAGAVQQTAALWALDVALPAEKKGTHMSRFVAWLDALALSGEPLDAASLRAKHAAMLDKLGADEGRIEAAFSFFIRKRAPVSGLQSLLDYQGRWISETRAGTTRVHAEVAVPVKSLCPCSKEISDYGAHNQRSLVTLRVELLQPVPWHELVRFAEDSASSEIWPMLKRPDEKWITEHAYENPKFVEDLVRDVALRLNSDARIGRYRVDVENFESIHNHSAYARIERA

SEQ ID NO: 5491 - protein, 267 aa, Betaproteobacteria bacterium
  misc_feature (1)..(267): tr|A0A1F4D0Z6|A0A1F4D0Z6_9PROT GTP cyclohydrolase FolE2 OS=Betaproteobacteria bacterium RIFCSPLOWO2_12_FULL_63 _13 OX=1797498 GN=folE2 PE=3 SV=1
MNTREAAVIPDVQSAEDKRKLAIDRVGIKAIRHPIRVAERGGGTQHTVAVFNMYVSLPHHFKGTHMSRFVEILNMHEREISVETFQVMLDQMMERLEAEAGTIEMTFPYFINKQAPVSKVKSLMDYEVTFTGEICGDVKRFTMKVVVPVTSLCPCSKKISDYGAHNQRSHVTIAARTKEFVWIEELVDYAEKHASSELYGLLKRPDEKLVTERAYDNPKFVEDMVRDVAADLNRDKRITWYLVESENFESIHNHSAYAAIERDKTRR

SEQ ID NO: 5492 - protein, 267 aa, Betaproteobacteria bacterium
  misc_feature (1)..(267): tr|A0A536YBI3|A0A536YBI3_9PROT GTP cyclohydrolase FolE2 OS=Betaproteobacteria bacterium OX=1891241 GN=folE2 PE =3 SV=1
MKARDLHNIPDVQASPDSRKLAIDQVGIKAIRHPVRIMERSGGVQHTIAMFNMYVGLPHHFKGTHMSRFVEILEAHEREITVETFQLMLREMVEKLEAEEGRIDMAFPYFIEKRAPISGVKSLMDYEVSFTGEIRKGRQGFTMKVLVPVTSLCPCSKEISERGAHNQRSHVTVTARTNDFVWIEELVDLVEKQASSELYGLLKRPDEKHVTERAYDNPKFVEDLVRDVAAVLNLDERVDAYVVESENFESIHNHSAYALIEKDKRAR

SEQ ID NO: 5493 - protein, 200 aa, Beutenbergia cavernae
  misc_feature (1)..(200): tr|C5BYK6|C5BYK6_BEUC1 GTP cyclohydrolase 1 OS=Beutenbe rgia cavernae (strain ATCC BAA-8 / DSM 12333 / NBRC 164 32) OX=471853 GN=folE PE=3 SV=1
MASPAGDGRAVRPYDAAGVERAVRDLLIAIGEDPDRDGLRETPERLARSYEEMFAGLHTDPREAVQTFFDLEHNELVIVSDIAVYSVCEHHLLPFHGVAHVGYIPAPSGHVTGLSKLARLVEAYARRPQVQERLTTQIADALVHALEPRGVVVVLECEHMCMSMRGVRKPGARTVTSAVRGALREPATRAEAMSLIRGAR

SEQ ID NO: 5494 - protein, 189 aa, Bhargavaea beijingensis
  misc_feature (1)..(189): tr|A0A1G7ALU7|A0A1G7ALU7_9BACL GTP cyclohydrolase 1 OS= Bhargavaea beijingensis OX=426756 GN=folE PE=3 SV=1
MGKVDHGKIVEAVRMILQAVGEDPDREGLLDTPKRVAKMYEEVFGGIGEDPREYFKTVFHEDHDELVLVKDIHFQSMCEHHLLPFYGKAHVAYIPRNGEVAGLSKLARAVEAVSRRPQLQERITAEVADALTEMLDPLGVYIVVEAEHMCMTMRGIRKPGSKTVTAAARGIFNQDDNKRAEVISLIKMS

SEQ ID NO: 5495 - protein, 189 aa, Bhargavaea cecembensis
  misc_feature (1)..(189): tr|M7NJJ8|M7NJJ8_9BACL GTP cyclohydrolase 1 OS=Bhargava ea cecembensis DSE10 OX=1235279 GN=folE PE=3 SV=1
MGKVDHGKIEEAVRLILEAVGEDPDREGLLDTPKRVAKMYEEVFGGIGQDPREYFKTVFHEDHDELVLVKDIHFQSMCEHHLLPFYGKAHVAYIPRNGEVAGLSKLARAVEAVSRRPQLQERITAEVADALTEMLDPLGVYIVVEAEHMCMTMRGIRKPGSKTVTAAARGIFDQDDSKRAEVISLIKMS

SEQ ID NO: 5496 - protein, 189 aa, Bhargavaea cecembensis
  misc_feature (1)..(189): tr|A0A161SKN9|A0A161SKN9_9BACL GTP cyclohydrolase 1 OS= Bhargavaea cecembensis OX=394098 GN=folE PE=3 SV=1
MGKVDHGKIEEAVRLILEAVGDDPDREGLLDTPKRVAKMYEEVFWGIGQDPREYFKTVFHEDHDELVLVKDIHFQSMCEHHLLPFYGKAHVAYIPRNGEVAGLSKLARAVEAVSRRPQLQERITAEVADALTEMLDPLGVYIVVEAEHMCMTMRGIRKPGSKTVTAAARGVFDQDDSKRAEVISLIKMS

SEQ ID NO: 5497 - protein, 189 aa, Bhargavaea ginsengi
  misc_feature (1)..(189): tr|A0A1H6SB87|A0A1H6SB87_9BACL GTP cyclohydrolase 1 OS= Bhargavaea ginsengi OX=426757 GN=folE PE=3 SV=1
MGKVDHGKIEEAVRLILEAVGEDPEREGLLDTPKRVAKMYEEVFWGIGEDPKEYFKTVFHEDHEELVLVKDIHFQSMCEHHLLPFYGKAHVAYIPRNGEVAGLSKLARAVEAVSRRPQLQERITAEVADALAEMLDPLGVYVVVEAEHMCMTMRGIRKPGSKTVTASAHGIFDQDDSKRAEIISLIKMS

SEQ ID NO: 5498 - protein, 218 aa, Bibersteinia trehalosi
  misc_feature (1)..(218): tr|A0A4V7I968|A0A4V7I968_BIBTR GTP cyclohydrolase 1 OS= Bibersteinia trehalosi USDA-ARS-USMARC-188 OX=1263829 G N=folE PE=3 SV=1
MNEISLEAKQVRQALVAKGIETPTVALTQSKAVRRDKIEQKMRDVLELLGLDLNDDSLEETPKRLAKMYVDEIFSGLDYTTFPKITKIQNRMKVSEMVLVDDITLTSTCEHHFVTIDGKVAVAYYPKDWVIGLSKINRVVQFFAQRPQVQERFTEQILTAFQTILETEDVAVYVKATHFCVKCRGVRDTNSQTITSAYGGVFLQDRETRKEFLAQIQK

SEQ ID NO: 5499 - protein, 218 aa, Bibersteinia trehalosi; identical to SEQ ID NO: 5498
  misc_feature (1)..(218): tr|M4R684|M4R684_BIBTR GTP cyclohydrolase 1 OS=Biberste inia trehalosi USDA-ARS-USMARC-192 OX=1171377 GN=folE P E=3 SV=1

SEQ ID NO: 5500 - protein, 211 aa, Bifidobacterium adolescentis
  misc_feature (1)..(211): tr|A0A414C2P6|A0A414C2P6_BIFAD GTP cyclohydrolase 1 OS= Bifidobacterium adolescentis OX=1680 GN=folE PE=3 SV=1
MSDTDFDTLLDDKARAAHAAGPVGYDEEGVRQAVRLFLKSIGEDPEREGLLDTPDRIGRACKELFAGLGHGPEEVLKTRFKVDTDEMVLVRDIELFSVCEHHLLPFHGVAHVGYIPQNGQVAGLSKLARLVELYARRPQVQERLTQQVADALMEGIDARGVIVVTECDHMCMAMRGVKKAQSRTITSAVRGCMRDAATRTEAMSLILSNHS

SEQ ID NO: 5501 - protein, 211 aa, Bifidobacterium adolescentis
  misc_feature (1)..(211): tr|A0A0G9MBV5|A0A0G9MBV5_BIFAD GTP cyclohydrolase 1 OS= Bifidobacterium adolescentis OX=1680 GN=folE PE=3 SV=1
MSDTDFDTLFDDKARAAHAAGPVGYDEEGVRQAVRLFLKSIGEDPDREGLLDTPDRIGRACKELFAGLGHGPEEVLKTRFKVDTDEMVLVRDIELFSVCEHHLLPFHGVAHVGYIPQNGQVAGLSKLARLVELYARRPQVQERLTQQVADALMEGIDARGVIVVTECDHMCMAMRGVKKAQSRTVTSAVRGCMRDAATRTEAMSLILSNHS

SEQ ID NO: 5502 - protein, 199 aa, Bifidobacterium angulatum
  misc_feature (1)..(199): tr|C4FHA8|C4FHA8_9BIFI GTP cyclohydrolase 1 OS=Bifidoba cterium angulatum DSM 20098 = JCM 7096 OX=518635 GN=fol E PE=3 SV=1
MAEQVQGISAARRPYDEEGVRQAVRLFLQSIGEDPEREGLLETPDRIARACRELFSGLDTSPADVLEKHFDVDTDELVLVKDIELYSVCEHHLLPFHGVAHVGYIPAKNGVMGLSKLARLVEVYARRPQVQERLTQQIADALVDYAGARGVIVVTECEHLCMSMRGIKKSEARTVTSAVRGLLRNPATRAEAMSLILNH

SEQ ID NO: 5503 - protein, 199 aa, Bifidobacterium angulatum
  misc_feature (1)..(199): tr|A0A126SUN6|A0A126SUN6_9BIFI GTP cyclohydrolase 1 OS= Bifidobacterium angulatum OX=1683 GN=folE PE=3 SV=1
MAEQVQGMSAARRPYDEEGVRQAVRLFLQSIGEDPEREGLLETPDRIARACRELFSGLDASPADVLEKHFDVDTDELVLVKDIELYSVCEHHLLPFHGVAHVGYIPAKNGVMGLSKLARLVEVYARRPQVQERLTQQIADALVDYAGARGVIVVTECEHLCMSMRGIKKSEARTVTSAVRGLLRNPATRAEAMSLILNH

SEQ ID NO: 5504 - protein, 196 aa, Bifidobacterium bifidum
  misc_feature (1)..(196): tr|E4VBZ2|E4VBZ2_BIFBI GTP cyclohydrolase 1 OS=Bifidoba cterium bifidum NCIMB 41171 OX=398513 GN=folE PE=3 SV=1
MVREAGGYMAIDEEGVRKAVRLFLTSIGENPDREGLLETPDRIARACEEIFSGLGRSPQEVLSKRFPVETDEMVLVRDIELFSVCEHHLLPFHGVAHVGYIPSNGQVVGLSKLARLVELYARRPQVQERITQQVADALMEYADAKGVIVVTECEHMCMAMRGVNKPASRTITSAVRGVMRTPATRAEAMSLIMAKH

SEQ ID NO: 5505 - protein, 188 aa, Bifidobacterium bifidum
  misc_feature (1)..(188): tr|A0A0H3EBB5|A0A0H3EBB5_BIFBP GTP cyclohydrolase 1 OS= Bifidobacterium bifidum (strain PRL2010) OX=702459 GN=f olE PE=3 SV=1
MAIDEEGVRKAVRLFLTSIGENPDREGLLETPDRIARACEEIFSGLGRSPQEVLSKRFPVETDEMVLVRDIELFSVCEHHLLPFHGVAHVGYIPSNGQVVGLSKLARLVELYARRPQVQERITQQVADALMEYADAKGVIVVTECEHMCMAMRGVNKPASRTITSAVRGVMRTPATRAEAMSLIMAKH

SEQ ID NO: 5506 - protein, 221 aa, Bifidobacterium breve
  misc_feature (1)..(221): tr|A0A0L7D0W9|A0A0L7D0W9_BIFBR GTP cyclohydrolase 1 OS= Bifidobacterium breve MCC 1114 OX=1365964 GN=folE PE=3 SV=1
MKMNEYIESCPRWRGLAAQPTGGGSGSESRQREESSYDEEGVRQAVRLFLKSIGEDPEREGLVETPDRIARACRELFAGLQASPADVLEKHFDVDTDELVLVKDIELYSVCEHHLLPFHGVAHVGYIPAKDGVMGLSKLARLVEVYARRPQVQERLTQQIADALVEYAGARGVIVVTECEHLCMSMRGIKKSSARTVTSAVRGLLRNPATRAEAMSLILDK

SEQ ID NO: 5507 - protein, 219 aa, Bifidobacterium breve
  misc_feature (1)..(219): tr|F9Y2T3|F9Y2T3_BIFBU GTP cyclohydrolase 1 OS=Bifidoba cterium breve (strain NCIMB 8807 / UCC2003) OX=326426 G N=folE PE=3 SV=1
MNEYIESCPRWRGLAAQPTGGGSGAESRQREESSYDEGGVRQAVRLFLKSIGEDPEREGLVETPDRIARACRELFAGLQASPADVLEKHFDVDTDELVLVKDIELYSVCEHHLLPFHGVAHVGYIPAKDGVMGLSKLARLVEVYARRPQVQERLTQQIADALVEYAGARGVIVVTECEHLCMSMRGIKKSSARTVTSAVRGLLRNPATRAEAMSLILDK

SEQ ID NO: 5508 - protein, 198 aa, Bifidobacterium callitrichidarum
  misc_feature (1)..(198): tr|A0A2U2N3G8|A0A2U2N3G8_9BIFI GTP cyclohydrolase 1 OS= Bifidobacterium callitrichidarum OX=2052941 GN=folE PE= 3 SV=1
MTEETTAVERAAHYDEEGVRQAVRLFLKSIGEDPEREGLVETPDRIARACKELFSGLQASPADVLEKHFDVDTDELVLVKDIELYSVCEHHLLPFHGVAHVGYIPAKDGVMGLSKLARLVEVYARRPQVQERLTQQIADALVEYAGARGVIVVTECEHLCMSMRGIKKSSARTVTSAVRGLLRNPATRAEAMSLILDK

SEQ ID NO: 5509 - protein, 195 aa, Bifidobacterium callitrichos
  misc_feature (1)..(195): tr|A0A2T3GBN5|A0A2T3GBN5_9BIFI GTP cyclohydrolase 1 OS= Bifidobacterium callitrichos OX=762209 GN=folE PE=3 SV= 1
MTNTNPDYRGYDEEGVRRAVRLFLTSIGEDPDREGLVETPDRIARACRELFAGLGSSPAQVLEKHFDVDTDELVLVKNIELYSVCEHHLLPFHGVAHVGYIPAKDGVMGLSKLARLVEVYARRPQVQERLTQQIADALVEYAGARGVIVVTECEHLCMSMRGIKKSEARTVTSAVRGLLRNPATRSEAMSLIMSR

SEQ ID NO: 5510 - protein, 195 aa, Bifidobacterium callitrichos
  misc_feature (1)..(195): tr|A0A087ABJ6|A0A087ABJ6_9BIFI GTP cyclohydrolase 1 OS= Bifidobacterium callitrichos DSM 23973 OX=1437609 GN=fo lE PE=3 SV=1
MTSTNPDYRGYDEEGVRRAVRLFLTSIGEDPDREGLVETPDRIARACRELFAGLGSSPAQVLEKHFDVDTDELVLVKNIELYSVCEHHLLPFHGVAHVGYIPAKDGVMGLSKLARLVEVYARRPQVQERLTQQIADALVEYAGARGVIVVTECEHLCMSMRGIKKSEARTVTSAVRGLLRNPATRSEAMSLIMSR

SEQ ID NO: 5511 - protein, 212 aa, Bifidobacterium catenulatum
  misc_feature (1)..(212): tr|A0A1V8PP54|A0A1V8PP54_9BIFI GTP cyclohydrolase 1 OS= Bifidobacterium catenulatum OX=1686 GN=folE PE=3 SV=1
MSDTEAFDTLFDDKARAAHAAGPVGYDEEGVRQAVRLFLKSIGEDPDREGLLDTPDRIGRACKELFAGLGHGPEEVLKTKFKVDTDEMVLVRDIELFSVCEHHLLPFHGVAHVGYIPSNGQVAGLSKLARLVELYARRPQVQERLTQQVADALMEGIEARGVIVVTECDHMCMAMRGVKKAQSRTVTSAVRGCMRDATTRAEAMSLILSQHS

SEQ ID NO: 5512 - protein, 212 aa, Bifidobacterium catenulatum
  misc_feature (1)..(212): tr|A0A087B7F0|A0A087B7F0_9BIFI GTP cyclohydrolase 1 OS= Bifidobacterium catenulatum subsp. kashiwanohense JCM 1 5439 = DSM 21854 OX=1150460 GN=folE PE=3 SV=1
MSDTEEFDTLFDDKARAAHAAGPVGYDEEGVRQAVRLFLKSIGEDPDREGLLDTPDRIGRACKELFAGLGHGPEEVLKTKFKVDTDEMVLVRDIELFSVCEHHLLPFHGVAHVGYIPLNGQVAGLSKLARLVELYARRPQVQERLTQQVADALMEGIEARGVIVVTECDHMCMAMRGVKKAQSRTVTSAVRGCMRDATTRAEAMSLILSQHS

SEQ ID NO: 5513 - protein, 189 aa, Bifidobacterium catulorum
  misc_feature (1)..(189): tr|A0A2U2MUT5|A0A2U2MUT5_9BIFI GTP cyclohydrolase 1 OS= Bifidobacterium catulorum OX=1630173 GN=folE PE=3 SV=1
MAAYDEEGVRRAVRLYLKSIGEDPDREGLLDTPDRIARASREIFAGLHQDPKDVLSARFRVDTEEMVLVRDIELYSVCEHHLLPFHGVAHVGYIPSKEGVTGLSKLARLVEVYARRPQVQERLTQQIADALMEHVDARGVIVVTECEHLCMSMRGIRKSQARTVTSAVRGVLRNPATRAEAMSLIFSRH

SEQ ID NO: 5514 - protein, 203 aa, Bifidobacterium dentium
  misc_feature (1)..(203): tr|A0A5F0Y024|A0A5F0Y024_9BIFI GTP cyclohydrolase 1 OS= Bifidobacterium dentium OX=1689 GN=folE PE=3 SV=1
MLDDKARAAHAAGPVGYDEEGVRQAVRLFLRSIGEDPDREGLLDTPDRIGRACRELFAGLGHGPEEVLKTKFKVDTDEMVLVRDIELFSVCEHHLLPFHGVAHVGYIPSNGQVAGLSKLARLVELYARRPQVQERLTQQVADALMTGIEARGVIVVTECDHMCMAMRGVKKPQSRTVTSAVRGCMRDAATRSEAMSLILSQHS

SEQ ID NO: 5515 - protein, 212 aa, Bifidobacterium dentium
  misc_feature (1)..(212): tr|E0Q8C7|E0Q8C7_9BIFI GTP cyclohydrolase 1 OS=Bifidoba cterium dentium ATCC 27679 OX=871562 GN=folE PE=3 SV=1
MSDTEAFDTMLDDKARAAHAAGPVGYDEEGVRQAVRLFLRSIGEDPDREGLLDTPDRIGRACRELFAGLGHGPEEVLKTKFKVDTDEMVLVRDIELFSVCEHHLLPFHGVAHVGYIPSNGQVAGLSKLARLVELYARRPQVQERLTQQVADALMTGIEARGVIVVTECDHMCMAMRGVKKPQSRTVTSAVRGCMRDAATRSEAMSLILSQHS

SEQ ID NO: 5516 - protein, 193 aa, Bifidobacterium felsineum
  misc_feature (1)..(193): tr|A0A2M9HMB1|A0A2M9HMB1_9BIFI GTP cyclohydrolase 1 OS= Bifidobacterium felsineum OX=2045440 GN=folE PE=3 SV=1
MTEEQVGTYDEEGVRKAVRLFLKSIGEDPDREGLVETPDRIARAGRELFAGLHASPADVLEKHFDVDTDELVLVKDIELYSVCEHHLLPFHGVAHVGYIPAKDGVMGLSKLARLVEVYARRPQVQERLTQQIADALVDYAGARGVIVVTECEHLCMSMRGIKKSSARTVTSAVRGLLRNPATRAEAMSLILDK

SEQ ID NO: 5517 - protein, 190 aa, Bifidobacterium hapali
  misc_feature (1)..(190): tr|A0A261FWA8|A0A261FWA8_9BIFI GTP cyclohydrolase 1 OS= Bifidobacterium hapali OX=1630172 GN=folE PE=3 SV=1
MTHTYDEEGVKQAVRLFLKSIGEDPDREGLLETPDRIARAGREIFAGLGRDPQEVLAKRFPVETDEMVLVRDIELFSVCEHHLLPFHGVAHVGYIPSNGQVVGLSKLARLVELYARRPQVQERITQQVADALMTYANARGVIVVTECEHMCMAMRGVNKPASRTVTSAVRGVMRNPATRAEAMSLIMAQH

SEQ ID NO: 5518 - protein, 193 aa, Bifidobacterium imperatoris
  misc_feature (1)..(193): tr|A0A2N5IQZ8|A0A2N5IQZ8_9BIFI GTP cyclohydrolase 1 OS= Bifidobacterium imperatoris OX=2020965 GN=folE PE=3 SV= 1
MTEEKVGTYDEEGVREAVRLFLKSIGEDPDREGLVETPDRIARAGRELFAGLHASPADVLEKHFDVDTDELVLVKDIELYSVCEHHLLPFHGVAHVGYIPAKDGVMGLSKLARLVEVYARRPQVQERLTQQIADALVDYAGARGVIVVTECEHLCMSMRGIKKSSARTVTSAVRGLLRNPATRAEAMSLILDK

SEQ ID NO: 5519 - protein, 212 aa, Bifidobacterium kashiwanohense
  misc_feature (1)..(212): tr|A0A0A7I185|A0A0A7I185_9BIFI GTP cyclohydrolase 1 OS= Bifidobacterium kashiwanohense PV20-2 OX=1447716 GN=fol E PE=3 SV=1
MSDTEAFDTLFDDKARAAHAAGPVGYDEEGVRQAVRLFLKSIGEDPDREGLLDTPDRIGRACKELFAGLGHGPEEVLKTKFKVDTDEMVLVRDIELFSVCEHHLLPFHGVAHVGYIPSNGQVAGLSKLARLVELYARRPQVQERLTQQVADALMEGIEARGVIVVTECDHMCMAMRGVKKAQSRTVTSAVRGCMRDAATRAEAMSLILSQHA

SEQ ID NO: 5520 - protein, 199 aa, Bifidobacterium longum
  misc_feature (1)..(199): sp|Q8G3S1|GCH1_BIFLO GTP cyclohydrolase 1 OS=Bifidobact erium longum (strain NCC 2705) OX=206672 GN=folE PE=3 S V=1
MNEYIESCHREKHTYDEEGVREAVRLFLKSIGEDPEREGLVETPDRIARACRELFTGLQASPADALEKHFDVDTDELVLVKDIELYSVCEHHLLPFHGVAHVGYIPAKDGVMGLSKLARLVEVYARRPQVQERLTQQIADALVEYAGARGVIVVTECEHLCMSMRGIKKSSARTVTSAVRGMLRNPATRAEAMSLILDK

SEQ ID NO: 5521 - protein, 199 aa, Bifidobacterium longum
  misc_feature (1)..(199): tr|A0A0M5L6M1|A0A0M5L6M1_BIFLN GTP cyclohydrolase 1 OS= Bifidobacterium longum OX=216816 GN=gch1 PE=3 SV=1
MNEYIESCQREKRTYDEEGVREAVRLFLKSIGEDPEREGLVETPDRIARACRELFAGLQASPADVLEKHFDVDTDELVLVKDIELYSVCEHHLLPFHGVAHVGYIPAKDGVMGLSKLARLVEVYARRPQVQERLTQQIADALVEYAGARGVIVVTECEHLCMSMRGIKKSSARTVTSAVRGMLRNPATRAEAMSLILDK

SEQ ID NO: 5522 - protein, 196 aa, Bifidobacterium margollesii
  misc_feature (1)..(196): tr|A0A2N5J898|A0A2N5J898_9BIFI GTP cyclohydrolase 1 OS= Bifidobacterium margollesii OX=2020964 GN=folE PE=3 SV= 1
MTSNDNGMPYYDEEGVRKAVRMYLKAIGEDPDREGLLDTPDRIARAGREMYAGLRQDPAEVLAKRFRVDTEEMVLVRDIELYSVCEHHLLPFHGVAHVGYIPSKDGVTGLSKLARLVEVYARRPQVQERLTQQVADALMKYVDARGAIVVTECEHMCMAMRGVKKSQARTVTSAVRGIMRTPATRAEAMSLIFSQH

SEQ ID NO: 5523 - protein, 199 aa, Bifidobacterium merycicum
  misc_feature (1)..(199): tr|A0A087BJI7|A0A087BJI7_9BIFI GTP cyclohydrolase 1 OS= Bifidobacterium merycicum OX=78345 GN=folE PE=3 SV=1
MTEQEHGIGDAVKPYDEEGVRRSVRLFLQSIGEDPDREGLLETPDRIARACREIFAGLGSSPADVLEKHFDVDTDELVLVKDIELYSVCEHHLLPFHGVAHVGYIPAKNGVMGLSKLARLVEVYARRPQVQERLTQQIADALVDYAGARGVIVVTECEHLCMSMRGIKKSEARTVTSAVRGLLRNPATRAEAMSLILNH

SEQ ID NO: 5524 - protein, 213 aa, Bifidobacterium moukalabense
  misc_feature (1)..(213): tr|W4N7D9|W4N7D9_9BIFI GTP cyclohydrolase 1 OS=Bifidoba cterium moukalabense DSM 27321 OX=1435051 GN=folE PE=3 SV=1
MSDTEVFDTTLDDNKARAAHAAGPVGYDEEGVRQAVRLFLRSIGEDPDREGLLDTPDRIGRACKELFAGLGHGPQEVLKTKFKVDTDEMVLVRDIELFSVCEHHLLPFHGVAHVGYIPSNGQVAGLSKLARLVELYARRPQVQERLTQQVADALMTGIEARGVIVVTECDHMCMAMRGVKKPQSRTVTSAVRGCMRDAATRSEAMSLILSQHS

SEQ ID NO: 5525 - protein, 211 aa, Bifidobacterium myosotis
  misc_feature (1)..(211): tr|A0A261FP97|A0A261FP97_9BIFI GTP cyclohydrolase 1 OS= Bifidobacterium myosotis OX=1630166 GN=folE PE=3 SV=1
MSEITNEPNSEESLESLESRNHRESHYDEDGVREAVRLFLKSIGEDPDREGLRETPDRIARAGRELFAGLGASPADVLEKHFDVDTDELVLVKDIELYSVCEHHLLPFHGVAHVGYIPAKDGVMGLSKLARLVEVYARRPQVQERLTQQIADALVEYAGARGVIVVTECEHLCMSMRGVRKSSARTVTSAVRGLLRNPATRAEAMSLILDR

SEQ ID NO: 5526 - protein, 274 aa, Bifidobacterium parmae
  misc_feature (1)..(274): tr|A0A2N5J6G4|A0A2N5J6G4_9BIFI GTP cyclohydrolase 1 OS= Bifidobacterium parmae OX=361854 GN=folE PE=3 SV=1
MARHAQNISLPDSPSLVRENADARNAGDVSRKPGMVQSRPHHAGHGGPGAPAQAQSRAAQDGSALQVSLPQSPRDHVAAGQTRGGDRPAYDEEGVRKAVRLFLQAIGEDPDREGLVETPDRIARAGRELFAGLSASPEQVLEKHFDVDTDELVLVKNIELYSVCEHHLLPFHGVAHVGYIPAKDGVMGLSKLARLVEVYARRPQVQERLTQQIADALVEYAGARGVIVVTECEHLCMSMRGVKKSEARTVTSAVRGLLRNPATRAEAMSLIMSR

SEQ ID NO: 5527 - protein, 189 aa, Bifidobacterium primatium
  misc_feature (1)..(189): tr|A0A2M9HAQ4|A0A2M9HAQ4_9BIFI GTP cyclohydrolase 1 OS= Bifidobacterium primatium OX=2045438 GN=folE PE=3 SV=1
MAAYDEEGVRQAVRLYLKSIGEDPDREGLLDTPDRIARASREIFAGLQQDPKDVLSARFRVDTEEMVLVRDIELYSVCEHHLLPFHGVAHVGYIPSKEGVTGLSKLARLVEVYARRPQVQERLTQQIADALMEHVDARGVIVVTECEHLCMSMRGIKKSQARTVTSAVRGVLKNPATRAEAMSLIFSQH

SEQ ID NO: 5528 - protein, 212 aa, Bifidobacterium pseudocatenulatum
  misc_feature (1)..(212): tr|C0BQ68|C0BQ68_9BIFI GTP cyclohydrolase 1 OS=Bifidoba cterium pseudocatenulatum DSM 20438 = JCM 1200 = LMG 10 505 OX=547043 GN=folE PE=3 SV=1
MSDTEAFDTLFDDKARAAHTAGPVGYDEEGVRQAVRLFLKSIGEDPDREGLLDTPDRIGRACKELFAGLGHGPEEVLKTKFKVDTDEMVLVRDIELFSVCEHHLLPFHGVAHVGYIPSNGQVAGLSKLARLVELYARRPQVQERLTQQVADALMEGIEARGVIVVTECDHMCMAMRGVKKAQSRTVTSAVRGCMRDATTRAEAMSLILSQHS

SEQ ID NO: 5529 - protein, 212 aa, Bifidobacterium pseudocatenulatum
  misc_feature (1)..(212): tr|A0A139B8S1|A0A139B8S1_9BIFI GTP cyclohydrolase 1 OS= Bifidobacterium pseudocatenulatum OX=28026 GN=folE PE=3 SV=1
MSDTEAFDTLFDDKARAAHAAGPVGYDEEGVRQAVRLFLKSIGEDPDREGLLDTPDRIGRACKELFAGLGHGPEEVLKTKFKVDTDEMVLVRDIELFSVCEHHLLPFHGVAHVGYIPSNGQVAGLSKLARLVELYARRPQVQERLTQQVADALMEGIEARGVIVVTECDHMCMAMRGVKKAQSRTVTSAVRGCMRDATTRAEAMSLILSQHA

SEQ ID NO: 5530 - protein, 198 aa, Bifidobacterium reuteri
  misc_feature (1)..(198): tr|A0A087CTJ0|A0A087CTJ0_9BIFI GTP cyclohydrolase 1 OS= Bifidobacterium reuteri DSM 23975 OX=1437610 GN=folE PE =3 SV=1
MTEESTGADRVAQYDEEGVREAVRLFLKSIGEDPDREGLRETPDRIARAGRELFSGLGASPADVLEKHFDVDTDELVLVKDIELYSVCEHHLLPFHGVAHVGYIPAKDGVMGLSKLARLVEVYARRPQVQERLTQQIADALVEYAGARGVIVVTECEHLCMSMRGIKKSSARTVTSAVRGLLRNPATRAEAMSLILDK

SEQ ID NO: 5531 - protein, 198 aa, Bifidobacterium reuteri; identical to SEQ ID NO: 5530
  misc_feature (1)..(198): tr|A0A5J5E7I9|A0A5J5E7I9_9BIFI GTP cyclohydrolase I Fol E OS=Bifidobacterium reuteri OX=983706 GN=folE PE=4 SV= 1

SEQ ID NO: 5532 - protein, 211 aa, Bifidobacterium ruminantium
  misc_feature (1)..(211): tr|A0A087CWK5|A0A087CWK5_9BIFI GTP cyclohydrolase 1 OS= Bifidobacterium ruminantium OX=78346 GN=folE PE=3 SV=1
MSDTDFDTLLDDKARAAHAAGPVGYDEEGVRQAVRLFLKSIGEDPEREGLLDTPDRIGRACKELFAGLGHGPEEVLKTRFKVDTDEMVLVRDIELFSVCEHHLLPFHGVAHVGYIPSNGQVAGLSKLARLVELYARRPQVQERLTQQVADALMEGIDARGVIVVTECDHMCMAMRGVKKAQSRTVTSAVRGCMRDATTRAEAMSLILSNHS

SEQ ID NO: 5533 - protein, 193 aa, Bifidobacterium saguini
  misc_feature (1)..(193): tr|A0A087D648|A0A087D648_9BIFI GTP cyclohydrolase 1 OS= Bifidobacterium saguini DSM 23967 OX=1437607 GN=folE PE =3 SV=1
MTEEKVGTYDEEGVREAVRLFLKSIGEDPDREGLVETPDRIARAGRELFAGLHASPADVLEKHFDVDTDELVLVKDIELYSVCEHHLLPFHGVAHVGYIPAKDGVMGLSKLARLVEVYARRPQVQERLTQQIADALVDCAGARGVIVVTECEHLCMSMRGIKKSSARTVTSAVRGLLRNPATRAEAMSLILDK

SEQ ID NO: 5534 - protein, 197 aa, Bifidobacterium scaligerum
  misc_feature (1)..(197): tr|A0A2M9HRD7|A0A2M9HRD7_9BIFI GTP cyclohydrolase 1 OS= Bifidobacterium scaligerum OX=2052656 GN=folE PE=3 SV=1
MTETVDIEPTRTYDEEGVREAVRLFLKSIGEDPEREGLVETPDRIARACKELFAGLHSSPADVLEKHFDVDTDELVLVKDIELYSVCEHHLLPFHGVAHVGYIPAKDGVMGLSKLARLVEVYARRPQVQERLTQQIADALVDYAGARGVIVVTECEHLCMSMRGIKKSSARTVTSAVRGLLRNPATRAEAMSLILDK

SEQ ID NO: 5535 - protein, 188 aa, Bifidobacterium scardovii
  misc_feature (1)..(188): tr|A0A087D7M9|A0A087D7M9_9BIFI GTP cyclohydrolase 1 OS= Bifidobacterium scardovii OX=158787 GN=folE PE=3 SV=1
MPYDEEGVREAVRLFLRSIGEDPEREGLVETPDRIARACREIFSGLGRDPREVLSKRFPVDTDEMVLVRDIELYSVCEHHLLPFHGFAHVGYIPSNGRVVGLSKLARLVELYARRPQVQERITQQVADALMEYADARGVIVVTECEHMCMAMRGVNKPQSRTVTSAVRGVMRNPATRAEAMSLIMAKH

SEQ ID NO: 5536 - protein, 206 aa, Bifidobacterium simiarum
  misc_feature (1)..(206): tr|A0A2M9HD18|A0A2M9HD18_9BIFI GTP cyclohydrolase 1 OS= Bifidobacterium simiarum OX=2045441 GN=folE PE=3 SV=1
MTIDTVNTDVTDETAAAKPVYDEEGVRKAVRMYLKAIGEDPDREGLLDTPDRIARAGRELYAGLRQDPAEVLAKRFRVDTEEMVLVRDIELYSVCEHHLLPFHGVAHVGYIPSKDGVTGLSKLARLVEVYARRPQVQERLTQQIADALMKYVDARGAIVVTECEHMCMAMRGVKKSQARTVTSAVRGIMRTPATRAEAMSLIFSQR

SEQ ID NO: 5537 - protein, 195 aa, Bifidobacterium sp.
  misc_feature (1)..(195): tr|A0A430F8D0|A0A430F8D0_9BIFI GTP cyclohydrolase 1 OS= Bifidobacterium sp. 2028B OX=2306973 GN=folE PE=3 SV=1
MSDTAAQRPFDEEGVRQAVRLYLKSIGEDPDREGLLDTPDRIARASRELFAGLQQDPKDVLSARFKVDTEEMVLVRDIELYSVCEHHLLPFHGVAHVGYIPSKEGVTGLSKLARLVEVYARRPQVQERLTQQIADALMDYVDARGAIVVTECEHLCMSMRGVKKSQARTTTSAVRGLMRQPATRAEAMSLILSQH

SEQ ID NO: 5538 - protein, 212 aa, Bifidobacterium sp.
  misc_feature (1)..(212): tr|A0A3D0Q0K8|A0A3D0Q0K8_9BIFI GTP cyclohydrolase 1 OS= Bifidobacterium sp. OX=41200 GN=folE PE=3 SV=1
MSDIEPFDTLLDDKARAAHAAGPVGYDEEGVRKAVRLFLKSIGENPDREGLLDTPDRIARACKELFAGLGHDPQEVLKTKFKVDTDEMVLVRDIELFSVCEHHLLPFHGVAHVGYIPSNGQVAGLSKLARLVELYARRPQVQERLTQQVADALMKGMDAKGVIVVTECDHMCMAMRGVKKAQSRTVTSAVRGCMRDPATRAEAMSLILSNHS

SEQ ID NO: 5539 - protein, 272 aa, Bifidobacterium stellenboschense
  misc_feature (1)..(272): tr|A0A087E0K1|A0A087E0K1_9BIFI GTP cyclohydrolase 1 OS= Bifidobacterium stellenboschense OX=762211 GN=folE PE=3 SV=1
MARHAQNISLPDSPSLVRENANAGDVSRKPGMVQSRPHHAGHGGPGAPAQVQSRASQDGSALQVSLPQSPRDHVAAGQTRGDGDRPAYDEDGVRRAVRLFLQAIGEDPDREGLVETPDRIARAGRELFAGLSASPEQVLERHFDVDTDELVLVKNIELYSVCEHHLLPFHGVAHVGYIPAKDGVMGLSKLARLVEVYARRPQVQERLTQQIADALVEYAGARGVIVVTECEHLCMSMRGVRKSEARTVTSAVRGLLRNPATRAEAMSLIMSR

SEQ ID NO: 5540 - protein, 211 aa, Bifidobacterium stercoris; identical to SEQ ID NO: 5501
  misc_feature (1)..(211): tr|A0A087DM37|A0A087DM37_BIFAD GTP cyclohydrolase 1 OS= Bifidobacterium stercoris JCM 15918 OX=1437612 GN=folE PE=3 SV=1

SEQ ID NO: 5541 - protein, 227 aa, Bifidobacterium thermacidophilum
  misc_feature (1)..(227): tr|A0A087E6I0|A0A087E6I0_9BIFI GTP cyclohydrolase 1 OS= Bifidobacterium thermacidophilum subsp. thermacidophilu m OX=79262 GN=folE PE=3 SV=1
MNSTDETNRQAGQASQIATAAATGAAGAPCAAHQQGTPDDGIDDAAIRTAVRMYLKAIGEDPDRDGLLDTPDRIARASHELFAGLHSNPQQVLEKRFPVDTDEMVLVRDIELYSVCEHHLLPFHGVAHVGYIPSHGAVVGLSKLARLVDVYARRPQVQERLTQQIADALMEYADARGVIVVTECEHLCMSMRGVKKSQARTTTSAVRGIMKNPTTRAEAMSLIFSQR

SEQ ID NO: 5542 - protein, 227 aa, Bifidobacterium thermophilum
  misc_feature (1)..(227): tr|A0A2N3QK95|A0A2N3QK95_9BIFI GTP cyclohydrolase 1 OS= Bifidobacterium thermophilum OX=33905 GN=folE PE=3 SV=1
MNSTDETNRQAGQASQIATAATTGVAGAPCAAHQQGTPDDGIDDAAIRTAVRMYLKAIGEDPDRDGLLDTPDRIARASHELFAGLHSNPQQVLEKRFPVDTDEMVLVRDIELYSVCEHHLLPFHGVAHVGYIPSHGAVVGLSKLARLVDVYARRPQVQERLTQQIADALMEYADARGVIVVTECEHLCMSMRGVKKSQARTTTSAVRGIMKDPTTRAEAMSLIFSQR

SEQ ID NO: 5543 - protein, 227 aa, Bifidobacterium thermophilum
  misc_feature (1)..(227): tr|M4RGB7|M4RGB7_9BIFI GTP cyclohydrolase 1 OS=Bifidoba cterium thermophilum RBL67 OX=1254439 GN=folE PE=3 SV=1
MNSTDETNRQAGQASQIATAATTGAAGAPCVARQQGTPDDGIDDAAIRTAVRMYLKAIGEDPDRDGLLDTPDRIARASHELFAGLHSNPQQVLEKRFPVDTDEMVLVRDIELYSVCEHHLLPFHGVAHVGYIPSHGAVVGLSKLARLVDVYARRPQVQERLTQQIADALMEYADARGVIVVTECEHLCMSMRGVKKSQARTTTSAVRGIMKDPTTRAEAMSLIFSQR

SEQ ID NO: 5544 - protein, 204 aa, Bifidobacterium tissieri
  misc_feature (1)..(204): tr|A0A261FCM8|A0A261FCM8_9BIFI GTP cyclohydrolase 1 OS= Bifidobacterium tissieri OX=1630162 GN=folE PE=3 SV=1
MSEVAQKAQAQEEQTQGAFDEEGVRQAVRLYLKSIGEDPDREGLLDTPDRIARASRELFAGLHQDPKDVLSARFKVDTEEMVLVRDIELYSVCEHHLLPFHGVAHVGYIPSKEGVTGLSKLARLVEVYARRPQVQERLTQQIADALMDYVDARGAIVVTECEHLCMSMRGVKKSQARTTTSAVRGIMRQPATRAEAMSLILSQH

SEQ ID NO: 5545 - protein, 195 aa, Bifidobacterium vansinderenii
  misc_feature (1)..(195): tr|A0A229VYN6|A0A229VYN6_9BIFI GTP cyclohydrolase 1 OS= Bifidobacterium vansinderenii OX=1984871 GN=folE PE=3 S V=1
MSDTAAPRTFDEEGVRQAVRLYLKSIGEDPDREGLLDTPDRIARASRELFAGLRQDPKDVLSARFKVDTEEMVLVRDIELYSVCEHHLLPFHGVAHVGYIPSKEGVTGLSKLARLVEVYARRPQVQERLTQQIADALMDYVDARGAIVVTECEHLCMSMRGVKKSQARTTTSAVRGLMRQPATRAEAMSLILSQH

SEQ ID NO: 5546 - protein, 259 aa, Bilophila sp.
  misc_feature (1)..(259): tr|G1V3W0|G1V3W0_9DELT GTP cyclohydrolase FolE2 OS=Bilo phila sp. 4_1_30 OX=693988 GN=folE2 PE=3 SV=1
MEDVQNSPAPVALPIDRVGVKGLKLPLLVRDRAQGTQHTVANVDVSVDLPAAFKGTHMSRFVQALANWTEDLDYAGMKRLLEDVRERLNARRAHIVFHFPYFVQKNAPATACPGILPYECRLTGELPEDGKPSFLLEVTVPVMTVCPCSKAISREGAHSQRADVRMAVRMRGFCWIEDFIEIAEASGSSPVYSLLKREDEKFVTEDAFSRPTFVEDVVRNVASRLADHPHVSGFRVEVESYESIHAHNAFACIEHGVTL

SEQ ID NO: 5547 - protein, 259 aa, Bilophila wadsworthia; identical to SEQ ID NO: 5546
  misc_feature (1)..(259): tr|E5Y3H2|E5Y3H2_BILWA GTP cyclohydrolase FolE2 OS=Bilo phila wadsworthia 3_1_6 OX=563192 GN=folE2 PE=3 SV=1

SEQ ID NO: 5548 - protein, 221 aa, Biostraticola sp.
  misc_feature (1)..(221): tr|A0A4U2UFS5|A0A4U2UFS5_9ENTR GTP cyclohydrolase 1 OS= Biostraticola sp. BGMRC 2031 OX=2575567 GN=folE PE=3 SV =1
MVSLTKEALLVHEALMARGLETPQSGEVLEAETRKRLIAEHMAGIMKLLNLDLTDDSLAETPHRIAKMYVDEIFSGLDYANFPKITLIENKMKVDEMVAVRNITLTSTCEHHFVIIDGKATVAYIPKDSVIGLSKINRIVQFFAQRPQVQERLTQQILIALQTLLGTNNVAVSIDAVHYCVKARGVKDATSATTTTSLGGLFKSSQNTRQEFLRAVRHHGD

SEQ ID NO: 5549 - protein, 299 aa, Biostraticola sp.
  misc_feature (1)..(299): tr|A0A4U2UB81|A0A4U2UB81_9ENTR GTP cyclohydrolase FolE2 OS=Biostraticola sp. BGMRC 2031 OX=2575567 GN=folE2 PE =3 SV=1
MLPDIQSTKADADAESLSWVGMEQIDLPVEIAGRPVSARVNAGINLLSSMDAEKGIHMSRLYLLLDELTQHEITPVLLGTVLEGFLKSHRGRSDEASITITGELLLSRKSLNSNYFGWKAYPIHLRAELKKGLTVTLKAGIPYSSTCPASAALSRHVAALQFRNDFGNCIDRLPVEEVAEWLTNKGMPATPHSQRSWAWVTVLLHPDADSFPVHDVIDYAEIALGTAVQTVVKRSDEQAFAVANGQNLMFCEDAARRLSKAFHAAPFCEDFEIHVEHQESLHAHNAVARIYRKGTRNVT

SEQ ID NO: 5550 - protein, 219 aa, Biostraticola tofi
  misc_feature (1)..(219): tr|A0A4R3Z7P8|A0A4R3Z7P8_9ENTR GTP cyclohydrolase 1 OS= Biostraticola tofi OX=466109 GN=folE PE=3 SV=1
MLSLTKEAALVHQALLARGLETPLRGEMLDAEVRKARIAGHMTEIMNLLNLDLEDDSLAETPHRIAKMYVDEIFAGLDYANFPKITVIQNKMKVDEMVTVRDITLTSTCEHHFVIIDGKATVAYIPKDCVIGLSKINRIVQFFAQRPQVQERLTQQILIALQTLLGTNNVAVCIDAVHYCVKARGIRDATSATTTTSLGGLFKSSQNTRQEFLRAVRHL

SEQ ID NO: 5551 - protein, 218 aa, Bisgaardia hudsonensis
  misc_feature (1)..(218): tr|A0A4R2N1A9|A0A4R2N1A9_9PAST GTP cyclohydrolase 1 OS= Bisgaardia hudsonensis OX=109472 GN=folE PE=3 SV=1
MSNLLPEAIKVRNALVEKGIETPMLSLMENKEQRKISIEKHMREVMKLIGLDLKDDSLEETPFRLAKMFIDEIFSGLDYANFPKITNIENRMKVSEMVLVNDITLTSTCEHHFVTIDGMVSVAYYPKKWVIGLSKINRVVSFFAQRPQVQERLTEQILLAFQTILETEDVAVYVKATHFCVKCRGIKDTNSYTVTSAFGGVFLDDRETRKEFLSLINK

SEQ ID NO: 5552 - protein, 231 aa, Bizionia algoritergicola
  misc_feature (1)..(231): tr|A0A5D0QX62|A0A5D0QX62_9FLAO GTP cyclohydrolase 1 OS= Bizionia algoritergicola OX=291187 GN=folE PE=3 SV=1
MKIQTKSNNQNPNALNGFSTDMIGDDHLSTGLETPMKSDAFKLSDSEKKERISVLFEEIMDVLGLDLNDDSLKGTPDRVAKMYIDEIFSGLNPENKPKIALFENKYRYNQMVLEKNITFYSNCEHHFVPIIGKAHLAYISSGKVIGLSKLNRIVQYFAKRPQVQERLTNQIANELKTILDTEDIAVIIDAKHLCVSSRGVKDDASATVTAYYGGAFNSPEKIIELQNYLNH

SEQ ID NO: 5553 - protein, 225 aa, Bizionia algoritergicola
  misc_feature (1)..(225): tr|A0A5D0QTA0|A0A5D0QTA0_9FLAO GTP cyclohydrolase 1 OS= Bizionia algoritergicola OX=291187 GN=folE PE=3 SV=1
MKINDNTADFDAIGDDHVGTSADTPLRSDAFVLNSEEKIKIIKEDVRHILETLGLDLTDDSLQGTPNRVAKMFVNEIFGGLNPDKKPSASTFDNKYKYGEMLVEKNITVYSTCEHHLLPIVGKAHVAYISNGTVVGLSKMNRIVDYFAKRPQVQERLTIQVVKELQNVLNTDDVACVIDAKHLCVNSRGIRDTESSTVTAEFGGKFKEAGTRREFLDYIKLDTAF

SEQ ID NO: 5554 - protein, 232 aa, Bizionia argentinensis
  misc_feature (1)..(232): tr|G2ECG3|G2ECG3_9FLAO GTP cyclohydrolase 1 OS=Bizionia argentinensis JUB59 OX=1046627 GN=folE PE=3 SV=1
MKTETIPFEKQNNNSLVDFSTEAIGDDHLYTGLETPMKPDAFKLSDTEKKARISLLFEEIMDVMGLDLTDDSLKGTPNRVAKMYIDEIFSGLNPANKPKIALFENKYRYNQMVLEKNITFYSNCEHHFVPIIGKAHLAYISSRKVIGLSKLNRIVQYFAKRPQVQERLTNQIAIELKTILETEDIAVIIDAKHLCVSSRGVKDDTSATVTAYYGGAFNTPHKIAELQNYLNN

SEQ ID NO: 5555 - protein, 225 aa, Bizionia argentinensis
  misc_feature (1)..(225): tr|G2ED62|G2ED62_9FLAO GTP cyclohydrolase 1 OS=Bizionia argentinensis JUB59 OX=1046627 GN=folE PE=3 SV=1
MKINDNTADFDALGDDHVGTSADTPLRSDAFVLNSEEKIEIIKNDVRHIMETLGLDLTDDSLKGTPNRVAKMFVNEIFSGLNPAIKPSASTFDNKYKYGEMLVEKNITVYSTCEHHLLPIVGKAHVAYISNGTVVGLSKMNRIVDYFAKRPQVQERLTIQVVKELQRVLNTEDVACVVDAKHLCVNSRGIRDTESSTITAEFGGKFKDIETRREFLDYIKLDTKF

SEQ ID NO: 5556 - protein, 232 aa, Bizionia echini
  misc_feature (1)..(232): tr|A0A1I5AH62|A0A1I5AH62_9FLAO GTP cyclohydrolase 1 OS= Bizionia echini OX=649333 GN=folE PE=3 SV=1
MKIESTVSKNQQNNSLNGFSTEMIGDDHLFTGLETPLKKDAFKLSDSEKKQRISVLFEEIMDVMGLDLTDDSLKGTPDRVAKMYIEEIFSGLNPKNKPKIALFENKYRYNQMVLEKNITFYSNCEHHFVPIIGKAHVAYISSGKVIGLSKLNRIVQYFAKRPQVQERLTNQIANELKTILETEDIAVIIDAKHLCVSSRGIKDDTSATVTAYYGGVFNTPEKIIELQNYLNH

SEQ ID NO: 5557 - protein, 225 aa, Bizionia echini
  misc_feature (1)..(225): tr|A0A1I5CP87|A0A1I5CP87_9FLAO GTP cyclohydrolase 1 OS= Bizionia echini OX=649333 GN=folE PE=3 SV=1
MKINDNTADFDAIGDDHVGTSADTPLRNDAFVLNSEEKIDIIKDDVRHIMETLGLDLSDDSLKGTPNRVAKMFVNEIFGGLNPNKKPSASTFENKYKYGEMLVEKNITVYSTCEHHLLPIVGKAHVAYISNGSVVGLSKMNRIVDYFAKRPQVQERLTIQVVQELQKVLNTDDVACVIDAKHLCVNSRGIRDTESSTVTAEFGGKFKEAGTRREFLDYIKLDTAF

SEQ ID NO: 5558 - protein, 232 aa, Bizionia myxarmorum
  misc_feature (1)..(232): tr|A0A5D0QZV7|A0A5D0QZV7_9FLAO GTP cyclohydrolase 1 OS= Bizionia myxarmorum OX=291186 GN=folE PE=3 SV=1
MKAEVLTTENQNTNVLYGFPTETIGDDHLYTGLETPMKADAFKLSDSEKKQRIALLFEEIMDVMGLDLTDDSLKGTPDRVAKMYIDEIFSGLNPANKPKIALFENKYRYNQMVLEKNITFYSNCEHHFVPIIGKAHLAYISSGKVIGLSKLNRIVQYYAKRPQVQERLTNQIANELKMTLETEDIAVIIDAKHLCVSSRGIKDDTSETVTAYYGGAFNTPEKIAELQNYLKH

SEQ ID NO: 5559 - protein, 225 aa, Bizionia myxarmorum
  misc_feature (1)..(225): tr|A0A5D0RET1|A0A5D0RET1_9FLAO GTP cyclohydrolase 1 OS= Bizionia myxarmorum OX=291186 GN=folE PE=3 SV=1
MKINDNTADFDAIGDDHVGTSADTPLRKDAFVLNSEEKIAIIKEDVRHIMETLGLDLTDDSLKGTPNRVAKMFVNEIFSGLNPAKKPSASTFDNKYKYGEMLVEKNITVYSTCEHHLLPIVGKAHVAYISNGTVVGLSKMNRIVDYFAKRPQVQERLTIQVVKELQRVLNTEDVACVMDAKHLCVNSRGIRDTESSTVTAEFGGKFKDPGTRREFLDYIKLETQF

SEQ ID NO: 5560 - protein, 198 aa, Bizionia paragorgiae
  misc_feature (1)..(198): tr|A0A1H4A842|A0A1H4A842_9FLAO GTP cyclohydrolase 1 OS= Bizionia paragorgiae OX=283786 GN=folE PE=3 SV=1
MSNKNFEEYNIKVTDAMQLRYKSIIEDLGENTKRDGLLKTPERAAKAMQFLTQGYEQDAAEILKSAMFKESYNEMVIVKDIELYSLCEHHILPFFGKAHIAYIPNGQIVGLSKIPRIVDVFSRRLQVQERLTEQILNCINETLKPEGVAVVIEASHMCMMMRGVQKQNSTTTTSGFRGAFKNIETRTEFLKLISENLS

SEQ ID NO: 5561 - protein, 225 aa, Bizionia paragorgiae
  misc_feature (1)..(225): tr|A0A1H3ZPA8|A0A1H3ZPA8_9FLAO GTP cyclohydrolase 1 OS= Bizionia paragorgiae OX=283786 GN=folE PE=3 SV=1
MEIDNTTKNHDSIGENHVGTSADTPMKADAFKLTSAEKIEIIKDDVRHIMETLGLDLTDDSLSGTPNRVAKMFVNEIFGGLDPQKKPSASTFDNKYKYGEMLVEKNITVYSTCEHHLLPIVGRAHIAYISNGTVVGLSKMNRIVDYFAKRPQVQERLTIQVVKELQKVLNTEDVACVIDAKHLCVNSRGIRDIESSTVTSEFGGQFKNKDIKREFLDYIKLDTTF

SEQ ID NO: 5562 - protein, 225 aa, Bizionia saleffrena
  misc_feature (1)..(225): tr|A0A5D0QYD8|A0A5D0QYD8_9FLAO GTP cyclohydrolase 1 OS= Bizionia saleffrena OX=291189 GN=folE PE=3 SV=1
MEIDNTTKNHESIGENHIGTSAVTPMKADAFKLTSTEKIDIIKDDVRHILETLGLDLSDDSLSGTPNRVAKMFVNEIFGGLDPQNKPSASTFDNKYKYGEMLVEKNITVYSTCEHHLLPIVGRAHIAYISNGTVVGLSKMNRIVDYFAKRPQVQERLTLQVVQELQKVLNTEDVACVMDAKHLCVNSRGIRDIDSSTVTAEFGGQFKNKDTKREFLDYIKLDTTF

SEQ ID NO: 5563 - protein, 198 aa, Bizionia saleffrena
  misc_feature (1)..(198): tr|A0A5D0R7E6|A0A5D0R7E6_9FLAO GTP cyclohydrolase 1 OS= Bizionia saleffrena OX=291189 GN=folE PE=3 SV=1
MPYKKFEEYNMQVTDDVKDRYKAIIEDLGENTEREGLLKTPERAAKALQFLTQGYEQDAAEILKSAMFKESYNEMVIVKDIELYSLCEHHILPFFGKAHIAYIPNGHIVGLSKIPRIVDVFSRRLQVQERLTEQILNCINDTLKPEGVAVVIEASHMCMMMRGVQKQNSTTTTSGFRGAFKNIETRTEFLKLISEKLS

SEQ ID NO: 5564 - protein, 204 aa, Blastocatellia bacterium
  misc_feature (1)..(204): tr|A0A317I0I6|A0A317I0I6_9BACT GTP cyclohydrolase 1 OS= Blastocatellia bacterium OX=2052146 GN=folE PE=3 SV=1
MATKFSEQKNKEETVPPVDLDLIAQGVRMILEGIGEDPERSGLQETPQRVAEMFAELTSGMREDPNEHVVPLPGDKHDEMVIVKDISIASMCEHHLAPFVGKCHIAYIPKGGRILGISKLARLAETFSRRLQLQERLTTDIANTLFEGLKPLGVMVVIEAEHTCMTLRGVRKADAKTVTSAVLGGFRTDPRTRAEAMSLIKGRD

SEQ ID NO: 5565 - protein, 208 aa, Blastocatellia bacterium
  misc_feature (1)..(208): tr|A0A3B9LW45|A0A3B9LW45_9BACT GTP cyclohydrolase 1 OS= Blastocatellia bacterium OX=2052146 GN=folE PE=3 SV=1
MATKFSKDDQNHTSLENDLPPVDLELIAQGVRLILEGLGENPDRSGLQETPRRVAEMYAELTSGMREDPRQHVIPLPGDKHDEMVIVKDIQFASMCEHHLAPFVGKCHIAYIPKEGRILGISKLARLAETFSRRLQLQERLTTDIANTLYEGLKPIGVMVVIEAAHTCMTLRGVRKADAKTITSAVLGGFRTDPRTRAEAMALITGKE

SEQ ID NO: 5566 - protein, 214 aa, Blastochloris sp.
  misc_feature (1)..(214): tr|A0A348G0P6|A0A348G0P6_9RHIZ GTP cyclohydrolase 1 OS= Blastochloris sp. GI OX=2233851 GN=folE PE=3 SV=1
MDASVAPLFPQAKDTPTQPTPPVARPSRAEAEAAVRTLIAWTGDDPTREGLIDTPARVVKAYEELYRGYGEDAEAFLERTFSETGGYDDMVLVRDIPFHSHCEHHMVPFFGKAHIAYVPVDRVVGLSKIARIVDAFARRLQTQEHLTAQIIGTIDEVLKPRGVAVLIEAEHMCMTMRGVQKAGASTLTTQFTGVFRDDPAEQARFMTLLRQGRG

SEQ ID NO: 5567 - protein, 211 aa, Blastochloris viridis
  misc_feature (1)..(211): tr|A0A0H5BQ95|A0A0H5BQ95_BLAVI GTP cyclohydrolase 1 OS= Blastochloris viridis OX=1079 GN=folE_1 PE=3 SV=1
MDASVAPLFRHVEEPTAAAVARPSREDAEAAVRTLIAWAGDDPGREGLIDTPKRVVRAYEELFGGYREDAAAFLERTFSETGGYDDMVLVRDISFHSHCEHHMVPFFGRAHVAYVPIDRVVGLSKIARIVDAFARRLQTQEHLTAQIVSTLDEVLKPRGVAVLIEAEHMCMTMRGVQKAGASTMTTQFTGVFRDDPAEQARFMTLLRQGRG

SEQ ID NO: 5568 - protein, 207 aa, Blastococcus aggregatus
  misc_feature (1)..(207): tr|A0A285VA01|A0A285VA01_9ACTN GTP cyclohydrolase 1 OS= Blastococcus aggregatus OX=38502 GN=folE PE=3 SV=1
MTAPMPEVAEVRSHRFRVVRGRAGLDLDGAEQAVTGLLRALGKDPAEPHLADTPRRVAAAFAEMLTPPSFDLTTFPNDEGYDELVMATAIPVQSLCEHHLLPFTGTAAIGYLPGDRILGLSKLARVLDLFARDLQVQERLTQQVADWLQENLAPRGVGVVLRAEHLCMSLRGVRARGARTTTSALHGVLREDARSRQEFFALAGTGE

SEQ ID NO: 5569 - protein, 191 aa, Blastococcus aggregatus
  misc_feature (1)..(191): tr|A0A285V1H4|A0A285V1H4_9ACTN GTP cyclohydrolase 1 OS= Blastococcus aggregatus OX=38502 GN=folE PE=3 SV=1
MTHRIDSARAEAAVRELLIAIGEDPDRPGLQDTPARVARAYAETFGGLWQDPYDILATTFDENHDELVLVKDIPMYSTCEHHLVPFHGVAHVGYIPGTDGRVTGLSKIARLVEVYARRPQVQERMTRQIADALDDVLKPQGVIVVIEAEHLCMAMRGIRKPGTTTVTSAVRGIFRDSAATRSEAMSLVLGR

SEQ ID NO: 5570 - protein, 205 aa, Blastococcus colisei
  misc_feature (1)..(205): tr|A0A543P134|A0A543P134_9ACTN GTP cyclohydrolase 1 OS= Blastococcus colisei OX=1564162 GN=folE PE=3 SV=1
MSEVPAEREDQLLTAPRGVDQERAAAAVRELLLAVGEDPDRPGLQDTPQRVARAYAETFAGLWQDPYDVLATTFDEDHDELVLVKDIPMYSTCEHHLVPFHGVAHIGYVPGEDGRVTGLSKLARLVEVYARRPQVQERMTSQIADALSDVLKPRGVLVIIEAEHLCMAMRGIRKPGSTTVTSAVRGIFRDNPATRSEAMSLVLHR

SEQ ID NO: 5571 - protein, 205 aa, Blastococcus endophyticus
  misc_feature (1)..(205): tr|A0A1H8UZZ2|A0A1H8UZZ2_9ACTN GTP cyclohydrolase 1 OS= Blastococcus endophyticus OX=673521 GN=folE PE=3 SV=1
MSEIPEEAEDEVRPVYGQIDHARAEAAVRELLIAVGEDPDRPGLQNTPGRVARAYAETFAGLWQDPYEVLATVFDEDHDEMVLVKDIPMYSTCEHHLVPFHGVAHVGYIPGEDGRVTGLSKLARLVDMYARRPQVQERMTRQIADALHEVLKPRGVIVIVEAEHLCMGMRGIRKPGSSTVTSAVRGMFRDSAATRSEAMSLVLGR

SEQ ID NO: 5572 - protein, 201 aa, Blastococcus endophyticus
  misc_feature (1)..(201): tr|A0A1H8W8E5|A0A1H8W8E5_9ACTN GTP cyclohydrolase 1 OS= Blastococcus endophyticus OX=673521 GN=folE PE=3 SV=1
MTSIDVPASRQRPSFDAARAEAAVRELLVAVGEDPDRPGLRDTPARVARAYAETFGGLVQDPAEVLSTTFEEDHDELVLVKDIPMYSTCEHHLVPFHGVAHIAYIPSEDGRVTGLSKLARLVDVYARRPQVQERMTRQVADALHDVLKPRGVLVVVQAEHLCMGMRGIRKPGAVTTTSAVRGLFRDSAATRAEAMSLVLGR

SEQ ID NO: 5573 - protein, 205 aa, Blastococcus saxobsidens
  misc_feature (1)..(205): tr|A0A4Q7YBP1|A0A4Q7YBP1_9ACTN GTP cyclohydrolase 1 OS= Blastococcus saxobsidens OX=138336 GN=folE PE=3 SV=1
MSEIPAEPEDLLLTPAPGVDQERAAAAVRELLVAVGEDPDRPGLQDTPARVARAYAETFAGLWQDPYEILATTFDEDHNELVLVKDIPMYSTCEHHLVPFHGVAHVGYIPGSDGRVTGLSKLARLVEVYARRPQVQERMTSQIADALADVLKPRGALVVIQAEHLCMAMRGIRKPGSTTVTSAVRGIFREDARTRSEAMSLILGR

SEQ ID NO: 5574 - protein, 205 aa, Blastococcus saxobsidens
  misc_feature (1)..(205): tr|H6RPW4|H6RPW4_BLASD GTP cyclohydrolase 1 OS=Blastoco ccus saxobsidens (strain DD2) OX=1146883 GN=folE PE=3 S V=1
MSEVPAEPADQLLEPVRGVDQQRAAAAVRELLLAIGEDPDRPGLRDTPDRVARAYAETFAGLAQDPYDILATTFDEDHDELVLVKDIPMYSTCEHHLVPFHGVAHVAYIPGDDGRVTGLSKLARLVEVYARRPQVQERMTRQIADALNDALKPRGALVVVQAEHLCMAMRGVRKPGSSTVTSAVRGIFRENAATRSEAMSLVLGR

SEQ ID NO: 5575 - protein, 205 aa, Blastococcus sp.
  misc_feature (1)..(205): tr|A0A4U3CJN2|A0A4U3CJN2_9ACTN GTP cyclohydrolase 1 OS= Blastococcus sp. CCUG 61487 OX=1840703 GN=folE PE=3 SV= 1
MSIVPGEPEDRVEPALDRIDSARAEAAVRELLLAIGEDPDRPGLQDTPARVARAYAETFAGLWQDPYDVLATTFEENHDELVLVKDIPMYSTCEHHLVPFHGQAHVGYIPAEDGRVTGLSKIARLVEVYARRPQVQERMTRQIADALDEVLKPRGVLVVVEAEHLCMAMRGIRKPGSTTVTSAVRGIIRDNAATRSEAMSLVLGR

SEQ ID NO: 5576 - protein, 205 aa, Blastococcus sp.
  misc_feature (1)..(205): tr|A0A4Y9NA66|A0A4Y9NA66_9ACTN GTP cyclohydrolase 1 OS= Blastococcus sp. AZ43 OX=2559606 GN=folE PE=3 SV=1
MSEIPAEPEDQLLDRPRGVDEERAAAAVRELLLAIGEDPDRPGLQDTPGRVARAYAETFAGLWQDPYDVLATVFDEDHDEMVLVKDIPMYSTCEHHLVPFHGQAHVGYIPGSDGRVTGLSKLARLVEVYARRPQVQERMTRQIADALYEVLKPQGVIVVIEAEHLCMAMRGIRKPGSTTVTSAVRGIFRDNPATRSEAMSLVLGR

SEQ ID NO: 5577 - protein, 204 aa, Blastomonas fulva
  misc_feature (1)..(204): tr|A0A222X1N3|A0A222X1N3_9SPHN GTP cyclohydrolase 1 OS= Blastomonas fulva OX=1550728 GN=folE PE=3 SV=1
MLYHDADDDHDVAGKGKIPVPVDVQEAIVTLLRWTGDDPDREGLRDTPLRVARAWKEYCSGYDDDPSVHLSRTFEEVGGYDELVLLKDIPFQSHCEHHMAPIIGKASIAYMPRDRVVGISKLARVLHGFSRRLQVQERLTAEVAACIWEHLQPHGVAVVIEASHSCMTARGVRTPGVSMITSRLLGCFLDDHRSREEVMSLMGY

SEQ ID NO: 5578 - protein, 204 aa, Blastomonas natatoria
  misc_feature (1)..(204): tr|A0A2V3V510|A0A2V3V510_9SPHN GTP cyclohydrolase 1 OS= Blastomonas natatoria OX=34015 GN=folE PE=3 SV=1
MLYHDADYDGDLSENGKIPVPQDVQQAIVTLLRWTGDNPEREGLRDTPLRVARAWKEYCSGYDDDPSVHLSRTFEEVGGYDELVLLKDIPFQSHCEHHMAPIIGKASIAYMPRDRVVGISKLARVLHGYARRLQVQERLTAEVAACIWEHLQPHGVAVVIEASHSCMTARGVRTPGVGMITSRLLGCFLEDHRSREEVMSLMGY

SEQ ID NO: 5579 - protein, 207 aa, Blastomonas sp.
  misc_feature (1)..(207): tr|W9BXL2|W9BXL2_9SPHN GTP cyclohydrolase 1 OS=Blastomo nas sp. CACIA14H2 OX=1419876 GN=folE PE=3 SV=1
MSSDSKTARQRSDPVGPDGKLLVPEHVEEAIRTLIRWAGDDPAREGLRDTPRRVARAWKEYCQGYAEAPEAHLSRMFEEVGGYNELVLLKDIPFHSHCEHHMAPIIGKAAIAYLPRNNVVGISKLARVSHGFARRLQIQERLTAEVAQCIWDNLNPVGVAVVVEASHACMTARGVGTPGVTMVTSRMMGIFLDDDRSRKEVLSLMGY

SEQ ID NO: 5580 - protein, 223 aa, Blastomonas sp.
  misc_feature (1)..(223): tr|W9C3L9|W9C3L9_9SPHN GTP cyclohydrolase 1 OS=Blastomo nas sp. CACIA14H2 OX=1419876 GN=folE PE=3 SV=1
MPSAAPYLTRQFVIKGECQMLYHDADDDGEMSEKGKIPVPQDVQQAIVTLLRWTGDDPEREGLRDTPLRVARAWKEYCSGYGDDPSVHLSRTFEEVGGYDELVLLKDIPFQSHCEHHMAPIIGKASIAYMPKDRVVGISKLARVLHGYARRLQVQERLTAEVAACIWEHLQPHGVAVVIEASHSCMTARGVRTPGVGMITSRLLGCFLDDHRSRKEVMGLMGY

SEQ ID NO: 5581 - protein, 304 aa, Blastopirellula cremea
  misc_feature (1)..(304): tr|A0A368KPP2|A0A368KPP2_9PLAN GTP cyclohydrolase FolE2 OS=Blastopirellula cremea OX=1031537 GN=folE2 PE=3 SV= 1
MLPDVANDTAPQFQSAIDRVGMSGIEVAILVRGEDDVLMRTPARVDAYVSLDDPAIKGIHMSRLYLSLQNELHTEFSRKQIERILGRFLETHQGMSASAYLCFSFEHMIQRASLLSDNLAWRSYPIQVEALRKGDEVKYRVHVRLTYSSACPCSAALSRQLLQQQFEEQFYGHNWLSASTVLSWLGANSTLIAVPHSQRSHADITVDLDETRSDLPIEEIIQRTEGVLNTAVQAAVKRADEQEFARLNGENLMFCEDAARRMKSAIDQMEGVTDYRIQASHFESLHPHDAVAIVVKGVPGGLKP

SEQ ID NO: 5582 - protein, 304 aa, Blastopirellula marina
  misc_feature (1)..(304): tr|A3ZTI5|A3ZTI5_9PLAN GTP cyclohydrolase FolE2 OS=Blas topirellula marina DSM 3645 OX=314230 GN=folE2 PE=3 SV= 1
MLPDVAADAAPIVQGKLNRVGMSGIEVAIRLRDANGDVIRTPARVDAYVSLDDPEVKGIHMSRLYLCLQDSLDDEFGRAQIETILQRFLETHSDISATSYLRFSYELMVRRESLLSDHSAWRSYPVKIEAWSSGGKVTYRVHVRLTYSSACPCSAALARQLLQQQFEEQFFGHHWLSTASVLNWLGSNETLMAVPHSQRSHADITIELDGQRDDLPIDELITCTEGALNTAVQAAVKRTDEQEFARLNGENLMFCEDAARRLKNAVDSLEGIHDYRIQASHFESLHPHDAVAIVTKGVPGGLTA

SEQ ID NO: 5583 - protein, 304 aa, Blastopirellula marina
  misc_feature (1)..(304): tr|A0A2S8GMT2|A0A2S8GMT2_9PLAN GTP cyclohydrolase FolE2 OS=Blastopirellula marina OX=124 GN=folE2 PE=3 SV=1
MLPDVANDTAPQFQSSIDRVGMSGIEVAILVRAEDDVLMRTPAKVDAYVSLDDPAIKGIHMSRLYLSLQNELHTEFSRKQIERILGRFLETHQEMSGSAYLQFSFEHMLQRASLLSDNTAWRSYPVQVEALQRGNEIKYRLHVRLTYSSACPCSAALSRQLLQQQFEEQFYGHNWLSASTVLNWLGSNNTLIAVPHSQRSHADITVDLDETRTNLPIDEIIQRTEGVLNTAVQAAVKRADEQEFARLNGENLMFCEDAARRMKSAIEPMEGVTDFRIQASHFESLHPHDAVAIVVKGVPGGLKP

SEQ ID NO: 5584 - protein, 214 aa, Blastopirellula sp.
  misc_feature (1)..(214): tr|A0A2E0ARF9|A0A2E0ARF9_9PLAN GTP cyclohydrolase 1 OS= Blastopirellula sp. OX=2024826 GN=folE PE=3 SV=1
MSTEHERETGSLMGEREADDLPDSSSAVDLPRIERAVREILAAVGEDPDREGLLETPARVSRMYAELFGGLHSDPRQHLKKFFTEKYDEVVLVRDISFCSMCEHHLLPFTGKAHIGYLPDGKVIGLSKLARVVEVVSRRPQVQERMTDDVADMLMDELGARGVAVIIEASHSCMTIRGIRKPGSLCVTSAMKGIFRKNEKTRQEIMQLIYGDRR

SEQ ID NO: 5585 - protein, 275 aa, Blastopirellula sp.
  misc_feature (1)..(275): tr|A0A2E0B1J3|A0A2E0B1J3_9PLAN GTP cyclohydrolase FolE2 OS=Blastopirellula sp. OX=2024826 GN=folE2 PE=3 SV=1
MIEDFQKKTALPDIQSTRDERNIAIDKVGVTAVSFPIQFASSSESLVTPAQHTIANFDLFVSLPKDERGTHMSRFLQVLHGWDRPLSYDALRELSERIRGELQAEAAHLKVRFPYFVERAAPVSGEPGKLQLQVAIEVETGRQCDLVLNVKGPATSLCPCSKQISDRGAHNQRCELNVSLRLQPGTSMFVEELFSLMEQAASTQVFPTLKRPDEKWVTEAAYDNPKFVEDIVRDLAVVLNSDERVVWYRCSSENFESIHQHNAFAEVELDKRMND

SEQ ID NO: 5586 - protein, 229 aa, Blattabacterium cuenoti
  misc_feature (1)..(229): tr|M4ZS83|M4ZS83_9FLAO GTP cyclohydrolase 1 OS=Blattaba cterium cuenoti BPAA OX=1229512 GN=folE PE=3 SV=1
MMEEKHNKIKKKKLNQKYNSILNHSINSDLTSQNNVYFMSDEEKIEKIKKHFFQIMEILGLDMNDDSLRKTPKRVAKMFIQEIFSGLNPKNTPNFSIFENKYRYNQMLIEKNITVYSTCEHHFLPIIGKAHVGYISNGKVVGLSKINRIVNFYAKRPQVQERLTIQIVQSLKKMLETQDVACIIEAKHLCVNSRGIKDTDSSTVTTELIGSFKNNSEIRKEFLHHIGIS

SEQ ID NO: 5587 - protein, 191 aa, Blattabacterium cuenoti
  misc_feature (1)..(191): tr|A0A224AK50|A0A224AK50_9FLAO GTP cyclohydrolase 1 OS= Blattabacterium cuenoti STAT OX=1457030 GN=folE PE=3 SV =1
MSEEKKIEKIEKHFFHIMEILGLDMNDDSLRKTPKRVAKMFIREIFSGLDPKNTPNFSIFENKYKYNQMLIEKNITVYSTCEHHFLPIIGKAHVGYISNGKVAGLSKINRIVNFYAKRPQVQERLTIQIVQSLKKMLETKDVACIIEAKHLCVNSRGIRDTDSSTITTELIGAFKKDSEIRKEFLHHIGIS

SEQ ID NO: 5588 - protein, 225 aa, Blattabacterium punctulatus
  misc_feature (1)..(225): tr|A0A2U9QAE2|A0A2U9QAE2_9FLAO GTP cyclohydrolase 1 OS= Blattabacterium punctulatus OX=164514 GN=folE PE=3 SV=1
MMEEKHKKFFKKKIKETISSLEDHETPLRNDAFFISDEEKISKIEKYFFHIMEILGLNMNDDSLRSTPKRVAKMFIKEIFSGLNPKTFPKVSTFENKYRYNQMLIEKNITIYSICEHHFLPIVGKAHVGYISNGKVIGLSKINRIVNYYSKRPQVQERLTIQIVKSLQKILDTKNVACIIEAKHLCVNSRGIQDINTKTITTKLLGIFKKNSEIRKEFFHYIGIS

SEQ ID NO: 5589 - protein, 225 aa, Blattabacterium punctulatus
  misc_feature (1)..(225): tr|A0A2U9QBV5|A0A2U9QBV5_9FLAO GTP cyclohydrolase 1 OS= Blattabacterium punctulatus OX=164514 GN=folE PE=3 SV=1
MMEEKHKKFFKKKIKETISSLEDHETPLRNDAFFISDEEKISKIEKYFFHIMEILGLNMNDDSLRSTPKRVAKMFITEIFSGLNPKTFPKVSTFENKYRYNQMLIEKNITIYSICEHHFLPIVGKAHVGYISNGKVIGLSKINRIVNYYSKRPQVQERLTIQIVKSLQKILDTKNVACIIEAKHLCVNSRGIQDINTKTITTKLLGIFKKDSEIRKEFFHYIGIP

SEQ ID NO: 5590 - protein, 226 aa, Blattabacterium sp.
  misc_feature (1)..(226): tr|U3Q5Q3|U3Q5Q3_9FLAO GTP cyclohydrolase 1 OS=Blattaba cterium sp. (Nauphoeta cinerea) OX=1316444 GN=folE PE=3 SV=1
MMEEKHKKNLRKEKLNCIFNHSINTDRFLQNNVCFDSDENKIERIEKHFFQIMKILGLDMNDDSLRKTPKRVAKMFIQEIFSGLNSKNIPNFSIFENKYKYNQMLIEKNITVYSTCEHHFLPIVGKAHVGYISNGKVVGLSKINRIVNFYAKRPQVQERLTMQIVQSLQKMLETQDVACVIEAKHLCVNSRGIKDIDSSTVTTELIGAFKKNWEIRNEFLHYIGIS

SEQ ID NO: 5591 - protein, 216 aa, Blattabacterium sp.
  misc_feature (1)..(216): tr|G7SPY5|G7SPY5_9FLAO GTP cyclohydrolase 1 OS=Blattaba cterium sp. (Mastotermes darwiniensis) str. MADAR OX=10 74889 GN=folE PE=3 SV=1
MGEKKDTIFHLEENHENPLRNDAFLMSDEEKINQIEKHFFHIMEILGLDMNNDSLRSTPRRVAKMFIQEIFSGINPKTYPKVSTFENKYQYNQMLIEKNITIYSTCEHHFLPIVGKAHVGYISNGKVIGLSKINRIVNYYAKRPQVQERLTIQIVKSLQKILETKNVACVIEAKHLCVNSRGIRDIDTRTITAELVGNFKNNSEIRREFFHYIGIS

SEQ ID NO: 5592 - protein, 184 aa, Blautia coccoides
  misc_feature (1)..(184): tr|A0A4R2K9A1|A0A4R2K9A1_9FIRM GTP cyclohydrolase 1 OS= Blautia coccoides OX=1532 GN=folE PE=3 SV=1
MNQDKIKEGVRLILEGIGEDVDREGLLETPDRIARMYEELAGGYTDDAGVHLKKRFHVDNNDMVMEKDIHFYSFCEHHMLPFYGNAAIAYIPNGEVVGLSKIARTVEVFAKRFQLQERLTAQIADAFMEELKPKGVMVLVQAEHMCMTMRGIKKPGTKTVSVVTRGVFDDNESLQNSFYRMLDC

SEQ ID NO: 5593 - protein, 185 aa, Blautia hansenii
  misc_feature (1)..(185): tr|C9L619|C9L619_BLAHA GTP cyclohydrolase 1 OS=Blautia hansenii DSM 20583 OX=537007 GN=folE PE=3 SV=1
MDKKKIEEGVRLILEGIGEDINREGLLETPDRIARMYEELAAGYTDNASEHLKKRFHVDNNDMVMEKDIPFYSFCEHHMLPFYGKAAVAYIPNGEVVGLSKIARTLEVFAKRFQLQERLTAQIADVFMEELKPYGVMVLIEAEHMCMTMRGIKKPGAKTVTVVTRGVFNEDEKLQNQFYRMLESR

SEQ ID NO: 5594 - protein, 216 aa, Blautia hydrogenotrophica
  misc_feature (1)..(216): tr|C0CQ83|C0CQ83_BLAHS GTP cyclohydrolase 1 OS=Blautia hydrogenotrophica (strain DSM 10507 / JCM 14656 / S5a33 ) OX=476272 GN=folE PE=3 SV=1
MLTDFITIEQSPKNYLSSEFQETKEEKEVVFLVDKQKVEQAVRLYLEGIGEDVNREGLLDTPSRIARMCEEIYGGLDQDPGVYLEKQFTVDSNEMVIEKDITFYSTCEHHLLPFFGKAHIAYIPNEKVTGLSKLARAVEVYARRPQIQEKMTVQIADALEKYLNPKGVMVMLEAEHTCMTMRGIKKPGTKTVTSVTRGEFKGNYELQKMFLQMVKD

SEQ ID NO: 5595 - protein, 185 aa, Blautia hydrogenotrophica
  misc_feature (1)..(185): tr|A0A173UMZ3|A0A173UMZ3_9FIRM GTP cyclohydrolase 1 OS= Blautia hydrogenotrophica OX=53443 GN=folE PE=3 SV=1
MVDKQKVEQAVRLYLEGIGEDVNREGLLDTPSRIARMCEEIYGGLDQDPGVYLEKQFTVDSNEMVIEKDITFYSTCEHHLLPFFGKAHIAYIPNEKVTGLSKLARAVEVYARRPQIQEKMTVQIADALEKYLNPKGVMVMLEAEHTCMTMRGIKKPGTKTVTSVTRGEFKGNYELQKMFLQMVKD

SEQ ID NO: 5596 - protein, 260 aa, Blautia luti
  misc_feature (1)..(260): tr|A0A564W7W4|A0A564W7W4_9FIRM GTP cyclohydrolase 1 typ e 2 OS=Blautia luti OX=89014 GN=RSSSTS7063_01110 PE=4 S V=1
MKAYELIEWLNAHHPQKFAEDWDNVGLLVGDDQKEISHVFLALDLTEPVLDEAVAAGADMILTHHPMIFSGIKKINNHTFTGRKILRLIKEDIPYFAMHTNYDVIGMADLSAEHLKLQDTRVLTVTDESGEQPEGFGRVGKLPHVMTLGEFGKYVKECNHLPDVRVYGDLDRKIETVAICTGSGKSMIGDVMAAGADVYVTGDIDYHTAIDTMADGLAIVDAGHYGTEYIFAEAMEKELNEVFSALKTTCASVKNPYTVL

SEQ ID NO: 5597 - protein, 185 aa, Blautia luti
  misc_feature (1)..(185): tr|A0A564VX11|A0A564VX11_9FIRM GTP cyclohydrolase 1 OS= Blautia luti OX=89014 GN=folE PE=3 SV=1
MVDKAKVEEAIKLLLEGIGEDVNREGLQGTPERIARMCEEIYGGLDNEADEHLQKQFHVENNEMVLEKDITFYSMCEHHLMPFYGKAHIAYIPNGKVTGLSKLARTVDVYARRPQIQERLTVQIADALERVLTPKGIMVMLEAEHTCMTMRGIKKPGSKTVTTVTRGEFKENMELQKQFLAMVKD

SEQ ID NO: 5598 - protein, 185 aa, Blautia obeum
  misc_feature (1)..(185): tr|A0A367FXQ9|A0A367FXQ9_9FIRM GTP cyclohydrolase 1 OS= Blautia obeum OX=40520 GN=folE PE=3 SV=1
MVDKAKVEEAIKLLLEGIGEDVNREGLQGTPERIARMCEEIYGGLDNEADEHLQKQFHVENNEMVLEKDITFYSMCEHHLMPFYGKAHIAYIPNGKVTGLSKLARTVDVYARRPQIQERLTVQIADALERVLAPKGIMVMLEAEHTCMTMRGIKKPGSKTVTTVTRGEFKENMELQKQFLAMVKD

SEQ ID NO: 5599 - protein, 185 aa, Blautia obeum
  misc_feature (1)..(185): tr|A5ZR69|A5ZR69_9FIRM GTP cyclohydrolase 1 OS=Blautia obeum ATCC 29174 OX=411459 GN=folE PE=3 SV=1
MVDKQKVEQAIRLLLEGIGEDTEREGLKDTPDRIARMCMEIYGGLDEEADHHLAKQFEVENNEMVLEKDITFYSMCEHHLMPFYGKAHVAYIPNGKVTGLSKLARTVDVYARRPQIQERLTVQIADALERTLNPKGIMVMLEAEHTCMTMRGIKKPGSKTITTVTRGDFKTDRELQKQFLSMVKD

SEQ ID NO: 5600 - protein, 184 aa, Blautia producta
  misc_feature (1)..(184): tr|A0A4P6M032|A0A4P6M032_9FIRM GTP cyclohydrolase 1 OS= Blautia producta OX=33035 GN=folE PE=3 SV=1
MNQDKIKEGVRLILEGIGEDIDREGLLETPDRIARMYEELAAGYTDDAGVHLKKRFHVDNNDMVMEKDIHFYSFCEHHMLPFYGNAAIAYIPNGEVVGLSKIARTVEVFAKRFQLQERLTAQIADAFMEELKPKGVMVLVQAEHMCMTMRGIKKPGTKTVSVVTRGVFDDNESLQNSFYRMLDC

SEQ ID NO: 5601 - protein, 184 aa, Blautia producta
  misc_feature (1)..(184): tr|A0A2S4GT44|A0A2S4GT44_9FIRM GTP cyclohydrolase 1 OS= Blautia producta OX=33035 GN=folE PE=3 SV=1
MNQDKIKEGVRLILEGIGEDINREGLLETPDRIARMYEELAAGYTDDAAVHLKKRFHVDNNDMVMEKDIHFYSFCEHHMLPFYGNAAIAYIPNGEVVGLSKIARTVEVFAKRFQLQERLTAQIADAFMEELKPKGVMVLVQAEHMCMTMRGIKKPGTRTVSVVTRGIFDDNESLQNSFYRMLEC

SEQ ID NO: 5602 - protein, 185 aa, Blautia sp.
  misc_feature (1)..(185): tr|A0A373VVV0|A0A373VVV0_9FIRM GTP cyclohydrolase 1 OS= Blautia sp. AF19-10LB OX=2292961 GN=folE PE=3 SV=1
MVDKAKVEQAIRLLLEGIGENPDREGLKDTPDRIARMCTEIYGGLDEEADQHLLKQFQVENNEMVLEKDITFYSMCEHHLMPFYGKAHIAYIPNGKVTGLSKLARTVDVYARRPQIQERLTVQIADALDRVLEPKGVMVMLEAEHTCMTMRGIKKPGSKTMTVITRGEFKNNIELQKQFLAMVKD

SEQ ID NO: 5603 - protein, 183 aa, Blautia sp.
  misc_feature (1)..(183): tr|A0A1Y4F7J2|A0A1Y4F7J2_9FIRM GTP cyclohydrolase 1 OS= Blautia sp. An249 OX=1965603 GN=folE PE=3 SV=1
MDKEKIMEGVRLLLEGIGEDVNREGLLETPERIARMCEEIYGGLNEDGDQHLKKQFTVDNSEMVLEKDITFYSTCEHHLLPFYGKAHVAYIPSNKVAGLSKLARTVEVYARRPQIQEKLTTQIADALERNLNPKGVMVVIEAEHTCMTMRGIKKPGSKTVTMATRGCFQEDYHMQKMFMDMIK

SEQ ID NO: 5604 - protein, 185 aa, Blautia wexlerae
  misc_feature (1)..(185): tr|A0A174TJB8|A0A174TJB8_9FIRM GTP cyclohydrolase 1 OS= Blautia wexlerae OX=418240 GN=folE PE=3 SV=1
MVDKLKIEQAVRLLLEGIGEDITREGLIDTPDRIARMCEEIYGGLGHEADQHLLKQFPVENNEIVLEKDITFYSMCEHHLMPFYGKAHLAYIPNGKVTGLSKLARTVEVYSRRPQIQERLTVQIADALERTLDPKGIMVMLEAEHTCMTMRGIKKPGSKTITTVTRGAFTEDKELQKMFLSMVKG

SEQ ID NO: 5605 - protein, 185 aa, Blautia wexlerae
  misc_feature (1)..(185): tr|A0A564WVY2|A0A564WVY2_9FIRM GTP cyclohydrolase 1 OS= Blautia wexlerae OX=418240 GN=folE PE=3 SV=1
MVDKVKIEQAVRLLLEGIGEDITREGLIDTPDRIARMCEEIYGGLGHEADQHLLKQFPVENNEIVLEKDITFYSMCEHHLMPFYGKAHLAYIPNGKVTGLSKLARTVEVYSRRPQIQERLTVQIADALERTLDPKGIMVMLEAEHTCMTMRGIKKPGSKTITTVTRGAFTEDKELQKMFLSMVKG

SEQ ID NO: 5606 - protein, 214 aa, Blochmannia endosymbiont
  misc_feature (1)..(214): tr|A0A0E3Y8H1|A0A0E3Y8H1_9ENTR GTP cyclohydrolase 1 OS= Blochmannia endosymbiont of Polyrhachis (Hedomyrma) tur neri OX=1505596 GN=folE PE=3 SV=1
MIFLTEQALLVRDTLLLQGLETPFLVQSGLKNRLNDQVREARIAENMLAILHLLNIDSQHDSIIDTPKRIARMYLKDFFYGLNYANFPKITMFKNTMNMDEVITVRNINVISMCEHHFIIFSGIATVAYIPNKHIIGLSKINRLVDFFSRRPQVQERLTKQIFLALQVLLDTKNVAISIDAVHFCVKARGVGDNSSTITFASGGILKKTGNNIY

SEQ ID NO: 5607 - protein, 217 aa, Blochmannia endosymbiont
  misc_feature (1)..(217): tr|A0A0E3Y7R0|A0A0E3Y7R0_9ENTR GTP cyclohydrolase 1 OS= Blochmannia endosymbiont of Camponotus (Colobopsis) obl iquus OX=1505597 GN=folE PE=3 SV=1
MLGWTKEASLVYDNLLMRGLEVPLSNKKRNNESCKNHIAIHMMKIMTLLNLDMDEDSIMDTPNRIAKMYVEEIFSGLDYLNFPKITILKNKMKVDEMIAIRNISLTSTCEHHFVIFDGKATVAYIPKNSVIGLSKISRIVRFFSQRPQVQERLTQQIFFALQVLLDTNDVAISIDAVHFCIKARGVRDNNTVTTTTSLGGSFKSSENIRREFLYNVI

SEQ ID NO: 5608 - protein, 221 aa, Blochmannia floridanus
  misc_feature (1)..(221): sp|Q7VRX3|GCH1_BLOFL GTP cyclohydrolase 1 OS=Blochmanni a floridanus OX=203907 GN=folE PE=3 SV=1
MSTLTQEALLVRNALLLQGLENPIIDLNIDDKIRMNCIESHMISIMHLLKLNLNHDSLLNTPKRVAKMYVEEIFSGLDYLNFPKITIIANTMQISEMITVRNINITSVCEHHFIIFNGKATVSYIPRKSVIGLSKINKIVEFFSKRPQLQERLTQQIFLALQTLLNTNNVAIFINAVHYCVKARGIHDMTSTTNTTALGGLFKSNKSIRKEFLHTITYCNS

SEQ ID NO: 5609 - protein, 221 aa, Blochmannia pennsylvanicus
  misc_feature (1)..(221): sp|Q492J7|GCH1_BLOPB GTP cyclohydrolase 1 OS=Blochmanni a pennsylvanicus (strain BPEN) OX=291272 GN=folE PE=3 S V=1
MSILTQEALLVRDALSVRGLENPLIELNINHKIRKRRIENHMRAIVHLLNLDLEHDSLLNTPKRIAKMYIEEIFSGLDYSNFPKIAIIQNTMQINEMITVRGINITSTCEHHFIVFNGKVTISYIPEKNVIGLSKINRIVQFFSKRPQLQERLTKQIFLALQTLLNTDNVAIFIDAVHYCVKARGIHDVSSTTTTTALGGLFESNTNTREEFLHAIMYCNH

SEQ ID NO: 5610 - protein, 221 aa, Blochmannia vafer
  misc_feature (1)..(221): tr|E8Q735|E8Q735_BLOVB GTP cyclohydrolase 1 OS=Blochman nia vafer (strain BVAF) OX=859654 GN=folE PE=3 SV=1
MSTLTQEALLVRDALLIQGLENPVIELDIDNRIRMNQIEDHMAAIMYLLKLNLNNDSLFHTPKRIAKMYVEEIFSGLDYSNFPKISVIKNTMKINEMITVRNINITSICEHHFIIFNGKATVSYIPENSVIGLSKINKIVQFFSKRPQLQERLTQQIFLALQTLLNTNNVAIFIDAVHYCVKARGIHDITSTTNTTALGGLFKSNENIRREFIHTITYTNS

SEQ ID NO: 5611 - protein, 268 aa, Unknown
  misc_feature (1)..(268): tr|A0A1U9VEU6|A0A1U9VEU6_9RALS GTP cyclohydrolase FolE2 OS=blood disease bacterium A2-HR MARDI OX=1944648 GN=f olE2 PE=3 SV=1
MNDMNPAFVMPDVQSSHDTRQIPIQRVGVRGVRYPMSLQTPSGVQSTVGTFNLDVHLPADKKGTHMSRFVALLEEEREPLNLAQFQLLLEKMLEKLEADAGRIEVSFPYFISKTAPVSGVQSLMDYEVTMIGEVRDGHTIVRVKALVPVTSLCPCSKKISQYGAHNQRSHITIDAELAADTPVEALIRMAEEEASCELWGLLKRPDEKFVTERAYENPKFVEDLVRDIAMRLNEDDRIVAYTLEAENFESIHNHSAYALVERDKRRAS

SEQ ID NO: 5612 - protein, 268 aa, Unknown; identical to SEQ ID NO: 5611
  misc_feature (1)..(268): tr|G2ZKE1|G2ZKE1_9RALS GTP cyclohydrolase FolE2 OS=bloo d disease bacterium R229 OX=741978 GN=folE2 PE=3 SV=1

SEQ ID NO: 5613 - protein, 202 aa, Bogoriella caseilytica
  misc_feature (1)..(202): tr|A0A3N2BB21|A0A3N2BB21_9MICO GTP cyclohydrolase 1 OS= Bogoriella caseilytica OX=56055 GN=folE PE=3 SV=1
MSGTPGTVDAGAPQPGRYDAEGVRRAVRDLLTAIGEDPDRQGLSGTPDRVARSYAEMFAGMAEDPADHLEAVFDLGHEEMILARDIPLYSMCEHHLLPFHGVAHVGYLPDATGRVTGLSKLARLVEGYARRPQVQERLTTQVADALVDRLGARGVIVIIEAEHLCMSMRGVRKPGAATVTSAVRGQLRNAATRAEAMSLLKG

SEQ ID NO: 5614 - protein, 184 aa, Bombella intestini
  misc_feature (1)..(184): tr|A0A1S8GNF0|A0A1S8GNF0_9PROT GTP cyclohydrolase 1 OS= Bombella intestini OX=1539051 GN=folE PE=3 SV=1
MSRIASGVRELLLAIGEDPSREGLRDTPERVAKMYLEIFSGLYEDPRDHLKKQFSADQHGGMVLVKDIRFQSTCEHHLLPVMGRAHVAYLPEGGRLTGLSKLARVVEGYARRPQLQERLTDQIVQAMVEVLAPKAVLVVVEAEHMCMSLRGVRSPGATTVTTGSYGLWAEDAQARQEIMALMRD

SEQ ID NO: 5615 - protein, 265 aa, Bordetella ansorpii
  misc_feature (1)..(265): tr|A0A157QBN4|A0A157QBN4_9BORD GTP cyclohydrolase FolE2 OS=Bordetella ansorpii OX=288768 GN=folE2 PE=3 SV=1
MNSPIDPAVVMPDVQSSADTRHITIQRVGIRGVRHPMLVHAGDGSAQPTVGSWTLTVALPPEEKGTHMSRFVALLEKHRTIPMTPASFADMAREMLPLLQAERGDISVTFPYFINKSAPVSGVQSLLDYEVQWIARAVGQQVEFELVVQVPVTSLCPCSKAISEYGAHNQRSHVTVSAVLGGEVAMDQVIRLVEDEASCELWGLLKRPDEKYVTERAYDNPKFVEDLVRDVAARLQTYPGIARFRVEAENFESIHNHSAYAVVEG

SEQ ID NO: 5616 - protein, 265 aa, Bordetella ansorpii
  misc_feature (1)..(265): tr|A0A157SWA6|A0A157SWA6_9BORD GTP cyclohydrolase FolE2 OS=Bordetella ansorpii OX=288768 GN=folE2 PE=3 SV=1
MNSPIDPAVVMPDVQSSADTRHITIQRVGIRGVRHPMLVQAGDGSAQPTVGTWTLTVALPPEEKGTHMSRFVALLEKHRVIPMTPASFADMAREMLPLLQAERGDISTTFPYFINKSAPVSGVQSLLDYEVQWIARAVGQQVEFELVVQVPVTSLCPCSKAISEYGAHNQRSHVTVSAIVDGEIAMDQIIRLVEDEASCELWGLLKRPDEKYVTERAYDNPKFVEDLVRDVAARLQAHPGIARFRVEAENFESIHNHSAYAVVEG

SEQ ID NO: 5617 - protein, 265 aa, Bordetella avium
  misc_feature (1)..(265): sp|Q2KZ16|GCH4_BORA1 GTP cyclohydrolase FolE2 OS=Bordet ella avium (strain 197N) OX=360910 GN=folE2 PE=3 SV=1
MNSPIDPAIVMPDVQSSADTRHIQIQRVGIRGVRHPMLVVAGDGSAQATVANWTLTVALPAEEKGTHMSRFVALLEKYRATPMTPALFSQMAREMLPLLHAERGDLTAAFPYFINKSAPVSGVQSLLDYEVIWTARAAGDEVEFELRVQVPVTSLCPCSKAISEYGAHNQRSHVTVSAVMEGDVAMDAIIRLVEDEGSCELWGLLKRPDEKYVTERAYDNPKFVEDLVRDVAARLKAHPSVARFCVEAENFESIHNHSAYAVVEG

SEQ ID NO: 5618 - protein, 243 aa, Bordetella avium
  misc_feature (1)..(243): tr|Q2L1Q0|Q2L1Q0_BORA1 GTP cyclohydrolase OS=Bordetella avium (strain 197N) OX=360910 GN=folE PE=4 SV=1
MGALIDSQPGITAETREGTPLSQVIRQRLRKAGVSFRANDNIAAHLREGEADGLQQEVALHIENALRALVIDVDNDHNTHETAKRVAKMFVKEVFSGRYEPPPPITEFPNVGHLNELTLIGPLRVRSACSHHLCPIMGHAWIGILPNANSNLPGLSKYARLLNWVMARPQIQEEAVKQIADLLEEKIGPDGIAVVMEADHYCMHWRGTKDDGARMVSSVMRGRFLEDPALRREFLSLMPKRPG

SEQ ID NO: 5619 - protein, 271 aa, Bordetella bronchialis
  misc_feature (1)..(271): tr|A0A193FYR5|A0A193FYR5_9BORD GTP cyclohydrolase FolE2 OS=Bordetella bronchialis OX=463025 GN=folE2 PE=3 SV=1
MNSPIDSALVMPDIQSSADTRHIPIQRVGIRGVRHPMLVQAADGSAMATVANWTLTVALPAEEKGTHMSRFVALLEKYRSTPMTPAAFRAMAREMLPLLHAQRGDITAAFPYFINKSAPVSGVQSLMDYEIQWVARAAGNQVEFELTVQVPLTSLCPCSKAISEYGAHNQRSHVTVTALIGDEVGVDELIRLIEDEGSCEVWGLLKRPDEKFVTERAYDNPKFVEDLVRDVAARLSVRAGVARYRVEAENFESIHNHSAYAVVEGEGPARL

SEQ ID NO: 5620 - protein, 181 aa, Bordetella bronchialis
  misc_feature (1)..(181): tr|A0A193FPD8|A0A193FPD8_9BORD GTP cyclohydrolase 1 OS= Bordetella bronchialis OX=463025 GN=folE PE=3 SV=1
MSLEEHYTAILQQLGEDPNREGLRDTPLRAAKAMKYLCRGYDQNLHEIVNGALFSSDTKEIVLVKNIELYSLCEHHILPFIGKAHVAYLPNGKVLGLSKVARIVDMFARRLQIQENLSRQIAEAVQQVTGAAGVAVVIEAQHMCMMMRGVEKQNSSMVTSVMLGEFHENAATRAEFMNLIR

SEQ ID NO: 5621 - protein, 265 aa, Bordetella bronchiseptica
  misc_feature (1)..(265): sp|Q7WL36|GCH4_BORBR GTP cyclohydrolase FolE2 OS=Bordet ella bronchiseptica (strain ATCC BAA-588 / NCTC 13252 / RB50) OX=257310 GN=folE2 PE=3 SV=1
MNSPIDPAIVMPDVQSSTDTRHIPIQRVGIRGVRHPMLVLAGDGAAQPTVANWTLTVALPAEEKGTHMSRFVALLEKYRATPMTPALFAAMAREMLPLLHAERGDITASFPYFINKSAPVSGVQSLLDYEMQWIARAVGEQVEFELVAQVPVTSLCPCSKAISEYGAHNQRSHVTVSAIVDGDFRMDELIRLVEDEASCELWGLLKRPDEKYVTERAYDNPKFVEDLVRDVAARLKAHPGIGRFRVEAENFESIHNHSAYAVVEG

SEQ ID NO: 5622 - protein, 265 aa, Bordetella bronchiseptica
  misc_feature (1)..(265): tr|A0A3T0P1K2|A0A3T0P1K2_BORBO GTP cyclohydrolase FolE2 OS=Bordetella bronchiseptica OX=518 GN=folE2 PE=3 SV=1
MNSPIDPAIVMPDVQSSTDTRHIPIQRVGIRGVRHPMLVLAGDGAAQPTVANWTLTVALPAEEKGTHMSRFVALLEKYRATPMTPALFAAMAREMLPLLHAERGDITASFPYFINKSAPVSGVQSLLDYEVQWIARAVGEQVEFELVAQVPVTSLCPCSKAISEYGAHNQRSHVTVSAIVDGDFRMDELIRLVEDEASCELWGLLKRPDEKYVTERAYDNPKFVEDLVRDVAARLTAHPGIGRFRVEAENFESIHNHSAYAVVEG

SEQ ID NO: 5623 - protein, 181 aa, Bordetella flabilis
  misc_feature (1)..(181): tr|A0A193GGG2|A0A193GGG2_9BORD GTP cyclohydrolase 1 OS= Bordetella flabilis OX=463014 GN=folE PE=3 SV=1
MSLEKHYTAILEQLGEDPTREGLRDTPQRAARAMRYLCRGYEQNLDEIVNGALFSSDTREIVLVKNIELYSLCEHHILPFIGKAHVGYLPNGKVLGLSKVARIVDMYARRLQIQENLCRQIAEAVQHVTGAAGVAVIIEAQHMCMMMRGVEKQNSSMVTSVMLGEFHENAATRAEFMNLVR

SEQ ID NO: 5624 - protein, 272 aa, Bordetella flabilis
  misc_feature (1)..(272): tr|A0A193GCN4|A0A193GCN4_9BORD GTP cyclohydrolase FolE2 OS=Bordetella flabilis OX=463014 GN=folE2 PE=3 SV=1
MNSPIDPALIMPDIQSSADTRHIPIQRVGIRGVRHPMLVQAADGSAMATVANWTLTVALPAEEKGTHMSRFVALLEKYRSTPMTPVSFRAMAREMLPLLHAERGDITAAFPLFINKSAPVSGVQSLMDYEVQWIARAAGDQVEFELVVQVPLTSLCPCSKAISEYGAHNQRSHVTVSALIGDAVGVEEIIRLIEDEGSCEVWGLLKRPDEKFVTERAYDNPKFVEDLVRDVAARLTVRTGVGRYRVEAENFESIHNHSAYAVVEGEGPGLAA

SEQ ID NO: 5625 - protein, 265 aa, Bordetella genomosp.
  misc_feature (1)..(265): tr|A0A261SA25|A0A261SA25_9BORD GTP cyclohydrolase FolE2 OS=Bordetella genomosp. 10 OX=1416804 GN=folE2 PE=3 SV =1
MNSPIDRAIVMPDVQSSADTRHIPIQRVGIRGVRHPMLVQAGDGSAMATVANWTLTVALPAEEKGTHMSRFVALLEKYRSVPMTPALFRAMAREMLPLLHAEKGDITAAFPYFINKSAPVSGVQSLLDYEVQWIARAAGDEVEFELVVQVPVTSLCPCSKAISEYGAHNQRSHVTVSAILGDDVGMDDVIRAVEEEGSCELWGLLKRPDEKFVTERAYDNPKFVEDLVRDVAARMAARQGIRRYRVEAENFESIHNHSAYAVVEG

SEQ ID NO: 5626 - protein, 265 aa, Bordetella genomosp.
  misc_feature (1)..(265): tr|A0A261S6P3|A0A261S6P3_9BORD GTP cyclohydrolase FolE2 OS=Bordetella genomosp. 1 OX=1395607 GN=folE2 PE=3 SV= 1
MNSPIDSAIVMPDIQSSADLRHIPIQRVGIRGVRHPMLIETADGSAQPTVGTWTLTVALPPEEKGTHMSRFIALLEKHRTTPMTPALFADMARDMLPLLQAERGDISATFPYFINKSAPVSGVQSLLDYEVKWIARAEGERVEFELVVLVPVTSLCPCSKAISQYGAHNQRSHVTVSAVLSAEVSMDAVIRLVEDEGSCELWGLLKRPDEKYVTERAYDNPKFVEDLVRDVAARLKALPGIARFTVEAENFESIHNHSAYAVVEG

SEQ ID NO: 5627 - protein, 258 aa, Bordetella hinzii
  misc_feature (1)..(258): tr|A0A0H4W6Q1|A0A0H4W6Q1_9BORD Putative GTP cyclohydrol ase 1 type 2 OS=Bordetella hinzii OX=103855 GN=ACR54_04 505 PE=4 SV=1
MKKVDIRALTAWLDATLQAARFKDYAPNGLQVEGKADVAHIITGVTASEALLRAAVERGADAVLVHHGWFWRNEDPRVLGPRRRRLALALAHDLNLIGYHLPLDAHPTLGNNAQLARVLGLEPARDAEDAPLTCGRDGLIWLGTAPGVATLGDLAAQIGERLGRQPLWVGEPDAPVGRVAWCTGGAQGMMAEAVDAGATVYLTGEASEPNTHLARETGVGFISAGHHATERYGVQALGAAVAAQFGIKVEFVDIDNPV

SEQ ID NO: 5628 - protein, 265 aa, Bordetella hinzii
  misc_feature (1)..(265): tr|A0A0H4WFA7|A0A0H4WFA7_9BORD GTP cyclohydrolase FolE2 OS=Bordetella hinzii OX=103855 GN=folE2 PE=3 SV=1
MNSPIDPAIVMPDVQSSADTRHIPIQRVGIRGVRHPMLVVAGDGSSQPTVANWTLTVALPAEEKGTHMSRFVALLEQYRSTPMTPALFAQMARDMLPLLHAERGDLTASFPYFINKSAPVSGVQSLLDYEVTWTARAAGDQVEFELRVLVPVTSLCPCSKAISEYGAHNQRSHVTVSAILEGEVAMDAIIRLVEDEGSCELWGLLKRPDEKYVTERAYDNPKFVEDLVRDVAARLKAHPSVARFCVEAENFESIHNHSAYAVVEG

SEQ ID NO: 5629 - protein, 265 aa, Bordetella holmesii
  misc_feature (1)..(265): tr|A0A158M0R4|A0A158M0R4_9BORD GTP cyclohydrolase FolE2 OS=Bordetella holmesii CDC-H585-BH OX=1331206 GN=folE PE=3 SV=1
MNSPIDPAIVMPDVQSSADTRHIPIQRVGIRGVRHPMLVVAGDGDAQPTVANWTLTVALPAEEKGTHMSRFVALLEQYRATPMTPALFSQMARDMLPLLHADRGDLTASFPYFINKSAPVSGVRSLLDYEVTWTARAAGDQVEFELRVLVPVTSLCPCSKAISEYGAHNQRSHVTVSAILGSEVAMDAIIRLVEDEGSCELWGLLKRPDEKYVTERAYDNPKFVEDLVRDVAARLKAHPAVTRFCVEAENFESIHNHSAYAVVEG

SEQ ID NO: 5630 - protein, 265 aa, Bordetella parapertussis; identical to SEQ ID NO: 5621
  misc_feature (1)..(265): sp|Q7W7P9|GCH4_BORPA GTP cyclohydrolase FolE2 OS=Bordet ella parapertussis (strain 12822 / ATCC BAA-587 / NCTC 13253) OX=257311 GN=folE2 PE=3 SV=1

SEQ ID NO: 5631 - protein, 265 aa, Bordetella parapertussis
  misc_feature (1)..(265): tr|K0MGF7|K0MGF7_BORPB GTP cyclohydrolase FolE2 OS=Bord etella parapertussis (strain Bpp5) OX=1208660 GN=folE2 PE=3 SV=1
MNSPIDPAIVMPDVQSSTDTRHIPIQRVGIRGVRHPMLVLAGDGAAQPTVANWTLTVALPAEEKGTHMSRFVALLEKYRATPMTPALFAAMAREMLPLLHAERGDITASFPYFINKSAPVSGVQSLLDYEMQWIARAVGEQVEFELVAQVPVTSLCPCSKAISEYGAHNQRSHVTVSAIVDGDFRMDELIRLVEDEASCELWALLKRPDEKYVTERAYDNPKFVEDLVRDVAARLKAHPGIGRFRVEAENFESIHNHSAYAVVEG

SEQ ID NO: 5632 - protein, 265 aa, Bordetella pertussis; identical to SEQ ID NO: 5621
  misc_feature (1)..(265): sp|Q7VV88|GCH4_BORPE GTP cyclohydrolase FolE2 OS=Bordet ella pertussis (strain Tohama I / ATCC BAA-589 / NCTC 1 3251) OX=257313 GN=folE2 PE=3 SV=1

SEQ ID NO: 5633 - protein, 256 aa, Bordetella pertussis
  misc_feature (1)..(256): tr|A0A171JWR8|A0A171JWR8_BORPT GTP cyclohydrolase FolE2 OS=Bordetella pertussis 2356847 OX=1331248 GN=folE2 PE =3 SV=1
MMPDVQSSTDTRHIPIQRVGIRGVRHPMLVLAGDGAAQPTVANWTLTVALPAEEKGTHMSRFVALLEKYRATPMTPALFAAMAREMLPLLHAERGDITASFPYFINKSAPVSGVQSLLDYEMQWIARAVGEQVEFELVAQVPVTSLCPCSKAISEYGAHNQRSHVTVSAIVDGDFRMDELIRLVEDEASCELWGLLKRPDEKYVTERAYDNPKFVEDLVRDVAARLKAHPGIGRFRVEAENFESIHNHSAYAVVEG

SEQ ID NO: 5634 - protein, 265 aa, Bordetella petrii
  misc_feature (1)..(265): sp|A9ITA7|GCH4_BORPD GTP cyclohydrolase FolE2 OS=Bordet ella petrii (strain ATCC BAA-461 / DSM 12804 / CCUG 434 48) OX=340100 GN=folE2 PE=3 SV=1
MNSPIDPALVMPDVQSSADTRHIPIQRVGIRGVRHPMLVAGADGAPQPTVANWTLTVALPAEEKGTHMSRFVALLEKYRSVPMTPALFAAMARDMLPLLHAERGDITAAFPYFINKSAPVSGVQSLLDYEVQWIARAAGDQVEFELVVQVPVTSLCPCSKAISEYGAHNQRSHVTVSVVLNGDLAMDRIIRLVEDEGSCELWGLLKRPDEKFVTERAYDNPKFVEDLVRDVAARLAAHPGVARYRVEAENFESIHNHSAYAVVEG

SEQ ID NO: 5635 - protein, 265 aa, Bordetella pseudohinzii
  misc_feature (1)..(265): tr|A0A0J6BZN8|A0A0J6BZN8_9BORD GTP cyclohydrolase FolE2 OS=Bordetella pseudohinzii OX=1331258 GN=folE2 PE=3 SV =1
MNSPIDPAIVMPDVQSSADTRHIPIQRVGIRGVRHPMLVVAGDGSAQPTVANWTLTVALPAEEKGTHMSRFVALLEQYRSTPMTPALFAQMARDMLPLLHAERGDLTASFPYFINKSAPVSGVQSLLDYEVTWTARAAGDQVEFELRVLVPVTSLCPCSKAISEYGAHNQRSHVTVSAILEGEVAMDAIIRLVEDEGSCELWGLLKRPDEKYVTERAYDNPKFVEDLVRDVAARLKAHPSVARFCVEAENFESIHNHSAYAVVEG

SEQ ID NO: 5636 - protein, 265 aa, Bordetella sp.
  misc_feature (1)..(265): tr|A0A0S1XW29|A0A0S1XW29_9BORD GTP cyclohydrolase FolE2 OS=Bordetella sp. N OX=1746199 GN=folE2 PE=3 SV=1
MNSPIDPALVMPDVQSSADTRHIPIQRVGIRGVRHPMLVQAGDGSAMATVANWTLTVALPAEEKGTHMSRFVALLEKYRSTPMTPALFRAMAREMLPLLHAEKGDITAAFPYFINKSAPVSGVQSLLDYEVQWIARADGTDVEFELVVQVPVTSLCPCSKAISEYGAHNQRSHVTVTAILGDEVGMEDVIRAVEEEGSCELWGLLKRPDEKYVTERAYDNPKFVEDLVRDVAARMAARQGIKRYRVEAENFESIHNHSAYAVVEG

SEQ ID NO: 5637 - protein, 271 aa, Bordetella sp.
  misc_feature (1)..(271): tr|A0A3T0NDC4|A0A3T0NDC4_9BORD GTP cyclohydrolase FolE2 OS=Bordetella sp. J329 OX=1977852 GN=folE2 PE=3 SV=1
MTSIVESAVVIPDVQSFADVRQIPIQRVGISGVRHPMVVADGSGAAHPTVAEWTLTVALPAEEKGTHMSRFVALLEKYRATPLTPALFSAMAGEMLPLLHAQSGDITASFPYFINKTAPVSGVRSLLDYAVVWTARANGDAVEFELTVTVPVTSLCPCSKSISKYGAHNQRSHVTVRTIVTDEAAFNLDDFISQIEKQGSCELWGLLKRPDEKYVTEHAYENPKFVEDIVRDVAATLNAYAGIAGYRVTVENFESIHNHSAYAVVEGHGKG

SEQ ID NO: 5638 - protein, 265 aa, Bordetella trematum
  misc_feature (1)..(265): tr|A0A157QVU0|A0A157QVU0_9BORD GTP cyclohydrolase FolE2 OS=Bordetella trematum OX=123899 GN=folE2 PE=3 SV=1
MNSPIDPAIVMPDVQSSLDTRHIPIQRVGIRGVRHPMLVQAGDGSVQPTVANWTLTVALSAEEKGTHMSRFVALLEKYRSIPMTPALFAEMAREMLPLLQAERGDLTATFPYFVNKSAPVSGVQSLLDYETTWVARAAGDQVEFELRVLVPVTSLCPCSKAISEYGAHNQRSHVTVSAILQDEISLDAIIRLVEDEASCELWGLLKRPDEKFVTERAYDNPKFVEDLVRDVAARLKAAPQIARFCVEAENFESIHNHSAYAVVEG

SEQ ID NO: 5639 - protein, 213 aa, Bosea lathyri
  misc_feature (1)..(213): tr|A0A1H5Y2Q9|A0A1H5Y2Q9_9BRAD GTP cyclohydrolase 1 OS= Bosea lathyri OX=1036778 GN=folE PE=3 SV=1
MIPVVKSLSVERALSPSADKFLVKKPTQEQAEEAVRTLILWAGDDPSREGLTETPQRVAKAYKEFYKGYDEDPEVILDRVFEEVDGYRDMVLVRDIPFYSHCEHHMVPFVGKAHIGYYPSEGVVGLSKLARIVDVYARRLQTQESMTAQIAQVIEAALKPRGVAVLIEAEHMCMSMRGVQKQGSSTMTTQYTGLFKDPAEQVRFFTMVKSPGL

SEQ ID NO: 5640 - protein, 213 aa, Bosea lupini
  misc_feature (1)..(213): tr|A0A1H7HZY3|A0A1H7HZY3_9BRAD GTP cyclohydrolase 1 OS= Bosea lupini OX=1036779 GN=folE PE=3 SV=1
MDAVVKSLSADQALRPAADTFLVRKPTREEAEEAVRTLILWAGDDPSREGLLETPGRVAKAYRELYKGYDEDPEEILERVFEEVDGYRDMVLVRDIPFYSHCEHHMVPFVGKVHIGYYPNGGVVGLSKLARVVEVYARRLQTQETMTAQIAQAIERTLKPGGVAVLVEAEHMCMSMRGVQKQGSSTMTTQYTGRFRDPAEQVRFFTMVKSPGL

SEQ ID NO: 5641 - protein, 213 aa, Bosea sp.
  misc_feature (1)..(213): tr|A0A0N1BAB7|A0A0N1BAB7_9BRAD GTP cyclohydrolase 1 OS= Bosea sp. AAP35 OX=1523417 GN=folE PE=3 SV=1
MNPVVKSLSVERTLGPSADKFLIKQPTQEAAEEAVRTLILWAGDDPSREGLLETPRRVAKAYREFYKGYDEDPDVILDRVFEEVEGYQDMVLVRDIPFYSHCEHHMVPFVGRAHIGYYPAKGVVGLSKLARIVDVYARRLQTQETMTAQIAKVIERALKPRGVAVLIEAEHMCMSMRGVQKQGASTMTTQYTGIFREPAEQVRFFTMVKSPGL

SEQ ID NO: 5642 - protein, 214 aa, Bosea sp.
  misc_feature (1)..(214): tr|A0A1Q3NV34|A0A1Q3NV34_9BRAD GTP cyclohydrolase 1 OS= Bosea sp. 67-29 OX=1895723 GN=folE PE=3 SV=1
MVPVVKSLSVERPVGPSADKFPVRKPTQEEAEAAVRTLLLWAGDDPSREGLAETPRRVAKAYKEFYKGYAEDPHHILDRVFEEVEDYRDMVLVRDIPFYSHCEHHMVPFVGKAHIGYYPSKGVVGLSKLARIVDVFARRLQTQETMTAQIADVIEAALEPRGVAILVEAEHMCMSMRGVQKQGSSTMTTQYRGLFRDDPAEQLRFFTMVKSPGL

SEQ ID NO: 5643 - protein, 214 aa, Bosea thiooxidans
  misc_feature (1)..(214): tr|A0A0Q3M4Q1|A0A0Q3M4Q1_9BRAD GTP cyclohydrolase 1 OS= Bosea thiooxidans OX=53254 GN=folE PE=3 SV=1
MIPVVKSLSVEGAVGPSADKFLVRKPTQEEAEAAVRTLILWAGDDPSREGLSDTPRRVAKAYREFYKGYAEDPHHILDRVFEEVEGYQDMVLVRDIPFYSHCEHHMVPFVGKAHIGYYPSKGVVGLSKLARIVDVYARRLQTQESMTSQIADVIEEALEPRGIAILIEAEHMCMSMRGVQKQGSSTMTTQYRGVFRDDPAEQVRFFTMVKSAAL

SEQ ID NO: 5644 - protein, 220 aa, Bosea vaviloviae
  misc_feature (1)..(220): tr|A0A0N1N1C6|A0A0N1N1C6_9BRAD GTP cyclohydrolase 1 OS= Bosea vaviloviae OX=1526658 GN=folE PE=3 SV=1
MNPVVKSMNPVVQPLSVEQALGPSADKFLIKQPTQEQAEEAVRTLILWAGDDPSREGLVETPRRVAKAYKEFYKGYQEDADEILDRVFEEVEGYRDMVLVRDIPFSSHCEHHMVPFVGKAHIGYYPSEGVVGLSKLARIVDVYARRLQTQETMTAQITQTLERVLKPRGVAVLIEAEHMCMSMRGVQKQGSSTMTTQYTGLFREPAEQVRFFTMVKSAGL

SEQ ID NO: 5645 - protein, 213 aa, Bosea vaviloviae
  misc_feature (1)..(213): tr|A0A1D7U6K0|A0A1D7U6K0_9BRAD GTP cyclohydrolase 1 OS= Bosea vaviloviae OX=1526658 GN=folE PE=3 SV=1
MNPVVKSLSVERVLSPSADKFLIKKPTQEQAEEAVRTLILWAGDDPSREGLTDTPRRVTKAYREFYKGYHEDAHEVLERVFEEVEGYKDMVLVRDIPFYSHCEHHMVPFVGKAHIGYYPSKGVVGLSKLARIVDLYARRLQTQETMTAQIAQVIDKVLKPRGVAVLIEAEHMCMSMRGVQKQGSSTMTTQYTGIFKDPAEQVRFFTMVKSPGL

SEQ ID NO: 5646 - protein, 214 aa, Bosea vestrisii
  misc_feature (1)..(214): tr|A0A543N824|A0A543N824_9BRAD GTP cyclohydrolase 1 OS= Bosea vestrisii OX=151416 GN=folE PE=3 SV=1
MIPVVKSLSVERAVTPSADKFLVGKPTQEEAEAAVRTLILWAGDDPSREGLAETPQRVVKAYKELYKGYGEDPHAILDRVFEEVDGYQDMVLVRDIPFYSHCEHHMVPFVGKAHIGYYPSQGVVGLSKLARIVDLYARRLQTQEAMTAQIADVIEEALKPRGIAVLIEAEHMCMSMRGVQKQGSSTMTTQYRGLFRDDPAEQVRFFTMVKSAGL

SEQ ID NO: 5647 - protein, 366 aa, Boseongicola aestuarii
  misc_feature (1)..(366): tr|A0A238J3V3|A0A238J3V3_9RHOB GTP cyclohydrolase FolE2 OS=Boseongicola aestuarii OX=1470561 GN=folE2 PE=3 SV= 1
MNVHSTDFDREPTRDEAKEALALLRKWAREADTAEIDTLDPAIARLMPSAPEDYPFFTREYAEDFNVDTAYKASLPDLQNGPESLIKGAHRAIQHVGISNFRLPVQFRSTTGAPRTLETSVTGTVSLDADKKGINMSRIMRSFYTHAEEEFSFEVIEAALDDYKTDLESFDARIQMRLSYPMKIESLRSGLSGWQYYDLALEVVDKAGVRTRVLHLDYVYSSTCPCSLELSEHARRTRGQLATPHSQRSVARLSVVIDPSADTLWFEDIVGLCRIAVPTETQVMVKREDEQAFAELNAANPIFVEDAARLFAEQLQSDARIGDFRVVASHQESLHSHDAVSILTEGETFEATSLDPRFFETLFHTG

SEQ ID NO: 5648 - protein, 364 aa, Boseongicola sp.
  misc_feature (1)..(364): tr|A0A4P7J989|A0A4P7J989_9RHOB GTP cyclohydrolase FolE2 OS=Boseongicola sp. CCM32 OX=2552942 GN=folE2 PE=3 SV= 1
MNVHVSQTSEAPSRDDAAEALKMLKAWAETATASEISALHPAASRLLAEQAPKELARDYPDDFTVDAAYKASLPDLQNGPASLIKGANRQIQHVGISNFRLPIRYHTRDNGDLTLETSVTGTVSLEAEKKGINMSRIMRSFYAHADRTFSFEVIEAALDDYKTDLESFDARIQMRLSFPMKVTSLRSGLSGYQYYDIALELVEQGGVRKKIVHLDYVYSSTCPCSLELSEHARNTRGQLATPHSQRSVARLSVEVNCAADCLWFEDLIDMARAAVPTETQVMVKREDEQAFAELNAVNPIFVEDAARLFAEQLQADGRINDFRVVASHQESLHSHDAVSVLTEGKTFAADSLDPKLFATLFHVG

SEQ ID NO: 5649 - protein, 368 aa, Boseongicola sp.
  misc_feature (1)..(368): tr|A0A5D0RMW5|A0A5D0RMW5_9RHOB GTP cyclohydrolase FolE2 OS=Boseongicola sp. HY14 OX=2603819 GN=folE2 PE=3 SV=1
MTHVSPNLTAVHPDEDEARRALDTLRAWASSADPVEVARLDPAIARLLPAHEVANYPDLSRSYPADFVPDDAYKATMPDLQNGPASLIQGARQLIQHVGISNFRLPIRYHTRDNGDLTLETSVTGTVSLEAEKKGINMSRIMRSFYAHAEKVFSFEVIEAALDDYKTDLDSLDARIEMSFSFPMKVQSLRSGLEGYQYYNIALELVEQGGTRRKFIHLDYVYSSTCPCSLELSEHARQVRGQLATPHSQRSVARISVEVMCDRSCLWFEDLIDLCRDAVPTETQVMVKREDEQAFAELNAANPIFVEDAARLFCERLKDDARVGDFRVVASHQESLHSHDAVSILTEGETFRSQSLDPRLFSTLIHAG

SEQ ID NO: 5650 - protein, 184 aa, Bowmanella sp.
  misc_feature (1)..(184): tr|A0A4Q9XKH8|A0A4Q9XKH8_9ALTE GTP cyclohydrolase 1 OS= Bowmanella sp. JS7-9 OX=1605368 GN=folE PE=3 SV=1
MSEALTQHYKHIIGLLGEDINREGLQDTPKRAAKAMEFLTGGYHVELNKIINGAVFESDTDEMVIVQDIEFYSLCEHHVLPFIGRCHIAYIPNGKVLGLSKFARIVDMFARRLQIQENLTKQVASTVQEVTGAKGVGVIMEAKHMCMMMRGVQKQNSSMVTSVMLGTMRDSQAARNEFLRLIGK

SEQ ID NO: 5651 - protein, 308 aa, Bowmanella sp.
  misc_feature (1)..(308): tr|A0A4Q9XLQ8|A0A4Q9XLQ8_9ALTE GTP cyclohydrolase FolE2 OS=Bowmanella sp. JS7-9 OX=1605368 GN=folE2 PE=3 SV=1
MSLIMPDVANQSAALTASTLDRVGMSNIEIPLMLATDESNGRPVSARVSAFVNLIKPEAKGIHMSRLYLLLDELSNHSELTLATLQQLLNDFVSSHEDLSDSAQLIVAFDYHMRRKSLISGKQGWKAYPIVLNGVLSKGKMQVEMQIDVPYSSTCPCSAALARQLIQQSFEQSFSQQEQVNFDQVHAWLGTTQGIVATPHSQRSIADVKVKLDDSVTELPVQALVDVIENALKTPVQAAVKREDEQEFARLNGQNLMFCEDAARKLKNALAAQASYADFYVRVNHLESLHAHDAVAIAVKGIEGGYQA

SEQ ID NO: 5652 - protein, 188 aa, Brachybacterium alimentarium
  misc_feature (1)..(188): tr|A0A2A3YK20|A0A2A3YK20_9MICO GTP cyclohydrolase 1 OS= Brachybacterium alimentarium OX=47845 GN=folE PE=3 SV=1
MAVDHARVEAAVREILAGIGEDPDRDGLLDTPARVARMYSEVFEGLGQDAHEPLSTTFDIDHQELVLVRDIRFHSMCEHHLLPFMGTAHVGYIPDGGTVTGLSKLARLVNVYARRPQVQERLTFQIADALMSELGAAGAIVVIEAEHMCMSMRGVRAEGARTVTSAVRGMLRESSSTRAEAMSLINRA

SEQ ID NO: 5653 - protein, 205 aa, Brachybacterium endophyticum
  misc_feature (1)..(205): tr|A0A2U2RM35|A0A2U2RM35_9MICO GTP cyclohydrolase 1 OS= Brachybacterium endophyticum OX=2182385 GN=folE PE=3 SV =1
MTDEATSNGPSTTGDASPLIDGPRVEAAVREILAAIGEDPDRDGLVQTPGRVARMYEEVFEGLGMDAHEPLAVTFGDIEHQELVLVRDIRFHSMCEHHLLPFFGTAHVGYIPGALGVTGLSKIARLVHVYARRPQVQERITSQIADALMEELQAAGAIVVLEAEHMCMSMRGVRAEGAQTVTSAVRGILRKGTTRSEAMSLIMRG

SEQ ID NO: 5654 - protein, 188 aa, Brachybacterium faecium
  misc_feature (1)..(188): tr|C7MC17|C7MC17_BRAFD GTP cyclohydrolase 1 OS=Brachyba cterium faecium (strain ATCC 43885 / DSM 4810 / NCIB 98 60) OX=446465 GN=folE PE=3 SV=1
MAVDKPRIEAAVREILAAIGEDPDRDGLLDTPSRVARMYDEVFEGLAQDAREPLSTTFDIEHQELVLVRDIAFYSMCEHHLLPFHGTAHIGYIPGGGVVTGLSKLARLVNIYARRPQVQERLTFQIADALMEELGAGGAIVVIEAEHMCMSMRGVRAAGARTVTSAVRGMLRDSPSTRGEAMALIHRA

SEQ ID NO: 5655 - protein, 187 aa, Brachybacterium faecium
  misc_feature (1)..(187): tr|A0A2W5CE66|A0A2W5CE66_9MICO GTP cyclohydrolase 1 OS= Brachybacterium faecium OX=43669 GN=folE PE=3 SV=1
MAIDQERIAGAVREILAALGEDPDRDGLKDTPARVARMYAEVFEGLEQDASQPLSTTFDIDHQELVLVRDIRFHSMCEHHLLPFFGVAHVGYIPGAGTVTGLSKLARLVHVYARRPQVQERITSQIADALMDQLGAAGAIVVIEAEHMCMSMRGVRAEGARTVTSAVRGILRDSATRAEAMTLISRG

SEQ ID NO: 5656 - protein, 188 aa, Brachybacterium ginsengisoli
  misc_feature (1)..(188): tr|A0A291GY46|A0A291GY46_9MICO GTP cyclohydrolase 1 OS= Brachybacterium ginsengisoli OX=1331682 GN=folE PE=3 SV =1
MAMDTPRIEAAVREILAGIGEDPDRDGLRDTPARVARMYAEVFQGLEQDAHEPLSTTFDIDHQELVLVRDIAFYSMCEHHLLPFHGSAHIGYIPGGGGVTGLSKLARLVEIYAHRPQVQERLTVQIADALMDELDAGGAIVVIEAEHMCMSMRGVRAAGARTVTSAVRGMLRENASTRGEAMALIHGS

SEQ ID NO: 5657 - protein, 187 aa, Brachybacterium muris
  misc_feature (1)..(187): tr|A0A022KUD1|A0A022KUD1_9MICO GTP cyclohydrolase 1 OS= Brachybacterium muris UCD-AY4 OX=1249481 GN=folE PE=3 S V=1
MVIDQGRIAVAVREILAALGEDPDRDGLRDTPARVARMYAEVFEGLEQDPTQPLSTTFDIDHQELVLVRDIRFHSMCEHHLLPFFGVAHVGYIPGAGSVTGLSKLARLVHVYARRPQVQERITSQIADALMDQLGAAGAIVVIEAEHMCMSMRGVRAEGARTVTSAVRGILRDSATRAEAMTLISRG

SEQ ID NO: 5658 - protein, 186 aa, Brachybacterium nesterenkovii
  misc_feature (1)..(186): tr|A0A1X6X0S2|A0A1X6X0S2_9MICO GTP cyclohydrolase 1 OS= Brachybacterium nesterenkovii OX=47847 GN=folE PE=3 SV= 1
MVDQARIEAAVREILVAIGEDPERDGLVKTPGRVARMYAEVFAGIGADAHEPLATHFEIDHDELVLVRDIRFHSMCEHHLLPFFGVAHVGYIPSGGTVTGLSKLARVVDLLARRPQVQERLTTEIADALMAELHAGGAIVVVEAEHMCMSMRGARAQGARTVTSAVRGQLREGATRAEAMSLILRG

SEQ ID NO: 5659 - protein, 214 aa, Brachybacterium paraconglomeratum
  misc_feature (1)..(214): tr|A0A426SNM8|A0A426SNM8_9MICO GTP cyclohydrolase 1 OS= Brachybacterium paraconglomeratum OX=173362 GN=folE PE= 3 SV=1
MPPAAPASPVPARATATATTTRRSAEMAVDRPRVEAAVRELLAGIGEDPGRDGLLDTPARVARMYAEVFEGLDQDAHEPLSTTFDIEHQELVLVRDIAFHSMCEHHLLPFHGMAHVGYIPGGGAVTGLSKLARLVHVYARRPQVQERLTFQIADALMDELGAAGAIVVIEAEHMCMSMRGVRAAGARTITSAVRGMLRDNPSTRGEAMALINGR

SEQ ID NO: 5660 - protein, 187 aa, Brachybacterium phenoliresistens
  misc_feature (1)..(187): tr|Z9JS78|Z9JS78_9MICO GTP cyclohydrolase 1 OS=Brachyba cterium phenoliresistens OX=396014 GN=folE PE=3 SV=1
MSVDHERIRAAVREILAAVGEDPDRDGLKETPARVARMYEEVFAGLDQDPSQPLSTTFDIEHQELVLVRDISFHSMCEHHLLPFMGVVHVGYIPGAGGVTGLSKLARLVHVYARRPQVQERITSQIADALMGELDAAGAIVVVDAEHMCMSMRGVRAQGARTVTSAVRGMLRESATRAEAMSLIVRG

SEQ ID NO: 5661 - protein, 188 aa, Brachybacterium saurashtrense
  misc_feature (1)..(188): tr|A0A345YLL3|A0A345YLL3_9MICO GTP cyclohydrolase 1 OS= Brachybacterium saurashtrense OX=556288 GN=folE PE=3 SV =1
MAVDQPRIEAAVREILAAIGEDPERDGLLETPGRVARMYGEVFEGLDQDAREPLATTFDIEHQELVLVRDIAFYSMCEHHLLPFHGTAHVGYIPGGGTVTGLSKLARLVNVYARRPQVQERLTFQIADALMDELNAAGAIVVIEAEHMCMSMRGVRAAGARTVTSAVRGMLRDSASTRGEAMALIHRR

SEQ ID NO: 5662 - protein, 188 aa, Brachybacterium sp.
  misc_feature (1)..(188): tr|A0A0M8KP10|A0A0M8KP10_9MICO GTP cyclohydrolase 1 OS= Brachybacterium sp. SW0106-09 OX=1704590 GN=folE PE=3 S V=1
MAVDRPRVEAAVRELLAGIGEDPGRDGLLDTPARVARMYAEVFEGLDQDAHEPLSTTFDIEHQELVLVRDIAFHSMCEHHLLPFHGMAHVGYIPGGGAVTGLSKLARLVHVYARRPQVQERLTFQIADALMDELGAAGAIVVIEAEHMCMSMRGVRAAGARTITSAVRGMLRDNPSTRGEAMALINGR

SEQ ID NO: 5663 - protein, 187 aa, Brachybacterium sp.
  misc_feature (1)..(187): tr|A0A4P8TKP8|A0A4P8TKP8_9MICO GTP cyclohydrolase 1 OS= Brachybacterium sp. SGAir0954 OX=2571029 GN=folE PE=3 S V=1
MPVDLDRVAAGVREILAGIGEDPDRDGLRDTPARVARMYAEVFEGLDKDAHEPLSTTFEIDHQELVLVRDIRFHSLCEHHLLPFHGVAHVGYIPGNGRVTGLSKLARLVHVYARRPQVQERITTQIAEALMEELGAAGAIVVLEAEHQCMSMRGVRAEGARTVTSAVRGQLRDGATRAEAMSLIQRG

SEQ ID NO: 5664 - protein, 278 aa, Bradymonadales bacterium
  misc_feature (1)..(278): tr|A0A5B8XSG8|A0A5B8XSG8_9DELT GTP cyclohydrolase FolE2 OS=Bradymonadales bacterium V1718 OX=2600177 GN=folE2 PE=3 SV=1
MRHLLPSLPLESPMEDVQNRSDNREIPIDRVGVTNLRYPIIVWDKANESQSTVATLSLSVHLPHHFKGTHMSRFLEVLNEHRGEFTIKTLPTVIHELKTRLDSEAAHIEARFPYFIEKQAPVTKKTSLLDIEGYFHGASDASGDDFILGVSVPVTSLCPCSKEISDYGAHNQRSTITIEIRMTSAASEHFVWMEDLIEIAEASASAPLYALLKRPDERFVTMQAYDNPAFVEDIARNVAKRLQDDERIGWFRVKCVNQESIHNHDAFSEILWTRPTES

SEQ ID NO: 5665 - protein, 217 aa, Bradymonadales bacterium
  misc_feature (1)..(217): tr|A0A5B8XM32|A0A5B8XM32_9DELT GTP cyclohydrolase 1 OS= Bradymonadales bacterium V1718 OX=2600177 GN=FRD01_0284 0 PE=3 SV=1
MHPTYSTWPCGDSAGVRALRHSPTLQTGLFGLGQDLTTPERHFQDFLEALGLSAEKDPELAETPRRVSELLADLTASAKLDPPQLSTFPAQNHETVIVEHIEFRSMCVHHMLPFFGTIDIAYIPDARLAGFGGFLRAVEYVSRKPQVQERLVQELADILQDALSPKGLLIRCQARQMCVEMRRDTIAKFTSFASTGELSGGPERESVLNQLAQRSST

SEQ ID NO: 5666 - protein, 222 aa, Bradyrhizobiaceae bacterium; identical to SEQ ID NO: 4158
  misc_feature (1)..(222): tr|F7QQ68|F7QQ68_9BRAD GTP cyclohydrolase 1 OS=Bradyrhi zobiaceae bacterium SG-6C OX=709797 GN=folE PE=3 SV=1

SEQ ID NO: 5667 - protein, 217 aa, Bradyrhizobiaceae bacterium
  misc_feature (1)..(217): tr|A0A363TGA3|A0A363TGA3_9BRAD GTP cyclohydrolase 1 OS= Bradyrhizobiaceae bacterium OX=2072420 GN=folE PE=3 SV= 1
MDAIVKSFPKPAPELSEHVRAAPVSSVPRPSREEAEAAVRTLIAFAGDDPTREGLTDTPRRVASAYEELFRGYRECPAEALARQFSEIGSYDDHVLVREIPFHSHCEHHMVPFVGKAHVAYLPVDRVVGLSKLARVIDIYARRLQTQEHLTAQVATAINEILRPRGVAVMMEAEHLCMSMRGVQKAGVSTVTTQFLGAYRDDPNEQARFLALVRPAR

SEQ ID NO: 5668 - protein, 230 aa, Bradyrhizobium arachidis
  misc_feature (1)..(230): tr|A0A1I7I3W4|A0A1I7I3W4_9BRAD GTP cyclohydrolase 1 OS= Bradyrhizobium arachidis OX=858423 GN=folE PE=3 SV=1
MDATIKSIRPNKPADRQPESRPAELDPAEFLAVAVRADQPRPARAEAEAAVKTLLAYIGENTEREGLLDTPRRVVEAFDELYQGYHQCPAEVLDRTFGETAGYDDFVLVRDIEFTSQCEHHMMPFYGKAHIAYTPVERVVGLSKLARLTDIFARRLQTQEHLTAQIAAAIDEILKPRGVAVLIEAEHTCMSVRGVAKHGASTFTSRFTGMFRDNPAEQARFLSLVRGLQR

SEQ ID NO: 5669 - protein, 208 aa, Bradyrhizobium arachidis
  misc_feature (1)..(208): tr|A0A1I7LHE0|A0A1I7LHE0_9BRAD GTP cyclohydrolase 1 OS= Bradyrhizobium arachidis OX=858423 GN=folE PE=3 SV=1
MKLQARKLERVAVAQAPSDRPDRAEVEQAIRTMIRWAGDDPARDGLRETPDRVARAFEEYFSGYAQDPTEILQKTFEEIEGYDEMIVLRGVRFESHCEHHMAPIVGRAWVAYIPQGRVVGISKLARVVDVYAKRLQIQEKMTAQIANTINDVLRPEGVGVIIKATHHCMTTRGAHKPGTDLVTSRMLGVFRDNALTRQELLGLANSDD

SEQ ID NO: 5670 - protein, 225 aa, Bradyrhizobium betae
  misc_feature (1)..(225): tr|A0A4Q1VJP5|A0A4Q1VJP5_9BRAD GTP cyclohydrolase 1 OS= Bradyrhizobium betae OX=244734 GN=folE PE=3 SV=1
MDATIKPIRPSKQPESRPAELDPAEFLAAAVRADQPRPARAEAEAAVKTLLAYIGENTGREGLLDTPRRVVEAFDELYQGYHQCPAEVLDRTFGETAGYDDFVLVRDIEFTSQCEHHMMPFYGKAHIAYTPVERVVGLSKLARLTDIFARRLQTQEHMTAQIAAAIDEIMKPRGVAVLIEAEHTCMSVRGVAKHGASTFTSRFTGMFRDNPAEQARFLSLVRGTR

SEQ ID NO: 5671 - protein, 246 aa, Bradyrhizobium canariense; identical to SEQ ID NO: 4157
  misc_feature (1)..(246): tr|A0A1H1N724|A0A1H1N724_9BRAD GTP cyclohydrolase 1 OS= Bradyrhizobium canariense OX=255045 GN=folE PE=3 SV=1

SEQ ID NO: 5672 - protein, 230 aa, Bradyrhizobium canariense
  misc_feature (1)..(230): tr|A0A1X3FFC3|A0A1X3FFC3_9BRAD GTP cyclohydrolase 1 OS= Bradyrhizobium canariense OX=255045 GN=folE PE=3 SV=1
MDATIKSIRPNKPSDRQPDSRPAELDPSEFLAAAVRADQPRPARAEAEQAVKTLLAYIGENTNREGLLDTPRRVVEAFDELYQGYHQCPAEVLDRTFGETAGYDDFVLVRDIEFTSQCEHHMMPFYGKAHIAYTPVERVVGLSKLARLTDIFARRLQTQEHMTAQIAAAIDESLKPRGVAVLIEAEHTCMSVRGVAKHGASTFTSRFTGMFRDNPAEQARFLSLVRGLQR

SEQ ID NO: 5673 - protein, 230 aa, Bradyrhizobium centrolobii
  misc_feature (1)..(230): tr|A0A176YK00|A0A176YK00_9BRAD GTP cyclohydrolase 1 OS= Bradyrhizobium centrolobii OX=1505087 GN=folE PE=3 SV=1
MDALIKSIRPNKPSDKQPESRPAELDPAEFLAAAVRADQPRPARAEAEQAVKTLLAYIGENTAREGLLDTPRRVVEAFDELYQGYHQCPAEVLDRTFGETAGYDDFVLVRDIEFTSQCEHHMMPFYGKAHIAYTPVERVVGLSKLARLTDIFARRLQTQEHLTAQIAAAIDEILKPRGVAVLVEAEHTCMSVRGVAKHGATTFTSRFTGMFRDNPAEQGRFLSLVRGTQR

SEQ ID NO: 5674 - protein, 230 aa, Bradyrhizobium daqingense
  misc_feature (1)..(230): tr|A0A562KGB5|A0A562KGB5_9BRAD GTP cyclohydrolase 1 OS= Bradyrhizobium daqingense OX=993502 GN=folE PE=3 SV=1
MDAAIKSIRPNKPSERQPESRPAELDPAEFLAAAVRADQPRPARAEAEAAVKTLLAYIGENTEREGLLDTPRRVVEAFDELYQGYHQCPAEVLDRTFGETAGYDDFVLVRDIEFTSQCEHHMMPFYGKAHIAYTPVERVVGLSKLARLTDIFARRLQTQEHLTAQIAAAIDEILKPRGVAVLIEAEHTCMSVRGVAKHGASTFTSRFTGMFRDNPAEQARFLSLVRGLQR

SEQ ID NO: 5675 - protein, 208 aa, Bradyrhizobium daqingense
  misc_feature (1)..(208): tr|A0A562LUE3|A0A562LUE3_9BRAD GTP cyclohydrolase 1 OS= Bradyrhizobium daqingense OX=993502 GN=folE PE=3 SV=1
MKSQPRRLERVAVAQAPSDRPNRAEVEQAIRTMIRWAGDDPARDGLRETPDRVARAFEEYFSGYAQDPTEILQKTFEEIEGYDEMIVLRGVRFESHCEHHMAPIVGRAWVAYIPQGRVVGISKLARLVDIYAKRLQIQEKMTAQIANTINDVLNPEGVGVIIKATHHCMTTRGAHKPGTDLVTSRMLGVFRDNALTRQELLGLANSDD

SEQ ID NO: 5676 - protein, 229 aa, Bradyrhizobium diazoefficiens
  misc_feature (1)..(229): sp|Q89IW2|GCH1_BRADU GTP cyclohydrolase 1 OS=Bradyrhizo bium diazoefficiens (strain JCM 10833 / IAM 13628 / NBR C 14792 / USDA 110) OX=224911 GN=folE PE=3 SV=1
MDATIKSIRPSKPSDRQPESRPAELDPAEFLAAAVRADQPRPARAQAEAAVKTLLAYIGENTEREGLLDTPRRVVEAFDELYQGYHQCPAEVLDRTFGETAGYDDFVLVRDIEFTSQCEHHMMPFYGKAHIAYTPVERVVGLSKLARLTDIFARRLQTQEHLTAQIAAAIDEVLKPRGVAVLIEAEHTCMSVRGVAKHGASTFTSRFTGMFRDNPAEQARFLSLVRGTR

SEQ ID NO: 5677 - protein, 229 aa, Bradyrhizobium diazoefficiens; identical to SEQ ID NO: 5676
  misc_feature (1)..(229): tr|A0A0E4FUL2|A0A0E4FUL2_9BRAD GTP cyclohydrolase 1 OS= Bradyrhizobium diazoefficiens OX=1355477 GN=folE PE=3 S V=1

SEQ ID NO: 5678 - protein, 205 aa, Bradyrhizobium elkanii
  misc_feature (1)..(205): tr|A0A1E3EI90|A0A1E3EI90_BRAEL GTP cyclohydrolase 1 OS= Bradyrhizobium elkanii OX=29448 GN=folE PE=3 SV=1
MNPIVHTLDRARAAQTESDKPTRAEVEAAVRTIIRWTGDDPERDGLLETPARVTRSFEEFFAGYDQRPAEILEKTFEEIEGYDEMIALRGIRFESHCEHHMAPIIGQAWVAYIPNGRVVGISKLARVVDIYARRLQIQEKMTAQVANTINDVLKPQGVGVIIKASHHCMTTRGVHKPDTDLVTSRMLGCFRDNALTRQEFLGIAV

SEQ ID NO: 5679 - protein, 205 aa, Bradyrhizobium elkanii
  misc_feature (1)..(205): tr|A0A4Q4KAD6|A0A4Q4KAD6_BRAEL GTP cyclohydrolase 1 OS= Bradyrhizobium elkanii OX=29448 GN=folE PE=3 SV=1
MNPIVHTLDRARAAQTESDKPTRAEVEAAVRTIIRWTGDDPERDGLLETPARVTRSFEEFFAGYDQRPAEILEKTFEEIEGYDEMIALRGIRFESHCEHHMAPIIGQAWVAYIPNGRVVGISKLARVVDIYARRLQIQEKMTAQIANTINEVLKPQGVGVIIKASHHCMTTRGVHKPDTDLVTSRMLGCFRDNALTRQEFLGIAV

SEQ ID NO: 5680 - protein, 226 aa, Bradyrhizobium erythrophlei
  misc_feature (1)..(226): tr|A0A1H4S6R7|A0A1H4S6R7_9BRAD GTP cyclohydrolase 1 OS= Bradyrhizobium erythrophlei OX=1437360 GN=folE PE=3 SV= 1
MDALIKSIRPNKPADAKAGELDPSEFMAAAVRADQPRPSRAEAEDAVKTLLAYIGENTGREGLLDTPRRVVEAYDELYQGYHQCPAEVLNRTFGETAGYDDFVLVRDIEFTSQCEHHMMPFYGRAHIAYTPVERVVGLSKLARLTDIFARRLQTQEHLTAQVAAAIDEVLKPRGVAVLIEAEHTCMSVRGVAKHGASTFTSRFTGMFRDNPAEQQRFLSLVRGPSR

SEQ ID NO: 5681 - protein, 231 aa, Bradyrhizobium erythrophlei
  misc_feature (1)..(231): tr|A0A1N6JSF5|A0A1N6JSF5_9BRAD GTP cyclohydrolase 1 OS= Bradyrhizobium erythrophlei OX=1437360 GN=folE PE=3 SV= 1
MDALIKSIRPNKSTDTKAPETRPAELDPAEFLAAAVRADQPRPSRAEAEQAVQTLLGYIGENPAREGLLDTPRRVVEAFDELYQGYHQCPAEVLDRTFGETAGYDDFVLIRDIEFTSQCEHHMMPFYGRAHIAYTPVERVVGLSKLARLTDIFARRLQTQEHLTAQIAAAIDEVLKPRGVAVVIEAEHTCMSVRGVAKHGAMTFTSRFTGMFRDNPAEQARFLSMVRGPNR

SEQ ID NO: 5682 - protein, 230 aa, Bradyrhizobium genosp.
  misc_feature (1)..(230): tr|A0A4Q7FNQ8|A0A4Q7FNQ8_9BRAD GTP cyclohydrolase 1 OS= Bradyrhizobium genosp. SA-3 OX=508868 GN=folE PE=3 SV=1
MDATIKSIRPNKPSDRQPESRPAELDPAEFLSVAVRADQPRPARAEAEAAVKTLLAYIGENTEREGLLDTPRRVVEAFDELYQGYHQCPAEVLDRTFGETAGYDDFVLVRDIEFTSQCEHHMMPFYGKAHIAYTPVERVVGLSKLARLTDIFARRLQTQEHLTAQIAAAIDEILKPRGVAVLIEAEHTCMSVRGVAKHGASTFTSRFTGMFRDNPAEQARFLSLVRGTTR

SEQ ID NO: 5683 - protein, 208 aa, Bradyrhizobium genosp.
  misc_feature (1)..(208): tr|A0A4Q7FPD2|A0A4Q7FPD2_9BRAD GTP cyclohydrolase 1 OS= Bradyrhizobium genosp. SA-3 OX=508868 GN=folE PE=3 SV=1
MKSQVRKLERVAVAQRPTERPARAEVEQAVRTMIRWAGDDPARDGLRDTPDRVARAFEEYFSGYALDPTEILQKTFEEIEGYDEMIVLRGVRFESHCEHHIAPIVGRAWVAYIPQGRVVGISKLARVVDIYAKRLQIQEKMTAQIANTINDVLEPQGVGVIIKATHHCMTTRGAYKPGTDLVTSRMLGVFRDNALTRQELLGLANSDT

SEQ ID NO: 5684 - protein, 208 aa, Bradyrhizobium guangdongense
  misc_feature (1)..(208): tr|A0A410VAZ6|A0A410VAZ6_9BRAD GTP cyclohydrolase 1 OS= Bradyrhizobium guangdongense OX=1325090 GN=folE PE=3 SV =1
MKSQARRLERVAVAQAPSERPDRAEVEQAIRTMIRWAGDDPARDGLRDTPDRVARAFEEYFSGYAQDPTEILQKTFEEIEGYDEMIVLRGVRFESHCEHHMAPIVGRAWVAYIPQGRVVGISKLARVVDVYAKRLQIQEKMTAQIANTINDVLKPEGVGVIIKATHHCMTTRGAHKPGTDLVTSRMLGVFRDNALTRQELLGLANSDD

SEQ ID NO: 5685 - protein, 230 aa, Bradyrhizobium guangdongense
  misc_feature (1)..(230): tr|A0A410V5P3|A0A410V5P3_9BRAD GTP cyclohydrolase 1 OS= Bradyrhizobium guangdongense OX=1325090 GN=folE PE=3 SV =1
MDATIKSIRPNKPSDRQPDSRPAELDPAEFLAAAVRADQPRPARAEAEAAVKTLLAYIGENPQREGLIDTPRRVVEAFDELYQGYHQCPAEVLDRTFGETAGYDDFVLVRDIEFTSQCEHHMMPFYGKAHIAYTPVERVVGLSKLARLTDIFARRLQTQEHLTAQIAAAIDEILKPRGVAVLIEAEHTCMSVRGVAKHGASTFTSRFTGMFRDNPAEQARFLSLVRGLQR

SEQ ID NO: 5686 - protein, 230 aa, Bradyrhizobium guangzhouense
  misc_feature (1)..(230): tr|A0A4Q0R4J3|A0A4Q0R4J3_9BRAD GTP cyclohydrolase 1 OS= Bradyrhizobium guangzhouense OX=1325095 GN=folE PE=3 SV =1
MDAAIKSIRPSKPSDRQPESRPAELDPAEFLAAAVRADQPRPARAEAEAAVKTLLAYIGENTEREGLLDTPRRVVEAFDELYQGYHQCPAEVLDRTFGETAGYDDFVLVRDIEFTSQCEHHMMPFYGKAHIAYTPVERVVGLSKLARLTDIFARRLQTQEHLTAQIAAAIDEILKPRGVAVLIEAEHTCMSVRGVAKHGASTFTSRYTGMFRDNPAEQARFLSMVRGMTR

SEQ ID NO: 5687 - protein, 190 aa, Bradyrhizobium guangzhouense
  misc_feature (1)..(190): tr|A0A4Q0RFG5|A0A4Q0RFG5_9BRAD GTP cyclohydrolase 1 OS= Bradyrhizobium guangzhouense OX=1325095 GN=folE PE=3 SV =1
MSREDAEEAFRVILRWIGEDPEREGLVDTPRRVVEAYRTYFRGYFEDPTEHLRTTFAETGGYDDMVLLRNIPFRSHCEHHMAPIVGRAWVGYVPAQRVVGISKLARVVDGYSRRLQIQERFTTEIANAIQSELEPKGVAVFVKAEHHCISGRGVQKHGVDLSTSKMIGCFKDDPILRQEFLAMVSADLKP

SEQ ID NO: 5688 - protein, 226 aa, Bradyrhizobium huanghuaihaiense
  misc_feature (1)..(226): tr|A0A562RX89|A0A562RX89_9BRAD GTP cyclohydrolase 1 OS= Bradyrhizobium huanghuaihaiense OX=990078 GN=folE PE=3 SV=1
MDATIKPIRPNKQLESRPAELDPAEFLAAAVRADQPRPARAEAEQAVKTLLAYIGENPHREGLLDTPRRVVEAFDELYQGYHQCPAEVLDRTFGETAGYDDFVLVRDIEFTSQCEHHMMPFYGKAHIAYTPVERVVGLSKLARLTDIFARRLQTQEHLTAQIAAAIDEILKPRGVAVLIEAEHTCMSVRGVAKHGASTFTSRYTGMFRDNPAEQARFLSMVRGLQR

SEQ ID NO: 5689 - protein, 242 aa, Bradyrhizobium icense
  misc_feature (1)..(242): tr|A0A1B1UFL8|A0A1B1UFL8_9BRAD GTP cyclohydrolase 1 OS= Bradyrhizobium icense OX=1274631 GN=folE PE=3 SV=1
MDALIKSLRPGKPSPSDLKPSEVKSPDVAPETRPAELDPAEFLAAAVRADLPRPSRAEAEHAVHTLLSYIGENPDREGLLDTPRRVVEAFDELYQGYHQCPAEVLDRTFGETAGYDDFVLVRDIEFTSQCEHHMMPFYGKAHIAYTPVERVVGLSKLARLTDIFARRLQTQEHLTAQIAAAIDEVLKPRGVAVLIEAEHTCMSVRGVAKHGAMTFTSRFTGMFRDNPAEQQRFLSLVRGPNR

SEQ ID NO: 5690 - protein, 230 aa, Bradyrhizobium japonicum
  misc_feature (1)..(230): tr|A0A4Y3YJM5|A0A4Y3YJM5_BRAJP GTP cyclohydrolase 1 OS= Bradyrhizobium japonicum OX=375 GN=folE PE=3 SV=1
MDAAIKSIRPGKPSDRQPESRLAELDPAEFLAAAVRADQPRPARAEAEAAVKTLLAYIGENTAREGLLDTPRRVVEAFDELYQGYHQCPAEVLDRTFGETAGYDDFVLVRDIEFTSQCEHHMMPFYGKAHIAYTPVERVVGLSKLARLTDIFARRLQTQEHMTAQIAAAIDEILKPRGVAVLIEAEHTCMSVRGVAKHGASTFTSRFTGMFRDNPAEQARFLSLVRGTPR

SEQ ID NO: 5691 - protein, 230 aa, Bradyrhizobium japonicum
  misc_feature (1)..(230): tr|A0A0A3XR21|A0A0A3XR21_BRAJP GTP cyclohydrolase 1 OS= Bradyrhizobium japonicum OX=375 GN=folE PE=3 SV=1
MDAAIKSIRPGKPSDRQPESRPAELDPAEFLAAAVRADQPRPARAEAEAAVKTLLAYIGENTAREGLLDTPRRVVEAFDELYQGYHQCPAEVLDRTFGETAGYDDFVLVRDIEFTSQCEHHMMPFYGKAHIAYTPVERVVGLSKLARLTDIFARRLQTQEHMTAQIAAAIDEILKPRGVAVLIEAEHTCMSVRGVAKHGASTFTSRFTGMFRDNPAEQARFLSLVRGTPR

SEQ ID NO: 5692 - protein, 205 aa, Bradyrhizobium jicamae
  misc_feature (1)..(205): tr|A0A0R3LTM9|A0A0R3LTM9_9BRAD GTP cyclohydrolase 1 OS= Bradyrhizobium jicamae OX=280332 GN=folE PE=3 SV=1
MNPNVQALDRARASLSDIQKPGRAEVEAAVRTIIRWTGEDPDRDGLRETPARVTRAFEEFFSGYGQDPVEILRKTFEEIEGYDEMIVLRGIRFESHCEHHMAPIVGQAWVAYIPNGRVVGISKLARVVNVYARRLQIQEKMTAQIANTINDVLEPQGVGVIIKASHHCMTTRGVHKPDSDLVTSRMLGCFRDNALTRQEFLGMAT

SEQ ID NO: 5693 - protein, 240 aa, Bradyrhizobium jicamae
  misc_feature (1)..(240): tr|A0A0R3LFW5|A0A0R3LFW5_9BRAD GTP cyclohydrolase 1 OS= Bradyrhizobium jicamae OX=280332 GN=folE PE=3 SV=1
MDALIKSIRPGKPSDAKPSEVKSPDMAPETRPAELDPAEFLAAAVRADLPRPSRAEAEHAVQTLLSYIGENPGREGLLDTPRRVVEAFDELYQGYHQCPAEVLDRTFGETAGYDDFVLVRDIEFTSQCEHHMMPFYGRAHIAYTPVERVVGLSKLARLTDIFARRLQTQEHLTAQIAAAIDEVLKPRGVAVLIEAEHTCMSVRGVAKHGAMTFTSRFTGMFRDNPAEQQRFLSLVRGPNR

SEQ ID NO: 5694 - protein, 243 aa, Bradyrhizobium lablabi
  misc_feature (1)..(243): tr|A0A1M7CV27|A0A1M7CV27_9BRAD GTP cyclohydrolase 1 OS= Bradyrhizobium lablabi OX=722472 GN=folE PE=3 SV=1
MDALIKSIRPGKASDLKTSDKPSDAKDQRIPESRPAELDPSEFLAAAVRADQPRPSRAEAEHAVETLLSYIGENPGREGLLDTPRRVVEAFDELYQGYHQCPAEVLNRTFGETAGYDDFVLIRDIEFTSQCEHHMMPFYGKAHIAYTPVERVVGLSKLARLTDIFARRLQTQEHLTAQIAAAIDEILKPRGVAVMIEAEHTCMSVRGVAKHGAMTFTSRFTGMFRDNPAEQARFLSMVRGPNR

SEQ ID NO: 5695 - protein, 205 aa, Bradyrhizobium lablabi
  misc_feature (1)..(205): tr|A0A0R3MZL8|A0A0R3MZL8_9BRAD GTP cyclohydrolase 1 OS= Bradyrhizobium lablabi OX=722472 GN=folE PE=3 SV=1
MNPNVQALNRARASLSDIQRPGRAEVEAAVRTIIRWTGEDPDRDGLRETPARVTRAFEEFFSGYGQDPVEILRKTFEEIEGYDEMIVLRGIRFESHCEHHMAPIVGQAWVAYIPNGRVVGISKLARVVDVYARRLQIQEKMTAQIANTINDVLEPQGVGVIIKASHHCMTTRGVHKPDSDLVTSRMLGCFRDNALTRQEFLGMAT

SEQ ID NO: 5696 - protein, 229 aa, Bradyrhizobium liaoningense
  misc_feature (1)..(229): tr|A0A151FMU3|A0A151FMU3_9BRAD GTP cyclohydrolase 1 OS= Bradyrhizobium liaoningense OX=43992 GN=folE PE=3 SV=1
MDAAIKSIRPNKPADRQPESRPAELDPAEFLAAAVRADQPRPARAEAEAAVKTLLAYIGENTEREGLLDTPRRVVEAFDELYQGYHQCPAEVLDRTFGETAGYDDFVLVRDIEFTSQCEHHMMPFYGKAHIAYTPVERVVGLSKLARLTDIFARRLQTQEHLTAQIAAAIDEILKPRGVAVLIEAEHTCMSVRGVAKHGASTFTSRFTGMFRDNPAEQARFLSLVRGTR

SEQ ID NO: 5697 - protein, 208 aa, Bradyrhizobium lupini
  misc_feature (1)..(208): tr|K5CPY0|K5CPY0_RHILU GTP cyclohydrolase 1 OS=Bradyrhi zobium lupini HPC(L) OX=1229491 GN=folE PE=3 SV=1
MDAIVKNFPGAGAKPDVAEARPNQAEAEEAVRVLLRWAGENPAREGLLDTPKRVAKAYRELFAGYELNVQDVLGTTFEEVGGYDDVVLVRDIPFFSHCEHHMVPIVGKAHVAYLPAGRVLGLSKIARVVEIFGRRLQTQENMTAQIARSIEETLKPRGVAVMIDAEHMCMSMRGVNKQGSTTLTTSFTGTFKNDPAEQVRFMTMVRNR

SEQ ID NO: 5698 - protein, 226 aa, Bradyrhizobium macuxiense
  misc_feature (1)..(226): tr|A0A120FKY4|A0A120FKY4_9BRAD GTP cyclohydrolase 1 OS= Bradyrhizobium macuxiense OX=1755647 GN=folE PE=3 SV=1
MDALIKSIRPNKPTDAKTTELDPSEFMAAAVRADQLRPSRAEAEQAVKTLLSYIGEDTGREGLLDTPRRVVEAYDELYQGYHQCPAEVLNRTFGETAGYDDFVLVRDIEFTSQCEHHMMPFYGKAHIAYTPVERVVGLSKLARLTDIFARRLQTQEHLTAQVAAAIDEILKPRGVAVLIEAEHTCMSVRGVAKHGASTFTSRFTGMFRDNPAEQQRFLSLVRGPTR

SEQ ID NO: 5699 - protein, 226 aa, Bradyrhizobium macuxiense
  misc_feature (1)..(226): tr|A0A560L7W1|A0A560L7W1_9BRAD GTP cyclohydrolase 1 OS= Bradyrhizobium macuxiense OX=1755647 GN=folE PE=3 SV=1
MDALIKPIRPNKPADAKPGELDPSEFMAAAVRADQPRPSRAEAEDAVKTLLAYIGENTHREGLLDTPRRVVEAYDELYQGYHQCPAEVLNRTFGETAGYDDFVLVRDIEFTSQCEHHMMPFYGKAHIAYTPVERVVGLSKLARLTDIFARRLQTQEHLTAQVAAAIDEVLKPRGVAVLIEAEHTCMSVRGVAKHGASTFTSRFTGMFRDNPAEQQRFLSLVRGPNR

SEQ ID NO: 5700 - protein, 230 aa, Bradyrhizobium manausense
  misc_feature (1)..(230): tr|A0A0R3E0F3|A0A0R3E0F3_9BRAD GTP cyclohydrolase 1 OS= Bradyrhizobium manausense OX=989370 GN=folE PE=3 SV=1
MDATIKSIRPNKPSDRQPESRPAELDPAEFLAAAVRADQPRPARAEAEAAVKTLLAYIGENTGREGLLDTPRRVVEAFDELYQGYHQCPAEVLDRTFGETAGYDDFVLVRDIEFTSQCEHHMMPFYGKAHIAYTPVERVVGLSKLARLTDIFARRLQTQEHLTAQIAAAIDEILKPRGVAVLIEAEHTCMSVRGVAKHGASTFTSRYTGMFRDNPAEQARFLSMVRGMTR

SEQ ID NO: 5701 - protein, 208 aa, Bradyrhizobium nanningense
  misc_feature (1)..(208): tr|A0A4Q0SE47|A0A4Q0SE47_9BRAD GTP cyclohydrolase 1 OS= Bradyrhizobium nanningense OX=1325118 GN=folE PE=3 SV=1
MKSQVRKLERVAVAQAPVERPDRAEVEQAIRTMIRWAGDDPARDGLRETPDRIARAFEEYFSGYAQDPTEILQKTFEEIEGYDEMIVLRGVRFESHCEHHMAPIVGRAWVAYIPQGRVVGISKLARVVDIYAKRLQIQEKMTAQIANTINDVLKPEGVGVIIKATHHCMTTRGAHKPGTDLVTSRMLGVFRDNALTRQELLGLANSDD

SEQ ID NO: 5702 - protein, 229 aa, Bradyrhizobium nanningense
  misc_feature (1)..(229): tr|A0A4Q0S2T2|A0A4Q0S2T2_9BRAD GTP cyclohydrolase 1 OS= Bradyrhizobium nanningense OX=1325118 GN=folE PE=3 SV=1
MDATIKSIRPGKPSDRQLESRPAELDPAEFLAAAVRADQPRPARAEAEAAVKTLLAYIGENTGREGLLDTPRRVVEAFDELYQGYHQCPAEVLDRTFGETAGYDDFVLVRDIEFTSQCEHHMMPFYGKAHIAYTPVERVVGLSKLARLTDIFARRLQTQEHLTAQIAAAIDEVLKPRGVAVLIEAEHTCMSVRGVAKHGASTFTSRFTGMFRDNPAEQARFLSLVRGTR

SEQ ID NO: 5703 - protein, 208 aa, Bradyrhizobium neotropicale
  misc_feature (1)..(208): tr|A0A176YU35|A0A176YU35_9BRAD GTP cyclohydrolase 1 OS= Bradyrhizobium neotropicale OX=1497615 GN=folE PE=3 SV= 1
MGSQARRLERVAVAQMPSERPSRAEVEQAVQTMIRWAGDDPARDGLRETPDRVARAFEEYYSGYALDPTDILQKTFEEIEGYDEMIVLRGVRFESHCEHHMAPIVGRAWVAYIPQGRVVGISKLARVVDIYAKRLQIQEKMTAQIANTINDVLKPEGVGVIIKATHHCMTTRGAHKPGTDLVTSRMLGVFRDNALTRQELLGLANSDA

SEQ ID NO: 5704 - protein, 230 aa, Bradyrhizobium neotropicale
  misc_feature (1)..(230): tr|A0A176ZJX6|A0A176ZJX6_9BRAD GTP cyclohydrolase 1 OS= Bradyrhizobium neotropicale OX=1497615 GN=folE PE=3 SV= 1
MDALIKSIRPNKPADKQPESRPAELDPSEFLAVAVRADQPRPARAEAEQAVKTLLAYIGENTQREGLLDTPRRVVEAFDELYQGYHQCPAEVLDRTFGETAGYDDFVLVRDIEFTSQCEHHMMPFYGKAHIAYTPVERVVGLSKLARLTDIFARRLQTQEHLTAQIAAAIDEILKPRGVAVLVEAEHTCMSVRGVAKHGAMTFTSRFTGMFRDNPAEQARFLSLVRGTQR

SEQ ID NO: 5705 - protein, 235 aa, Bradyrhizobium oligotrophicum
  misc_feature (1)..(235): tr|M4ZA98|M4ZA98_9BRAD GTP cyclohydrolase 1 OS=Bradyrhi zobium oligotrophicum S58 OX=1245469 GN=folE PE=3 SV=1
MDTLIKTLRANKPESKPLDAKLTDARAAELDPAEFLAAAVRPDRARPSRAEAEAAVYTLLNYIGEDPTREGLVDTPRRVVEAYDELYQGYHQCPAEVLDRTFGETAGYDDFVLIRDIEFTSQCEHHMMPFYGRAHIAYTPVERVVGLSKLARLTDIFARRLQTQEHLTAQIAAAIDEVLKPRGVAVMIEAEHTCMSVRGVAKHGAITFTSRFTGMFRDNPAEQGRFLSMVRSPQR

SEQ ID NO: 5706 - protein, 206 aa, Bradyrhizobium oligotrophicum
  misc_feature (1)..(206): tr|M4ZB84|M4ZB84_9BRAD GTP cyclohydrolase 1 OS=Bradyrhi zobium oligotrophicum S58 OX=1245469 GN=folE PE=3 SV=1
MRETAKTLPFACDPVRVTQDDVEDAIRTILTWIGEDPSREGLSETPARVARAYKSYFAGYAQNPEDYLRKTFEETAGYDEMVLLRNIPFQSHCEHHMAPIIGRAWVGYVPRSRVVGISKLARVVEAYASRLQIQERMTAEIANIIDEVLQPQGVAVVIKAAHHCISSRGVKKHGVDLTTSRMLGCFRTDPMSRQEFLAMVNADLKD

SEQ ID NO: 5707 - protein, 230 aa, Bradyrhizobium ottawaense
  misc_feature (1)..(230): tr|A0A2U8PC42|A0A2U8PC42_9BRAD GTP cyclohydrolase 1 OS= Bradyrhizobium ottawaense OX=931866 GN=folE PE=3 SV=1
MDATIKSIRPNMPSDRQPESRPAELDPAEFLAAAVRADQPRPARAEAEQAVKTLLAYIGENTEREGLLDTPRRVVEAFDELYQGYHQCPAEVLDRTFGETAGYDDFVLVRDIEFTSQCEHHMMPFYGRAHIAYTPVERVVGLSKLARLTDIFARRLQTQEHLTAQIAAAIDEVLKPRGVAVLIEAEHTCMSVRGVAKHGASTFTSRFTGMFRDNPAEQARFLSLVRGLQR

SEQ ID NO: 5708 - protein, 208 aa, Bradyrhizobium ottawaense
  misc_feature (1)..(208): tr|A0A2U8PJ80|A0A2U8PJ80_9BRAD GTP cyclohydrolase 1 OS= Bradyrhizobium ottawaense OX=931866 GN=folE PE=3 SV=1
MKSQVRKLERVAVAQAPVERPDRPEVEQAIRTMIRWAGDDPARDGLRDTPDRVARAFEEYFSGYAQDPTEILQKTFEEIEGYDEMIVLRGVRFESHCEHHIAPIVGRAWVAYIPQGRVVGISKLARVVDIYAKRLQIQEKMTAQIANTINDVLKPEGVGVIIKATHHCMTTRGAHKPGTDLVTSRMLGVFRDNALTRQELLGLANSND

SEQ ID NO: 5709 - protein, 226 aa, Bradyrhizobium pachyrhizi
  misc_feature (1)..(226): tr|A0A0R3BSS4|A0A0R3BSS4_9BRAD GTP cyclohydrolase 1 OS= Bradyrhizobium pachyrhizi OX=280333 GN=folE PE=3 SV=1
MDALIKSIRPNKPADAKPGELDPSEFMTAAVRADQPRPSRAEAEDAVKTLLAYIGENTGREGLLDTPRRVVEAYDELYQGYHQCPAEVLNRTFGETAGYDDFVLVRDIEFTSQCEHHMMPFYGKAHIAYTPVERVVGLSKLARLTDIFARRLQTQEHLTAQVAAAIDEVLKPRGVAVLIEAEHTCMSVRGVAKHGASTFTSRFTGMFRDNPAEQQRFLSLVRGPNR

SEQ ID NO: 5710 - protein, 205 aa, Bradyrhizobium pachyrhizi
  misc_feature (1)..(205): tr|A0A0R3D8S6|A0A0R3D8S6_9BRAD GTP cyclohydrolase 1 OS= Bradyrhizobium pachyrhizi OX=280333 GN=folE PE=3 SV=1
MNPIVHALDRARAAQTESDKPTRAEVEAAVRTIIRWTGDDPERDGLLETPARVTRSFEEFFAGYDQRPAEILEKTFEEIEGYDEMIALRGIRFESHCEHHMAPIIGQAWVAYIPNGRVVGISKLARVVDIYARRLQIQEKMTAQIANTINDVLKPQGVGVIIKASHHCMTTRGVHKPDTDLVTSRMLGCFRDNALTRQEFLGIAV

SEQ ID NO: 5711 - protein, 240 aa, Bradyrhizobium retamae
  misc_feature (1)..(240): tr|A0A0R3N0V1|A0A0R3N0V1_9BRAD GTP cyclohydrolase 1 OS= Bradyrhizobium retamae OX=1300035 GN=folE PE=3 SV=1
MDALIKSLRPSKPSDLKPSEVKSPDVAPETRPAELDPAEFLAAAVRADLPRPSRAEAEHAVHTLLSYIGENPDREGLLDTPRRVVEAFDELYQGYHQCPAEVLDRTFGETAGYDDFVLVRDIEFTSQCEHHMMPFYGKAHIAYTPVERVVGLSKLARLTDIFARRLQTQEHLTAQIAAAIDEVLKPRGVAVLIEAEHTCMSVRGVAKHGAMTFTSRFTGMFRDNPAEQARFLSLVRGSNR

SEQ ID NO: 5712 - protein, 230 aa, Bradyrhizobium rifense
  misc_feature (1)..(230): tr|A0A5D3JZV3|A0A5D3JZV3_9BRAD GTP cyclohydrolase 1 OS= Bradyrhizobium rifense OX=515499 GN=folE PE=3 SV=1
MDAAIKSIRPSKPSDKQLESRPAELDPAEFLAAAVRADQPRPARAEAEAAVKTLLAYIGENTGREGLLDTPRRVVEAFDELYQGYHQCPAEVLDRTFGETAGYDDFVLVRDIEFTSQCEHHMMPFYGRAHIAYTPVERVVGLSKLARLTDIFARRLQTQEHLTAQIAAAIDEILKPRGVAVLIEAEHTCMSVRGVAKHGASTFTSRYTGMFRDNPAEQARFLSMVRGMTR

SEQ ID NO: 5713 - protein, 226 aa, Bradyrhizobium sacchari
  misc_feature (1)..(226): tr|A0A560K681|A0A560K681_9BRAD GTP cyclohydrolase 1 OS= Bradyrhizobium sacchari OX=1399419 GN=folE PE=3 SV=1
MDATIKPIRPNKQLESRPAELDPAEFLAAAVRADQPRPARAEAEQAVKTLLAYIGENTEREGLLDTPRRVVEAFDELYQGYHQCPAEVLDRTFGETAGYDDFVLVRDIEFTSQCEHHMMPFYGKAHIAYTPVERVVGLSKLARLTDIFARRLQTQEHLTAQIAAAIDEVLKPRGVAVLIEAEHTCMSVRGVAKHGASTFTSRFTGMFRDNPAEQARFLSLVRGLQR

SEQ ID NO: 5714 - protein, 208 aa, Bradyrhizobium shewense
  misc_feature (1)..(208): tr|A0A1C3UCJ7|A0A1C3UCJ7_9BRAD GTP cyclohydrolase 1 OS= Bradyrhizobium shewense OX=1761772 GN=folE PE=3 SV=1
MTSQVRKLERVAVAQAPVERPDRAEVEQAIRTMIRWAGDDPARDGLRETPDRVARAFEEYFSGYAQDPTEILQKTFEEIEGYDEMIVLRGVRFESHCEHHIAPIVGRAWVAYIPQGRVVGISKLARVVDIYAKRLQIQEKMTAQIANTINDVLKPEGVGVIIKATHHCMTTRGAHKPGTDLVTSRMLGVFRDNALTRQELLGLANSDD

SEQ ID NO: 5715 - protein, 230 aa, Bradyrhizobium shewense
  misc_feature (1)..(230): tr|A0A1C3WGE1|A0A1C3WGE1_9BRAD GTP cyclohydrolase 1 OS= Bradyrhizobium shewense OX=1761772 GN=folE PE=3 SV=1
MDATIKSIRPNKPSDRQPESRPAELDPAEFLAAAVRADQPRPARAEAEQAVKTLLAYIGENTEREGLLDTPRRVVEAFDELYQGYHQCPAEVLDRTFGETAGYDDFVLVRDIEFTSQCEHHMMPFYGRAHIAYTPVERVVGLSKLARLTDIFARRLQTQEHLTAQIAAAIDEVLKPRGVAVLIEAEHTCMSVRGVAKHGASTFTSRFTGMFRDNPAEQARFLSLVRGLQR

SEQ ID NO: 5716 - protein, 206 aa, Bradyrhizobium sp.
  misc_feature (1)..(206): tr|H0TA04|H0TA04_9BRAD GTP cyclohydrolase 1 OS=Bradyrhi zobium sp. STM 3809 OX=551936 GN=folE PE=3 SV=1
MRNTAKKLPFVCDPVTVTQDDVEDAIRTILTWIGEDPTREGLSETPARVARAYKSYFAGYDQNPEDYLRKTFEETAGYDEMVLLRNIPFQSHCEHHMAPIIGRAWVGYVPRSRVVGISKLARVVEAYAARLQIQERMTAEIANIINDVLQPQGVAVVIKAAHHCISSRGVKKHGVDLTTSRMLGCFRTDPMSRQEFLAMVNSDLKD

SEQ ID NO: 5717 - protein, 240 aa, Bradyrhizobium sp.
  misc_feature (1)..(240): tr|A0A1B9YKU2|A0A1B9YKU2_9BRAD GTP cyclohydrolase 1 OS= Bradyrhizobium sp. LMTR 3 OX=189873 GN=folE PE=3 SV=1
MDALIKSLRPGKPSDLKPSEVKSPDVAPEARPAELDPAEFLAAAVRADLPRPSRAEAEHAVHTLLSYIGENPDREGLLDTPRRVVEAFDELYQGYHQCPAEVLDRTFGETAGYDDFVLVRDIEFTSQCEHHMMPFYGKAHIAYTPVERVVGLSKLARLTDIFARRLQTQEHLTAQIAAAIDEVLKPRGVAVLIEAEHTCMSVRGVAKHGAMTFTSRFTGMFRDNPAEQQRFLSLVRGSNR

SEQ ID NO: 5718 - protein, 226 aa, Bradyrhizobium stylosanthis
  misc_feature (1)..(226): tr|A0A560DWM2|A0A560DWM2_9BRAD GTP cyclohydrolase 1 OS= Bradyrhizobium stylosanthis OX=1803665 GN=folE PE=3 SV= 1
MDATIKPIRPTKQPEARPAELDPAEFLAAAVRADQPRPARAEAEAAVKTLLAYIGENTNREGLLDTPRRVVEAFDELYQGYHQCPAEVLDRTFGETAGYDDFVLVRDIEFTSQCEHHMMPFYGKAHIAYTPVERVVGLSKLARLTDIFARRLQTQEHLTAQIAAAIDEILKPRGVAVLIEAEHTCMSVRGVAKHGASTFTSRYTGMFRDNPAEQARFLSMVRGLQR

SEQ ID NO: 5719 - protein, 240 aa, Bradyrhizobium valentinum
  misc_feature (1)..(240): tr|A0A0R3LWT6|A0A0R3LWT6_9BRAD GTP cyclohydrolase 1 OS= Bradyrhizobium valentinum OX=1518501 GN=folE PE=3 SV=1
MDALIKSIRPGKPSEVKPSEVKSPDMAPETRPAELDPAEFLAAAVRADLPRPSRAEAEQAVHTLLSYIGENPGREGLLDTPRRVVEAFDELYQGYHQCPAEVLDRTFGETAGYDDFVLVRDIEFTSQCEHHMMPFYGRAHIAYTPVERVVGLSKLARLTDIFARRLQTQEHLTAQIAAAIDEVLKPRGVAVLIEAEHTCMSVRGVAKHGAMTFTSRFTGMFRDNPAEQQRFLSLVRGPNR

SEQ ID NO: 5720 - protein, 230 aa, Bradyrhizobium vignae
  misc_feature (1)..(230): tr|A0A4Q0QK41|A0A4Q0QK41_9BRAD GTP cyclohydrolase 1 OS= Bradyrhizobium vignae OX=1549949 GN=folE PE=3 SV=1
MDAAIKSIRPNKPSDRQPESRPAELDPAEFLEAAVRADQPRPARAEAEAAVKTLLAYIGENPQREGLLDTPRRVVEAFDELYQGYHQCPAEVLDRTFGETAGYDDFVLVRDIEFTSQCEHHMMPFYGKAHIAYTPVERVVGLSKLARLTDIFARRLQTQEHLTAQIAAAIDEILKPRGVAVLIEAEHTCMSVRGVAKHGASTFTSRFTGMFRDNPAEQARFLSLVRGTTR

SEQ ID NO: 5721 - protein, 208 aa, Bradyrhizobium vignae
  misc_feature (1)..(208): tr|A0A4Q0R1T1|A0A4Q0R1T1_9BRAD GTP cyclohydrolase 1 OS= Bradyrhizobium vignae OX=1549949 GN=folE PE=3 SV=1
MKSQARKLERVAVAQAPSDRPERYEVEQAVRTMIRWAGDDPERDGLRDTPDRVARAFEEYFTGYAQDPTEILQKTFEEIEGYDEMIVLRGVRFESHCEHHIAPIVGRAWVAYIPQGRVVGISKLARVVDIYAKRLQIQEKMTAQIANTINDVLKPQGVGVIIKATHHCMTTRGAHKPGTDLVTSRMLGVFRDNALTRQELLGLANSDD

SEQ ID NO: 5722 - protein, 230 aa, Bradyrhizobium yuanmingense
  misc_feature (1)..(230): tr|A0A1C3WZ44|A0A1C3WZ44_9BRAD GTP cyclohydrolase 1 OS= Bradyrhizobium yuanmingense OX=108015 GN=folE PE=3 SV=1
MDAAIKSIRPGKPSDRQPENRPAELDPAEFLAAAVRADQPRPARAEAEAAVKTLLAYIGENTEREGLLDTPRRVVEAFDELYQGYHQCPAEVLDRTFGETAGYDDFVLVRDIEFTSQCEHHMMPFYGKAHIAYTPVERVVGLSKLARLTDIFARRLQTQEHLTAQIAAAIDEVLKPRGVAVLIEAEHTCMSVRGVAKHGASTFTSRFTGMFRDNPAEQARFLSLVRGTTR

SEQ ID NO: 5723 - protein, 230 aa, Bradyrhizobium yuanmingense
  misc_feature (1)..(230): tr|A0A0R3BZN2|A0A0R3BZN2_9BRAD GTP cyclohydrolase 1 OS= Bradyrhizobium yuanmingense OX=108015 GN=folE PE=3 SV=1
MDAAIKSIRPGKPSDRQPESRPAELDPAEFLAAAVRADQPRPARAEAEAAVKTLLAYIGENTEREGLLDTPRRVVEAFDELYQGYHQCPAEVLDRTFGETAGYDDFVLVRDIEFTSQCEHHMMPFYGKAHIAYTPVERVVGLSKLARLTDIFARRLQTQEHLTAQIAAAIDEVLKPRGVAVLIEAEHTCMSVRGVAKHGASTFTSRFTGMFRDNPAEQARFLSLVRGTTR

SEQ ID NO: 5724 - protein, 208 aa, Bradyrhizobium zhanjiangense
  misc_feature (1)..(208): tr|A0A4Q0QY64|A0A4Q0QY64_9BRAD GTP cyclohydrolase 1 OS= Bradyrhizobium zhanjiangense OX=1325107 GN=folE PE=3 SV =1
MKSQVRKLERVAVAQRPTERPDRAEVEQAVRTMIRWAGDDPARDGLRDTPDRVARAFEEYFSGYALDPTEILQKTFEEIEGYDEMIVLRGVRFESHCEHHIAPIVGRAWVAYIPQGRVVGISKLARVVDIYAKRLQIQEKMTAQIANTINDVLEPQGVGVIIKATHHCMTTRGAYKPGTDLVTSRMLGVFRDNALTRQELLGLANSDT

SEQ ID NO: 5725 - protein, 230 aa, Bradyrhizobium zhanjiangense
  misc_feature (1)..(230): tr|A0A4Q0QH62|A0A4Q0QH62_9BRAD GTP cyclohydrolase 1 OS= Bradyrhizobium zhanjiangense OX=1325107 GN=folE PE=3 SV =1
MDATIKSIRPNKPSDRQPESRPAELDPAEFLAVAVRADQPRPARAEAEAAVKTLLAYIGENTEREGLLDTPRRVVEAFDELYQGYHQCPAEVLDRTFGETAGYDDFVLVRDIEFTSQCEHHMMPFYGKAHIAYTPVERVVGLSKLARLTDIFARRLQTQEHLTAQIAAAIDEILKPRGVAVLIEAEHTCMSVRGVAKHGASTFTSRFTGMFRDNPAEQARFLSLVRGTTR

SEQ ID NO: 5726 - protein, 194 aa, Branchiibius hedensis
  misc_feature (1)..(194): tr|A0A2Y8ZLZ9|A0A2Y8ZLZ9_9MICO GTP cyclohydrolase 1 OS= Branchiibius hedensis OX=672460 GN=folE PE=3 SV=1
MSIPPKVDLDRAAAAVRELLLALGEDPDREGLRDTPGRVARAYAEQFAGMWQEPQDVLNRTFDVSHDELVIVRDIELYSTCEHHLVPFHGVAHVGYIPAKSGRVTGLSKIARLVDVYAKRPQVQERLTSQIADALVEHLSAQGVLVVLECEHLCMSMRGVKKPGALTITSAVRGQLRSAATRAEAMSLIAAPRR

SEQ ID NO: 5727 - protein, 194 aa, Branchiibius sp.
  misc_feature (1)..(194): tr|A0A151C2T6|A0A151C2T6_9MICO GTP cyclohydrolase 1 OS= Branchiibius sp. NY16-3462-2 OX=1807500 GN=folE PE=3 SV =1
MSIPPKVDLDRAAAAVRELLVALGEDPDREGLRDTPGRVARAYAEQFAGMWQEPQDVLNRTFDVSHDELIIVRDIELYSTCEHHLVPFHGVAHVGYIPAKSGRVTGLSKIARLVDVYAKRPQVQERLTSQIADALVEHLGAQGVLVVLECEHLCMSMRGVKKPGALTMTSAVRGQLRSAATRAEAMSLIATPRR

SEQ ID NO: 5728 - protein, 220 aa, Brenneria alni
  misc_feature (1)..(220): tr|A0A421DSE8|A0A421DSE8_9GAMM GTP cyclohydrolase 1 OS= Brenneria alni OX=71656 GN=folE PE=3 SV=1
MSSLSKEAVLVHEALMARGLETPLRGELLDRETRKQRIAEHMTEVMNLLSLDLEDDSLAETPHRIAKMYVDEIFSGLDYANFPKITIIENKMKVDEMVTVRDITLTSTCEHHFVTIDGKATVAYIPKDGVIGLSKINRIVQFFSQRPQVQERLTQQILTALQTLLGTSNVAVSIDAVHYCVKARGIRDATSATTTTSLGGLFKSSQNTRQEFLRAVRHHS

SEQ ID NO: 5729 - protein, 220 aa, Brenneria goodwinii
  misc_feature (1)..(220): tr|A0A0G4K2G2|A0A0G4K2G2_9GAMM GTP cyclohydrolase 1 OS= Brenneria goodwinii OX=1109412 GN=folE PE=3 SV=1
MSSLSKEAVMVHEALMARGLETPLRGELLDRETRKQRITEHMTEIMNLLSLDLEDDSLAETPHRIAKMYVDEIFSGLDYANFPKITIIENKMKVDEMVTVRDITLTSTCEHHFVTIDGKATVAYIPKDGVIGLSKINRIVQFFSQRPQVQERLTQQILIALQTLLGTNNVAVSIDAVHYCVKARGIRDATSATTTTSLGGLFKSSQNTRQEFLRAVRHHN

SEQ ID NO: 5730 - protein, 220 aa, Brenneria nigrifluens
  misc_feature (1)..(220): tr|A0A2U1UUQ2|A0A2U1UUQ2_9GAMM GTP cyclohydrolase 1 OS= Brenneria nigrifluens DSM 30175 = ATCC 13028 OX=1121120 GN=folE PE=3 SV=1
MSSLSKEAVLVHEALMARGLETPLRGELLDRETRKQRIAEHMTEVMNLLSLDLQDDSLAETPHRIAKMYVDEIFSGLDYANFPKITIIENKMKVDEMVTVRDITLTSTCEHHFVTIDGKATVAYIPKEGVIGLSKINRIVQFFSQRPQVQERLTQQILIALQTLLGTSNVAVCIDAVHYCVKARGIRDATSATTTTSLGGLFKSSQNTRQEFLRAVRHHG

SEQ ID NO: 5731 - protein, 220 aa, Brenneria roseae
  misc_feature (1)..(220): tr|A0A2U1TLT1|A0A2U1TLT1_9GAMM GTP cyclohydrolase 1 OS= Brenneria roseae subsp. americana OX=1508507 GN=folE PE =3 SV=1
MSSLSKEAVLVHEALMARGLETPLRGQLLDRETRKQRITEHMTEIMNLLSLDLEDDSLAETPHRIAKMYVDEIFSGLDYANFPKITIIENKMKVDEMVTVRDITLTSTCEHHFVMIDGKATVAYIPKDGVIGLSKINRIVQFFSQRPQVQERLTQQILIALQTLLGTSNVAVSIDAVHYCVKARGIRDATSATTTTSLGGLFKSSQNTRQEFLRAVRHHN

SEQ ID NO: 5732 - protein, 220 aa, Brenneria rubrifaciens
  misc_feature (1)..(220): tr|A0A4P8QZV6|A0A4P8QZV6_9GAMM GTP cyclohydrolase 1 OS= Brenneria rubrifaciens OX=55213 GN=folE PE=3 SV=1
MSSLSKEAVLVHEALMARGLETPLRGQLLDRETRKQRITEHMTEIMNLLSLDLEDDSLAETPHRIAKMYVDEIFSGLDYANFPKITIIENKMKVDEMVTVRDITLTSTCEHHFVMIDGKATVAYIPKDGVIGLSKINRIVQFFSQRPQVQERLTQQILIALQTLLGTSNVAVSIDAVHYCVKARGVRDATSATTTTSLGGLFKSSQNTRQEFLRAVRHHS

SEQ ID NO: 5733 - protein, 220 aa, Brenneria salicis
  misc_feature (1)..(220): tr|A0A366HX93|A0A366HX93_9GAMM GTP cyclohydrolase 1 OS= Brenneria salicis ATCC 15712 = DSM 30166 OX=714314 GN=f olE PE=3 SV=1
MSSLSKEAVLVHEALMARGLETPLRGQLLDRETRKQRFTEHMTEIMNLLSLDLDDDSLAETPNRIAKMYVDEIFSGLDYANFPKITIIENKMKVDEMVTVRDITLTSTCEHHFVMIDGKATVAYIPKDGVIGLSKINRIVQFFSQRPQVQERLTQQILIALQTLLGTSNVAVSIDAVHYCVKARGIRDATSATTTTSLGGLFKSSQNTRQEFLRAVRHTD

SEQ ID NO: 5734 - protein, 220 aa, Brenneria sp.; identical to SEQ ID NO: 5730
  misc_feature (1)..(220): tr|A0A2U1U6S7|A0A2U1U6S7_9GAMM GTP cyclohydrolase 1 OS= Brenneria sp. CFCC 11842 OX=2173106 GN=folE PE=3 SV=1

SEQ ID NO: 5735 - protein, 221 aa, Brenneria sp.
  misc_feature (1)..(221): tr|A0A5J5G324|A0A5J5G324_9GAMM GTP cyclohydrolase I Fol E OS=Brenneria sp. L3-3HA OX=2590031 GN=folE PE=4 SV=1
MSSSLSKEATLVHQALLARGLETPLRGQMLDSETRKRRITEHMTGIMNLLSLDLSDDSLAETPQRIAKMYVDEIFSGLDYANFPKITIIENKMKVDEMVTVRDITLTSTCEHHFVTIDGKATVAYIPKDGVIGLSKINRIVQFFSQRPQVQERLTQQILIALQTLLGTSNVAVSIDAVHYCVKARGIRDATSATTTTSLGGLFKSSQNTRQEFLRAVRHHN

SEQ ID NO: 5736 - protein, 211 aa, Breoghania corrubedonensis
  misc_feature (1)..(211): tr|A0A2T5VD23|A0A2T5VD23_9RHIZ GTP cyclohydrolase 1 OS= Breoghania corrubedonensis OX=665038 GN=folE PE=3 SV=1
MDAVVKAANNKDKDMAAQRPDMDARPTRAQAEDAVRTLLAYIGEDVTREGLIETPQRVIRAYDEFFKGYDEAATDYLGTIFDEVNGYDDIVLLRDIPFYSHCEHHMVPFIGHAHIAYYPKGGVVGLSKLARVIDVYARRLQTQENLSAEIATAIETALQPRGLAVMIEAEHQCMSLRGVQKAGVTTVTTRFTGVFRDNPAEQARFMTLLRR

SEQ ID NO: 5737 - protein, 208 aa, Breoghania sp.
  misc_feature (1)..(208): tr|A0A346R3N9|A0A346R3N9_9RHIZ GTP cyclohydrolase 1 OS= Breoghania sp. L-A4 OX=2304600 GN=folE PE=3 SV=1
MDAILNSPAKTGPTSDKQPAPKPSREEAEAAVRTLLAWIGEDPDREGLIDTPKRVVKAYGEFFRGYQDDSANHLGTIFEEVGGYDDIVLVRNIPFYSHCEHHMVPFIGVAHVAYYPNEGVIGLSKIARVVEVFARRLQTQENLTMEIVTALDTALAPRGIAVMIEAEHQCMSLRGVQKSGVSTLTTQFTGVFRDDPNEQTRFMTMIRG

SEQ ID NO: 5738 - protein, 212 aa, Brevefilum fermentans
  misc_feature (1)..(212): tr|A0A1Y6K385|A0A1Y6K385_9CHLR GTP cyclohydrolase 1 OS= Brevefilum fermentans OX=1986204 GN=folE PE=3 SV=1
MSINCNDPLVLSADLFCDEPMDIDTIEAAVKNILSAIGEDVEREGLERTPHRVANSYNELLAGYRMDPRELINDAIFDVAYDQMVIVRDIEFYSMCEHHMLPFMGRAHVAYIPSDKVIGLSKIPRIVDLFSRRLQVQERMTTQIAEYLDVVLKPKGVAVVVEGLHMCMMLRGVKKHDARMTTSAMLGAFRKDISTRMEFLDNISRGAEKLHF

SEQ ID NO: 5739 - protein, 187 aa, Brevibacillus agri
  misc_feature (1)..(187): tr|A0A3M8AQM0|A0A3M8AQM0_9BACL GTP cyclohydrolase 1 OS= Brevibacillus agri OX=51101 GN=folE PE=3 SV=1
MNVDLDKIQQAVRMILEAVGDNPDREGLLDTPKRVAKMYAEVFEGMHINEEQYFETVFSEDHEEMVLVKDIPFYSMCEHHLVPFFGKAHVAYVPRGGRVVGLSKLARAVDTVAKRPQLQERITTTIADSIVRKLDPHGVIVVVEAEHMCMTMRGVKKPGSKTVTSAVRGMFEKDAAARAEVFSLIRS

SEQ ID NO: 5740 - protein, 186 aa, Brevibacillus borstelensis
  misc_feature (1)..(186): tr|M8DJ63|M8DJ63_9BACL GTP cyclohydrolase 1 OS=Brevibac illus borstelensis AK1 OX=1300222 GN=folE PE=3 SV=1
MNVDLEKIQTAVRMILEAIGENPDREGLLDTPKRVAKMYAEAFEGLGIDEEKYFETVFSEDHEEMVLVKDIPFYSMCEHHLVPFFGKAHVAYIPRGGRVVGLSKLARAVETVARRPQLQERITAHVADAIVRKLDPHGVVVVVEAEHMCMTMRGVKKPGSKTVTSAVRGIFANDPAARAEVFSLIK

SEQ ID NO: 5741 - protein, 187 aa, Brevibacillus brevis
  misc_feature (1)..(187): sp|C0ZCC7|GCH1_BREBN GTP cyclohydrolase 1 OS=Brevibacil lus brevis (strain 47 / JCM 6285 / NBRC 100599) OX=3586 81 GN=folE PE=3 SV=1
MMNVDLDKIQQAVRMILEAVGDDPDREGVLDTPKRVAKMYAEVFEGMHIDEEQYFETVFSEDHEEMVLVKDIPFYSMCEHHLVPFFGKAHVAYVPRGGRVVGLSKLARAVDTVAKRPQLQERITATVADSIMRKLDPHGVVVVVEAEHMCMTMRGVKKPGSKTITSAVRGMFEKDAAARAEVISLMR

SEQ ID NO: 5742 - protein, 187 aa, Brevibacillus brevis
  misc_feature (1)..(187): tr|A0A517IGT3|A0A517IGT3_BREBE GTP cyclohydrolase 1 OS= Brevibacillus brevis OX=1393 GN=folE PE=3 SV=1
MNVDLDKIQQAVRMILEAVGDDPNREGVLDTPKRVAKMYAEVFEGMHIDEDQYFETVFSEDHEEMVLVKDIPFYSMCEHHLVPFFGKAHVAYVPRGGRVVGLSKLARAVDTVAKRPQLQERITSTVADAIMRKLDPHGVVVVVEAEHMCMTMRGVKKPGSKTITSAVRGMFEKDAAARAEVFSLIRS

SEQ ID NO: 5743 - protein, 187 aa, Brevibacillus choshinensis
  misc_feature (1)..(187): tr|A0A0Q3WQL2|A0A0Q3WQL2_BRECH GTP cyclohydrolase 1 OS= Brevibacillus choshinensis OX=54911 GN=folE PE=3 SV=1
MNVDLDKIQQAVRMILEAVGENPDREGLLDTPKRVAKMYAEVFEGMHINEQDYFETVFSEDHEEMVLVKDIPFYSMCEHHLVPFFGKAHVAYVPRGGRVVGLSKLARAVDTVARRPQLQERITSTVADAIVKKLDPHGVVVVVEAEHMCMTMRGVRKPGSKTVTSAVRGMFEKDAAARAEVFSLIRP

SEQ ID NO: 5744 - protein, 187 aa, Brevibacillus fluminis
  misc_feature (1)..(187): tr|A0A3M8D358|A0A3M8D358_9BACL GTP cyclohydrolase 1 OS= Brevibacillus fluminis OX=511487 GN=folE PE=3 SV=1
MSVDHEKIKQAVRMILEAVGEDPDREGLLDTPKRVAKMYAEAFEGLRVDEEQYFETIFSENHEELVLVKDIPFYSMCEHHLVPFFGKAHVAYIPKGGRVVGLSKLARAVETVSRRPQLQERITSTVADAIMKKLQPHGVLVVVEAEHMCMTMRGVKKPGAKTVTSAARGTFETDTAQRAEVLSLIKD

SEQ ID NO: 5745 - protein, 186 aa, Brevibacillus formosus
  misc_feature (1)..(186): tr|A0A4Y4HTG1|A0A4Y4HTG1_9BACL GTP cyclohydrolase 1 OS= Brevibacillus formosus OX=54913 GN=folE PE=3 SV=1
MNVDLDKIQQAVRMILEAVGDDPDREGVLDTPKRVAKMYAEVFEGMHIDEEQYFETVFSEDHEEMVLVKDIPFYSMCEHHLVPFFGKAHVAYVPRGGRVVGLSKLARAVDTVAKRPQLQERITATVADAIMRKLDPHGVVVVVEAEHMCMTMRGVKKPGSKTITSAVRGMFEKDAAARAEVISLMR

SEQ ID NO: 5746 - protein, 186 aa, Brevibacillus formosus
  misc_feature (1)..(186): tr|A0A220MER6|A0A220MER6_9BACL GTP cyclohydrolase 1 OS= Brevibacillus formosus OX=54913 GN=folE PE=3 SV=1
MNVDLDKIQQAVRMILEAVGDNPDREGVLDTPKRVAKMYAEVFEGMHIDEEQYFETVFSEDHEEMVLVKDIPFYSMCEHHLVPFFGKAHVAYVPRGGRVVGLSKLARAVDTVAKRPQLQERITATVADAIMRKLDPHGVVVVVEAEHMCMTMRGVKKPGSKTITSAVRGMFEKDAAARAEVISLMR

SEQ ID NO: 5747 - protein, 187 aa, Brevibacillus gelatini
  misc_feature (1)..(187): tr|A0A3M8B735|A0A3M8B735_9BACL GTP cyclohydrolase 1 OS= Brevibacillus gelatini OX=1655277 GN=folE PE=3 SV=1
MNVDLDKIQQAVRMILEAVGDDPDREGLLDTPKRVAKMYAEVFEGMHINEEQYFETVFSEDHEEMVLVKDIPFYSMCEHHLVPFFGKAHVAYIPRGGRVVGLSKLARAVDTVAKRPQLQERITTTIADSIVRKLDPHGVIVVLEAEHMCMTMRGVKKPGSKTVTSAVRGIFEKDPAARAEVFSLIRS

SEQ ID NO: 5748 - protein, 194 aa, Brevibacillus gelatini
  misc_feature (1)..(194): tr|A0A3M8AIQ0|A0A3M8AIQ0_9BACL GTP cyclohydrolase 1 OS= Brevibacillus gelatini OX=1655277 GN=folE PE=3 SV=1
MQPLVTSNRIQNDVIEESIRNILKEIGENPEREGLLDTPKRVAKMYREVFSGVGVNPETALTTTFEEQYNGMITVKDITYYTFCEHHIIPFYGKAHIGYIPDGRIVGLSKFARLVELVSQRPQVQERMTTQIADAIWNVLNPKGVIVTVEGTHLCMCARGIKKPGTATVTTVKKGLFAENPALCEEFDRSLARQ

SEQ ID NO: 5749 - protein, 187 aa, Brevibacillus invocatus
  misc_feature (1)..(187): tr|A0A3M8CIE1|A0A3M8CIE1_9BACL GTP cyclohydrolase 1 OS= Brevibacillus invocatus OX=173959 GN=folE PE=3 SV=1
MNVDLEKIQQAVRMILEAVGDNPDREGLLDTPKRVAKMYAEVFEGMHINEEVYFETVFSEDHEEMVLVKDIPFYSMCEHHLVPFFGKAHVAYIPRGGRVVGLSKLARAVDTVAKRPQLQERITATVADAMMRKLDPHGVVVVVEAEHMCMTMRGIKKPGSKTITSAVRGIFEKDAAARAEVFSLIRV

SEQ ID NO: 5750 - protein, 187 aa, Brevibacillus laterosporus
  misc_feature (1)..(187): tr|A0A075R404|A0A075R404_BRELA GTP cyclohydrolase 1 OS= Brevibacillus laterosporus LMG 15441 OX=1042163 GN=folE PE=3 SV=1
MNVDHEKIKQAVRMILEAVGEDPDREGLLDTPKRVAKMYAEAFEGMNVDEETYFETIFSEDHEEIVLVKDIPFYSMCEHHLVPFFGKAHVAYIPKGGRVVGLSKLARAVETVARRPQLQERITSTVANAIMKKLEPHGVMVMVEAEHMCMTMRGVKKPGSSTVTTAVRGVFEKDANARAEVLQYIKA

SEQ ID NO: 5751 - protein, 187 aa, Brevibacillus laterosporus; identical to SEQ ID NO: 5750
  misc_feature (1)..(187): tr|H0UA05|H0UA05_BRELA GTP cyclohydrolase 1 OS=Brevibac illus laterosporus GI-9 OX=1118154 GN=folE PE=3 SV=1

SEQ ID NO: 5752 - protein, 187 aa, Brevibacillus nitrificans
  misc_feature (1)..(187): tr|A0A3M8DLR9|A0A3M8DLR9_9BACL GTP cyclohydrolase 1 OS= Brevibacillus nitrificans OX=651560 GN=folE PE=3 SV=1
MNVDLDKIQQAVRMILEAVGDNPDREGLLDTPKRVAKMYAEVFEGMHINEEDYFETVFSEDHEEMVLVKDIPFYSMCEHHLVPFFGKAHVAYIPKGGRVVGLSKLARAVDTVARRPQLQERITSTVADAIVSKLDPHGVVVVVEAEHMCMTMRGVKKPGSKTVTSAVRGLFKEDAAARAEVFSLIRP

SEQ ID NO: 5753 - protein, 187 aa, Brevibacillus panacihumi
  misc_feature (1)..(187): tr|V6MC05|V6MC05_9BACL GTP cyclohydrolase 1 OS=Brevibac illus panacihumi W25 OX=1408254 GN=folE PE=3 SV=1
MNVDMEKIQQAVRMILEAVGDNPDREGLLDTPKRVAKMYAEVLEGMHINEEVYFETVFSEEHEEMVMVKDIPFYSMCEHHLVPFFGKAHVAYIPRGGRVVGLSKLARAVDVVAKRPQLQERITSTVADSMMRKLDPHGVVVVIEAEHMCMTMRGIKKPGSKTITSAVRGIFEKDAAARAEVFSLIRV

SEQ ID NO: 5754 - protein, 187 aa, Brevibacillus panacihumi
  misc_feature (1)..(187): tr|A0A3M8DCH1|A0A3M8DCH1_9BACL GTP cyclohydrolase 1 OS= Brevibacillus panacihumi OX=497735 GN=folE PE=3 SV=1
MNVDMEKIQQAVRMILEAVGDNPDREGLLDTPKRVAKMYAEVFEGMHINEEVYFETVFSEEHEEMVMVKDIPFYSMCEHHLVPFFGKAHVAYIPRGGRVVGLSKLARAVDVVAKRPQLQERITSTVADSMMRKLDPHGVVVVIEAEHMCMTMRGIKKPGSKTITSAVRGIFEKDAAARAEVFSLMRV

SEQ ID NO: 5755 - protein, 187 aa, Brevibacillus parabrevis
  misc_feature (1)..(187): tr|A0A4Y3PE45|A0A4Y3PE45_BREPA GTP cyclohydrolase 1 OS= Brevibacillus parabrevis OX=54914 GN=folE PE=3 SV=1
MNVDLDKIQQAVRMILEAVGENPDREGLLDTPKRVAKMYAEVFEGMHINEEQYFETVFSEDHEEMVLVKDIPFYSMCEHHLVPFFGKAHVAYVPRGGRVVGLSKLARAVEAVAKRPQLQERITTTIAESIVRKLDPHGVIVVVEAEHMCMTMRGVKKPGSKTITSAVRGMFEKDAAARAEVFSLIRS

SEQ ID NO: 5756 - protein, 187 aa, Brevibacillus reuszeri
  misc_feature (1)..(187): tr|A0A0K9YQY6|A0A0K9YQY6_9BACL GTP cyclohydrolase 1 OS= Brevibacillus reuszeri OX=54915 GN=folE PE=3 SV=1
MNVDLDKIKQAVRMILEAVGEDPDREGLLDTPKRVAKMYAEVFEGMHIDEQKYFETVFSEDHEEMVLVKDIPFYSMCEHHLVPFFGKAHVAYIPKGGRVVGLSKLARAVDTVARRPQLQERITTTVADAIVSKLDPHGVVVVVEAEHMCMTMRGVKKPGSKTITSAVRGVFEKDAAARAEVFSLIRS

SEQ ID NO: 5757 - protein, 188 aa, Brevibacillus sp.
  misc_feature (1)..(188): tr|A0A553KTS8|A0A553KTS8_9BACL GTP cyclohydrolase 1 OS= Brevibacillus sp. LEMMJ03 OX=2595056 GN=folE PE=3 SV=1
MKEVDLEKIQQAVRMIIEAIGDDPDRDGLLDTPKRVAKMYAEVFEGMRINEEEYFETVFSEDHEEMVLVKDIPFYSMCEHHFVPFFGKAHVAYIPRGGRVVGLSKLARAVEAVARRPQLQERITSTVADAIVRKLDPHGVVVVVEAEHMCMTMRGVKKPGSKTVTSAVRGIFANDAAARAEVFSLIRT

SEQ ID NO: 5758 - protein, 187 aa, Brevibacillus sp.; identical to SEQ ID NO: 5752
  misc_feature (1)..(187): tr|A0A1I3YWB0|A0A1I3YWB0_9BACL GTP cyclohydrolase 1 OS= Brevibacillus sp. OK042 OX=1884381 GN=folE PE=3 SV=1

SEQ ID NO: 5759 - protein, 207 aa, Brevibacterium antiquum
  misc_feature (1)..(207): tr|A0A2H1IPR7|A0A2H1IPR7_9MICO GTP cyclohydrolase 1 OS= Brevibacterium antiquum OX=234835 GN=folE PE=3 SV=1
MSELEEVTEVLGEAPAGTGNKVDQPRIAAAVREILIAVGEDPDREGLLETPARVARAYEEVFAGLHRDAADVMSVTFDISHEEMVLVRDIDLYSMCEHHLVPFHGVAHIGYIPSKNGKVTGLSKLARLVEIYARRPQVQERLTTQIADALVEHLEPQGAIVVVEAEHLCMTMRGVRKPGASTITSAVRGQLRETASRAEAMSLIIRR

SEQ ID NO: 5760 - protein, 207 aa, Brevibacterium antiquum
  misc_feature (1)..(207): tr|A0A2H1IZZ2|A0A2H1IZZ2_9MICO GTP cyclohydrolase 1 OS= Brevibacterium antiquum CNRZ 918 OX=1255637 GN=folE PE= 3 SV=1
MSELEEVTEVLGEAPAGTGNKVDQPRIAAAVREILIAVGEDPDREGLLETPARVARAYEEVFAGLHRDAADVLGVTFDISHEEMVLVRDIDLYSMCEHHLAPFHGVAHIGYIPSKNGKVTGLSKLARLVEIYARRPQVQERLTTQIADALVEHLEPQGAIVVVEAEHLCMTMRGVRKPGASTITSAVRGQLRETASRAEAMSLIIRR

SEQ ID NO: 5761 - protein, 198 aa, Brevibacterium aurantiacum
  misc_feature (1)..(198): tr|A0A3Q8T1C2|A0A3Q8T1C2_9MICO GTP cyclohydrolase 1 OS= Brevibacterium aurantiacum OX=273384 GN=folE PE=3 SV=1
MLGEAPAGTGNKVDQARIAAAVREILIAVGEDPDREGLVETPDRVARAYEEVFAGLHRDPAEVLGVTFDISHEEMVLVRDIDLYSTCEHHLVPFHGVAHIGYIPSKNGKVTGLSKLARLVEIYARRPQVQERLTTQIADALVEHLEPQGAIVVVEAEHLCMTMRGVRKPGASTITSAVRGQLRETASRAEAMSLILRR

SEQ ID NO: 5762 - protein, 207 aa, Brevibacterium aurantiacum
  misc_feature (1)..(207): tr|A0A1D7W161|A0A1D7W161_9MICO GTP cyclohydrolase 1 OS= Brevibacterium aurantiacum OX=273384 GN=folE PE=3 SV=1
MSELEGVPEILGEAPAGTGNKVDQARIAAAVREILIAVGEDPDREGLVETPDRVARAYEEVFAGLHRDPAEVLGVTFDISHEEMVLVRDIDLYSTCEHHLVPFHGVAHIGYIPSKNGKVTGLSKLARLVEIYARRPQVQERLTTQIADALVEHLEPQGAIVVVEAEHLCMTMRGVRKPGASTITSAVRGQLRETASRAEAMSLILRR

SEQ ID NO: 5763 - protein, 204 aa, Brevibacterium casei
  misc_feature (1)..(204): tr|A0A163AV07|A0A163AV07_9MICO GTP cyclohydrolase 1 OS= Brevibacterium casei OX=33889 GN=folE PE=3 SV=1
MTDYVFSDLGETAEERPTIDHDRIAAAVREILFAVGENPDREGLQETPARVARAYEEIFAGLHRDPAEILSVTFDISHEEMVLVRDIDLYSMCEHHLVPFHGVAHVGYIPAKNGKVTGLSKLARLVEVYARRPQVQERLTSQIADALMKHLEPQGAIVVVEAEHLCMTMRGVRKPGASTITSAVRGQLREPASRAEAMSLILRG

SEQ ID NO: 5764 - protein, 204 aa, Brevibacterium casei; identical to SEQ ID NO: 5763
  misc_feature (1)..(204): tr|A0A2H1IV67|A0A2H1IV67_9MICO GTP cyclohydrolase 1 OS= Brevibacterium casei CIP 102111 OX=1255625 GN=folE PE=3 SV=1

SEQ ID NO: 5765 - protein, 205 aa, Brevibacterium celere
  misc_feature (1)..(205): tr|A0A366IF78|A0A366IF78_9MICO GTP cyclohydrolase 1 OS= Brevibacterium celere OX=225845 GN=folE PE=3 SV=1
MPELDDLSAALDSAGLPGAAVDQERIAAAVREILIAVGEDPDRDGLVETPARVARAYAEIFAGLHRDPSEVLGVTFDIAHEEMVLVRDIDLYSTCEHHLVPFHGVAHIGYIPNKQGRVTGLSKLARLVEIFARRPQVQERLTAQIADALVEHLEPQGVIVVVEAEHLCMTMRGVRKPGASTITSAVRGQLREPASRAEAMSLILR

SEQ ID NO: 5766 - protein, 201 aa, [Brevibacterium] flavum
  misc_feature (1)..(201): tr|A0A0F6SRS5|A0A0F6SRS5_9CORY GTP cyclohydrolase 1 OS= [Brevibacterium] flavum OX=92706 GN=folE PE=3 SV=1
MKETTVDNHAAVREFDEERATAAIRELLIAVGEDPDREGLLETPARVARAYKETFAGLHEDPTTVLEKTFSEGHEELVLVREIPIYSMCEHHLVPFFGVAHIGYIPGKSGKVTGLSKLARLADMFAKRPQVQERLTSQIADALVEKLDAQAVAVVIEAEHLCMAMRGIRKPGAVTTTSAVRGGFKNNAASRAEVFSLIRGH

SEQ ID NO: 5767 - protein, 188 aa, [Brevibacterium] frigoritolerans
  misc_feature (1)..(188): tr|A0A4R6AGR8|A0A4R6AGR8_9BACI GTP cyclohydrolase 1 OS= [Brevibacterium] frigoritolerans OX=450367 GN=folE PE=3 SV=1
MGQINTQQIEEAVRLILEAIGENPNREGLLDTPKRVAKMYAEVFSGLNEDPKEHFKTVFGEDHEELVLVKDIPFHSMCEHHLVPFFGKAHIAYIPKGGKVTGLSKLARAVEAVCRRPQLQERITSTIADSIVDSLEPHGVMVVVEAEHMCMTMRGVKKPGSKTVTSAVRGVFVKDPAARAEVLSFIKE

SEQ ID NO: 5768 - protein, 188 aa, [Brevibacterium] frigoritolerans
  misc_feature (1)..(188): tr|A0A3Q9SKE1|A0A3Q9SKE1_9BACI GTP cyclohydrolase 1 OS= [Brevibacterium] frigoritolerans OX=450367 GN=folE PE=3 SV=1
MANVDHAKLEEAVKMLLEAVGEDPTREGLLDTPARVARMYEEIFSGLNQDPKEYFDTVFGEDHEELVLVKDIPFYSVCEHHLVPFYGKAHVAYIPKNGKVTGLSKLARAVEAVSKRPQLQERITSTVADSIMEKLEPHGVMVVVEAEHMCMTMRGVKKPGSKTVTSAVRGTFAKDHRTRAEVLAFIKD

SEQ ID NO: 5769 - protein, 207 aa, Brevibacterium iodinum
  misc_feature (1)..(207): tr|A0A2H1J2R3|A0A2H1J2R3_9MICO GTP cyclohydrolase 1 OS= Brevibacterium iodinum ATCC 49514 OX=1255616 GN=folE PE =3 SV=1
MADIEEVSAGLGPAPAGQDNKVDQERIAAAVREILIAVGEDPDREGLVETPGRVARAYEEIFAGLHRDPAEVLGVTFDISHEELVLVRDIDLYSTCEHHLVPFHGVAHIGYIPSKNGKITGLSKLARLVEIYARRPQVQERLTSQIADALVDHLEPQGVIVVVEAEHLCMTMRGVRKPGASTITSAVRGQLRESASRAEAMSLILGR

SEQ ID NO: 5770 - protein, 188 aa, Brevibacterium jeotgali
  misc_feature (1)..(188): tr|A0A2H1L2E6|A0A2H1L2E6_9MICO GTP cyclohydrolase 1 OS= Brevibacterium jeotgali OX=1262550 GN=folE PE=3 SV=1
MTVDHARIEAAVREILLAVGEDPDRDGLTETPARVARAYEEAFEGLSQDAADVLGVQFDIGFDEMVLVRDIALYSTCEHHLVPFHGAAHIGYIPGAEGRVTGLSKLARLVDVFARRPQVQERLTTQIADALVAHLQPRGAIVVVEAEHLCMSMRGVKKPGSSTITSAVRGQLRNAASRSEAMSLILRR

SEQ ID NO: 5771 - protein, 207 aa, Brevibacterium linens
  misc_feature (1)..(207): tr|A0A3Q9P4J7|A0A3Q9P4J7_BRELN GTP cyclohydrolase 1 OS= Brevibacterium linens OX=1703 GN=folE PE=3 SV=1
MADIEEVSAGLGPAPSGQENKVDRERIAAAVREILIAVGEDPDREGLLETPGRVARAYEEIFAGLHRDPAEVLGVTFDISHEELVLVRDIDLYSTCEHHLVPFHGVAHIGYIPSRNGKVTGLSKLARLVEIYARRPQVQERLTSQIADALVDHLEPQGVIVVIEAEHLCMTMRGVRKPGASTITSAVRGQLRESASRAEAMSLILGR

SEQ ID NO: 5772 - protein, 207 aa, Brevibacterium linens
  misc_feature (1)..(207): tr|A0A142NLM7|A0A142NLM7_BRELN GTP cyclohydrolase 1 OS= Brevibacterium linens OX=1703 GN=folE PE=3 SV=1
MADIEEVSAGLGPAPSGQENKVDQARIAAAVREILIAVGEDPDREGLLETPDRVARAYEEIFAGLHRDPAEVLGVTFDISHEELVLVRDIDLYSTCEHHLVPFHGVAHIGYIPSKNGKVTGLSKLARLVEIYARRPQVQERLTSQIADALVEHLDPQGVIVVVEAEHLCMTMRGVRKPGASTITSAVRGQLRESASRAEAMSLILGR

SEQ ID NO: 5773 - protein, 234 aa, Brevibacterium luteolum
  misc_feature (1)..(234): tr|A0A2N6PIX8|A0A2N6PIX8_9MICO GTP cyclohydrolase 1 OS= Brevibacterium luteolum OX=199591 GN=folE PE=3 SV=1
MKASRAPRDSRDRPSRRSPRTRVSRASPRIRVNPASRRRAPGRTGAEMVDQPRIEAAVREILLAVGEDPDRDGLRDTPARVARSYEEVFSGLHKDAADVLRVVFDVGYDEMVLVRDIEMYSTCEHHLVPFHGSAHIGYIPGPEGKVTGLSKLARLVEIYARRPQIQERLTSQIADAIVEHLEPRGAIVVIEAEHLCMSMRGVQKPGATTISSAVRGQLRDAASRAEAMSLILGR

SEQ ID NO: 5774 - protein, 188 aa, Brevibacterium mcbrellneri
  misc_feature (1)..(188): tr|D4YMQ7|D4YMQ7_9MICO GTP cyclohydrolase 1 OS=Brevibac terium mcbrellneri ATCC 49030 OX=585530 GN=folE PE=3 SV =1
MVDQPRIEAAVREILYAIGEDPNRDGLQETPGRVARAYAELFAGIGQDPAEVLSTTFEIGHDEMVLVRNIEMFSTCEHHLLPFHGVAHVGYIPNTSGRVTGLSKLARLVELYARRPQVQERLTGQIADALMEHLEPRGAIVVIEAEHLCMSMRGVDKAGASTITSAVRGSLRKPTSRAEAMSLIRGTT

SEQ ID NO: 5775 - protein, 188 aa, Brevibacterium paucivorans
  misc_feature (1)..(188): tr|A0A2N6VMQ1|A0A2N6VMQ1_9MICO GTP cyclohydrolase 1 OS= Brevibacterium paucivorans OX=170994 GN=folE PE=3 SV=1
MVDQPRIEAAVREILHAIGEDPGRDGLQETPGRVARAYAELFAGIGQDPAEVLSTTFEIGHDEMVLVRNIEMFSTCEHHLLPFHGIAHVGYIPNTSGRVTGLSKLARLVELYARRPQVQERLTGQIADALMEHLEPRGAIVVIEAEHLCMSMRGVDKAGASTITSAVRGSLRKPTSRAEAMSLIRGTT

SEQ ID NO: 5776 - protein, 282 aa, Brevibacterium ravenspurgense
  misc_feature (1)..(282): tr|A0A150H8U3|A0A150H8U3_9MICO Putative GTP cyclohydrol ase 1 type 2 OS=Brevibacterium ravenspurgense OX=479117 GN=Bravens_01306 PE=4 SV=1
MRDVMNVCEQLWPNNLAEDWDSVGLAVGDPEAPVTHVHCALDPSDEVIAEAVELGADFLFTHHPLLLRGVTSVAADTLKGGAVHTLIRSGIAQFNAHTNADSALGGVSDVLAEILQLREVEPLVQNPDAEAGVGLGRVGTVEPTTVEDIAVRLAQGVDLSVRGIAIGGDPGAEVTRVAVLGGAGDSMFGEARKAGAQLYITSDLRHHPASEALDTGSRGGPLEHLIDISHYSAESAWIPRAAVQLDEALRAGGHSVEVTVSGVCSDPWTAVVLPDSEEWQWN

SEQ ID NO: 5777 - protein, 187 aa, Brevibacterium ravenspurgense
  misc_feature (1)..(187): tr|A0A150H905|A0A150H905_9MICO GTP cyclohydrolase 1 OS= Brevibacterium ravenspurgense OX=479117 GN=folE PE=3 SV =1
MADLPKIEAAVRSILEAIGEDPDRDGLKDTPKRVAKSYADLCRGLGQTADDLLEVSFDIGYDEMVLVKDIEMFSMCEHHLLPFHGKAHVGYIPGPEGRVTGLSKLARLVEVYARRPQVQERLTTQIADALVDNLNARGVIVVVEAEHLCMSMRGVQKPGAKTLTSAVRGQLRDPASRAEAISLIQGG

SEQ ID NO: 5778 - protein, 207 aa, Brevibacterium sandarakinum
  misc_feature (1)..(207): tr|A0A1H1MR05|A0A1H1MR05_9MICO GTP cyclohydrolase 1 OS= Brevibacterium sandarakinum OX=629680 GN=folE PE=3 SV=1
MSELEEVTEVLGEAPAGTGNKVDQPRIAAAVREILIAVGEDPDREGLLETPARVARAYEEVFAGLHRDPADVLGMTFDISHEEMVLVRDIDLYSMCEHHLVPFHGVAHIGYIPSKNGKVTGLSKLARLVEIYARRPQVQERLTTQIADALVDHLEPQGVIVVVEAEHLCMTMRGVRKPGASTITSAVRGQLRETASRAEAMSLILRR

SEQ ID NO: 5779 - protein, 207 aa, Brevibacterium siliguriense
  misc_feature (1)..(207): tr|A0A1H1X4I1|A0A1H1X4I1_9MICO GTP cyclohydrolase 1 OS= Brevibacterium siliguriense OX=1136497 GN=folE PE=3 SV= 1
MADIEEVSAGLGPAPSGHENKVDQARIAAAVREILIAVGEDPDREGLLETPDRVARAYEEIFAGLHRDPAEVLGVTFDISHEELVLVRDIDLYSTCEHHLVPFHGVAHIGYIPSKNGKITGLSKLARLVEIYARRPQVQERLTAQIADALVDHLDPQGVIVVVEAEHLCMTMRGVRKPGASTITSAVRGQLRESASRAEAMSLILGR

SEQ ID NO: 5780 - protein, 188 aa, Brevibacterium sp.
  misc_feature (1)..(188): tr|A0A2H1HN03|A0A2H1HN03_9MICO GTP cyclohydrolase 1 OS= Brevibacterium sp. Mu109 OX=1255669 GN=folE PE=3 SV=1
MTVDHARIEAAVREILLAVGEDPDRDGLVNTPARVARAYEESFAGLSQDAADILGVQFDIGFDEMVLVRDIALYSTCEHHLVPFHGAAHIGYIPGPEGRVTGLSKLARLVEVFARRPQVQERLTTQIADALVTHLQPRGAIVVVEAEHLCMSMRGVKKPGSSTITSAVRGQLRNAASRSEAMSLILRR

SEQ ID NO: 5781 - protein, 207 aa, Brevibacterium sp.
  misc_feature (1)..(207): tr|A0A4Z0K4K0|A0A4Z0K4K0_9MICO GTP cyclohydrolase 1 OS= Brevibacterium sp. S22 OX=2483794 GN=folE PE=3 SV=1
MADIEEVSAGLGPAPAGQENKVDQERIAAAVREILIAVGEDPDREGLVETPGRVARAYEEIFAGLHRDPAEVLGVTFDLSHEELVLVREIDLYSTCEHHLVPFHGVAHIGYIPSRNGKVTGLSKLARLVEIYARRPQVQERLTSQIADALVDHLDPQGVIVVVEAEHLCMTMRGVRKPGASTITSAVRGQLRDSASRAEAMSLILGR

SEQ ID NO: 5782 - protein, 188 aa, Brevibacterium yomogidense
  misc_feature (1)..(188): tr|A0A1X6XHJ1|A0A1X6XHJ1_9MICO GTP cyclohydrolase 1 OS= Brevibacterium yomogidense OX=946573 GN=folE PE=3 SV=1
MTVDHARIEAAVREILLAVGEDPDRDGLVDTPARVARAYEESFAGLSQDAADILGVQFDIGFDEMVLVRDIALYSTCEHHLVPFHGAAHIGYIPGPEGRVTGLSKLARLVEVFARRPQVQERLTTQIADALVTHLQPRGAIVVVEAEHLCMSMRGVKKPGSSTITSAVRGQLRNAASRSEAMSLILRR

SEQ ID NO: 5783 - protein, 270 aa, Brevifollis gellanilyticus
  misc_feature (1)..(270): tr|A0A512MC23|A0A512MC23_9BACT GTP cyclohydrolase FolE2 OS=Brevifollis gellanilyticus OX=748831 GN=folE2 PE=3 SV=1
MPALKDTQNERDDRRLPIDRVGVKDVRFPLRIRDRDQATQHTVATVNMAVDLPHHYKGTHMSRFLEVLHAHGRELTVSSIAAMPQELMTRLHAQKAHVEMRFPYFRAKRAPVTKAEGLLDYGVVFEVNAEGEAIDYVVTVEVPVATLCPCSKAISERGAHNQRGLVTLSVRFRQPIWIEDLIELVESSASCELYSVLKRPDEKAVTERAYDNPVFVEDLVRNVAMKAGAHKLIKWFRVEAVNYESIHNHNAWAVIERRVTRGTEGQQEGV

SEQ ID NO: 5784 - protein, 375 aa, Brevirhabdus pacifica
  misc_feature (1)..(375): tr|A0A1U7DH95|A0A1U7DH95_9RHOB GTP cyclohydrolase FolE2 OS=Brevirhabdus pacifica OX=1267768 GN=folE2 PE=3 SV=1
MNVHTPKVALAPDREEAERALETLRNWAASAAPEEVAQLDPRVSRLLPSDSLSNYPPLSRHYPDAFQADADYRRTLPDLQNGPASLIRGAQRQIQHVGISDFRLPIRYHTREGHERGEGPGSDLHLETSVTGTVSLEAGKKGINMSRLMRTFYRRAEETFSFEVIEAALDDYKADLESLDARIQMRFSFPMKVDSLRSGLQGYQYYDIALELNESNGVRKKMLHLDYVYSSTCPCSLELSEHARQFRGQLATPHSQRSIARVSVELLPHMPCLWFEDLIEMCREAVPTETQVMVKREDEQAFAELNAANPIFVEDAARLFCERLRSDPRIGDFRIIASHQESLHSHDAVSVLVEGATFETESLDPRLFHTLGRHG

SEQ ID NO: 5785 - protein, 204 aa, Brevundimonas abyssalis
  misc_feature (1)..(204): tr|U2YSA9|U2YSA9_9CAUL GTP cyclohydrolase 1 OS=Brevundi monas abyssalis TAR-001 OX=1391729 GN=folE PE=3 SV=1
MDLQAKPVLVSNDGDIKRPSREQAMDAVRTLIAWAGDNPEREGLIDTPKRVVDAYGDWFQAMTPTPRRSLSRTFEDVQGYDDMVLLRDIEVESHCEHHMAPFLGKAYVAYVPAEKVVGISKLARVVEIFSKRLQTQETLTQLIAQAIEDNLLPAGTAVLIDAEHQCMTTRGVHHRHVSTITTRFTGVFKSDPTLQDRFLKLARG

SEQ ID NO: 5786 - protein, 205 aa, Brevundimonas abyssalis
  misc_feature (1)..(205): tr|U2YRN3|U2YRN3_9CAUL GTP cyclohydrolase 1 OS=Brevundi monas abyssalis TAR-001 OX=1391729 GN=folE PE=3 SV=1
MDPHRHDPLWTPHDRRQHPRLPDRRRSRRAHPDPLGRRRSRPRRLIDTPARVARSYRELFAGYEVDPREYLERTFQEVGGYDELVILKDIRFVSFCEHHMLPVVGKAHVAYLPTDRVVGISKLARVVRGFARRLQIQEKMTADIARTIHEVLRPEGVGVIIEAEHSCMTMRGVDVPGASLITSHLIGVVRDDPRTREEFMRLARG

SEQ ID NO: 5787 - protein, 196 aa, Brevundimonas diminuta
  misc_feature (1)..(196): tr|A0A246KB74|A0A246KB74_BREDI GTP cyclohydrolase 1 OS= Brevundimonas diminuta OX=293 GN=folE PE=3 SV=1
MSDQTPSSPAVSQEEAEAAVRTLIRWAGDNPAREGLIETPKRVAKSYRELFQGYEVEPRDYLEKTFEEVGGYDELVVLKDIRFVSFCEHHMLPVVGKAHVAYLPTDRVVGISKLARVVRGYARRLQIQEKMTSEIANAIQDVLRPHGVGVVIEAEHSCMTMRGVDVPGASLSTSCLLGAVREDPRTREEFLRLVRG

SEQ ID NO: 5788 - protein, 204 aa, Brevundimonas diminuta
  misc_feature (1)..(204): tr|A0A246KJ13|A0A246KJ13_BREDI GTP cyclohydrolase 1 OS= Brevundimonas diminuta OX=293 GN=folE_2 PE=3 SV=1
MSSTPAKPVLVANEAPQRPSREQALEAVRTLIAWAGDNPDRPGLLDTPKRVVDAYGEWFDGYDADAGKELSRTFEDVTGYDDMVILRDIEVESHCEHHLAPFLGKAYVAYLPGEKVVGISKLARVVEIFARRLQNQETLTNDIIDAIESHLQPRGVAVLVDAAHQCMTTRGVHHRHVSTITTRFTGAFKNDPALAERFLKLARG

SEQ ID NO: 5789 - protein, 194 aa, Brevundimonas intermedia
  misc_feature (1)..(194): tr|A0A4Y9RS25|A0A4Y9RS25_9CAUL GTP cyclohydrolase 1 OS= Brevundimonas intermedia OX=74315 GN=folE PE=3 SV=1
MTDARTTKVSQADAEAAVRTLIEWAGDNPDREGLLETPARVARSYRELFEGYEVDPLSYLEKTFEETGGYDQLVVLKDIRFVSFCEHHMLPVVGKAHVAYLPTDRVVGISKLARVVRGFARRLQIQEKMTSEIAEAIQTVLKPHGVGVVIEAEHSCMTLRGVNAPGASLSTSHLIGVVRDDPRTREEFLRLVRG

SEQ ID NO: 5790 - protein, 205 aa, Brevundimonas intermedia
  misc_feature (1)..(205): tr|A0A4Y9RUS7|A0A4Y9RUS7_9CAUL GTP cyclohydrolase 1 OS= Brevundimonas intermedia OX=74315 GN=folE PE=3 SV=1
MSVIPAKPVLVSSDETVVRPSREQALEAVRTLIAWAGDNPNRPGLIDTPKRVVDAYGEWFDGYDADAGKELSRTFEDVTGYDDMVILRDIEVESHCEHHMAPFLGKAYVAYLPGEKVVGISKLARVVEIYARRLQNQETLTNDIIDAIESHLQPRGVAVLVDAEHQCMTTRGVHHRHVSTITTRFTGAFKDDPALADRFLKLAKT

SEQ ID NO: 5791 - protein, 195 aa, Brevundimonas naejangsanensis
  misc_feature (1)..(195): tr|A0A494RJF6|A0A494RJF6_9CAUL GTP cyclohydrolase 1 OS= Brevundimonas naejangsanensis OX=588932 GN=folE PE=3 SV =1
MTDHAHKPSVSQEEAEAAVRTLIRWAGDNPDREGLIETPKRVAKSYRELFQGYEVEPRDYLEKTFEEVGGYDELVVLKDIRFVSFCEHHMLPVVGKAHVAYLPTDRVVGISKLARVVRGYARRLQIQEKMTSEIANAIHEVLRPHGVGVVIEAEHSCMTMRGVDVPGASLTTSCLLGAVREDPRTREEFLRLVRG

SEQ ID NO: 5792 - protein, 195 aa, Brevundimonas naejangsanensis
  misc_feature (1)..(195): tr|A0A172Y6T6|A0A172Y6T6_9CAUL GTP cyclohydrolase 1 OS= Brevundimonas naejangsanensis OX=588932 GN=folE PE=3 SV =1
MTDHAPTPPVSQEEAEAAVRTLIRWAGDNPAREGLIETPKRVAKSYRELFQGYEVEPRDYLEKTFEEVGGYDELIVLKDIRFVSFCEHHMLPVVGKAHVGYLPTDRVVGISKLARVVRGYARRLQIQEKMTSEIAQAIQEVLRPVGVGVVIEAEHSCMTMRGVDVPGASLSTSCLLGAVREDPRTREEFLRLVRG

SEQ ID NO: 5793 - protein, 194 aa, Brevundimonas nasdae
  misc_feature (1)..(194): tr|A0A0B4CM59|A0A0B4CM59_9CAUL GTP cyclohydrolase 1 OS= Brevundimonas nasdae OX=172043 GN=folE PE=3 SV=1
MTDAPASKVSQADAEAAVRTLIEWAGDNPDREGLLETPARVAKSYRELFQGYEVDPLSYLEKTFEETGGYDQLVVLKDIRFVSFCEHHMLPVVGKAHVAYLPTDRVVGISKLARVVRGFARRLQIQEKMTSEIAEAIQTVLRPHGVGVVIEAEHSCMTLRGVNAPGASLSTSHLIGVVRDDPRTREEFMRLVLS

SEQ ID NO: 5794 - protein, 204 aa, Brevundimonas nasdae
  misc_feature (1)..(204): tr|A0A0B4CR17|A0A0B4CR17_9CAUL GTP cyclohydrolase 1 OS= Brevundimonas nasdae OX=172043 GN=folE PE=3 SV=1
MSVTPAKPVLVSDAAVQRPSREQALEAVRTLIAWAGDNPNRPGLIDTPKRVVDAYGEWFDGYDADAGKELSRTFEDVTGYDDMVILRDIEVESHCEHHLAPFLGKAYVAYLPGEKVVGISKLARVVEIYARRLQNQETLTNDIIDAIESHLQPRGVAVLVDAEHQCMTTRGVHHRHVSTITTRFTGAFKDDPALADRFLKLAKA

SEQ ID NO: 5795 - protein, 201 aa, Brevundimonas sp.
  misc_feature (1)..(201): tr|A0A0Q7RWL0|A0A0Q7RWL0_9CAUL GTP cyclohydrolase 1 OS= Brevundimonas sp. Root1423 OX=1736462 GN=folE PE=3 SV=1
MSPTSRTRRSWAFPSWRAWWKSSRAVSVRRMRPDNPDRPGLIDTPRRVVDAYGEWFDGYDADVEKELSRTFEDVQGYDDMVLLRDIEVESHCEHHMAPFIGKAYVAYIPNEKVVGISKLARVVEIFSRRLQTQEVLTNQIAAAIESHLEPAGVAILIDAEHQCMTTRGVHHRHVSTITTRFTGVFKSDAALKDRFLKLAKG

SEQ ID NO: 5796 - protein, 188 aa, Brevundimonas sp.
  misc_feature (1)..(188): tr|A0A0Q7SFQ4|A0A0Q7SFQ4_9CAUL GTP cyclohydrolase 1 OS= Brevundimonas sp. Root1423 OX=1736462 GN=folE PE=3 SV=1
MPDEDEVRAAVRTLIRWTGDDPDREGLVDTPDRVARSYREMFAGYDVDPREYLERTFEEVGGYDELIVLRDIRFVSVCEHHMLPVIGRAHVAYLPTDRVVGISKLARVVRGYARRLQIQEKMTSEIAKAIQEVLQPQGVGVVIEAEHSCMTLRGVNAPGTSLITSHLTGVLRDDARTREEFLRLVRGG

SEQ ID NO: 5797 - protein, 204 aa, Brevundimonas subvibrioides
  misc_feature (1)..(204): tr|A0A258FVI5|A0A258FVI5_9CAUL GTP cyclohydrolase 1 OS= Brevundimonas subvibrioides OX=74313 GN=folE PE=3 SV=1
MDAHAARPTLVGNDHMTRPSREEALAAVRTLIAWSGDNPDREGLLDTPKRVVDAYGEWFEGYAADPAKELSRTFEDVQGYDDMVLLRDIEVESHCEHHMAPFLGKAYVAYLPTEKVVGISKIARVVEIFSKRLQTQETLTQEIAAALESNLNPAGVAVLIDAEHQCMTTRGVHHRHVSTITTRFTGAFKSDPALVERFLKLAKG

SEQ ID NO: 5798 - protein, 204 aa, Brevundimonas subvibrioides
  misc_feature (1)..(204): tr|D9QH31|D9QH31_BRESC GTP cyclohydrolase 1 OS=Brevundi monas subvibrioides (strain ATCC 15264 / DSM 4735 / LMG 14903 / NBRC 16000 / CB 81) OX=633149 GN=folE PE=3 SV= 1
MDANASRPTLVGNDHLTRPTREEALAAVRTLIAWSGDNPDREGLLDTPKRVVDAYGEWFEGYTADPAKELSRTFEDVQGYDDMVLLRDIEVESHCEHHMAPFLGKAYVAYLPTEKVVGISKIARVVEIFSKRLQTQETLTQEIAGALEDHLSPAGVAVLIDAEHQCMTTRGVHHRHVSTITTRFTGQFKTDPALIERFLKLAKG

SEQ ID NO: 5799 - protein, 200 aa, Brevundimonas vancanneytii
  misc_feature (1)..(200): tr|A0A4P1KDN4|A0A4P1KDN4_9CAUL GTP cyclohydrolase 1 OS= Brevundimonas vancanneytii OX=1325724 GN=folE_2 PE=3 SV =1
MQPVMSDQTPSSPAVSQEEAEAAVRTLIRWAGDNPAREGLIETPKRVAKSYRELFQGYEVEPRDYLEKTFEEVGGYDELVVLKDIRFISFCEHHMLPVVGKAHVAYLPTDRVVGISKLARVVRGYARRLQIQEKMTSEIANAIQDVLRPHGVGVVIEAEHSCMTMRGVDVPGASLSTSCLLGAVREDPRTREEFLRLVRG

SEQ ID NO: 5800 - protein, 204 aa, Brevundimonas vancanneytii
  misc_feature (1)..(204): tr|A0A4P1JZZ8|A0A4P1JZZ8_9CAUL GTP cyclohydrolase 1 OS= Brevundimonas vancanneytii OX=1325724 GN=folE_1 PE=3 SV =1
MSSTPAKPVLVANEAPQRPSREQALEAVRTLIAWAGDNPDRPGLLDTPKRVVDAYGEWFDGYDADAGKELSRTFEDVTGYDDMVILRDIEVESHCEHHLAPFLGKAYVAYLPGEKVVGISKLARVVEIFARRLQNQETLTNDIIDAIESHLQPKGVAVLVDAAHQCMTTRGVHHRHVSTITTRFTGAFKNDPALAERFLKLARG

SEQ ID NO: 5801 - protein, 204 aa, Brevundimonas vesicularis
  misc_feature (1)..(204): tr|A0A2X1B670|A0A2X1B670_BREVE GTP cyclohydrolase 1 OS= Brevundimonas vesicularis OX=41276 GN=folE_1 PE=3 SV=1
MSVTPAKPVLVSDAAVQRPSREQALEAVRTLIAWAGDNPNRPGLIDTPKRVVDAYGEWFDGYDADAGKELSRTFEDVTGYDDMVILRDIEVESHCEHHLAPFLGKAYVAYLPGEKVVGISKLARVVEIYARRLQNQETLTNDIIEAIESHLQPRGVAVLVDAEHQCMTTRGVHHRHVSTITTRFTGAFKDDPALADRFLKLAKA

SEQ ID NO: 5802 - protein, 204 aa, Brevundimonas vesicularis
  misc_feature (1)..(204): tr|A0A1Z3UBS3|A0A1Z3UBS3_BREVE GTP cyclohydrolase 1 OS= Brevundimonas vesicularis OX=41276 GN=folE PE=3 SV=1
MSVTPAKPVLVSDDSVQRPSREQALEAVRTLIAWAGDNPDRPGLIDTPKRVVDAYGEWFDGYDADAGKELSRTFEDVTGYDDMVILRDIEVESHCEHHLAPFLGKAYVAYLPGEKVVGISKLARVVEIYARRLQNQETLTNDIIEAIESHLQPRGVAVLVDAEHQCMTTRGVHHRHVSTITTRFTGAFKDDPALADRFLKLAKA

SEQ ID NO: 5803 - protein, 205 aa, Brevundimonas viscosa
  misc_feature (1)..(205): tr|A0A1I6TDJ1|A0A1I6TDJ1_9CAUL GTP cyclohydrolase 1 OS= Brevundimonas viscosa OX=871741 GN=folE PE=3 SV=1
MSVTPVKPVLVGDNDEIKRPSREQALDAVRTLLAWAGDDPDREGLKDTPKRVVDAYAEWFDGYDADAAKELSRTFEDVQGYDDMVLLRDIEVESHCEHHMAPFLGKAYVAYIPDEKVVGISKLARVVEIYARRLQTQEVLTNQIAEAIESNLQPRGVAILIDAEHQCMTTRGVHHRHVSTITTRFTGVFKSDAALKDRFLKLARG

SEQ ID NO: 5804 - protein, 191 aa, Brevundimonas viscosa
  misc_feature (1)..(191): tr|A0A1I6QFM0|A0A1I6QFM0_9CAUL GTP cyclohydrolase 1 OS= Brevundimonas viscosa OX=871741 GN=folE PE=3 SV=1
MTDAPVSQAEAEAAVRTLIRWAGDDPDREGVLDTPGRVARSYRELFAGYASDPREYLERTFEEVGGYDELVVLKDIRFVSFCEHHMLPVVGRAHVGYLPTDRVVGISKLARVVHGFARRLQIQEKMTSEIATAIHEVLRPQGVGVVIEAEHSCMTLRGVNTAGASLSTSCLMGVIRDDPRTREEFLRLVRG

SEQ ID NO: 5805 - protein, 175 aa, Brochothrix campestris
  misc_feature (1)..(175): tr|W7D867|W7D867_9LIST GTP cyclohydrolase 1 OS=Brochoth rix campestris FSL F6-1037 OX=1265861 GN=folE PE=3 SV=1
MKSILEAVGEDPTREGLIDTPMRVARMYEEIFSGLHTDAKQHLTTVFDEPYSEMVLVKDIPFYSVCEHHLVPFFGTVSIAYLPQNGKVVGLSKLARIVEEISKRPQVQERITVTVAEMIMTELKAAGVYVFVEAEHMCMTMRGVKKPGAVTITTAARGHYADNDAARLELLNMIK

SEQ ID NO: 5806 - protein, 262 aa, Brochothrix thermosphacta
  misc_feature (1)..(262): tr|A0A2X0Q454|A0A2X0Q454_BROTH Putative GTP cyclohydrol ase 1 type 2 OS=Brochothrix thermosphacta OX=2756 GN=BT BSAS_230030 PE=4 SV=1
MVTVGDIVKSMERIAPPELKLGKDPIGLHIGDEMQVVTKVMVTLDVLETVVDEAIAKGVNMIIAHHPLLYVPIKNIDTSTSRGRLIAKLLKHDIAVFAAHTNLDVAEGGVNDMLAQSLELQSITYLEKTTERYQVDYGIGRIGELAEVTTVSALSEQVKKLWDLPGVRFIGPADREIKTVAILGGDGNNYIRTAALSKADVLITGDIYYHLGHDAMELDFPVIDAGHTIEKIMINGLITLLQEQHSISFIASQVDTNPFNYR

SEQ ID NO: 5807 - protein, 186 aa, Brochothrix thermosphacta
  misc_feature (1)..(186): tr|A0A1D2KB87|A0A1D2KB87_BROTH GTP cyclohydrolase 1 OS= Brochothrix thermosphacta OX=2756 GN=folE PE=3 SV=1
MTVNKEKIALAVKDILEAVGEDPNRSGLLDTPMRVARMYEEIFSGLEKDPKKHLETVFEEEYSEMVLVKDIGFHSVCEHHLVPFYGKVSIAYLPADGNVVGLSKLARIVEDISKRPQVQERITKTIADLIETELKAVGVFVYVEAEHMCMAMRGVKKPGAVTITTAARGLYANDADARIEILTMIK

SEQ ID NO: 5808 - protein, 191 aa, Brockia lithotrophica
  misc_feature (1)..(191): tr|A0A2T5G8J4|A0A2T5G8J4_9THEO GTP cyclohydrolase 1 OS= Brockia lithotrophica OX=933949 GN=folE PE=3 SV=1
MAIDHEKVKHAVRLIFEAIGEDPEREGLADTPRRIAEMFEEIFSGVGKDPRGELNTFFTERHEELVALRDIPFYSMCEHHLLPFFGRGHIGYLPADGRVVGVSKLARVLEVVARRPQIQERMGEEIADAIVDVLAPRGVIVVLEAEHLCMIMRGVKKPGSQMVTITARGVFREDPALREEALRLLLGNHRR

SEQ ID NO: 5809 - protein, 213 aa, Brucella abortus
  misc_feature (1)..(213): sp|Q2YQ03|GCH1_BRUA2 GTP cyclohydrolase 1 OS=Brucella a bortus (strain 2308) OX=359391 GN=folE PE=3 SV=1
MDARILQDNDDTSLPVNQASVTRIHKKPGKAEAEAAVRTLLLWAGEDPDREGLLETPKRVAKAYQELFGGYSESPEEVLGTTFEEVAGYDDMVLVKDISFFSHCEHHMVPIIGKAHVAYLPEGRVVGLSKIARVVDIFARRLQTQESITAQIADSIQRILKPRGVAVMIEAEHMCMAMRSIRKQGSSTITTTFTGDFKEKADQQVRFMTLIRT

SEQ ID NO: 5810 - protein, 213 aa, Brucella abortus; identical to SEQ ID NO: 5809
  misc_feature (1)..(213): tr|A0A0M1WDJ9|A0A0M1WDJ9_BRUAO GTP cyclohydrolase 1 OS= Brucella abortus NCTC 8038 OX=575591 GN=folE PE=3 SV=1

SEQ ID NO: 5811 - protein, 213 aa, Brucella canis
  misc_feature (1)..(213): sp|A9M586|GCH1_BRUC2 GTP cyclohydrolase 1 OS=Brucella c anis (strain ATCC 23365 / NCTC 10854) OX=483179 GN=folE PE=3 SV=1
MDARILQDNDDTSLPVNQASVTRIHKKPGKAEAEAAVRTLLLWAGEDPDREGLLETPKRVAKAYQELFGGYSESPEEVLGTTFEEVAGYDDMVLVKDISFFSHCEHHMVPIIGKAHVAYLPEGRVVGLSKIARVVDIFARRLQTQESITAQIADSMQRILKPRGVAVMIEAEHMCMAMRSIRKQGSSTITTTFTGDFKEKADQQVRFMTLIRT

SEQ ID NO: 5812 - protein, 248 aa, Brucella ceti
  misc_feature (1)..(248): tr|C0G6G4|C0G6G4_9RHIZ GTP cyclohydrolase 1 OS=Brucella ceti str. Cudo OX=595497 GN=folE PE=3 SV=1
MACCCRINTSPARKAHRCIVRLTRFLLEGNYWRILMDARILQDNDDTSLPVNQASVTRIHKKPGKAEAEAAVRTLLLWAGEDPDREGLLETPKRVAKAYQELFGGYSESPEEVLGTTFEEVAGYDDMVLVKDISFFSHCEHHMVPIIGKAHVAYLPEGRVVGLSKIARVVDIFARRLQTQESITAQIADSIQRILKPRGVAVMIEAEHMCMAMRSIRKRGSSTITTTFTGDFKEKADQQVRFMTLIRT

SEQ ID NO: 5813 - protein, 213 aa, Brucella melitensis; identical to SEQ ID NO: 5809
  misc_feature (1)..(213): sp|Q8YH94|GCH1_BRUME GTP cyclohydrolase 1 OS=Brucella m elitensis biotype 1 (strain 16M / ATCC 23456 / NCTC 100 94) OX=224914 GN=folE PE=3 SV=1

SEQ ID NO: 5814 - protein, 213 aa, Brucella melitensis; identical to SEQ ID NO: 5809
  misc_feature (1)..(213): tr|A0A4P6KM57|A0A4P6KM57_BRUML GTP cyclohydrolase 1 OS= Brucella melitensis OX=29459 GN=folE PE=3 SV=1

SEQ ID NO: 5815 - protein, 213 aa, Brucella microti
  misc_feature (1)..(213): tr|C7LC26|C7LC26_BRUMC GTP cyclohydrolase 1 OS=Brucella microti (strain CCM 4915) OX=568815 GN=folE PE=3 SV=1
MDARILQDNDDTSLPVNQASVTRIHKKPGKAEAEAAVRTLLLWAGEDPDREGLLETPKRVAKAYQELFGGYSESPEEVLGTTFEEVAGYDDMVLVKDISFFSHCEHHMVPIIGKAHVAYLPEGRVVGLSKIARVVDIFARRLQTQESITAQIADSIQRILKPRGVAVMIEAEHMCMAMRGIRKQGSSTITTTFTGDFKEKADQQVRFMTLIRT

SEQ ID NO: 5816 - protein, 213 aa, Brucella neotomae
  misc_feature (1)..(213): tr|A0A381B7U4|A0A381B7U4_BRUNE GTP cyclohydrolase 1 OS= Brucella neotomae OX=29460 GN=folE PE=3 SV=1
MDARILQDNDDTSLPVNQASVTRIHKKPGKAEAEAAVRTLLLWVGEDPDREGLLETPKRVTKAYQELFGGYSESPEEVLGTTFEEVAGYDDMVLVKDISFFSHCEHHMVPIIGKAHVAYLPEGRVVGLSKIARVVDIFARRLQTQESITAQIADSIQRILKPRGVAVMIEAEHMCMAMRSIRKQGSSTITTTFTGDFKEKADQQVRFMTLIRT

SEQ ID NO: 5817 - protein, 213 aa, Brucella ovis
  misc_feature (1)..(213): sp|A5VQL0|GCH1_BRUO2 GTP cyclohydrolase 1 OS=Brucella o vis (strain ATCC 25840 / 63/290 / NCTC 10512) OX=444178 GN=folE PE=3 SV=1
MDARIFQDNDDTSLPVNQASVTRIHKKPGKAEAEAAVRTLLLWVGEDPDREGLLETPKRVAKAYQELFGGYSGSPEEVLGTTFEEVAGYDDMVLVKDISFFSHCEHHMVPIIGKAHVAYLPEGRVVGLSKIARVVDIFARRLQTQESITAQIADSIQRILKPRGVAVMIEAEHMCMAMRSIRKQGSSTITTTFTGDFKEKADQQVRFMTLIRT

SEQ ID NO: 5818 - protein, 213 aa, Brucella ovis; identical to SEQ ID NO: 5817
  misc_feature (1)..(213): tr|N8LXW4|N8LXW4_BRUOV GTP cyclohydrolase 1 OS=Brucella ovis IntaBari-2002-82-58 OX=1293916 GN=folE PE=3 SV=1

SEQ ID NO: 5819 - protein, 213 aa, Brucella pinnipedialis
  misc_feature (1)..(213): tr|A0A0E1X291|A0A0E1X291_9RHIZ GTP cyclohydrolase 1 OS= Brucella pinnipedialis M292/94/1 OX=520462 GN=folE PE=3 SV=1
MDARILQDNDDTSLPVNQASVTRIHKKPGKAEAEAAVRTLLLWAGEDPDREGLLETPKRVAKAYQELFGGYSESPEEVLGTTFEEVAGYDDMVLVKDISFFSHCEHHMVPIIGKAHVAYLPEGRVVGLSKIARVVDIFARRLQTQESITAQIADSIQRILKPRGVAVMIEAEHMCMAMRSIRKRGSSTITTTFTGDFKEKADQQVRFMTLIRT

SEQ ID NO: 5820 - protein, 213 aa, Brucella sp.
  misc_feature (1)..(213): tr|D6LP89|D6LP89_9RHIZ GTP cyclohydrolase 1 OS=Brucella sp. NVSL 07-0026 OX=520448 GN=folE PE=3 SV=1
MDARILQDNDDTSLPVNQASVTRIHKKPGKAEAEAAVRTLLLWAGEDPDREGLLETPKRVAKAYQELFGGYSGSPEEVLGTTFEEVAGYDDMVLVKDISFFSHCEHHMVPIIGKAHVAYLPEGRVVGLSKIARVVDIFARRLQTQESITAQIADSIQRILKPRGVAVMIEAEHMCMAMRSIRKQGSSTITTTFTGDFKEKADQQVRFMTLIRT

SEQ ID NO: 5821 - protein, 213 aa, Brucella sp.; identical to SEQ ID NO: 5815
  misc_feature (1)..(213): tr|A0A1P8S6C3|A0A1P8S6C3_9RHIZ GTP cyclohydrolase 1 OS= Brucella sp. 09RB8910 OX=1844051 GN=folE PE=3 SV=1

SEQ ID NO: 5822 - protein, 213 aa, Brucella suis; identical to SEQ ID NO: 5811
  misc_feature (1)..(213): sp|Q8G0L4|GCH1_BRUSU GTP cyclohydrolase 1 OS=Brucella s uis biovar 1 (strain 1330) OX=204722 GN=folE PE=3 SV=1

SEQ ID NO: 5823 - protein, 213 aa, Brucella suis; identical to SEQ ID NO: 5811
  misc_feature (1)..(213): tr|A0A4Z0F269|A0A4Z0F269_BRUSS GTP cyclohydrolase 1 OS= Brucella suis OX=29461 GN=folE PE=3 SV=1

SEQ ID NO: 5824 - protein, 215 aa, Brucellaceae bacterium
  misc_feature (1)..(215): tr|A0A3P1UQM5|A0A3P1UQM5_9RHIZ GTP cyclohydrolase 1 OS= Brucellaceae bacterium VT-16-1752 OX=2487907 GN=folE PE =3 SV=1
MDARILKEDDESGLPSKKQANVTPLHGTPTQADAEAAVRTLLLWAGDNPDREGLLETPKRVAKAYKELFSGYAESPEEVLGTVFEEVAGYNDMVLVKDISFFSHCEHHMVPIIGKAHVAYLPDHKVVGLSKIARVVDIFAHRLQTQESITAQIADSIQTILKPRGVAVMIEAEHMCMAMRGIRKQGSTTITTTFTGEMKTKVDEQVRFMTLSRSK

SEQ ID NO: 5825 - protein, 197 aa, Brumimicrobium aurantiacum
  misc_feature (1)..(197): tr|A0A3E1EV32|A0A3E1EV32_9FLAO GTP cyclohydrolase 1 OS= Brumimicrobium aurantiacum OX=1737063 GN=folE PE=3 SV=1
MENKFEYNQEITDKLTDVYKEVIKDLGEDPNREGLLKTPERVAKSVQFLTQGYQQDPDAILRSALFQEDYSEMVIVKDIEVYSQCEHHMLPFFGKAHIAYIPDGKIVGLSKLPRIVDAYARRLQVQERLTLEIRDCIQRTLEPKGVAVVLECSHMCMQMRGVEKQNSSTTTSAFKGLFLNNDSTRKEFINLIQARLH

SEQ ID NO: 5826 - protein, 197 aa, Brumimicrobium glaciale
  misc_feature (1)..(197): tr|A0A4V1WFE8|A0A4V1WFE8_9FLAO GTP cyclohydrolase 1 OS= Brumimicrobium glaciale OX=200475 GN=folE PE=3 SV=1
MESKFEYDQEVTDRLTEVYKGVLADLGEDPNREGLLKTPERVAKSVQFLTQGYKQDPDEILRSALFHEDYSEMVIVKDIEVYSQCEHHMLPFFGKAHIAYIPNGKIVGLSKLPRIVDAYARRLQVQERLTLEIRDCIQRTLDPKGVAVVLECSHMCMQMRGVEKQNSSTTTSAFKGLFMSNDSTRKEFINLIQARLH

SEQ ID NO: 5827 - protein, 197 aa, Brumimicrobium salinarum
  misc_feature (1)..(197): tr|A0A2I0R1V2|A0A2I0R1V2_9FLAO GTP cyclohydrolase 1 OS= Brumimicrobium salinarum OX=2058658 GN=folE PE=3 SV=1
MENKFDYDENITLKLTEVYKEVLKDLGEDPQREGLLKTPERVAKSVQFLTQGYKQDPDEILKSALFDEDYSEMVIVKDIEVYSQCEHHMLPFFGKAHIAYIPDGKIVGLSKLPRIVDAYARRLQVQERLTLEIRDCIQRTLNPKGVAVVLECSHMCMQMRGVEKQNSSTTTSAFKGLFMQNDSTRKEFINLIQANLH

SEQ ID NO: 5828 - protein, 197 aa, Brumimicrobium sp.
  misc_feature (1)..(197): tr|A0A2U2XFE2|A0A2U2XFE2_9FLAO GTP cyclohydrolase 1 OS= Brumimicrobium sp. C305 OX=2100725 GN=folE PE=3 SV=1
MESKFEYNQEVTDKLTEVYKSVLADLGEDPSREGLLKTPERVAKSVQFLTQGYKQNPDEILRSALFQEDYSEMVIVKDIEVYSQCEHHMLPFFGKAHIAYIPDGKIVGLSKLPRIVDAYARRLQVQERLTLEIRDCIQRTLEPKGVAVVLECSHMCMQMRGVEKQNSSTTTSAFKGLFMSNDSTRKEFINLIQAKLH

SEQ ID NO: 5829 - protein, 191 aa, Bryobacterales bacterium
  misc_feature (1)..(191): tr|A0A3D1AS76|A0A3D1AS76_9BACT GTP cyclohydrolase 1 OS= Bryobacterales bacterium OX=2026791 GN=folE PE=3 SV=1
MIAQRDIQNSLEPLVAQMIARLGEDPAREGLLRTPARVDQALRFLTSGYQTRIEDIVNEALFAVTYDEMVIVRDIEFFSLCEHHMLPFFGKAHIAYIPRDRVIGLSKLPRIVDMFARRLQIQERLTQQIAECIQDVLDPVGVGVICEAQHFCMMMRGVEKQHSGTVTSAMLGDFRERKETRDEFLALTRSR

SEQ ID NO: 5830 - protein, 209 aa, Bryobacterales bacterium
  misc_feature (1)..(209): tr|A0A2E5FMG6|A0A2E5FMG6_9BACT GTP cyclohydrolase 1 OS= Bryobacterales bacterium OX=2026791 GN=folE PE=3 SV=1
MASHPSSHDPHSESPTDSSNNTKLSGLVQEMLGELGENPDRDGLRRTPQRVARAFRELTRGYEMDAATVLNNALFEVSYDEMVIVRDIEVFSLCEHHLLPFFGKVHVAYLPREKVIGLSKIPRLVDMFARRLQIQERLTNQIAATIQETINPVGVGVVIEARHLCMVMRGVEKQHSSAVTSAMLGAFRENSQTREEFLSLLSPRSTQGL

SEQ ID NO: 5831 - protein, 222 aa, Bryocella elongata
  misc_feature (1)..(222): tr|A0A1H5TY65|A0A1H5TY65_9BACT GTP cyclohydrolase 1 OS= Bryocella elongata OX=863522 GN=folE PE=3 SV=1
MTIKIHDTNFSGTNGHSPMETELSAAKAHPALAKPLGEASTQEIYAELLSRLGEDPTRDGLLRTPERVEKSMAFLTRGYTQSIEEVLHEALFDVDYDEMVVVKDIEFYSLCEHHMLPFFGRAHVAYLPQGKVVGLSKIPRIVDVFARRLQVQERMTQQIAEAIEDAVHPQGVGVVLEGQHLCMMMRGVEKQSSWTTTSAMRGVFKTQVQTRSEFLSLVRPVR

SEQ ID NO: 5832 - protein, 218 aa, Buchnera aphidicola
  misc_feature (1)..(218): sp|Q8KA05|GCH1_BUCAP GTP cyclohydrolase 1 OS=Buchnera a phidicola subsp. Schizaphis graminum (strain Sg) OX=198 804 GN=folE PE=3 SV=1
MIKITKEANIARNVLLLKGLENPILKEYNDIKEKERELLIAEYLYKIMSLLNLDLKNESLKDTPIRISKMYVNEIFSGLDYKNFPKIMLMDNKIKFHEMIIVRDILLISTCEHHFITINGQATIAYIPENKIIGLSKINRIAQFFAKRPQIQERLTKQILLVLQVLLQTKNVAIIIHMDHFCVKARGVCDTSSSTVTSCLDGLFKSDKNIREEFFFKK

SEQ ID NO: 5833 - protein, 220 aa, Buchnera aphidicola
  misc_feature (1)..(220): tr|A0A5J6ZD59|A0A5J6ZD59_9GAMM GTP cyclohydrolase I Fol E OS=Buchnera aphidicola (Aphis gossypii) OX=98785 GN=f olE PE=4 SV=1
MIKISQEAQLAHNALLSKGLENPILKEYNGIEEKERELLIAKYIYKIMYILNLDTKNDSLKNTPDRISKMYNKEIFLGLDYKNFPKITFIENVIKSSDIIIVRDITLMSTCEHHFITIYGKADIAYIPRKKIIGLSKINRIAQFYSKRPQIQERLTKQIRVVLQTLLGTKDIAIVLNMNHFCVKTRGICDVNSTVITSSLKGLFKTSKSIRDQFLFKNNL

SEQ ID NO: 5834 - protein, 124 aa, Budvicia aquatica
  misc_feature (1)..(124): tr|A0A484ZMP0|A0A484ZMP0_9GAMM GTP cyclohydrolase 1 OS= Budvicia aquatica OX=82979 GN=folE_2 PE=3 SV=1
MQLLNLDLSDDSLAETPTRIAKMYVDEIFSGLDYANFPKITLIQNKMKVDEMGYGQRYHTDQHPVNITFVTIDGKATVAYIPKDSVIGLSKINRIVQFFSQRPQVQERLTQQILLGFANPIGHH

SEQ ID NO: 5835 - protein, 223 aa, Budvicia aquatica
  misc_feature (1)..(223): tr|A0A2C6DNS8|A0A2C6DNS8_9GAMM GTP cyclohydrolase 1 OS= Budvicia aquatica OX=82979 GN=folE PE=3 SV=1
MSSLSKEAILVHAALEAKGLETPLRGAVLDSDIRKQRIQAHMTEIMQLLNLDLSDDSLAETPTRIAKMYVDEIFSGLDYANFPKITLIQNKMKVDEMVTVRDITLTSTCEHHFVTIDGKATVAYIPKDSVIGLSKINRIVQFFSQRPQVQERLTQQILLALQTLLGTTNVAVSIDAIHYCVKSRGVCDATSSTSTTSLGGLFKSNPSTRQEFLASVRHTSHHP

SEQ ID NO: 5836 - protein, 269 aa, Burkholderia ambifaria
  misc_feature (1)..(269): sp|Q0BAL7|GCH4_BURCM GTP cyclohydrolase FolE2 OS=Burkho lderia ambifaria (strain ATCC BAA-244 / AMMD) OX=339670 GN=folE2 PE=3 SV=1
MNQMNPAFVMPDVQSTVDTRQIPIQRVGVKAVRHPLTVRTESGDVQPTVGVWNLDVHLPADQKGTHMSRFVALLEDSREPLTVERFRAMLASMLVRLEAEAGRIEVTFPYFVNKTAPVSGVQSLLDYEVTLAGESRNGETRLFLKVLVPVTSLCPCSKKISQYGAHNQRSHVTIDAELAADLPVEALIRIAEEEASCELWGLLKRPDEKFVTERAYENPKFVEDLVRDVAQRLDADERVVAYVLEAENFESIHNHSAYALIERDKRHAA

SEQ ID NO: 5837 - protein, 209 aa, Burkholderia ambifaria
  misc_feature (1)..(209): tr|B1SYJ0|B1SYJ0_9BURK GTP cyclohydrolase 1 OS=Burkhold eria ambifaria MEX-5 OX=396597 GN=folE PE=3 SV=1
MGKKTARPEPAASRPSRKEAEEAVRVLLRWAGDDPAREGLLDTPARVVRAYEEFFAGYALEPREILARTFSEVDGYDEMIVLKDIRFESYCEHHMVPIIGRAHVAYLPNHRVVGISKLARLVDAFAKRLQIQEKMTVQIADTLFDVLQPKGVGVILEAAHQCISTRGIHKPGVEMVTSRMLGTFRTDPSTRREFLSIVANPSSVNLTNT

SEQ ID NO: 5838 - protein, 211 aa, Burkholderia anthina
  misc_feature (1)..(211): tr|A0A3N9L3E3|A0A3N9L3E3_9BURK GTP cyclohydrolase 1 OS= Burkholderia anthina OX=179879 GN=folE PE=3 SV=1
MGKGKKSAQPEAVASRPSREEAEDAVRVLLRWAGDDPAREGLLDTPARVVRAYEQFFAGYALEPRDILARTFSEVDGYDEMIVLKDIRFESYCEHHMVPIIGRAHVAYLPNHRVVGISKLARLVDAFAKRLQIQEKMTVQIADTLFDVLQPKGVGVILEAAHQCISTRGVHKPGVEMVTSRMLGTFRTDPSTRREFLSIVANPSSVNLTNT

SEQ ID NO: 5839 - protein, 269 aa, Burkholderia anthina
  misc_feature (1)..(269): tr|A0A104L9D7|A0A104L9D7_9BURK GTP cyclohydrolase FolE2 OS=Burkholderia anthina OX=179879 GN=folE2 PE=3 SV=1
MNQMNPAFVMPDVQSTVDTRQIPIQRVGVKAVRHPLTVCTESGDVQPTVGVWNLDVRLPADQKGTHMSRFVALLEENRAPLTVERFRAMLASMLEKLEAEAGRIEVTFPYFVNKTAPVSGVQSLLDYEVTLAGESRNGDTRLFLKVLVPVTSLCPCSKKISQYGAHNQRSHVTIDAELAADLPVEALIRIAEEEASCELWGLLKRPDEKFVTERAYENPKFVEDLVRDIAQRLDADERVAAYVLEAENFESIHNHSAYALIERDKRLAA

SEQ ID NO: 5840 - protein, 211 aa, Burkholderia catarinensis
  misc_feature (1)..(211): tr|A0A1J9NLU0|A0A1J9NLU0_9BURK GTP cyclohydrolase 1 OS= Burkholderia catarinensis OX=1108140 GN=folE PE=3 SV=1
MGKGKKSAQPEPAASRPSRDEAEDAVRVLLRWAGDDPAREGLRDTPARVVRAYEQFFAGYALEPRDILARTFSEVDGYDEMIVLKDIRFESYCEHHMVPIIGRAHVAYLPNHRVVGISKLARLVDAFAKRLQIQEKMTVQIADTLFDVLQPKGVGVILEAAHQCISTRGVHKPGVEMVTSRMLGTFRTDPSTRREFLSIVANPSSVNLTNT

SEQ ID NO: 5841 - protein, 269 aa, Burkholderia catarinensis
  misc_feature (1)..(269): tr|A0A1J9NR06|A0A1J9NR06_9BURK GTP cyclohydrolase FolE2 OS=Burkholderia catarinensis OX=1108140 GN=folE2 PE=3 SV=1
MNQMNPAFVMPDVQSTVDTRQIPIQRVGVKAVRHPLTVRTESGDVQPTVGVWNLDVRLPADQKGTHMSRFVALLEENRAPLTVERFRAMLASMLEKLEAEAGRIEVTFPYFVNKTAPVSGVQSLLDYEVTLAGESRNGDTRLFLKVLVPVTSLCPCSKKISQYGAHNQRSHVTIDAELAADLPVEALIRIAEEEASCELWGLLKRPDEKFVTERAYENPKFVEDLVRDVAQRLDADGRVVAYVLEAENFESIHNHSAYALIERDKRQAA

SEQ ID NO: 5842 - protein, 316 aa, Burkholderia cenocepacia
  misc_feature (1)..(316): sp|B1K5N3|GCH42_BURCC GTP cyclohydrolase FolE2 2 OS=Bur kholderia cenocepacia (strain MC0-3) OX=406425 GN=folE2 -2 PE=3 SV=2
MEKALHRISSMNAALPDISLTDAAPGRRPLEWVGMQGIDLPVVVAEPGCRRDVHARADVQVDLPAPQVKGIHMSRLYGLLDGLADGEALSPAGLQRMLRAMVDSHRDCATRSARVRLRFDLLARRTALVTEGLAGWKAYPVRLDATLSGDAFALRAQVTVVYSSTCPCSAALSRHWIEQAFLTAFGHEARVEPTAVAAWLKRHATAATPHSQRSEAVVSVALPADGTTLGLLDLIDRVEQALGTPVQTAVKRADEQAFAVLNGGNLMFVEDAARRVQAALEDRHASPRVRVRHLESLHPHDAVAWAAPLREGADAC

SEQ ID NO: 5843 - protein, 306 aa, Burkholderia cenocepacia
  misc_feature (1)..(306): tr|A0A1V6KQ73|A0A1V6KQ73_9BURK GTP cyclohydrolase FolE2 OS=Burkholderia cenocepacia OX=95486 GN=folE2 PE=3 SV= 1
MNAALPDISLTDAAPGHRPLEWVGMQGIDLPVVVAEPGCRRDVHARADVQVDLPAPQVKGIHMSRLYWLLDWLADGEALSPAGLQRVLRAMVDSHRDCDTRSARVRLHFDLLARRTALVTDGLSGWKAYPVRVDATLAGDAFALRAQVTVVYSSTCPCSAALSRHWIEQAFLTAFGREDRVDPAAVAAWLKQHATAATPHSQRSEAVVSVALPADGATLGLIGLIDRVEQALGTPVQTAVKRADEQAFAVLNGGNLMFVEDAARRVQAALEGHHAGPRVRVRHLESLHPHDAVAWAAPLREGADAC

SEQ ID NO: 5844 - protein, 316 aa, Burkholderia cepacia
  misc_feature (1)..(316): tr|A0A0U4BQH6|A0A0U4BQH6_BURCE GTP cyclohydrolase FolE2 OS=Burkholderia cepacia JBK9 OX=1395570 GN=folE2 PE=3 SV=1
MEKARHRNPSMNAVLPDVSLTDAAPGRRPLEWVGMQGIDLPVTVAEPGCRRDVHARADVQVDLPAPDVKGIHMSRLYWLLDWLADGEALSPAGLRRVLRAMVDSHRDCDTRSARVRLRFDLLARRTALVTEGLAGWKAYPVQVDATLAGDAFELRAQVTVAYSSTCPCSAALSRHWIEQAFLTAFDREARVAPAAVAAWLKQHATLATPHSQRSEAVVSVALPADGAALGLIDLIDRIEHALGTPVQTAVKRADEQAFAVLNGGNLMFVEDAARRVQAALESRHAHPRVHVRHLESLHPHDAVAWAAPVREGADAC

SEQ ID NO: 5845 - protein, 269 aa, Burkholderia cepacia
  misc_feature (1)..(269): tr|A0A104D3Z2|A0A104D3Z2_BURCE GTP cyclohydrolase FolE2 OS=Burkholderia cepacia OX=292 GN=folE2 PE=3 SV=1
MNQMNPAFVMPDVQSTVDTRQIPIQRVGVKAVRHPLTVCTEAGDVQPTVGVWNLDVRLPADQKGTHMSRFVALLEENRAPLTVERFRAMLASMLEKLEAEAGRIEVTFPYFVNKTAPVSGVQSLLDYEVTLAGESRNGDTRLFLKVLVPVTSLCPCSKKISQYGAHNQRSHVTIDAELAADLPVEALIRIAEEEASCELWGLLKRPDEKFVTERAYENPKFVEDLVRDVAQRLDADERVVAYVLEAENFESIHNHSAYALIERDKRQAA

SEQ ID NO: 5846 - protein, 306 aa, Burkholderia contaminans
  misc_feature (1)..(306): tr|A0A3N8QJ86|A0A3N8QJ86_9BURK GTP cyclohydrolase FolE2 OS=Burkholderia contaminans OX=488447 GN=folE2 PE=3 SV =1
MNAPLPDISLTDAAPGGRPLEWVGMQGIDLPVAVAEPGCRRDVHARADVQVDLPAPHVKGIHMSRLYRLLDGLDDGAALSPAGVQRVLHAMVDSHRDCDTRSARLRLRFDLLARRAALVTDGLAGWKAYPVRIDATLTGSRFALRAQVTVVYSSTCPCSAALSRHWVEQAFLAAFGRDDRVEPTAVAAWLKRHATAATPHSQRSEAVVTVALPADGATLGLIDLIDRIEHALGTPVQTAVKRADEQAFAVLNGGNLMFVEDAARRVQAALDGHHATPRVHVRHLESLHPHDAVAWAAPLREGADAC

SEQ ID NO: 5847 - protein, 269 aa, Burkholderia contaminans
  misc_feature (1)..(269): tr|A0A0G3YNT6|A0A0G3YNT6_9BURK GTP cyclohydrolase FolE2 OS=Burkholderia contaminans OX=488447 GN=folE2 PE=3 SV =1
MNQMNPAFVMPDVQSTVDTRQIPIQRVGVKAVRHPLTVCTESGDVQPTVGVWNLDVRLPADQKGTHMSRFVALLEENRAPLTVERFRAMLASMLEKLEAEAGRIEVTFPYFVNKTAPVSGVQSLLDYEVTLAGESRNGDTRLFLKVLVPVTSLCPCSKKISQYGAHNQRSHVTIDAELAADLPVEALIRIAEEEASCELWGLLKRPDEKFVTERAYENPKFVEDLVRDVAQRLDADERVVAYVLEAENFESIHNHSAYALIERDKRQAA

SEQ ID NO: 5848 - protein, 223 aa, Burkholderia dabaoshanensis
  misc_feature (1)..(223): tr|A0A2N7VFQ0|A0A2N7VFQ0_9BURK GTP cyclohydrolase 1 OS= Burkholderia dabaoshanensis OX=564714 GN=folE PE=3 SV=1
MKEASREKKASRAGTRKHAEASSAAPARPSRDEAEQAVRVLLRWAGDDPAREGLLDTPARVVRAYEEFFKGYALDPREILARTFSEVEGYDEMVVLKDIRFESYCEHHMVPIIGRAHVAYLPNHRVVGISKLARLVDAFAKRLQIQEKMTVQIADTLNDILQPKGVGVILEAAHQCITTRGVHKAGVQMVTSRMLGSFRDDPSTRREFLAIVGNADGMSVPNV

SEQ ID NO: 5849 - protein, 272 aa, Burkholderia dabaoshanensis
  misc_feature (1)..(272): tr|A0A2N7VKF2|A0A2N7VKF2_9BURK GTP cyclohydrolase FolE2 OS=Burkholderia dabaoshanensis OX=564714 GN=folE2 PE=3 SV=1
MNQMNPAFVMPDVQSTVDTRQIAIQRVGVKGVRHPLTVRTASGDVQPTVGTWNLDVHLPADQKGTHMSRFVALLEGNKAPLEAATFRKMLDEMLSKLEATGGRIEVTFPYFVPKTAPVSGVTSLLDYEVTLAGQARDGEVRTFLRVLVPVTSLCPCSKEISQYGAHNQRSHVTIDVELVADLPVEELIRMAEEEASCELWGLLKRPDEKFVTERAYENPKFVEDLVRDVAQRLNADERIVSYTLEAENFESIHNHSAYAVIEHDKRDAAVAA

SEQ ID NO: 5850 - protein, 269 aa, Burkholderia diffusa
  misc_feature (1)..(269): tr|A0A1B4BY56|A0A1B4BY56_9BURK GTP cyclohydrolase FolE2 OS=Burkholderia diffusa OX=488732 GN=folE2 PE=3 SV=1
MNQMNPAFVMPDVQSTVDTRQIPIQRVGVKAVRHPLTVCTESGDVQPTVGVWNLDVRLPADQKGTHMSRFVALLEENRAPLTVERFRAMLASMLEKLEAEAGRIEVTFPYFVNKTAPVSGVQSLLDYEVTLAGESRNGEARLFLKVLVPVTSLCPCSKKISQYGAHNQRSHVTIDAELAADLPVEALIRIAEEEASCELWGLLKRPDEKFVTERAYENPKFVEDLVRDVAQRLDADERVIAYVLEAENFESIHNHSAYALIERDKRHAA

SEQ ID NO: 5851 - protein, 209 aa, Burkholderia diffusa
  misc_feature (1)..(209): tr|A0A1B4C2K2|A0A1B4C2K2_9BURK GTP cyclohydrolase 1 OS= Burkholderia diffusa OX=488732 GN=folE PE=3 SV=1
MGKKSARPEPAASRPSREEAEDAVRVLLRWAGDDPAREGLLDTPARVVRAYEQFFAGYALEPRDILARTFSEVDGYDEMIVLKDIRFESYCEHHMVPIIGRAHVAYLPNHRVVGISKLARLVDAFAKRLQIQEKMTVQIADTLFDVLQPKGVGVILEAAHQCISTRGVHKPGVEMVTSRMLGTFRTDPSTRREFLSIVANPSSVNLTNT

SEQ ID NO: 5852 - protein, 209 aa, Burkholderia dolosa
  misc_feature (1)..(209): tr|A0A0D5IRP9|A0A0D5IRP9_9BURK GTP cyclohydrolase 1 OS= Burkholderia dolosa AU0158 OX=350701 GN=folE PE=3 SV=1
MGKKSARSKPAAARPSREEAEDAVRVLLRWAGDDPTREGLIDTPARVVRAYEQFFAGYAVEPRDILARTFSEVDGYDEMIVLKDIRFESYCEHHMVPIIGRAHVAYLPNKRVVGISKLARLVDAFAKRLQIQEKMTVQIADTLFDVLQPKGVGVILEAAHQCISTRGVHKPGVEMVTSRMLGTFRTDPSTRREFLSIVANPSSVNLTNT

SEQ ID NO: 5853 - protein, 269 aa, Burkholderia dolosa
  misc_feature (1)..(269): tr|A2WDP5|A2WDP5_9BURK GTP cyclohydrolase FolE2 OS=Burk holderia dolosa AU0158 OX=350701 GN=folE2 PE=3 SV=1
MNQMNPAFVMPDVQSTVDTRQIPIQRVGVKAVRHPLTVCTESGDVQPTVGVWNLDVRLPADQKGTHMSRFVALLEENRAPLTVERFRAMLASMLAKLEAEAGRIEVTFPYFVNKTAPVSGVQSLLDYEVTLAGESRNGDTRVFLKVLVPVTSLCPCSKKISQYGAHNQRSHVTIDAELAADLPVEALIRIAEEEASCELWGLLKRPDEKFVTERAYENPKFVEDLVRDVAQRLDADERIVAYVLEAENFESIHNHSAYALIERDKRQAG

SEQ ID NO: 5854 - protein, 268 aa, Burkholderia gladioli
  misc_feature (1)..(268): tr|F2LNT4|F2LNT4_BURGS GTP cyclohydrolase FolE2 OS=Burk holderia gladioli (strain BSR3) OX=999541 GN=folE2 PE=3 SV=1
MNQMNPGFAMPDVQSTVDTRQIPIQRVGVKAVRHPLTVRTASGEIQPSVGTWNLDVHLPAEQKGTHMSRFVALLEDNREPLGPEALRGLLASMLDKLEAVAGRIEVTFPYFVSKTAPVSGVKSLLDYEVTLAGEVRNGATRLFLKVLVPVTSLCPCSKKISQYGAHNQRSHVTIDAELDGEVAVEELIRIAEEEASCELWGLLKRPDEKFVTERAYENPKFVEDLVRDVAQRLNADERIVAYVLEAENFESIHNHSAYALIERDKRIG

SEQ ID NO: 5855 - protein, 268 aa, Burkholderia gladioli; identical to SEQ ID NO: 5854
  misc_feature (1)..(268): tr|A0A2S4NJ51|A0A2S4NJ51_BURGA GTP cyclohydrolase FolE2 OS=Burkholderia gladioli OX=28095 GN=folE2 PE=3 SV=1

SEQ ID NO: 5856 - protein, 268 aa, Burkholderia glumae
  misc_feature (1)..(268): tr|A0A2J9HMN8|A0A2J9HMN8_BURGL GTP cyclohydrolase FolE2 OS=Burkholderia glumae OX=337 GN=folE2 PE=3 SV=1
MNQMNPGFAMPDVQSTVDTRQIPIQRVGVKAVRHPLSVRGGTGEIQPSVGTWNLDVQLPADQKGTHMSRFVALLEENDQPLTAEVFRGLLASMLVRLEAQAGRIEVSFPYFVRKTAPVSGVKSLLDYQVTLAGDLRDGVTRLFLKVLVPVTSLCPCSKQISQYGAHNQRSHVTIDAELNADVPAEDLIRIAEEEASCELWGLLKRPDEKFVTERAYENPKFVEDLVRDVAQRLDADDRIAAYVLEAENFESIHNHSAYALIERDKRIA

SEQ ID NO: 5857 - protein, 268 aa, Burkholderia glumae; identical to SEQ ID NO: 5856
  misc_feature (1)..(268): tr|C5AJ55|C5AJ55_BURGB GTP cyclohydrolase FolE2 OS=Burk holderia glumae (strain BGR1) OX=626418 GN=folE2 PE=3 S V=1

SEQ ID NO: 5858 - protein, 216 aa, Burkholderia insecticola
  misc_feature (1)..(216): tr|R4X2P8|R4X2P8_9BURK GTP cyclohydrolase 1 OS=Burkhold eria insecticola OX=758793 GN=folE PE=3 SV=1
MSAPRKNHLSGSDIPADQADRPSREEAEAAVRVLLRWAGDDPNREGLLDTPARVVRAYEEFFAGYEQNPHDILARTFSEVQGYDEMIVLKDIRFESYCEHHMVPIIGRAHVAYLPNKRVVGISKLARLVDAFAKRLQIQEKMTAQIADTLNEVLQPIGVGVILEAAHQCMSTRGVHKAGVAMVTSRMLGSFRDDPSTRREFLSIVGNSNAFSVANT

SEQ ID NO: 5859 - protein, 267 aa, Burkholderia insecticola
  misc_feature (1)..(267): tr|R4WMM5|R4WMM5_9BURK GTP cyclohydrolase FolE2 OS=Burk holderia insecticola OX=758793 GN=folE2 PE=3 SV=1
MNQMNPAFVMPDVQSTPDTRQIAISRVGVKGVRHPLSVRTASGVQPSIGVWNLDVHLPAEQKGTHMSRFVALLEENREPLDQAALRTLLAAMLTKLEAHSGRIEVSLPYFVMKTAPVSGVQSLLDYEVTFIAEKRDGQTRMSMKVLVPVTSLCPCSKQISQYGAHNQRSHVTITAELAGEVAVEELIRIAEEEASCELWGLLKRPDEKFVTERAYENPKFVEDLVRDVATRLNADARIVAYVLEAENFESIHNHSAYAVIESTRRDA

SEQ ID NO: 5860 - protein, 316 aa, Burkholderia lata
  misc_feature (1)..(316): sp|Q39AS8|GCH41_BURL3 GTP cyclohydrolase FolE2 1 OS=Bur kholderia lata (strain ATCC 17760 / DSM 23089 / LMG 224 85 / NCIMB 9086 / R18194 / 383) OX=482957 GN=folE2-1 PE =3 SV=1
MEKALHRISSMNAPLPDISLTDAAPGGRPLEWVGMQGIDLPVAVAEPGCRRDVHARADVQVDLPAPHVKGIHMSRLYRLLDGLGDGTALSPAGLQHVLHAMVDSHRDCDTRSARLRLRFDLLARRAALVTDGLAGWKAYPVRIDATLSGARFELRAQVTVVYSSTCPCSAALSRHWVEQAFLAAFGHDDRVEPAAVAAWLKRHATAATPHSQRSEAVVSVALPADGATLGLIDLIDRIEHALGTPVQTAVKRADEQAFAVLNGGNLMFVEDAARRVQAALDGHHANPRVHVRHLESLHPHDAVAWAAPVREGADAC

SEQ ID NO: 5861 - protein, 269 aa, Burkholderia lata
  misc_feature (1)..(269): tr|A0A3G3HIU7|A0A3G3HIU7_BURL3 GTP cyclohydrolase FolE2 OS=Burkholderia lata (strain ATCC 17760 / DSM 23089 / LMG 22485 / NCIMB 9086 / R18194 / 383) OX=482957 GN=fol E2 PE=3 SV=1
MNQMNPAFVMPDVQSTVDTRQIPIQRVGVKAVRHPLTVCTESGDVQPTVGVWNLDVRLPADQKGTHMSRFVALLEENRAPLTVERFRAMLASMLEKLEAEAGRIEVTFPYFVNKTAPVSGVQSLLDYEVTLAGESRNGDTRLFLKVLVPVTSLCPCSKKISQYGAHNQRSHVTIDAELAADLPVEALIRIAEEEASCELWGLLKRPDEKFVTERAYENPKFVEDLVRDVAQRLDADERVMAYVLEAENFESIHNHSAYALIERDKRQAA

SEQ ID NO: 5862 - protein, 269 aa, Burkholderia latens
  misc_feature (1)..(269): tr|A0A1B4P3P6|A0A1B4P3P6_9BURK GTP cyclohydrolase FolE2 OS=Burkholderia latens OX=488446 GN=folE2 PE=3 SV=1
MNQMNPAFVMPDVQSTVDTRQIPIQRVGVKAVRHPLTVCTESGDVQPSVGVWNLDVRLPADQKGTHMSRFVALLEENRAPLTVARFRAMLASMLEKLEAEAGRIEVTFPYFVSKTAPVSGVQSLLDYEVTLAGESRNGETRVFLKVLVPVTSLCPCSKKISQYGAHNQRSHVTIDAELAADLPVEALIRIAEEEASCELWGLLKRPDEKFVTERAYENPKFVEDLVRDVAQRLDADERVVAYVLEAENFESIHNHSAYALIERDKRHAA

SEQ ID NO: 5863 - protein, 209 aa, Burkholderia latens
  misc_feature (1)..(209): tr|A0A1B4NYL5|A0A1B4NYL5_9BURK GTP cyclohydrolase 1 OS= Burkholderia latens OX=488446 GN=folE PE=3 SV=1
MGKKNARPEPAASRPSREEAEDAVRVLLRWAGDDPNREGLLDTPARVVRAYEEFFAGYALEPRDILARTFSEVDGYDEMIVLKDIRFESYCEHHMVPIIGRAHVAYLPNHRVVGISKLARLVDAFAKRLQIQEKMTVQIADTLFDVLQPKGVGVILEAAHQCISTRGVHKPGVEMVTSRMLGTFRTDPSTRREFLSIVANPSSVNLTNT

SEQ ID NO: 5864 - protein, 266 aa, Burkholderia mallei
  misc_feature (1)..(266): sp|Q62DU0|GCH4_BURMA GTP cyclohydrolase FolE2 OS=Burkho lderia mallei (strain ATCC 23344) OX=243160 GN=folE2 PE =3 SV=1
MNPEFAMPDVQSTVDTRQMPIQRVGVRAVRHPLTVRTAEGETQATVGTWNLDVHLPADQKGTHMSRFVALLEERGGPLTADAFRTMLATMLEKLEARAGRIEVSFPYFVNKTAPVSGVRSLLDYEVTLTGDVRDGLTRVFAKVLVPVTSLCPCSKKISQYGAHNQRSHVTIDAELAADVPVEDLIRIAEEEASCELWGLLKRPDEKFVTERAYENPKFVEDLVRDVARRLDADERIVAYVLEAENFESIHNHSAYALIERDKRRGA

SEQ ID NO: 5865 - protein, 210 aa, Burkholderia mallei
  misc_feature (1)..(210): tr|A5PM35|A5PM35_BURML GTP cyclohydrolase 1 OS=Burkhold eria mallei OX=13373 GN=folE PE=3 SV=1
MIDTQYNGACDVHHHSPAEIRRIRQFDPAAFEMAVGSLLMACGIEIDAAHTSRTAQRVRELWQKRLLDGYDVDPAEALGVGFDDRKEDMVIIRSIAVHGVCPHHLLPFRGVAHVAYLPGGRLHGFGRIARMIDAISHRFTYQEWITNEIATALVTHGKARGAACLIEAEQLCLLMGENRRGDERVITQCYVGEFDHNAQARNEFLRAINR

SEQ ID NO: 5866 - protein, 269 aa, Burkholderia metallica
  misc_feature (1)..(269): tr|A0A1B4I773|A0A1B4I773_9BURK GTP cyclohydrolase FolE2 OS=Burkholderia metallica OX=488729 GN=folE2 PE=3 SV=1
MNQMNPAFVMPDVQSTVDTRQIPIQRVGVKAVRHPLTVRTEGGGVQPTVGVWNLDVRLPADQKGTHMSRFVALLEENRAPLTVERFRAMLASMLEKLEAEAGRIEVTFPYFVNKTAPVSGVQSLLDYEVTLAGESRNGDTRLFLKVLVPVTSLCPCSKKISQYGAHNQRSHVTIDAELAADLPVEALIRIAEEEASCELWGLLKRPDEKFVTERAYENPKFVEDLVRDVAQRLDADERVMAYVLEAENFESIHNHSAYALIERDKRQAA

SEQ ID NO: 5867 - protein, 306 aa, Burkholderia metallica
  misc_feature (1)..(306): tr|A0A1B4I7I1|A0A1B4I7I1_9BURK GTP cyclohydrolase FolE2 OS=Burkholderia metallica OX=488729 GN=folE2 PE=3 SV=1
MNAALPDISLTDVAPGRRPLDWVGMQGIDLPVAVAEPGCRRDVHARADVQVDLPAPDAKGIHMSRLYRLLDGLGDGTALSPAGLRRVLHAMVDSHRDCDTRSARLRLRFDLLARRAALVTDGLAGWKAYPVRIDATLTGVGFELRAQVTAVYSSTCPCSAALSRHWVEQAFLAAFGRDERVEPAAVAAWLKRHATAATPHSQRSEAVVSVALPADGATLGLIDLIDRIEYALGTPVQTAVKRADEQAFAVLNGENLMFVEDAARRVQAALDGRHADPRVHVRHLESLHPHDAVAWAAPVREGADAC

SEQ ID NO: 5868 - protein, 269 aa, Burkholderia multivorans
  misc_feature (1)..(269): sp|A9ANA1|GCH4_BURM1 GTP cyclohydrolase FolE2 OS=Burkho lderia multivorans (strain ATCC 17616 / 249) OX=395019 GN=folE2 PE=3 SV=1
MNQMNPAFVMPDVQSTVDTRQIPIQRVGVKAVRHPLTVLTESGDVQPTVGVWNLDVRLPAEQKGTHMSRFVALLEENRAPLTIERFRAMIASMLEKLEAEAGRIEVTFPYFVNKTAPVSGVQSLLDYEVTLAGESRNGDTRLFLKVLVPVTSLCPCSKKISQYGAHNQRSHVTIDAELAADVPVEALIRIAEEEASCELWGLLKRPDEKFVTERAYENPKFVEDLVRDVAARLDADARIVAYVLEAENFESIHNHSAYALIERDKRHAA

SEQ ID NO: 5869 - protein, 209 aa, Burkholderia multivorans
  misc_feature (1)..(209): tr|A0A2S9MZT6|A0A2S9MZT6_9BURK GTP cyclohydrolase 1 OS= Burkholderia multivorans OX=87883 GN=folE PE=3 SV=1
MGKKTARSEPAASRPSREEAEDAVRVLLRWAGDDPTREGLIDTPARVVRAYEQFFAGYSIEPRDILARTFSEVDGYDEMIVLKDIRFESYCEHHMVPIIGRAHVAYLPNHRVVGISKLARLVDAFAKRLQIQEKMTVQIADTLFDVLQPKGVGVILEAAHQCISTRGVHKPGVEMVTSRMLGTFRTDPSTRREFLSIVANPSSVNLTNT

SEQ ID NO: 5870 - protein, 216 aa, Burkholderia novacaledonica
  misc_feature (1)..(216): tr|A0A2U3HYA3|A0A2U3HYA3_9BURK GTP cyclohydrolase 1 OS= Burkholderia novacaledonica OX=1544861 GN=folE PE=3 SV= 1
MSAPRKNHLSGSDIPADKADRPSREEAEAAVRVLLRWAGDDPRREGLLDTPGRVVRAYEEFFAGYTQNPHDILARTFSEVQGYDEMIVLKDIRFESYCEHHMVPIIGRAHVAYLPNERVVGISKLARLVDAFAKRLQIQEKMTAQIADTLNEVLQPLGVGVILEAAHQCMSTRGVHKAGVSMVTSRMLGSFRDDPSTRREFLSIVSNQNAFSVSNT

SEQ ID NO: 5871 - protein, 268 aa, Burkholderia novacaledonica
  misc_feature (1)..(268): tr|A0A2U3I3R2|A0A2U3I3R2_9BURK GTP cyclohydrolase FolE2 OS=Burkholderia novacaledonica OX=1544861 GN=folE2 PE= 3 SV=1
MNQMNPAFVMPDVQSTSDTRQIAIQRVGVKGVRHPLSVVTQSGVKPSVGVWNLDVHLPADQKGTHMSRFVALLEENRHPLDQHALRGLLAVMLSKLEAHSGRIEVTLPYFVMKTAPVSGVQSLLDYEVTFIAERRDGDTRMSMKVLVPVTSLCPCSKKISQYGAHNQRSHVTITAEVADEIAVEELIRIAEEEASCELWGLLKRPDEKFVTERAYDNPKFVEDLVRDIATRLNADERIVAYVLEAENFESIHNHSAYAVIERDKRRDA

SEQ ID NO: 5872 - protein, 243 aa, Burkholderia oklahomensis
  misc_feature (1)..(243): tr|A0A381IJA4|A0A381IJA4_9BURK GTP cyclohydrolase 1 OS= Burkholderia oklahomensis OX=342113 GN=folE PE=3 SV=1
MAKGKTASKTAAPTARKAASKATNKTASKQTTRAAAPSPAPAPVPASRPSRDEAEAAVRVLLRWAGDDPEREGLVDTPARVVRAYEEFFSGYALEPRDILARTFSEVDGYDEMIVLKDIRFESYCEHHMVPIIGRAHVAYLPHHRVVGISKLARLVDAFAKRLQIQEKMTVQIADTLFDVLQPKGVGVILEAAHQCISTRGIHKPGVEMVTSRMLGTFRTDPATRREFLSIVANPSSVNLTNT

SEQ ID NO: 5873 - protein, 293 aa, Burkholderia oklahomensis
  misc_feature (1)..(293): tr|A0A381IJH0|A0A381IJH0_9BURK GTP cyclohydrolase FolE2 OS=Burkholderia oklahomensis OX=342113 GN=folE2 PE=3 S V=1
MLHFRQVMRHMAMSCRVTLYGSNKMNLMNPEFVMPDVQSTIDTRQMPIQRVGVRAVRHPLTVRTAEGETQATVGTWNLDVHLPADQKGTHMSRFVALLEESDGPLTIDAFRAMLATMLEKLEAQAGRIEVSFPYFVNKTAPVSGVRSLLDYEVTLTGDVRGGAARVFAKVLVPVTSLCPCSKKISQYGAHNQRSHVTIDAELAADVPVEDLIRIAEEEASCELWGLLKRPDEKFVTERAYENPKFVEDLVRDVARRLDADARIVAYVLEAENFESIHNHSAYALIERDKRRAE

SEQ ID NO: 5874 - protein, 244 aa, Burkholderia plantarii
  misc_feature (1)..(244): tr|A0A0B6S5W1|A0A0B6S5W1_9BURK GTP cyclohydrolase I OS= Burkholderia plantarii OX=41899 GN=folE2 PE=4 SV=1
MGNLIDAPELTRAATDEGAPLSRIIRRRLESAGARFHANDNIAAYLRDGELETLQAEVAQGLESVLRSLVIDVDNDHNTRETAARVARMFVREVFAGRYEAAPAVTEFPNVERLDELLIVGPLRVRSACSHHLCPIMGRIWIGVLPSAASSLIGLSKYGRLVNWVMTRPQIQEEAVKQIADLLEARIAPDGLAVVLEAEHFCMHWRGTKDDQARMTNSVMRGKFLADASLRREFLSLLPEKSRG

SEQ ID NO: 5875 - protein, 268 aa, Burkholderia plantarii
  misc_feature (1)..(268): tr|A0A0B6SAA0|A0A0B6SAA0_9BURK GTP cyclohydrolase FolE2 OS=Burkholderia plantarii OX=41899 GN=folE2 PE=3 SV=1
MNQMNPGFAMPDVQSTVDTRQIPIQRVGVKAVRHPLTVRGAAGEIQPSVGTWNLDVHLPADQKGTHMSRFVALLEENDQPLTAGVFRGLLASMLVRLEARAGRIEVSFPYFVRKTAPVSGVKSLLDYQVTLAGDVRDGVTRLFLKVLVPVTSLCPCSKKISQYGAHNQRSHVTIDAELNADVPAEDLIRIAEEEASCELWGLLKRPDEKFVTERAYENPKFVEDLVRDVAQRLDADERIAAYVLEAENFESIHNHSAYALIERDKRIA

SEQ ID NO: 5876 - protein, 269 aa, Burkholderia pseudomallei
  misc_feature (1)..(269): sp|A3NMF5|GCH4_BURP6 GTP cyclohydrolase FolE2 OS=Burkho lderia pseudomallei (strain 668) OX=320373 GN=folE2 PE= 3 SV=1
MNLMNPEFAMPDVQSTVDTRQMPIQRVGVRAVRHPLTVRTAEGETQATVGTWNLDVHLPADQKGTHMSRFVALLEERGGPLTADAFRTMLATMLEKLEARAGRIEVSFPYFVNKTAPVSGVRSLLDYEVTLTGDVRDGLTRVFAKVLVPVTSLCPCSKKISQYGAHNQRSHVTIDAELAADVPVEDLIRIAEEEASCELWGLLKRPDEKFVTERAYENPKFVEDLVRDVARRLDADERIVAYVLEAENFESIHNHSAYALIERDKRRGA

SEQ ID NO: 5877 - protein, 293 aa, Burkholderia pseudomallei
  misc_feature (1)..(293): tr|A8ENW0|A8ENW0_BURPE GTP cyclohydrolase FolE2 OS=Burk holderia pseudomallei 406e OX=360118 GN=folE2 PE=3 SV=1
MLHFRQAMRHRAMSRRMTLQGSNKMNLMNPEFAMPDVQSTVDTRQMPIQRVGVRAVRHPLTVRTAEGETQATVGTWNLDVHLPADQKGTHMSRFVALLEERGGPLTADAFRTMLATMLEKLEARAGRIEVSFPYFVNKTAPVSGVRSLLDYEVTLTGDVRDGLTRVFAKVLVPVTSLCPCSKKISQYGAHNQRSHVTIDAELAADVPVEDLIRIAEEEASCELWGLLKRPDEKFVTERAYENPKFVEDLVRDVARRLDADERIVAYVLEAENFESIHNHSAYALIERDKRRGA

SEQ ID NO: 5878 - protein, 270 aa, Burkholderia pseudomultivorans
  misc_feature (1)..(270): tr|A0A132E9T7|A0A132E9T7_9BURK GTP cyclohydrolase FolE2 OS=Burkholderia pseudomultivorans OX=1207504 GN=folE2 PE=3 SV=1
MNQMNPAFVMPDVQSTVDTRQITIQRVGVKAVRHPLTVHTESGDVQPTVGLWNLDVRLPADQKGTHMSRFVALLEEHRAAPLTVERFRAMLASMLEKLEADAGRIEVTFPYFVNKTAPVSGVQSLLDYEVTLAGERRNGETRLFLKVLVPVTSLCPCSKKISQYGAHNQRSHVTIDAELAADLPVEALIRIAEEEASCELWGLLKRPDEKFVTERAYENPKFVEDLVRDVATRLDADERIVAYVLEAENFESIHNHSAYALIERDKRHAA

SEQ ID NO: 5879 - protein, 305 aa, Burkholderia pseudomultivorans
  misc_feature (1)..(305): tr|A0A132EQ69|A0A132EQ69_9BURK GTP cyclohydrolase FolE2 OS=Burkholderia pseudomultivorans OX=1207504 GN=folE2 PE=3 SV=1
MTAALPDISIADVAPAGGPLEWVGMQGIDLPVVVAEQGCARNVHARADVQVDLPAAHVKGIHMSRLYRLLDALGDGDALSPAGLRQALQAMIDSHRDCDTRSARLRLHFDLLARRPALVTDGLAGWKSYPVRLDAMLAGDVFTLRAQVTIVYSSTCPCSAALSRHWIEQAFVAAFGAEDRVEPAAVAAWLRRHATDATPHSQRSEAVVEVGIADDRATLGLLALIDRVEHALGTPVQTAVKRADEQAFAVLNGRNLMFVEDAARRVQAALDRVHADSRVRVRHLESLHPHDAVAWAASRSAGIAA

SEQ ID NO: 5880 - protein, 210 aa, Burkholderia puraquae
  misc_feature (1)..(210): tr|A0A1X1PMG6|A0A1X1PMG6_9BURK GTP cyclohydrolase 1 OS= Burkholderia puraquae OX=1904757 GN=folE PE=3 SV=1
MGKKKSARPEPAASRPSREEAEDAVRVLLRWAGDDPAREGLIDTPARVVRAYEQFFAGYEVEPRDILARTFSEVDGYDEMIVLKDIRFESYCEHHMVPIIGRAHVAYLPNHRVVGISKLARLVDAFAKRLQIQEKMTVQIADTLFDVLQPKGVGVILEAAHQCISTRGVHKPGVEMVTSRMLGTFRTDPSTRREFLSIVANPSSVNLTNT

SEQ ID NO: 5881 - protein, 308 aa, Burkholderia puraquae
  misc_feature (1)..(308): tr|A0A1X1P6Y5|A0A1X1P6Y5_9BURK GTP cyclohydrolase FolE2 OS=Burkholderia puraquae OX=1904757 GN=folE2 PE=3 SV=1
MNAPLPDISLTDAAPGGCPLEWVGMQGIDLPVAVAEPGCRRDVHARADVQVDLPAPHVKGIHMSRLYRLLDGFGDGAALSPAGLQRVLHAMVDSHCDCDTRSARLRLRFDLLARRAALVTDGLAGWKAYPVRIDATLAGSGFELRAQVTVVYSSTCPCSAALSRHWVEQAFLAAFGRDDRVEPAAVAAWLRRHATAATPHSQRSEAVVSVGLPADGATLGLIDLIDRIEHALGTPVQTAVKRADEQAFAVLNGGNLMFVEDAARRVRAALDGHGHHANPRVHVRHLESLHPHDAVAWAAPVREGVDAC

SEQ ID NO: 5882 - protein, 269 aa, Burkholderia pyrrocinia; identical to SEQ ID NO: 5847
  misc_feature (1)..(269): tr|A0A2Z5N3N2|A0A2Z5N3N2_BURPY GTP cyclohydrolase FolE2 OS=Burkholderia pyrrocinia OX=60550 GN=folE2 PE=3 SV=1

SEQ ID NO: 5883 - protein, 209 aa, Burkholderia pyrrocinia
  misc_feature (1)..(209): tr|A0A087NUB2|A0A087NUB2_BURPY GTP cyclohydrolase 1 OS= Burkholderia pyrrocinia OX=60550 GN=folE PE=3 SV=1
MGKKSARPEQAASRPSREEAEAAVRVLLRWAGDDPAREGLVDTPARVVRAYEQFFAGYAVEPRDILARTFSEVDGYDEMIVLKDIRFESYCEHHMVPIIGRAHVAYLPNHRVVGISKLARLVDAFAKRLQIQEKMTVQIADTLFDVLQPKGVGVILEAAHQCISTRGVHKPGVEMVTSRMLGSFRTDPSTRREFLSIVANPSSVNLTNT

SEQ ID NO: 5884 - protein, 269 aa, Burkholderia reimsis
  misc_feature (1)..(269): tr|A0A365QIF5|A0A365QIF5_9BURK GTP cyclohydrolase FolE2 OS=Burkholderia reimsis OX=2234132 GN=folE2 PE=3 SV=1
MNQMNPAFVMPDVQSTVDTRQIPIQRVGVKAVRHPLTVCTEGGDVQPTVGVWNLDVRLPADQKGTHMSRFVALLEENRAPLTVERFRAMLASMLEKLEAEAGRIEVTFPYFVNKTAPVSGVQSLLDYEVTLAGESRNGDTRLFLKVLVPVTSLCPCSKKISQYGAHNQRSHVTIDAELAADLPVEALIRIAEEEASCELWGLLKRPDEKFVTERAYENPKFVEDLVRDVAQRLDADERVVAYVLEAENFESIHNHSAYALIERDKRQAA

SEQ ID NO: 5885 - protein, 306 aa, Burkholderia reimsis
  misc_feature (1)..(306): tr|A0A365QWT6|A0A365QWT6_9BURK GTP cyclohydrolase FolE2 OS=Burkholderia reimsis OX=2234132 GN=folE2 PE=3 SV=1
MNAPLPDISLTDAAPGRRPLEWVGMQGIDLPVAVAEPGCRRDVHARADVQVDLPVPHVKGIHMSRLYRLLDGLGDGDALSPAGLRPVLQAMVDSHRDCDTRRARLRLRFDLLARRAALVTDGLAGWKAYPVRIDATLTDVGFEVRAQVTVAYSSTCPCSAALSRHWVEQAFLAAFGRDDRVEPAAVAAWLKRHATAATPHSQRSEAVVSAGLPADGATLGLIDLIDRVEHALGTPVQTAVKRADEQAFAVLNGGNLMFVEDAARRVQDALDGRHAHPRVHVRHLESLHPHDAVAWAAPVREGADAC

SEQ ID NO: 5886 - protein, 211 aa, Burkholderia seminalis
  misc_feature (1)..(211): tr|A0A103KH31|A0A103KH31_9BURK GTP cyclohydrolase 1 OS= Burkholderia seminalis OX=488731 GN=folE PE=3 SV=1
MGKGKKTVRPEPAVTRPSREEAEDAVRVLLRWAGDDPAREGLIDTPARVVRAYEQFFAGYALEPRDILARTFSEVDGYDEMIVLKDIRFESYCEHHMVPIIGRAHVAYLPNHRVVGISKLARLVDAFAKRLQIQEKMTVQIADTLFDVLQPKGVGVILEAAHQCISTRGVHKPGVEMVTSRMLGTFRTDPSTRREFLSIVANPSSVNLTNT

SEQ ID NO: 5887 - protein, 316 aa, Burkholderia seminalis
  misc_feature (1)..(316): tr|A0A118FR61|A0A118FR61_9BURK GTP cyclohydrolase FolE2 OS=Burkholderia seminalis OX=488731 GN=folE2 PE=3 SV=1
MDKARHRNPSMNAALPDVSLTDAAPGRRPLEWVGMQGIDLPVAVAEPGCRRDVHARADVQVDLPAPHVKGIHMSRLYGLLDRLADGEALSPAGLGRVLRAMVDSHRDCDTRSARVRLRFDLLARRPALVTEGLAGWKAYPVRIDATLAGEAFELRAQVTVAYSSTCPCSAALSRHWVEQAFLAAFGREDRVAPAAVAAWLKRHASAATPHSQRSEAVVGVALPAAGATLGLIDLIDRVEHALGTPVQTAVKRADEQAFAVLNGGNLMFVEDAARRVQAALDGRHANPCVQVRHLESLHPHDAVAWAAPMAEGAGAC

SEQ ID NO: 5888 - protein, 269 aa, Burkholderia singularis
  misc_feature (1)..(269): tr|A0A238H2R3|A0A238H2R3_9BURK GTP cyclohydrolase FolE2 OS=Burkholderia singularis OX=1503053 GN=folE2 PE=3 SV =1
MNQMNPEFAMPDVQSTVDTRQLPIQRVGVRAVRHPLTVRTATGDTQASVGMWNLDVHLPADQKGTHMSRFVALLEANDAPLTADSFRAMLATMLEKLEAQAGRIEVSFPYFVNKTAPVSGVRSLLDYEVTLTGDMRGGVTRLFAKVLVPVTSLCPCSKQISQYGAHNQRSHVTIDAELAADVPVEELIRIAEEEASCELWGLLKRPDEKFVTERAYENPKFVEDLVRDIAKRLDADERIVAYVLEAENFESIHNHSAYALIERDKRLLA

SEQ ID NO: 5889 - protein, 269 aa, Burkholderia singularis
  misc_feature (1)..(269): tr|A0A103E5I4|A0A103E5I4_9BURK GTP cyclohydrolase FolE2 OS=Burkholderia singularis OX=1503053 GN=folE2 PE=3 SV =1
MNQMNPEFAMPDVQSTVDTRQLPIQRVGVRAVRHPLTVRTATGDTQASVGMWNLDVHLPADQKGTHMSRFVALLEANDAPLTADSFRAMLATMLEKLEAQAGRIEVSFPYFVNKTAPVSGVRSLLDYEVTLTGDVRGGVTRLFAKVLVPVTSLCPCSKQISQYGAHNQRSHVTIDAELAADVPVEELIRIAEEEASCELWGLLKRPDEKFVTERAYENPKFVEDLVRDIAKRLDADERIVAYVLEAENFESIHNHSAYALIERDKRLPA

SEQ ID NO: 5890 - protein, 268 aa, Burkholderia sp.
  misc_feature (1)..(268): tr|A0A1N6LRS6|A0A1N6LRS6_9BURK GTP cyclohydrolase FolE2 OS=Burkholderia sp. GAS332 OX=1882750 GN=folE2 PE=3 SV =1
MNQMNPAFVMPDVQSTPDTRQIPIQRVGVKAVRHPLTVRTQGGEVQPSVGTWNLDVHLPADQKGTHMSRFVALLEENKAPLEAATFRRMLAAMLEKLEAEAGRIEVSFPYFVNKTAPVSGVQSLLDYEVTLTGETRNGATRLFLKVLVPVTSLCPCSKKISQYGAHNQRSHVTINAELAGDVAVEELVRIAEEEASCELWGLLKRPDEKFVTERAYENPKFVEDLVRDVAQRLNADERIVAYVLEAENFESIHNHSAYAVIERDKRAA

SEQ ID NO: 5891 - protein, 209 aa, Burkholderia sp.; identical to SEQ ID NO: 5851
  misc_feature (1)..(209): tr|A0A3P0S935|A0A3P0S935_9BURK GTP cyclohydrolase 1 OS= Burkholderia sp. Bp9004 OX=2184559 GN=folE PE=3 SV=1

SEQ ID NO: 5892 - protein, 306 aa, Burkholderia stabilis
  misc_feature (1)..(306): tr|A0A498RUX0|A0A498RUX0_9BURK GTP cyclohydrolase FolE2 OS=Burkholderia stabilis OX=95485 GN=folE2_2 PE=3 SV=1
MTAALPDISLTDAVPGHRPLEWVGMQGIDLPVVVAEPGCRRHVHARADVHVDLPAPQVKGIHMSRLYRLLDGLGDGDALSPAGLRRMLRAMIDSHRDCESRSARLRLHFDLLARRPALVTDGLAGWKSYPVRIDATLAGDAFALRAQVTVAYSSTCPCSAALSRHWVEQAFLGAFGGEERVSPAAVAAWLQQHATAATPHSQRSEAVVSVGLAPEDAALRLLDLIDRIEHALGTPVQTAVKRADEQAFAVLNGGNLMFVEDAARRVQAALDGRYANPGVHVRHLESLHPHDAVAWAAPVREGADAC

SEQ ID NO: 5893 - protein, 211 aa, Burkholderia stabilis
  misc_feature (1)..(211): tr|A0A1D7ZNB9|A0A1D7ZNB9_9BURK GTP cyclohydrolase 1 OS= Burkholderia stabilis OX=95485 GN=folE PE=3 SV=1
MGKKKTVRPEPAAASRPSREEAEDAVRVLLRWAGDDPAREGLIDTPARVVRAYEQFFAGYALEPRDILARTFSEVDGYDEMIVLKDIRFESYCEHHMVPIIGRAHVAYLPNHRVVGISKLARLVDAFAKRLQIQEKMTVQIADTLFDVLQPKGVGVILEAAHQCISTRGVHKPGVEMVTSRMLGTFRTDPSTRREFLSIVANPSSVNLTNT

SEQ ID NO: 5894 - protein, 209 aa, Burkholderia stagnalis
  misc_feature (1)..(209): tr|A0A125KKF9|A0A125KKF9_9BURK GTP cyclohydrolase 1 OS= Burkholderia stagnalis OX=1503054 GN=folE PE=3 SV=1
MGKKSSRPEPAASRPSRSEAEEAVRVLLRWAGDDPAREGLVDTPARVVRAYEEFFAGYAIEPRDILARTFSEVDGYDEMIVLKDIRFESYCEHHMVPIIGRAHVAYLPNHRVVGISKLARLVDAFAKRLQIQEKMTVQIADTLFDVLQPKGVGVILEAAHQCISTRGIHKPGVEMVTSRMLGTFRTDPSTRREFLSIVANPSSVNLTNT

SEQ ID NO: 5895 - protein, 269 aa, Burkholderia stagnalis
  misc_feature (1)..(269): tr|A0A119C8R7|A0A119C8R7_9BURK GTP cyclohydrolase FolE2 OS=Burkholderia stagnalis OX=1503054 GN=folE2 PE=3 SV= 1
MNQMNPAFVMPDVQSTVDTRQIPIQRVGVKAVRHPLTVRTESGDVQPTVGVWNLDVHLPADQKGTHMSRFVALLEEHRAPLTTERFRAMLAAMLEKLEAEAGRIEVTFPYFVNKTAPVSGVQSLLDYEVTLAGDTRGGATRLFMKVLVPVTSLCPCSKKISQYGAHNQRSHVTIDAELAADVPVEALIRMAEEEASCELWGLLKRPDEKFVTERAYENPKFVEDLVRDVAQRLDRDERIVAYVLEAENFESIHNHSAYALIERDKRHAA

SEQ ID NO: 5896 - protein, 316 aa, Burkholderia territorii
  misc_feature (1)..(316): tr|A0A108F426|A0A108F426_9BURK GTP cyclohydrolase FolE2 OS=Burkholderia territorii OX=1503055 GN=folE2 PE=3 SV =1
METALHRIPDMNAALPDISLTDAAPGHRPLEWVGMQNVDLPVVVAEPGCRRDVHARADVQVDLPAPRVKGIHMSRLYGLLDRLADGEALSPAGLQRMLRAMIDSHHDCATRSARVRLRFDLLARRAALVTEGLAGWKAYPVQIDATLAGDAFALRAQTTIVYSSTCPCSAALSRHWVEQAFLTAFGREDRVEPAAVAAWVKRHATAATPHSQRSEAVVDVALPADGATLGLIDLVDRVERALGTPVQTAVKRADEQAFAVLNGENLMFVEDAARRVQAALEDRHASPRVRVRHLESLHPHDAVAWAAPVREGGDAC

SEQ ID NO: 5897 - protein, 209 aa, Burkholderia territorii
  misc_feature (1)..(209): tr|A0A124KQA6|A0A124KQA6_9BURK GTP cyclohydrolase 1 OS= Burkholderia territorii OX=1503055 GN=folE PE=3 SV=1
MGKKSARPEPAASRPSREEAEEAVRVLLRWAGDDPAREGLLDTPARVVRAYEEFFAGYALEPRDILARTFSEVDGYDEMIVLKDIRFESYCEHHMVPIIGRAHVAYLPNHRVVGISKLARLVDAFAKRLQIQEKMTVQIADTLFDVLQPKGVGVILEAAHQCISTRGVHKPGVEMVTSRMLGTFRTDPSTRREFLSIVANPSSVNLTNT

SEQ ID NO: 5898 - protein, 269 aa, Burkholderia thailandensis
  misc_feature (1)..(269): sp|Q2T7N4|GCH4_BURTA GTP cyclohydrolase FolE2 OS=Burkho lderia thailandensis (strain ATCC 700388 / DSM 13276 / CIP 106301 / E264) OX=271848 GN=folE2 PE=3 SV=2
MNLMNPEFVMPDVQSTVDTRQMPIQRVGVRAVRHPLTVRTAEGETQATVGTWNLDVHLPADQKGTHMSRFVALLEESGGPLTADAFRAMLATMLEKLEAQAGRIEVSFPYFVNKTAPVSGVRSLLDYEVTLTGDVRDGLTRVFAKVLVPVTSLCPCSKKISQYGAHNQRSHVTIDAELAADVPVEDLIRIAEEEASCELWGLLKRPDEKFVTERAYENPKFVEDLVRDVARRLDADERIVAYVLEAENFESIHNHSAYALIERDKRRRA

SEQ ID NO: 5899 - protein, 242 aa, Burkholderia thailandensis
  misc_feature (1)..(242): tr|A0A2N8R3G5|A0A2N8R3G5_BURTH GTP cyclohydrolase 1 OS= Burkholderia thailandensis OX=57975 GN=folE PE=3 SV=1
MAKGNTASKAAAPAAHPAASRTSNEAGKAASKPAARAAARTSAPVNRPSRDEAEAAVRVLLRWAGDDPEREGLVDTPARVVRAYEEFFSGYTLEPRDILARTFSEVDGYDEMIVLKDIRFESYCEHHMVPIIGRAHVAYLPNHRVVGISKLARLVDAFAKRLQIQEKMTVQIADTLFDVLQPKGVGVILEAAHQCISTRGIHKPGVEMVTSRMLGTFRTDPATRREFLSIVANPSSVNLTNT

SEQ ID NO: 5900 - protein, 269 aa, Burkholderia ubonensis
  misc_feature (1)..(269): tr|A0A118HL37|A0A118HL37_9BURK GTP cyclohydrolase FolE2 OS=Burkholderia ubonensis OX=101571 GN=folE2 PE=3 SV=1
MNQMNPAFVMPDVQSTVDTRQIPIQRVGVKAVRHPLTVRTESGDIQPSVGLWNLDVHLPADQKGTHMSRFVALLEEHRAPLTTGLFRTMLASMLEKLEAEAGRIEVTFPYFVNKTAPVSGVQSLLDYEVTLAGESRGGVTRLFLKVLVPVTSLCPCSKKISQYGAHNQRSHVTIDAELAADVPVEALIRMAEEEASCELWGLLKRPDEKFVTERAYENPKFVEDLVRDVAQRLDADERIVAYVLEAENFESIHNHSAYALIERDKRLAA

SEQ ID NO: 5901 - protein, 209 aa, Burkholderia ubonensis
  misc_feature (1)..(209): tr|A0A108E7C7|A0A108E7C7_9BURK GTP cyclohydrolase 1 OS= Burkholderia ubonensis OX=101571 GN=folE PE=3 SV=1
MGKKSSRPEPAASRPSRSEAEEAVRVLLRWAGDDPAREGLVDTPARVVRAYEEFFSGYAIEPRDILARTFSEVDGYDEMIVLKDIRFESYCEHHMVPIIGRAHVAYLPNHRVVGISKLARLVDAFAKRLQIQEKMTVQIADTLFDVLQPKGVGVILEAAHQCISTRGIHKPGVEMVTSRMLGTFRTDPSTRREFLSIVANPSSVNLTNT

SEQ ID NO: 5902 - protein, 269 aa, Burkholderia vietnamiensis
  misc_feature (1)..(269): sp|A4JLT5|GCH4_BURVG GTP cyclohydrolase FolE2 OS=Burkho lderia vietnamiensis (strain G4 / LMG 22486) OX=269482 GN=folE2 PE=3 SV=1
MNQMNPAFVMPDVQSTVDTRQIPIQRVGVKAVRHPLTVCTESGDVQPSVGVWNLDVRLPADQKGTHMSRFVALLEENRAPLTVERFRAMLASMLEKLEAQAGRIEVTFPYFVNKTAPVSGVQSLLDYEVTLAGESRDGHTRVFLKVLVPVTSLCPCSKKISQYGAHNQRSHVTIDAELAGDLPVEALIRIAEEEASCELWGLLKRPDEKFVTERAYENPKFVEDLVRDVAQRLDADERVIAYVLEAENFESIHNHSAYALIERDKRLAA

SEQ ID NO: 5903 - protein, 269 aa, Burkholderia vietnamiensis; identical to SEQ ID NO: 5902
  misc_feature (1)..(269): tr|A0A132D6Q3|A0A132D6Q3_BURVI GTP cyclohydrolase FolE2 OS=Burkholderia vietnamiensis OX=60552 GN=folE2 PE=3 S V=1

SEQ ID NO: 5904 - protein, 268 aa, Burkholderiaceae bacterium
  misc_feature (1)..(268): tr|A0A0F0DBC2|A0A0F0DBC2_9BURK GTP cyclohydrolase FolE2 OS=Burkholderiaceae bacterium 26 OX=1619951 GN=folE2 P E=3 SV=1
MNDMNPAFAMPDVQSSHDTRQIPIQRVGVRGVRYPMSLQTPSGVQNTVGTYNLDVHLPADQKGTHMSRFVALLEEEREPLNLAQFQLLLEKMLEKLEADAGRIEVHFPYFVSKTAPVSGVQSLMDYEVTMIGEVRDGHTTVRVKALVPVTSLCPCSKKISQYGAHNQRSHITIDAELAADTPVESLIRMAEEEASCELWGLLKRPDEKFVTERAYENPKFVEDLVRDIAMRLNQDDRIVAYTLEAENFESIHNHSAYALIERDKRTDK

SEQ ID NO: 5905 - protein, 267 aa, Burkholderiaceae bacterium
  misc_feature (1)..(267): tr|A0A522L2Q3|A0A522L2Q3_9BURK GTP cyclohydrolase FolE2 OS=Burkholderiaceae bacterium OX=2030806 GN=folE2 PE=3 SV=1
MNSLIDSVVVMPDVQSSVDTRHMPIQRVGVRGVRHPMLVAAAGQPQSTIAMWELTVALSEQEKGTHMSRFVALLEQYRATPMTPALFCAMARDMLSLLHSDRGDISASFPYFINKAAPVSGVTSLMDYEVTWTARAQQDGVAEFELGLVVPVTSLCPCSKAISEYGAHNQRSHVSVNVVFDSSAGIDLDALIGMVEKQASCELWGLLKRPDEKYVTEHAYENPKFVEDLVRDVAVRVKAMAGVQRFHIEAENFESIHNHSAYAVVEG

SEQ ID NO: 5906 - protein, 193 aa, Burkholderiales bacterium
  misc_feature (1)..(193): tr|A0A1Q3YQF4|A0A1Q3YQF4_9BURK GTP cyclohydrolase 1 OS= Burkholderiales bacterium 70-64 OX=1895733 GN=folE PE=3 SV=1
MDDPPDADRPFDASDWRRLLRSLHEDPDRPGLHETPMRVARAWAHWTSGYAQDPAEILKVFQDGAEEYNELIVVRGIPVYSHCEHHLAPFFGTATVGYVPNGRIVGLSKLTRLVDCYAKRLQVQERLTQQVAHALMTHLEPTAVGVVVRCRHLCMESRGIRAIGEETVTSAMLGELLTNLGMRTELLALERTR

SEQ ID NO: 5907 - protein, 181 aa, Burkholderiales bacterium
  misc_feature (1)..(181): tr|A0A1Q3XHK1|A0A1Q3XHK1_9BURK GTP cyclohydrolase 1 OS= Burkholderiales bacterium 67-32 OX=1895729 GN=folE PE=3 SV=1
MSLEQNYTSILEQLGEDPGREGLRDTPKRAAKAMKYLCQGYTQNLDEIVNGALFSSDTNEMVLVKNIELYSLCEHHLLPFIGKAHVAYLPNGKVLGLSKVARIVDMYARRLQIQENLCLQIAEAVQKVTDALGVAVVIEAQHMCMMMRGVEKQNSSMVSSVMLGAFRENPSTRAEFLELIR

SEQ ID NO: 5908 - protein, 221 aa, Buttiauxella agrestis
  misc_feature (1)..(221): tr|A0A085G995|A0A085G995_9ENTR GTP cyclohydrolase 1 OS= Buttiauxella agrestis ATCC 33320 OX=1006004 GN=folE PE= 3 SV=1
MSSLSPEAALVHEALVARGLETPLRPPVRELDNETRKREIAEHMTEIMQLLNLDLSDDSLMETPHRIAKMYVDEIFSGLDYANFPKITVIENKMKVDEMVTVRNITLTSTCEHHFVTIDGKATVSYLPKDTVIGLSKINRIVQFFAQRPQVQERLTQQILIALQTLLGTNNVAVSIDAVHYCVKARGVQDATSATTTTSLGGLFKSSQNTRQEFLRAVRHN

SEQ ID NO: 5909 - protein, 221 aa, Buttiauxella agrestis; identical to SEQ ID NO: 5908
  misc_feature (1)..(221): tr|A0A381C558|A0A381C558_9ENTR GTP cyclohydrolase 1 OS= Buttiauxella agrestis OX=82977 GN=folE PE=3 SV=1

SEQ ID NO: 5910 - protein, 221 aa, Buttiauxella brennerae
  misc_feature (1)..(221): tr|A0A1B7IN48|A0A1B7IN48_9ENTR GTP cyclohydrolase 1 OS= Buttiauxella brennerae ATCC 51605 OX=1354251 GN=folE PE =3 SV=1
MSSLSPEAALVHEALVARGLETPLRPQLRELDNETRKREIAGHMTEIMQLLNLDLSDDSLMETPHRIAKMYVDEIFSGLDYANFPKITVIENKMKVDEMVTVRNITLTSTCEHHFVTIDGKATVSYLPKDTVIGLSKINRIVQFFAQRPQVQERLTQQILIALQTLLGTNNVAVSIDAVHYCVKARGVQDATSATTTTSLGGLFKSSQNTRQEFLRAVRHN

SEQ ID NO: 5911 - protein, 221 aa, Buttiauxella gaviniae; identical to SEQ ID NO: 5910
  misc_feature (1)..(221): tr|A0A1B7I4V8|A0A1B7I4V8_9ENTR GTP cyclohydrolase 1 OS= Buttiauxella gaviniae ATCC 51604 OX=1354253 GN=folE PE= 3 SV=1

SEQ ID NO: 5912 - protein, 221 aa, Buttiauxella izardii
  misc_feature (1)..(221): tr|A0A3A5JMJ8|A0A3A5JMJ8_9ENTR GTP cyclohydrolase 1 OS= Buttiauxella izardii OX=82991 GN=folE PE=3 SV=1
MTSLSPEATLVHEALVARGLETPLRPPVRELDNETRKRQIAEHMTEIMQLLNLDLSDDSLMETPHRIAKMYVDEIFSGLDYANFPKITVIENKMKVDEMVTVRNITLTSTCEHHFVTIDGKATVSYLPKDTVIGLSKINRIVQFFAQRPQVQERLTQQILIALQTLLGTNNVAVSIDAVHYCVKARGVQDATSATTTTSLGGLFKSSQNTRQEFLRAVRHS

SEQ ID NO: 5913 - protein, 221 aa, Buttiauxella noackiae
  misc_feature (1)..(221): tr|A0A1B7HPU7|A0A1B7HPU7_9ENTR GTP cyclohydrolase 1 OS= Buttiauxella noackiae ATCC 51607 OX=1354255 GN=folE PE= 3 SV=1
MSSLRPEAALVHEALVARGLETPLRPQLRELDNETRKREIAGHMTEIMQLLNLDLSDDSLMETPHRIAKMYVDEIFSGLDYANFPKITVIENKMKVDEMVTVRNITLTSTCEHHFVTIDGKATVSYLPKDTVIGLSKINRIVQFFAQRPQVQERLTQQILIALQTLLGTNNVAVSIDAVHYCVKARGVQDATSATTTTSLGGLFKSSQNTRQEFLRAVRHN

SEQ ID NO: 5914 - protein, 221 aa, Buttiauxella sp.; identical to SEQ ID NO: 5910
  misc_feature (1)..(221): tr|A0A4R8F3T1|A0A4R8F3T1_9ENTR GTP cyclohydrolase 1 OS= Buttiauxella sp. BIGb0552 OX=2485120 GN=folE PE=3 SV=1

SEQ ID NO: 5915 - protein, 221 aa, Buttiauxella sp.
  misc_feature (1)..(221): tr|A0A4P5QB62|A0A4P5QB62_9ENTR GTP cyclohydrolase 1 OS= Buttiauxella sp. A111 OX=2563088 GN=folE PE=3 SV=1
MPSLSPEAALVHEALVARGLETPLRPQLRELDNETRKRQIAEHMTEIMQLLNLDLSDDSLMETPHRIAKMYVDEIFSGLDYANFPKITVIENKMKVDEMVTVRNITLTSTCEHHFVTIDGKATVSYLPKDTVIGLSKINRIVQFFAQRPQVQERLTQQILIALQTLLGTNNVAVSIDAVHYCVKARGVQDATSATTTTSLGGLFKSSQNTRQEFLRAVRHN

SEQ ID NO: 5916 - protein, 221 aa, Buttiauxella warmboldiae
  misc_feature (1)..(221): tr|A0A3N5DSQ1|A0A3N5DSQ1_9ENTR GTP cyclohydrolase 1 OS= Buttiauxella warmboldiae OX=82993 GN=folE PE=3 SV=1
MSSLSPEAALVHEALVARGLETPLRPPLRELDNETRKRQIAEHMTEIMQLLNLDLSDDSLMETPHRIAKMYVDEIFSGLDYANFPKITVIENKMKVDEMVTVRNITLTSTCEHHFVTIDGKATVSYLPKDTVIGLSKINRIVQFFAQRPQVQERLTQQILIALQTLLGTNNVAVSIDAVHYCVKARGVQDATSATTTTSLGGLFKSSQNTRQEFLRAVRHN

SEQ ID NO: 5917 - protein, 186 aa, Butyribacterium methylotrophicum
  misc_feature (1)..(186): tr|A0A1E7S4T0|A0A1E7S4T0_BUTME GTP cyclohydrolase 1 OS= Butyribacterium methylotrophicum OX=1487 GN=folE PE=3 S V=1
MNKEKIMEAVTMLIEAIGEDPQREGLVDTPDRIARMYEEIFAGIGQTAEEHLSKSFTIESNDLVIERDIPFYSMCEHHFLPFYGKAHIAYVPNGKVAGLSKLVRTVDVYARKPQLQEKLTSEIGSAIMEYLDAQGVMVIIEAEHLCMNMRGVKRPGTKTVTAMSDGILKTDASLKNDVYNLLGIRA

SEQ ID NO: 5918 - protein, 192 aa, Butyricicoccus porcorum
  misc_feature (1)..(192): tr|A0A252F705|A0A252F705_9CLOT GTP cyclohydrolase 1 OS= Butyricicoccus porcorum OX=1945634 GN=folE PE=3 SV=1
MAIDTNAIKEYIRGILIALGDDPDREGLKDTPDRVARMYSEVFEGMNYTNEEIAQMFDKTFEDEMDFASDSKDLVIVRDIQLFSYCEHHIALMYDMTATVAYMPNGKVIGLSKIARIADMVSKRLQLQERIGSDIAQIMQIVTGSEDVAVLIEGSHSCMTARGIRQANARTTTTTLRGRFRTDSDLQMRLYR

SEQ ID NO: 5919 - protein, 208 aa, Butyricimonas faecalis
  misc_feature (1)..(208): tr|A0A3Q9ITB6|A0A3Q9ITB6_9BACT GTP cyclohydrolase 1 OS= Butyricimonas faecalis OX=2093856 GN=folE PE=3 SV=1
MKYTELDDNEEFYRKVEYYNKARIEKLSYHYKEILTLLGEDPEREGLVKTPYRVAKAMQFMTKGYTENPEEILRSALFKEDYRQMVIVKDIEIYSLCEHHMLPFIGHAHVAYIPNGYITGLSKIARVVEAFSRRLQVQERLTNDIKNCIQNTLNPLGVAVVIEAQHMCMMMRGVQKQNSVTTTSDFSGAFEKLATREEFIRLISNKFH

SEQ ID NO: 5920 - protein, 208 aa, Butyricimonas sp.
  misc_feature (1)..(208): tr|A0A1Y3VT59|A0A1Y3VT59_9BACT GTP cyclohydrolase 1 OS= Butyricimonas sp. An62 OX=1965649 GN=folE PE=3 SV=1
MKYTELDDNEEFYRKVEYYNKARTEKLSYHYKEILKLLGEDPEREGLVKTPYRVAKAMQFMTRGYTENPEEILRSALFKEDYRQMVIVKDIEIYSLCEHHMLPFIGHAHVAYIPNGYITGLSKIARVVEAFSRRLQVQERLTNDIKNCIQNTLNPLGVAVVIEAQHMCMMMRGVQKQNSVTTTSDFSGAFEKLATREEFIRLISNKFH

SEQ ID NO: 5921 - protein, 208 aa, Butyricimonas sp.
  misc_feature (1)..(208): tr|A0A3D2DQM6|A0A3D2DQM6_9BACT GTP cyclohydrolase 1 OS= Butyricimonas sp. OX=1969738 GN=folE PE=3 SV=1
MKYTELDDNEEFYRKVEYYNKARTEKLSYHYKEILKLLGEDPEREGLVKTPYRVAKAMQFMTRGYTESPEEILRSALFKEDYRQMVIVKDIEIYSLCEHHMLPFIGHAHVAYIPNGYITGLSKIARVVEAFSRRLQVQERLTNDIKNCIQNTLNPLGVAVVIEAQHMCMMMRGVQKQNSVTTTSDFSGAFEKLATREEFIRLISNKFH

SEQ ID NO: 5922 - protein, 208 aa, Butyricimonas synergistica; identical to SEQ ID NO: 5920
  misc_feature (1)..(208): tr|A0A1U7LB44|A0A1U7LB44_9BACT GTP cyclohydrolase 1 OS= Butyricimonas synergistica OX=544644 GN=folE PE=3 SV=1

SEQ ID NO: 5923 - protein, 208 aa, Butyricimonas virosa; identical to SEQ ID NO: 5921
  misc_feature (1)..(208): tr|A0A415QCG0|A0A415QCG0_9BACT GTP cyclohydrolase 1 OS= Butyricimonas virosa OX=544645 GN=folE PE=3 SV=1

SEQ ID NO: 5924 - protein, 208 aa, Butyricimonas virosa
  misc_feature (1)..(208): tr|A0A412WWP7|A0A412WWP7_9BACT GTP cyclohydrolase 1 OS= Butyricimonas virosa OX=544645 GN=folE PE=3 SV=1
MKYTELADNEEFYHKVEYYNKARTEKLSYHYKEILKLLGEDPEREGLVKTPYRVAKAMQFMTRGYTESPEEILRSALFKEDYRQMVIVKDIEIYSLCEHHMLPFIGHAHVAYIPNGYITGLSKIARVVEAFSRRLQVQERLTNDIKNCIQNTLNPLGVAVVIEAQHMCMMMRGVQKQNSVTTTSDFSGAFEKLATREEFIRLISNKFH

SEQ ID NO: 5925 - protein, 200 aa, Butyrivibrio crossotus
  misc_feature (1)..(200): tr|R5M029|R5M029_9FIRM GTP cyclohydrolase 1 OS=Butyrivi brio crossotus CAG:259 OX=1263062 GN=folE PE=3 SV=1
MAIDREAIKKHIRGILIALGDDPDREGLKDTPERVAKMYEEVFEGMNYSNKEIAEMFNKTFEQGLDTITDSKDMVLVKDIDIFSYCEHHLALMYDVKVSVGYIPNGKVIGLSKIARIADMVGKRLQLQEKIGSDIAEIMETVTESEDIAVYIEGCHSCMTARGIKKNNSKTVTTTFRGEFSKDKLLQMKFLMGINNRPAD

SEQ ID NO: 5926 - protein, 200 aa, Butyrivibrio crossotus
  misc_feature (1)..(200): tr|D4RWH4|D4RWH4_9FIRM GTP cyclohydrolase 1 OS=Butyrivi brio crossotus DSM 2876 OX=511680 GN=folE PE=3 SV=1
MAIDREAIKKHIRGILIALGDDPDREGLKDTPERVAKMYEEVFEGMNYSNKEIAEMFNKTFEQGLDTITDSKDMVLVKDIDIFSYCEHHLALMYDVKVSVAYIPNGKVIGLSKIARIADMVGKRLQLQEKIGSDIAEIMETVTESEDIAVYIEGCHSCMTARGIKKNNSKTVTTTFRGEFSKDKLLQMKFLMGINNRPAD

SEQ ID NO: 5927 - protein, 184 aa, Butyrivibrio fibrisolvens
  misc_feature (1)..(184): tr|A0A1H9TN14|A0A1H9TN14_BUTFI GTP cyclohydrolase 1 OS= Butyrivibrio fibrisolvens OX=831 GN=folE PE=3 SV=1
MDDNKIKEGVRLILEGIGEDINREGLLETPDRIARMYHELAAGYTEDAATHLAKRFHVDTSDIVVEKDIPLYSFCEHHMLPFYGTAAVAYIPDGEVVGLSKIARTVDVFAKRFQVQERLTSQIADAFETELHPKGVMVLVEAEHMCMTMRGIRKPGSKTVTVVTRGAFATDKNLQDTFYRMIGR

SEQ ID NO: 5928 - protein, 184 aa, Butyrivibrio fibrisolvens
  misc_feature (1)..(184): tr|A0A1M5Z348|A0A1M5Z348_BUTFI GTP cyclohydrolase 1 OS= Butyrivibrio fibrisolvens DSM 3071 OX=1121131 GN=folE P E=3 SV=1
MDDNKIKEGVRLILEGIGEDINREGLLETPDRIARMYHELAAGYSEDPAEHLAKRFHVETSDMVVEKDIPLYSFCEHHMLPFYGTATVAYIPDGEVVGLSKIARTVDCFAKRFQVQERLTAQIADAFVKELHPKGVMVLVEAEHMCMTMRGIRKPGTKTVTVVTRGDFENNKDLQDTFYRMIGR

SEQ ID NO: 5929 - protein, 184 aa, Butyrivibrio hungatei
  misc_feature (1)..(184): tr|A0A1G5E8N2|A0A1G5E8N2_9FIRM GTP cyclohydrolase 1 OS= Butyrivibrio hungatei OX=185008 GN=folE PE=3 SV=1
MINKEKIEKAIKLLLEGIGEDATRPGLIETPERVARMYEEILSGYDDSAERHLEKTFPVTESEMILEKDIQFYSLCEHHLLPFFGKAHIAYIPVDEVVGISKLARTVEVFARRLQIQERMTGQIADAIAKNLKTKGVMVLVEAEHMCVSMRGIKKGGSKTVTIATRGCFENDQNLRETFFKLIS

SEQ ID NO: 5930 - protein, 200 aa, Butyrivibrio sp.
  misc_feature (1)..(200): tr|A0A3C0J7B1|A0A3C0J7B1_9FIRM GTP cyclohydrolase 1 OS= Butyrivibrio sp. OX=28121 GN=folE PE=3 SV=1
MAIDREAIKEHIRGILIALGDDPDREGLKDTPERVAKMYEEVFEGMNYSNKEIAEMFNKTFEQGLDTVTDSKDMVLVKDIDIFSYCEHHLALMYDVKVSVAYIPNGKVIGLSKIARIADMVGKRLQLQEKIGSDIAEIMETVTESEDIAVYIEGCHSCMTARGIKKNNSKTVTTTFRGEFSKDKLLQMKFLMGINNRPAD

SEQ ID NO: 5931 - protein, 184 aa, Butyrivibrio sp.
  misc_feature (1)..(184): tr|A0A1I7JS02|A0A1I7JS02_9FIRM GTP cyclohydrolase 1 OS= Butyrivibrio sp. M55 OX=1855323 GN=folE PE=3 SV=1
MINKEKIEQAVKLLLEGMGEDATRPGLVETPERVARMYEEILSGYGDCAERHLSKTFPVAESGMILEKDIQFYSLCEHHLLPFFGKVHIAYVPVDEVVGISKLARTVEVFARRLQIQEQMTGQIADAIEKNLKTKGVMVLVEAEHMCVSMRGIKKSGSKTVTIASRGCFENDQNLRETFFKLIS

SEQ ID NO: 5932 - protein, 207 aa, Bythopirellula goksoyri
  misc_feature (1)..(207): tr|A0A5B9Q6J3|A0A5B9Q6J3_9PLAN GTP cyclohydrolase 1 OS= Bythopirellula goksoyri OX=1400387 GN=folE_1 PE=3 SV=1
MSSSASNCTSEDEKPCEATPVDLPRIERAVREILTAVGEDPDREGLRETPARVARMYAELFSGLHTDPKIHLQKFFTEKYDEMVLVKDIAFNSMCEHHMLPFIGKAHIGYVPNGKVVGLSKLARVVEEVSHRPQVQERMTEQIADLLIQELEVKGVAVVIEASHSCMSIRGIRKPESMCVTSAMKGLFRTNLSSRSEVMTLIYGDRR

SEQ ID NO: 5933 - protein, 263 aa, Bythopirellula goksoyri
  misc_feature (1)..(263): tr|A0A5B9QCG8|A0A5B9QCG8_9PLAN GTP cyclohydrolase 1 typ e 2 OS=Bythopirellula goksoyri OX=1400387 GN=Pr1d_25910 PE=4 SV=1
MSTVGKVIEYLEQIAPLSLAEDWDNVGLLVGDRVWSVDRLMTCLTITPAVVAEAIEARANLIVTHHPLPFHSLKSITADSTAGRLLLNLIAARIAVYSAHSAFDSARAGINQHLAIGLGLQEIVPLFPRDVDDADIGAGRCGILGEEVSLLDMAERLKNFLGLEKLQVVGENEQVVTRIAIACGSGGSFLDRAIELDCDCLITGETNFHTCLEAEARGVALILPGHFASERFGLISLADYLSDLVPEVTVWASKSEQDPLRSI

SEQ ID NO: 5934 - protein, 267 aa, Caballeronia arationis
  misc_feature (1)..(267): tr|A0A158B3B5|A0A158B3B5_9BURK GTP cyclohydrolase FolE2 OS=Caballeronia arationis OX=1777142 GN=folE2 PE=3 SV= 1
MNQMNPAFVMPDVQSTPDIRQIPIQRVGVKGVRYPLTVRTQSGDVQPSVGVWNLDVHLPAEQKGTHMSRFVALLDEHRAPLDQAAFRAMLDSMLAKLEAQAGRIEVTFPYFVMKTAPVSGVESLMDYEVTLAGELRDGATRLSLKVLVPVTSLCPCSKKISQYGAHNQRSHVTITAELAGDLPVEDLIRIAEEEASCELWGLLKRPDEKFVTERAYENPKFVEDLVRDVATRLNADERVVAYTLEAENFESIHNHSAYAVIERDKRV

SEQ ID NO: 5935 - protein, 216 aa, Caballeronia arationis
  misc_feature (1)..(216): tr|A0A158B4C3|A0A158B4C3_9BURK GTP cyclohydrolase 1 OS= Caballeronia arationis OX=1777142 GN=folE PE=3 SV=1
MSAPRRSNTSASDTPAASVDRPSREEAEAAVRVLLRWAGDDPRREGLRDTPARVIRAYEEFFRGYEQDPREILARTFSEVQGYDEMIVLKDIRFESYCEHHMVPIIGRAHVAYLPSKRVVGISKLARLVDAFAKRLQIQEKMTAQIADTLDEVLQPLGVGVILEAAHQCMSTRGVHKAGASMVTSRMLGAFRDDPSTRREFLAIVGNQNAYSVSNT

SEQ ID NO: 5936 - protein, 216 aa, Caballeronia arvi
  misc_feature (1)..(216): tr|A0A158KKX8|A0A158KKX8_9BURK GTP cyclohydrolase 1 OS= Caballeronia arvi OX=1777135 GN=folE PE=3 SV=1
MSAPRKNHLSGSDMPAEPADRPTREEAEAAVRVLLRWAGDDPRREGLLDTPGRVVRAYEEFFAGYTQSPHDILARTFSEVQGYDEMIVLKDIRFESYCEHHMVPIIGRAHVAYLPNKRVVGISKLARLVDAFAKRLQIQEKMTAQIADTLDEVLQPLGVGVILEAAHQCMSTRGVHKAGVSMVTSRMLGSFRDDPSTRREFLSIVGNQSAFSVSNT

SEQ ID NO: 5937 - protein, 268 aa, Caballeronia arvi
  misc_feature (1)..(268): tr|A0A158F9H1|A0A158F9H1_9BURK GTP cyclohydrolase FolE2 OS=Caballeronia arvi OX=1777135 GN=folE2 PE=3 SV=1
MNQMNPAFVMPDVQSTPDTRQIAIQRVGVKGVRHPLSVVTQSGVKPSVGVWNLDVHLPADQKGTHMSRFVALLEENRHPLDQHALRGLLAVMLSKLEAHSGRIEVTLPYFVMKTAPISGVQSLLDYEVTFIAQRRDGETSMSMKVLVPVTSLCPCSKQISQYGAHNQRSHVTITAEVADDIAVEELIRIAEEEASCELWGLLKRPDEKFVTERAYENPKFVEDLVRDVATRLNADQRIVAYVLEAENFESIHNHSAYAVIERDKRRDA

SEQ ID NO: 5938 - protein, 216 aa, Caballeronia calidae
  misc_feature (1)..(216): tr|A0A158DT32|A0A158DT32_9BURK GTP cyclohydrolase 1 OS= Caballeronia calidae OX=1777139 GN=folE PE=3 SV=1
MSAPRKNHFSGSDMPADQADRPTREEAEAAVRVLLRWAGDDPRREGLRDTPGRVVRAYEEFFAGYAQNPHDILARTFSEVQGYDEMIVLKDIRFESYCEHHMVPIIGRAHVAYLPNKRVVGISKLARLVDAFAKRLQIQEKMTAQIADTLNEVLQPLGVGVILEAAHQCMSTRGVHKAGVAMVTSRMLGSFRDDPSTRREFLAIVGDQSAFSVSNT

SEQ ID NO: 5939 - protein, 268 aa, Caballeronia calidae
  misc_feature (1)..(268): tr|A0A158AAT9|A0A158AAT9_9BURK GTP cyclohydrolase FolE2 OS=Caballeronia calidae OX=1777139 GN=folE2 PE=3 SV=1
MNQMNPAFVMPDVQSTPDVRQIAIQRVGVKGVRHPLSVRTANGVQPSVGVWNLDVHLPADQKGTHMSRFVALLEENGEPLDQAALRTLLAAMLTKLEAHSGRIEVSLPYFVMKTAPVSGVQSLLDYEATFIAERRDDETRLSMKVLVPVTSLCPCSKKISQYGAHNQRSHVTITAELAGDVAVEDLIRIAEEEASCELWGLLKRPDEKFVTERAYENPKFVEDLVRDVATRLNADERIVAYVLEAENFESIHNHSAFAVIERDKRRDA

SEQ ID NO: 5940 - protein, 216 aa, Caballeronia catudaia; identical to SEQ ID NO: 5936
  misc_feature (1)..(216): tr|A0A158B8T8|A0A158B8T8_9BURK GTP cyclohydrolase 1 OS= Caballeronia catudaia OX=1777136 GN=folE PE=3 SV=1

SEQ ID NO: 5941 - protein, 268 aa, Caballeronia catudaia
  misc_feature (1)..(268): tr|A0A158CLS2|A0A158CLS2_9BURK GTP cyclohydrolase FolE2 OS=Caballeronia catudaia OX=1777136 GN=folE2 PE=3 SV=1
MNQMNPAFVMPDVQSTPDTRQIAIQRVGVKGVRHPLSVVTQSGVKPSVGVWNLDVHLPAEQKGTHMSRFVALLEENRHPLDQHALRGLLAVMLSKLEAHSGRIEVTLPYFVMKTAPVSGVQSLLDYEVTFIAQRRDGDTRMSMKVLVPVTSLCPCSKQISQYGAHNQRSHVTITAEVADDIAVEELIRIAEEEASCELWGLLKRPDEKFVTERAYENPKFVEDLVRDVATRLNADQRIVAYVLEAENFESIHNHSAYAVIERDKRRDA

SEQ ID NO: 5942 - protein, 216 aa, Caballeronia choica
  misc_feature (1)..(216): tr|A0A158IJT6|A0A158IJT6_9BURK GTP cyclohydrolase 1 OS= Caballeronia choica OX=326476 GN=folE PE=3 SV=1
MSASGKSPLSGSDTPADSANRPSREEAEAAVRVLLRWAGDDPRREGLRDTPARVIRAYEEFFRGYEQDPREILARTFSEVQGYDEMIVLKDIRFESYCEHHMVPIIGRAHVAYLPSKRVVGISKLARLVDAFAKRLQIQEKMTAQIADTLNEVLQPLGVGVILEAAHQCMSTRGVHKAGASMVTSRMLGAFRDDPSTRREFLAIVGNQNAYSVSNT

SEQ ID NO: 5943 - protein, 267 aa, Caballeronia choica
  misc_feature (1)..(267): tr|A0A158IMQ2|A0A158IMQ2_9BURK GTP cyclohydrolase FolE2 OS=Caballeronia choica OX=326476 GN=folE2 PE=3 SV=1
MNQMNPAFVMPDVQSTPDTRQIPIQRVGVKAVRYPLTVRTASGDLQPSIGMWNLDVHLPAEQKGTHMSRFVALLDEHRAPLDQAAFRVMLESMLAKLEAHSGRIEVSFPYFVMKTAPVSGVQSLLDYEVTLTGEMREGETRMSLKVLVPVTSLCPCSKKISEYGAHNQRSHVTISAELAADMPIEDLIRIAEEEASCELWGLLKRPDEKFVTERAYKNPKFVEDLVRDVATRLNADERVVAYVLEAENFESIHNHSAYAVIERDKRV

SEQ ID NO: 5944 - protein, 216 aa, Caballeronia cordobensis
  misc_feature (1)..(216): tr|A0A158H8W0|A0A158H8W0_9BURK GTP cyclohydrolase 1 OS= Caballeronia cordobensis OX=1353886 GN=folE PE=3 SV=1
MSAPRKNHLSGSDMPAEQADRPTREEAEAAVRVLLRWAGDDPRREGLLDTPARVVRAYEEFFAGYTQSPHDILARTFSEVQGYDEMIVLKDIRFESYCEHHMVPIIGRAHVAYLPNKRVVGISKLARLVDAFAKRLQIQEKMTAQIADTLDEVLQPLGVGVILEAAHQCMSTRGVHKAGVSMVTSRMLGSFRDDPSTRREFLSIVGNQTAFSVSNT

SEQ ID NO: 5945 - protein, 268 aa, Caballeronia cordobensis
  misc_feature (1)..(268): tr|A0A158IEU1|A0A158IEU1_9BURK GTP cyclohydrolase FolE2 OS=Caballeronia cordobensis OX=1353886 GN=folE2 PE=3 S V=1
MNQMNPAFVMPDVQSTPDTRQIAIQRVGVKGVRHPLSVVTQSGVKPSVGVWNLDVHLPADQKGTHMSRFVALLEENRHPLDQHALRGLLAVMLSKLEAHSGRIEVTLPYFVMKTAPVSGVQSLLDYEVTFIAERRDGETRMSMQVLVPVTSLCPCSKKISQYGAHNQRSHVTIRAEVSDEIAVEDLIRIAEEEASCELWGLLKRPDEKFVTERAYENPKFVEDLVRDVATRLNADERIVAYVLEAENFESIHNHSAYAVIERDKRRDA

SEQ ID NO: 5946 - protein, 216 aa, Caballeronia fortuita
  misc_feature (1)..(216): tr|A0A158D3Q2|A0A158D3Q2_9BURK GTP cyclohydrolase 1 OS= Caballeronia fortuita OX=1777138 GN=folE PE=3 SV=1
MSAPRKNHLTGSDMPAEQADRPTREEAEAAVRVLLRWAGDDPAREGLLDTPGRVVRAYEEFFAGYTQNPHDILARTFSEVQGYDEMIVLKDIRFESYCEHHMVPIIGRAHVAYLPNKRVVGISKLARLVDAFAKRLQIQEKMTAQIADTLDEVLQPLGVGVILEAAHQCMSTRGVHKAGVSMVTSRMLGSFRDDPSTRREFLAIVGNQNAFSVSNT

SEQ ID NO: 5947 - protein, 268 aa, Caballeronia fortuita
  misc_feature (1)..(268): tr|A0A158DPA8|A0A158DPA8_9BURK GTP cyclohydrolase FolE2 OS=Caballeronia fortuita OX=1777138 GN=folE2 PE=3 SV=1
MNQMNPAFVMPDVQSTPDTRQIAIQRVGVKGVRYPLTVLTEDGLKPTVGVWNLDVHLPAEQKGTHMSRFVALLEENRLPVDQHALRGMLSLMLAKLEAHSGRMEVTLPYFVMKTAPVSGVKSLLDYEVTFVAERRDGETRMSLKVLVPVTSLCPCSKKISQYGAHNQRSHVTIAAELAEEMPVEELIRIAEEEASCELWGLLKRPDEKFVTERAYENPKFVEDLVRDVATRLNADARIVAYTLEAENFESIHNHSAYAVIERDKRRDA

SEQ ID NO: 5948 - protein, 267 aa, Caballeronia glathei
  misc_feature (1)..(267): tr|A0A069PMV3|A0A069PMV3_9BURK GTP cyclohydrolase FolE2 OS=Caballeronia glathei OX=60547 GN=folE2 PE=3 SV=1
MNQMNPAFVMPDVQSSPDTRQIPIQRVGVKAVRHPLTVRTRSGEAQPSVGVWNLDVHLPADQKGTHMSRFVALLDEHREPLELASLRAMLVSMLEKLEAHAGRIEVSFPYFVMKTAPVSGVQSLMDYEVTLAGELRDGETRVTLKVLVPVTSLCPCSKKISQYGAHNQRSHVTIAAELAADMPVEDLIAIVEEEASCELWGLLKRPDEKFVTERAYENPKFVEDLVRDVATRLNGDARIAAYVLEAENFESIHNHSAYAVIERDKRV

SEQ ID NO: 5949 - protein, 217 aa, Caballeronia glathei
  misc_feature (1)..(217): tr|A0A069PHP1|A0A069PHP1_9BURK GTP cyclohydrolase 1 OS= Caballeronia glathei OX=60547 GN=folE PE=3 SV=1
MSASGKSSTSSGSDIPADPVDRPSREEAEAAVRVLLRWAGDDPRREGLRDTPARVIRSYEEFFAGYAQDPREILARTFTEVQGYDEMIVLKDIRFESYCEHHMVPIIGRAHVAYLPSKRVVGISKLARLVDAFAKRLQIQEKMTAQIADTLDEVLQPLGVGVILEAAHQCMSTRGVHKAGVSMVTSRMLGAFRDDPSTRREFLAIVGNQNAFSVSNT

SEQ ID NO: 5950 - protein, 268 aa, Caballeronia glebae
  misc_feature (1)..(268): tr|A0A157Z0D2|A0A157Z0D2_9BURK GTP cyclohydrolase FolE2 OS=Caballeronia glebae OX=1777143 GN=folE2 PE=3 SV=1
MNQMNPAFVMPDVQSTPDTRQIAIQRVGVKGVRYPLTVLTEHGLKPTVGVWNLDVHLPAEQKGTHMSRFVALLEENRLPVDQHALRGLLALMLAKLEAHSGCIEVTMPYFVMKTAPVSGVKSLLDYEVTFIAERRDGDTRMSIKVLVPVTSLCPCSKQISQYGAHNQRSHVTIAAELADEIAVEDLIRIAEEEASCELWGLLKRPDEKFVTERAYENPKFVEDLVRDVATRLNADERIVAYTLEAENFESIHNHSAYAVIERDKRCDA

SEQ ID NO: 5951 - protein, 216 aa, Caballeronia glebae
  misc_feature (1)..(216): tr|A0A157ZKN1|A0A157ZKN1_9BURK GTP cyclohydrolase 1 OS= Caballeronia glebae OX=1777143 GN=folE PE=3 SV=1
MSAPRQNHLSGSDMPADTADRPSREEAEAAVRVLLRWAGDDPRREGLLDTPGRVVRAYEEFFAGYTQNPHDILARTFSEVQGYDEMIVLKDIRFESYCEHHMVPIIGRAHVAYLPNKRVVGISKLARLVDAFAKRLQIQEKMTAQIADTLNEVLQPLGVGVILEAAHQCMSTRGVHKAGVSMVTSRMLGSFRDDPSTRREFLSIVGNQNAFSVSNT

SEQ ID NO: 5952 - protein, 216 aa, Caballeronia grimmiae
  misc_feature (1)..(216): tr|A0A069NIR2|A0A069NIR2_9BURK GTP cyclohydrolase 1 OS= Caballeronia grimmiae OX=1071679 GN=folE PE=3 SV=1
MSSPRKNHLTGSDMPADSADRPSREEAEAAVRVLLRWAGDDPRREGLLDTPARVVRSYEEFFAGYAENPHDILARTFSEVQGYDEMIVLKDIRFESYCEHHMVPIIGRAHVAYLPNKRVVGISKLARLVDAFAKRLQIQEKMTAQIADTLDEVLQPLGVGVILEAAHQCMSTRGVHKAGVAMVTSRMLGSFRDDPSTRREFLAIVGQSSAFSVTNT

SEQ ID NO: 5953 - protein, 265 aa, Caballeronia grimmiae
  misc_feature (1)..(265): tr|A0A069P1L6|A0A069P1L6_9BURK GTP cyclohydrolase FolE2 OS=Caballeronia grimmiae OX=1071679 GN=folE2 PE=3 SV=1
MNQMNPAFVMPDVQSTPDTRQIDIARVGVKGVRHPLSVRTASGVQPSVGVWNLDVHLPADQKGTHMSRFVALLEEHREPLDQAALQTMLAAMLVKLEAHSGRIEVSLPYFVMKTAPISGVQSLLDYEVTFVAEKRNGDMRLSLKVLVPVTSLCPCSKKISQYGAHNQRSHVTITAELAGDVAVEELVRVAEEEASCELWGLLKRPDEKFVTERAYENPKFVEDLVRDIAVRLNADDRIVAYVLEAENFESIHNHSAYAVIERVKR

SEQ ID NO: 5954 - protein, 216 aa, Caballeronia humi
  misc_feature (1)..(216): tr|A0A158H5S0|A0A158H5S0_9BURK GTP cyclohydrolase 1 OS= Caballeronia humi OX=326474 GN=folE PE=3 SV=1
MSVSGKTTPSASDMPAGSADRPSREEAEAAVRVLLRWAGDDPRREGLRDTPARVIRAYEEFFRGYEQDPREILQRTFSEVQGYDEMIVLKDIRFESYCEHHMVPIIGRAHVAYLPSKRVVGISKLARLVDAFAKRLQIQEKMTAQIADTLDEVLQPLGVGVILEAAHQCMSTRGVHKAGASMVTSRMLGAFRDDPSTRREFLAIVGNQNAYSVSNT

SEQ ID NO: 5955 - protein, 267 aa, Caballeronia humi
  misc_feature (1)..(267): tr|A0A158H635|A0A158H635_9BURK GTP cyclohydrolase FolE2 OS=Caballeronia humi OX=326474 GN=folE2 PE=3 SV=1
MNQMNPAFVMPDVQSTPDTRQIPIQRVGVKGVRYPLTVRAQSGELQPSVGVWNLDVHLPAEQKGTHMSRFVALLDEHRAPLDQTAFRAMLASMLAKLEVQAGRIEVSFPYFVMKTAPVSGVESLMDYEVTLTGELRDGETRMSLKVLVPVTSLCPCSKKISQYGAHNQRSHVTISAELASDMPVEDLIRIAEEEASCELWGMLKRPDEKFVTERAYENPKFVEDLVRDVATRLNEDARIVAYVLEAENFESIHNHSAYAVIERDRRG

SEQ ID NO: 5956 - protein, 268 aa, Caballeronia hypogeia
  misc_feature (1)..(268): tr|A0A158DDJ3|A0A158DDJ3_9BURK GTP cyclohydrolase FolE2 OS=Caballeronia hypogeia OX=1777140 GN=folE2 PE=3 SV=1
MNQMNPAFVMPDVQSTPDTRQIAIQRVGVKGVRYPLTVLTEDGLKPSVGVWNLDVHLPAEQKGTHMSRFVALLEENRSPLDQHALRGMLALMLAKLEAHSGRIEVTLPYFVMKTAPVSGVKSLLDYEASFIAERRDGDTTMSIKVLVPVTSLCPCSKKISEYGAHNQRSHVTITAELADEVAVEELIRMAEEEASCELWGLLKRPDEKFVTERAYENPKFVEDLVRDIATRLNADKRIVAYVLEAENFESIHNHSAYAVIERDKRRDA

SEQ ID NO: 5957 - protein, 216 aa, Caballeronia hypogeia
  misc_feature (1)..(216): tr|A0A158C9H3|A0A158C9H3_9BURK GTP cyclohydrolase 1 OS= Caballeronia hypogeia OX=1777140 GN=folE PE=3 SV=1
MSAPRKNNLSGSDMPADQADRPTREEAEAAVRVLLRWAGDDPGREGLLDTPARVVRAYEEFFAGYTQNPHDILARTFSEVQGYDEMIVLKDIRFESYCEHHMVPIIGRAHVAYLPNQRVVGISKLARLVDAFAKRLQIQEKMTAQIADTLNEVLQPIGVGVILEAAHQCMSTRGVHKAGVSMVTSRMLGSFRDDPSTRREFLSIVGNSTAFSVSNT

SEQ ID NO: 5958 - protein, 268 aa, Caballeronia jiangsuensis
  misc_feature (1)..(268): tr|A0A038GX72|A0A038GX72_9BURK GTP cyclohydrolase FolE2 OS=Caballeronia jiangsuensis OX=1458357 GN=folE2 PE=3 SV=1
MNQMNPAFVMPDVQSTPDTRQIAIQRVGVKGVRHPLSVRTANGVQPSVGVWNLDVHLPADQKGTHMSRFVALLEENREPLDQAALRSLLASMLTKLEAHSGRIEVTLPYFVMKTAPVSGVQSLLDYEATFIAEKRDGETHLSMKVLVPVTSLCPCSKKISQYGAHNQRSHVTIAAQLAGEVAVEELIRIAEEEASCELWGLLKRPDEKFVTERAYENPKFVEDLVRDVATRLNADERIVAYVLEAENFESIHNHSAYAVIERDKRRDA

SEQ ID NO: 5959 - protein, 216 aa, Caballeronia jiangsuensis
  misc_feature (1)..(216): tr|A0A038GPY4|A0A038GPY4_9BURK GTP cyclohydrolase 1 OS= Caballeronia jiangsuensis OX=1458357 GN=folE PE=3 SV=1
MSAPRKNHLSGSDMPADTADRPTREEAEAAVRVLLRWAGDDPKREGLLDTPGRVVRAYEEFFAGYTQNPHEILARTFSEVQGYDEMIVLKDIRFESYCEHHMVPIIGRAHVAYLPNKRVVGISKLARLVDAFAKRLQIQEKMTAQIADTLNEVLQPLGVGVILEAAHQCMSTRGVHKAGVSMVTSRMLGSFRDDPSTRREFLSIVSDQNAFSVSNT

SEQ ID NO: 5960 - protein, 268 aa, Caballeronia megalochromosomata
  misc_feature (1)..(268): tr|A0A149QH24|A0A149QH24_9BURK GTP cyclohydrolase FolE2 OS=Caballeronia megalochromosomata OX=1399969 GN=folE2 PE=3 SV=1
MNQMNPAFVMPDVQSTPDTRQIAIQRVGVKGVRHPLTVVTEDGVKPTVGVWNLDVHLPAEQKGTHMSRFVALLEENRHPLDQHALRGLLALMLAKLEAHAGRIEVTLPYFVMKTAPVSGVKSLLDYEVTFIAERRDGDTRMSIKVLVPVTSLCPCSKKISQYGAHNQRSHVTIMAELTEEIPVEDLIRIAEEEASCELWGLLKRPDEKFVTERAYENPKFVEDLVRDVATRLNADPRIVAYVLEAENFESIHNHSAYAVIERDKRRDA

SEQ ID NO: 5961 - protein, 216 aa, Caballeronia megalochromosomata
  misc_feature (1)..(216): tr|A0A149QZU8|A0A149QZU8_9BURK GTP cyclohydrolase 1 OS= Caballeronia megalochromosomata OX=1399969 GN=folE PE=3 SV=1
MSAPRKNHLSGSDMPADQADRPTREEAEAAVRVLLRWAGDDPKREGLLDTPGRVVRAYEEFFAGYTQNPHEILARTFSEVQGYDEMIVLKDIRFESYCEHHMVPIIGRAHVAYLPNKRVVGISKLARLVDAFAKRLQIQEKMTAQIADTLNEVLQPLGVGVILEAAHQCMSTRGVHKAGVSMVTSRMLGSFRDDPSTRREFLSIVSDQNAFSVSNT

SEQ ID NO: 5962 - protein, 268 aa, Caballeronia mineralivorans
  misc_feature (1)..(268): tr|A0A0J1CXT3|A0A0J1CXT3_9BURK GTP cyclohydrolase FolE2 OS=Caballeronia mineralivorans PML1(12) OX=908627 GN=f olE2 PE=3 SV=1
MNQMNPAFAMPDVQSSLDVRQIPIQRVGVKAVRYPLTIRTSSGELQPGVGLWNLDVHLPADQKGTHMSRFVALLDEHRAPLDQAAFRTMLVAMLAKLEAHSGRIEVSFPYFVMKTAPVSGVQSLMDYEVTLTGEMRGGETRISLRVLVPVTSLCPCSKQISQYGAHNQRSHVTIAAEFKGDVAIEDLIRIAEEEASCELWGLLKRPDEKFVTERAYENPKFVEDLVRDVATRLNADERIVSYVLEAENFESIHNHSAYAVIEHDKRVS

SEQ ID NO: 5963 - protein, 218 aa, Caballeronia mineralivorans
  misc_feature (1)..(218): tr|A0A0J1CZL3|A0A0J1CZL3_9BURK GTP cyclohydrolase 1 OS= Caballeronia mineralivorans PML1(12) OX=908627 GN=folE PE=3 SV=1
MSATRNSPNASSDIQDHADHGDRPSREEAEAAVRVLIRWAGDDPAREGLVDTPSRVIRSYEEFFAGYTQNPHDILARTFSEVQGYDEMIVLKDIRFESYCEHHMVPIIGRAHVAYLPRERVVGISKLARLVDAFAKRLQIQEKMTAQIADTLEEVLQPLGVGVILEATHQCMSTRGVHKAGASMVTSRMLGTFRDDPSTRREFLSIVGHSSGFSVSNS

SEQ ID NO: 5964 - protein, 216 aa, Caballeronia pedi
  misc_feature (1)..(216): tr|A0A158B1D3|A0A158B1D3_9BURK GTP cyclohydrolase 1 OS= Caballeronia pedi OX=1777141 GN=folE PE=3 SV=1
MSAPRKNQLSGSDMPAEQADRPTREEAEAAVRVLLRWAGDDPSREGLLDTPGRVVRAYEEFFAGYDQNPHEILARTFSEVQGYDEMIVLKDIRFESYCEHHMVPIIGRAHVAYLPNKRVVGISKLARLVDAFAKRLQIQEKMTAQIADTLNEVLQPIGVGVILEAAHQCMSTRGVHKAGVAMVTSRMLGSFRDDPSTRREFLSIVGNASAFSVSNT

SEQ ID NO: 5965 - protein, 268 aa, Caballeronia pedi
  misc_feature (1)..(268): tr|A0A158C1G9|A0A158C1G9_9BURK GTP cyclohydrolase FolE2 OS=Caballeronia pedi OX=1777141 GN=folE2 PE=3 SV=1
MNQMNPAFVMPDVQSTPDTRQIAIQRVGVKGVRYPLTVLTEDGLKPTVGVWNLDVHLPAEQKGTHMSRFVALLEENRLPLDQHALRGLLALMLAKLEAHSGRIEVTLPYFVMKTAPVSGVKSLLDYEVTFIAERRDGDTRMSIKVLVPVTSLCPCSKQISQYGAHNQRSHVTIAAELIEDIAVEDLIRIAEEEASCELWGLLKRPDEKFVTERAYENPKFVEDLVRDIATRLNADARIVAYVLEAENFESIHNHSAYAVIERDKRRAV

SEQ ID NO: 5966 - protein, 216 aa, Caballeronia peredens
  misc_feature (1)..(216): tr|A0A158J968|A0A158J968_9BURK GTP cyclohydrolase 1 OS= Caballeronia peredens OX=1777132 GN=folE PE=3 SV=1
MSAPRKNHLSGSDIPADEADRPTREEAEAAVRVLLRWAGDDPGREGLLDTPARVVRAYEEFFAGYTQNPHDILARTFSEVQGYDEMIVLKDIRFESYCEHHMVPIIGRAHVAYLPNKRVVGISKLARLVDAFAKRLQIQEKMTAQIADTLNEVLQPIGVGVILEAAHQCMSTRGVHKAGVAMVTSRMLGSFRDDPSTRREFLAIVGNSNAFSVSNT

SEQ ID NO: 5967 - protein, 268 aa, Caballeronia peredens
  misc_feature (1)..(268): tr|A0A158JNZ5|A0A158JNZ5_9BURK GTP cyclohydrolase FolE2 OS=Caballeronia peredens OX=1777132 GN=folE2 PE=3 SV=1
MNQMNPAFVMPDVQSTPDTRQIAISRVGVKGVRHPLSVRTTNGVQPSIGVWNLDVHLPAEQKGTHMSRFVALLEENREPLDQAALRALLAAMLTKLEAHSGRIEVSLPYFVMKTAPVSGVQSLLDYEVTFIAEKRDGQTRMSMKVLVPVTSLCPCSKQISQYGAHNQRSHVTITAELAGEVAVEELIRIAEEEASCELWGLLKRPDEKFVTERAYENPKFVEDLVRDVATRLNADERIVAYVLEAENFESIHNHSAYAVIESTRRRDA

SEQ ID NO: 5968 - protein, 216 aa, Caballeronia ptereochthonis
  misc_feature (1)..(216): tr|A0A158E481|A0A158E481_9BURK GTP cyclohydrolase 1 OS= Caballeronia ptereochthonis OX=1777144 GN=folE PE=3 SV= 1
MSAPRKNHLSGSDMPADKADRPTREEAEAAVRVLLRWAGDDPRREGLLDTPARVVRAYEEFFAGYAQNPHDILARTFSEVQGYDEMIVLKDIRFESYCEHHMVPIIGRAHVAYLPNKRVVGISKLARLVDAFAKRLQIQEKMTAQIADTLNEVLQPIGVGVILEAAHQCMSTRGVHKAGVSMVTSRMLGSFRDDPSTRREFLSIVGNQSAFSVSNT

SEQ ID NO: 5969 - protein, 268 aa, Caballeronia ptereochthonis
  misc_feature (1)..(268): tr|A0A158ARX0|A0A158ARX0_9BURK GTP cyclohydrolase FolE2 OS=Caballeronia ptereochthonis OX=1777144 GN=folE2 PE= 3 SV=1
MNQMNPAFVMPDVQSTPDMRQIAISRVGVKGVRHPLSVRTQDGVQPSVGVWNLDVHLPAEQKGTHMSRFVALLEEHREPLDQAALRTLLAAMLTKLEAHSGRIEVTLPYFVMKTAPVSGVQSLLDYEATFIAEKRDGQTRLSMKVLVPVTSLCPCSKKISQYGAHNQRSHVTITAELAGEVALEELIRIAEEEASCELWGLLKRPDEKLVTERAYENPKFVEDLVRDVAMRLNADERIVAYVLEAENFESIHNHSAYAVIERDKRRDA

SEQ ID NO: 5970 - protein, 219 aa, Caballeronia sordidicola
  misc_feature (1)..(219): tr|A0A242MMY5|A0A242MMY5_9BURK GTP cyclohydrolase 1 OS= Caballeronia sordidicola OX=196367 GN=folE PE=3 SV=1
MSATRNNPDASPDIHADHAGGADRPSREEAEAAVRVLIKWAGDDPSREGLLDTPARVIRSYEEFFAGYAQNPRDILARTFSEVQGYDEMIVLKDIRFESYCEHHMVPIIGRAHVAYLPRERVVGISKLARLVDAFAKRLQIQEKMTAQIADTLEEVLQPLGVGVILEASHQCMSTRGVHKAGASMVTSRMLGTFRDDPSTRREFLAIVGHSSGFSVSNS

SEQ ID NO: 5971 - protein, 219 aa, Caballeronia sordidicola
  misc_feature (1)..(219): tr|A0A158FNS9|A0A158FNS9_9BURK GTP cyclohydrolase 1 OS= Caballeronia sordidicola OX=196367 GN=folE PE=3 SV=1
MSATRNKPDASPDIHADELSHADRPSREEAEAAVRVLIRWAGDNPSREGLVDTPARVIRSYEEFFAGYAQNPKDILARTFSEVQGYDEMIVLKDIRFESYCEHHMVPIIGRAHVAYLPRERVVGISKLARLVDAFAKRLQIQEKMTAQIADTLEEVLQPLGVGVILEATHQCMSTRGVHKAGASMVTSRMLGTFRDDPSTRREFLSIVGHSSGFSVSNT

SEQ ID NO: 5972 - protein, 267 aa, Caballeronia telluris
  misc_feature (1)..(267): tr|A0A158K148|A0A158K148_9BURK GTP cyclohydrolase FolE2 OS=Caballeronia telluris OX=326475 GN=folE2 PE=3 SV=1
MNQMNPAFVMPDVQSTPDTRQIPIQRVGVKGVRYPLTVRTQSGDAQPGVGVWNLDVHLPAEQKGTHMSRFVALLDEHRAPLDQAAFRAMLQSMLAKLEAHAGRIEVTFPYFVMKTAPVSGVESLMDYEVTLTGELRDGTTRLSLKVLVPVTSLCPCSKKISQYGAHNQRSHVTIAAELAGELPVEDLIRIAEEEASCELWGLLKRPDEKFVTERAYENPKFVEDLVRDVATRLNADERVLAYTLEAENFESIHNHSAYAVIERGKRV

SEQ ID NO: 5973 - protein, 216 aa, Caballeronia telluris
  misc_feature (1)..(216): tr|A0A158JCF3|A0A158JCF3_9BURK GTP cyclohydrolase 1 OS= Caballeronia telluris OX=326475 GN=folE PE=3 SV=1
MSAPRQSNTSASDMPAGSVDRPSREEAEAAVRVLLRWAGDDPRREGLRDTPARVIRAYEEFFRGYEQDPREILARTFSEVQGYDEMIVLKDIRFESYCEHHMVPIIGRAHVAYLPSKRVVGISKLARLVDAFAKRLQIQEKMTAQIADTLDEVLQPLGVGVILEAAHQCMSTRGVHKAGASMVTSRMLGSFRDDPSTRREFLAIVGNQNAYSVSNT

SEQ ID NO: 5974 - protein, 216 aa, Caballeronia temeraria
  misc_feature (1)..(216): tr|A0A158AVV7|A0A158AVV7_9BURK GTP cyclohydrolase 1 OS= Caballeronia temeraria OX=1777137 GN=folE PE=3 SV=1
MSAPRKNHLSGSDMPADTADRPTREEAEAAVRVLLRWAGDDPSREGLLDTPGRVVRAYEEFFAGYTQNPHDILARTFSEVQGYDEMIVLKDIRFESYCEHHMVPIIGRAHVAYLPNNRVVGISKLARLVDAFAKRLQIQEKMTAQIADTLNEVLQPIGVGVILEAAHQCMSTRGVHKAGVSMVTSRMLGSFRDDPSTRREFLAIVGNQNAFSVSNT

SEQ ID NO: 5975 - protein, 268 aa, Caballeronia temeraria
  misc_feature (1)..(268): tr|A0A158AC67|A0A158AC67_9BURK GTP cyclohydrolase FolE2 OS=Caballeronia temeraria OX=1777137 GN=folE2 PE=3 SV= 1
MNQMNPAFVMPDVQSTPDTRQIAIQRVGVKGVRYPLTVLTEDGLKPTVGTWNLDVHLPAEQKGTHMSRFVALLEENRLPVDQHALRGMLALMLAKLEAHAGRIEVTLPYFVMKTAPVSGVKSLLDYEVTFIVERRDGDTRMSIKVLVPVTSLCPCSKQISQYGAHNQRSHVTIAAEVAEEVPVEDLIRIAEEEASCELWGLLKRPDEKFVTERAYENPKFVEDLVRDIATRLNADARIVAYTLEAENFESIHNHSAYAVIERDKRRDA

SEQ ID NO: 5976 - protein, 267 aa, Caballeronia terrestris
  misc_feature (1)..(267): tr|A0A158J754|A0A158J754_9BURK GTP cyclohydrolase FolE2 OS=Caballeronia terrestris OX=1226301 GN=folE2 PE=3 SV =1
MNQMNPAFVMPDVQSTPDTRQIPIQRVGVKGVRYPLTVRTQSGELQPSIGVWNLDVHLPAEQKGTHMSRFVALLDEHRAPLDQAAFGTMLASMLAKLEAQAGRIEVSFPYFVMKTAPVSGVESLMDYEVTLTGELRDGETRMSLKVLVPVTSLCPCSKKISQYGAHNQRSHVTISAELASDMPVEDLIRVAEEEASCELWGMLKRPDEKFVTERAYENPKFVEDLVRDVATRLNEDARIVAYVLEAENFESIHNHSAYAVIERDKRG

SEQ ID NO: 5977 - protein, 216 aa, Caballeronia terrestris
  misc_feature (1)..(216): tr|A0A158J7A7|A0A158J7A7_9BURK GTP cyclohydrolase 1 OS= Caballeronia terrestris OX=1226301 GN=folE PE=3 SV=1
MSVSGKTTPSASDMPAGSADRPSREEAEAAVRILLRWAGDDPRREGLRDTPARVIRAYEEFFRGYEQDPREILQRTFSEVQGYDEMIVLKDIRFESYCEHHMVPIIGRAHVAYLPSKRVVGISKLARLVDAFAKRLQIQEKMTAQIADTLDEVLQPLGVGVILEAAHQCMSTRGVHKAGASMVTSRMLGAFRDDPSTRREFLAIVGNQNAYSVSNT

SEQ ID NO: 5978 - protein, 268 aa, Caballeronia turbans
  misc_feature (1)..(268): tr|A0A158GJQ9|A0A158GJQ9_9BURK GTP cyclohydrolase FolE2 OS=Caballeronia turbans OX=1777134 GN=folE2 PE=3 SV=1
MNQMNPAFVMPDVQSTPDTRQIAIQRVGVKGVRHPLSVRTANGVQPSVGVWNLDVHLPADQKGTHMSRFVALLEEHREPLDQAALRTLLASMLAKLEAHSGRIEVTLPYFVMKTAPVSGVQSLLDYEATFIAEKRDGQTHMSMKVLVPVTSLCPCSKKISQYGAHNQRSHVTILAQLAGEVAVEELIRIAEEEASCELWGLLKRPDEKFVTERAYENPKFVEDLVRDVATRLNADERIVAYVLEAENFESIHNHSAYAVIERDKRRDA

SEQ ID NO: 5979 - protein, 216 aa, Caballeronia turbans
  misc_feature (1)..(216): tr|A0A158GEP0|A0A158GEP0_9BURK GTP cyclohydrolase 1 OS= Caballeronia turbans OX=1777134 GN=folE PE=3 SV=1
MSAPRKNHLSGSDMPADPADRPTREEAEAAVRVLLRWAGDDPRREGLLDTPGRVVRAYEEFFAGYTQNPHDILARTFSEVQGYDEMIVLKDIRFESYCEHHMVPIIGRAHVAYLPNKRVVGISKLARLVDAFAKRLQIQEKMTAQIADTLNEVLQPLGVGVILEAAHQCMSTRGVHKAGVSMVTSRMLGSFRDDPSTRREFLSIVSDQSAFSVSNT

SEQ ID NO: 5980 - protein, 268 aa, Caballeronia udeis
  misc_feature (1)..(268): tr|A0A3M0UHD4|A0A3M0UHD4_9BURK GTP cyclohydrolase FolE2 OS=Caballeronia udeis OX=1232866 GN=folE2 PE=3 SV=1
MNQMNPAFAMPDVQSSLDVRQIPIQRVGVKAVRYPLTIRTSSGELQPGVGLWNLDVHLPADQKGTHMSRFVALLDEHRAPLDQAAFRTMLVAMLAKLEAHSGRIEVSFPYFVMKTAPVSGVQSLMDYEVTLTGEMRGGETRISLKVLVPVTSLCPCSKQISQYGAHNQRSHVTIAAEFKGDVAIEDLIRIAEEEASCELWGLLKRPDEKFVTERAYENPKFVEDLVRDVATRLNADERIVSYVLEAENFESIHNHSAYAVIEHDKRVS

SEQ ID NO: 5981 - protein, 215 aa, Caballeronia udeis
  misc_feature (1)..(215): tr|A0A158FFV6|A0A158FFV6_9BURK GTP cyclohydrolase 1 OS= Caballeronia udeis OX=1232866 GN=folE PE=3 SV=1
MSATRNSPNASSDIHDQADRPSREEAEAAVRVLIRWAGDNPAREGLIDTPSRVIRSYEEFFAGYAQNPHDILARTFSEVQGYDEMIVLKDIRFESYCEHHMVPIIGRAHVAYLPRERVVGISKLARLVDAFAKRLQIQEKMTAQIADTLEEVLQPLGVGVILEATHQCMSTRGVHKAGASMVTSRMLGTFRDDPSTRREFLSIVGHSSAFSVSNS

SEQ ID NO: 5982 - protein, 223 aa, Caenispirillum bisanense
  misc_feature (1)..(223): tr|A0A286GW20|A0A286GW20_9PROT GTP cyclohydrolase 1 OS= Caenispirillum bisanense OX=414052 GN=folE PE=3 SV=1
MSDTKAVKTPAPLRDYRDAAGSAKAALAAEGRPSREEAEAAVRTLLRWAGDNPSREGLVDTPARVVRAYEEFFAGYEEDAEDILRRTFEETDGYDEMVLLRDIRIESHCEHHMVPIIGKAHVAYLPDKRVVGISKLARVIEIYAKRLQIQEKLTAQVANAINDVLQPKGVAVVIEAAHQCMTTRGIRKPGVTMVTSRMLGAFRDNPTTRREFMALIAGERGGF

SEQ ID NO: 5983 - protein, 231 aa, Caenispirillum salinarum
  misc_feature (1)..(231): tr|K9H3D2|K9H3D2_9PROT GTP cyclohydrolase 1 OS=Caenispi rillum salinarum AK4 OX=1238182 GN=folE PE=3 SV=1
MTEAKPVKTPSALRDFREGATATAPRATDSAPVSAAEAGRPSREEAEAAIRTLLRWAGDDPTREGLVDTPARVARAYEEFFAGYGEDPEDILRRTFEETDGYDEMVLLRDIRIESHCEHHMVPILGKAHVAYLPDRRVVGISKLARVVEIYAKRLQIQEKLTAQIANAINDVLQPKGVAVVMEAAHQCMTTRGIRKPGVTMVTSRMLGAFRDNPTTRREFMALISGDRGHF

SEQ ID NO: 5984 - protein, 209 aa, Caldalkalibacillus thermarum
  misc_feature (1)..(209): tr|F5L718|F5L718_CALTT GTP cyclohydrolase 1 OS=Caldalka libacillus thermarum (strain TA2.A1) OX=986075 GN=folE PE=3 SV=1
MSKADAKSDTETFAHIDSPAQPQEVDKAKIEQAVRMILEAIGENPDREGLVDTPKRVARMYEEVFSGMRTDPGHYFDVIFGEDHEELVLVKDIPFFSMCEHHLVPFFGKAHVAYIPKGGRVTGLSKLARAVEAIARRPQLQERITSTVADTMVEKLDPHGVVVVVEAEHMCMTMRGVKKPGAKTVTSAVRGCFEHDAAARAEVFSLIKG

SEQ ID NO: 5985 - protein, 188 aa, Caldanaerobacter subterraneus
  misc_feature (1)..(188): sp|Q8R7N2|GCH1_CALS4 GTP cyclohydrolase 1 OS=Caldanaero bacter subterraneus subsp. tengcongensis (strain DSM 15 242 / JCM 11007 / NBRC 100824 / MB4) OX=273068 GN=folE PE=3 SV=1
MIDKEKIKKAVREILEAIGEDPDREGLLETPDRVARMYEEIFSGLHTDVKDVIKIFQEDEHQEIILVKDIPLYSMCEHHLLPFIGVAHVAYLPRKGRILGLSKVARIVDVLSKRPQLQERLTSEIADTIMEAVNPLGVAVVIEAEHLCMTMRGVKKPGSKTVTSALRGIFRTDQKARAEVMALINSKR

SEQ ID NO: 5986 - protein, 198 aa, Caldanaerobacter subterraneus
  misc_feature (1)..(198): tr|A0A0F5PKM5|A0A0F5PKM5_9THEO GTP cyclohydrolase 1 OS= Caldanaerobacter subterraneus subsp. pacificus DSM 1265 3 OX=391606 GN=folE PE=3 SV=1
MHNKKEGVSKMIDKEKIKKAVREILEAIGEDPDREGLLETPDRVARMYEEIFSGLHTDVKDVIKIFQEDEHQEIILVKDIPLYSMCEHHLLPFIGVAHVAYLPRKGRILGLSKVARIVDVLSKRPQLQERLTSEIADTIMEAVNPLGVAVVIEAEHLCMTMRGVKKPDSKTVTSALRGIFRTDQKARAEVMALINSKR

SEQ ID NO: 5987 - protein, 183 aa, Caldanaerobius fijiensis
  misc_feature (1)..(183): tr|A0A1M5A9A2|A0A1M5A9A2_9THEO GTP cyclohydrolase 1 OS= Caldanaerobius fijiensis DSM 17918 OX=1121256 GN=folE P E=3 SV=1
MNEERIKNAIRVILEEIGEDPDREGLRDTPDRVYRMYKEIFSGIGSDPQDVLTAVFHEQHKELVIVKDIRFYSVCEHHMVPFFGKAHVGYLPDGKIIGLSKIARLVDIVSKRLQLQERMTQMIADAMNQRLEPKGVIVMLEAEHLCMSMRGIKRPGSTTVTIATRGIFDTDENMRKRFFELIK

SEQ ID NO: 5988 - protein, 268 aa, Caldanaerovirga acetigignens
  misc_feature (1)..(268): tr|A0A1M7LUZ9|A0A1M7LUZ9_9FIRM GTP cyclohydrolase FolE2 OS=Caldanaerovirga acetigignens OX=447595 GN=folE2 PE= 3 SV=1
MGSSTGVKTLKDVQSERDERRVPLKKVGVKNIEWPLKVLDKARGHQYTVAKISLSVDLRHDVRGTHMSRFVEVLNDLEMLSPAALLEILSEIKEKLQAEKSYLLMCFPYFIWKKSPISGLSSPMKIQAFIEAESDIKSTITMGVKVPVHTLCPCSKEISESGAHNQRAVVEIYVRSKKMIWFEDLSEIAEKSASCPIYTLLKRPDEKFVTEMAYRNAKFVEDVTRDAALELERDERIEWYKVQVTSFESIHNHDAFACVEKGWIQDDN

SEQ ID NO: 5989 - protein, 186 aa, Calderihabitans maritimus
  misc_feature (1)..(186): tr|A0A1Z5HY41|A0A1Z5HY41_9THEO GTP cyclohydrolase 1 OS= Calderihabitans maritimus OX=1246530 GN=folE PE=3 SV=1
MDLGKIEKGVRLILEGLGEDTSREGLRDTPARVARMYKEIFCGLEEDPEAHLQVYFTEEHEEMVLVKDIPLYSMCEHHLLPFYGKAHVAYIPRKGRITGLSKLARVVEGFAKRPQLQERLTSQIADAIMRALKPHGVLVVVEAEHMCMTMRGVKKPGSQTLTSAVRGLFKTSEATRAEAFALIKGN

SEQ ID NO: 5990 - protein, 188 aa, Caldibacillus debilis
  misc_feature (1)..(188): tr|A0A150M7C7|A0A150M7C7_9BACI GTP cyclohydrolase 1 OS= Caldibacillus debilis OX=301148 GN=folE PE=3 SV=1
MKDIKINQIEHAVRLILEAVGEDVEREGLLDTPRRVAKMYGELFSGLHEDPGKYFETIFHENHDGLVLVKDISFYSMCEHHLLPFFGRAHVAYIPEGGRVVGLSKLARAVETVARRPQLQERMTRIVADTIMEKLNPLGVAVVVEAEHMCMTMRGIKKPGSITVTTAVRGIFAEDKEAKNEVLARILK

SEQ ID NO: 5991 - protein, 188 aa, Caldibacillus debilis
  misc_feature (1)..(188): tr|A0A420VEN5|A0A420VEN5_9BACI GTP cyclohydrolase 1 OS= Caldibacillus debilis GB1 OX=1339248 GN=folE PE=3 SV=1
MKDIKINQIEHAVRLILEAVGEDVEREGLLDTPRRVAKMYGELFSGLHEDPGKYFETIFHENHDGLVLVKDISFYSMCEHHLLPFFGRAHVAYIPEGGRVVGLSKLARAVETIARRPQLQERMTRIVADTIMEKLNPLGVAVVVEAEHMCMTMRGIKKPGSITVTTAVRGIFAEDKEAKNEVLARILK

SEQ ID NO: 5992 - protein, 256 aa, Caldicellulosiruptor bescii
  misc_feature (1)..(256): sp|B9MNP4|GCH4_CALBD GTP cyclohydrolase FolE2 OS=Caldic ellulosiruptor bescii (strain ATCC BAA-1888 / DSM 6725 / Z-1320) OX=521460 GN=folE2 PE=3 SV=1
MIDVQSQKDQRGISIQKVGIKDLNWPIVVMDRENKTQTTIAKIIAAAELKGDIRGTHMSRFIEAIDELKVVGPKEIEKLLDRIKEKLNSEKAYIRFDFPYFINKRTPVTATLSPLKVDCYFEAEKDQKFDLKVGVIVPVHTLCPCSKEISEYGAHNQRAYVTIEVRMKKFMWIEELVEIAEASASCPLYSILKRPDEKWVTERAYQNPRFVEDLLREVVLKMKEDGRIKWYKVFVESIESIHNHNAFAYIEGEITK

SEQ ID NO: 5993 - protein, 256 aa, Caldicellulosiruptor changbaiensis
  misc_feature (1)..(256): tr|A0A3T0D2G5|A0A3T0D2G5_9FIRM GTP cyclohydrolase FolE2 OS=Caldicellulosiruptor changbaiensis OX=1222016 GN=fo lE2 PE=3 SV=1
MIDVQSQKDLRGISIQKVGIKDLNWPIVVMDRANKTQTTIAKITAAAELKGDMRGTHMSRFIEAIDELNVVGPKEIERLLDRIKEKLDSQKAYVRFDFPYFINKRTPVTETLAPLKVDCYFEAEKGEKFDLKVGVIVPVHTLCPCSKEISEYGAHNQRAYVTIEVRMRRFMWIEELVEIAESSASCPLYSILKRPDEKWVTERAYQNPRFVEDLLREVVVKINSDKRIKWYKVFVESIESIHNHNAFAYIEGEIAK

SEQ ID NO: 5994 - protein, 256 aa, Caldicellulosiruptor hydrothermalis
  misc_feature (1)..(256): tr|E4Q882|E4Q882_CALH1 GTP cyclohydrolase FolE2 OS=Cald icellulosiruptor hydrothermalis (strain DSM 18901 / VKM B-2411 / 108) OX=632292 GN=folE2 PE=3 SV=1
MIDVQSQKDQRGISIQKVGIKDLNWPIVVMDRENKTQTTIAKITAAAELKGDIRGTHMSRFIEAIDELKVVGPKEIEKLLDRIKEKLLSDRAYIRFDFPYFINKRTPVTGTLSPLKVDCYFEAEKDQKFDLKVGVVVPVHTLCPCSKEISEYGAHNQRAYVTIEVRMKKFMWIEELVEIAEASASCPLYSILKRPDEKWVTERAYQNPRFVEDLLREVVLKIKEDGRIKWYKVFVESIESIHNHNAFAYIEGEITK

SEQ ID NO: 5995 - protein, 256 aa, Caldicellulosiruptor kristjanssonii
  misc_feature (1)..(256): tr|E4S6C4|E4S6C4_CALKI GTP cyclohydrolase FolE2 OS=Cald icellulosiruptor kristjanssonii (strain ATCC 700853 / D SM 12137 / I77R1B) OX=632335 GN=folE2 PE=3 SV=1
MIDVQSQKDLRGISIQKVGIKDLNWPIVVMDRENKTQTTIAKITAAAELKGDIRGTHMSRFIEAIDELKVVGPKEIEKLLDRIKEKLNSEKAYIRFDFPYFINKRTPVTGTLSPLKVDCYFEAEKDQKFDLKVGVIVPVHTLCPCSKEISEYGAHNQRAYVTIEVRMKKFMWIEELVEIAEASASCPLYSILKRPDEKWVTERAYQNPRFVEDLLREVVLKIKEDGRIKWYKVFVESIESIHNHNAFAYIEGEITK

SEQ ID NO: 5996 - protein, 256 aa, Caldicellulosiruptor kronotskyensis
  misc_feature (1)..(256): tr|E4SH08|E4SH08_CALK2 GTP cyclohydrolase FolE2 OS=Cald icellulosiruptor kronotskyensis (strain DSM 18902 / VKM B-2412 / 2002) OX=632348 GN=folE2 PE=3 SV=1
MIDVQSQKDLRGISIQKVGIKDLNWPIVVMDRENKTQTTIAKIIAAAELKGDIRGTHMSRFIEAIDELKVVGPKEIEKLLDRIKEKLNSEKAYIRFDFPYFINKRTPVTATLSPLKVDCYFEAEKDQKFDLKVGVIVPVHTLCPCSKEISEYGAHNQRAYVTIEVRMKKFMWIEELVEIAEASASCPLYSILKRPDEKWVTERAYQNPRFVEDLLREVVLKIKEDNRIKWYKVFVESIESIHNHNAFAYIEGEITK

SEQ ID NO: 5997 - protein, 256 aa, Caldicellulosiruptor lactoaceticus
  misc_feature (1)..(256): tr|G2PWG6|G2PWG6_9FIRM GTP cyclohydrolase FolE2 OS=Cald icellulosiruptor lactoaceticus 6A OX=632516 GN=folE2 PE =3 SV=1
MIDVQSQKDLRGISIQKVGIKDLNWPIVVMDRENKTQTTIAKITAAAELKGDIRGTHMSRFIEAIDELKVVGPKEIEKLLDRIKEKLNSEKAYIRFDFPYFINKRTPVTGTLSPLKVDCYFEAEKDQKFDLKTGVIVPVHTLCPCSKEISEYGAHNQRAYVTIEVRMKKFMWIEELVEIAEASASCPLYSILKRPDEKWVTERAYQNPRFVEDLLREVVLKIKEDGRIKWYKVFVESIESIHNHNAFAYIEGEITK

SEQ ID NO: 5998 - protein, 256 aa, Caldicellulosiruptor obsidiansis
  misc_feature (1)..(256): tr|D9TI96|D9TI96_CALOO GTP cyclohydrolase FolE2 OS=Cald icellulosiruptor obsidiansis (strain ATCC BAA-2073 / st rain OB47) OX=608506 GN=folE2 PE=3 SV=1
MIDVQSQKDLRGISIQKVGIKDLNWPIVVMDRENKTQTTIAKITAAAELKGDIRGTHMSRFIEAIDELKVVGPKEIEKLLDRIKEKLNSEKAYIRFDFPYFINKRTPVTGTLSPLKVDCYFEAERDNKFDLKVGVVVPVHTLCPCSKEISEYGAHNQRAYVTIEVKMRKFMWIEELVEIAESSASCPLYSILKRPDEKWVTERAYQNPRFVEDLLREVVLKIREDGRIKWYKVFVESIESIHNHNAFAYIEGEITK

SEQ ID NO: 5999 - protein, 256 aa, Caldicellulosiruptor owensensis
  misc_feature (1)..(256): tr|E4Q339|E4Q339_CALOW GTP cyclohydrolase FolE2 OS=Cald icellulosiruptor owensensis (strain ATCC 700167 / DSM 1 3100 / OL) OX=632518 GN=folE2 PE=3 SV=1
MIDVQSQKDQRGISIQKVGIKDLNWPIVVMDRENKTQITIAKITAAAELKGDIRGTHMSRFIEAIDELKVVGPKEIERLLDRIKEKLNSEKAYIRFDFPYFINKRTPVTGTLSPLKVDCFFEAEKDSKFDLKVGVVVPVHTLCPCSKEISEYGAHNQRAYVTIEVKMRKFMWIEELVEIAESSASCPLYSILKRPDEKWVTERAYQNPRFVEDLLREVVLKIKEDGRIKWYKVFVESIESIHNHNAFAYIEGEITK

SEQ ID NO: 6000 - protein, 256 aa, Caldicellulosiruptor saccharolyticus
  misc_feature (1)..(256): sp|A4XG24|GCH4_CALS8 GTP cyclohydrolase FolE2 OS=Caldic ellulosiruptor saccharolyticus (strain ATCC 43494 / DSM 8903 / Tp8T 6331) OX=351627 GN=folE2 PE=3 SV=1
MIDVQSQKDLRGIAIQKVGIKDLNWPIVVMDRANKTQTTIAKITAAAELKGDMRGTHMSRFIEAIDELNVVGPKEIERLLDRIKEKLDSQKAYVRFDFPYFINKRTPVTETLAPLKVDCYFEAEKGEKFDLKVGVIVPVHTLCPCSKEISEYGAHNQRAYVTIEVKMRRFMWIEELVEIAESSASCPLYSILKRPDEKWVTERAYQNPRFVEDLLREVVVKISGDKRIKWYKVFVESIESIHNHNAFAYIEGENTK

SEQ ID NO: 6001 - protein, 359 aa, Caldilinea aerophila
  misc_feature (1)..(359): tr|I0I6H9|I0I6H9_CALAS GTP cyclohydrolase FolE2 OS=Cald ilinea aerophila (strain DSM 14535 / JCM 11387 / NBRC 1 04270 / STL-6-O1) OX=926550 GN=folE2 PE=3 SV=1
MNIKHTNGFNSNGLNSNGLNGNGHHTVVYNPNGTHGTAAPALTPSAQQTLSPRRYYDADFVVTEAYRASLPDLQNGPASLIQGSAVAIQQVGIHNFRLPLRYASRDGQPMTLETSVTGTVSLEAHKKGINMSRVMRTFYEYKDELFDLDLLDAILQDYRRSLGSLEAYLILRFNYPILNESLRSGLFGYQYYQVALEARMDRYGAVRKLIHFDFVYSSTCPCSYELSQHAILERGIAAVPHSQRSVARVSVELNDFLWIEDLRDLCLDALKTETQVMVKREDEQAFAELNAAYLKFVEDAVRLLHEKLDPDPRIKDFKIVASHQESLHSHDAVSVLVKGIPGGFTPEVDPSVFATLIHR

SEQ ID NO: 6002 - protein, 217 aa, Caldilineae bacterium
  misc_feature (1)..(217): tr|A0A3M1EXN1|A0A3M1EXN1_9CHLR GTP cyclohydrolase 1 OS= Caldilineae bacterium OX=2420332 GN=folE PE=3 SV=1
MTQIKQTAPLPPLTLSPVANGNGTETHTGKTAIEEAVRTILHHIGENPDRDGLRRTPERIARMYDELTAGYHVDPVELVNDALFDVNYNEMVLVKNIDFYSLCEHHMLPFFGQAHVAYIPNGKVIGLSKIPRIVEMFARRLQVQERMTTQIAELLEEVLQPRGVAVVVEGVHMCSAMRGVKKANARMVTSTVTGAFQSNPKTRAEFMEHLSRRGWDD

SEQ ID NO: 6003 - protein, 241 aa, Caldilineae bacterium
  misc_feature (1)..(241): tr|A0A3M1FYN2|A0A3M1FYN2_9CHLR GTP cyclohydrolase 1 OS= Caldilineae bacterium OX=2420332 GN=folE PE=3 SV=1
MTSLTPPNQNGHNGHHGPADHYANGTNGNGAHGHGRPALVTEPFSLAENPYATPPAESYDPAFEALIRQMLQRLGEDPEREGLQRTPLRVAKAMDFLTEGYNQSLHEVVNGALFEDDVDEMVIVRDIEFYSLCEHHMLPFFGKAHIGYIPNGRIIGLSKLARIVDVFARRLQVQERLTGQVADALMEILQPRGVAVVTEASHFCMMMRGVQKQNSFTIASAMRGVFKEDPRTRQEFMGLVK

SEQ ID NO: 6004 - protein, 269 aa, Caldimicrobium thiodismutans
  misc_feature (1)..(269): tr|A0A2N7PJ61|A0A2N7PJ61_9BACT GTP cyclohydrolase FolE2 OS=Caldimicrobium thiodismutans OX=1653476 GN=folE2 PE =3 SV=1
MKLPDVQSLEPSYQLPIEKVGIKNLRYPIKVLDRAKGFQATVGEFNLYVDLPSHFKGTHMSRFIEILNEFREEIHVKNINEILRKLKKRLNAKSAHLEVYFPYFIEKKAPVTGIPSLMEYQAFIIASLSQRRKDLIIGVKVPVMTLCPCSKSISEYGAHNQRGLVTVAVRSRKFIWLEELIEMAEESASSPIYPLLKRPDEKYVTEKAYENPKFVEDVVRGVAYKLLQRKEIYWFNVEAENMESIHGHNAYACITYPFKDYSSESSISK

SEQ ID NO: 6005 - protein, 269 aa, Caldimicrobium thiodismutans
  misc_feature (1)..(269): tr|A0A0U4W2D8|A0A0U4W2D8_9BACT GTP cyclohydrolase FolE2 OS=Caldimicrobium thiodismutans OX=1653476 GN=folE2 PE =3 SV=1
MKLPDIQSSPPEEQIPIDKVGIKNLRYPIRVLDRAKGLQATVGEFNLYVDLPSHFKGTHMSRFIEVLNEFKDEIHVRNIEEILRKLKKRLNAKSAHLEVYFPYFLEKKSPVTEISSLMEYQAFMLASLTARKIDLVLGVKVPVMTLCPCSKSVSEYGAHNQRGIITVAVRSKKFIWLEELIEMAESSASSPVYPLLKRPDEKYVTERAYENPKFVEDVVRGLAFKLLENKEIFWFTVEAENMESIHGHNAYACIRYPFENYSSESSISK

SEQ ID NO: 6006 - protein, 257 aa, Caldiserica bacterium
  misc_feature (1)..(257): tr|A0A2H9MDC5|A0A2H9MDC5_9BACT GTP cyclohydrolase FolE2 OS=Caldiserica bacterium CG02_land_8_20_14_3_00_36_38 OX=1973932 GN=folE2 PE=3 SV=1
MRDVQNDLDLRNIALNKVGVSGIVYPIRVMDKNNGFQHTVSKINMFVDLPQEFRGTHMSRFVEVLNKHRTNMSLATLENILDDIKIALKAKTAHIEVRFPYFMIKKAPISRIESFMNYECAFIASKGKNFDFVLEVNTPVHSLCPCSKEISNFGAHNQRANIKAQVRMKKLVWIEEIVNISESSASAPLYSLLKREDEKYVTEHAFQNPKFVEDMVRGVSILLDKDERITYYAIEAISFESIHNHNAYGFYSRDKRV

SEQ ID NO: 6007 - protein, 257 aa, Caldiserica bacterium; identical to SEQ ID NO: 6006
  misc_feature (1)..(257): tr|A0A2H9N4S0|A0A2H9N4S0_9BACT GTP cyclohydrolase FolE2 OS=Caldiserica bacterium CG_4_8_14_3_um_filter_35_18 O X=1973931 GN=folE2 PE=3 SV=1

SEQ ID NO: 6008 - protein, 260 aa, Caldisericum exile
  misc_feature (1)..(260): tr|I0GJK5|I0GJK5_CALEA GTP cyclohydrolase FolE2 OS=Cald isericum exile (strain DSM 21853 / NBRC 104410 / AZM16c 01) OX=511051 GN=folE2 PE=3 SV=1
MKDVQSEKDKRNIFIEKVGVSSIKYPIRIMDKQNGFQNTVALVDIYVDLPSEYRGTHMSRFVEILNKHRNNMSLSNLEKILDDTKQQLRAKVAHIVLRFPYFILKKAPITKEESFMDYECAFIASKNEKFDFVLEVNVPVHLLCPCSKEISDFGAHNQRANIRVKVKMDRLVWIEEIVEMVENSASAPLYALLKRPDEKYITEKAYMNPKFVEDIVRDVSILFDKDERITYYEIEAISYESIHNHSAYAYLHRDKNSYNK

SEQ ID NO: 6009 - protein, 257 aa, Caldisericum sp.; identical to SEQ ID NO: 6006
  misc_feature (1)..(257): tr|A0A1J5BNZ5|A0A1J5BNZ5_9BACT GTP cyclohydrolase FolE2 OS=Caldisericum sp. CG2_30_36_11 OX=1805053 GN=folE2 P E=3 SV=1

SEQ ID NO: 6010 - protein, 261 aa, Calditerrivibrio nitroreducens
  misc_feature (1)..(261): tr|A0A2J6WGY3|A0A2J6WGY3_9BACT GTP cyclohydrolase FolE2 OS=Calditerrivibrio nitroreducens OX=477976 GN=folE2 P E=3 SV=1
MVLADIQSQYDHRNLDIDRVGIKDILYPIVVKDKKNGKQSTVARINMYVKLPHNFKGTHMSRFVEVLNNHRTNIALESFKGILDDLQTVLNSEEAYIEITFPYFIEKTAPVSKLPSLMDYECTFVGISSKDKKDFTVSVKVPVISLCPCSKEISDYGAHNQRSYVTIKVRYKGMIWIEDLIEIAESSASAPIFSLLKREDEKYITEFSYDNPVFVEDIVRNAANKLLLDERVTWFEVSSENYESIHNHSAYAVIARDKRGG

SEQ ID NO: 6011 - protein, 261 aa, Calditerrivibrio nitroreducens
  misc_feature (1)..(261): tr|E4TEJ2|E4TEJ2_CALNY GTP cyclohydrolase FolE2 OS=Cald iterrivibrio nitroreducens (strain DSM 19672 / NBRC 101 217 / Yu37-1) OX=768670 GN=folE2 PE=3 SV=1
MALADIQSQYDHRNLDIDRVGIKDILYPIVVKDKKNGKQSTVARINMYVRLPHNFKGTHMSRFVEVLNNHRTNIALESFKGILDDLKTVLNSEEAHIEITFPYFIEKIAPVSNLPSLMDYECTFVGISSKDKKDFIVSVKVPVVSLCPCSKEISDYGAHNQRSYVTIKVRYKGMIWIEDLIEVAESSASAPIFSLLKREDEKYITEHSYDNPVFVEDIVRNAANKLLLDDRVTWFEVSSENYESIHNHSAYAVITRDKRGG

SEQ ID NO: 6012 - protein, 190 aa, Caldithrix abyssi
  misc_feature (1)..(190): tr|H1XX36|H1XX36_9BACT GTP cyclohydrolase 1 OS=Caldithr ix abyssi DSM 13497 OX=880073 GN=folE PE=3 SV=1
MKSMEEAVRQILLGIGEDPERQGLKNTPFRVAKMFREVTKGYQADPQKIINNAIFDVDYDEMVVVANIEYYSLCEHHLLPFFGVVHVGYIPRGKVVGLSKIPRIVDMFARRLQIQEKMTLEIAHLLNDALDPDGVGVVVEGQHMCMMMRGVQKDKAKMITSAMLGSFKDDEKTRAEFLSLIRSPRVEAPY

SEQ ID NO: 6013 - protein, 124 aa, Caldithrix sp.
  misc_feature (1)..(124): tr|A0A1F4N9Z3|A0A1F4N9Z3_9BACT GTP cyclohydrolase 1 OS= Caldithrix sp. RBG_13_44_9 OX=1797576 GN=A2Y94_15850 PE =3 SV=1
MADDLIVIRDIPFYSLCEHHLLPFFGKVHLAYIPRQNKVSGFSAITRLVDIFSRRLQIQERLTRQIANALMQFLDPRGVLVIVDAQQLCVSMRGTKKDSVRTVTRATRGEISPDCLPLLGFKTS

SEQ ID NO: 6014 - protein, 184 aa, Caldithrix sp.
  misc_feature (1)..(184): tr|A0A523HR23|A0A523HR23_9BACT GTP cyclohydrolase 1 OS= Caldithrix sp. OX=1962856 GN=folE PE=3 SV=1
MQAIIKRLLIEIGEDPEREGLLNTPARVAKSYEFLTRGYQQDPCKIITDALFTERCDEMIVVKDIEVYSLCEHHLLPFYGKCHVAYMPNGKVVGLSKIPRVVDVYARRLQVQERLTNQIADLLLDCLNPEGVAVVIEARHLCMMMRGVEKQNTVVSTSALRGVFRDNLSTRAEFMQLIKPQRNV

SEQ ID NO: 6015 - protein, 260 aa, Calditrichaeota bacterium
  misc_feature (1)..(260): tr|A0A3M1NQ14|A0A3M1NQ14_9BACT GTP cyclohydrolase FolE2 OS=Calditrichaeota bacterium OX=2212469 GN=folE2 PE=3 SV=1
MVDVQNRPDERGIPINKVGVKQLKYPIVVLDRAHEKQQTVAEVSLSVSLPHHFKGTHMSRFVEVLNEHHDEMTMWTLPTILHKLKERLDAESAHVEFTFPYFIEKRAPVSKAIGLMDYQTTFIGETYSDRDIFILKVNVPVTSLCPCSKEISDYGAHNQRGEVTIEVQCKENEMIWIEEVVEIAESSASAPVYALLKRPDERFVTMQAYDNPAFVEDIVRNVALQLKADERVVWFRVHAENFESIHNHNAFAMVEWRREN

SEQ ID NO: 6016 - protein, 191 aa, Calditrichaeota bacterium
  misc_feature (1)..(191): tr|A0A3M2FMD5|A0A3M2FMD5_9BACT GTP cyclohydrolase 1 OS= Calditrichaeota bacterium OX=2212469 GN=folE PE=3 SV=1
MKESKTEQAVRQILTDIGEDPDRQGLQKTPHRVAKMYREVTVGYHQNVEKLVNGAIYDVDYDEMVVVTNIEFYSMCEHHLLPFYGIAHVGYLPRGKVIGLSKIPRIVDMYARRLQVQENMTRQIADALHEILAPQGVGVVVEGRHMCMMMRGVQKDQAKMITSTLVGSFKEDEKTRDEFLKLIRSSRANPF

SEQ ID NO: 6017 - protein, 237 aa, Calditrichales bacterium
  misc_feature (1)..(237): tr|A0A524L9L1|A0A524L9L1_9BACT GTP cyclohydrolase I (Fr agment) OS=Calditrichales bacterium OX=2528038 GN=E4H13 _13165 PE=3 SV=1
IKNLRYPITVLDRRDGYQHTVASINMYVDLPHKYKGTHMSRFVELLHLFRPEVSLKRISVVLEKMKQHLNAASAVIEVTFPYFIEKKAPISGSPGILDYTCRIVGSSDPEGKVDLVSEVIVPISSVCPCSKEISESGAHNQRGEVRLSTRFKKFIWMEDMIELVESCASCEVYSVLKRVDEKCVTERGFSNPKFVEDIVRDIAKKLKEDSNITWFSVSAENFESIHNHSAYAHITSE

SEQ ID NO: 6018 - protein, 209 aa, Calidifontibacter indicus
  misc_feature (1)..(209): tr|A0A3D9UKJ2|A0A3D9UKJ2_9MICO GTP cyclohydrolase 1 OS= Calidifontibacter indicus OX=419650 GN=folE PE=3 SV=1
MDVSTPPGTDDIERGDGLLTVDRERAAAAVRELLLALGEDPDREGLVDTPMRVAKAFEETFAGLRQDPAEILSRTFSIDHDELIIVKDIEVYSTCEHHLVPFHGVAHVGYIPAKDGRVTGLSKIARLVDVYARRPQVQERLTTQVADALVQHLGAQGVLVVVECEHLCMSMRGVRKPGATTITSAVRGQLRDPATRAEAMSLMKAPTSR

SEQ ID NO: 6019 - protein, 256 aa, Caloramator australicus
  misc_feature (1)..(256): tr|I7LJE2|I7LJE2_9CLOT GTP cyclohydrolase FolE2 OS=Calo ramator australicus RC3 OX=857293 GN=folE2 PE=3 SV=1
MKDVQSEKDFRNVPLKKVGINSLKWPIVVKEKHGGVQHTIADMSLSVDLPSDVRGTHMSRFVELVHELQEITPKEIERALDRLKEKLHAKTAHIKIDFDYFIKKSSPVSGIISPNDIKCSFDAEKGEDFKFIMEVSVPVVTLCPCSKEISEFGAHNQRATVNIKIYTKKLIWIEDLVAIAEESASCPVFSLLKRKDEKYVTERAYLNPRFVEDVVREVALRLDENKDILWYRVYVESMESIHNHNAFACTEKGEIL

SEQ ID NO: 6020 - protein, 256 aa, Caloramator fervidus
  misc_feature (1)..(256): tr|A0A1H5W4I6|A0A1H5W4I6_9CLOT GTP cyclohydrolase FolE2 OS=Caloramator fervidus OX=29344 GN=folE2 PE=3 SV=1
MKDVQSEKDFRNVPLKKVGISKLKWPIIVKEKEGGIQHTIADMTLSVDLPADIRGTHMSRFVELVHELKEITPKEIERALDRLKEKLSAKTAHIKIDFDYFIKKPSPVTGIVSPNDVKCSFDAEKSDTYRFFMEVSVPVVTLCPCSKEISEFGAHNQRAVVNIKIYTKKLIWIEDIVAIAEESASCPVFSLLKRKDEKYVTERAYLNPRFVEDVVREVALRLDSNKDILWYRVYVESIESIHNHNAFACTEKGEII

SEQ ID NO: 6021 - protein, 256 aa, Caloramator mitchellensis
  misc_feature (1)..(256): tr|A0A0R3K2U6|A0A0R3K2U6_9CLOT GTP cyclohydrolase FolE2 OS=Caloramator mitchellensis OX=908809 GN=folE2 PE=3 S V=1
MKDVQSEKDYRNVPLKKVGINSLRWPIIIKEKDGGIQNTIADMALSVDLPADVKGTHMSRFVELVNDLKEISPKEIDKALDALKEKLHAKTAHIRIDFDYFIKKPSPVTGIISPYDVKCSFDAEKGEDFKFIMEVAVPVSTLCPCSKEISDFGAHNQRARVSIKIVSKKLIWIEDVVKIAEDSASSPVFSLLKRKDEKYVTEMAYLNPRFVEDVVREAAIRLDEIKDITYYRVYAESMESIHNHNAFACAEKGEII

SEQ ID NO: 6022 - protein, 256 aa, Caloramator proteoclasticus
  misc_feature (1)..(256): tr|A0A1M5AFT1|A0A1M5AFT1_9CLOT GTP cyclohydrolase FolE2 OS=Caloramator proteoclasticus DSM 10124 OX=1121262 GN =folE2 PE=3 SV=1
MKDVQNERDFRNIPLKHVGINNLKWPVVVRDKKNGTQNTIAKVSLSVDLPHFQRGTHMSRFVEVIKELKSVSPKDIEAMLTDLKEKLEAQVAHCRMEFDYFISKPSPVTQIESPYDVQCAFEATKNHNFDFILEVKVPVTTLCPCSKEISEFGAHNQRATVDIKIKTDKMIWIEDIVKVAEESASTPVFSLLKRKDEKWVTEMAYLNPRFVEDVAREVALRLEKNEDIKWYSVCVESIESIHNHNAFAYTEKGMME

SEQ ID NO: 6023 - protein, 256 aa, Caloramator quimbayensis
  misc_feature (1)..(256): tr|A0A1T4YEU6|A0A1T4YEU6_9CLOT GTP cyclohydrolase FolE2 OS=Caloramator quimbayensis OX=1147123 GN=folE2 PE=3 S V=1
MKDVQSEKDFRNVSLKKVGINGLKWPIVVKEKSGGVQNTISQMALSVDLPADIRGTHMSRFVELVNDLKEITPKEIEKALDNLKEKLGAKTAHLKIDFDYFIKKPSPVTGIVSPYDVKCSFDAEKGEDFIFIMEVFVPVSTLCPCSKEISEFGAHNQRAVVNISIYSKKLIWIEDLVKVAEESASSPVFSLLKRKDEKFVTERAYLNPRFVEDVVRETAIRLDDMKEILWYRVHVESMESIHNHNAFACTEKGEIV

SEQ ID NO: 6024 - protein, 256 aa, Caloramator sp.
  misc_feature (1)..(256): tr|A0A5B7THX4|A0A5B7THX4_9CLOT GTP cyclohydrolase FolE2 OS=Caloramator sp. E03 OX=2576307 GN=folE2 PE=3 SV=1
MKDVQSEKDFRNVSLKKVGINGLKWPIVVKEKSGGVQNTISQMALSVDLPADIRGTHMSRFVELVNDLKEITPKEIEKALDKLKEKLGAKTAHLKIDFDYFIKKPSPVTGIVSPYDVKCSFDAEKGEDFRFIMEVIVPVSTLCPCSKEISEFGAHNQRATVNISIYSKKLIWIEDLVKVAEDSASSPVFSLLKRKDEKFVTERAYLNPRFVEDVVREAAIRLDDMKEILWYRVYVESMESIHNHNAFACTEKGVIL

SEQ ID NO: 6025 - protein, 187 aa, Caloranaerobacter azorensis
  misc_feature (1)..(187): tr|A0A096BFV6|A0A096BFV6_9CLOT GTP cyclohydrolase 1 OS= Caloranaerobacter azorensis H53214 OX=1156417 GN=folE P E=3 SV=1
MDKEKIKRAVRDILEAIGEDPDREGLKGTPDRIARMYEEIFSGLKEDPKEHLQIYFQDEKYEELVLVKDIPFYSMCEHHLVPFFGKAHVAYIPKGGKLTGLSKLARVVETVAKRPQLQERITKTIADTLMEVLEPYGVVVVVEAEHMCMTMRGVKKPGSKTVTSAVRGIFETRPESRAEVMSLINQK

SEQ ID NO: 6026 - protein, 187 aa, Caloranaerobacter azorensis
  misc_feature (1)..(187): tr|A0A1M5W7J6|A0A1M5W7J6_9CLOT GTP cyclohydrolase 1 OS= Caloranaerobacter azorensis DSM 13643 OX=1121264 GN=fol E PE=3 SV=1
MDKEKIKRAVRDILEAIGEDPDREGLKGTPDRIARMYEEIFSGLKEDPKEHLQIYFQDEKYEELVLVKDIPFYSMCEHHLVPFFGKAHVAYIPKGGKLTGLSKLARVVETVAKRPQLQERITKTIADTLMEVLEPYGVVVVVEAEHMCMTMRGIKKPGSKTVTSAVRGIFETRPESRAEVMSLINQK

SEQ ID NO: 6027 - protein, 187 aa, Caloranaerobacter sp.
  misc_feature (1)..(187): tr|A0A0P8UYT4|A0A0P8UYT4_9CLOT GTP cyclohydrolase 1 OS= Caloranaerobacter sp. TR13 OX=1302151 GN=folE PE=3 SV=1
MDKEKIKRAIRDILEAIGEDPDREGLRGTPDRIARMYEEIFSGLNEDPKKHLEIYFQDEKYEELVLVKDIPFYSMCEHHLVPFFGKAHVAYIPKDGKLTGLSKLARVVETVAKRPQLQERITKTIADTLMEVLEPYGVVVVVEAEHMCMTMRGVKKPGSKTVTSAVRGIFETRPESRAEVMSLINHK

SEQ ID NO: 6028 - protein, 235 aa, Calothrix brevissima
  misc_feature (1)..(235): tr|A0A1Z4JZZ3|A0A1Z4JZZ3_9CYAN GTP cyclohydrolase 1 OS= Calothrix brevissima NIES-22 OX=1973478 GN=folE PE=3 SV =1
MTIASSNGSNRSQSPLIPDLADAITLRPDRNTHDGHEPELHHPKDEDMERMTAAVHQILLGVGEDPEREGLLKTPKRVAEAMRFLTSGYNQSLEQLVNGAIFDEGHSEMVLVRDINFFSLCEHHMLPFMGRAHVAYIPNQKVVGLSKLARIVEMYSRRLQVQERLTRQIAEAVQTILNPHGVAVVMEATHMCMVMRGVQKPGSWTVTSAMLGVFQEEQKTREEFLNLIRHQAAFF

SEQ ID NO: 6029 - protein, 232 aa, Calothrix desertica
  misc_feature (1)..(232): tr|A0A433VPB1|A0A433VPB1_9CYAN GTP cyclohydrolase 1 OS= Calothrix desertica PCC 7102 OX=232991 GN=folE PE=3 SV= 1
MTIARSNGSQSPLIPDLTDIISTRPDRNTHNGKTPDLHPPTPEHMEQMQDAVRNILIGVGEDPEREGLLKTPKRVAEAMRFLTSGYSQSLEDLVNNAIFDEGHNEMVLVRDIDFFSLCEHHMLPFMGRAHVAYIPNQKVVGLSKLARIVEMYSRRLQVQERLTRQIAEAVQTILEPQGVAVVMEGAHMCMAMRGVQKPGSWTVTSAMLGVFQDEQKTREEFFNLIRHQPSFF

SEQ ID NO: 6030 - protein, 102 aa, Calothrix desertica
  misc_feature (1)..(102): tr|A0A3S1AH55|A0A3S1AH55_9CYAN GTP cyclohydrolase 1 OS= Calothrix desertica PCC 7102 OX=232991 GN=DSM106972_073 700 PE=3 SV=1
MAYIPNGKVIGLSKIARICEMYARRLQVQERLTLQIADALQGLLKPQGVAVVVEATHMCMVMRSVQKPGSWTVTSAMRGVFSEDARTREEFMNLVRHNSNFR

SEQ ID NO: 6031 - protein, 217 aa, Calothrix elsteri
  misc_feature (1)..(217): tr|A0A2A2TLI7|A0A2A2TLI7_9CYAN GTP cyclohydrolase 1 OS= Calothrix elsteri CCALA 953 OX=987040 GN=folE PE=3 SV=1
MTLSYRPESDSAEKMIASIKTEAKQKVTEAEMMQAVRTLLIGLGENPDREGLKDTPKRVMKALQFLTKGYHQSLDELLNGAVFTEDANEMVLIRDIDIFSSCEHHILPIIGRAHVAYIPNGKVIGLSKIARICEMYAQRLQVQERLTLQIADALQGLLKPQGVAVVIEATHMCMVMRGIQKPGSWTVTSAMRGVFSEDVRTREEFMNLIRHSPGFHS

SEQ ID NO: 6032 - protein, 232 aa, Calothrix elsteri
  misc_feature (1)..(232): tr|A0A2A2TEE7|A0A2A2TEE7_9CYAN GTP cyclohydrolase 1 OS= Calothrix elsteri CCALA 953 OX=987040 GN=folE PE=3 SV=1
MTTARSNGSQSPLIPDLSDIINTRPDRNTHNGGQPELHPPTEEDMEQMQDAVRNIILGVGEDPEREGLLKTPKRVAESMRFLTSGYSQSLEDLVNNAIFDEGHNEMVLVRDINFFSLCEHHMLPFMGRAHVAYIPNQKVVGLSKLARIVEMYSRRLQVQERLTRQVAEAIQTVLEPQGVAVVMEGSHMCMAMRGVQKPGSWTVTSAMVGVFQEDQKTREEFFSLIRHQAAFF

SEQ ID NO: 6033 - protein, 235 aa, Calothrix parasitica
  misc_feature (1)..(235): tr|A0A1Z4LQ08|A0A1Z4LQ08_9CYAN GTP cyclohydrolase 1 OS= Calothrix parasitica NIES-267 OX=1973488 GN=folE PE=3 S V=1
MTIASSNGSNYSQSPLIPNLEDAVNPRPDRNTKDGSQPNLYPPSEEQMEQMKDAVRTMLVGVGEDPEREGLLKTPKRVAEAMRFLTSGYSQSLDELVNGAIFDEGHNEMVLVRDINFFSLCEHHMLPFMGKAHVAYIPNQKVVGLSKLARIVEMYSRRLQVQERLNRQIAEAVQEILEPQGVAVVMEATHMCMAMRGVQKPGSWTVTSAMLGVFEQEQKTREEFFNLIRHQPAFF

SEQ ID NO: 6034 - protein, 217 aa, Calothrix parasitica
  misc_feature (1)..(217): tr|A0A1Z4LQW0|A0A1Z4LQW0_9CYAN GTP cyclohydrolase 1 OS= Calothrix parasitica NIES-267 OX=1973488 GN=folE PE=3 S V=1
MTLSIRPELPSSERTLSSLSKQNQSSNVTEAEMMEAVRTLLIGLGEDPNREGLKDTPKRVVKALQFLTKGYHESLDELLNGAVFTEDANEMVLVRDIDIFSSCEHHILPVIGRAHVAYIPNGKVIGLSKVARICEMYARRLQVQERLTVQIADALQGLLKPQGVAVVLEASHMCMVMRGVQKPGSWTVTSAMRGVFAEDAKTREEFMNLIRHKPNFS

SEQ ID NO: 6035 - protein, 217 aa, Calothrix sp.
  misc_feature (1)..(217): tr|A0A1Q4RA44|A0A1Q4RA44_9CYAN GTP cyclohydrolase 1 OS= Calothrix sp. HK-06 OX=1137096 GN=folE PE=3 SV=1
MFTEKQENNLNLIENNNVVATEEFEDLSDCKELNEPIIEAVKTLLLNLGEEPEREGLLRTPKRVAEAMRFLTSGYNQSLEALVNCAVFDEGHNEMVLVRDINVFSLCEHHMLPFMGKAHIAYMPNQKVVGLSKLARIVEMYSRRLQVQERLTTQIAEAVHTILEPQGVAVVIEATHMCMVMRGVQKPGSWTVTSAMLGVFQEEKNRREFLNFTSHNK

SEQ ID NO: 6036 - protein, 216 aa, Calothrix sp.
  misc_feature (1)..(216): tr|A0A1Z4RFD7|A0A1Z4RFD7_9CYAN GTP cyclohydrolase 1 OS= Calothrix sp. NIES-4101 OX=2005461 GN=folE PE=3 SV=1
MTLSISPELTSAEQVLSSLATQAKPKVTDAEMMQAVRTLLIGLGEDPDREGLKDTPKRVMKALQFLTKGYHESLDELLNGAVFTEDANEMVLVRDIDIFSSCEHHILPIIGRAHVAYIPNGKVIGLSKVARICEMYARRLQVQERLTFQIADALQRLLKPQGVAVVIEATHMCMVMRGVQKPGSWTVTSAMRGVFADDARTREEFMNLIRHKPSFS

SEQ ID NO: 6037 - protein, 216 aa, Camelimonas lactis
  misc_feature (1)..(216): tr|A0A4R2GL66|A0A4R2GL66_9RHIZ GTP cyclohydrolase 1 OS= Camelimonas lactis OX=659006 GN=folE PE=3 SV=1
MDSVVKSLSARLAPANADKQVTVPDFERPTREEAEAAVRTLIAWAGDNPDREGLVDTPRRVVKAYEELYGGYRQDPEAQLDRVFAEVGGYDDMVLLRDIQFFSHCEHHMVPFTGRVHIAYYPNGGVVGLSKLARVVDIFANRLQTQETMTAQILDTIDARLRPRGAAVMVEAAHMCMSMRGIQKQGSMTITSRFSGVFREDPAEQARFMTLVRAGA

SEQ ID NO: 6038 - protein, 192 aa, Caminibacter mediatlanticus
  misc_feature (1)..(192): tr|A0A4P9DTM4|A0A4P9DTM4_9PROT GTP cyclohydrolase 1 OS= Caminibacter mediatlanticus TB-2 OX=391592 GN=folE PE=3 SV=1
MSIDLEKLETAAKMILEAIGENPNRDGLIKTPKRVAKSFEEIYSGYFKDPKEVLNDALFDSTNNEMVVVRDIEFYSMCEHHILPFFGRVHVAYIPDKKVVGLSKIPRMVEVFARRLQIQEQLTEQIADAIMEVVKPKGVGVVIHARHMCMEMRGVKTKHSYTSSSALRGIFLEEKTREEFFNIINAKIDNHF

SEQ ID NO: 6039 - protein, 188 aa, Caminicella sporogenes
  misc_feature (1)..(188): tr|A0A1M6P1J8|A0A1M6P1J8_9CLOT GTP cyclohydrolase 1 OS= Caminicella sporogenes DSM 14501 OX=1121266 GN=folE PE= 3 SV=1
MDKERIERAVREILEAIGENPEREGLKDTPKRIARMYEEIFSGLNEDPGKHLEIYFQEEKHEELVLVKDIPFYSMCEHHLVPFFGKAHVGYLPKNGKLTGLSKLARVVETVARRPQLQERLTATIADILVDKLEPYGVIVVVEAEHMCMTMRGVKKPGSKTVTSAVRGLFNKDAKARAEAMALINFGR

SEQ ID NO: 6040 - protein, 190 aa, Campylobacter avium
  misc_feature (1)..(190): tr|A0A222MUI5|A0A222MUI5_9PROT GTP cyclohydrolase 1 OS= Campylobacter avium LMG 24591 OX=522484 GN=folE PE=3 SV =1
MQEKFENHIKDILTLIGEDPQRDGLLKTPSRVFKSFEFLTSGYKQDPKEILSKALFDSTNNEMILVRDIEFYSLCEHHLLPFFGRAHIAYIPDKKVLGLSKFARLVELYARRLQIQEQLTEQIAEALISFVGAKGVGVVLEARHMCMEMRGVQKANATTLTSALRGSFLANEKTRKEFFSLINSSKQVKF

SEQ ID NO: 6041 - protein, 192 aa, Campylobacter blaseri
  misc_feature (1)..(192): tr|A0A2P8R0X3|A0A2P8R0X3_9PROT GTP cyclohydrolase 1 OS= Campylobacter blaseri OX=2042961 GN=folE PE=3 SV=1
MSNQENFENAVKTMLKIVGENIDRDGLKKTPTRVFKAFEFLTSGYKEDPKTVLNDALFDSTNNEMVLIKDIEFYSLCEHHLLPIIGRAHVAYIPNGKVVGLSKIPRMVNIFARRLQIQEQMTEQIAQAIQDVIKPQGVGVVLEARHMCMEMRGVEKINSKTTTSALRGGFISDHRTREEFFSLINSPKYSRF

SEQ ID NO: 6042 - protein, 190 aa, Campylobacter coli
  misc_feature (1)..(190): tr|W8L133|W8L133_CAMCO GTP cyclohydrolase 1 OS=Campylob acter coli RM4661 OX=1183379 GN=folE PE=3 SV=1
MQKKFEDCVKTILEIIGENPNREGLIKTPNRVFKAYEFLTSGYTQNVKEILNDALFESSNNEMVLVRDIEFYSLCEHHLLPFFGRAHVAYIPNKKVVGLSKIPRLVEVFARRLQIQEQLTEQIAQALMENVDAKGVGVVIEARHMCVEMRGVQKANSTTTTSALRGIFLKNEKTREEFFSLINSAKQVRF

SEQ ID NO: 6043 - protein, 200 aa, Campylobacter coli
  misc_feature (1)..(200): tr|A0A400M320|A0A400M320_CAMCO GTP cyclohydrolase 1 OS= Campylobacter coli OX=195 GN=folE PE=3 SV=1
MSQEKNTENNLQEKFKNCVKTMLEIMGENPTREGLVKTPNRVFKAYEFLTSGYKKNVKEILNNALFESSNNEMVLVRDIEFYSLCEHHLLPFFGRVHVAYIPDQKVVGLSKIPRLVEVYARRLQIQEQLTEQIAEALMENVGAKGVGVVIEARHMCVEMRGVQKANSTTTTSALRGLFLKNEKTREEFFSLINSPKQVRF

SEQ ID NO: 6044 - protein, 190 aa, Campylobacter concisus
  misc_feature (1)..(190): sp|A7ZB36|GCH1_CAMC1 GTP cyclohydrolase 1 OS=Campylobac ter concisus (strain 13826) OX=360104 GN=folE PE=3 SV=1
MQESFENSVKNMLTIIGEDPNREGLIKTPERVYKAFKFLTSGYEQDPKEVLGDALFTSSNNEMVLMRNIEFYSLCEHHLLPIIGRVHVAYIPNGKVVGLSKIPRMVNIYARRLQIQEQMTEQIAKALEDVIAPKGVGVVVEARHMCVEMRGVEKINSTTTTSALRGCFIKNADTRREFFSLINSPRETHF

SEQ ID NO: 6045 - protein, 190 aa, Campylobacter concisus
  misc_feature (1)..(190): tr|A0A1L9R3I3|A0A1L9R3I3_9PROT GTP cyclohydrolase 1 OS= Campylobacter concisus OX=199 GN=folE PE=3 SV=1
MQESFENSVKNMLTIIGEDPNREGLIKTPERVYKAFKFLTSGYDQDPKEVLGDALFTSSNNEMVLMRNIEFYSLCEHHLLPIIGRVHVAYIPNGKVVGLSKIPRMVNIYARRLQIQEQMTEQIAKALEDVIAPKGVGVVVEARHMCVEMRGVEKINSTTTTSALRGCFIKNADTRREFFSLINSPRETHF

SEQ ID NO: 6046 - protein, 190 aa, Campylobacter cuniculorum
  misc_feature (1)..(190): tr|A0A1W6BUJ1|A0A1W6BUJ1_9PROT GTP cyclohydrolase 1 OS= Campylobacter cuniculorum DSM 23162 = LMG 24588 OX=1121 267 GN=folE PE=3 SV=1
MQKKFENCVKTILELIGENPQREGLLKTPTRIFKTYEFLTSGYKQDIDEILNGALFESSNNEMILVRDIEFYSLCEHHLLPFFGRVHVAYIPNSKVVGLSKIPRLVEVFARRLQIQEQLTEQIADALMQNVGAKGVGVVIEARHMCIEMRGIQKANSTTSTSALRGLFLKNEKTREEFFTLINSPKQVRF

SEQ ID NO: 6047 - protein, 190 aa, Campylobacter curvus
  misc_feature (1)..(190): sp|A7GW42|GCH1_CAMC5 GTP cyclohydrolase 1 OS=Campylobac ter curvus (strain 525.92) OX=360105 GN=folE PE=3 SV=1
MQESFENSVKNILKIIGEDPNREGLLKTPSRVYKAFKFLTSGYEEDPKEVLNDALFTSSNNEMVLMRNIEFYSLCEHHLLPIIGRVHVAYIPNGKVVGLSKIPRMVNIYARRLQIQEQMTEQIAQALAEVIEPKGVGVVVEARHMCVEMRGVQKINSTTTTSALRGCFIKNADTRREFFSLINSPQETHF

SEQ ID NO: 6048 - protein, 195 aa, Campylobacter fetus
  misc_feature (1)..(195): tr|A0A0E1GNS1|A0A0E1GNS1_CAMFE GTP cyclohydrolase 1 OS= Campylobacter fetus subsp. fetus 04/554 OX=1240980 GN=f olE PE=3 SV=1
MFDQNRKIEFEKCVKTMLEILGENPDREGLLNTPKRVAKAYEFITSGYWQDPKDVLNDAMFDSSNNEMVLLKDIEFYSICEHHLLPIIGRAHVAYIPDGKVVGLSKIPRMVNIYARRLQIQEQMTEQIAQALQDAISPKGVGVVVEARHMCIEMRGVEKINSTTTTSALRGIFIKNAETRKEFFDLINSPKSVKF

SEQ ID NO: 6049 - protein, 195 aa, Campylobacter fetus
  misc_feature (1)..(195): tr|A0A433YGE7|A0A433YGE7_CAMFE GTP cyclohydrolase 1 OS= Campylobacter fetus OX=196 GN=folE PE=3 SV=1
MFDQNRKIEFEKCVKTMLEILGENPDREGLLNTPKRVAKAYEFITSGYWQDPKDVLNDAMFDSSNNEMVLIKDIEFYSICEHHLLPIIGRAHVAYIPDGKVVGLSKIPRMVNIYARRLQIQEQMTEQIAQALQDAISPKGVGVVVEARHMCIEMRGVEKINSTTTTSALRGIFIKNAETRKEFFDLINSPKSVKF

SEQ ID NO: 6050 - protein, 195 aa, Campylobacter geochelonis
  misc_feature (1)..(195): tr|A0A128EAY3|A0A128EAY3_9PROT GTP cyclohydrolase 1 OS= Campylobacter geochelonis OX=1780362 GN=folE PE=3 SV=1
MDKDLKQENFEKSVKNMLELLGEDPNREGLLKTPNRVFKAYEFMTSGYSQDPKIVLNDALFESSNNEMVLIKDIEFYSLCEHHLLPIIGRAHVAYIPNGKVVGLSKIPRMVNIFARRLQIQEQMTEQIAQAIQEVIKPKGVGVVLQARHMCVEMRGVEKINSTTTTSALRGSFISDSRTRKEFFSLINSPRDSRF

SEQ ID NO: 6051 - protein, 194 aa, Campylobacter gracilis
  misc_feature (1)..(194): tr|C8PIC2|C8PIC2_9PROT GTP cyclohydrolase 1 OS=Campylob acter gracilis RM3268 OX=553220 GN=folE PE=3 SV=1
MDEKSRAKFESCVSQMLEILGEDPKRDGLAKTPGRVAKAYEFLTSGYELDPKEILNDALFESSNNEMVLIKDIEFYSLCEHHLLPIIGRAHVAYIPNKKVVGLSKIPRMVNIFARRLQIQEQLTEQIASAIQEVIHPLGVGVVLQARHMCMEMRGVQKINSTTTTSALRGLFISRNDTRKEFFDLINSPKTFGF

SEQ ID NO: 6052 - protein, 190 aa, Campylobacter helveticus
  misc_feature (1)..(190): tr|A0A1V0REC1|A0A1V0REC1_9PROT GTP cyclohydrolase 1 OS= Campylobacter helveticus OX=28898 GN=folE PE=3 SV=1
MQEKFEKCVENMLEIIGENPKREGLLKTPTRVFKSYEFLTSGYKQDVKEILNDALFDSSNNEMVLVRDIEFYSLCEHHLLPFFGRAHIAYIPDKKVVGLSKIPRLVEVFARRLQIQEQLTEQIAEALMQNVGAKGVGVVLEARHLCVEMRGVQKANSTTSTSALRGLFLKNEKTREEFFSLINSPKQVRF

SEQ ID NO: 6053 - protein, 190 aa, Campylobacter hepaticus
  misc_feature (1)..(190): tr|A0A424Z0Y2|A0A424Z0Y2_9PROT GTP cyclohydrolase 1 OS= Campylobacter hepaticus OX=1813019 GN=folE PE=3 SV=1
MQEQFENCIKTMLEIIGENPTREGLIKTPNRVFKAYEFLTSGYKQNAKEILNDALFESSNKEMVLVRDIEFYSLCEHHLLPFFGHVHVAYIPDEKVVGLSKIPRIVEMYAKRLQLQEQLSEQIAQCLMENLNAKGVGVVIQARHMCVQMRGVQKINSTTFTSSLRGVFLEDEKIRKEFFELINLSKQVNL

SEQ ID NO: 6054 - protein, 194 aa, Campylobacter hominis
  misc_feature (1)..(194): tr|A7HZH2|A7HZH2_CAMHC GTP cyclohydrolase 1 OS=Campylob acter hominis (strain ATCC BAA-381 / LMG 19568 / NCTC 1 3146 / CH001A) OX=360107 GN=folE PE=3 SV=1
MDEQSKIEIEKHMQEILRLIGENPERDGLVKTPERVAKSLEFLTSGYRMEPKNVLNDALFSSTNNEMVLMKNIEFYSLCEHHLLPIIGRVHVAYIPNKKVVGLSKIPRMVNIFARRLQIQEQMTEQIANAIQEVVHPLGVGVVVEARHMCVEMRGVEKINSITTTSALRGSFITRADTRKEFFDLINSPKNFAF

SEQ ID NO: 6055 - protein, 195 aa, Campylobacter hyointestinalis
  misc_feature (1)..(195): tr|A0A172ST84|A0A172ST84_CAMHY GTP cyclohydrolase 1 OS= Campylobacter hyointestinalis subsp. hyointestinalis LM G 9260 OX=1031746 GN=folE PE=3 SV=1
MFDQNRRAEFEKCIRTMLEIMGENPDREGLLDTPKRVAKAYEFITSGYSLNPKDVLNDALFDSSNNEMVLIKDIEFYSLCEHHLLPIIGRAHVAYIPNGKVVGLSKIPRMVNIYARRLQIQEQMTEQIAVALQEAINPKGVGVVVEARHMCVEMRGVQKINSITTTSALRGIFIKSAETRKEFFDLINSPKSVKF

SEQ ID NO: 6056 - protein, 195 aa, Campylobacter hyointestinalis
  misc_feature (1)..(195): tr|A0A330FBF7|A0A330FBF7_CAMHY GTP cyclohydrolase 1 OS= Campylobacter hyointestinalis subsp. lawsonii OX=91353 GN=folE PE=3 SV=1
MFDQNRRAEFEKCIRTMLEIIGENPDREGLLDTPKRVAKAYEFITSGYSLNPKDVLNDALFDSSNNEMVLIKDIEFYSLCEHHLLPIIGRAHVAYIPNGKVVGLSKIPRMVNIYARRLQIQEQMTEQIAIALQEAINPKGVGVVVEARHMCVEMRGVQKINSITTTSALRGIFIKSAETRKEFFDLINSPKSVKF

SEQ ID NO: 6057 - protein, 195 aa, Campylobacter iguaniorum
  misc_feature (1)..(195): tr|A0A076FBU0|A0A076FBU0_9PROT GTP cyclohydrolase 1 OS= Campylobacter iguaniorum OX=1244531 GN=folE PE=3 SV=1
MFDESRRSEFENCVKTMLEIMGEDPKRGGLLDTPKRVAKAYEFITSGYSMDPKDVLNDALFQSSNNEMVLIKDIEFYSVCEHHLLPIIGRVHVAYIPDGQVVGLSKIPRMVNIYARRLQIQEQMTEQIAQAIAETIKPKGVGVVVEARHMCVEMRGVEKINSITTTSALRGSFIKSAETRKEFFDLINSPRSVKF

SEQ ID NO: 6058 - protein, 190 aa, Campylobacter insulaenigrae
  misc_feature (1)..(190): tr|A0A0A8H2L3|A0A0A8H2L3_9PROT GTP cyclohydrolase 1 OS= Campylobacter insulaenigrae NCTC 12927 OX=1031564 GN=fo lE PE=3 SV=1
MQEKFENSVKNILELIGENPSREGLLKTPTRVFKAFEFLTSGYKQDPKKILNDALFESSNNEMVLIRDIEFYSLCEHHLLPFFGRIHVAYIPDKKVVGLSKIPRLVEVFARRLQIQEQLTEQIAESLMKYVGAKGVGVVIEARHMCVEMRGIQKANSTTSTSALRGIFLKNEKTRKEFFTLINSAKQVRF

SEQ ID NO: 6059 - protein, 190 aa, Campylobacter jejuni
  misc_feature (1)..(190): sp|P51594|GCH1_CAMJE GTP cyclohydrolase 1 OS=Campylobac ter jejuni subsp. jejuni serotype O:2 (strain ATCC 7008 19 / NCTC 11168) OX=192222 GN=folE PE=3 SV=2
MQKKFEDCVKTMLEIIGENPNREGLIKTPNRVFKAYEFLTSGYTQNVKEILNDALFESSNNEMVLVRDIEFYSLCEHHLLPFFGRAHVAYIPNKKVVGLSKIPRLVEVFARRLQIQEQLTEQIAQALMENVDAKGVGVVIEARHMCVEMRGVQKANSTTTTSALRGIFLKNEKTREEFFSLINSAKQVRF

SEQ ID NO: 6060 - protein, 190 aa, Campylobacter jejuni
  misc_feature (1)..(190): tr|A0A381D0F0|A0A381D0F0_CAMJU GTP cyclohydrolase 1 OS= Campylobacter jejuni subsp. doylei OX=32021 GN=folE PE= 3 SV=1
MQKKFEDCVKTMLEIIGENPNREGLIKTPNRVFKAYEFLTSGYTQNVKEILNDALFESSNNEMVLVRDIEFYSLCEHHLLPFFGRAHVAYIPNKKVVGLSKIPRLVEVFARRLQIQEQLTEQIAQALMENADAKGVGVIIEARHMCVEMRGVQKANSTTTTSALRGIFLKNEKIREEFFSLINSAKQVRF

SEQ ID NO: 6061 - protein, 195 aa, Campylobacter lanienae
  misc_feature (1)..(195): tr|A0A381D7H5|A0A381D7H5_9PROT GTP cyclohydrolase 1 OS= Campylobacter lanienae OX=75658 GN=folE PE=3 SV=1
MFDKNRMTEFQDCVKKMLEIMGEDPNRDGLLNTPKRVAKAYEFITQGYSQSPLDILGDAMFESSNNEMVLIKDIEFYSICEHHLLPIIGRAHVAYIPDGKVVGLSKIPRMVNIYARRLQIQEQMTEQIAQALQEAINPKGVGVVLEARHMCMEMRGVEKINSVTTTSALRGSFIKNPETRKEFFDLINSPKSVKF

SEQ ID NO: 6062 - protein, 195 aa, Campylobacter lanienae
  misc_feature (1)..(195): tr|A0A562Y241|A0A562Y241_9PROT GTP cyclohydrolase 1 OS= Campylobacter lanienae OX=75658 GN=folE PE=3 SV=1
MFDKSKMAEFENCVKKMLEIIGENPNRDGLINTPKRVAKAYEFITQGYNQSPIEILGDAMFESSNNEMVLIKDIEFYSICEHHLLPIIGRAHVAYIPDGKVVGLSKIPRMVNIYARRLQIQEQMTEQIAQALQEAINPKGVGVVVEARHMCMEMRGVEKINSVTTTSALRGSFIKNPETRKEFFDLINSPKSVKF

SEQ ID NO: 6063 - protein, 190 aa, Campylobacter lari
  misc_feature (1)..(190): sp|B9KDZ8|GCH1_CAMLR GTP cyclohydrolase 1 OS=Campylobac ter lari (strain RM2100 / D67 / ATCC BAA-1060) OX=30626 3 GN=folE PE=3 SV=1
MQEKFEQSVKNMLEIIGENPQREGLLKTPTRVFKAFEFLNSGYKQDPKQILNDALFESSNNEMVLVRDIEFYSLCEHHLLPFFGRVHVAYIPDKKVVGLSKIPRLVEVFARRLQIQEQLTEQIAEALMEHVGAKGVGVVIEARHMCVEMRGVQKANSTTSTSALRGSFLKSEKTRKEFFTLINSAKQVRF

SEQ ID NO: 6064 - protein, 190 aa, Campylobacter lari
  misc_feature (1)..(190): tr|A0A0A8HXH0|A0A0A8HXH0_CAMLA GTP cyclohydrolase 1 OS= Campylobacter lari NCTC 11845 OX=1388749 GN=folE PE=3 S V=1
MQEKFEQSVKNMLEIIGENPQREGLLKTPTRVFKAFEFLSSGYKQDPKQILNDALFESSNNEMVLVRDIEFYSLCEHHLLPFFGRVHVAYIPDKKVVGLSKIPRLVEVFARRLQIQEQLTEQIAEALMEHVGAKGVGVVIEARHMCVEMRGVQKANSTTSTSALRGSFLKSEKTRKEFFTLINSAKQVRF

SEQ ID NO: 6065 - protein, 190 aa, Campylobacter ornithocola
  misc_feature (1)..(190): tr|A0A1C2FWS3|A0A1C2FWS3_9PROT GTP cyclohydrolase 1 OS= Campylobacter ornithocola OX=1848766 GN=folE PE=3 SV=1
MQKKFEQSIKNMLEIIGEDPQREGLLKTPARVFKAFEFLNSGYKQDPKQILNDALFESSNNEMVLVRDIEFYSLCEHHLLPFFGRVHVAYIPDKKVVGLSKIPRLVEVFARRLQIQEQLTEQIAEALMEYVGAKGVGVVIEARHMCVEMRGVQKANSTTSTSALRGSFLKSEKTRKEFFTLINSAKQVRF

SEQ ID NO: 6066 - protein, 190 aa, Campylobacter peloridis
  misc_feature (1)..(190): tr|A0A0A8GXL9|A0A0A8GXL9_9PROT GTP cyclohydrolase 1 OS= Campylobacter peloridis LMG 23910 OX=1388753 GN=folE PE =3 SV=1
MQKKFEQSVINILEIIGENPTRDGLIKTPARVFKAFEFLSSGYKQDPKKILNDALFDSSNNEMVLVRDIEFYSLCEHHLLPFFGRVHVAYIPDKKVVGLSKIPRLVEVFARRLQIQEQLTEQIAESLMEHVGAKGVGVVIEARHMCVEMRGVQKANSTTSTSALRGSFLKSEKTRKEFFSLINSSKQVRF

SEQ ID NO: 6067 - protein, 190 aa, Campylobacter peloridis
  misc_feature (1)..(190): tr|A0A5C7DMX7|A0A5C7DMX7_9PROT GTP cyclohydrolase 1 OS= Campylobacter peloridis OX=488546 GN=folE PE=3 SV=1
MQKKFEQSIINILEIIGENPNRDGLLKTPTRVFKAFEFLSNGYKQDPKKILNDALFDSSNNEMVLVRDIEFYSLCEHHLLPFFGRVHVAYIPDKKVVGLSKIPRLVEVFARRLQIQEQLTEQIAESLMEHVGAKGVGVVIEARHMCVEMRGVQKANSTTSTSALRGSFLKSEKTRKEFFSLINSSKQVRF

SEQ ID NO: 6068 - protein, 190 aa, Campylobacter pinnipediorum
  misc_feature (1)..(190): tr|A0A1S6TM09|A0A1S6TM09_9PROT GTP cyclohydrolase 1 OS= Campylobacter pinnipediorum subsp. pinnipediorum OX=166 0067 GN=folE PE=3 SV=1
MQESFENSVRNMLTIIGEDINREGLIKTPERVFKSFKDLTSGYKEDPKEVLNNALFQSSNNEMVLIKDIEFYSLCEHHLLPIIGRVHVAYIPNGKVVGLSKIPRMVNIYAKRLQIQEQMTEQIAQAIADVIEPKGVGVVVQARHMCMEMRGVQKINSTTTTSALRGAFIKNAETRKEFFSLINSPKEFSF

SEQ ID NO: 6069 - protein, 190 aa, Campylobacter pinnipediorum
  misc_feature (1)..(190): tr|A0A1S6U5F2|A0A1S6U5F2_9PROT GTP cyclohydrolase 1 OS= Campylobacter pinnipediorum subsp. caledonicus OX=18743 62 GN=folE PE=3 SV=1
MQESFENSVRNMLTIIGEDINREGLIKTPERVFKSFRDLTSGYKEDPKEVLNNALFQSSNNEMVLIKDIEFYSLCEHHLLPIIGRVHVAYIPNGKVVGLSKIPRMVNIYAKRLQIQEQMTEQIAQAIADVIEPKGVGVVVQARHMCMEMRGVQKINSTTTTSALRGAFIKNAETRKEFFSLINSPKEFSF

SEQ ID NO: 6070 - protein, 200 aa, Campylobacter rectus
  misc_feature (1)..(200): tr|B9D2K4|B9D2K4_CAMRE GTP cyclohydrolase 1 OS=Campylob acter rectus RM3267 OX=553218 GN=folE PE=3 SV=1
MQKNLKNEDLKKEKFESCVEQMLSLVGEDPRREGLAKTPERVFKAFEFLTSGYWQDPKVVLNDALFDSSNNEMVLVRDIEFYSLCEHHLLPFFGRVHVAYIPNHKVVGLSKIPRMVNIFARRLQIQEQLTEQIAEAVQDVIKPKGVGVVIEARHMCVEMRGVGKINSTTTTSALRGCFLKSSETRREFFSLINSHKELRF

SEQ ID NO: 6071 - protein, 200 aa, Campylobacter rectus; identical to SEQ ID NO: 6070
  misc_feature (1)..(200): tr|A0A3P1X7E5|A0A3P1X7E5_CAMRE GTP cyclohydrolase 1 OS= Campylobacter rectus OX=203 GN=folE PE=3 SV=1

SEQ ID NO: 6072 - protein, 200 aa, Campylobacter showae
  misc_feature (1)..(200): tr|M3JDZ0|M3JDZ0_9PROT GTP cyclohydrolase 1 OS=Campylob acter showae CC57C OX=1073353 GN=folE PE=3 SV=1
MQENLKNENLKKEKFESCVEQMLNLVGEDPNREGLIKTPERVFKAYEFLTSGYSQDPKVVLNDALFDSSNNEMVLVRDIEFYSLCEHHLLPFFGRVHVAYIPNHKVVGLSKIPRMVNIFARRLQIQEQLTEQIAEAVQDVIKPKGVGVVIEARHMCVEMRGVGKINSTTTTSALRGCFLKSSETRREFFSLINSHKEVRF

SEQ ID NO: 6073 - protein, 200 aa, Campylobacter showae
  misc_feature (1)..(200): tr|C6RHY8|C6RHY8_9PROT GTP cyclohydrolase 1 OS=Campylob acter showae RM3277 OX=553219 GN=folE PE=3 SV=1
MQENLKNEILKKEKFESCVEQMLNLVGEDPHREGLAKTPERVFKAYEFLTSGYWQDPKVVLNDALFDSSNNEMVLVRDIEFYSLCEHHLLPFFGRVHVAYIPNHKVVGLSKIPRMVNIFARRLQIQEQLTEQIAEAVQEVIKPKGVGVVIEARHMCVEMRGVGKINSTTTTSALRGCFLKSSETRREFFSLINSHKEVRF

SEQ ID NO: 6074 - protein, 195 aa, Campylobacter sp.
  misc_feature (1)..(195): tr|A0A1X9SV30|A0A1X9SV30_9PROT GTP cyclohydrolase 1 OS= Campylobacter sp. RM6137 OX=1660073 GN=folE PE=3 SV=1
MFDKSKMAEFEDCVKKMLQIIGEDPNRDGLINTPKRVAKAYEFITQGYNQSPLEILGDAMFESSNNEMVLIKDIEFYSICEHHLLPIIGRVHVAYIPNGKVVGLSKIPRMVNIYARRLQIQEQMTEQIAQALQEAINPKGVGVVVEARHMCMEMRGVEKINSVTTTSALRGSFIKNPETRKEFFDLINSPKSVKF

SEQ ID NO: 6075 - protein, 190 aa, Campylobacter sp.
  misc_feature (1)..(190): tr|A0A4U7BDK8|A0A4U7BDK8_9PROT GTP cyclohydrolase 1 OS= Campylobacter sp. MIT 12-5580 OX=2040651 GN=folE PE=3 S V=1
MQEEFEKSVTNILNLIGENPQREGLLKTPARVAKSFEFLTQGYKQDPKQILNDALFASSNNEMVLVRDIEFYSLCEHHLLPFFGRVHVAYIPDKKVVGLSKIPRLVEVFARRLQIQEQLTEQIAEALMENVGAKGVGVVIEARHLCVEMRGVQKANSTTSTSALRGCFLKNDNTRREFFSLINSSKQVRF

SEQ ID NO: 6076 - protein, 194 aa, Campylobacter sputorum
  misc_feature (1)..(194): tr|A0A381DKH6|A0A381DKH6_9PROT GTP cyclohydrolase 1 OS= Campylobacter sputorum biovar sputorum OX=32024 GN=folE PE=3 SV=1
MDLSRKDEFMQAFRTMLEIMGEDVNREGLLKTPERVFKAYEFMTSGYDKDPAEVLNDALFNTSNSEMVLIRDIEFYSLCEHHILPIIGKAHVAYIPNKKVVGLSKIPRMVNIFARRLQIQEQMTEQIANAIQSVIKPFGVGVVLQARHMCIEMRGVEKINSTTTTSALRGSFITNPDTRKEFFSLINSPREPRF

SEQ ID NO: 6077 - protein, 190 aa, Campylobacter subantarcticus
  misc_feature (1)..(190): tr|A0A0A8HF38|A0A0A8HF38_9PROT GTP cyclohydrolase 1 OS= Campylobacter subantarcticus LMG 24374 OX=1388751 GN=fo lE PE=3 SV=1
MQEKFEQSVKNMLEIIGENPQREGLLKTPTRVFKAFEFFSSGYKQDPKQILNDALFESSNNEMVLVRDIEFYSLCEHHLLPFFGRVHVAYIPNKKVIGLSKIPRLVEVFARRLQIQEQLTEQIAEALMEHVGAKGVGVVIEARHMCVEMRGVQKANSTTSTSALRGSFLKSEKTRKEFFTLINSAKQVRF

SEQ ID NO: 6078 - protein, 190 aa, Campylobacter upsaliensis
  misc_feature (1)..(190): tr|A0A381EGE0|A0A381EGE0_CAMUP GTP cyclohydrolase 1 OS= Campylobacter upsaliensis OX=28080 GN=folE PE=3 SV=1
MQEKFENCVKNILELIGENPQREGLLKTPTRVFKSYEFLTNGYKKDVKEILNNALFDSSNNEMVLVRDIEFYSLCEHHLLPFFGRAHIAYIPDKKVVGLSKIPRLVEVFARRLQIQEQLTEQIAEALMQNVGAKGVGVVLEARHMCVEMRGVQKANSTTSTSALRGLFLKNEKTRREFFSLINSSKQVRF

SEQ ID NO: 6079 - protein, 190 aa, Campylobacter upsaliensis
  misc_feature (1)..(190): tr|A0A3X8R6M3|A0A3X8R6M3_CAMUP GTP cyclohydrolase 1 OS= Campylobacter upsaliensis OX=28080 GN=folE PE=3 SV=1
MQEKFENCVKNMLELIGENPQREGLLKTPTRVFKSYEFLTNGYKKDVKEILNDALFDSSNNEMVLVRDIEFYSLCEHHLLPFFGRAHIAYIPDKKVVGLSKIPRLVEIFARRLQIQEQLTEQIAEALMQNVGAKGVGVVLEARHMCVEMRGVQKANSTTSTSALRGLFLKNEKTRREFFSLINSSKQVRF

SEQ ID NO: 6080 - protein, 196 aa, Campylobacter ureolyticus
  misc_feature (1)..(196): tr|A0A0K1HHT4|A0A0K1HHT4_9PROT GTP cyclohydrolase 1 OS= Campylobacter ureolyticus RIGS 9880 OX=1032069 GN=folE PE=3 SV=1
MDNSKKKSIEFEKSVKNMLEILGEDPNREGLIKTPHRVFKAYEFMTSGYKQDPKVVLNDALFESSNNEMVLIKDIEFYSLCEHHLLPIIGRAHVAYIPNGKVVGLSKIPRMVNIFARRLQIQEQLTEQIAGALQEVINPRGVGVVLEARHMCIEMRGVEKINSTTTTSALRGSFISDPRTRKEFFSLINSSREARF

SEQ ID NO: 6081 - protein, 196 aa, Campylobacter ureolyticus
  misc_feature (1)..(196): tr|S3XW85|S3XW85_9PROT GTP cyclohydrolase 1 OS=Campylob acter ureolyticus ACS-301-V-Sch3b OX=883165 GN=folE PE= 3 SV=1
MDNNKKNSIEFEKSVKNMLEILGEDPNREGLIKTPQRVFKAYEFMTSGYKEDPKVVLNDALFESSNNEMVLIKDIEFYSLCEHHLLPIIGRAHVAYIPNGKVVGLSKIPRMVNIFARRLQIQEQLTEQIAGALQEVINPRGVGVVLEARHMCIEMRGVEKINSTTTTSALRGSFISDPRTRKEFFSLINSSREARF

SEQ ID NO: 6082 - protein, 190 aa, Campylobacter volucris
  misc_feature (1)..(190): tr|A0A5C8KWQ1|A0A5C8KWQ1_9PROT GTP cyclohydrolase 1 OS= Campylobacter volucris OX=1031542 GN=folE PE=3 SV=1
MQEKFENSVKNMLEIIGENPQREGLLKTPTRVFKAFEFLTSGYKQDPKKILNDALFESSNNEMVLVRDIEFYSLCEHHLLPFFGRVHVAYIPDKKVVGLSKIPRLVEVFARRLQIQEQLTEQIAESLMEHVGAKGVGVVIEARHMCVEMRGVQKANSTTSTSALRGSFLKSEKTRREFFSLINSSKQVRF

SEQ ID NO: 6083 - protein, 190 aa, Campylobacter volucris
  misc_feature (1)..(190): tr|A0A5C7E3A1|A0A5C7E3A1_9PROT GTP cyclohydrolase 1 OS= Campylobacter volucris OX=1031542 GN=folE PE=3 SV=1
MQEKFENSVKNMLEIIGENPQREGLLKTPTRVFKAFDFLTSGYKQDPKKILNDALFESSNNEMVLVRDIEFYSLCEHHLLPFFGRVHVAYIPDKKVVGLSKIPRLVEVFARRLQIQEQLTEQIAESLMKHVGAKGVGVVIEARHMCVEMRGVQKANSTTSTSALRGSFLKSEKTRREFFSLINSSKQVRF

SEQ ID NO: 6084 - protein, 194 aa, Campylobacteraceae bacterium
  misc_feature (1)..(194): tr|A0A1Y1R8R5|A0A1Y1R8R5_9PROT GTP cyclohydrolase 1 OS= Campylobacteraceae bacterium 4484_4 OX=1970775 GN=folE PE=3 SV=1
MSSEKAKKFEEAVTTILELIGEDPKREGLVKTPHRVYKAFEHICEGYRMDPKKVLNDAMFESSNDEMVLVRDIEFYSMCEHHILPIIGRVHVAYIPNGKVVGLSKIPRMVNIFARRLQIQEQMTEQIADAILETVQPKGVAVVVEARHMCMEMRGVEKINSTTVSSALRGLFKTDAKTREEFMSMINAPLRPRY

SEQ ID NO: 6085 - protein, 191 aa, Campylobacteraceae bacterium
  misc_feature (1)..(191): tr|A0A1Y1RCM4|A0A1Y1RCM4_9PROT GTP cyclohydrolase 1 OS= Campylobacteraceae bacterium 4484_4 OX=1970775 GN=folE PE=3 SV=1
MQEKVKFEESVRNMLEIIGEDPNREGLLKTPERVYKAFQFMTKGYSQNPREVLNEALFTSSNDEMVLIRDIEFYSMCEHHLLPIIGRAHVAYIPDGKVVGLSKIPRMVEVFARRLQIQEQMTEQIADAIVDVIDPKGVGVVIQARHMCMEMRGVEKVNSITTTSALRGMFRETRTRAEFLDFVNTPPSIRY

SEQ ID NO: 6086 - protein, 194 aa, Campylobacterales bacterium
  misc_feature (1)..(194): tr|A0A258X3V5|A0A258X3V5_9PROT GTP cyclohydrolase 1 OS= Campylobacterales bacterium 16-40-21 OX=1970501 GN=folE PE=3 SV=1
MASRQQEDFEEAVRTMIGHVGEDVTREGLLKTPERVFKAYEFMFGGYQEDPQAILNSAMFATSNDEMVLIKDIEFYSTCEHHLLPIIGRAHIAYIPDGKVVGLSKIPRVVDVFARRMQIQEQLTEQIADALMRSINPKGVAVVIQARHMCMEMRGVEKISSTTTSSALRGLFKRDEKTRMEFFSLINSHSGNRY

SEQ ID NO: 6087 - protein, 186 aa, Scalindua sp.
  misc_feature (1)..(186): tr|A0A286TUP5|A0A286TUP5_9BACT GTP cyclohydrolase 1 OS= Candiadtus Scalindua japonica OX=1284222 GN=folE PE=3 S V=1
MDKKKIIKATKLFLEGIGEDPERGGLKDTPKRVAEMCEEIFAGIGADSSKVIKVLKSEDHDEIVLMKDISFFSVCEHHLLPFIGKAHVAYIPNGPRVTGLSKLARVVEIESKQLQVQERLTTAIAESIMKALRPKGAMVVIEAEHLCMAMRGVKKAGSKAQTSVVRGIFRKNPATRAEAMALITGR

SEQ ID NO: 6088 - protein, 177 aa, Zixibacteria bacterium
  misc_feature (1)..(177): tr|A0A1F4YPG1|A0A1F4YPG1_9BACT GTP cyclohydrolase 1 OS= candidate division Zixibacteria bacterium RBG_16_53_22 OX=1802787 GN=folE PE=3 SV=1
MPIRLLQFIGEDPGRGGLAETPGRFLRAWSDWTIGYGQDPKDVLKVFEDGAERCDQLVLVKDIPVYSHCEHHLAPFFGVAHVGYIPNGKIVGLSKISRLVDIFAKRLQVQERLTNQIADTLTEYLDPLGVGVVIECRHMCMESRGIQRQGSTTITSAMRGALLDEPSARAEFLAIMK

SEQ ID NO: 6089 - protein, 200 aa, Unknown
  misc_feature (1)..(200): tr|A0A0S8JC56|A0A0S8JC56_9BACT GTP cyclohydrolase 1 OS= candidate division BRC1 bacterium SM23_51 OX=1703761 GN =folE PE=3 SV=1
MRKKRTEDTENLGIETLVREILTRIGEDPARQGLAETPERISRALAFLTRGYRQRLEEVVKNAVFKQKCDEMVIVKDINFYSLCEHHLLPFFGHAHIAYLPDGRLIGLSKIPRIVDMFARRLQLQERMTVQIAESIQKILRPKGVGVVIEAEHMCITMRGVEKQHSRAVTSAMLGSFRDKTRTRAEFLALIGMSMGARPS

SEQ ID NO: 6090 - protein, 259 aa, Abyssubacteria bacterium
  misc_feature (1)..(259): tr|A0A3A4NZW5|A0A3A4NZW5_9BACT GTP cyclohydrolase FolE2 OS=Candidatus Abyssubacteria bacterium SURF_5 OX=20933 60 GN=folE2 PE=3 SV=1
MKDVQNEPANHHVEVDKVGVKNVKYPIVVRDKAKREQHTIADINMYVNLPHRFRGTHMSRFIEVLNKHRGRMSMQNMDDLLHEVEKALDADSAYLEMSFPYFVEKAAPISGARSLTEYQCKFIAFHKESLDFVLEVNVPVTNLCPCSKEISEHSAHNQRSLVTVQLKFKEFVWIEDVVALVEDSASCELYSLLKREDEKYVTEKAYSRPMFAEDVVREIAQKLDSDPNITWFTVASENYESIHNHNAYAFIEKKAPKLA

SEQ ID NO: 6091 - protein, 257 aa, Abyssubacteria bacterium
  misc_feature (1)..(257): tr|A0A419EQK0|A0A419EQK0_9BACT GTP cyclohydrolase FolE2 OS=Candidatus Abyssubacteria bacterium SURF_17 OX=2093 361 GN=folE2 PE=3 SV=1
MRDVQSEPANHEVEVDKVGVKDVKYPIVVRDKAKKEQHTIADINIYVNLPHQFRGTHMSRFIEVLNKHRGRMSVRTMEELLREVERALDAHSAHLEMSFPYFIEKAAPVSGAKSLMEYKCRFIVSHRDQLDFILEVNVPVTNLCPCSKEISEQSAHNQRSIVTVQLTFKEFVWIEDVIALVEQSASCELYSLLKREDEKYVTERAYSRAMFAEDVVREIAQKLESDANITWFTVASENFESIHNHNAYAFVEKKLRK

SEQ ID NO: 6092 - protein, 279 aa, Accumulibacter aalborgensis
  misc_feature (1)..(279): tr|A0A1A8XK06|A0A1A8XK06_9PROT GTP cyclohydrolase FolE2 OS=Candidatus Accumulibacter aalborgensis OX=1860102 G N=folE2 PE=3 SV=1
MNAPETPRSPAMMADVQGSADTRQLAINKVGIKAIRHPVKVLDKSGGVQHTIAMFNMYVSLPHNFKGTHMSRFVEILNSHEREISVENFPAMLREMVHRLEAETGHIEMSFPYFINKAAPVSGVQSLMDYDVTLIGEIAHGCMESTIKVAVPVTSLCPCSKEISERGAHNQRSQVTVTVSINEHLWIEELVQFVEDEASCELYGLLKRPDEKYVTERAYDNPKFVEDMVRDVAARLNGERRIDAYVVESENFESIHNHSAYALIENDKRLPLAPDCPTP

SEQ ID NO: 6093 - protein, 248 aa, Accumulibacter aalborgensis
  misc_feature (1)..(248): tr|A0A1A8XX99|A0A1A8XX99_9PROT Putative GTP cyclohydrol ase 1 type 2 OS=Candidatus Accumulibacter aalborgensis OX=1860102 GN=ACCAA_720051 PE=4 SV=1
MKREELIGYLDNLLEAGRLRDYCPNGLQVEGRTDVQRLVAGVTACQALLDAAVERGADAILVHHGWFWRGEDGRVTGLRKARLQTLLKQDINLIAYHLPLDNHPEFGNNAQLAGKLGWLADGRFGEQDLGWLGRLESPTTLSDVAGKVAGELQRVPLTIGDRERVVSRVAWCSGAAQGLFEQAITLGVDLYLSGEISEQTVHLARESGVAYIAAGHHASERYGVQALAEHLALRFGIDCQFVDIDNPI

SEQ ID NO: 6094 - protein, 185 aa, Acetothermia bacterium
  misc_feature (1)..(185): tr|A0A3D3X1B3|A0A3D3X1B3_9BACT GTP cyclohydrolase 1 OS= Candidatus Acetothermia bacterium OX=2053493 GN=folE PE =3 SV=1
MDHKQVEEGMRQILQGIGPGYLSAEVIKNTPRRVAKMFAEFFSKIDRDPAEVLEVLFQEDYNEMVVVKDIPFFSICEHHFLPFIGEADIVYIPKGNRIVGVSKLARALDIAAARPQLQERLTSELADALMERLDPYGALVRLQATHLCMTLRGVKKPGVKMVTSAIRGIFRSNRASREEALSLIA

SEQ ID NO: 6095 - protein, 190 aa, Acetothermia bacterium
  misc_feature (1)..(190): tr|A0A3B9QPJ3|A0A3B9QPJ3_9BACT GTP cyclohydrolase 1 OS= Candidatus Acetothermia bacterium OX=2053493 GN=folE PE =3 SV=1
MDLGKIEAGVRLILEGLGQGKLSQEIWANTPRRVAEALAELCFGLEKNPEDELEVTFLEPYDEMVVLRDVPFHSLCEHHLLPFIGRASLVYLPKGGRVVGVSKLARVLEVAAARPQLQERLTSQVADALMEKLRPHGVLVQVQAEHLCMTIRGVKKPGSTLVTSAIRGLFRTDPAARAEALALISRPAAP

SEQ ID NO: 6096 - protein, 290 aa, Acididesulfobacter guangdongensis
  misc_feature (1)..(290): tr|A0A519BFE2|A0A519BFE2_9DELT GTP cyclohydrolase FolE2 OS=Candidatus Acididesulfobacter guangdongensis OX=259 7225 GN=folE2 PE=3 SV=1
MLTDVQNSKDKRGIPIDKVGIKNLHYPISVLDKKKSFQHTVADINMYVDLPHYFKGTHMSRFLEVLNEYRGEISIVSFPDILRKIKKVLNAGSASVEIEFPYFIEKTAPVSGKKSLMEYICSYKGTIKNKKAECNNNNNNNSNNDNSNDNNTTNDNNNNEDESIIIIGIKVPINTLCPCSKEISKYGAHNQRGVVSVSLKFSKLIWFEDIINDVESCASAPIYSLLKRADERFLTEHAYENPMFVEDIVRCVADILKKNKNIEWFRVEAENFESIHNHNAYAMTESRYED

SEQ ID NO: 6097 - protein, 279 aa, Acidulodesulfobacterium ferriphilum
  misc_feature (1)..(279): tr|A0A519BA88|A0A519BA88_9DELT GTP cyclohydrolase FolE2 OS=Candidatus Acidulodesulfobacterium ferriphilum OX=2 597223 GN=folE2 PE=3 SV=1
MIDVQNSKDKRGIAIDKVGIKNLSYPIAVLDKKKSLQHTIANINMYVDLPHYFKGTHMSRFLEVLNEHMGEISIVSFPDILRKIKKVLNAGSASVEMEFPYFIEKTAPVSRKKSLMEYVCYYNGTIKNKARNDKSEKVSDFKSDTFSAGIEENEESVIKIGVKVPINTLCPCSKEISKYGAHNQRGVVSVSVEFSKLIWFEDIIEDVESCASSPIYSLLKRSDERYLTEHAYENPRFVEDVVRCVAGILKENKDIKWYKVEAENFESIHNHNAYAMIEG

SEQ ID NO: 6098 - protein, 186 aa, Actinomarina minuta
  misc_feature (1)..(186): tr|S5DJ83|S5DJ83_9ACTN GTP cyclohydrolase 1 OS=Candidat us Actinomarina minuta OX=1389454 PE=3 SV=1
MGKLQTNLSNAEEALFTLLKDITDKSDDEISKLTFKFLDQIQKKLSKKNDIELNFEILDKTIYSQPIYINGISYISLCEHHMLPFHGSVNIAVFPKKNILGISKFSDIVSHLSNDLTLQEKLTEKIASFIHETLNAEGVFVKISGKHLCSDLLNSKNSSEEVITTFSTGVYELDFSLRNEAILNFS

SEQ ID NO: 6099 - protein, 189 aa, Actinomarinales bacterium
  misc_feature (1)..(189): tr|A0A520W3B8|A0A520W3B8_9ACTN GTP cyclohydrolase 1 OS= Candidatus Actinomarinales bacterium OX=2510331 GN=EVA2 8_00440 PE=3 SV=1
MTKREKNIIDTEEFKDQINNLIEKIDDKGITNLDQTVNRFVDFLYKKTTNEKSIDEIFTVLDLEEHSEPLFINKINFLSICEHHLVPFFGTVDIAVIPNKQIAGLSKYGNLVEYFSNAFQIQERFTKEIGEKIHEVLSPKGVFIRVEAQHICSQVDSGMNNVSKFITTHSTGIYSMDGSLRDEAIKQFG

SEQ ID NO: 6100 - protein, 186 aa, Actinomarinales bacterium
  misc_feature (1)..(186): tr|A0A520W211|A0A520W211_9ACTN GTP cyclohydrolase 1 OS= Candidatus Actinomarinales bacterium OX=2510331 GN=EVA2 7_00255 PE=3 SV=1
MSKVQTNLIQAQESLFFLLKEITDKSDEEIKNLSIKFLDQVQKKLSNKSDETLIFESLKEVRHSQPIYINGISYISLCEHHMMPFHGLASIAVFPKKKILGISKFSDLVGHFSNDLTLQEKLTEKIASFIHNTLDADGVFVKISAKHLCSDLLNSQNSSEEVITTYSTGVYELDFSLRNEALLNFS

SEQ ID NO: 6101 - protein, 266 aa, Aegiribacteria bacterium
  misc_feature (1)..(266): tr|A0A1V4MYW2|A0A1V4MYW2_9BACT GTP cyclohydrolase FolE2 OS=Candidatus Aegiribacteria bacterium MLS_C OX=177567 4 GN=folE2 PE=3 SV=1
MVDVQNRRDGRMITLDEAGIRDLLYPVTILDRERDRQRTVARISMSVELPHHFKGTHMSRFMEVLGRHDRDFDGRTIPAILEELKRVLDARSARMTMEFPYFMEKRAPVTGAAARMDYRCRFQGASGPGGEDFVLTVSVPVSSLCPCSREISSYGAHNQRGSITMEVRSIAGGDGLPSMVWIEELVSVAESSASSPVYGLLKRPDEKFVTESSYDNPVFVEDMARNASVQLMSDPRIIWFRVTAESLESIHNHTAYAVYEWSRKDG

SEQ ID NO: 6102 - protein, 189 aa, Aegiribacteria bacterium
  misc_feature (1)..(189): tr|A0A1V4MSX0|A0A1V4MSX0_9BACT GTP cyclohydrolase 1 OS= Candidatus Aegiribacteria bacterium MLS_C OX=1775674 GN =folE PE=3 SV=1
MDLKKIEMGVRLILEGVGEDPEREGLRDTPVRVAGSMAELCRGLDSGAMKTLTTMSCKGQNEMIIVKDISFSSLCEHHLLPYIGRCDVVYLPANDRIAGLSSIVETVETMAARPTIQERLTTEIAERLMGELSAKGVMVVMEAEHMCLAMRGVKKRDSRIVTSAMRGYLKRLETRTEALSLIGRAIRVT

SEQ ID NO: 6103 - protein, 188 aa, Aerophobetes bacterium
  misc_feature (1)..(188): tr|A0A497E5F8|A0A497E5F8_9BACT GTP cyclohydrolase 1 OS= Candidatus Aerophobetes bacterium OX=2030807 GN=folE PE =3 SV=1
MDKDKIKMAVRLFLEGIGENPNRPGIKETPDRVARMCEDIFGGIEKDPREELTILRGEKHDEIILLRDIPLYSVCEHHLLPFLGKAHIAYIPRGGRVTGLSKLARVVDILSRRLQVQERLTTQIADVINEALQPRGVMVMIEAEHLCMSIRGIKKPGVRTVTSVVRGIFRENSATRAEAISFIKKKEP

SEQ ID NO: 6104 - protein, 199 aa, Aerophobetes bacterium
  misc_feature (1)..(199): tr|A0A523UTT1|A0A523UTT1_9BACT GTP cyclohydrolase 1 OS= Candidatus Aerophobetes bacterium OX=2030807 GN=folE PE =3 SV=1
MLRKNSQTQGNMDKEKIKKAVRLFLEGIGENPDREAIKETPGRVAKMCEDVLGGIGKDPREILSILKAEKHDEIILLRDIPLYSFCEHHLLPFLGKAHIAYIPKDGRVTGLSKLARVISILSQRLQVQERLTTQIADVVNDALRPRGVMVIIEAEHLCMSIRGVKKPGTTTITSVVRGIFRENAATRAEAMSLIGGLKK

SEQ ID NO: 6105 - protein, 177 aa, Amesbacteria bacterium
  misc_feature (1)..(177): tr|A0A0G1WWJ6|A0A0G1WWJ6_9BACT GTP cyclohydrolase 1 OS= Candidatus Amesbacteria bacterium GW2011_GWC1_48_10 OX= 1618365 GN=folE PE=3 SV=1
MGEDTQREGLRETPDRVLKMYHELLGGYTQEEKKLYKTFASNGYNEIITVANIDFYSLCEHHLIPFFGKVHIGYVPNGKILGLSKFARVVEMYAHRLQTQENLTKQIADSLEKYLCPRGVIVCIEAEHLCVSMRGIKKKGVMTKTATRRGLMKDNPSALDQFYRDINALNIDSIKTI

SEQ ID NO: 6106 - protein, 199 aa, Amesbacteria bacterium
  misc_feature (1)..(199): tr|A0A1F5A1Q6|A0A1F5A1Q6_9BACT GTP cyclohydrolase 1 OS= Candidatus Amesbacteria bacterium RIFOXYD1_FULL_47_9 OX =1797267 GN=folE PE=3 SV=1
MKRSHTGLNDNPQSLIQKLLLHLGEDTQREGLRETPDRVLKMYHELLGGYTQEEKKLYKTFASNGYNEIITVANIDFYSLCEHHLIPFFGKVHIGYVPNGKILGLSKFARVVEMYAHRLQTQENLTKQIADSLEKYLCPRGVIVCIEAEHLCVSMRGIKKKGVMTKTATRRGLMKDNPSALDQFYRDINALNIDSIKTI

SEQ ID NO: 6107 - protein, 193 aa, Aminicenantes bacterium
  misc_feature (1)..(193): tr|A0A1F5B7D0|A0A1F5B7D0_9BACT GTP cyclohydrolase 1 OS= Candidatus Aminicenantes bacterium RBG_19FT_COMBO_59_29 OX=1797276 GN=folE PE=3 SV=1
MDAKKIEKSIRLLLEGVDEDPDRAGLKATPRRVASMFLEILGGTSEDPVKHLRTIHEEKHDEMVIIKNIPLYSMCEHHLLPFAGVAHVAYIPKAGRIVGLSKIARVVDIFSRRLQVQERLTKQVADILDEHLKPLGVMVVIEAEHMCMSMRGAKKPKCVTVTSAVRGSFRTNSATRAEAMMLIRGGATSVKDV

SEQ ID NO: 6108 - protein, 188 aa, Aminicenantes bacterium
  misc_feature (1)..(188): tr|A0A1F5BC46|A0A1F5BC46_9BACT GTP cyclohydrolase 1 OS= Candidatus Aminicenantes bacterium RBG_13_63_10 OX=1797 270 GN=folE PE=3 SV=1
MAKGVALILEGMGEDINRPGIKATPQRVARMFAEILGGAHEDPSAHLRVLQHEKHDEMVLIKSIPLYSMCEHHLLPFAGVAHVAYIPKGGRIVGLSKIARVVDILARRLQVQERLTKQVADLIMDRLKPLGVMVVIEAEHLCMSMRGAKKPKSVTVTSAVRGVFRTNSITRAEAINLIRGGPGSVRDF

SEQ ID NO: 6109 - protein, 199 aa, Aquarickettsia rohweri
  misc_feature (1)..(199): tr|A0A3R9Y8R8|A0A3R9Y8R8_9RICK GTP cyclohydrolase 1 OS= Candidatus Aquarickettsia rohweri OX=2602574 GN=folE PE =3 SV=1
MQSKLLNNNNIRVKVSDDEAKKAVKTLLEWIGENPDREGLSDTPQRVIDSYKEYFSGYLEDPANILKKTFTETSGYQYMVLLKDINFYSHCEHHIAPIKGVAHIAYYPNTKVVGISKLARIVEIYSKRLQIQERLTSEIANTINYTLKPKGVAVIIEASHSCINNRGINQKLAKMKTHALIGCFRNDPEISRRFFQLIS

SEQ ID NO: 6110 - protein, 183 aa, Aquiluna sp.
  misc_feature (1)..(183): tr|A0A1G4V8B3|A0A1G4V8B3_9MICO GTP cyclohydrolase 1 OS= Candidatus Aquiluna sp. UB-MaderosW2red OX=1855377 GN=f olE PE=3 SV=1
MQSDRIRAAVRELLIAIGEDPDREALRSTPEKVAQSYEAFFKGIGKDPLSAFGELFETEKNETVILKDIELVSICEHHLLPFTGVAHVAYLPNGKLAGLGRLANVVEILAARPQLQEHLTNQITQAISDGLNAQGVIVVVEARHQCVASRGARQPAVNTITMSSLGVFADPVYRAEVMGLINK

SEQ ID NO: 6111 - protein, 185 aa, Aquiluna sp.
  misc_feature (1)..(185): tr|I0QZU4|I0QZU4_9MICO GTP cyclohydrolase 1 OS=Candidat us Aquiluna sp. IMCC13023 OX=1081644 GN=folE PE=3 SV=1
MQTDRIKAAVVELLEAIGEDPNRPALKNTPTKVAEAYTSFFRGIGVNPQSVIGDMFEAVNAEAVILKDIELVSICEHHLLPFTGVAHIAYLPNKKLAGLGRLASVIEVLAARPQLQENLTAEVADALEEALDAKGVLVVIEARHQCVASRGARQPDVNTVTLASRGLYTEPSYRAEVLGLINKKS

SEQ ID NO: 6112 - protein, 247 aa, Arsenophonus lipoptenae
  misc_feature (1)..(247): tr|A0A0X9VMF5|A0A0X9VMF5_9GAMM Putative GTP cyclohydrol ase 1 type 2 OS=Candidatus Arsenophonus lipoptenae OX=6 34113 GN=ybgI PE=4 SV=1
MNNIKLEKIINQYLKIDNYQDYSPNGLQVEGRSEICKIVTGVTASQALLNEGIKLSADAIIVHHGYFWKNEPQVILNMKRNRLKTLLCNNMNLYSYHLPLDCHPIIGNNIQLGNLMEVEIESYITPFLPIGKFTKSITADNLISRLSNRLNRQPLYCGDNGPIKIHKIAWSTGSSQDLIQKAAEAGADAFVTGEVSEQTIHIAREMKIHFYAAGHHATEKFGVKLLGEWLNKNYGFQVIFIDINNPV

SEQ ID NO: 6113 - protein, 222 aa, Arsenophonus lipoptenae
  misc_feature (1)..(222): tr|A0A109QE31|A0A109QE31_9GAMM GTP cyclohydrolase 1 OS= Candidatus Arsenophonus lipoptenae OX=634113 GN=folE PE =3 SV=1
MSSINQEVILVRKALEDHGLETPFLSKCINSNTCKQQIEEHIGAMMRLLNLDLSNDSLAKTPKRVAKMYVNEIFSGLDYNNFPKITLIKNNMAFDEMVTVRNITLTSVCEHHFVTIDGKATVSYIPKDKVIGLSKINRIVHFFSQRPQVQERLTQQILIALQTLLGAANVAVSIDAVHYCVKARGISDVNSSTMTTSLGGLFKSSKNTRQEFLRNISRLSNI

SEQ ID NO: 6114 - protein, 170 aa, Arthromitus sp.
  misc_feature (1)..(170): tr|A0A1B7LL87|A0A1B7LL87_9CLOT GTP cyclohydrolase 1 OS= Candidatus Arthromitus sp. SFB-turkey OX=1840217 GN=A6P 36_01335 PE=3 SV=1
MDKNINLENAVKTILKEIGEDLNREGLIDTPKRVSKSLREILNGYNENIEEIMSKKFKLHNHSKDIVKINSIEFFSLCEHHLLPFFGHVNIEYIPKEEILGLSKFGRLVNAFSKRLQVQEKLTKQIGETIVKYLNCDYVKVHIKASHMCMTMRGISKTSSYTETEFVYKK

SEQ ID NO: 6115 - protein, 236 aa, Atelocyanobacterium thalassa
  misc_feature (1)..(236): tr|A0A086CGD9|A0A086CGD9_9CHRO GTP cyclohydrolase 1 OS= Candidatus Atelocyanobacterium thalassa isolate SIO6498 6 OX=1527444 GN=folE PE=3 SV=1
MTRDSSNRFNSSKSNSSNNLNSDLVDQINTQNNHNKQKSTDPNNLDVNIKKIEDAVYSILEALGEDPNREGLLKTPYRVATSMEFLTAGYNQSLAELVNGAIFDEGHNEMVLIRDINFFSLCEHHMLPFMGRAHVAYIPNNKVIGLSKLARIVEMYSRRLQVQERLTRQIADAIQEVLEPRGVAVVMEASHMCMVMRGVQKPGSWTVTSTMVGKFNEEQKTREEFLNLVRHQPKPF

SEQ ID NO: 6116 - protein, 188 aa, Atribacteria bacterium
  misc_feature (1)..(188): tr|A0A1F5BY97|A0A1F5BY97_9BACT GTP cyclohydrolase 1 OS= Candidatus Atribacteria bacterium RBG_16_35_8 OX=179729 0 GN=folE PE=3 SV=1
MDRKMIEEGVKLIIKGIGEDINREGLKGTPERVAEMYEEIFSGIGKDPSEELGPVFDENHDEIILVKDIPFYSVCEHHMVPFTGKAHIAYVPNKAGRIIGLSKLVRVLDITAKRLQVQERLTSIVADTIMKKIKPRGVLVIVEAEHLCMSMRGVRKPGTLTVTSAVRGLFRENPASRAEVMALIKQNK

SEQ ID NO: 6117 - protein, 185 aa, Atribacteria bacterium
  misc_feature (1)..(185): tr|A0A524MJG7|A0A524MJG7_9BACT GTP cyclohydrolase 1 OS= Candidatus Atribacteria bacterium OX=2053509 GN=folE PE =3 SV=1
MDQARIEAAITELLAGIGTKHLNEEVLANTPRRIAAMYAEFFADIDKDPSEVLEVVYQEKYEEMIVMRDITFFSICEHHFLPFVGTADIVYIPKAGRIVGASKLARVVDIAAGRPQLQERLTQQVADALVGKLDPTGVLVRIQATHLCMTLRGVKKSGSRMVTSAIRGSFYRDQASRSEALSLIT

SEQ ID NO: 6118 - protein, 185 aa, Aureabacteria bacterium
  misc_feature (1)..(185): tr|A0A3A4R954|A0A3A4R954_9BACT GTP cyclohydrolase 1 OS= Candidatus Aureabacteria bacterium SURF_26 OX=2093366 G N=folE PE=3 SV=1
MESAIRKIIEHIGEDPNREGLVRTPHRVAEAYKYLTKGYSVDIDSLINGAVFSEKYDEMVIVRDIDFYSLCEHHMLPFYGKCHIAYLPNGKVMGLSKLPRIVETFSRRLQIQERLTNEIAECLMKHLNPLGVAVVMEATHLCMVIRGVEKQNAFATTSSMLGAFRSDRSTRMEFLNLIQLPRLNR

SEQ ID NO: 6119 - protein, 214 aa, Azambacteria bacterium
  misc_feature (1)..(214): tr|A0A350QJZ0|A0A350QJZ0_9BACT GTP cyclohydrolase 1 OS= Candidatus Azambacteria bacterium OX=2053511 GN=folE PE =3 SV=1
MLSEEAVLVRSALEAHGLETPMLDNGLSRDEKYRKISQLMTEVVSTLGLDLTDDSLSETPHRIAKMYVDEVFGGLNYKNFPKIALIENKMQVREMVKVKDISFTSTCEHHFVTIDGSATVAYIPQGRIIGLSKINRIVRFFAQRPQVQERLTQQILLALQTLLQTKDVAVTMDAVHYCVKSRGVMDMNSKTQTTALGGIFKDDGRTRAEFLARY

SEQ ID NO: 6120 - protein, 214 aa, [Bacteroides] periocalifornicus
  misc_feature (1)..(214): tr|A0A0Q4B5G3|A0A0Q4B5G3_9BACT GTP cyclohydrolase 1 OS= Candidatus [Bacteroides] periocalifornicus OX=1702214 G N=folE PE=3 SV=1
MDIERLNDGGSSAPGPGYNKLEQWDAQRTQQLMQHYEAILGLLGEDPSRSGLLKTPERVAKSIQFLTHGYKLDPTSILMGARFAEDYSQMVIVKDIELYSLCEHHMLPFYGKAHVAYIPNGYITGLSKIARVVDAYARRLQVQERLTDQILECIQNALNPKGVAVVIEAAHMCMQMRGVQKQNSVTTTSAFTGAFMTQSKTREEFIQLIKGHLV

SEQ ID NO: 6121 - protein, 221 aa, Baumannia cicadellinicola
  misc_feature (1)..(221): tr|A0A0K2BL66|A0A0K2BL66_9GAMM GTP cyclohydrolase 1 OS= Candidatus Baumannia cicadellinicola OX=186490 GN=folE PE=3 SV=1
MVMLTKEASMVRKALQEHGLEPLLRGNNILDIEVRKRNIAEHFKKIMMLLNLDLMDDSLAKTPYRIANMYIHEIFSGLDYANFPKITVISNKMKADEMVTVREINLTSTCEHHFLIIDGKATVSYIPNNFVIGLSKINRIVWFFAQRPQVQERLTQQILLALQTILGTNNVAVSIYAVHYCVKARGICDTTSIATTTSLGGLFKSSNNTRNEFFSIIKNNN

SEQ ID NO: 6122 - protein, 220 aa, Baumannia cicadellinicola
  misc_feature (1)..(220): tr|A0A2N4XX18|A0A2N4XX18_9GAMM GTP cyclohydrolase 1 OS= Candidatus Baumannia cicadellinicola OX=186490 GN=folE PE=3 SV=1
MVTLTKEASMVRQALLAHGLEPLLRGNMLDREIRKQRIAKYIKKIMTLLNLNIADDSLVKTPYRIANMYMEEIFSGLDYANFPKITVISNKMKVDEMVTVRDITLTSTCEHHFLMFDGKATVSYIPKRSVIGLSKINRIVRFFAQRPQVQERLTQQILLALQTILGTNHVAVSIYAVHYCVKARGIGDSTSATTTTSLGGLFKSSQNTRQEFLRTITHYR

SEQ ID NO: 6123 - protein, 190 aa, Beckwithbacteria bacterium
  misc_feature (1)..(190): tr|A0A1J5BAP8|A0A1J5BAP8_9BACT GTP cyclohydrolase 1 OS= Candidatus Beckwithbacteria bacterium CG2_30_44_31 OX=1 805035 GN=folE PE=3 SV=1
MKNNKLGASVKELVKKLIISVRENPKRDGLKQTPERVARAYKELLSGYSQNPENTLKLFNSNGFHELVTVGNIDFYSLCEHHMLPFFGKVHIGYVPNRKILGLSKFARIVEIYSRRLQNQENLTKQIFDFISEKLSPKGLIVLIEAKHLCVSMRGIKNNGFITKTVVKKGLLKTRQDLYKQFYQNIEIKS

SEQ ID NO: 6124 - protein, 184 aa, Berkelbacteria bacterium
  misc_feature (1)..(184): tr|A0A554JAR2|A0A554JAR2_9BACT GTP cyclohydrolase 1 OS= Candidatus Berkelbacteria bacterium Gr01-1014_85 OX=201 7150 GN=folE PE=3 SV=1
MNQFNEQKITEGIKLLIEGLGEDLTRPGLIDTPERVARAWKEWCRGYTPFNLPLTTFPSDYVGMIVRKDIPFQSFCEHHLAIYQGTIDLAYVPDGKVLGLSKIIRFCQHYSARLSIQEDLTDDILNRFNQAVQPKGVAIKMSACHSCEGSRGVKVPDVPTVTFATSGVFQERPELVGQFHSLIR

SEQ ID NO: 6125 - protein, 283 aa, Berkiella aquae
  misc_feature (1)..(283): tr|A0A0Q9YMP5|A0A0Q9YMP5_9COXI GTP cyclohydrolase FolE2 OS=Candidatus Berkiella aquae OX=295108 GN=folE2 PE=3 SV=1
MQIHDLIADIQNSPDSRNLAVDRVGIRDLCHPIVFTDNHEGKTISQHSIAHFDMLVNLPKNVKGTHMSRFVEILNEKECLLSIANMPSQLTEMVTRLNADDGYLQVKFPYFVTKYAPISKAASLMNYNVSLQGILEKGKMDVFATVVVPVTSLCPCSKEISDYGAHNQRSHVTVTVRATPELSLREIIQLVESKASCELFGILKRADEKAVTERAYDNPRFVEDTVRDIAASLEKISTIKGYKISSENFESIHNHSAYAEIDRLNMTAPVSQESSEAILCCDA

SEQ ID NO: 6126 - protein, 278 aa, Berkiella cookevillensis
  misc_feature (1)..(278): tr|A0A0Q9YLG8|A0A0Q9YLG8_9COXI GTP cyclohydrolase FolE2 OS=Candidatus Berkiella cookevillensis OX=437022 GN=fo lE2 PE=3 SV=1
MLRFLKLNNTFEDIQNWPDNRNISVDRVGIRGIKHPVRFEDWVEQGNIASQHLTATIDMMVNLPKDVKGTHMSRFVEILNAQEVVLSIANMPYWLDAMATKLEAQHCFFKANFDYFLTKTAPISKVKSLMDYQVTLNGVLYEGVPQTIVTVVIPVTSLCPCSKKLSKYGAHNQRSHITLTLEARPNLSLQKIIQLVESNASCELYGIVKRNDEKYITEKAYENPKFVEDMVRDVAHALSKEDTLLGYKVASENFESIHNHSAYAEIDCLTLPAMIRAL

SEQ ID NO: 6127 - protein, 221 aa, Blochmannia chromaiodes
  misc_feature (1)..(221): tr|L0MX20|L0MX20_9ENTR GTP cyclohydrolase 1 OS=Candidat us Blochmannia chromaiodes str. 640 OX=1240471 GN=folE PE=3 SV=1
MSILTQEALLVRDALSVRGLENPLIELNINHKVRKRRIEDHMRAIVHLLSLDLEHDSLLNTPKRIAKMYIEEIFSGLDYSNFPKIAIIQNTMQINEMITVRGINITSTCEHHFIVFNGKVTISYIPEKNVIGLSKINRIVQFFSKRPQLQERLTKQIFLALQTLLNTDNVAIFIDAVHYCVKARGIHDVSSTTTTTALGGLFESNTNTREEFLHAIMYCNH

SEQ ID NO: 6128 - protein, 187 aa, Brocadia sinica
  misc_feature (1)..(187): tr|A0A136LV56|A0A136LV56_9BACT GTP cyclohydrolase 1 OS= Candidatus Brocadia sinica OX=795830 GN=folE PE=3 SV=1
MVDKKKIIESIRLFIEGIGDDPNREGLLETPERVADMCEEIFAGIGQDSHKEIKVLKSEKYDEIVLLKDIPFYSICEHHLLPFSGVAHVAYIPQGNRVTGISKLARVVEIEANRLQVQERLTTDIAESIMKALRPKGVLAIIEAEHLCMTMRGIKKPGARVKTSVVRGIFRDNPATRAEALALIKGH

SEQ ID NO: 6129 - protein, 200 aa, Brocadia sapporoensis
  misc_feature (1)..(200): tr|A0A1V6M3J8|A0A1V6M3J8_9BACT GTP cyclohydrolase 1 OS= Candidatus Brocadia sapporoensis OX=392547 GN=folE PE=3 SV=1
MTSYAAQQHETSKQKAQRAIATAVRTILVNVGEDPTREGLRKTPERVARAYNELLGGYAVNPASLINGALFESAYDDMVVVKDIEFYSLCEHHMLPFFGKAHVAYIPDGKIIGLSKIPRIVEMYARRLQVQEKMTREIADFIQTLLSPRGVAVIVMGQHMCATMRGVNQTNSKMLTQAMYGAFQERIAHEQLNDRLQQAE

SEQ ID NO: 6130 - protein, 187 aa, Brocadiaceae bacterium
  misc_feature (1)..(187): tr|A0A5C6F1Y2|A0A5C6F1Y2_9BACT GTP cyclohydrolase 1 OS= Candidatus Brocadiaceae bacterium B188 OX=2528032 GN=fo lE_2 PE=3 SV=1
MVDKKKIAEAIRLFLEGIGDDPNREGLIETPERVADMCEEIFAGIGRDSHTEIKVLKSEKYDEIVLIKDIPFYSMCEHHLLPFSGVAHVAYIPQGNRVTGISKLARVVEIEAKRPQVQERLTTDIAESIMKALHPKGVLVVIEAEHLCMTMRGIKKPGARVKTSVVRGIFRENPATRAEALMLIKGH

SEQ ID NO: 6131 - protein, 405 aa, Brocadiaceae bacterium
  misc_feature (1)..(405): tr|A0A5C6EZA9|A0A5C6EZA9_9BACT GTP cyclohydrolase 1 OS= Candidatus Brocadiaceae bacterium B188 OX=2528032 GN=fo lE_1 PE=3 SV=1
MNDAYIFIGSNIERETNYPLAVERLCRLGTVLAVSPVYDTPALGNAPNTPRFFNGAARLLTELTPHALRNALRAIESELGRVRTADKNAPRTIDLDLVLYDQEIIGDNELKIPDLKIFECGFMARALADVNPDYIIPPDGPTLAELADRLCTSRDNMYTVPGISSQVRQFVQNALQTQATAPQLPACVTHAYDNDRSQTIIPDHTITNYAAQQHETSEQKSQRAIATAVRTILVNVGEDPTREGLRKTPERVARAYNELLGGYAVNPASLINGALFESAYDDMVVVKDIEFYSLCEHHMLPFFGKAHVAYIPDGKIIGLSKIPRIVEMYARRLQVQEKMTREIADFIQTLLSPRGVAVIVMGQHMCATMRGVNQTSSKMLTQAMYGAFQERIAHEQLNDRLQQAE

SEQ ID NO: 6132 - protein, 267 aa, Burkholderia pumila
  misc_feature (1)..(267): tr|A0A0J7JQK9|A0A0J7JQK9_9BURK GTP cyclohydrolase FolE2 OS=Candidatus Burkholderia pumila OX=1090375 GN=folE2 PE=3 SV=1
MNQMNPAFLMLDVQNTPDTRQIAIQRVGVKGVRHPLTVNTASGVQPSVGVWNLDVHLPAEQKGTHMSRFIALLEENREALDQAALRALLASMLTKLEAHSGRIEVTLPYFVMKTAPVSGVQSLLDYEVTFIVEKRDGDTRTSMKVLVPVTSLCPCSKKISQYGAHNQRSHVTIAAELAGEVAVEELVRIAEEDASCELWGLLKRPDEKFVTERAYENPKFVEDLVRDVATRLNADARIVAYVLEAENFESIHNHSAYAVIERDKRIA

SEQ ID NO: 6133 - protein, 215 aa, Burkholderia verschuerenii
  misc_feature (1)..(215): tr|A0A0L0MC66|A0A0L0MC66_9BURK GTP cyclohydrolase 1 OS= Candidatus Burkholderia verschuerenii OX=242163 GN=folE PE=3 SV=1
MSAPRKNTPSASDMPASADRPSREEAEAAVRVLLRWAGDDPRREGLIDTPARVVRSYEEFFQGYEQNPHEILSRTFSEVQGYDEMIVLKDIRFESYCEHHMVPIIGRAHVAYLPNKRVVGISKLARLVDAFAKRLQIQEKMTAQIADTLNEVLQPIGVGVILEAAHQCMSTRGVHKAGVSMVTSRMLGSFRDDPSTRREFLSIVGNSNAFSVSNT

SEQ ID NO: 6134 - protein, 190 aa, Carbobacillus altaicus
  misc_feature (1)..(190): tr|A0A2R6Y1R0|A0A2R6Y1R0_9BACL GTP cyclohydrolase 1 OS= Candidatus Carbobacillus altaicus OX=2163959 GN=folE PE =3 SV=1
MSVDHEKIEHAVRLILEAVGENPEREGLRETPARVARMYEEIFAGIGEDPAQHFSAIFSEDHEEIVIVKDIPFYSMCEHHLVPFFGKAHVGYIPRDGRVVGLSKLARAVETVAKRPQLQERMTAQIADAIMERLEAHGAIVVIEAEHLCMVMRGVKKPGSKTVTSAVRGFFVENAMARSEALSLIQGKLS

SEQ ID NO: 6135 - protein, 239 aa, Chloroploca asiatica
  misc_feature (1)..(239): tr|A0A2H3L8Z2|A0A2H3L8Z2_9CHLR GTP cyclohydrolase 1 OS= Candidatus Chloroploca asiatica OX=1506545 GN=folE PE=3 SV=1
MGMHNGNGHNGNGHNGNGQHHQSVAELDGHDYDLLIVPGRGKLEGVTYTSDPQIEGAVREILDGIGEQPDREGLLKTPSRVAKMYAELTAGYHIDPAALINDAIFTVGYDEMVVVKNIDFYSLCEHHMLPFMGQVHVAYIPNGKVVGLSKIPRIVEMFARRLQVQERMTVQIADFINEHLEPQGVAVVAEGVHMCSVMRGVKKANASMVTSAMRGVFRDDSKTRGEFMAHVGRSRSFEA

SEQ ID NO: 6136 - protein, 221 aa, Chryseobacterium massiliae
  misc_feature (1)..(221): tr|A0A3D9BHZ2|A0A3D9BHZ2_9FLAO GTP cyclohydrolase 1 OS= Candidatus Chryseobacterium massiliae OX=204089 GN=folE PE=3 SV=1
MVDFTDNDDDIFTGKEHTPIREDAFDKSPEEKIEKITELFGEIMETLGLDMTDDSLKDSPKRVAKMYVNEIFGGLLPENKPGISTFSNKYKYRQMLVEKDITVYSFCEHHFLPIIGRAHVAYISNGEVIGLSKINRIVDYYAKRPQVQERLTMQIVNALKEALGTKDVACIIDAKHLCVNCRGIKDTASSTITAELSGIFRTNPITRQEFLHYVGSHAKLD

SEQ ID NO: 6137 - protein, 203 aa, Chrysopegis kryptomonas
  misc_feature (1)..(203): tr|A0A0P1MRV9|A0A0P1MRV9_9BACT GTP cyclohydrolase 1 OS= Candidatus Chrysopegis kryptomonas OX=1633643 GN=folE P E=3 SV=1
MAGENKNNEELVQVQPNLEKMANLIKELLIELGEDPEREGLKKTPMRVAKAYQYLTKGYREDIDKVLNGAVFNEKYNEMVVVKNIDFFSLCEHHLLPFYGKVHIAYIPNGKIVGLSKIPRIVEVFSRRLQVQERLTQQIADTLNEYLNPKGVAVVIEARHLCMIMRGVEKQNSVATTSAMHGIFVEDAKTRDEFMHLISEDLT

SEQ ID NO: 6138 - protein, 256 aa, Cloacimonas sp.
  misc_feature (1)..(256): tr|A0A1V4R727|A0A1V4R727_9BACT GTP cyclohydrolase FolE2 OS=Candidatus Cloacimonas sp. 4484_140 OX=1956163 GN=f olE2 PE=3 SV=1
MKLNDIQNQKDTRKIPINKVGVKGLQYPIVLQDRTNGTQNSVADINMYVELPHDFRGTHMSRFVEILHHYHRDIIIDNLEELLAEMKKKLDADVAYLEMEFPYFIKKAAPVTKEESLSSYQCGFKTSLRDEFVLEMFAKVPVLSLCPCSKEISEFGAHNQRAYITVGIVYRDFVWLEELIEIIENAASSEVYSLLKRPDEKYVTEKSYDNPKFVEDIARDIAIVLKNDERIAKFSIEAESIESIHNHNAYAMIKSS

SEQ ID NO: 6139 - protein, 260 aa, Cloacimonas sp.
  misc_feature (1)..(260): tr|A0A3D5VBD4|A0A3D5VBD4_9BACT GTP cyclohydrolase FolE2 OS=Candidatus Cloacimonas sp. OX=2053534 GN=folE2 PE=3 SV=1
MKGKKDIQSQNDNRNVNINKVGVKKVRYPIIVEDRENKQQNTVADLDIYVELSHLQRGTHMSRFLEVLNRFHKETIIGNLEDFMLEIKRELIADAAYARISFPYFINKQAPVSKISSYLGYDCFFEAYYKQDYDLKIGVQVPVTSLCPCSKEISDYGAHNQRSLVTLKVAYDGFVWLEELIEVVEGAASSQIYSLLKRVDEKYVTEQAYNNPRFVEDIVREITVKLKKDKRIKYFKVESENFESIHNHSAYACVEWSRDE

SEQ ID NO: 6140 - protein, 186 aa, Cloacimonetes bacterium
  misc_feature (1)..(186): tr|A0A2G6BMJ0|A0A2G6BMJ0_9BACT GTP cyclohydrolase 1 OS= Candidatus Cloacimonetes bacterium OX=2030808 GN=folE P E=3 SV=1
MDNLEKLTKNYEDLIVNIGEDKNREGLLKTPKRAAKAFQYITRGYNQDLDEVINGAIFSTTNDDMVVVKDIELYSLCEHHLLPFYGKCHVAYIPKGKVIGLSKVARVIDVFARRLQIQENLTREIAEAILKYTGAEGVAVVIEASHLCMMMRGVEKQNSHMKSSCMLGSFRNDTATRLEFLNLIKS

SEQ ID NO: 6141 - protein, 184 aa, Cloacimonetes bacterium
  misc_feature (1)..(184): tr|A0A523XG91|A0A523XG91_9BACT GTP cyclohydrolase 1 OS= Candidatus Cloacimonetes bacterium OX=2030808 GN=folE P E=3 SV=1
MNKKRIEELTREFLGEIGLDPKSEELKKTPERVASLFEEIFSGIKKEPKKGINVYKTDVKNEIVLLKNIPFFSFCEHHILPFFGKVHIAYIPKNGIITGFSSFVSIVKIISRRLQLQERLTDEIADTVADILKPEGVIVVIEARHLCIEMKGEKPSSTEVMTFSVRGTMEEPSLKERVISLIKA

SEQ ID NO: 6142 - protein, 265 aa, Coatesbacteria bacterium
  misc_feature (1)..(265): tr|A0A1F5FHX0|A0A1F5FHX0_9BACT GTP cyclohydrolase FolE2 OS=Candidatus Coatesbacteria bacterium RBG_13_66_14 OX =1817816 GN=folE2 PE=3 SV=1
MHPHLPDVANDEPPFDIPLDKVGVKHILYPITVLDRHDRWQSTVARVNMYVDLPKNFRGTHMSRFIAILNRFRGRISFETIRQIVKATRAEFQALEAHLELRFPYFIEKRAPVSGEPSLMEYRAGFHAFARGDDFDIQLEVSVPVMSLCPCSKEISARGAHNQRSVVRMRIKTGNRLVWIEELVAIAEAAGSAPLYSLLKREDEKAVTEAAYDNPRFVEDIVRTVANALEADPRITGYRVECENFESIHNHSAYAAISKRLAEGL

SEQ ID NO: 6143 - protein, 285 aa, Competibacter denitrificans
  misc_feature (1)..(285): tr|W6MD02|W6MD02_9GAMM GTP cyclohydrolase FolE2 OS=Cand idatus Competibacter denitrificans Run_A_D11 OX=1400863 GN=folE PE=3 SV=1
MKPSTMNSAALCSVVHIPDVQNSADTRQLAINKVGIKEIRHPVKVRDRNGGEQHTIATFNMYVNLPHNFKGTHMSRFVEILNIPGREISVDSFQDMLSEMTGRLEAEAGHIEMTFTYFISKAAPVSGVESLMDYEVTFIGEIRDGKPAMNLKVVVPVTSLCPCSKKISKYGAHNQRSHVTLTVRTRGFIWIEDLIDLAENEASCQLYGLLKRPDEKYVTEHAYENPKFVEDMVRDVAAKLNEDERVAAYSVESENFESIHNHSAYALIEHDKEAQNPAATAPVRI

SEQ ID NO: 6144 - protein, 286 aa, Competibacteraceae bacterium
  misc_feature (1)..(286): tr|A0A433I9E7|A0A433I9E7_9GAMM GTP cyclohydrolase FolE2 OS=Candidatus Competibacteraceae bacterium OX=2053538 GN=folE2 PE=3 SV=1
MNSAAMPTVIHIPDVQNSADTRRLAINKVGIKDIRHPVKVRDRSGGEQHTIAMFNMYVNLPHNFKGTHMSRFVEILNVPGREISVSSFKDMLMEMTDRLEAEAGHIEMTFTYFVNKAAPVSGVESLMDYEVTFIGEIRAGRPTMNLKVVVPVTSLCPCSKKISRYGAHNQRSHVTVNVRTRGFIGIEDIIDLVEKEASCELYGLLKRPDEKYVTERAYENPKFVEDMVRDIAAKLNQDDRVAAYAVESENFESIHNHSAYAMIEHDKEAEEAGVDEAVVQVQDEDI

SEQ ID NO: 6145 - protein, 280 aa, Competibacteraceae bacterium
  misc_feature (1)..(280): tr|A0A3S0U2U3|A0A3S0U2U3_9GAMM GTP cyclohydrolase FolE2 OS=Candidatus Competibacteraceae bacterium OX=2053538 GN=folE2 PE=3 SV=1
MNAAVMPVLIPIPDVQNSADTRRLAINKVGIKDIRHPVKVRDRSGGEQHTIATFNMYVNLPHNFKGTHMSRFVEILNVPGREISVDSFQDMLLEMTDRLEAEAGHIEMTFAYFVNKAAPVSGVQSLMDYEVTFTGEIRAGQPTMILKVVVPVTSLCPCSKKISRYGAHNQRSHVTISVRNRGFIGIEDLIDLAEKEASCELYGLLKRPDEKYVTERAYENPKFVEDMVRDIAAQLNQDDRVAAYAVESENFESIHNHSAYAMIEYDKEAKEPAAVQPESV

SEQ ID NO: 6146 - protein, 185 aa, Coxiella mudrowiae
  misc_feature (1)..(185): tr|A0A0H4UXT7|A0A0H4UXT7_9COXI GTP cyclohydrolase 1 OS= Candidatus Coxiella mudrowiae OX=2054173 GN=folE PE=3 S V=1
MTNTTTEKHVEAILTNLGEDIRREGLRETPHRFQKALESLTSGYQDKLHEIVNNAIFESDMDEIVIVKNIELYSLCEHHLLPFIGKCHVAYLPNGKIIGLSKIARIVDMYAKRLQVQENLTKQIAESIAKVTDAKGVGVIIEAKHLCMMMRGVEKQNSDMTTSMMLGTFRKDERTRAEFLSLIRN

SEQ ID NO: 6147 - protein, 189 aa, Cryosericum odellii
  misc_feature (1)..(189): tr|A0A398DKD1|A0A398DKD1_9BACT GTP cyclohydrolase 1 OS= Candidatus Cryosericum odellii OX=2290917 GN=folE PE=3 SV=1
MDKERVQAAVRELLLAIGEDPDREGLLETPQRVANMYAEVFSGIEQDPKQFLKLFHEPQQHEELVIVRDIPLYSVCEHHLLPFIGKAHIAYIPKGSQIIGLSKFARIIDCFAKRPQVQERLTAQVADFLYENLRPYGVAVVIEAEHLCMTMRGARAAGAKTQTSALRGTMRTDAKSRAEVMMLLNGGMH

SEQ ID NO: 6148 - protein, 299 aa, Cyclonatronum proteinivorum
  misc_feature (1)..(299): tr|A0A345UM48|A0A345UM48_9BACT GTP cyclohydrolase I OS= Candidatus Cyclonatronum proteinivorum OX=1457365 GN=CY PRO_2304 PE=4 SV=1
MITSNLKRIYDPTFVVTDEYKKTLPDLQNGPASLIEGANVPIQQVGISNFKLPLKFPTRDGDILTLEVSVDGYVGLDAGKKGINMSRIMRSFYKFKDEVFHPEVLEYVLQMYKKDLEARESFIKLSFNYPMLKDSLRSDLAGYQYYAVSLEASMDAKDNITHFMHLDFVYSSACPCSYELAEHARETREVASIPHSQRSEAYLTVQLRDAVSIEEMVELCRDALQTETQVMVKREDEQAFAELNGAYQKFVEDAARLMFDKLDPHPSISDFVVRCVHMESLHSHDAVSRICKGIPCGLR

SEQ ID NO: 6149 - protein, 267 aa, Dactylopiibacterium carminicum
  misc_feature (1)..(267): tr|A0A272EPK0|A0A272EPK0_9RHOO GTP cyclohydrolase FolE2 OS=Candidatus Dactylopiibacterium carminicum OX=857335 GN=folE2 PE=3 SV=1
MNSSVSIPDVQGFEDRRHLAINKVGIKSIRHPVKVLDRGEGGVQHTVATFDMYVGLPHHFKGTHMSRFVQILNTQEREISVESFEPMLREMVKRLEAETGYLEMRFPYFIKKKAPVSGVESLMDYDVTFIGEISAGGEYKLRTRVVVPVTSLCPCSKKISEYGAHNQRSHITITAETNASTWIEEIVEIAESQASCELWGLLKRPDEKYVTERAYDNPKFVEDLVRDVAGRLNEEARIVAYVVESENFESIHNHSAYALIERDKRLG

SEQ ID NO: 6150 - protein, 184 aa, Dadabacteria bacterium
  misc_feature (1)..(184): tr|A0A1F5IVK4|A0A1F5IVK4_9BACT GTP cyclohydrolase 1 OS= Candidatus Dadabacteria bacterium RIFCSPHIGHO2_12_FULL_ 53_21 OX=1797756 GN=folE PE=3 SV=1
MSVETAVREILVEIGEDPEREGLRDTPDRMADMFKELTAGYRASPYTIINEALFNIKYDEMVVVKDIEFYSLCEHHMLPFFGSCSVGYIPNGKIVGLSKIPRIVEVFSRRLQVQERMTAEIADFLMEVLNPLGVAVVAEARHLCMAMRGIMKADASMLTSSMRGAFKKDERTRSEFLSFIGKHA

SEQ ID NO: 6151 - protein, 185 aa, Dadabacteria bacterium
  misc_feature (1)..(185): tr|A0A523HZ39|A0A523HZ39_9BACT GTP cyclohydrolase 1 OS= Candidatus Dadabacteria bacterium OX=2080303 GN=folE PE =3 SV=1
MSVKKAIKEILLYIGEDPKREGLRDTPARMEKMFQEVTSGYQVDPKEVINGAIFHIKYDEMVVVKDIEFYSLCEHHMLPFFGKCNIAYIPNGKVLGLSKLPRIVEVFSRRLQIQERMTVQIADFLEKELDPQGVAVVVEAYHLCVAMRGVKKSEANMLTSSMRGAFKKDERTRGEFLSFISRNLK

SEQ ID NO: 6152 - protein, 267 aa, Daviesbacteria bacterium
  misc_feature (1)..(267): tr|A0A1F5MHP3|A0A1F5MHP3_9BACT GTP cyclohydrolase FolE2 OS=Candidatus Daviesbacteria bacterium RIFCSPLOWO2_02_ FULL_36_7 OX=1797792 GN=folE2 PE=3 SV=1
MIDIQNQNDTRQIPLEMVGIKDIAFPLLMPTKSGKSQNVTGLVSFFTDLSRNSRGTHMSRFVEVLYRNRHNHLTFQQLKHIASEAKKELKTENAYLEVSFTYLIKKRSPVSKKYSFVDYQCSVISKVNSVDHEQRLRAKIPVLLLCPCSKAISKFNAHSQRATVTVDVDFIREFWVEDLIKLVEKEGSCEIYPLLKRTDEKFVTEKSYENPKFVEDIVRDVALRLKKIVGIKSFIVECESYESIHNHDAYAKFTSDSITKGAESVNS

SEQ ID NO: 6153 - protein, 196 aa, Daviesbacteria bacterium
  misc_feature (1)..(196): tr|A0A0G0YNL8|A0A0G0YNL8_9BACT GTP cyclohydrolase 1 OS= Candidatus Daviesbacteria bacterium GW2011_GWB1_41_5 OX =1618429 GN=folE PE=3 SV=1
MKNNARNFVKRKNLFTKFIPRLVESFGEDPQREGLNETPGRVLRMYEELLSGYSKNPSSVFKTFKNDGYKDLVTVANINFYSLCEHHLIPFFGKVHIGYVPNGRILGFSKFARLVDVYARRLQTQENLTKQIFDSIQSNLHPKACIVRIEAEHLCVNMRGIKKKDFITKTTVSDNGMRKNGYLTNQFYKDIESNKI

SEQ ID NO: 6154 - protein, 190 aa, Deianiraea vastatrix
  misc_feature (1)..(190): tr|A0A5B8XBZ1|A0A5B8XBZ1_9RICK GTP cyclohydrolase 1 OS= Candidatus Deianiraea vastatrix OX=2163644 GN=folE PE=3 SV=1
MSISRSDAEKAVLTLLEYISKGKANDEVMKNTPSRVIDSFEELFGGYDIDFDSEFGKNFDNSFNYNNFVMIDNINFSSTCEHHLLPIVGVAHIAYIPDKKVIGLSKICRIVEAVSRRLQLQERMMVEILDIMTKYIKPKGSAIFIRANHGCMSLRGVKKHNCNTTTMLFSGQFETDIAKKQEFLSAIPVK

SEQ ID NO: 6155 - protein, 186 aa, Delongbacteria bacterium; identical to SEQ ID NO: 6140
  misc_feature (1)..(186): tr|A0A2G6P3A2|A0A2G6P3A2_9BACT GTP cyclohydrolase 1 OS= Candidatus Delongbacteria bacterium OX=2044594 GN=folE PE=3 SV=1

SEQ ID NO: 6156 - protein, 188 aa, Delongbacteria bacterium
  misc_feature (1)..(188): tr|A0A348NV90|A0A348NV90_9BACT GTP cyclohydrolase 1 OS= Candidatus Delongbacteria bacterium OX=2044594 GN=folE PE=3 SV=1
MEESKIKELSGLFKKVITDLGENADREGLLRTPERAAKAYSFLTRGYEENIDQVINGAVFSTDNDDMVIVKNIELYSLCEHHLLPFFGKCHVAYIPAGKVLGLSKVARIVDVYSRRLQIQENLVRQIAETVMKYTSAEGVGVVIEAQHLCMMMRGVEKQNSVMTTSCMLGSFREDSATRSEFLSLIGK

SEQ ID NO: 6157 - protein, 244 aa, Dependentiae bacterium
  misc_feature (1)..(244): tr|A0A1V5U9R2|A0A1V5U9R2_9BACT GTP cyclohydrolase 1 typ e 2 OS=Candidatus Dependentiae bacterium ADurb.Bin246 O X=1852839 GN=BWY33_00740 PE=4 SV=1
MKIKDIYEFLNSISPFELQEKWDNSGLLVGNMSDSFESLYLSMDLDLDLVKNLKPNSLVITHHPLIFSGLKRVNYDTYSTKILKELIKKDIALISMHTNIDKTHLNRFVVEKILNFKIENQNEFIANVKIDMSFTDLLKHLSKKLNLKNIKFVKTKDYIKTLAICTGSAMSLIDEVQADCFITGDIKYHDAMEAKARGLSLIDIRHYESENHFNILLEELLEEYLKKNKLKAIITASKNPFEFF

SEQ ID NO: 6158 - protein, 190 aa, Dependentiae bacterium
  misc_feature (1)..(190): tr|A0A1V5U626|A0A1V5U626_9BACT GTP cyclohydrolase 1 OS= Candidatus Dependentiae bacterium ADurb.Bin246 OX=18528 39 GN=folE PE=3 SV=1
MNKELEFENSIKNILNYIDEDVTREGLLDTPKRVRKAYEFMFSGYKLDPKEIIQKALFTSTNDEMVVVKDIEFYSFCEHHMLPIIGKAHVAYIPNGKVVGLSKIPRVVDVFARRLQIQEQLTEQICDALNEHLKPKGVAVIVDARHMCMEMRGVQKICSTTITSSLRGLFKSDKKTKDEFLSIVSASFQK

SEQ ID NO: 6159 - protein, 183 aa, Desantisbacteria bacterium
  misc_feature (1)..(183): tr|A0A2M7S920|A0A2M7S920_9BACT GTP cyclohydrolase 1 OS= Candidatus Desantisbacteria bacterium CG_4_10_14_0_8_um _filter_48_22 OX=1974543 GN=folE PE=3 SV=1
MDKKKIEKAVRMILESIGEDPERPGISKTPERFARMCEEIFAGMREKAADVLKTLPSEKYRDMVLVRDIPFYSVCEHHLVPFFGKVHIAYVPSGRMTGLSKFARLVEAFSKRLQVQERITRQIADAFQKKLKPEGVFVMIEAVHLCMVMRGIKKERSSVVTVAARGVFKKSEKQAEVLNLIKK

SEQ ID NO: 6160 - protein, 256 aa, Desulfofervidus auxilii
  misc_feature (1)..(256): tr|A0A127AT91|A0A127AT91_9DELT GTP cyclohydrolase FolE2 OS=Candidatus Desulfofervidus auxilii OX=1621989 GN=fo lE2 PE=3 SV=1
MIDVQSLPDYRQIEVDKVGIKDIRYPITVLDRENGTQKTVAYINMYVGLPHRFKGTHMSRFVEILNEYQGELISFKSMKEILHKMKERLNAVSAHLEIEFPYFMEKKAPVSKTKGLMEYLCTFIGNLRDKIELELKVRVPICTLCPCSKEISEFGAHNQRGIVNLRLRFRKFIWLEDIIKLVEQAGSSEVYSLLKRVDEKYVTEKAYQNPKFVEDVVREIAKKLLSDDNITWFAVEAENFESIHNHSAYAYIERKK

SEQ ID NO: 6161 - protein, 176 aa, Desulforudis sp.
  misc_feature (1)..(176): tr|A0A3A6N6F1|A0A3A6N6F1_9FIRM GTP cyclohydrolase 1 OS= Candidatus Desulforudis sp. OX=2093368 GN=folE PE=3 SV= 1
MMILEAVGEDPQREGLRDTPARVARMYREVFAGLLVNPESELEVLFTENHEELVLVRDIPLYSMCEHHLLPVFGVAHVAYIPQGGVITGLSKLARVVEGFARRPQLQERLTGQVADAIMKKLEPHGVLVVIELEHMCMTMRGVNKPGSKTITSAVRGIFEKNAKTRMEAFSLIRKS

SEQ ID NO: 6162 - protein, 186 aa, Desulforudis audaxviator
  misc_feature (1)..(186): tr|A0A3S8S5E2|A0A3S8S5E2_9FIRM GTP cyclohydrolase 1 OS= Candidatus Desulforudis audaxviator OX=471827 GN=folE P E=3 SV=1
MDLEKIEQAVTMIIESIGEDPNREGLRDTPRRVARMYAEVFSGLETDPEEVLEQFFTENHEELILVKDIPLFSVCEHHLLPVVGKAHVAYIPRRGLITGLSKLARVVDGYARRPQLQERLTAQIADAIMKRLEPHGVLVMIEAEHMCMTMRGVNKPGAQTVTSAVRGIFERNAKTRTEALALIKGR

SEQ ID NO: 6163 - protein, 282 aa, Desulfosporosinus infrequens
  misc_feature (1)..(282): tr|A0A2U3KTU4|A0A2U3KTU4_9FIRM Putative GTP cyclohydrol ase 1 type 2 OS=Candidatus Desulfosporosinus infrequens OX=2043169 GN=SBF1_2700009 PE=4 SV=1
MAVTVGLVAQIIERLAPKSWAEDWDNVGLLVGSGSAPVERILITLDGTLAVVEEAKAFGAQLIVAHHPIIFRPLKNLRSDNAAAQVPLQLLQNSIGYYAAHTNLDQSIVSSSRALGEVLGLQEMKIFEESEDDLVPIHKRSEARGYGVSGYLSHPEKLGVLWKNFLDSLGQSGVYAQPYKLSGVRLAGSVEKEMRKVAIVNGSGGRFVAKALFKGADLLITGDVDHHAVLDALEGGMAVGDLGHFLSEAPMLQAMYRYLSAEKALQGVEIRVSAINQSPWLL

SEQ ID NO: 6164 - protein, 191 aa, Desulfosporosinus infrequens
  misc_feature (1)..(191): tr|A0A2U3LU12|A0A2U3LU12_9FIRM GTP cyclohydrolase 1 OS= Candidatus Desulfosporosinus infrequens OX=2043169 GN=f olE PE=3 SV=1
MGMDLEKIEKAVYMILEAIGEDPTREGLRDTPKRVARMYAEVFCGLNQDPSQHLNVQFTEEEHEEMVIVKDIPVYSMCEHHLVPFYGKAHVAYIPRKGKITGLSKFARVVEGFAHRPQLQERLTSQIANAIMGELDPLGVVVVIEAEHMCMTMRGVKKAGSQTLTSAVRGVFKTNDSTRSEAFSMIQGQKR

SEQ ID NO: 6165 - protein, 269 aa, Desulfovibrio trichonymphae
  misc_feature (1)..(269): tr|A0A1J1DT14|A0A1J1DT14_9DELT GTP cyclohydrolase FolE2 OS=Candidatus Desulfovibrio trichonymphae OX=1725232 G N=folE PE=3 SV=1
MEDVQNYSPAVPLNIDRAGIRELKLPLLVRDRSDGTQRTVALVDLGVDLPSAFKGAHMSRFVEALNAWDDEINYQSVRRLLENIKNRLGAQRAYARFCFPYFIRKTAPASCSKSSVPYECRLTGELDENGQSFLLEMDVPVMTVCPCSRAISRDSAHSQRAIVRMNVRMAGFSWLEEFIEMAEESGSSAVYTLLKREDEKFVTEHAFAHPAFVEDVVRNVAQRLFAHEHVEWFSVEVESMESIHSHNAFARIERSVNRAAAGQQHGESP

SEQ ID NO: 6166 - protein, 212 aa, Dojkabacteria bacterium
  misc_feature (1)..(212): tr|A0A3M0Z1K3|A0A3M0Z1K3_9BACT GTP cyclohydrolase 1 OS= Candidatus Dojkabacteria bacterium OX=2099670 GN=folE P E=3 SV=1
MGVLHNTKCRPCKIKTQYMINNKSIRKEIITNFVSQLLSIFNEDISRDDLKETPQRVFRMYKELLSGYFQNPKDVFKTFKSNGYKDLISITNIRFYSLCEHHMIPFFGSVHIGYVPNGRVLGLSKFVRLIEILSHRLQTQENLTNQIADILEENLKPRGLAVIVEAEHLCISMRGVRKVNCITKTTILKGLLKKNSKLTDQFYREINNQKDK

SEQ ID NO: 6167 - protein, 247 aa, Doolittlea endobia
  misc_feature (1)..(247): tr|A0A143WUQ1|A0A143WUQ1_9ENTR Putative GTP cyclohydrol ase 1 type 2 OS=Candidatus Doolittlea endobia OX=177826 2 GN=ybgI PE=4 SV=1
MHNTELEYIINQKLNSNEIEDYVPNGLQVEGCQEVQRIVTGVTACQALLESALAHEANAVIVHHGYFWKNEAPVIRGMKRQRLKTLLTNDINLYAWHLSLDAHPELGNNAQFAVALEIRVTGAITPLLLQGELKTPLSGDALRLRLEQTLRRSVLHCGDNGPAQILRLAWCTGNGQKFIELAAQAGVDAFITGEASEHTIHVAREQGLHFYAAGHHATERGGIYALGSWLTQEYNLDVTFIEIPNPA

SEQ ID NO: 6168 - protein, 203 aa, Dormibacter sp.
  misc_feature (1)..(203): tr|A0A2W5ZW58|A0A2W5ZW58_9BACT GTP cyclohydrolase 1 OS= Candidatus Dormibacter sp. RRmetagenome_bin12 OX=259963 0 GN=folE PE=3 SV=1
MSSGRLDASALSAPGTEAAHLVERLLRLLGEDPSREGLRGTSQRVVTSLASLTAGYDQTVADVVHGAVFAEAYSEMVVVRNLEVYSLCEHHLLPFVGHAHIAYVPDGRIIGLSKLPRIVDLFARRLQIQERLTIEIAAALDDVLSPLGVAVVIEAAHFCMLMRRTQKPATKTLTSSMRGVFRSDPSTRAEFMAVIHPGHRDRR

SEQ ID NO: 6169 - protein, 208 aa, Dormibacter sp.
  misc_feature (1)..(208): tr|A0A2W5ZBK1|A0A2W5ZBK1_9BACT GTP cyclohydrolase 1 OS= Candidatus Dormibacter sp. RRmetagenome_bin12 OX=259963 0 GN=folE PE=3 SV=1
MDEPTPLPIRPSRDQPVAAVASVGADPIIPLIECLIREVGEDTAREGLLHTPDRVARSLRFLLSGYDLEVADVINGAVFEESYEEMVLVRDIEVYSLCEHHLLPFFGKAHVAYLPRGRIVGLSKLPRIVEMFARRLQVQERLTTQIAAALNEALDPYGVAVVIEASHLCMMMRGVEKQNSRTVTSALTGGFQTDPKCRNEFLDLLGRT

SEQ ID NO: 6170 - protein, 206 aa, Dormibacteraeota bacterium
  misc_feature (1)..(206): tr|A0A2W5Y4F1|A0A2W5Y4F1_9BACT GTP cyclohydrolase 1 OS= Candidatus Dormibacteraeota bacterium OX=2052315 GN=fol E PE=3 SV=1
MERGLTSWQNGAVSAHHSQPHSSAEALQQLVRALIEQLGEDVGREGLRGTPERAADSLTYLTGGYGADLEDLLGDALFEQQYDEMVLVKNVQFYSLCEHHLLPFFGAAHVAYLPRGKVLGLSKVPRVVDVFARRLQLQERMTREIAEALLQLTEAKGVGVVIEARHLCMEMRGVEKVGGQTVTSCMLGVFRSDARTRGEFLNLISR

SEQ ID NO: 6171 - protein, 202 aa, Dormibacteraeota bacterium
  misc_feature (1)..(202): tr|A0A2W6BI98|A0A2W6BI98_9BACT GTP cyclohydrolase 1 OS= Candidatus Dormibacteraeota bacterium OX=2052315 GN=fol E PE=3 SV=1
MGEQFGRGDALNVAPQIHDRLTGLVRQVLAELGEDPAREGLVDTPERVARSLRYLTEGYGVDATDAIGDALFEQEYDEMVLVRDVQFYSLCEHHLLPFFGVAHVAYQPAGRVVGLSKIPRVIDVFAHRLQLQERMTRQIAEGLERVTRPHGVAVVVEARHLCMEMRGVEKVGGQTVTSCMLGCFREDARTRAEFLDLIHRHN

SEQ ID NO: 6172 - protein, 185 aa, Edwardsbacteria bacterium
  misc_feature (1)..(185): tr|A0A1F5R4Q3|A0A1F5R4Q3_9BACT GTP cyclohydrolase 1 OS= Candidatus Edwardsbacteria bacterium GWF2_54_11 OX=1817 851 GN=folE PE=3 SV=1
MDGPAIEQAVHQLLLAVGEDPQREGLKETPCRVARMYQEILSGMADDPIDQLKVYTAKNEDEMILVKDITFHSLCEHHLLPFFGKVHIAYIPRRNKITGFSSLVKVVEAMAKRLQLQERLAADIADLLMKKLKPLGVLVVVEAEHLCLTMRGVKKPGSSVVTSAIRGGMKRESTRLEALSLIKGR

SEQ ID NO: 6173 - protein, 203 aa, Edwardsbacteria bacterium
  misc_feature (1)..(203): tr|A0A3B9E6Z9|A0A3B9E6Z9_9BACT GTP cyclohydrolase 1 OS= Candidatus Edwardsbacteria bacterium OX=2053551 GN=folE PE=3 SV=1
MKRKTTTPPRSRPKKAGGIDGPAIEQAVHQLLLAVGEDPQREGLKETPCRVARMYQEILSGMADDPIDQLKVYTAKNEDEMILVKDITFHSLCEHHLLPFFGKVHIAYIPRRNKITGFSSLVKVVEAMAKRLQLQERLAADIADLLMKKLKPLGVLVVVEAEHLCLTMRGVKKPGSSVVTSAIRGGMKRESTRLEALSLIKGR

SEQ ID NO: 6174 - protein, 194 aa, Eisenbacteria bacterium
  misc_feature (1)..(194): tr|A0A1F5RR30|A0A1F5RR30_9BACT GTP cyclohydrolase 1 OS= Candidatus Eisenbacteria bacterium RBG_16_71_46 OX=1817 856 GN=A2W00_10830 PE=3 SV=1
MGSQPPGSNRSAVEQAVAGLIRALGLDPATEPELAQTPARVAELYVEIFRGLAPDAMPEPATFAHPGGDDLVVVRDLPFHSLCVHHFVPFFGRALVAYLPGERIIGISGAARLLLHYARRPQLQERITRQVADHLERLLSPRGLAVVLQARHLCMEMRGVRSPGVVETRVVRGALADARWAEALRMSPGGGPGA

SEQ ID NO: 6175 - protein, 198 aa, Eisenbacteria bacterium
  misc_feature (1)..(198): tr|A0A538U1V7|A0A538U1V7_9BACT GTP cyclohydrolase 1 OS= Candidatus Eisenbacteria bacterium OX=2212470 GN=folE P E=3 SV=1
MAHEPPSFDRAGSERAIAALIRALGLDPATEPELAETPARVADLYAEIFSGLDPASAPALATFPTPPSTGEDLVLVRDLPFYSLCVHHFVPFFGRAHVAYLPGRRLLGISGMARVLQHHARRPQLQERLAAQVADHLERALEPRGVAVVLQARHLCMEMRGIRSPGTVETRTLRGALAEPHWASTLPDAGGLGDPHGA

SEQ ID NO: 6176 - protein, 268 aa, Electronema sp.
  misc_feature (1)..(268): tr|A0A521G2T8|A0A521G2T8_9DELT GTP cyclohydrolase FolE2 OS=Candidatus Electronema sp. GS OX=2005002 GN=folE2 P E=3 SV=1
MTLPRMTTEILPDIQKMGDSRGIAINKVGIKNFRLPVYVQDRLNKGQHTIADCSMYVNLPCDFKGTHMSRFAEILHAEEFAVTLHSVKDTLLKMTQLLDARDAYLELAFCYFIKKNAPVSGIASMMDYKVTLMGELVDGKYAIFIKAVVPITSLCPCSKEISQYGAHNQRSYVTVTVELKKFVWIEEIIRIIEDSGSCEVYGILKRPDEKYVTEKAYDNPKFVEDIVRDIAVRLNQDDRIVAYVVKSENVESIHNHSAIAVITRDKRQ

SEQ ID NO: 6177 - protein, 142 aa, Electrothrix marina
  misc_feature (1)..(142): tr|A0A444JAT6|A0A444JAT6_9DELT GTP cyclohydrolase I OS= Candidatus Electrothrix marina OX=1859130 GN=VU01_13653 PE=4 SV=1
MKDQLDAEAAHLEVRFPYFLERAAEEGSGMDRYECRLHGSLQECDDLVMELNVPITLPESMGRWGYAQVSVRFNEFIWLEDLIGMVQQAIRAGSERTASVESLCGQLGDALKATSEVSWFRVEVENLAGGCSTFATVESTLS

SEQ ID NO: 6178 - protein, 255 aa, Electrothrix marina
  misc_feature (1)..(255): tr|A0A3S3R762|A0A3S3R762_9DELT GTP cyclohydrolase I OS= Candidatus Electrothrix marina OX=1859130 GN=VT99_12452 PE=4 SV=1
MKLHSVGIKHFTCPVSIREQKGGMQQTVAEINLQASLPHRFKQSCLETFTCILAKYQQDMHTKIFPKLLTEVQSNLQAKQAEMEMQFPYFIAKKAPVTGTESLMEYDCSFIGSIGSIDNQEHQLLLKVSVPLTTLCPCSKEISTQGAHNQRAEVILTVQPLGFIWLEELITLVESCGSCELYALLKRPDEKFVTEKAYANPMFVEDVVRKVAQKAKNHKMIGWFSVSVESFESIHKHSAYAYVDSTDLDREFTKE

SEQ ID NO: 6179 - protein, 320 aa, Endobugula sertula
  misc_feature (1)..(320): tr|A0A1D2QLT5|A0A1D2QLT5_9GAMM GTP cyclohydrolase FolE2 OS=Candidatus Endobugula sertula OX=62101 GN=folE2 PE= 3 SV=1
MNNVMTKNKKPDMPDIASTQQAQHNATLDWVGMSRIALPLTICDQDRGNYAAKTFIETYVDIFNPQVKGIHMSRLYLLLAEFTKDKVLSIDTLKTLLQEKLSSHEGISRQSCLHIEFDYLINQPALKSEYSGWKDYPILIKAQLNGDRLDIELGIKVPYSSTCPCSAALSRQLMQQEFLKDFADKSTIDKAMVEQWLRSEQGSVATPHSQRSYANVWVKLTDTASAFPMSQLINILEGALKTAVQTAVKREDEQEFARLNGANQMFCEDAARRVKSVLSQQEAYKDFWVRVEHIESLHAHDAVAVATKGVVGGYSPLLHR

SEQ ID NO: 6180 - protein, 214 aa, Endolissoclinum sp.
  misc_feature (1)..(214): tr|A0A1Z9XS71|A0A1Z9XS71_9PROT GTP cyclohydrolase 1 OS= Candidatus Endolissoclinum sp. TMED26 OX=1986636 GN=fol E PE=3 SV=1
  misc_feature (64)..(64): Xaa can be any naturally occurring amino acid
MSPYDNTMLQNISILPASSNASTDLRPSRSEAEEAVRTLIRWAGDDPSREGLLDTPARVTRSYXELFVGYTQDPDEILSTTFAETENYDDMVLLKDIRFESTCEHHMLPVIGTAHVAYVPESRVVGISKLARVVHLFGKRLQIQEKMTSQIAQAIDHALAPKGVAVVVDAVHECMTNRGVHTHGSSLVTRSFMGVFEDDKNLRRDFMDAISGNR

SEQ ID NO: 6181 - protein, 217 aa, Endolissoclinum sp.
  misc_feature (1)..(217): tr|A0A1Z8V3Z4|A0A1Z8V3Z4_9PROT GTP cyclohydrolase 1 OS= Candidatus Endolissoclinum sp. TMED55 OX=1986641 GN=fol E PE=3 SV=1
MDTAITTGHPQGSTANDLNKRRRPSKEEAEAAVRTLIEWAGDDPDREGLRGTPDRVARAYQEFFAGYDEDPVALLSTTFEETEDYDEMIVLRDIRLESHCEHHLVPIIGKAHIGYLPAERVVGISKLGRVIDVFAKRMQIQEKLTSQVAHTLYDVLKPHGVGIVIEAAHQCMTTRGVHKPGVKMVTSRMLGSFRDDITVRKQFLDMIKGPGSAPNNA

SEQ ID NO: 6182 - protein, 189 aa, Endomicrobium trichonymphae
  misc_feature (1)..(189): tr|A0A1E5IKS2|A0A1E5IKS2_9BACT GTP cyclohydrolase 1 OS= Candidatus Endomicrobium trichonymphae OX=1408204 GN=fo lE PE=3 SV=1
MFNFDEKKAQRAVKLLLESFGEDLNREGIRRTPERVAEFYREVLSGNEIGPLKFVPVHYTTEDHEEIVLVKDITFYSLCEHHLLPFFGRTHIAYIPKKDRIIGVSKLINLVEIFANRLQLQERLTKQLADTVMEFVKPHGVMVVVEAEHLCMTMRGVKKPGSKMVTSAMRGMFLKDVRTRSEAMSLLRG

SEQ ID NO: 6183 - protein, 190 aa, Endomicrobium trichonymphae
  misc_feature (1)..(190): tr|A0A1C9ZX13|A0A1C9ZX13_9BACT GTP cyclohydrolase 1 OS= Candidatus Endomicrobium trichonymphae OX=1408204 GN=fo lE PE=3 SV=1
MQIFNFDEKKAQRAVKLLLESFGEDLNREGIKRTPERVAEFYKEVLSGNKIDPLKFIPVHYATEDHEEIVLVKDITFYSLCEHHLLPFFGKMHIAYIPKKDRIIGVSKLIKLVEIFANRLQLQERLTKQLADIVMKFVKPHGVMVVVEAEHLCMTMRGVKKAGSKIITSAMRGIFLKDVRTRSEAMSLLR

SEQ ID NO: 6184 - protein, 219 aa, Enterovibrio luxaltus
  misc_feature (1)..(219): tr|A0A291BBM4|A0A291BBM4_9GAMM GTP cyclohydrolase 1 OS= Candidatus Enterovibrio luxaltus OX=1927128 GN=folE PE= 3 SV=1
MTALSNFAIRVRDELLARGIETPMQSYSPLTKAEKKEKIEYYMRSILSVIELDLDDDSLAETPARIAKMYVDEVFSGLDYTNFPKITVIENKMGCDEMVRVKDITLTSTCEHHLVTIDGSCTVAYLPKDKIIGLSKINRIVQFFGQRPQIQERLTRQILVALQILLETENVAVHVNAVHYCVKARGVMDATSKTTTTALGGMFKKNVATRAEFLHGIDM

SEQ ID NO: 6185 - protein, 220 aa, Enterovibrio escacola
  misc_feature (1)..(220): tr|A0A2A5T100|A0A2A5T100_9GAMM GTP cyclohydrolase 1 OS= Candidatus Enterovibrio escacola OX=1927127 GN=folE PE= 3 SV=1
MTALSNFAILVRAALIAKDIETPMYSNSTMTPAEKKEIIEYHMREILSVIDLDLNDDSLMETPVRIAKMYVDEVFSGLDYFNFPKITVIENKMGCDEMVRVKNITVTSTCEHHLVTIDGFCTVAYLPKEKIIGLSKINRIVRFFAQRPQIQERLTRQILVALQTLLETDNVAVHVNATHSCVKARGVMDATSATTTTALGGVFKKNAASRAEFFHGIGCL

SEQ ID NO: 6186 - protein, 204 aa, Entotheonella gemina
  misc_feature (1)..(204): tr|W4LXZ6|W4LXZ6_9BACT GTP cyclohydrolase 1 OS=Candidat us Entotheonella gemina OX=1429439 GN=folE PE=3 SV=1
MPRVDAVETNGIKKPSEYMDQAKIAAGVRLILEGIGEDADREGLRDTADRVARMYAEVFKGLYQDPCDYLTAVFDEDHDEMVVVKDIPFYSMCEHHLLPFQGKAHVAYLPSGKVLGLSKIARVVEAFAQRPQVQERLTSQIADLLMTKLDALGVAVVMEATHSCMTMRGVKKPGSSMITSAMRGNFKTNQATRSEFMSLIHSNR

SEQ ID NO: 6187 - protein, 206 aa, Entotheonella factor
  misc_feature (1)..(206): tr|W4LGA4|W4LGA4_9BACT GTP cyclohydrolase 1 OS=Candidat us Entotheonella factor OX=1429438 GN=folE PE=3 SV=1
MSRVEVVETNGISKPAGYMDQAKIAAGVRLILEGIGEDADREGLRGTADRVARMYAEVFKGLYQDPCDYLTAVFDEDHDEMVVVKDIPFYSMCEHHLLPFQGKAHVAYLPSGKVLGLSKIARVVEAFAQRPQVQERLTSQIADLLTTELDALGVAVVMEATHSCMTMRGVKKPGSSMITSAMRGDFKTNQATRSEFMSLIRSGSAI

SEQ ID NO: 6188 - protein, 221 aa, Erwinia haradaeae
  misc_feature (1)..(221): tr|A0A451DI65|A0A451DI65_9GAMM GTP cyclohydrolase 1 OS= Candidatus Erwinia haradaeae OX=1922217 GN=folE PE=3 SV =1
MHAWSPEAKRIHKALLDCGLETAFQLPQKEINNNKRKQLIAQHIASIMQLLDLNLNDPSLSQTPQRIAKMYVDEIFSGLNYANFPQITLIDNIVKTDEIIIVRNINLTSICEHHFLMIDGKATVAYIPQNKVIGLSKINRIVQFFSHRPQVQERLIQQIFIALQILLHTTHVAVSIEATHYCVKGRGVRDVTSSTITTSLGGLFKSSDNTRKEFLQSIKHT

SEQ ID NO: 6189 - protein, 221 aa, Erwinia dacicola
  misc_feature (1)..(221): tr|A0A1E7Z3U8|A0A1E7Z3U8_9GAMM GTP cyclohydrolase 1 OS= Candidatus Erwinia dacicola OX=252393 GN=folE PE=3 SV=1
MATLSQEATLVHEALLARGLETPLRLPVRDMDDDTRKALIAGHMTEIMRLLNLDLEDDSLVETPQRIAKMYVNEVFSGLDYANFPKITMIENKMKVDEMVTVRDITLTSTCEHHFVIIDGQATVAYIPKDKVIGLSKINRIVQFFSSRPQVQERLTQQILLALQILLGTNNVAVSIDAFHYCVKARGIRDATSATTTTSLGGLFKSSQNTRQEFLRSVHHR

SEQ ID NO: 6190 - protein, 183 aa, Falkowbacteria bacterium
  misc_feature (1)..(183): tr|A0A1F5S462|A0A1F5S462_9BACT GTP cyclohydrolase 1 OS= Candidatus Falkowbacteria bacterium RIFOXYA2_FULL_38_12 OX=1797993 GN=folE PE=3 SV=1
MQKIIKSLLVKIGENPNRDGLKETPDRVSQMYTEFFYGYDKGKKPKITVFDNEQSSNDQIIIDKGYFYSFCEHHMMPFFGEYYFAYVPDKKIIGLSKISRIVDYYASKLQVQERLTMEILDELENKLKPKGLAIIMSARHLCKEMRGVKKNKVEMTTHDFRGIFADNSKKKKELLDVISLTIK

SEQ ID NO: 6191 - protein, 189 aa, Fermentibacter daniensis
  misc_feature (1)..(189): tr|A0A163WTW2|A0A163WTW2_9BACT GTP cyclohydrolase 1 OS= Candidatus Fermentibacter daniensis OX=1729713 GN=folE PE=3 SV=1
MDLNKIEQGVRLILEGIDEDLDREGLVDTPCRTAKSIAELCRGMDPASARSISTFHAEGHDDLVIVKDISFASICEHHLLPYVGRCDVVYLPADSRIAGLSAIVETVETMAARLTTQERLTTEIADRLMQEIQAKGVMVVMEAEHMCLAIRGVRKRDSRIVTSAMRGYLRRLPTRTEALALIGRSTSVR

SEQ ID NO: 6192 - protein, 190 aa, Fermentibacteria bacterium
  misc_feature (1)..(190): tr|A0A496U752|A0A496U752_9BACT GTP cyclohydrolase 1 OS= Candidatus Fermentibacteria bacterium OX=2044591 GN=fol E PE=3 SV=1
MMDLEKVEQGVKLILEGIGENPDRPGIKRTPRRVALSMAELCRGLDPESRRPIAVMSEDDQNEMIIVKDISFSSMCEHHLLPFLGRCDVVYLPADDRIAGLSAIVELVENLAARPTIQERLTTQIANTLMKELQAKGVMVVMEAEHMCLAMRGVKKRDSRIVTSAMRGHLRRPETRSEALALIGRSTTGR

SEQ ID NO: 6193 - protein, 265 aa, Fermentibacteria bacterium
  misc_feature (1)..(265): tr|A0A2G6LV66|A0A2G6LV66_9BACT GTP cyclohydrolase FolE2 OS=Candidatus Fermentibacteria bacterium OX=2044591 GN =folE2 PE=3 SV=1
MKDIQNSPDTRRIPLDEVGVTSLSYPVTILDRENREQSTVADISMYVDLPMHFKGTHMSRFIEVLTESGCSFTGSTMPLLLARLKAALEADSAAVKVEFPYFMERKAPVTGASALMSYRCSFLGVSGPDGDDFVLTVTVPVGTLCPCSREISDAGAHNQRGYLTMEVRTMKKEDGAFEMLWIEELVETAERSASVPLYTILKRADEKFVTEQAYENPVFVEDMVREAARELMADRRVRSFTVRAENHESIHTHNAYAVVRWSRPS

SEQ ID NO: 6194 - protein, 201 aa, Filomicrobium marinum
  misc_feature (1)..(201): tr|A0A0D6JFY0|A0A0D6JFY0_9RHIZ GTP cyclohydrolase 1 OS= Candidatus Filomicrobium marinum OX=1608628 GN=folE PE= 3 SV=1
MKKNASDSQPLPAAERPDRREAEDAIRTILRWTGENPERDGLIETPSRVVRAFEEYFRGYAEDPEAILQKTFEEIEGYDEMIALRGIRFESHCEHHMAPIIGHAWVGYIPNGRVVGISKLARIVDVYAKRLQIQEKMTAQIANAIQTVLEPQGVGVVIKAEHHCMTTRGIHKPGTDLVTSRMLGVFRDDPKTRQEFLSMVD

SEQ ID NO: 6195 - protein, 204 aa, Filomicrobium marinum
  misc_feature (1)..(204): tr|A0A0D6JE86|A0A0D6JE86_9RHIZ GTP cyclohydrolase 1 OS= Candidatus Filomicrobium marinum OX=1608628 GN=folE PE= 3 SV=1
MDALVHPFADCSRLPTSRETERAAAETAFRAIIRWAGDDPDRPGLIETPARLARAFEQYFAGYSQDPGQILQKTFKEIDGYDEMIVLRGIRFESHCEHHLAPIVGKAWVAYVPEGRVVGISKLARVVDAYARRLQIQERMTVQIANTISEVLQPRGVGVIIKATHHCMTTRGVHKPDSDLITSRMLGCFRDNSRLRQEFVALVD

SEQ ID NO: 6196 - protein, 186 aa, Firestonebacteria bacterium
  misc_feature (1)..(186): tr|A0A1F5UE48|A0A1F5UE48_9BACT GTP cyclohydrolase 1 OS= Candidatus Firestonebacteria bacterium GWA2_43_8 OX=181 7858 GN=folE PE=3 SV=1
MNKAKIEKAVRDILIAIGEDPEREGLQGTPERVARMYEEIFQGVKMDPTKELKVLFTEEHDEMVLLKDIPFYSMCEHHLLPFIGKAHVAYIPVNNKVLGLSKIARLVDTVSKRPQLQERLTSLIADTLTKTIKPKGVLVVVEAEHLCMTMRGIKKPGSKMVTSAVRGLFRKSQATRSEALALIRGS

SEQ ID NO: 6197 - protein, 186 aa, Firestonebacteria bacterium
  misc_feature (1)..(186): tr|A0A1F5UVF7|A0A1F5UVF7_9BACT GTP cyclohydrolase 1 OS= Candidatus Firestonebacteria bacterium RIFOXYC2_FULL_39 _67 OX=1817861 GN=folE PE=3 SV=1
MNKTKIEKAVRDVLVAIGEDPNREGLKETPERVARMYEEIFKGVGMDPTKELKVLFTEEHDEMVLLKDIPFYSMCEHHLLPFIGKAHVAYIPVNNKVLGLSKIARLVDTVSKRPQLQERLTSQIADTLTKTIKPKGVLVVVEAEHLCMTMRGIKKPGSKMVTSAVRGLFRKSQATRSEALALIHGS

SEQ ID NO: 6198 - protein, 185 aa, Fischerbacteria bacterium
  misc_feature (1)..(185): tr|A0A1F5VJN2|A0A1F5VJN2_9BACT GTP cyclohydrolase 1 OS= Candidatus Fischerbacteria bacterium RBG_13_37_8 OX=181 7863 GN=folE PE=3 SV=1
MEDIIRQLLIKVGENPDREGLEETPRRVADAWSYFTKGYQEDARNIIQSAIFIEDYDEMVIVKDIDLFSICEHHLLPFIGKCHVAYIPDKKIIGLSKIVRVIEIFSRRLQIQERLTSQIAYAIWEELKPQGTAVVIEALHLCMMMRGVEKQNSKAITSTMLGTFRTNPETRMEFMSLIKSEKSFL

SEQ ID NO: 6199 - protein, 191 aa, Fokinia solitaria
  misc_feature (1)..(191): tr|A0A2U8BSE7|A0A2U8BSE7_9RICK GTP cyclohydrolase 1 OS= Candidatus Fokinia solitaria OX=1802984 GN=folE PE=3 SV =1
MSKVKEHEIENSIRKILEYIGENPDREGLSETPKRVVKAFKEYFSGYNQNHHEILGKTFTETAGYSDMIALTNLRVQSHCEHHIAPITGQAIVAYIPKNAVVGISKISRLVSMYSHRLQLQERLTKQILDAIDEVLTPYGTAVYISASHSCLSKRGICDDEAMVQTFAFSGDFLNSQLDYKQRFIALTQRV

SEQ ID NO: 6200 - protein, 211 aa, Frackibacter sp.
  misc_feature (1)..(211): tr|A0A1H7X6F4|A0A1H7X6F4_9FIRM GTP cyclohydrolase 1 OS= Candidatus Frackibacter sp. WG12 OX=2017977 GN=folE PE= 3 SV=1
MGKYIIKDIQYMKYYKKIIAEGELIMVDRDKIREAVEMILEAIGEDPKREGLQETPDRVARMYEEVFSGLHKDPSDDLQIFFTEEHEELVLVKDISFYSMCEHHLLPFYGKAHVGYIPKSGKVTGLSKLARVVDSFAKRPQLQERLTSQVADLIMDNIDARGVIVVIEAEHMCMTMRGIKKPGSFTTTSAVRGILHKDQAVRAEALKLIKD

SEQ ID NO: 6201 - protein, 249 aa, Frankia californiensis
  misc_feature (1)..(249): tr|A0A1C3NUU5|A0A1C3NUU5_9ACTN GTP cyclohydrolase 1 OS= Candidatus Frankia californiensis OX=1839754 GN=folE PE =3 SV=1
MGATELAERRRQGTPLTTDFGLAPTGGYTSLASAPVDAGGVPAEDVAPQRRGPDLGPRAVRPFDHERVARAVRELLIGIGEDPDREGLRKTPERVARAYEEAVEGLGRDPSEVLTTVFDEGHEEMVLVRDIDFTSLCEHHLVAFAGKAHVAYIPNESGQITGLSKLARLVDLYSRRPQVQERLTTQIADALEQALSPRGVMIVVEAEHLCMSMRGVRKPGARTVTSAVRGQFLSTATRNEGMSLILSHR

SEQ ID NO: 6202 - protein, 221 aa, Fukatsuia symbiotica
  misc_feature (1)..(221): tr|A0A2U8I3V1|A0A2U8I3V1_9GAMM GTP cyclohydrolase 1 OS= Candidatus Fukatsuia symbiotica OX=1878942 GN=folE PE=3 SV=1
MSVLSEEAKLVYAALKAKGFETPLCGEMLDVKTRKTRIQQHITEIMKLLNLDLTNDSLAETPNRIAKMYVDEIFSGLDYTNFPKITVIKNKMKVDEMITVRNITMTSTCEHHFITINGKATVSYIPKEHIIGLSKINRIVQFFSQRPQVQERLTQQILLALQTLLETNHVAVSIDAIHYCVKARGICDATSTTTTTSLGGLFKSSQNTRQEFLRAATYHTN

SEQ ID NO: 6203 - protein, 267 aa, Gallionella acididurans
  misc_feature (1)..(267): tr|A0A139BRL9|A0A139BRL9_9PROT GTP cyclohydrolase FolE2 OS=Candidatus Gallionella acididurans OX=1796491 GN=fo lE2 PE=3 SV=1
MNTPVQNFIPDVQSSADTRHLAINRVGIKGIRHPVKVKDKSVGVQHTIATFNMYVHLPHNFKGTHMSRFVEILNHHEREISVESFESILSEMVSRLEAESGYIEMSFPYFVNKTAPVSGVQSLLDYDVTLIGETINGKPRVTMKVLVPVTSLCPCSKKISERGAHNQRSHVTLSLRTNEFVWIEDVIRIAEEQASCELYGLLKRPDEKFVTERAYDNPKFVEDMVRDVATVLDADKRIDAYVVESENFESIHNHSAYAMIERDKTGD

SEQ ID NO: 6204 - protein, 263 aa, Gastranaerophilales bacterium
  misc_feature (1)..(263): tr|A0A292RDC6|A0A292RDC6_9BACT GTP cyclohydrolase FolE2 OS=Candidatus Gastranaerophilales bacterium HUM_9 OX=1 916320 GN=folE2 PE=3 SV=1
MKDVQNSLDNRGVEIQKVGVKHVEIPLTIQRKNAENQEVCADATVTVSLPAHYKGTHMSRFVEVLNDWRTKNLLGVDIQGCVTDVVERLDAKSGYLKFDFKYFIEKESPVTKIKSPMYYDCTFEGILDNYQEEDEEYQFFLGVKVPVTTLCPCSKEISKFGAHNQRALVSVKVAYDEDAHIWLEDLISMIEKSASCELYSLLKREDEKYVTEYAYSNPKFVEDVLRDVVINLRNNPVVDRFEVECESIESIHNHSAWAYQQEG

SEQ ID NO: 6205 - protein, 258 aa, Gastranaerophilales bacterium
  misc_feature (1)..(258): tr|A0A292RA46|A0A292RA46_9BACT GTP cyclohydrolase FolE2 OS=Candidatus Gastranaerophilales bacterium HUM_7 OX=1 916228 GN=folE2 PE=3 SV=1
MKDVQNTQDTRNVDIQKVGIKNVELPLIIQRKNASDKVVYATARVCVSLPRNYKGTHMSRFVEVLNEWRTKNLLGVDIKGCLEKIIKKLHAQSGELEFNFKYFVDKKAPITKLAAPMCYDCSFEGTMDGDDYKFILGVKVPVTTLCPCSKEISDNGAHNQRAIISVKVSYDETEHVWLEDLIELIESCASCPVYSLLKRQDEKFVTEHAWENPRFVEDVLREVVVKLRKHPVIKSFEVDCEAFESIHNHSAWAYQKEG

SEQ ID NO: 6206 - protein, 266 aa, Gastranaerophilus sp.
  misc_feature (1)..(266): tr|A0A2L2XCA4|A0A2L2XCA4_9BACT GTP cyclohydrolase FolE2 OS=Candidatus Gastranaerophilus sp. (ex Termes propinq uus) OX=2029980 GN=folE2 PE=3 SV=1
MKTLTDTQNQSDNRKINIQKVGVKDVEIPLIIARKNAENQTVYARAKMSVSLPHHFKGTHMSRFIEVLNDYHQKNLVGVDIHEMLKCMCSRLDAKSAYLKFDFKYFIEKQAPATGLSALMSYDCFFEGTLNEEKYKFNLGAKVPLTTLCPCSKEISEHGAHNQRALVKVKVSYSESEHIWLEDLITLTESSGSAEVYSLLKREDEKFVTEQAFNNPKFVEDVLRDIVIKLENHSAVDSFEVEIEAFESIHNHSAWAYQKREKGVGN

SEQ ID NO: 6207 - protein, 267 aa, Glassbacteria bacterium
  misc_feature (1)..(267): tr|A0A1F5YRL3|A0A1F5YRL3_9BACT GTP cyclohydrolase FolE2 OS=Candidatus Glassbacteria bacterium RIFCSPLOWO2_12_F ULL_58_11 OX=1817867 GN=folE2 PE=3 SV=1
MTTQTALRDLQSETDHRNLEIQKAGVKGLSYPIVVQDRANGTQHTVARIQMSVSLPHHFRGTHMSRFIEILNRHRGNIASDNLREILAEAREKLDAEVAHMELEFPYFIEKSAPVSGAKALQEYICRFSGSLGVREKDTDFILEVNVPVTTLCPCSKEISDYGAHNQRSVLTIAVKFKSFVWIEDLVEIAENSASCALFPLLKRRDEKYVTERAYDNPRFVEDVVRECALLLEQMDEVTWYRVEAENFESIHNHNAYALIENRKNGK

SEQ ID NO: 6208 - protein, 204 aa, Glomeribacter gigasporarum
  misc_feature (1)..(204): tr|G2JAM7|G2JAM7_9BURK GTP cyclohydrolase 1 OS=Candidat us Glomeribacter gigasporarum BEG34 OX=1070319 GN=folE PE=3 SV=1
MNDQTIAGVEQRARPSQQEVEEAIRVLIRWTGDDPAREGLVDTPARVARAYREFFSGYQQDPVQILTRTFSEVDGYDEMIVLSGIRFESYCEHHLVPMIGTAHVGYLPEKRVVGISKLARLVDVYAKRLQIQEKMTVQIADTLNGVLQPKGVAVVLRASHQCMSTRGVHKAAAEMITSRMLGAFRDNPATRREFLALVGIQAAR

SEQ ID NO: 6209 - protein, 185 aa, Goldbacteria bacterium
  misc_feature (1)..(185): tr|A0A2N1W446|A0A2N1W446_9BACT GTP cyclohydrolase 1 OS= Candidatus Goldbacteria bacterium HGW-Goldbacteria-1 OX =2013807 GN=folE PE=3 SV=1
MDKEKIKKAVTMILEAIGEDTNREGLKQTPERVADMYEEIFAGINQKPEEFIKIFQEDEHEELIILKDIPFYSVCEHHLMPFLGKAHIGYIPKKNRLLGLSKLARMVEMYAKRLQLQERLTSQVADTIMKAVDPLGVIVIVEAQHLCTTMRGVKKPGSVMVTSAIRGIFKDDESARKEALSLINK

SEQ ID NO: 6210 - protein, 196 aa, Gottesmanbacteria bacterium; identical to SEQ ID NO: 6153
  misc_feature (1)..(196): tr|A0A1F6AVK1|A0A1F6AVK1_9BACT GTP cyclohydrolase 1 OS= Candidatus Gottesmanbacteria bacterium RIFCSPLOWO2_01_F ULL_46_21 OX=1798393 GN=folE PE=3 SV=1

SEQ ID NO: 6211 - protein, 190 aa, Gottesmanbacteria bacterium; identical to SEQ ID NO: 6123
  misc_feature (1)..(190): tr|A0A2H0NH84|A0A2H0NH84_9BACT GTP cyclohydrolase 1 OS= Candidatus Gottesmanbacteria bacterium CG11_big_fil_rev _8_21_14_0_20_37_11 OX=1974575 GN=folE PE=3 SV=1

SEQ ID NO: 6212 - protein, 220 aa, Hamiltonella defensa
  misc_feature (1)..(220): tr|A0A249DYM1|A0A249DYM1_9ENTR GTP cyclohydrolase 1 OS= Candidatus Hamiltonella defensa (Bemisia tabaci) OX=672 795 GN=folE PE=3 SV=1
MSSFSKEARQVHEALVKHGLENPFNMDPKNGLLDAATRRSHIEKHITRIMELLNLDLKDDSLSKTPSRIASMYVDEIFLGLDYAHFPEITLIQNKMQVDEMITVHDISLSSTCEHHFASIDGKATVAYIPKDYIIGLSKINRVVQFFSQRPQVQERLTQQIILALQTLLATENVAVSIDATHYCVKARGICDRSSVTRTTSLRGLFKSSQNTRQEFLHIC

SEQ ID NO: 6213 - protein, 220 aa, Hamiltonella defensa
  misc_feature (1)..(220): tr|A0A2D3TBH3|A0A2D3TBH3_9ENTR GTP cyclohydrolase 1 OS= Candidatus Hamiltonella defensa OX=138072 GN=folE PE=3 SV=1
MSSFSKEARQVHEALVKHGLENPFNMDPENGLLDAATRRSHIEKHITQIMELLNLDLRDDSLSKTPSRIASMYVDEIFLGLDYAHFPEITLIQNKMQVDEMITVHDISLSSTCEHHFASIDGKATVAYIPKDYIIGLSKINRVVQFFSQRPQVQERLTQQIILALQTLLATENVAVSIDATHYCVKARGICDRSSVTRTTSLRGLFKSSQNTRQEFLHIC

SEQ ID NO: 6214 - protein, 247 aa, Hoaglandella endobia
  misc_feature (1)..(247): tr|A0A143WUD1|A0A143WUD1_9ENTR Putative GTP cyclohydrol ase 1 type 2 OS=Candidatus Hoaglandella endobia OX=1778 263 GN=ybgI PE=4 SV=1
MRNTELEYIINQKLNSSEIQDYVPNGLQVEGRHEVRRIITGVTACQAILDSALTHGADAIIVHHGYFWKNELAVIRGIKRQRLKTLLSHDINLYAWHLPLDAHPELGNNAQLASALAIQVTGVLEPLITQGELDIPLSADALQKRLEQKLGRSVIHCGDNAPAQIKRLAWCCGGGQRFIELAAEAGMDAFISGEISEQTSHAAREWGLHFYAAGHHATERGGIRALGEWLAKQYDLDVNFIDIPNPA

SEQ ID NO: 6215 - protein, 191 aa, Hodgkinia cicadicola
  misc_feature (1)..(191): tr|A0A2G9FR12|A0A2G9FR12_9RHIZ GTP cyclohydrolase 1 OS= Candidatus Hodgkinia cicadicola OX=573658 GN=folE PE=3 SV=1
MSFINVYKMINKIIIKKIIEYVGDDSNRNGLRSTPIRVIRSLKEMYCGYKTQLPKVNKSFSYINSNIDLVYIKNVFISSNCEHHMLPFFGQVNLVYCPSTMVLGLSKFINILNFYSTRLQSQERLAQQVVTYIKNIIRPKAIMLKLSCKHVCMLARGVKSICSTNGIIINEGLSVISPMLMNKMLTVVKDE

SEQ ID NO: 6216 - protein, 180 aa, Hodgkinia cicadicola
  misc_feature (1)..(180): tr|A0A2G9FUM5|A0A2G9FUM5_9RHIZ GTP cyclohydrolase 1 OS= Candidatus Hodgkinia cicadicola OX=573658 GN=folE PE=3 SV=1
MLNNIIIIKIIEYIGDNPKRNELHLTPIRVVKSMKEIYCGYKLNLTDMEKSFDYNNSNTDLIYIKNVFFGSNCEHHMLPFFGQANFVYCPSKKIIGLSKFINILNFYSARLQTQERLARQVVNYIKNILRPRAIILKLSCKHICMLMRNVKSICSTSGTVINEGLSTISPTLMLKMLFII

SEQ ID NO: 6217 - protein, 189 aa, Hydrogenedentes bacterium
  misc_feature (1)..(189): tr|A0A1V5YYB2|A0A1V5YYB2_9BACT GTP cyclohydrolase 1 OS= Candidatus Hydrogenedentes bacterium ADurb.Bin170 OX=18 52848 GN=folE PE=3 SV=1
MNTDRIAGLIRELLIEIGEDPDREGLLKTPDRYAKALKFLTKGYHEDMNTIINGAIFQAESNNMIIMRDIELYSLCEHHMLPFFGRAHVGYIAQEKVIGLSKIARIVDFYARRLQIQERLTAQIARAIMDNTRAEGVGVVLECKHLCTMMRGVEKQNSLMTTSSVLGSFHDDEITRQEFLQLIGRGGQI

SEQ ID NO: 6218 - protein, 210 aa, Hydrogenedentes bacterium
  misc_feature (1)..(210): tr|A0A3M2EZ69|A0A3M2EZ69_9BACT GTP cyclohydrolase 1 OS= Candidatus Hydrogenedentes bacterium OX=2030809 GN=folE PE=3 SV=1
MEREGKKEKSPCGKDCSERRRRIAKSIREILETLGFDIARSDLRDTPSRVAEMYWEIFRGEREENEPKLTVFPNDEGYRSMVMVRDIPFYSMCAHHLVPFFGVGHIGYIPAESIVGLSKLARVLEHFARRPQVQERLTEQVADFLQKKLNPRGVMVVLEARHLCMEMRGVEKPGALTMTTTTRGTFDVEEGVDYRKEFLRHLLRPGSVPR

SEQ ID NO: 6219 - protein, 260 aa, Hydrothermae bacterium
  misc_feature (1)..(260): tr|A0A496U321|A0A496U321_9BACT GTP cyclohydrolase FolE2 OS=Candidatus Hydrothermae bacterium OX=2250085 GN=fol E2 PE=3 SV=1
MRDVQKEPPPRKIPIDKVGVEDVTYPIRVMDKENGFQNTVARIKMSVDLPHNFRGTHMSRFIEVLNKHLHNITLHNLENILEDIRKELDAETSHIEIEFPYFIKKKAPVSGMESFMNYRCKFIASKDDKFDFILEVNVPVHTLCPCSKEISERGAHNQRALVSVQVRMKKLVWIEEIVEMVEGSVSAPLYALLKREDERYITEHAYDNPRFVEDVVREVAVNLDRDDRIIWYFINVKSFESIHNHNAFACLKRDKIIGSQ

SEQ ID NO: 6220 - protein, 260 aa, Izimaplasma sp.
  misc_feature (1)..(260): tr|A0A088T1Y3|A0A088T1Y3_9BACT GTP cyclohydrolase 1 typ e 2 OS=Candidatus Izimaplasma sp. HR1 OX=1541959 GN=KQ5 1_01133 PE=4 SV=1
MIVSEFIKKFEQYFPSNLAYKWDNVGLQVGSDEENITNILLSLDLTNEIIDEAIEKNANFVVVHHPIIFTPLKQINTNTYLGNLLSKIIKNNINIYVAHTNFDLSNFGMNKVLADMLEIEDQKIIELETLDEGLGRYGNLNESMSLGKFIEKVKNVYNLDTVKLISNQKMNYMIGTVAICGGSGSSLLGNDILKYCDIYITGDVTYHHALDAINRGLTVLDVGHHVERHGILSIKSQLETFSQDYRVFLSNLDVNPYKIV

SEQ ID NO: 6221 - protein, 257 aa, Izimaplasma sp.
  misc_feature (1)..(257): tr|A0A094IFE5|A0A094IFE5_9BACT Putative GTP cyclohydrol ase 1 type 2 OS=Candidatus Izimaplasma sp. HR2 OX=15419 60 GN=KQ78_01366 PE=4 SV=1
MNGIEIINIFEALYPKDLAYNWDNVGLQIGTLNKDIGKILLSLDLTLEVVNEAINNGTELIIVHHPLIFSALKSINTDTYKGKVIEKLIKSDITLYVAHTNFDVSSYGMNTILADMLNLKDQEVLEFTTEDEGLGKVGKVSPSLMKDYINTVKKTFKVDNARFIGDLNKTVNKVAITGGSGSSTIYSASKAGVDLLITGDISYHQAHDALAINLNVLDIGHNIEKFFVHELKSILVNKGVKANILVSKINTNPYKFV

SEQ ID NO: 6222 - protein, 187 aa, Jettenia caeni
  misc_feature (1)..(187): tr|I3ILL8|I3ILL8_9BACT GTP cyclohydrolase 1 OS=Candidat us Jettenia caeni OX=247490 GN=folE PE=3 SV=1
MVDKKKIIESIRLFIEGIGEDPAREGLRETPERVADMCEEIFAGIGIDSHAEIKVLKSEKYDEIVLLKDIPFYSICEHHLLPFSGVAHVAYIPQGNRVTGISKLARVVEIEAKRLQVQERLTTDIAESIMKALRPKGVLVIIEAGHLCMTMRGIKKPGTTVHTSVVRGIFRDNPATRAEAMALIKGH

SEQ ID NO: 6223 - protein, 187 aa, Jettenia ecosi; identical to SEQ ID NO: 6222
  misc_feature (1)..(187): tr|A0A533Q840|A0A533Q840_9BACT GTP cyclohydrolase 1 OS= Candidatus Jettenia ecosi OX=2494326 GN=folE PE=3 SV=1

SEQ ID NO: 6224 - protein, 198 aa, Jidaibacter acanthamoeba
  misc_feature (1)..(198): tr|A0A0C1QFH9|A0A0C1QFH9_9RICK GTP cyclohydrolase 1 OS= Candidatus Jidaibacter acanthamoeba OX=86105 GN=folE_2 PE=3 SV=1
MVRFMSKILEKDQAINQKAINAIRSLIECIGDDPGRSELKKSPYKILEVLQSYFAGYAVNSDEILAETIEEVEGYDDIIMLKDINFTSYCEHHFLPFSGKCHIGYIPNKKIAGIGKFVEVLEAFAGRLQIQERLTVLIAEAIYKNLQPKGVGVVIEAKHNCLSFKHQSCNNAVMRTGKMLGAFHEDYNIRNEFLSALK

SEQ ID NO: 6225 - protein, 193 aa, Kaiserbacteria bacterium
  misc_feature (1)..(193): tr|A0A1F6CVM0|A0A1F6CVM0_9BACT GTP cyclohydrolase 1 OS= Candidatus Kaiserbacteria bacterium RIFCSPHIGHO2_01_FUL L_53_29 OX=1798480 GN=folE PE=3 SV=1
MDLWRRQQAILPCMQDAIKKILEELGENPTRNGLKETPRRVEESLRFLTQGYHLSAEEVIADALFEEDHNEMIVVKDIEIYSLCEHHLLPFVGKAHVGYIPNGRIVGLSKIARVADVFARRLQLQERLTKEIADALQKSLRPLGVGVIIEAEHFCMMMRGVEKQNSKAMTSAMRGSFLDDEKTRQEFLRLAVA

SEQ ID NO: 6226 - protein, 193 aa, Kaiserbacteria bacterium; identical to SEQ ID NO: 6225
  misc_feature (1)..(193): tr|A0A1F6FZQ3|A0A1F6FZQ3_9BACT GTP cyclohydrolase 1 OS= Candidatus Kaiserbacteria bacterium RIFCSPLOWO2_12_FULL _53_8 OX=1798529 GN=folE PE=3 SV=1

SEQ ID NO: 6227 - protein, 285 aa, Kentron sp.
  misc_feature (1)..(285): tr|A0A451C0I2|A0A451C0I2_9GAMM GTP cyclohydrolase FolE2 OS=Candidatus Kentron sp. G OX=2126341 GN=folE2 PE=3 S V=1
MTQCVRTDSVRINNANTGKEASESGKIADVQGSADLRRIPIQQVGIKGIRHPIQVRDRANTLQHTIATFNMYVNLPHNFKGTHMSRFVEILNNHEYEITVESFTRMLFEMTEILDAESGQIEMMFPYFVNKVAPISKVQSLMDYEVTLTGRLVDGQPYMYIKVIVPVTSLCPCSKEISDYGAHNQRSHVTLKVRTHTFVWIEELIDLVENQASSQVYGLLKRPDEKFVTERAFDHPKFVEDMVRDVAQLLNKDDRIDAYIVESENFESIHNHSAYALVEKDKLEE

SEQ ID NO: 6228 - protein, 280 aa, Kentron sp.
  misc_feature (1)..(280): tr|A0A451B705|A0A451B705_9GAMM GTP cyclohydrolase FolE2 OS=Candidatus Kentron sp. MB OX=2138164 GN=folE2 PE=3 SV=1
MNRSAGINCANGNTGVQECGEIPDVQGSLDLRQIPIQKVGIKGIRHPVQVRDRANSVQHTIATFNMYVNLPHNFKGTHMSRFVEILNNHEYEITVESFLRMPFEMTRILNAKSGQIEMSFPYFVNKIAPVSKVKSLMDYGVTLTGKLHDEKSDLYIKVVVPITSLCPCSKEISDYGAHNQRSHVTIEVRTGTFVWIEELIDLIEGEASSQLYGLLKRRDEKFVTEHAFNNPKFVEDMVRDVARKLNQDDRIDSYVVESENFESIHNHSAYALVEKDKFAP

SEQ ID NO: 6229 - protein, 185 aa, Kerfeldbacteria bacterium
  misc_feature (1)..(185): tr|A0A359MY13|A0A359MY13_9BACT GTP cyclohydrolase 1 OS= Candidatus Kerfeldbacteria bacterium OX=2053565 GN=folE PE=3 SV=1
MDKKTISKNIAELIQHIDPQPQREGLADTPRRVADSFEKLFSGYGIDPNGLLTFFDSEHYDEMITCKEIDFYSTCEHHLLPFHGKAHIGYIPKAKIIGLSKLPRVVEVFARRLQNQERLTSQITDFLEQALQAKGIGVVLEATHLCMQARGVEKQNTIVTTSSFRGLFKSNSNTRSEFLSVCFNR

SEQ ID NO: 6230 - protein, 275 aa, Kinetoplastibacterium galatii
  misc_feature (1)..(275): tr|M1M1C6|M1M1C6_9PROT GTP cyclohydrolase FolE2 OS=Cand idatus Kinetoplastibacterium galatii TCC219 OX=1208921 GN=folE2 PE=3 SV=1
MKTIKSNLENISEIPDIQDLVDTRCIPINRVGVHNVRFPITILDKNNNIQHTIANWTMTVSLPANKKGTHMSRFLVLLEKFKGKLMNLSSFSEMNADMLYLLNSENGDISASFPFFLEKKAPVSNVASLMNYDVQINISTCNNKTELEIVITVPVTSLCPCSKAISEYGAHNQRSNITLSVTSNKILSLHIEDLINLVEKEASCELWSILKRPDEKYVTEYAYNNPKFVEDLVRDLAFRIDTVFPNISKYRIEAENFESIHNHSAYAVIEKTINN

SEQ ID NO: 6231 - protein, 272 aa, Kinetoplastibacterium desouzaii
  misc_feature (1)..(272): tr|M1LUE7|M1LUE7_9PROT GTP cyclohydrolase FolE2 OS=Cand idatus Kinetoplastibacterium desouzaii TCC079E OX=12089 19 GN=folE2 PE=3 SV=1
MTINTLNPDSTIPDIQSLSDKRHIPIKRVGIRNLCLPAIISDLDSKTQNTTANWTMTVSLSEKDKGTHMSRFITLLEQYRLKILTPELLHQMALEMLDLLQSNSGDISLSFPFFMEKTAPVSKVKSLMNYQVEFIVRVNKESKDEFELILQIPVTSLCPCSKAISTYGAHNQRSNITLSIIFKEISDISISKFIRFAEEESSCELWSLLKRPDEKYVTEYAYDHPKFVEDLIRDLASRIDKNLINISKYKIEAENFESIHNHSAYAVIEKSV

SEQ ID NO: 6232 - protein, 201 aa, Kryptonium thompsoni
  misc_feature (1)..(201): tr|A0A0N7MSR5|A0A0N7MSR5_9BACT GTP cyclohydrolase 1 OS= Candidatus Kryptonium thompsoni OX=1633631 GN=folE PE=3 SV=1
MGENRKEQIVQNRLDIEKIADLIRELLIEIGEDPEREGLKRTPIRVAEAFEYFTKGYREEIEKVLNGAIFNEKYNEMVVVKNIDFFSLCEHHLLPFYGKVHIAYIPNGKIVGLSKIPRIVEVFSRRLQVQERLTQQIADTLNEYLNPKGVAVVIEARHLCMIMRGVEKQNSVATTSAMHGVFVEDAKTRDEFMHLISQDLT

SEQ ID NO: 6233 - protein, 211 aa, Lambdaproteobacteria bacterium
  misc_feature (1)..(211): tr|A0A1F6GQD6|A0A1F6GQD6_9PROT GTP cyclohydrolase 1 OS= Candidatus Lambdaproteobacteria bacterium RIFOXYD2_FULL _56_26 OX=1817773 GN=folE PE=3 SV=1
MWPIGRQSFPDGLLAEKENFMTQVSREQALEAVRTLIRYIGDDPNREGLLETPDRVVRSYAELFKGYKLEPSKILDKKFTTHSGEMVVLSNIELYSTCEHHMMPFIGKCHIAYLPNEKVVGLSKLARLMEVYSRRLQIQEEMTWQIAQALNQETGARGVAVLVEARHMCMSARGVNKQHSIMSTTAMLGDFKDNPTLKSEFMAQIEKSRLL

SEQ ID NO: 6234 - protein, 193 aa, Lambdaproteobacteria bacterium
  misc_feature (1)..(193): tr|A0A1F6GFT5|A0A1F6GFT5_9PROT GTP cyclohydrolase 1 OS= Candidatus Lambdaproteobacteria bacterium RIFOXYD2_FULL _50_16 OX=1817772 GN=folE PE=3 SV=1
MNPVSAEEAKEAIKTLIRFIGDDPEREGLLETPERVIRAYEEIFKGYKLDPAEILEKKFSTHSGELVVLSNIELYSTCEHHMMPFIGKCHIGYLPKDHVVGISKLARLMEIYSRRLQIQEEMTWQIAQALEHETQARGVAVLVEARHLCISSRGIGKQHSVMTTIATIGEFQENQNAKADFIHIIEQQRLSSL

SEQ ID NO: 6235 - protein, 187 aa, Latescibacteria bacterium
  misc_feature (1)..(187): tr|A0A496SC37|A0A496SC37_9BACT GTP cyclohydrolase 1 OS= Candidatus Latescibacteria bacterium OX=2053570 GN=folE PE=3 SV=1
MDLEKIEQGVRLILEGIGDDPDREGLVDTPRRVAQMYRELFCGLEADPIETLKVYITENRDEMILVKDIPFYSMCEHHLLPFFGKVHIAYIPDGNRVTGFSHLVRVVENFARRPQLQERMTTEIAETIMRVLKPKGVLVVVEAEQMCLTMRGVQKPGSKTLTSAMRGIMRQEATRLEAFSMIMGGRR

SEQ ID NO: 6236 - protein, 166 aa, Latescibacteria bacterium
  misc_feature (1)..(166): tr|A0A3D5FTX5|A0A3D5FTX5_9BACT GTP cyclohydrolase 1 (Fr agment) OS=Candidatus Latescibacteria bacterium OX=2053 570 GN=folE PE=3 SV=1
MQGRHRQERDVVEEHFSRLIESVGEDPTREGLRGTPARAARAFEYFTQGYEQDPADVVGEAIFTSEMDEMVIVRDIELYSLCEHHLLPFLGRCHIGYLPKGKVIGLSKVARVVDVFARRLQIQENLTAEIAQSLSDLIEPAGVGVVIEARHMCMMMRGVQKQNSEM

SEQ ID NO: 6237 - protein, 256 aa, Levybacteria bacterium
  misc_feature (1)..(256): tr|A0A2M8FCC4|A0A2M8FCC4_9BACT GTP cyclohydrolase FolE2 OS=Candidatus Levybacteria bacterium CG_4_9_14_0_2_um_ filter_35_21 OX=1974627 GN=folE2 PE=3 SV=1
MKDIQSEFDTRGLPLDMVGITGISLPLLISGKKNSVQPVSAVISFYASLASDIKGHHMSRFVEILYENSGKRITLNRLKFITSQAKRRLDVENAYLEVSFNYFMKKKAPVTGKIGYLDYRCIVLTKVNSGDDEQVLTVEVPIMLLCPCSKAISKYNAHNQRAIAKVKVVLRKKLWIEDIITLIEKQGSCEVYPVLKRPDEKYVTEKSYENAKFVEDIVRDIANVFSQKKNIVSFSVECESQESIHNHNAFAKYISL

SEQ ID NO: 6238 - protein, 195 aa, Liberibacter solanacearum
  misc_feature (1)..(195): tr|A0A0F4VJA5|A0A0F4VJA5_9RHIZ GTP cyclohydrolase 1 OS= Candidatus Liberibacter solanacearum OX=556287 GN=folE PE=3 SV=1
MKSKNPTAEEAKEAIRVILRWIGDDPEREGLKDTPERVIKSYKELFSGYEQDFIVQDTSRFYFGEVSNYGDMVLIKDISFFSYCEHHILPIFGKIHLAYIPKKRVIGLSKLIRILEIYSRRLQIQERLTMQIANEIGNVADSKGVAVLIEGQHMCMSMRGIRREGLTTVTTSFTGEFNSNKENKDIFIRMINNKR

SEQ ID NO: 6239 - protein, 193 aa, Liberibacter africanus
  misc_feature (1)..(193): tr|A0A0G3I9H3|A0A0G3I9H3_LIBAF GTP cyclohydrolase 1 OS= Candidatus Liberibacter africanus PTSAPSY OX=1277257 GN =folE PE=3 SV=1
MKKNPTAEEAKEAIRTILRWIGDDPDREGLKDTPERVIRSYQELFAGYKQDPVIQDTSRFHFGEVSNYKGMVLIKDISFFSYCEHHILPIWGRIHLAYIPKNNVIGLSKLIRILEIYSRRLQIQERLTMQIAHAIDQSTDSKGAAVLIEGQHMCMSMRGIKRDGLTTVTTSFTGDFSKDQQKTDFFLTAINKR

SEQ ID NO: 6240 - protein, 272 aa, Lindowbacteria bacterium
  misc_feature (1)..(272): tr|A0A1F6LJ07|A0A1F6LJ07_9BACT GTP cyclohydrolase FolE2 OS=Candidatus Lindowbacteria bacterium RIFCSPLOWO2_12_ FULL_62_27 OX=1817870 GN=folE2 PE=3 SV=1
MSDSSKIEDVQGQADQRGVMIEQVGISEVKLPMVVQDRERGRQQVTATIRISASLSPAERGTHMSRFVELLDRFKSRPLNPEILEVLLESVVDRLGAERSYLDVSFLYFRTKRSPLTAEPALMGYACRLGGDCEKNGEKKFRKIVEADVPILTLCPCSKAISEFGAHNQRTQVKAAVEMAETIWIEELIDLVESEGSSEVYPLLKRPDEKFVTEASYRNPKFVEDVVRDIALKFDADPRVASYRIECESLESIHSHNAYAIISSGPFPCYWR

SEQ ID NO: 6241 - protein, 205 aa, Lumbricidophila eiseniae
  misc_feature (1)..(205): tr|A0A2A6FQQ8|A0A2A6FQQ8_9MICO GTP cyclohydrolase 1 OS= Candidatus Lumbricidophila eiseniae OX=1969409 GN=folE PE=3 SV=1
MTAVDAQRIEQAVREILLAIGEDPTRPGLTDTPRRVAVAYADFFGGLATDPYSHLGDAVPVGMAEDGNPATSDTVIVRNIEFRSVCEHHLLPFVGTAHVAYVPGDRVVGLGRIPAVVDTLARRPQLQERLTEEIADALTTGLNPVGSLVVLEAQHRCVTTRGARQSQSSTVTLAARGSLRESGARAEIIALIRAPNGGRLGGVNL

SEQ ID NO: 6242 - protein, 276 aa, Macondimonas diazotrophica
  misc_feature (1)..(276): tr|A0A4Z0F7X5|A0A4Z0F7X5_9GAMM GTP cyclohydrolase FolE2 OS=Candidatus Macondimonas diazotrophica OX=2305248 GN =folE2 PE=3 SV=1
MKVPGQVASIITDIADVQGSADHRRIAIDRVGIRSIRHPLRVADRSGGVQHTVARLNMYVSLPHHQKGTHMSRFVAILGEHDDVLTVHSLNMLMQRMTSRLEADSGHLEIAFPYFVDKSAPVSGVRSLMDYEVTLTGVSTPAGGAQTLVRVVVPVTSLCPCSKEISDYGAHNQRSHVTVEVRCQGDVWIEDLVDLVETEASAQLYGLLKRPDEKFVTERAYDNPKFVEDMVRDVAVRLDADERVLAYTVESENFESIHNHSAYAVVERVKDIQDPA

SEQ ID NO: 6243 - protein, 185 aa, Magnetobacterium bavaricum
  misc_feature (1)..(185): tr|A0A0F3GX53|A0A0F3GX53_9BACT GTP cyclohydrolase 1 OS= Candidatus Magnetobacterium bavaricum OX=29290 GN=folE PE=3 SV=1
MDTEKIKRGVELILEGIGENPQRPGLQRTPHRVAAMYKEILSGMATPEEELLRPIEGENYDEMVILKDITFYSMCEHHMLPFFGTANIAYIPNGGKIVGIGELAKALDLMAKRLQVQERLTTQLADLIMDCLRPRGTMVVIEAEHLCLSMRGLKKQGAKVITSAVRGIFRTRKSTRDEILSLIRQ

SEQ ID NO: 6244 - protein, 180 aa, Magnetoglobus multicellularis
  misc_feature (1)..(180): tr|A0A1V1PDS2|A0A1V1PDS2_9DELT GTP cyclohydrolase 1 OS= Candidatus Magnetoglobus multicellularis str. Araruama OX=890399 GN=folE PE=3 SV=1
MNKQERLIAEILKYIGEDPNREGLLETPARVVKSWSELYSGYKQNPDNVFKCFEKIDADDNGIISLKKINFYSMCEHHMLPFTGEVDIGYIPNGKVVGISKLARVVDIFSKRLQVQERMTYQIAESIFKGVKPKGVIVVTRGQHFCTTARGIKKSHTIMTTTATKGVFNDMEKKLEFLQT

SEQ ID NO: 6245 - protein, 264 aa, Magnetoglobus multicellularis
  misc_feature (1)..(264): tr|A0A1V1PDW7|A0A1V1PDW7_9DELT GTP cyclohydrolase FolE2 OS=Candidatus Magnetoglobus multicellularis str. Araru ama OX=890399 GN=folE2 PE=3 SV=1
MKDVQNEPDVRNMPINKVGIKDLRYPITVLDRQKSVQHTVATINMYVDLPHQYKGTHMSRFVEMLHVLEPEISVRRVSKILEAMMKYLQANSAHIEICFPYFIEKVAPVSSIRGLMDYDCRFIGSSYANNETDIVTEVRIPITSVCPCSKEISAYGAHNQRGEVTVAIRFNKFIWIEDLIEMVEKCASCDLYSVLKRVDEKYVTEYAYHNPKFVEDIVRDVALKLKNNADVKWFSVSAENFESIHHHSAYAQITSNGTPMFFGR

SEQ ID NO: 6246 - protein, 263 aa, Magnetomorum sp.
  misc_feature (1)..(263): tr|A0A0M9ECM9|A0A0M9ECM9_9DELT GTP cyclohydrolase FolE2 OS=Candidatus Magnetomorum sp. HK-1 OX=1509431 GN=folE 2 PE=3 SV=1
MKDVQNELDNRNMPINKVGIKDLRYPLTVLDRQKSVQHTIATINMYVDLPHQYKGTHMSRFVEMLHVLQPEISVKRVEKILDKMMEYLQADSAHIEINFPYFIEKTAPVSDSKGFMDYDCRFLGSSYKKGETDIITEIHVPISSVCPCSKEISDYGAHNQRGEVSLSIRFNKFIWIEDLIELVEKCASCDVYSVLKRVDEKYVTEYAYQNPKFVEDIVRDVALELKKNNDIKWFSVSAENFESIHHHSAYAQITSDNTHFSRK

SEQ ID NO: 6247 - protein, 276 aa, Magnetoovum chiemensis
  misc_feature (1)..(276): tr|A0A0F2J472|A0A0F2J472_9BACT GTP cyclohydrolase FolE2 OS=Candidatus Magnetoovum chiemensis OX=1609970 GN=fol E2 PE=3 SV=1
MNTRDKGLENAVATNPIDQAIPDVQSTIDTRHIAIQSVGIRSVKYPVLIELQGQKPMPSVAEFEMTVFLPADQKGTHMSRFIALLEEAQGTVLTVSGFRAMLVEMLQRLDAPSGRIKMELPYFLSKVAPISGVSSLMDYQLTLEGSATATGQDIYLTVVVPVTSLCPCSKKISEYGAHNQRSHVTARVQLKEDVDIAQFISAIEQQASCELYGLLKRPDEKYVTERAYDNPKFVEDLVRDVAIAMNKFSQVGQYTVEAENFESIHNHSAYARIDRA

SEQ ID NO: 6248 - protein, 188 aa, Magnetoovum chiemensis
  misc_feature (1)..(188): tr|A0A0F2J259|A0A0F2J259_9BACT GTP cyclohydrolase 1 OS= Candidatus Magnetoovum chiemensis OX=1609970 GN=folE PE =3 SV=1
MDKEKIQKGIRLVLEGLGENPDRAGLKNTPYRVASMYEEILSGLETSTEEILKPIEGENHDEMVILKDITFYSMCEHHLLPFFGIANIAYIPSEGKIVGIGELAKALDALAKRPQVQERLTTELADLIMNNLKPKGAMVIIEAEHLCLSMRGLRKQGSKTVTSAVRGLFRTKQSTRQEMLSLIKNRNI

SEQ ID NO: 6249 - protein, 190 aa, Margulisbacteria bacterium
  misc_feature (1)..(190): tr|A0A1F6QMN4|A0A1F6QMN4_9BACT GTP cyclohydrolase 1 OS= Candidatus Margulisbacteria bacterium GWE2_39_32 OX=181 7872 GN=folE PE=3 SV=1
MPRNNERIEMLVKELLTELGEDTNREGIVRTPNRLAKSLKFLTSGYSVDMKKLINNAIFTQEVDSMIIIKDIELYSLCEHHLLPFYGRCHIGYLPNGKVIGASKLARIVDTYSRRLQIQEHLTEQISNAIKDAIGAAGVGVMIEARHLCMMMRGVQKQNSMLVTSSLLGSFRDHPATRQEFLSLIGKTQQ

SEQ ID NO: 6250 - protein, 186 aa, Margulisbacteria bacterium
  misc_feature (1)..(186): tr|A0A2W4HZW8|A0A2W4HZW8_9BACT GTP cyclohydrolase 1 OS= Candidatus Margulisbacteria bacterium OX=2053573 GN=fol E PE=3 SV=1
MNIDRHRIENAVKEILAAIGEDVNRPELLDTPARVACMYEEVFSCTRKDLHDTVSVILEPHGEQMIVVKDITFYSMCEHHLVPFFGKAHIVYIPKENRITGFSKLCTLVESAAKRPQLQERMTTQIADVLMNVLEPQGVMVVIEAEHLCMSMRGVKKPGTKTTTSAIRGLFYEDASARAEALTLIK

SEQ ID NO: 6251 - protein, 191 aa, Marinamargulisbacteria bacterium
  misc_feature (1)..(191): tr|A0A328QWC2|A0A328QWC2_9BACT GTP cyclohydrolase 1 OS= Candidatus Marinamargulisbacteria bacterium SCGC AG-343 -K17 OX=2184341 GN=folE PE=3 SV=1
MTEKPSLEDALAAVEILIRYAGDNPNREGLKETPKRVVKSYEEFFSGYAKNPDEILAKTFEEVEGYDEMVIVKNIDLESHCEHHMVPILGVAHVAYIPNNRVVGISKLARIVDVYAKRLQTQETMTAQIADTISRVLEPKGVAVVIDAAHQCMSTRGVHKRHSSTVTSRMLGLFRSDPRTRSEFMDLIKSS

SEQ ID NO: 6252 - protein, 191 aa, Marinamargulisbacteria bacterium
  misc_feature (1)..(191): tr|A0A328RC99|A0A328RC99_9BACT GTP cyclohydrolase 1 OS= Candidatus Marinamargulisbacteria bacterium SCGC AG-414 -C22 OX=2184344 GN=folE PE=3 SV=1
MCNQTKAIPEMVDLYHKILNLINEDVTREGLVKTPERAAQTFSYLTKGYTENLQDILNGAIFDSDNDGMILVKDIELYSLCEHHLVPFFGKCHIAYIPNGKIIGLSKVARVVDLYARRLQVQENLTKEIADAIQEATQALGVAVVIEARHLCMMMRGVQKQNSRMKTSSMLGSFRKNAATRAEFLSLINDN

SEQ ID NO: 6253 - protein, 189 aa, Marinimicrobia bacterium
  misc_feature (1)..(189): tr|A0A2E5UR88|A0A2E5UR88_9BACT GTP cyclohydrolase 1 OS= Candidatus Marinimicrobia bacterium OX=2026760 GN=folE PE=3 SV=1
MINEKIKKATKILLEEIGENPNREGLLNTPLRVAKAWDFLSSGYRQDIEKIINNAVFEETYDQMVTVQDIEFFSMCEHHLLPFFGVAHVAYIPDGKIIGLSKIPRIVDMFSRRLQVQERMTKEIATMLQNTLKPKGVAVIIEGQHMCMQMRGVQKKKSYMSTSSMVGIFREDNKTRKEFLDIIKMPKQF

SEQ ID NO: 6254 - protein, 189 aa, Marinimicrobia bacterium
  misc_feature (1)..(189): tr|A0A4Y8I9P6|A0A4Y8I9P6_9BACT GTP cyclohydrolase 1 OS= Candidatus Marinimicrobia bacterium MT.SAG.3 OX=2552982 GN=folE PE=3 SV=1
MAKSLKDFETVENLIKELLLKLGEDPDREGLLKTPSRVAKSLNYLTKGYNESVEEVVNGALFYEDLDEMVIIRDIDIFSMCEHHMLPFFGKCHVAYLPNKKIIGLSKIPRIVEIFARRLQVQERLTTQIADAINNSVNPHGVAVTIEATHLCTVMRGVEKQNTVAITSSMLGKFKTDSKSRSEFLSMIK

SEQ ID NO: 6255 - protein, 267 aa, Melainabacteria bacterium
  misc_feature (1)..(267): tr|A0A1F6RA01|A0A1F6RA01_9BACT GTP cyclohydrolase FolE2 OS=Candidatus Melainabacteria bacterium RIFOXYA2_FULL_ 32_9 OX=1801611 GN=folE2 PE=3 SV=1
MVRSKLKDVQNQKDHRGIDIQKVGVRNVEVPLNILRKNDKEQIVSAKATMSVSLPKDYKGTHMSRFIEILSEWGQRNLLGVDLKGCLVEITDKLDAESAELKFNFKYFIDKRAPVSELVCPMGYDCSFEGILKNKEDYTFILGVNVPVTTLCPCSKEISEYGAHNQRTFVKVRISYDVNSIVWIEDLVELIEKCGSSPVYPLLKREDEKFVTELAYNNPKFVEDVLRDVVSKIKNIKEIHWFEVDCEAHESIHNHSAWAYQEEFVAS

SEQ ID NO: 6256 - protein, 220 aa, Melainabacteria bacterium
  misc_feature (1)..(220): tr|A0A2W4I4B1|A0A2W4I4B1_9BACT GTP cyclohydrolase 1 OS= Candidatus Melainabacteria bacterium OX=2052166 GN=folE PE=3 SV=1
MEATVTVLPCTLRRKPEDSPATKFASAVPEGSLAREVDLAKIETAVEMILEAIGENPKRAGLIDTPQRVARLYQELCYSTGIDAASEISCKFQEETEGLVLVKDIEFTSLCEHHLVPFTGRAHVAYLPTNGVITGLSKLARVVELTARRLQVQERMTEEIADAVAKGIDAQAVCVWVEAEHMCMSIRGIKKPGAKTVTTAFRGLFKEDQAMRSEVLSYLK

SEQ ID NO: 6257 - protein, 184 aa, Methylomirabilis oxyfera
  misc_feature (1)..(184): tr|D5ML96|D5ML96_9BACT GTP cyclohydrolase 1 OS=Candidat us Methylomirabilis oxyfera OX=671143 GN=folE PE=3 SV=1
MIERLVRDLLKEIGEDPDREGLVKTPERVERMFAFLTSGYDKQVNNVLNEAVFQDNYDEIVLVKDIDFFSLCEHHLLPFFGKCHVGYLPDGRIVGLSKLVRLVEMYSRRLQVQERLTSQIANALLEALRPKGVAVVMEAQHLCMMMRGVEKQNSKAVTSSMHGVFRERIESRNEFMQLIRSHAT

SEQ ID NO: 6258 - protein, 184 aa, Methylomirabilis lanthanidiphila
  misc_feature (1)..(184): tr|A0A564ZNS7|A0A564ZNS7_9BACT GTP cyclohydrolase 1 OS= Candidatus Methylomirabilis lanthanidiphila OX=2211376 GN=folE PE=3 SV=1
MIDRLVRDLLKEIGEDPDREGLIKTPERVERMYGFLTSGYSKQVEQVLNEAVFQDNYDEIVLVKDIDFFSLCEHHLLPFFGKCHVGYLPDGRIVGLSKLVRLVEMYSRRLQVQERLTSEIANALLDALRPRGVAVVMEAYHLCMMMRGVEKQNCKAVTSSMHGIFRERIESRNEFMQLIRSHAT

SEQ ID NO: 6259 - protein, 263 aa, Methylopumilus rimovensis
  misc_feature (1)..(263): tr|A0A5B8DIR6|A0A5B8DIR6_9PROT GTP cyclohydrolase FolE2 OS=Candidatus Methylopumilus rimovensis OX=2588535 GN= folE2 PE=3 SV=1
MTTSKHTCPIEDVQNTPDLRSLDIDKVGIKSIRHPVLVKDKTGGAQHTVATFNMYVYLPHNFKGTHMSRFVEILNMNEREISVESFENILREMMERLEAKSCDVEMTFPYFINKTAPISGVKSLLDYDVSFIGKIIDGKFKNTIKVIVPVTSLCPCSKKISDYGAHNQRSHVTVTAEINKFIWIEELIELIEKQASCELYGLLKRPDEKFVTEKAYDNPKFVEDMVRDVAAQLKLEKRIDHFVVESENFESIHNHSAYALIEG

SEQ ID NO: 6260 - protein, 263 aa, Methylopumilus universalis
  misc_feature (1)..(263): tr|A0A5B8CYT0|A0A5B8CYT0_9PROT GTP cyclohydrolase FolE2 OS=Candidatus Methylopumilus universalis OX=2588536 GN =folE2 PE=3 SV=1
MTTSDHICPIEDVQNSPDLRSLDIDKVGIKSIKHPVLVKDKTGGAQHTIATFNMYVYLPHNFKGTHMSRFVEILNMNEREISVESFENILREMIKRLESKSCDVEMTFPYFINKTAPVSGVKSLLDYEVSFIGKIVDGKFKNTIKVVVPVTSLCPCSKKISDYGAHNQRSHVTVTAEINKFIWVEEIIELIEKQASSELYGLLKRPDEKYVTEKAYDNPKFVEDMVRDVAAQLKLEKRVDHFIVESENFESIHNHSAYALIEG

SEQ ID NO: 6261 - protein, 180 aa, Methyloumidiphilus alinensis
  misc_feature (1)..(180): tr|A0A2W4S520|A0A2W4S520_9GAMM GTP cyclohydrolase 1 OS= Candidatus Methyloumidiphilus alinensis OX=2202197 GN=f olE PE=3 SV=1
MEKQFSQLIQAIGEDITREGLVDTPKRAAAAFRFLNNGYHKSLENVLNNAIFESDTEDMVIVKDIELYSLCEHHLLPFIGKCHVAYLPTGKVLGLSKIARIVDMYARRLQIQERLTKQIADAIQVAVNPRGVAVVIEAKHLCMMMRGVEKQNSVMTTSSMLGLFRENISTRSEFLNLIKR

SEQ ID NO: 6262 - protein, 265 aa, Methyloumidiphilus alinensis
  misc_feature (1)..(265): tr|A0A2W4TC18|A0A2W4TC18_9GAMM GTP cyclohydrolase FolE2 OS=Candidatus Methyloumidiphilus alinensis OX=2202197 GN=folE2 PE=3 SV=1
MSVHSANKTIEDVQNSEDTRRIDIDRVGIKSIRHPVLFRQRDGELQATVAMFDMTVNLSHEQKGTHMSRFVEILNEELGELDIRTFPQVISDMASRLEADHAYIETHFPLFIRKKAPVTSVPSLLDYEVTLTGEWIAGLSKLWLKVVVPVTSLCPCSKKISDYGAHNQRSHVTLTVQPRELLWVEDLIDLIERQASSQIYGLLKRADEKYVTERAYNNPKFVEDIVRDIANDLNQNKAILYYKLETENFESIHNHSAYAIIERFK

SEQ ID NO: 6263 - protein, 187 aa, Microgenomates bacterium
  misc_feature (1)..(187): tr|A0A3A4ZKQ7|A0A3A4ZKQ7_9BACT GTP cyclohydrolase 1 OS= Candidatus Microgenomates bacterium OX=2093373 GN=folE PE=3 SV=1
MPWEKQSPEDIATSLLKFIGEDPTRQGLEKTPDRFMKAWKQWTAGYEQQVEDVLTVFDDGAENYDEMVTLKDIPIYSHCEHHLAPFFGKAVVSYIPNGRILGLSKIVRIVNIFAQRLQVQERLTSQIADALSSHLQARGVAVHLECRHLCMESRGVQRSGAVTITSAMRGMFRTNPATRAEFLALLK

SEQ ID NO: 6264 - protein, 210 aa, Micropelagos thuwalensis
  misc_feature (1)..(210): tr|U2WRA3|U2WRA3_9PROT GTP cyclohydrolase 1 OS=Candidat us Micropelagos thuwalensis OX=1397666 GN=folE PE=3 SV= 1
MDVRVNDSKNVNDVENERDVKVAKPSRETAEEAVRTLIAWAGDNPDREGLIDTPKRVVNAYQEFFAGYEEDPEEVLGRTFEDVEGYDDMVMLRDIDLESHCEHHMVAILGKVHIAYMPVERVVGISKLARVIEIYAKRLQTQETMTAQIVDCIQRVLEPAGVALLVDAKHQCMTTRGIKKPDVATITTRFTGVFANDPRMEARFLAMINN

SEQ ID NO: 6265 - protein, 257 aa, Micropelagos thuwalensis
  misc_feature (1)..(257): tr|U2WU24|U2WU24_9PROT GTP cyclohydrolase 1 protein OS= Candidatus Micropelagos thuwalensis OX=1397666 GN=folE PE=4 SV=1
MKSFLPNFHAVIFGSGGGIGAAMASRLTELPSCTRLTLMGRNISKIEENVNAIGDTDIQMLQADICDEDSIASVAAQLGEHINDDAPVQLFVNASGILHDEENDLQPERSIRHLSNEAFQKVFAINSFGPALLIKHFLPFMPRDQRSVFASLSARVGSISDNKIGGWYAYRASKAAHNMLIKTASLEARMKYKQAVIVGLHPGTVATNLSAPFRGNVSPEKLFSPSQSADYLLDVMDNLTPAQSGAVFAWDGQEIPA

SEQ ID NO: 6266 - protein, 210 aa, Microthrix parvicella
  misc_feature (1)..(210): tr|A0A359A1D6|A0A359A1D6_9ACTN GTP cyclohydrolase 1 OS= Candidatus Microthrix parvicella OX=41950 GN=folE PE=3 SV=1
MIDDHTTSPGPLEVPDPETAPGPTSVDLPRVEAAVRELLDAIGEDAERNGLLDTPARVARMYAEVCGGLHEDPRRHLRTTFDADHDEMIMVRDIAFHSLCEHHLVPFFGRAHVAYIPNEEGRITGLSKLARLTLGYARRPQVQERLTTQIAEGIEEVLAPRGVLVVVEAEHLCMAMRGVRSPGATTVTSAVRGLFRTDVAARAEAMGLIG

SEQ ID NO: 6267 - protein, 210 aa, Microthrix parvicella; identical to SEQ ID NO: 6266
  misc_feature (1)..(210): tr|R4YWJ3|R4YWJ3_9ACTN GTP cyclohydrolase 1 OS=Candidat us Microthrix parvicella RN1 OX=1229780 GN=folEA PE=3 S V=1

SEQ ID NO: 6268 - protein, 328 aa, Moanabacter tarae
  misc_feature (1)..(328): tr|A0A2Z4AFV6|A0A2Z4AFV6_9BACT GTP cyclohydrolase FolE2 OS=Candidatus Moanabacter tarae OX=2200854 GN=folE2 PE =4 SV=1
MRMSEDKELISDLDRAGRPKSLDHQYDDGFTVSRPYRESLPDVQNRTGVEIHGDGVPIIEVGISNFHLPLKVLTAQNESIDLEAAVTGTVSLGSDRKGVNMSRIIRTFYEFKDRVFTLELLEEILLRYKETLESSRARLTVRFSYPIYQESLRSGLGGYLYYDVDYEGIIDDLDRFRKRMHLDFIYSSVCPNSAELAEHARNMRGKYALPHAQRSKARVSVEVRSGALVTIENIREKCLEALRTEVQSMVKREDEQAFAELNGSFPKFVEDAVRLLHEKFNVDKRIIDFQIACVHLESLHAHDAVAVINKGVSGGFSGSVEDFRRFVC

SEQ ID NO: 6269 - protein, 280 aa, Muproteobacteria bacterium
  misc_feature (1)..(280): tr|A0A1F6TIK4|A0A1F6TIK4_9PROT GTP cyclohydrolase FolE2 OS=Candidatus Muproteobacteria bacterium RBG_16_64_11 OX=1817758 GN=folE2 PE=3 SV=1
MPETANATSKSRGPRLDPIADVQNKPDTRHIAIDKVGIKDIRHPVLVKDRSQGVQHTIANFNMYVELPHNFKGTHMSRFVEILNAYDMEISVESFKDMLAEMRKRLEAEIGHIEMSFPYFIDKAAPVSGVKSLMDYQVRFSGQIDGDRTVMTIKVVVPVTSLCPCSKEISEYGAHNQRSHVTLAVRTNTFVWIEDLIDIVEKQASCELFGLLKRPDEKYVTERAYENPKFVEDMVRDVAAQLNADDRIDAYVVESENFESIHNHSAYAMIKLDKTAPVAR

SEQ ID NO: 6270 - protein, 278 aa, Muproteobacteria bacterium
  misc_feature (1)..(278): tr|A0A1F6TGS8|A0A1F6TGS8_9PROT GTP cyclohydrolase FolE2 OS=Candidatus Muproteobacteria bacterium RBG_16_65_31 OX=1817759 GN=folE2 PE=3 SV=1
MTPKGKAQSLPIADVQNSPDTRHLPIDKVGIKDIRHPVRVKDRSQGEQHTVANFNMYVELPHNFKGTHMSRFVEILNNYEPEISVESFKDMLAELSERLEAETGHIEMSFPYFINKAAPVTGVKSLMDYQVSFIGKISGGKYLMTIKVIVPVTSLCPCSREISRFGAHNQRSHVTLTVRTNTFVWVEDLIDIVEKQASSELYGLLKRPDEKFVTEKAYENPKFVEDMVRDVAAVLNADDRIEAYTVESENFESIHNHSAYAMIQRDKAGERAGQGSSE

SEQ ID NO: 6271 - protein, 206 aa, Nanopelagicus abundans
  misc_feature (1)..(206): tr|A0A249L2Q2|A0A249L2Q2_9ACTN GTP cyclohydrolase 1 OS= Candidatus Nanopelagicus abundans OX=1884916 GN=folE PE =3 SV=1
MSEVNSVSMGPNDGGAKQEFDQVRAEKAVTELLHALGEDPNRDGLKDTPKRVAKALAENFAGLWQKPKDVLSTTFDIGHKELVIVREIEVFSHCEHHLTPFHGVAHIGYIPGESGKITGISKLARLVDMYSRRPQVQERLTSQIADALVEILQPGGVIVIIDCEHLCMSMRGVRKSQARTTTSAVRGQLLNPATRAEAISLINQSR

SEQ ID NO: 6272 - protein, 206 aa, Nanopelagicus hibericus
  misc_feature (1)..(206): tr|A0A249K7P9|A0A249K7P9_9ACTN GTP cyclohydrolase 1 OS= Candidatus Nanopelagicus hibericus OX=1884915 GN=folE P E=3 SV=1
MSDINSVSMGPHDGGAKKEFDQARAEKAVTELLHALGEDPTRDGLKDTPKRVAKALAENFAGLWLKPEDVLTTIFDIGHKELVIVREIEVFSHCEHHLTPFHGVAHIGYIPGESGRITGISKLARIVDLYARRPQVQERLTSQIADALVEILQPGGVIVIIDCEHLCMSMRGVRKSQARTTTSAVRGQLLNPTTRAEAISLINQSR

SEQ ID NO: 6273 - protein, 259 aa, Nasuia deltocephalinicola
  misc_feature (1)..(259): tr|A0A0S2UP97|A0A0S2UP97_9PROT GTP cyclohydrolase I typ e 2 OS=Candidatus Nasuia deltocephalinicola OX=1160784 GN=ASU29_090 PE=4 SV=1
MYSDIFFIKYNILNIININKIFINRVGIKNYYQPFIFDDNSNKLQKILGLWNIGNSVQNYKRGVHMSRFLYILNKFLNKIISLKLIFKFYKFFNINNSNDFFLQLSFIYFIKKISPISLNSGLMNYKITLFLKKNNIFKNFLLKLIVPINTLCPCSKSISLYNAHNQRSYVSIFILLKKNLNIYKLLYYIEKQSSISLWSFLKRVDEKYFTEYSYNNPKFIEDLTRSIYNKFKKFKFFLKLENLESIHNHNVYSFCKNF

SEQ ID NO: 6274 - protein, 262 aa, Nasuia deltocephalinicola
  misc_feature (1)..(262): tr|A0A286QUU9|A0A286QUU9_9PROT GTP cyclohydrolase I typ e 2 OS=Candidatus Nasuia deltocephalinicola OX=1160784 GN=CA212_081 PE=4 SV=1
MIYKNIFLKKKELNNILNIYRKSINNVGVNNLYYPFIFDSGNKLQKTIGIWNISLYLKKFKRGAHMSRIFFFLEKYKNIPLNIKLFLKIYKILMYKLESNDINIQVTFIYFIKKISPISKNISLMNYKLSFFFKRINIQNIFFLKIIIPVINLCPCSKNISYYNAHNQRSKVYVYLNIYKNININKTINYIENESSSEIWSLLKRNDEKYITEFSYNNPKFVEDIIRNILLKIKNNNLKSFLIKVENYESIHNHNVYSLIKY

SEQ ID NO: 6275 - protein, 191 aa, Neoehrlichia lotoris
  misc_feature (1)..(191): tr|A0A0F3NLF3|A0A0F3NLF3_9RICK GTP cyclohydrolase 1 OS= Candidatus Neoehrlichia lotoris str. RAC413 OX=1359163 GN=folE PE=3 SV=1
MTNKPSDYDAEMAVKMLISWIGDDPNREGLLNTPKRVLNFYKKMFKGYKCNLENVSVTSKLLNSCYSDLIILKNIDFTSYCEHHIVPIKGKISIGYLPDKLICGIGKIIELLNIFTKRLQIQENLTMQIAEYLNKLLLPKGIAVLIEATHECIACCEEYDKNNLTLQTNYMLGIFQDDLNIRKEFFNRIKI

SEQ ID NO: 6276 - protein, 174 aa, Nephrothrix sp.
  misc_feature (1)..(174): tr|A0A2B8A7N3|A0A2B8A7N3_9BACT GTP cyclohydrolase 1 (Fr agment) OS=Candidatus Nephrothrix sp. EaCA OX=2044729 G N=CRN43_00395 PE=3 SV=1
IMEVLGLDLTDDSLQGTPRRVAEMYVNEVFSGLNPKNLPNTRLFENKYKYDQMLVEKDITFYSYCEHHFVPFYGKAHVAYFSSGKVIGLSKINRLVQFYARRPQVQERLTVQIGKELEKLLETAHVAVVVDANHLCVASRGVGDTNSKTGTAYFSGKFEENEFKKEFLNYVNHV

SEQ ID NO: 6277 - protein, 212 aa, Nitrosoglobus terrae
  misc_feature (1)..(212): tr|A0A1Q2SME4|A0A1Q2SME4_9GAMM GTP cyclohydrolase 1 OS= Candidatus Nitrosoglobus terrae OX=1630141 GN=folE PE=3 SV=1
MDKKLTKPLSKDPYMDSLEMESDEPYNEELEASIRKMLIQLGEDPSREGLRRTPQRVAKAMDFLTSGYTMTVEEAVKDALFEDECEEMVIVKDVEFYSLCEHHMLPFFGRAHVGYLPKNRIVGLSKIARVIDVFARRLQVQERLTTQIANGLMSVLNARGVGVVLEACHFCMVMRGVQKQNSQTVTSAMLGTFRQDPRTRAEFMDLIRRSPY

SEQ ID NO: 6278 - protein, 261 aa, Nitrosoglobus terrae
  misc_feature (1)..(261): tr|A0A1Q2SLS8|A0A1Q2SLS8_9GAMM GTP cyclohydrolase FolE2 OS=Candidatus Nitrosoglobus terrae OX=1630141 GN=folE2 PE=3 SV=1
MEDVQAKADKRKIAINKVGIKGIRHPVRISDRSGERQHTVANFNMYVGLPHHLKGTHMSRFIEILNQQEWEITIQSFKKMLQEMTYYLQADSGYIEMDFPYFIAKQAPVSKIKSLMDYQVTFIGEANQNKQQVVIKIIVPVTSLCPCSKKISDYGAHNQRSHITVTARVKGFIWIEDIIDLVEEEASCEIYSLLKRPDEKYVTEQAYDNPKFVEDMVRDIAARLNPDDRILAYRVESENFESIHNHSAYAIIEQDKQLHVN

SEQ ID NO: 6279 - protein, 215 aa, Nitrospira inopinata
  misc_feature (1)..(215): tr|A0A0S4KRI1|A0A0S4KRI1_9BACT GTP cyclohydrolase 1 OS= Candidatus Nitrospira inopinata OX=1715989 GN=folE PE=3 SV=1
MARRGKGKTVAETSEDVSGNGRPADVDALRSLVTRMLTALGEKPGRNGLLKTPERVAKALAFMTQGYQRDIDHLLNGALFPIQYDEMVIVKDIDFFSMCEHHLLPFFGKVHVGYLPNKKVVGLSKIPRIVDTFARRLQVQERLTVQIAETLNTKLHAKGVGVVVEARHLCMMMRGVEKQNTVAVTSSMLGEFRSQPQTRLEFLKLIQKTSVGDAD

SEQ ID NO: 6280 - protein, 215 aa, Nitrospira nitrificans
  misc_feature (1)..(215): tr|A0A0S4LAC2|A0A0S4LAC2_9BACT GTP cyclohydrolase 1 OS= Candidatus Nitrospira nitrificans OX=1742973 GN=folE PE =3 SV=1
MRKQQKRDKRRERVEDTSGSGKPADLPVLQSLVTEMLLALGERPGRNGLLKTPERVAKALAFMTQGYQRDIDHLLNGALFPIEYDEMVIVKDIDFFSMCEHHLLPFFGRVHVGYLPNKKVVGLSKIPRIVDTFARRLQVQERLTVQIAETLSNKLNAHGVGVVVEARHLCMMMRGVEKQNTVAVTSSMLGAFRSQSQTRVEFLKLIRHGRVSDPD

SEQ ID NO: 6281 - protein, 268 aa, Nitrotoga sp.
  misc_feature (1)..(268): tr|A0A3E1DAQ9|A0A3E1DAQ9_9PROT GTP cyclohydrolase FolE2 OS=Candidatus Nitrotoga sp. MKT OX=2184311 GN=folE2 PE =3 SV=1
MNSPQAILIPDVQNMADTRHLAINKVGIKSIRHPVQVKDKNVGVQHTIATFNMYVHLPHNFKGTHMSRFVEILNHHGREISVESFESILCEMVEKLEAQSGYIEMSFPYFINKTAPVSGVQSLLDYDVTFIGEINNGKYRFTMKVLVPVTSLCPCSKKISERGAHNQRSHVTITVRTNRSVWIEDVVRYAEEQASCELYGLLKRPDEKFVTERAYDNPKFVEDMVRDVAAALNRDERIEAYVVESENFESIHNHSAYALIEWDKNVSN

SEQ ID NO: 6282 - protein, 268 aa, Nitrotoga sp.
  misc_feature (1)..(268): tr|A0A3E1DHP6|A0A3E1DHP6_9PROT GTP cyclohydrolase FolE2 OS=Candidatus Nitrotoga sp. SPKER OX=2184312 GN=folE2 PE=3 SV=1
MNSPQATLIPDVQNMADTRHLAINKVGIKSIRHPVQVKDKNAGVQHTVATFNMYVHLPHNFKGTHMSRFVEILNHHGREISVESFESILREMVEKLEAKSGHIEMSFPYFINKTAPVSSVQSLLDYDVTFIGEINNGQYRFTMKVVVPVTSLCPCSKKISERGAHNQRSHVTITVRTSRSVWIEEVVRYAEEQASCELYGLLKRPDEKFVTERAYDNPKFVEDMVRDVAAALNRDERIEAYVVESENFESIHNHSAYALIEWDRNVNN

SEQ ID NO: 6283 - protein, 187 aa, Nomurabacteria bacterium
  misc_feature (1)..(187): tr|A0A0G1FHT2|A0A0G1FHT2_9BACT GTP cyclohydrolase 1 OS= Candidatus Nomurabacteria bacterium GW2011_GWF2_43_8 OX =1618779 GN=folE PE=3 SV=1
MSRKNKEQIVRDMLMAIGENPNRQGLKNTPKRITRMWEEIFSGYDKKNKPSITVFPNKTDGVEYNQMIIDTGYFYSHCEHHGVPFFGKYYFAYIPNKKIMGLSKVSRTIDYFSSRLQIQERLVKDVVDEIEKVVQPKGVALVMKARHLCKEMRGVKKIDGEMTTSDVRGAFRKNALTRNEFMSLIGL

SEQ ID NO: 6284 - protein, 185 aa, Omnitrophica bacterium
  misc_feature (1)..(185): tr|A0A351I6G6|A0A351I6G6_9BACT GTP cyclohydrolase 1 OS= Candidatus Omnitrophica bacterium OX=2035772 GN=folE PE =3 SV=1
MDKSKIQKAVRMILEAVGENADRPDLKKTPERVAEMYAEIFSGISKDPARELEVLLTEKHDEMVLLKDIPLYSICEHHLLPFIGKAHIAYIPKNNKVTGLSKIVRVVEILSKRLQVQERLTTEIAEILMKKLKPMGVMVIIEAEHLCMSMRGVKKSGVLTVTSAVRGVFKENQKTRAETLALIKN

SEQ ID NO: 6285 - protein, 185 aa, Omnitrophica bacterium
  misc_feature (1)..(185): tr|A0A496RNE2|A0A496RNE2_9BACT GTP cyclohydrolase 1 OS= Candidatus Omnitrophica bacterium OX=2035772 GN=folE PE =3 SV=1
MDRKKIERAVKMIIEAVGANLNKKDLLTTPRRVAQMYEEILKGEKKSPEKELDAILEQKHDEIILLKDIPLYSLCEHHLLPFIGKVHIAYIPDRRITGLSKIVRVVETLSSRLQVQERLTTQIADVIMKKLKPKGVMVVIEAEHLCISMRGVKKPGVKVVTSVVRGIFRKNQKTRQESLNLIFSK

SEQ ID NO: 6286 - protein, 187 aa, Omnitrophus magneticus
  misc_feature (1)..(187): tr|A0A0F0CRL7|A0A0F0CRL7_9BACT GTP cyclohydrolase 1 OS= Candidatus Omnitrophus magneticus OX=1609969 GN=folE PE =3 SV=1
MDKEKIKKAVRDILIAIGEDPDRDGLLNTPNRVAEMYEEILSGINKNAEEEITVFFEAEHDEIILLKDIPLYSLCEHHLVPFLGKAHVAYIPEGNKITGLSKIVRVIDTLSRRLQVQERLTTEIANSLMKKLTPKGVLVVIEAEHLCMSMRGVKKPGVVTTTSAVRGIFRSSHKTRSEALALIQHRS

SEQ ID NO: 6287 - protein, 225 aa, Ornithobacterium hominis
  misc_feature (1)..(225): tr|A0A383TU78|A0A383TU78_9FLAO GTP cyclohydrolase 1 OS= Candidatus Ornithobacterium hominis OX=2497989 GN=folE PE=3 SV=1
MKEKELYQDMGDGHIPGNHETPLRADAFDLNDDEKIEKIEKHFYEIMNVLGMDMGDDSLKGTPHRVAKMYVKEIFGGLNPERCPKMSTFENKYKYNQMLVEKDITVYSTCEHHFLPIVGRAHVAYMSKGRVIGLSKINRIVNYYARRPQVQERLTMQVVHAMQEALGTDDVACVIDAKHLCVNSRGIKDIESSTVTAELGGAFRNNPTTRAEFLKYIGMGTRFNV

SEQ ID NO: 6288 - protein, 280 aa, Ozemobacter sibiricus
  misc_feature (1)..(280): tr|A0A367ZTM7|A0A367ZTM7_9BACT GTP cyclohydrolase FolE2 OS=Candidatus Ozemobacter sibiricus OX=2268124 GN=folE 2 PE=3 SV=1
MDDIQNQRDDRNIPIDEVGVKRLSYPITVLDKHHGRQETVAEIEMTVGLPHEFRGTHMSRFLEVLEKHRGEMTLFTIGRILREIKRRLHAERAAMSVAFPYFIEKTAPVSGARSLLRYDCRFYGTLERVADFVLTVVVPVTTLCPCSKAISARSAHNQRSLVTVSARFTDFLWIEDLVELVEASASAEVFTLLKRPDEKWLTEQAYDRPRFAEDLVREVAQRLDALSQVSWYAVSTENLESIHAHSAFAFLKREKPRPERQAEEAESRTRRGRRAAAARS

SEQ ID NO: 6289 - protein, 269 aa, Pandoraea novymonadis
  misc_feature (1)..(269): tr|A0A2P6UXP3|A0A2P6UXP3_9BURK GTP cyclohydrolase FolE2 OS=Candidatus Pandoraea novymonadis OX=1808959 GN=folE 2 PE=3 SV=1
MNQINPIFIMPDVQSGIDTRQIPIQRVGVRAVRHPLVLKTNSDQMQATVAIFNMDVHLPANQKGTHMSRFIALLEENKAPFDMMNFRVMLITMLERLEADAGHMEVSFPYFISKTAPISGVESLMDYQVTLTGQVLDGQTRVWLKVLVPVTSLCPCSKQISKYGAHNQRSHVTIHAELLSEISIEEIVTIAEEEASCELWGLLKRPDEKYVTERAYENPKFVEDLVRDVAKRLNKEPRIISYKLEAENFESIHNHSAYALIEHDKRLNA

SEQ ID NO: 6290 - protein, 221 aa, Pantoea carbekii
  misc_feature (1)..(221): tr|U3U9K4|U3U9K4_9GAMM GTP cyclohydrolase 1 OS=Candidat us Pantoea carbekii OX=1235990 GN=folE PE=3 SV=1
MRILSQEALIVHQALLKHGLETPFRTEEYKIDEQSRQNKIADHLSQIMKLLNLDLKDDSLMETPYRIAKMYTNEIFSGLDYINFPEITVIPNKMKVDEMVTVHDITLTSTCEHHFVIIDGKATVAYIPKDKVIGLSKINRIVHFFSQRPQVQERLTQQILIALQTLLNTNNVAVSIDAIHYCVKARGIKDSNSATTTTSLGGLFKASYNTRTEFLRVVHQI

SEQ ID NO: 6291 - protein, 134 aa, Paraburkholderia kirkii
  misc_feature (1)..(134): tr|U3UB52|U3UB52_9BURK WGS project CAFE00000000 data, c ontig bkir_c67 OS=Candidatus Paraburkholderia kirkii UZ Hbot1 OX=1055526 GN=BKIR_c67_4317 PE=4 SV=1
MTHAASAVTARGLALAGAAPANFLRHNPKSADSKAWFATEAPSANAAGPPRFHHLPPACLALAGATCHSHSSSLNRIVVHRVTPITTMAKPSHCVFGNSRPVALIPEKRNDETRILMKVLVPVTSLCPCSKQIP

SEQ ID NO: 6292 - protein, 227 aa, Paraburkholderia kirkii
  misc_feature (1)..(227): tr|A0A0L0LYH7|A0A0L0LYH7_9BURK GTP cyclohydrolase 1 OS= Candidatus Paraburkholderia kirkii OX=198822 GN=folE PE =3 SV=1
MHSTDRRQELSMSAPRKNHLSGSDMPADQADRPTREEAEAAVRVLLRWAGDDPGREGLLDTPARVVRAYEEFFSGYTQNPHDILARTFSEVQGYDEMIVLKDIRFESYCEHHMVPIIGRAHVAYLPNKRVVGISKLARLVDAFAKRLQIQEKMTAQIADTLDEVLQPIGVGVILEAAHQCMSTRGVHKAGVSMVTSRMLGSFRDDPSTRREFLSIVGNQSAFSVSNT

SEQ ID NO: 6293 - protein, 190 aa, Paracaedibacter acanthamoebae
  misc_feature (1)..(190): tr|A0A077B2I3|A0A077B2I3_9PROT GTP cyclohydrolase 1 OS= Candidatus Paracaedibacter acanthamoebae OX=91604 GN=fo lE PE=3 SV=1
MTKPTRLEAENAIRTLIRWAGDNPDREGLQQTPERVVRAFEEYFVGYTEDPADYLRRTFEEVNGYDEIVLLKNIRFESHCEHHMAPIIGHVHVAYLPNKRVVGISKLARVVDIFAKRLQIQEKLTADIAQAIDTTLNPFGVAVAIEASHQCMTCRGVHKTDVSMITTRMTGVFRDNHELRRDVLALIKGQ

SEQ ID NO: 6294 - protein, 181 aa, Parcubacteria bacterium
  misc_feature (1)..(181): tr|A0A3M0WUH6|A0A3M0WUH6_9BACT GTP cyclohydrolase 1 OS= Candidatus Parcubacteria bacterium OX=2053309 GN=folE P E=3 SV=1
MHEEQLKQAAKAIISIGAVNVNSEGLRRTPERFTKMIKDLCEKNAPKITTFPANGYKGIIVSQKIKFYSLCEHHILPFFGYATVGYIPDKRIIGISKLPRIVHYAAKGLNTQEGITVSVAEILTKELKPKGCAVYMVARHLCMEMRGVCEHEAVTSTVTLRGIFEKDNTLALQFIKGVNHG

SEQ ID NO: 6295 - protein, 271 aa, Parcubacteria bacterium
  misc_feature (1)..(271): tr|A0A3R7ABE7|A0A3R7ABE7_9BACT GTP cyclohydrolase FolE2 OS=Candidatus Parcubacteria bacterium OX=2053309 GN=fo lE2 PE=3 SV=1
MTTLHDIQNSPAEKQIPIDQVGVTDLRYPIIVLDRQQEKQQTVARLTVSVALPHHFKGTHMSRFIEVLNDHRGEITMRTLPVILDNMKTRLEAERARIELQFPYFLERSAPVSGEKGLMDYDCVFVGEANGNDCDFVMKVRVPVASLCPCSKSISDYGAHNQRGYFDIALRSNRKEDGEFNFIWIEELIEIAEKSASGPVYALLKRSDERHVTMHAYDNPVFVEDMVRNVAAILIEDKRVAWFRVQAENHESIHNHNAFALIERWNEIKGK

SEQ ID NO: 6296 - protein, 203 aa, Pelagibacter sp.
  misc_feature (1)..(203): tr|A0A2D6XSW0|A0A2D6XSW0_9PROT GTP cyclohydrolase 1 OS= Candidatus Pelagibacter sp. OX=2024849 GN=folE PE=3 SV= 1
  misc_feature (6)..(6): Xaa can be any naturally occurring amino acid
  misc_feature (20)..(20): Xaa can be any naturally occurring amino acid
MKLVKXTEQKDNKKQEISDXKVEEAIKTIIEWIGENPEREGLRSTPKRVVKAYKEYFQGYDLDPAEYLTKTFNEVEGYDDMIIEKDISIRSHCEHHMAPIIGVAHVAYVPSKKVVGLSKLARVVEAFSKRLQTQERLTMQIAKTVMDVLQPRGVAVTIDAVHQCMTNRGIKKENTTTITNYFLGAFKDDLSFQNRYLRYINKD

SEQ ID NO: 6297 - protein, 203 aa, Pelagibacter sp.
  misc_feature (1)..(203): tr|A0A1Z8W2R7|A0A1Z8W2R7_9PROT GTP cyclohydrolase 1 OS= Candidatus Pelagibacter sp. TMED64 OX=1986830 GN=folE P E=3 SV=1
MKLVKNLKESKENLKKVSDFEAEQAIKTILEWIGENPSREGLTETPKRVIKAYKEYFKGYKQDPEEFLSKTFGDVEGYNDIVIVKNIKVESHCEHHMAPIVGLAHVAYIPNQKIVGLSKLARVVEVFSKRLQTQERLTMQIANSLMKTLEARGVAVSIDAAHHCMTMRGVKQHETTTITNYYTGLLKDDLSYQNRYLNLINTK

SEQ ID NO: 6298 - protein, 180 aa, Peregrinibacteria bacterium
  misc_feature (1)..(180): tr|A0A554IMB6|A0A554IMB6_9BACT GTP cyclohydrolase 1 OS= Candidatus Peregrinibacteria bacterium Greene0416_19 OX =2017154 GN=folE PE=3 SV=1
MDHLFMDLLKAIGEDPSREGLKDTPRRSAESYKFLTQGYAQTLEDVVGDATFPADTDGMVIVKDIEMYSLCEHHLLPFYGKVHVGYIPDQIVIGLSKIPRIIDMFARRLQVQERMGQQICDALEEVLGPKGVGVVIEANHLCMMMRGVEKQHSLAVTSHVKGIFKTDPRTREEFMQLIQS

SEQ ID NO: 6299 - protein, 197 aa, Peregrinibacteria bacterium
  misc_feature (1)..(197): tr|A0A2H0S0V4|A0A2H0S0V4_9BACT GTP cyclohydrolase 1 OS= Candidatus Peregrinibacteria bacterium CG10_big_fil_rev _8_21_14_0_10_49_16 OX=1974788 GN=folE PE=3 SV=1
MEFPWESQEQTNKEHQDFVVRLLEELGEDASRPALLDTPARFLKAWREMTRGYTMDVKLKAMEIEESLFPTDTHGMIVVRDIEFHSLCEHHLLPFVGKVHVGYLPYKHTIGHSKIPRIVEMYASRLQVQERLGQQICDAIADVVQPKGIGVLIEGSHFCMLMRGVKKEHTTITTSHLKGVFAEDARTRQEFLQLVRN

SEQ ID NO: 6300 - protein, 201 aa, Peribacteria bacterium
  misc_feature (1)..(201): tr|A0A1F7BGZ1|A0A1F7BGZ1_9BACT GTP cyclohydrolase 1 OS= Candidatus Peribacteria bacterium RIFCSPHIGHO2_01_FULL_ 51_9 OX=1801915 GN=folE PE=3 SV=1
MEFPWESQEQTSKEHQDFVVRLLEELGENASREGLKDTPARFLKAWREMTSGYGAQLDLRSIKPDSALFSTDTQGMVIVKDIEFYSLCEHHLLPFVGKVHVGYLPAKHMIGLSKIPRIVDMYARRLQIQERLGQQICDTLDAFIKPRGVGVVIESTHFCMIMRGVKQQSTRIISSHVKGAFKEDARTRQEFLQLIGINAQS

SEQ ID NO: 6301 - protein, 180 aa, Peribacteria bacterium
  misc_feature (1)..(180): tr|A0A1F7BFM2|A0A1F7BFM2_9BACT GTP cyclohydrolase 1 OS= Candidatus Peribacteria bacterium RIFCSPHIGHO2_01_FULL_ 51_35 OX=1801914 GN=folE PE=3 SV=1
MEELYKKLLKAVGEDPTRAGLEKTPKRAWEAMQYFTSGYKQDPKKILNDALYPVDTEGMVIVKNIEFFSLCEHHLLPFFGKVHVGYIPRKHVIGLSKIPRIVDTFARRLQVQERMGQQICDALAKILKPKGIGIVIEANHLCMMMRGVEKQHSQAVTSHVEGLFKKDPKTRQEFLDLIKK

SEQ ID NO: 6302 - protein, 210 aa, Phaeomarinobacter ectocarpi
  misc_feature (1)..(210): tr|X5MK96|X5MK96_9RHIZ GTP cyclohydrolase 1 OS=Candidat us Phaeomarinobacter ectocarpi OX=1458461 GN=folE PE=3 SV=1
MDAMVDKMDATDMTETTETRPSRSEAEAAVRTLISWAGDNPDREGLIDTPSRVVRAYEEFFEGYDEDPSEVLGRTFEEVEGYNDIVMLRDISLESHCEHHMVPILGKAHIAYMPINSVVGISKLARVIEIYAKRLQTQETMTAQIAETIVSALKPAGVAVMIEAKHQCMTTRGIKKPDVATITTQFTGVFKDDPRMEERFFRLVRGDRSY

SEQ ID NO: 6303 - protein, 218 aa, Photodesmus blepharus
  misc_feature (1)..(218): tr|A0A084CM93|A0A084CM93_9GAMM GTP cyclohydrolase 1 OS= Candidatus Photodesmus blepharus OX=1179155 GN=folE PE= 3 SV=1
MLNLSESAKLVKDALERRGLETPISSKNKIGRKEKKERIEYHIRKILSILELNIIDDSLEKTPYRVAKMYVDEIFSGLNYQNFPKITIIENKMNVNEMICVKDITLTSTCEHHFVTIDGKAALAYIPRNKLIGLSKINRIVRFFAQRPQIQERMTQQILVALQVLLGSDDVAVSIKASHYCVKSRGVTDSTSQTITRALGGIFKSNSSTRCEFLDAIH

SEQ ID NO: 6304 - protein, 227 aa, Photodesmus katoptron
  misc_feature (1)..(227): tr|S3EHE1|S3EHE1_9GAMM GTP cyclohydrolase 1 OS=Candidat us Photodesmus katoptron Akat1 OX=1236703 GN=folE PE=3 SV=1
MEKSKTLLDLSRAAKLVKNALESSGLETPMSLDQLNLNYKVKKEKIEYHIREVLGLLGLNLMDDSLKDTPFRVASMYMDEVFSGLYYQNFPKITLIENKMNITEMVFIKNISLTSTCEHHFITIDGKAAIGYVPKRKIIGLSKINRIVHFFSKRPQVQERMTEQILLALQTLLESSDVAVVIDAVHYCVKSRGIVDVTSETSTTALGGIFKKSKSARQEFFNKSSTK

SEQ ID NO: 6305 - protein, 197 aa, Phycorickettsia trachydisci
  misc_feature (1)..(197): tr|A0A2P1P7C0|A0A2P1P7C0_9RICK GTP cyclohydrolase 1 OS= Candidatus Phycorickettsia trachydisci OX=2115978 GN=fo lE PE=3 SV=1
MKTKISKLIKPLPSRDDALRAVSTLLEYIGVDLENEHFKDTPRRVVDSFEEIYGGYKLLASDILKSKVYKKNNYDQPILLKDIEFTSTCAHHMLPIVGTVSVSYIPGDAIVGISKIARIIDVFAKRLQIQEDMTTEIAEHIARGLKAKGVAVKISAEHYCMISRGVKRKGSKLDTYHFTGLFADNHSIQTNFIHANA

SEQ ID NO: 6306 - protein, 205 aa, Phycosocius bacilliformis
  misc_feature (1)..(205): tr|A0A2P2ECE4|A0A2P2ECE4_9PROT GTP cyclohydrolase 1 OS= Candidatus Phycosocius bacilliformis OX=1445552 GN=folE PE=3 SV=1
MDAITDPRLISEVNDTNRPTREEAMAAVRTLLRWAGDNPEREGLIDTPKRVVEAYREFFAGYEMDPAAELSRTFEDVQGYDDIVMLRDIDLESHCEHHMVPILGRAHIAYMPTNRVVGISKIARVVEIFGKRLQTQETMTAQIADCITEALRPAGVAVLLDAKHQCMTTRGVHHPNVATITTQFTGVFKTDRELKDRFLRLAGYN

SEQ ID NO: 6307 - protein, 195 aa, Planktophila sulfonica
  misc_feature (1)..(195): tr|A0A249KIK5|A0A249KIK5_9ACTN GTP cyclohydrolase 1 OS= Candidatus Planktophila sulfonica OX=1884904 GN=folE PE =3 SV=1
MGPSDGRASHPYDQERAEKAVRELLLALGEDPEREGLKETPARVARAFKENFEGLWQKPEDVLTTTFDIGHEELVIIRDIEVFSHCEHHLTPFHGVAHVGYIPSGKITGLSKVARLVDLFARRPQVQERLTTQIADALVEILKPMGVIVIIDCEHLCMSMRGVRKSQARTTTSAVRGVLRDATTRAEAISLITNR

SEQ ID NO: 6308 - protein, 193 aa, Planktophila vernalis
  misc_feature (1)..(193): tr|A0A249KRM3|A0A249KRM3_9ACTN GTP cyclohydrolase 1 OS= Candidatus Planktophila vernalis OX=1884907 GN=folE PE= 3 SV=1
MTDGRASGPYDQARAEKAVRELLLALGEDPDREGLKETPARVARAMKENFEGLWQSPEDVLTTTFDIGHEELVIVRDIEVFSHCEHHLTPFHGVAHVGYIPSGKITGLSKIARLVDMYSRRPQVQERLTTQIADAMVEILNPLGVIVIIDCEHLCMSMRGVKKSNARTTTSAVRGVLQNTATRAEAISLITTR

SEQ ID NO: 6309 - protein, 188 aa, Poribacteria bacterium
  misc_feature (1)..(188): tr|A0A2D9QSM4|A0A2D9QSM4_9BACT GTP cyclohydrolase 1 OS= Candidatus Poribacteria bacterium OX=2026781 GN=folE PE =3 SV=1
  misc_feature (39)..(39): Xaa can be any naturally occurring amino acid
  misc_feature (98)..(98): Xaa can be any naturally occurring amino acid
  misc_feature (124)..(124): Xaa can be any naturally occurring amino acid
  misc_feature (167)..(167): Xaa can be any naturally occurring amino acid
  misc_feature (170)..(170): Xaa can be any naturally occurring amino acid
  misc_feature (184)..(184): Xaa can be any naturally occurring amino acid
MKQYDLDDDLFQGNSKLERLYHGVIEEIGEDPTRQGLFXTPYRSAKALQFLTQGYTQKVDEIVNGAIFDEEFDDMVIVKDIEFYSLCEHHILPFFGKXHVGYIPNKRIVGLSKIPRIIDMFARXLQVQERLTHQIAQAINEVLQPQGIAVVMEAQHMCMMIRGVEKXRSXTFTNVMLGTFRDRXLNSC

SEQ ID NO: 6310 - protein, 197 aa, Poribacteria bacterium
  misc_feature (1)..(197): tr|A0A495Z9A9|A0A495Z9A9_9BACT GTP cyclohydrolase 1 OS= Candidatus Poribacteria bacterium OX=2026781 GN=folE PE =3 SV=1
MKIYHADSIDNGTTAADPKLEYIYTQILENIGEDPTREGVLKTPQRAAKALQFLMQGYDQNVEDVVNDAIFNEEYDEMVIVKDIECYSLCEHHLLPFFGKCHVGYIPRKKIIGLSKIPRIVDMFARRLQVQERLTKQIAEALQDVLHPAGVAVVIEAQHLCMMVRGVQKQHSQTMTNVMLGEFRDKISTRTEFMRCI

SEQ ID NO: 6311 - protein, 208 aa, Promineofilum breve
  misc_feature (1)..(208): tr|A0A160T869|A0A160T869_9CHLR GTP cyclohydrolase 1 OS= Candidatus Promineofilum breve OX=1806508 GN=folE PE=3 SV=1
MTGDWSGRMADGPVLSAGCKNVVADAVTAILHAVGEDPTREGLQNTPARVARAYDELLIGYSIDPIALLNNALFDVTYSEMVIVTDIDFYSLCEHHMLPFIGKAHVAYIPDKKVVGLSKIPRIVEVFARRLQIQERMTRQIAELIDELLNPLGVGVVIDGLHMCMAMRGVSKANARMRTSALLGSFADKPKTRSEFMDHIGPVTRTLL

SEQ ID NO: 6312 - protein, 271 aa, Propionivibrio aalborgensis
  misc_feature (1)..(271): tr|A0A1A8XR32|A0A1A8XR32_9RHOO GTP cyclohydrolase FolE2 OS=Candidatus Propionivibrio aalborgensis OX=1860101 G N=folE2 PE=3 SV=1
MNAPQAPIPNAMVDVQNLADTRQIAINRVGIKSIRHPVKVLDKSGGVQHTIAMFNMYVGLPHNFKGTHMSRFVEILNSHEREISVENFPTMLREMLEKLEAETGHIEMNFPYFINKAAPVSGVQSLMDYDVTLTGEICHGEIASTIKVVVPVTSLCPCSKKISERGAHNQRSHVTVTARINDHLWIEEIVQLVEAEASCELYGLLKRPDEKHVTERAYDNPKFVEDMVRDVAARLSAEPRIYSYVVESENFESIHNHSAYALIENRNPEPV

SEQ ID NO: 6313 - protein, 214 aa, Propionivibrio aalborgensis
  misc_feature (1)..(214): tr|A0A1A8XKC0|A0A1A8XKC0_9RHOO GTP cyclohydrolase 1 OS= Candidatus Propionivibrio aalborgensis OX=1860101 GN=fo lE PE=3 SV=1
MTDNSDHEHTPPLSCEIGIPRPNEFDPAAFEQAVSDLLKACGIAPDITHMGRTAQRVRELWQQRLLGGYDLDPASALGTGFDDHRRDMVIVRGIAVHGVCPHHLVPFRGLAHVAYLPGGRLHGFGRIARMVDAIGHRFTYQEWMTRDIAEALMRHGKARGAACVVEAEQLCLLLGEDRRGDERVITQCFTGEFETSSQYRNEFLRAVGSVRRSD

SEQ ID NO: 6314 - protein, 230 aa, Protochlamydia amoebophila
  misc_feature (1)..(230): tr|A0A0C1K1X0|A0A0C1K1X0_9BACT GTP cyclohydrolase 1 OS= Candidatus Protochlamydia amoebophila OX=362787 GN=folE PE=3 SV=1
MMSKKFMTKKEFPQKKIPPSITNFPSPIRRHQKRLSDQDKIKLIAEHFKAIMETLELDVEDESLARTPERVAKMYVNEIFSGLDEENFPEISFFKDEIHHEHKANMVFVKVGFTSFCEHHFVPMSGFAYVAYIPTNQLIGLSKIPRLVRYFAKRPQLQERLTAQIADSLALLLNTEHVAVSLTAIHSCVQARGIQDECSHTITNVLRGQFGADGNLRREFFEGINRRVFE

SEQ ID NO: 6315 - protein, 230 aa, Protochlamydia naegleriophila
  misc_feature (1)..(230): tr|A0A0U5JFZ4|A0A0U5JFZ4_9BACT GTP cyclohydrolase 1 OS= Candidatus Protochlamydia naegleriophila OX=389348 GN=f olE PE=3 SV=1
MTKKTTQSKAPSKKKAPSPAVTNFPSPIRKPKKQLTNEEKIDLIADRFKDILETLGLDIEDDSLTRTPYRIAKMYVEEVFSGLDEKNFPSISFFKDELHHEHKANMVFVKVGFTSFCEHHFVPMTGFAYVAYVPESELIGLSKIPRIVRYFARRPQVQERLTAQIADSLALLLNTDNVAVSITARHSCVIARGIQDECSHTITNVLRGQFGINANLRREFFEGINRRDLD

SEQ ID NO: 6316 - protein, 247 aa, Providencia siddallii
  misc_feature (1)..(247): tr|A0A0M6W997|A0A0M6W997_9GAMM Putative GTP cyclohydrol ase 1 type 2 OS=Candidatus Providencia siddallii OX=171 5285 GN=ybgI PE=4 SV=1
MNNLELEKILNGLLKIHEFQDYTPNGLQVEGCFNISKIVTGVTACQVLLEIAVEKKADTIIVHHGYFWKNESSIINGIKKIRLRTLLINNINLYSYHLPLDVHYELGNNNQLSYIIGVKVYGQINQFISYGFFKEAITADMLNTRLETRLHRKILYCTGNNERKIQKVAWCTGNGQDFIYEAARFGVDAFITGGISEQSVHIAREMKIHFYSAGHHATERYGIKKLSEWLIDKYDLDVEFVDIDNIA

SEQ ID NO: 6317 - protein, 181 aa, Pseudomonas adelgestsugas
  misc_feature (1)..(181): tr|A0A481QM60|A0A481QM60_9PSED GTP cyclohydrolase 1 OS= Candidatus Pseudomonas adelgestsugas OX=1302376 GN=folE PE=3 SV=1
MFLEQNYTAILDQLGEDVSREGLLDTPKRAAKAMQYLCRGYEQTLEEVTNGALFSSDNSEIVLVKDIELYSLCEHHLLPFIGKAHVAYIPSGKVLGLSKVARIVDMYARRLQIQENLSRQIANAVMQVTGALGVAVVIEAKHMCMMMRGVEKQNSSMITSVMLGEFRENAATRSEFLSLIK

SEQ ID NO: 6318 - protein, 204 aa, Puniceispirillum sp.
  misc_feature (1)..(204): tr|A0A1Z8UC65|A0A1Z8UC65_9PROT GTP cyclohydrolase 1 OS= Candidatus Puniceispirillum sp. TMED52 OX=1986639 GN=fo lE PE=3 SV=1
MTPYDADKINLVAVDPTPSREEAEEAVRTLIKWAGDNPEREGLIETSARVVRSYEEYFSGYQEDPEHMLSRVFEEVEGYDDLVMLKDIRLVSHCEHHMVPIIGSATIAYLPDRRVVGISKLARVVDIFAKRLQTQETMTAQIAQTIQTVLEPKGVALLIDAAHQCMTTRGVQKQGVSMVTTRFTGAFELDQDLRNRFLIQAGQN

SEQ ID NO: 6319 - protein, 212 aa, Puniceispirillum sp.
  misc_feature (1)..(212): tr|A0A424RJW8|A0A424RJW8_9PROT GTP cyclohydrolase 1 OS= Candidatus Puniceispirillum sp. TMED213 OX=1986634 GN=f olE PE=3 SV=1
  misc_feature (87)..(87): Xaa can be any naturally occurring amino acid
MTPYDSTTLERESSIESQSETAGHRPSREDAEKAVELLLRWAGDDPSREGLVDTPARVARAYEEFFSGYQEDPEDMLARTFEEVEGXDDMVMLRGIDLQSHCEHHMVPILGQAHIAYLPDRRVVGISKLARVLDSFGRRLQTQETMTAQVANAIQNALKPKGVAILVDAQHQCMTTRGVKKPSVSMVTTRFTGQFKDNTELRDRFYQHIKLG

SEQ ID NO: 6320 - protein, 181 aa, Raymondbacteria bacterium
  misc_feature (1)..(181): tr|A0A1F7FG43|A0A1F7FG43_9BACT GTP cyclohydrolase 1 OS= Candidatus Raymondbacteria bacterium RIFOXYD12_FULL_49_ 13 OX=1817890 GN=folE PE=3 SV=1
MEKIIRELLVKIGEDPDREGLLKTPARVKKTYEFLTKGYQEDPKAILSGAIFHEQCNHMIIVDDIEFYSMCEHHMLPFFGKCHIGYISKNKIYGVSKIVRVVECFSRRLQVQERMTQQVARILMDTIGAEGVGVVIEAQHLCMMMRGVEKQNSRMLTSAMLGSFHDDHPTRDEFLHLIKKR

SEQ ID NO: 6321 - protein, 234 aa, Regiella insecticola
  misc_feature (1)..(234): tr|G2GX21|G2GX21_9ENTR GTP cyclohydrolase 1 OS=Candidat us Regiella insecticola 5.15 OX=1005043 GN=folE PE=3 SV =1
MPLLSEKTSQIDKKAEKMNREAEKVRDALKEEGLETPLSGEVLDAKTRKKCIEENIKKIMGLLNLNLDDDSLAETPNRIAKMYVDEIFSGLDYANFPKITLIENKMKINEMITVRNITLTSTCEHHFVAIDGKATVSYIPKNCIIGLSKINRIVRFFAQRPQVQERLTQQIFLALKTLLNTENIAVSIDAVHFCVKARGICDATSATTTTSLGGLFKSNQSTRQEFLRAVNNND

SEQ ID NO: 6322 - protein, 234 aa, Regiella insecticola
  misc_feature (1)..(234): tr|E0WTM2|E0WTM2_9ENTR GTP cyclohydrolase 1 OS=Candidat us Regiella insecticola LSR1 OX=663321 GN=folE PE=3 SV= 1
MPLLSEEMSQINKKAEKMNKEAEKVRDALKKEGLETPLSGEVLDAKTRKKCIEENMKEIMELLNLNLNDDSLAETPNRIAKMYVDEIFSGLDYANFPKITLIENKMKINEMITVRNITLTSTCEHHFVAIDGKATVSYIPENCIIGLSKINRIVRFFAQRPQVQERLTQQIFLALKTLLNTENIAVSIDAVHFCVKARGICDATSATTTTSLGGLFKSNQSTRQEFLRAVNNND

SEQ ID NO: 6323 - protein, 110 aa, Rhabdochlamydia sp.
  misc_feature (1)..(110): tr|A0A486XJ10|A0A486XJ10_9BACT GTP cyclohydrolase 1 typ e 2 OS=Candidatus Rhabdochlamydia sp. T3358 OX=2099795 GN=RHT_00455 PE=4 SV=1
MKVWAKLVIFAPESHADQIRTAAAKVGAGKIGKYSDCSFSVKGTARFLPKKGSEPWTGKENQLEEVIEERIEMLCEEIYIEQVLKEISRVHPYEEPAIDIYPVYQRGFFT

SEQ ID NO: 6324 - protein, 251 aa, Rhabdochlamydia sp.
  misc_feature (1)..(251): tr|A0A486XR45|A0A486XR45_9BACT GTP cyclohydrolase 1 typ e 2 OS=Candidatus Rhabdochlamydia sp. T3358 OX=2099795 GN=RHT_01308 PE=4 SV=1
MITLQDLLQYLNQLLQPELFSDVCPNGLQVEGKKTISRIAFAVSASLATIKQAIAIKADALVVHHGIFWDKTSCVLLGPKKQKFQLLLENEISLLAYHLPLDANQTVGNNWKAAHDLSLTNLKAFGLLGTNKIGVKAQIKPTLIEDFQIKLEAYYEHVAHAALGGKKQISSVAIVSGGAHWMIEQAIQEEMDCFITGSFDEPIWDLAHENGIHFLALGHFSTEKVGIQSLKQITTKHFDVPTHFINLFNPF

SEQ ID NO: 6325 - protein, 330 aa, Rhodobacter lobularis
  misc_feature (1)..(330): tr|A0A0J9E1F6|A0A0J9E1F6_9RHOB GTP cyclohydrolase FolE2 OS=Candidatus Rhodobacter lobularis OX=1675527 GN=folE 2 PE=3 SV=1
MSTHSPLDQDCPDRDEAAPALSRSYPEDFEVDAAYKASLPDLQNGPESLIKGAHRAIQHVGISNFRLPIRYRTRDNGDLTLETSVTGTVSLEAEKKGINMSRIMRSFYRHAEQTFSFEVMECALDDYKSDLESFDARIQMRFSFPMKVPSLRSGLEGYQYYDITLELVEQAGVRKKILHLDYVYSSTCPCSLELSEHARRTRGQLATPHSQRSVARLSAVLTEGEDVMWFEDLIEMCRDAVPTETQVMVKREDEQAFAELNAANPIFVEDAARLYAEQLMRDRRVSDFRVVASHQESLHSHDAVSVLTEGPTFSAESLDPRLFASMFHIG

SEQ ID NO: 6326 - protein, 184 aa, Rhodoluna planktonica
  misc_feature (1)..(184): tr|A0A1D9DXM8|A0A1D9DXM8_9MICO GTP cyclohydrolase 1 OS= Candidatus Rhodoluna planktonica OX=535712 GN=folE PE=3 SV=1
MVDQQRIKNAVVELLAAIGEDPNRQELLATPDKVAQSYAEFFKGVNVDETEALAEPFEAEHNEVVILKDIDFVSMCEHHLLPFTGTAHIAYLPDDKVVGLGRLPKLVELVASRPQLQENLTAQIADALERGLGTKGVVVVVQARHHCVVSRGARQPEANTITMAARGCYAEPASRAEVMALIAK

SEQ ID NO: 6327 - protein, 179 aa, Rickettsiella isopodorum
  misc_feature (1)..(179): tr|A0A1J8NK15|A0A1J8NK15_9COXI GTP cyclohydrolase 1 OS= Candidatus Rickettsiella isopodorum OX=1225476 GN=folE PE=3 SV=1
MEKHIKAILTALGEDTEREGLKNTPLRVSKSLRYLTSGSRESLDDILNGAVFRSTMEEMILVKDIELYSLCEHHLLPFIGACHIAYIPNGKIIGLSKISRIINFYARRLQIQENLTRQIADTLMKVLDAKGVAIIIEAKHLCMMMRGVEKQKASMKTSVMLGLFRQDLRTRSEFLSLIG

SEQ ID NO: 6328 - protein, 183 aa, Rickettsiella viridis
  misc_feature (1)..(183): tr|A0A2Z5UWG4|A0A2Z5UWG4_9COXI GTP cyclohydrolase 1 OS= Candidatus Rickettsiella viridis OX=676208 GN=folE PE=3 SV=1
MQTHITEILKLLGEDPEREGLKKTPERVEKSLRYLTSGTQQSLETLMNGAFFSSSIAEMILVKDIELYSLCEHHLLPFMGHCHIAYIPNGKIIGLSKIPRIVDFYARRLQIQENLTCQIADSLMSLLNAKGVAIVIEAKHLCMMMRGVEKQTASLKTSVMLGVFRDDMKIRAEFLSLLNSTHH

SEQ ID NO: 6329 - protein, 208 aa, Riesia sp.
  misc_feature (1)..(208): tr|A0A1V0HQG0|A0A1V0HQG0_9ENTR GTP cyclohydrolase 1 OS= Candidatus Riesia sp. GBBU OX=1719125 GN=folE PE=3 SV=1
MSSINQESVLVHKALKIHGLENSFYSNKALTEDTEKKIAVNISNIMNLLKFDVSNCTLSETPKRVAKMYVEEIFSGLNYRNFPRISFIKNKMKVDEIISVKNISLITTCEHHLTVIDGNASIKYLPNDRIIGFSKIIEIVYFFSKRPQIQERLTKQILIALQTLLRTKDISVSISAIHYCTKLVGSKDITNNIVTNSYGGIFKRRQKS

SEQ ID NO: 6330 - protein, 189 aa, Riesia pediculischaeffi
  misc_feature (1)..(189): tr|A0A0C1V768|A0A0C1V768_9ENTR GTP cyclohydrolase 1 OS= Candidatus Riesia pediculischaeffi PTSU OX=1401651 GN=P 689_119235 PE=3 SV=1
MSFLNEDVNLIRKKLQLCGLDIQSNSNFSISFKKLSKLYSELFFKSDYRDFPKFKLMENKIQFNEMIVIRDVQFISICEHHLLIIEGTSTVAYIPKKYIVGLSKISQIIHFFSKRPQLQEKMTKQISISLKNLLKTEDVAVFINAVHYCMKIRYAQDRSSDVITTELSGSFVSDDLLKDRFLRFCYSNR

SEQ ID NO: 6331 - protein, 190 aa, Riflebacteria bacterium
  misc_feature (1)..(190): tr|A0A1F7G085|A0A1F7G085_9BACT GTP cyclohydrolase 1 OS= Candidatus Riflebacteria bacterium RBG_13_59_9 OX=18178 75 GN=folE PE=3 SV=1
MDRKRIENAVREILIAIGEDPEREGLIRTPERVAQMYEDMLGGVQEDGYELIRSSIYHEKHEELVLLRDLDFFSICEHHLMPFMGKAHIAYIPKGRICGLSKILRAFSHLCRRPQVQERLTWQMADMLYETLKPHGAAVVLEARHLCLELQGVKKLGTIVTTSALRGIFHVHSASRGELFQLIQGRDGVL

SEQ ID NO: 6332 - protein, 190 aa, Roizmanbacteria bacterium; identical to SEQ ID NO: 6123
  misc_feature (1)..(190): tr|A0A2M8KMQ9|A0A2M8KMQ9_9BACT GTP cyclohydrolase 1 OS= Candidatus Roizmanbacteria bacterium CG10_big_fil_rev_8 _21_14_0_10_36_26 OX=1974851 GN=folE PE=3 SV=1

SEQ ID NO: 6333 - protein, 179 aa, Roizmanbacteria bacterium
  misc_feature (1)..(179): tr|A0A1F7GTX3|A0A1F7GTX3_9BACT GTP cyclohydrolase 1 OS= Candidatus Roizmanbacteria bacterium RIFCSPHIGHO2_01_FU LL_39_8 OX=1802033 GN=folE PE=3 SV=1
MKLTPTIKKLLIYFGEDIKRDGLKETPIRVERMYEELLSGYKKDPKSIFKKFESESYKGLITVTNIDFFSLCEHHLLPFFGKVSIGYIPNGHILGLSKFARLVDIYAKRLQVQEHLTTQIANSLMKHLNAQGVIVHITATHLCMSMRGVNKTNVVTKTTIVRGVLKEDQYLQNQFYMQI

SEQ ID NO: 6334 - protein, 187 aa, Rokubacteria bacterium
  misc_feature (1)..(187): tr|A0A1F7PAQ5|A0A1F7PAQ5_9BACT GTP cyclohydrolase 1 OS= Candidatus Rokubacteria bacterium RIFCSPLOWO2_12_FULL_7 1_22 OX=1802110 GN=folE PE=3 SV=1
MIEKLIEQLLKELGQDVSREGLAKTPERVAQALRYLTSGYDKDVKDVLNDAMFVEDYDEMVIVKDIDFFSMCEHHVLPFFGKAHVAYMPRKKIVGLSKIPRLVEMYSRRLQVQERLTTQIATTLDEALQPRGVAVVMEAIHMCMLMRGVEKQNSKAVTSAMLGAFRDRPETRAEFMELIKAGRGLQI

SEQ ID NO: 6335 - protein, 193 aa, Rokubacteria bacterium
  misc_feature (1)..(193): tr|A0A1Q7I358|A0A1Q7I358_9BACT GTP cyclohydrolase 1 OS= Candidatus Rokubacteria bacterium 13_1_40CM_4_67_11 OX= 1805361 GN=folE PE=3 SV=1
MSEEPGTVARLVGQLLAELGEDACREGLARTPERVEKSLRYLTSGYRMNVHDVLNDALFVEEYDEMVVVKDIDVFSLCEHHLLPFAGKCHVAYMPRKKIVGLSKIPRLVEMYARRLQVQERLTTQIATTLDEVLQPRGVAVVMEAFHLCMLMRGVEKQNSKAVTSAMLGAFRDRPETRAEFMALIKSSPGLSI

SEQ ID NO: 6336 - protein, 206 aa, Saccharicenans subterraneum
  misc_feature (1)..(206): tr|A0A3E2BML5|A0A3E2BML5_9BACT GTP cyclohydrolase 1 OS= Candidatus Saccharicenans subterraneum OX=2508984 GN=fo lE PE=3 SV=1
MAQKNRKRNQVKKMDLKKIEQGVRLVIEGIGEDPDRPGLKGTPGRVARMMEDILGGTQIDPQADLEVFQDERHDELVLIRNIPLYSFCEHHLLPFAGVAHVAYIPKEGRIIGLSKIARLVDTLARRLQVQERLTKQVADILNATLNPLGVMVVIEAEHLCMSMRGVKKPKAITVTSAVRGSFRNNPATRTEAMMLIKGGIPGGREV

SEQ ID NO: 6337 - protein, 185 aa, Saganbacteria bacterium
  misc_feature (1)..(185): tr|A0A2H0XVP6|A0A2H0XVP6_9BACT GTP cyclohydrolase 1 OS= Candidatus Saganbacteria bacterium CG08_land_8_20_14_0_ 20_45_16 OX=2014293 GN=folE PE=3 SV=1
MINQKKIEKAVKEILSAIGEDPNRPGLKDTPKRVARMYAELFAGLHKDPANELTVFHEADHEEMVMVKDIPFYSMCEHHLIPFAGKAHVVYIPTKGKVTGLSKLVRVVECFVRRPQVQERLTSQIADCLMQKLKPQGVMIIIEAEHMCMSMRGVKKPGAMTTTSAVRGIFQKNAKTRSEALSLLK

SEQ ID NO: 6338 - protein, 185 aa, Scalindua brodae
  misc_feature (1)..(185): tr|A0A0B0EJP7|A0A0B0EJP7_9BACT GTP cyclohydrolase 1 OS= Candidatus Scalindua brodae OX=237368 GN=gch PE=3 SV=1
MDKKKITMAVKLFLEGIGEDPERGGLKDTPKRVAEMCEEIFSGIGEDSAKVIKVLKSEDHDEIVLLKDISFFSVCEHHLLPFIGKAHVAYIPNGSKVTGLSKLARVVEIESKKPQVQERLTTSIAEAIMKALRPKGVMVVIEAEHLCMAMRGIKKPGSKAQTSVVRGIFRKNPATRAEAMSLIKD

SEQ ID NO: 6339 - protein, 186 aa, Scalindua sp.
  misc_feature (1)..(186): tr|A0A523CQQ0|A0A523CQQ0_9BACT GTP cyclohydrolase 1 OS= Candidatus Scalindua sp. AMX11 OX=2555784 GN=folE PE=3 SV=1
MDKQKIMKATKLLLEGIGEDPSREGLLETPRRVAEMCEEIFSGIGADSGEQIKILQSEDHDEIVLLKDIPFFSVCEHHLLPFIGKAHVAYIPNGNRVTGLSKLARVVDTESKKLQMQERLTTAIANSIMNALQPKGAMAIVEAEHLCMTMRGIKKPGTITRTSVVRGIFRESLATRTEAMSLIMGR

SEQ ID NO: 6340 - protein, 178 aa, Schekmanbacteria bacterium
  misc_feature (1)..(178): tr|A0A1F7RPL9|A0A1F7RPL9_9BACT GTP cyclohydrolase 1 OS= Candidatus Schekmanbacteria bacterium RBG_16_38_10 OX=1 817879 GN=folE PE=3 SV=1
MEELIRKILAGIGENPNRQGLKKTPSRVQKTLKFLTKGYGEDPKKIFEGAIFREDYEEMILLKGIDIYSLCEHHLLPFFGKCHVAYIPKKKLIGLSKIAKLVEVYSRRLQVQERLTNQIAKTLEEELDPLGVAVVIEAQHLCMIMRGVEKQNSVAVTSSMLGGFRRPETRAEFMNLIK

SEQ ID NO: 6341 - protein, 186 aa, Schekmanbacteria bacterium
  misc_feature (1)..(186): tr|A0A1F7RL31|A0A1F7RL31_9BACT GTP cyclohydrolase 1 OS= Candidatus Schekmanbacteria bacterium RBG_13_48_7 OX=18 17878 GN=folE PE=3 SV=1
MSDPLEDCIFKILHELGEDTDREGLKRTPERVAKSLRFLTKGYDLDVKSVFENAVFEAENFDEMVLLKDIEMYSMCEHHLLPFFGKCHISYVPRKKIIGLSKIPRIVEVFARRLQVQERMTTQIAYAIKDALEPYGVGVIIEAYHLCMMMRGVEKQNCETLTSCMLGVYKSDPRTRAEFLSLIRKK

SEQ ID NO: 6342 - protein, 218 aa, Schmidhempelia bombi
  misc_feature (1)..(218): tr|A0A484GBW1|A0A484GBW1_9GAMM GTP cyclohydrolase 1 OS= Candidatus Schmidhempelia bombi str. Bimp OX=1387197 GN =folE PE=3 SV=1
MSILSNEAILVKQALIQKNLETPFKRVALTKDERKKQIQHHFTKIMQLMELDLSDDSLVETPHRMAKMYVDEIFLGLDYANFPKITLIENKMQFDEMVTVRDITLTSICEHHFVTIDGKATVSYIPKDYVIGLSKINRIVAFFSQRPQVQERLTQQILVALQTLLGTNNVAVSIDAAHYCVKARGIKDATSMTTTTALGGGFKTNASTRQEFLRSIRH

SEQ ID NO: 6343 - protein, 221 aa, Sodalis pierantonius
  misc_feature (1)..(221): tr|K7TFX6|K7TFX6_9GAMM GTP cyclohydrolase 1 OS=Candidat us Sodalis pierantonius str. SOPE OX=2342 GN=folE PE=3 SV=1
MVTLTKEASQVREALLARGLETPLRGEVLDNEVRKRLIAEHMTAIMTLLNLDLTDDSLAETPHRIAKMYVEEVCAGLDYANFPKITVIENKMKVDEMVTVRDITLTSTCEHHFVIIDGKATVSYIPKHCVIGLSKINRIVQFFVQRPQVQERLTQQILLALQTLLGTNNVAVSIDAVHYCVKARGIRDATSTTTTTSLGGLFKSSQNTRQEFLRAVTHHNG

SEQ ID NO: 6344 - protein, 201 aa, Streptomyces philanthi
  misc_feature (1)..(201): tr|A0A367F239|A0A367F239_9ACTN GTP cyclohydrolase 1 OS= Candidatus Streptomyces philanthi OX=371608 GN=folE PE= 3 SV=1
MTDPVTLDGASPIGEFDEKRAENAVRELLIAVGEDPDREGLLETPARVARAYREMFAGLRQRPEDVLTTTFDLGHDELVLVKDIEVVSQCEHHLLPFHGVAHVGYIPAASGKITGLSKLARLVDVFARRPQVQERLTTQIADSLMRILEPRGVIVVIECEHMCMSVRGVRKPGAKTTTSAVRGQLRDATTRAEAMSLILAK

SEQ ID NO: 6345 - protein, 230 aa, Sulfobium mesophilum
  misc_feature (1)..(230): tr|A0A2U3QIB8|A0A2U3QIB8_9BACT GTP cyclohydrolase 1 OS= Candidatus Sulfobium mesophilum OX=2016548 GN=folE PE=3 SV=1
MNFQKGNGIVVRRARVIFFFYLLGISGKIFTSDIYGSIKKNYKMNLKKIEKGVRLIIEGIGEDPERPGIRGTPQRVARMYQEIFSGLETPTEEILKHIEGESHDEMVLLKDIPFYSVCEHHLLPFIGKAHVAYVPGAGKIAGIGELAKAVEIFAKRPQVQERLTAQLADMIMMKLKPKGAMVVIDAEHLCLSMRGMKKPGSRTVTSAVRGIFRSKESTRQELLELIKQRD

SEQ ID NO: 6346 - protein, 265 aa, Sulfobium mesophilum
  misc_feature (1)..(265): tr|A0A2U3QGX7|A0A2U3QGX7_9BACT Putative GTP cyclohydrol ase 1 type 2 OS=Candidatus Sulfobium mesophilum OX=2016 548 GN=NBG4_30068 PE=4 SV=1
MCTDASGADRRQVKETALRTFVSFLDSELALSEFPKDESINGLQVEGHGSVRKIGLAVDACGYVFETAAERNIDFLFVHHGLIWSGIRAVRGVTKKRLKALLDSGISLYACHLPLDWHPKYGNNAELLRVLSIKKMGEFGEYHGKRIGYWGKTRAPLSTADFVNVVNKALGIKSSCVDFRKKVRNVGVVSGGGWSAIHDAEELGIDTFLTGEPSHSAYHLAKEIGVNLIFAGHYATETLGVKAVGRMLKKKFGLPVEFIDYPTGL

SEQ ID NO: 6347 - protein, 205 aa, Sulfopaludibacter sp.
  misc_feature (1)..(205): tr|A0A2N9MXM5|A0A2N9MXM5_9BACT GTP cyclohydrolase 1 OS= Candidatus Sulfopaludibacter sp. SbA3 OX=2043164 GN=fol E PE=3 SV=1
MKSNKAIVKVMQAKLEQPDLAPLVREILAGLGENPERNGLARTPHRVDQALKFLTSGYRMDVQKVVNGALYDVKYDEMVVVKDIEFFSLCEHHMLPFFGKMHVAYLPKNRVIGLSKIPRIVDVFARRLQIQERLTQEVAQTIQQVIDPVGVGVICEARHFCMMMRGVEKQHSGAMTSAMLGAFRTRKETRDEFLALVNHRGSGGL

SEQ ID NO: 6348 - protein, 199 aa, Sulfopaludibacter sp.
  misc_feature (1)..(199): tr|A0A2U3K1S9|A0A2U3K1S9_9BACT GTP cyclohydrolase 1 OS= Candidatus Sulfopaludibacter sp. SbA4 OX=2043165 GN=fol E PE=3 SV=1
MKPNKAVVKVITPKLEEGTIAPLIREVLEKLGEDPQREGLERTPERVDKALRFLTSGYRTDIRKLVNGALYEVKYDEMVVVRDIEFFSLCEHHLLPFFGKMHVAYLPKAKVIGLSKIPRIVDAFARRLQIQERLTQEVAQTIQEIIDPAGVGVICEARHFCMMMRGVEKQHSGAMTSAMLGAFRDCKETRDEFLALVNH

SEQ ID NO: 6349 - protein, 199 aa, Sulfotelmatobacter sp.
  misc_feature (1)..(199): tr|A0A2N9N8Q3|A0A2N9N8Q3_9BACT GTP cyclohydrolase 1 OS= Candidatus Sulfotelmatobacter sp. SbA7 OX=2043160 GN=fo lE PE=3 SV=1
MKSSVESPTITGASFEELVREMIVRLGEDPEREGLTRTPERVHRAYEHLMKGYKEDPEAMLKKALFTVTYDQMVIVKDVEMFSLCEHHMLPFFGKVHVAYIPNGKVIGLSKIPRLVDIFSRRLQIQERLTTQIAETIQKAIAPQGVGVVIEARHLCMMMRGVEKQHSAAVTSSMLGCFREEQETRTEFLSLIRNRANGV

SEQ ID NO: 6350 - protein, 199 aa, Sulfotelmatobacter kueseliae
  misc_feature (1)..(199): tr|A0A2U3KP25|A0A2U3KP25_9BACT GTP cyclohydrolase 1 OS= Candidatus Sulfotelmatobacter kueseliae OX=2042962 GN=f olE PE=3 SV=1
MKPAIEPATLTSARFEDLVREMLVRLGEDPRREGLTATPERVRKALEFLTKGYQEDPEALLKGALFTVSYDEMVIVKDIEMFSLCEHHMLPFFGKVHVAYIPNGRVIGLSKIPRLIELFSRRLQIQERLTTQIAETIQKVIEPQGVGVVIEARHLCMMMRGVEKQHSAAVTSSMLGCFRQEEETRSEFLSLIRQRANGV

SEQ ID NO: 6351 - protein, 210 aa, Sulfotelmatomonas gaucii
  misc_feature (1)..(210): tr|A0A2N9L4U3|A0A2N9L4U3_9BACT GTP cyclohydrolase 1 OS= Candidatus Sulfotelmatomonas gaucii OX=2043161 GN=folE PE=3 SV=1
MGRPMVVNKAVKPAVVADEGLGAFSTQEMYREILSRLGEDPDRDGLLATPERVEKSMAFLTKGYDQDPAQILHGALFDVDYDEMVIVKDIEMFSLCEHHMLPFFGKVHVAYIPKRKVIGLSKIPRLVEVFARRLQVQERLTRQIADAIQEAIEPQGVGVVIEARHLCMMMRGIEKQHSSTVTSAMVGCFRQKETRTEFLALLRQPATNGV

SEQ ID NO: 6352 - protein, 195 aa, Sulfuricurvum sp.
  misc_feature (1)..(195): tr|K7SQK5|K7SQK5_9HELI GTP cyclohydrolase 1 OS=Candidat us Sulfuricurvum sp. RIFRC-1 OX=1249480 GN=folE PE=3 SV =1
MSKENEQQNFEEAVKTMIRYVGEDVNREGLEKTPSRVLKAYEFMFGGYKEDPQTILNSAMFASSNDEMVLVKDIEFYSTCEHHLLPIIGRAHVAYIPNGKVVGLSKIPRVVDVFARRMQIQEQLTEQIADALMEAVEPKGVAVVIQARHMCMEMRGVEKICSTTTSSALRGLFKKDEKTRMEFFSLINSSSGNRY

SEQ ID NO: 6353 - protein, 217 aa, Sumerlaea chitinovorans
  misc_feature (1)..(217): tr|A0A2Z4Y8R0|A0A2Z4Y8R0_9BACT GTP cyclohydrolase 1 OS= Candidatus Sumerlaea chitinovorans OX=2250252 GN=folE P E=3 SV=1
MAETHAHIRDIIEQADELALAEDVQPSHNPELEALVRRLLELIGEDPQREGLQRTPLRVARAWEALTAGYTMSLDRIVNNAIFHEKYDEIVSVKNIHFFSLCEHHLLPFFGIANVGYIPNGRVIGLSKIPRIVDMFARRLQLQERLTSQIAETIQQVLRPRGVAVVVEAYHLCMMMRGVEKQDSLTVTSCMLGDFKTNPQTRNEFLELCGRHSLKGR

SEQ ID NO: 6354 - protein, 204 aa, Sumerlaeota bacterium
  misc_feature (1)..(204): tr|A0A353GGL4|A0A353GGL4_9BACT GTP cyclohydrolase 1 OS= Candidatus Sumerlaeota bacterium OX=2107588 GN=folE PE= 3 SV=1
MAFCDCSDDNNTGAENPALAQLEKIGRDLIVTVGENPEREGLLRTPQRFARSWEYLTSGYHVDISKLVNNAVFEEAYDEIIAVKNIEFFSMCEHHLLPFYGKCSVAYIPNGRVIGLSKIPRIVDAFSRRLQIQECLTRQIAAALNEHLSPIGVAVVMEARHMCMCMRGVEKQTSTCLTSELTGVFKRSAKSRSEVMTLFGMNLK

SEQ ID NO: 6355 - protein, 264 aa, Synechococcus spongiarum
  misc_feature (1)..(264): tr|A0A165B1N4|A0A165B1N4_9SYNE GTP cyclohydrolase I typ e 1 OS=Candidatus Synechococcus spongiarum OX=431041 GN =FLM9_1332 PE=4 SV=1
MTLDDLKPMPSLEADFDVAPHLPLSVTGTADRATRPATPSTTSARIRQRLQAARASFFANDNIAAYLEEGELENLQEEVVEQVRGLLKTLVIDVDNDHNTAETAERVAKMYLHEVFKGRYHPQPKVASFPNVRELDEIYTVGPITVRSACSHHLVPILGYCWIGIQPGERVIGLSKFSRIADWVFSRPHIQEEAVIILADEIEALCKPRGLGIVLKAQHYCMKWRGVKEPQASMVNSVVRGSFRSNASMKKEFFDLIRQQESLL

SEQ ID NO: 6356 - protein, 192 aa, Syntrophonatronum acetioxidans
  misc_feature (1)..(192): tr|A0A424YIV7|A0A424YIV7_9FIRM GTP cyclohydrolase 1 OS= Candidatus Syntrophonatronum acetioxidans OX=1795816 GN =folE PE=3 SV=1
MSQMIDQEKIEEAIKMILEAIGEDPTREGLVETPKRVGKMYAEMFEGLHEDPRGHLKKCFTEDEHDEMILVRDISIYSMCEHHLLPFYGKAHVAYIPAHGRITGLSKIARVVENIARRPQLQERLTSEVADVIMETLDPKGVVVVVEAEHLCMTIRGIKKPGSQTITSAVRGIFRRNQVSRSEAFSLIKGSR

SEQ ID NO: 6357 - protein, 258 aa, Syntrophosphaera thermopropionivorans
  misc_feature (1)..(258): tr|A0A4R5JR47|A0A4R5JR47_9BACT GTP cyclohydrolase FolE2 OS=Candidatus Syntrophosphaera thermopropionivorans OX =2593015 GN=folE2 PE=3 SV=1
MSIPDIQSQDDFRQIAIEKVGVKGLSYPIVVDDRENGTQDTVGNINLYVDLHPSKRGIHMSRFIEVLNRYHHDSITGNLESLLQDLKSIMKAEAAYIDISFPYFIKKMAPVSKIPSLMDYQCFFNASFNNYFQLWIGTTVPVTTLCPCSRAISINGAHNQRAQVTIKVRYTDFVWLEELIQIAEESASSPVYPLLKRRDEKFVTENAYSNPKFVEDIVREVTQKLEKDSRIVEFIIEVESMESIHNHNAYAMTHRVKQ

SEQ ID NO: 6358 - protein, 272 aa, Tectomicrobia bacterium
  misc_feature (1)..(272): tr|A0A1F7TP27|A0A1F7TP27_9BACT GTP cyclohydrolase FolE2 OS=Candidatus Tectomicrobia bacterium RIFCSPLOWO2_12_F ULL_69_37 OX=1802343 GN=folE2 PE=3 SV=1
MSGTPAESADLADVQGGTDDRNVKIDKVGVKNIRYPIVVRDRAKKFQHTVGTVNMYVDLPHQFKGTHMSRFLEVLNEHNGLISVDRVPEILESIRQRLDAQTAHFEVTFPYFVTREAPVTGASGMMALECGFDASAGAVNDFVLSVKVNVATLCPCSKEISARGAHNQRGNVHIQVRFEGELWIEEIAEVAEESGSCALYPVLKREDEKFVTEKAFDNPRFVEDVVREASLRLRQDPRVRWFQIQVENFESIHDHNAYAFVEEWRVPPAPKG

SEQ ID NO: 6359 - protein, 272 aa, Tectomicrobia bacterium; identical to SEQ ID NO: 6358
  misc_feature (1)..(272): tr|A0A1F7T4P0|A0A1F7T4P0_9BACT GTP cyclohydrolase FolE2 OS=Candidatus Tectomicrobia bacterium RIFCSPLOWO2_02_F ULL_70_19 OX=1802342 GN=folE2 PE=3 SV=1

SEQ ID NO: 6360 - protein, 264 aa, Tenderia electrophaga
  misc_feature (1)..(264): tr|A0A0S2T9S8|A0A0S2T9S8_9GAMM GTP cyclohydrolase FolE2 OS=Candidatus Tenderia electrophaga OX=1748243 GN=folE 2 PE=3 SV=1
MAAIDDVQSSADTRRIPINKVGIKDIRHPVRVKDRSEGEQHTIANFNMYVNLPHNFKGTHMSRFVEILNNYERELSVESFEHMLQEMVTRLDAEAGHIEMSFSYFVDKPAPVSGVKSLMDYDVTLIGEIRDATPRVDIKVVVPVTSLCPCSKQISERGAHNQRSHVTVSVRTRDFVWIEDIIDLVEGQASCELYGLLKRPDEKYVTERAYDNPKFVEDMVRDVAASLNADDRIVAYTVESENFESIHNHSAYALIEQDKTATLL

SEQ ID NO: 6361 - protein, 209 aa, Terasakiella magnetica
  misc_feature (1)..(209): tr|A0A1C3RIH1|A0A1C3RIH1_9RHIZ GTP cyclohydrolase 1 OS= Candidatus Terasakiella magnetica OX=1867952 GN=folE PE =3 SV=1
MSTKPKLDLVGAKPSREEAEEAVRTLIRWTGDDHTREGLLGTPDRVVRSYEEFFAGYNQDPEEILKRTFEETDGYDEMVLLRDIRFESHCEHHMVPILGKAHIGYMPKNRVVGISKLARIIEVYAKRLQIQEKMTAQVANVIQDVLEPHGVAVVIEAQHQCMTTRGVYKPGVTMVTSRMLGAFRNNMATRKEFLAMIGNPASGQSVSPY

SEQ ID NO: 6362 - protein, 189 aa, Termititenax aidoneus
  misc_feature (1)..(189): tr|A0A388TC69|A0A388TC69_9BACT GTP cyclohydrolase 1 OS= Candidatus Termititenax aidoneus OX=2218524 GN=folE PE= 3 SV=1
MLYCPPVENLYKAILAAIGEDASREGLRDTPRRAAQAMQYLTKGYQEDIDRLVNNALFEAESDDMVIVRDIELYSLCEHHLLPFIGKCHVGYIPTRKIIGLSKIPRIVDAYARRLQVQERLTKQIANTILKYTQADGVGVVIEAQHLCTMMRGVEKQNSVMTTSCMLGSFRRESATRAEFMALIRKSSR

SEQ ID NO: 6363 - protein, 182 aa, Termititenax persephonae
  misc_feature (1)..(182): tr|A0A388TEF3|A0A388TEF3_9BACT GTP cyclohydrolase 1 OS= Candidatus Termititenax persephonae OX=2218525 GN=folE PE=3 SV=1
MENLYQALLSAIGEDLGREGLRDTPRRAAQALQYLTKGYQADLDQLVNNALFTAESDDMVIVRDIELYSLCEHHLLPFIGKCHVGYIPSQKIIGLSKIPRIVDAYARRLQVQERLTKQIADTILKYTQADGVGVVIEAQHLCTMMRGVEKQNSVMTTSCMLGSFRRESATRAEFMSLIRKQA

SEQ ID NO: 6364 - protein, 218 aa, Thermochlorobacter aerophilum
  misc_feature (1)..(218): tr|A0A395LYH7|A0A395LYH7_9BACT GTP cyclohydrolase 1 OS= Candidatus Thermochlorobacter aerophilum OX=1868324 GN= folE PE=3 SV=1
MQGKSQNEKRMIASLQGDEEDFYPNAASDEAQVLARIAENVKENLRLLGENPEREGLLRTPERVAKALMYLTSGYRCNPREILLSAVFHEKYDEMVLVKDIEVFSMCEHHMLPFFGKAHVAYIPNGKIVGLSKIPRVVDVYARRLQVQERMTQEIRDIIEEVLEPKGVAVVIEAKHLCMIMRGVEKQNSITTTSAMSGEFLKNSATRSEFMRLIKSFN

SEQ ID NO: 6365 - protein, 219 aa, Thermochlorobacter aerophilum
  misc_feature (1)..(219): tr|A0A395LZL2|A0A395LZL2_9BACT GTP cyclohydrolase 1 OS= Candidatus Thermochlorobacter aerophilum OX=1868324 GN= folE PE=3 SV=1
MMQGKSQNEKRMIASLQGDEEDFYPNAASDEAQVLARIAENVKENLRLLGENPEREGLLRTPERVAKALMYLTSGYRCDPREILLSAVFHEKYDEMVLVKDIEVFSMCEHHMLPFFGKAHVAYIPNGKIVGLSKIPRVVDVYARRLQVQERMTQEIRDIIEEVLEPKGVAVVIEAKHLCMIMRGVEKQNSITTTSAMSGEFLKNSATRSEFMRLIKSFN

SEQ ID NO: 6366 - protein, 225 aa, Thermofonsia bacterium
  misc_feature (1)..(225): tr|A0A3M0WWM4|A0A3M0WWM4_9CHLR GTP cyclohydrolase 1 OS= Candidatus Thermofonsia bacterium OX=2364220 GN=folE PE =3 SV=1
MKNLQSTAINGNGRLHTNGNGHNGHILAPATLTPQKAVIEEAVRAILVNVGENPEREGLLKTPHRVAKMYDEVLSGYHQNLETLVNNALFDVDYQEMVVVKDIEYFSMCEHHMLPFFGRAHVAYIPRDKVIGLSKIPRIVEMFARRLQVQERMTNQIAEAIEEVLDPLGVAVVVQGSHMCSMMRGVKKEHPEMVTSTYRGLFREDKETKRELMEHLRRPSTKSIF

SEQ ID NO: 6367 - protein, 268 aa, Thermofonsia Clade
  misc_feature (1)..(268): tr|A0A2M8PWZ6|A0A2M8PWZ6_9CHLR GTP cyclohydrolase 1 OS= Candidatus Thermofonsia Clade 2 bacterium OX=2364211 GN =folE PE=3 SV=1
MHNSSQQHNGHQSYEEPSSKRDHHSALDTQEIPNISFESFTVGEPTGTVVSGHTLLASAENLLPVFPEEYEQTEILTGDKQQVARIERAIFDLLDAFNVNWDDPNYTDTPKRVAKAYVEYWAAGYARHAEDEITVFPNTHGSDDLVLVKDMKFYSTCSHHLAPFMGYAAIAYIPEQYLLGLSKLGRILDIYARRFQLQERIGAQTADKLMELIQPKGVMVMLYDVEHMCMSSRGVKLHEANTTTLATRGIFKTDAQLRQEVLSMICHR

SEQ ID NO: 6368 - protein, 199 aa, Thermokryptus mobilis
  misc_feature (1)..(199): tr|A0A0S4N4P1|A0A0S4N4P1_9BACT GTP cyclohydrolase 1 OS= Candidatus Thermokryptus mobilis OX=1643428 GN=folE PE= 3 SV=1
MSVDKLEEAVKPDLEKIASLIHEFLIELGEDPNREGLKKTPMRVAKAFEYLTKGYREDIEKVLNGAVFNEKYNEMVIVKNIDFFSLCEHHLLPFYGKVHIAYIPNGKIVGLSKIPRIVEVFSRRLQVQERLTQQIADTLNEYLQPKGVAVVIEAKHLCMIMRGVEKQNSVATTSAMHGVFVKDAKTRDEFMHLISENLM

SEQ ID NO: 6369 - protein, 272 aa, Thiodiazotropha endoloripes
  misc_feature (1)..(272): tr|A0A1E2URG1|A0A1E2URG1_9GAMM GTP cyclohydrolase FolE2 OS=Candidatus Thiodiazotropha endoloripes OX=1818881 G N=folE2 PE=3 SV=1
MLDKTPVNGSQIADVQNSADTRQIAINKVGIKDISHPMRIRDRSEGEQHTIANFNMYVNLPHNFKGTHMSRFVEILNSHETEITVESFKDMLAEMTERLEAESGHIEMNFPFFINKTAPISGVKSLLDYDVTLIGEIHGGKPIIEIKVVVPVTSLCPCSKKISDRGAHNQRSHVTVQARTNGFIWIEEIIDMVEKQASCELYGLLKRPDEKFVTETAYDNPKFVEDMVRDIAVQFNREDRISAYVIESENFESIHNHSAYALIERDKTTDPD

SEQ ID NO: 6370 - protein, 224 aa, Thiodiazotropha endoloripes
  misc_feature (1)..(224): tr|A0A1E2UNN9|A0A1E2UNN9_9GAMM GTP cyclohydrolase 1 OS= Candidatus Thiodiazotropha endoloripes OX=1818881 GN=fo lE PE=3 SV=1
MLNKPLRLTKQPKISDEAALVRDALIEHGLETPMFDNGMSQDQKYDRIRDLMSEVMQTLGLDLSDDSLIETPHRIAKMYIHEIFSGLDYSHFPKITLIDNKMGSDEMISVEEIDLTSTCEHHFITIDGKVKVAYIPSASLIGLSKINRIVRFFAQRPQVQERLTRQILVALQTLLDTEDVAVSIEATHYCVKARGVMDSSSHTRTKALGGSFKQDPYLRAEFLA

SEQ ID NO: 6371 - protein, 212 aa, Thiodictyon syntrophicum
  misc_feature (1)..(212): tr|A0A2K8UCW6|A0A2K8UCW6_9GAMM GTP cyclohydrolase 1 OS= Candidatus Thiodictyon syntrophicum OX=1166950 GN=folE PE=3 SV=1
MSEKPKLSKVLAEARYAATFEAESEEEVYDRKKEALVRSMLQEIGEDPDREGLRRTPLRVAKAMDFLTSGYQLSAAEIIKKALFVEDVKEMVVIRDIEFYSMCEHHMLPFFGHAHVGYLPNGKVVGLSKVARVVDCFARRLQVQERLTNQVADALIEHLGAHGVAVVMEASHTCMMMRGVQKQRSTTVSSAMRGSFETNQLTRAEFMSFIRA

SEQ ID NO: 6372 - protein, 285 aa, Thiodictyon syntrophicum
  misc_feature (1)..(285): tr|A0A2K8UFW5|A0A2K8UFW5_9GAMM GTP cyclohydrolase FolE2 OS=Candidatus Thiodictyon syntrophicum OX=1166950 GN=f olE2 PE=3 SV=1
MQQATESTCGATACVTPGIADVQGSADTRHIAIDKVGIKDIRHPVRVRDRGGLEQHTVANFNMYVYLPHNFKGTHMSRFVQILNSQERELSVDSFKEMLREMSRRLESAAGHIEMRFPFFVNKRAPVTGVESLLDYEVTFIGEIHDGDPTLDIKVVVPVTSLCPCSKEIAAYGAHNQRSHVTVQVRTRGFIWIEELIELVEREASSQLYGLLKRPDEKYVTEHAYDNPKFVEDMVRDVATRLNADERVAAYVVQSENFESIHNHSAYALIERDKDAEARIAEASL

SEQ ID NO: 6373 - protein, 271 aa, Thioglobus sp.
  misc_feature (1)..(271): tr|A0A520MN50|A0A520MN50_9GAMM GTP cyclohydrolase FolE2 OS=Candidatus Thioglobus sp. OX=2026721 GN=folE2 PE=3 SV=1
MLETETESHNVNEIEDVQGSPDTRNITIDKVGVKDLRHPVRIQDRSGHDQHTVANFSMYVELPHNFKGTHMSRFVEILSRHEREISVQSFRSMLQETRDHLDAGTSHIEMAFPFFLEKAAPITGVKSLMDYQVTFVGEAIDDEVSTEVRVVVPVTSLCPCSKKISQYGAHNQRSHVTVSVKSKAFIWIEEIIDIVEQEASCELYGLLKRPDEKYVTERAYENPKFVEDMVRDVAGRLNSDDRILKYTVEAENFESIHNHSAYAQINFSRDL

SEQ ID NO: 6374 - protein, 263 aa, Thioglobus sp.
  misc_feature (1)..(263): tr|A0A432TZI2|A0A432TZI2_9GAMM GTP cyclohydrolase FolE2 OS=Candidatus Thioglobus sp. OX=2026721 GN=folE2 PE=3 SV=1
MKSCDLPDTQNKKDIRQIVIDKVGIKDISHPITYVDREGNHMPTIGNFTMTVTLPEHVKGTHMSRFIEILNDGPCEFNSGNFDRIIEKVRDKLESETAHITLDFPFFRKKVAPSSGVESMMDYQVTLYGILDKGESEVMMKVLVPVTSLCPCSKSISKYGAHNQRSHITIKAKVTKGKTLYIEDLIDLAERKASCELYAILKREDEKVVTERAYDNPAFVEDLVRDIAVELNNDERINYYRLESENFESIHNHSAYALVENQK

SEQ ID NO: 6375 - protein, 266 aa, Thiomargarita nelsonii
  misc_feature (1)..(266): tr|A0A0A6PH84|A0A0A6PH84_9GAMM GTP cyclohydrolase FolE2 OS=Candidatus Thiomargarita nelsonii OX=1003181 GN=fol E2 PE=3 SV=1
MNQPVTQMPDVQNSVDTRRLAIDKVGIKDIKYPVRVKDRSGREQHTIANFNMYVNLPHDFKGTHMSRFVEILNEHEYEITVESFKQMLVEMNKRLEAESGHIEMIFNYFVRKTAPISGVKSLLDYEVTFIGEITGETPSITVKVVVPATSLCPCSKKISDYGAHNQRSHVTITAKTNGFLWIEDLIDLVEKEASCELYGLLKRPDEKYVTEHAYNNPKFVEDIVRDIAAKLNQDDRIAGYIVESENFESIHNHSAYAMIENDKQLK

SEQ ID NO: 6376 - protein, 196 aa, Tokpelaia sp.
  misc_feature (1)..(196): tr|A0A368A045|A0A368A045_9RHIZ GTP cyclohydrolase 1 OS= Candidatus Tokpelaia sp. JSC188 OX=2079009 GN=folE PE=3 SV=1
MLGIKRPTEEEVREAIRVLLLWIGENPEREGLLNTPARVARAYSEFFSGYNQSVEEILGTVFEDLSGYEEPVIIRDMPFFSHCEHHMLPIIGKAHVGYLPNGNLVGLSKIFRVVEVFARRMQTQEAMTAQIANALNTYLKPFGVAVFIEAEHLCMSMRGVGKQGAATITSAFHGIYKKDQRAQARFITAVVQGQRR

SEQ ID NO: 6377 - protein, 206 aa, Tokpelaia sp.
  misc_feature (1)..(206): tr|A0A367ZZT0|A0A367ZZT0_9RHIZ GTP cyclohydrolase 1 OS= Candidatus Tokpelaia sp. JSC085 OX=2079008 GN=folE PE=3 SV=1
MIFSKSRNSEKSTVLRSKENPTKEEAKQAIRTLLLWAGENPEREGLLKTPERVIKAYGELFGGYSQSVEDILGTVFKDVSGYDEPVLIKDISFFSHCEHHMVPIIGKAHVAYQPDGQVIGLSKVSRTVEVFARRLQTQEAMTAQIADAFDRHLKPRGVAVLIEAEHLCMTMRGVQKQGSTTVTIALRGMYKSDKNAQASFMKMVEG

SEQ ID NO: 6378 - protein, 185 aa, Vecturithrix granuli
  misc_feature (1)..(185): tr|A0A081C5M9|A0A081C5M9_9BACT GTP cyclohydrolase 1 OS= Candidatus Vecturithrix granuli OX=1499967 GN=folE PE=3 SV=1
MNEVRVQELIRQLLIEIGEDPEREGLQKTPERVAKSYAFLTKGYRTDPAEVINNAVFQSEANNMIIARDIEVYSLCEHHLLPFYGVCHIGYVAKKHVLGLSKLSRIVELYSRRLQIQERLTSQIARAIKDAIDAEGVGVVMECKHLCMMMRGVEKQHSTMTTSSVLGSFHHSQSTRLEFLNLIGK

SEQ ID NO: 6379 - protein, 228 aa, Viridilinea mediisalina
  misc_feature (1)..(228): tr|A0A2A6RGH2|A0A2A6RGH2_9CHLR GTP cyclohydrolase 1 OS= Candidatus Viridilinea mediisalina OX=2024553 GN=folE P E=3 SV=1
MPSFHTNGHHHTVADFDEHEYEPLIVRGRGKLEGVSYSSDPRTEHAVREILIGIGEQPEREGLLKTPARVAKMYAELTAGYHVDPDALINDAIFSVSYDEMVLVKNIDFSSLCEHHMLPFMGQVHVAYIPQGKVVGLSKIPRIVEMFARRLQVQERMTVQIADFINDRLEPMGVAVVAEGVHMCSVMRGVKKANASMVTSAMRGIFRDDPKTRAEFMAHVGRPRSFEG

SEQ ID NO: 6380 - protein, 228 aa, Viridilinea halotolerans
  misc_feature (1)..(228): tr|A0A426U4U8|A0A426U4U8_9CHLR GTP cyclohydrolase 1 OS= Candidatus Viridilinea halotolerans OX=2491704 GN=folE PE=3 SV=1
MHTNGNGHHHAVVSDFDTHDYEPLIVRGRGKLEGVSYGSDPRTEDAVREILIGIGEQPEREGLLKTPSRVAKMYAELTAGYHIDPDALINDAIFSVGYDEMVLVKNIDFSSLCEHHMLPFMGQVHVAYIPQGKVVGLSKIPRIVEMFARRLQVQERMTVQIADFINDRLDPLGVAVVAEGVHMCSVMRGVKKANASMVTSAMRGVFRDDPKTRAEFMAHVNRTRSFEG

SEQ ID NO: 6381 - protein, 248 aa, Westeberhardia cardiocondylae
  misc_feature (1)..(248): tr|A0A0H5BX58|A0A0H5BX58_9ENTR Putative GTP cyclohydrol ase 1 type 2 OS=Candidatus Westeberhardia cardiocondyla e OX=1594731 GN=ybgI PE=4 SV=1
MLNVDLEFLVNQKIDGNQHDDYAPNGLQVEGRRNIQNIVTGVTFCKKLIDIAVKCNADAIIVHHGCFWKNDSPVITGIKYKRLQALLTNNINLYAWHFPLDIHPELGNNAQLAKRLKIKKISLLGKFVMQGELSIPSHGIAFNKNIKEALHCYHVWHFFERAPSIIKKIAWCTGKGQNFIKLAIQNNLDAFISGEVSEETMHLAKEGRIHFYSVGHYATERVGIQALGKWLMKKYNLNVIFIDIPNPI

SEQ ID NO: 6382 - protein, 287 aa, Woesebacteria bacterium
  misc_feature (1)..(287): tr|A0A2H0BJD0|A0A2H0BJD0_9BACT GTP cyclohydrolase FolE2 OS=Candidatus Woesebacteria bacterium CG22_combo_CG10- 13_8_21_14_all_39_10 OX=1975059 GN=folE2 PE=3 SV=1
MLNYNQSFNIMIMGKYMGAHLKDLQSQNDNRGISLELVGITKLALPLLIPSKNGDPKQVNALVSFFTDLPHHSRGTHMSRFVEILYRNRLNHLTFKALKKIASEAKKKLKAENAYLEVSFTYLIEKQSPVSKKYSFVDYECKTIFKVNCGDYEQRLIVKVPVLLLCPCSKAISKCNAHNQRAMVTVDADLIDKFWIEDLIKLVEKEGSCEVYPLLKRPDEKYVTEKSYENPKFVEDVVRDIALKLKNLASIRSFIVECESYESIHNHNAYARFTSNGVLRGGENANS

SEQ ID NO: 6383 - protein, 194 aa, Woesebacteria bacterium
  misc_feature (1)..(194): tr|A0A0G0X7H8|A0A0G0X7H8_9BACT GTP cyclohydrolase 1 OS= Candidatus Woesebacteria bacterium GW2011_GWA1_41_13b O X=1618555 GN=folE PE=3 SV=1
MVNSRTGTYDSLEELARQVISLTGEDPNREGLKETPKRVAKTYKELLSGYEMDPSHEITMFDSNGFNELVSVTEIDFYSLCEHHMLPFFGKVHIGYVPDKKILGLSKFSRIVDIYSRRLQTQENLTKQIFDLLENKLSPKGLIVSIEARHLCVRMRGVKEKGSSTKTTIKNGILLKRRDFADQFFIDSHLKVIS

SEQ ID NO: 6384 - protein, 182 aa, Xenolissoclinum pacificiensis
  misc_feature (1)..(182): tr|W2V2R3|W2V2R3_9RICK GTP cyclohydrolase 1 OS=Candidat us Xenolissoclinum pacificiensis L6 OX=1401685 GN=P857_ 1143 PE=3 SV=1
MNFEDITKYIIEYIGDDPNRMDLKDTPERFKQYMDFVFSGYNMTNPIENSSLYRSTSDQMICIKKVSFISHCEHHVAPIIGEISLGYIPDLLIASLGSLLRTVQMFTRRLQIQERIVQQITDFIYEKTQSRGVISLIKAHHHCLICNASVLESDTEMCSLYYNGIFLEDENKRNDFLSTVKN

SEQ ID NO: 6385 - protein, 277 aa, Xiphinematobacter sp.
  misc_feature (1)..(277): tr|A0A0P0GB44|A0A0P0GB44_9BACT GTP cyclohydrolase FolE2 OS=Candidatus Xiphinematobacter sp. Idaho Grape OX=170 4307 GN=folE2 PE=3 SV=1
MKSIDYSLIDTQSSLDHRKIAIKRVGIKNLRYPVQIRDKQRHTLQSTIATVLLTVDLPAHRRGTHMSRFIEALHSHSSILHVENIYDIPIQLQRKLQSFGAHMELEFPFFLEKKAPVTHSSGLIDYTVRLGVTLVGEERDFMLTVVVPITTLCPCSKAISIQGAHSQRGQVACSARFERPMWIEDLIRMVEKSASCELYSLLKRPDEKAVTEHAYTHPVFVEDLVRNIAILAEENSKIVWYRIEAENFESIHNHNAYALVEREATGSTKKCDPYCLR

SEQ ID NO: 6386 - protein, 251 aa, Xiphinematobacter sp.
  misc_feature (1)..(251): tr|A0A0P0FIN6|A0A0P0FIN6_9BACT Putative GTP cyclohydrol ase 1 type 2 OS=Candidatus Xiphinematobacter sp. Idaho Grape OX=1704307 GN=ybgI PE=4 SV=1
MAFLRDIVPYLDHLLYIHRFGDAPGAYNGLQLENSGKIEKIAAAVDACEAVIDRAAQVGRTLLLVHHGLFWGENRRWIGATYRRFRSAISGDLAIYSAHLPLDVHPRHGNNVLLAQACGFTRCQPFLEVSGTYVGVRVEVKLSRVDVLNRVAEAVCGGVHLASGGPETCCHVGIVSGSAGSKIAQAAADGIDTLITGEGAHWTCIAAEESRVNLIYAGHYATETFGIRSVAKHLSEYLNLPWEFIDHPTGR

SEQ ID NO: 6387 - protein, 258 aa, Candidimonas bauzanensis
  misc_feature (1)..(258): tr|A0A1M5ZQE1|A0A1M5ZQE1_9BURK GTP cyclohydrolase FolE2 OS=Candidimonas bauzanensis OX=658167 GN=folE2 PE=3 SV =1
MPDVQSSVDTRHIAIERVGVRGVRHPMLIAAADGAAPLPTVATWELTVALPAREKGTHMSRFVALLEEHRRIPMTPVLFCGMADAMLALLNAEKGDIAASFPYFMSKVAPVSGVTSLMDYEVKWIARAQSDAAEFELSVLVPVTSLCPCSKAISDYGAHNQRSHITVNAVFSNPASVDIDALIRAIEQQASCELWGLLKRGDEKFVTERAYENPKFVEDLVRDVAVQLKSLAGVRRFRVEAENFESIHNHSAYAVVEG

SEQ ID NO: 6388 - protein, 276 aa, Candidimonas nitroreducens
  misc_feature (1)..(276): tr|A0A225M9X5|A0A225M9X5_9BURK GTP cyclohydrolase FolE2 OS=Candidimonas nitroreducens OX=683354 GN=folE2 PE=3 SV=1
MSAYAILPPIPDTPTAGLPDIQARPDVRGVALDAVGVKGLRHPLTLHGDHGQQPVVATLAMTVGLPAASKGTHMSRFIEVLEARPAIVGQAGMRTLVYAMLARLDASSGCIEMSFPYFVRKTAPVSGTSSLLDYDIAWRGEVDADGIYRFRMRVTVPVTSLCPCSKEISAYGAHNQRSLITIEAELREAMAIEDLIALAERNASCEVYGLLKRPDEKYVTERAYDNPKFVEDLVRDVALALQREPRVGAYRVEAENFESIHNHSAYARIARPAAAA

SEQ ID NO: 6389 - protein, 267 aa, Candidimonas nitroreducens
  misc_feature (1)..(267): tr|A0A225M4H2|A0A225M4H2_9BURK GTP cyclohydrolase FolE2 OS=Candidimonas nitroreducens OX=683354 GN=folE2 PE=3 SV=1
MNSLTDPLVAMPDVQSSVDTRHIPIQRVGVRGVRHPMLVAGAGGQAMPTVAQWELTVALPAEEKGTHMSRFVALLEQYRSRPMTPALFCDMARDMLPLLHAVKGDITASFPYFIEKVAPVSGVASLMDYELTWTARAEGDAVAFELAVLVPVTSLCPCSKAIADYGAHNQRSHVTVRVAYGDPAQANVDDLIRRIEQQGSSELWGLLKRTDEKFVTERAYENPKFVEDLVRDVAAQVKTVAGVQRFHIEAENFESIHNHSAYAVVEG

SEQ ID NO: 6390 - protein, 277 aa, Candidimonas sp.
  misc_feature (1)..(277): tr|A0A522QLF1|A0A522QLF1_9BURK GTP cyclohydrolase FolE2 OS=Candidimonas sp. OX=1912597 GN=folE2 PE=3 SV=1
MYASQRHALLPDIQSRTDPRGLALDQVGIKGVRYPVTIDTPAGLQPTVATLTMTVSLPAAAKGTHMSRFIEVLAAHAGALDQAGFRTLVHDMLRRLNADAGSITMAFPYFIRKTAPISGEASLLDYDVVWHGEFRHDDTYHFHVHVTVPVTSLCPCSKEISDYGAHNQRSLIGIEAELARNMPLEDLVGIAERNASCEVYGLLKRPDEKYVTEHAYDNPKFVEDLVRDVALALEHEPRVAAWRVEAENFESIHNHSAFASVSSRNALGRPAVYAVKS

SEQ ID NO: 6391 - protein, 267 aa, Candidimonas sp.
  misc_feature (1)..(267): tr|A0A522KC10|A0A522KC10_9BURK GTP cyclohydrolase FolE2 OS=Candidimonas sp. OX=1912597 GN=folE2 PE=3 SV=1
MNSLIERVVAMPDVQSTVDTRHIAIQRVGIRGVRHPMLVAGPNGQAIPTVALWELTVALPPEEKGTHMSRFVALLEQYRAVPMTPALFCEMARSMLPLLHAQKGDIAASFPYFLNKFAPVSGVASLMDYELKWIARVGADALEFELSVLVPVTSLCPCSKAISEYGAHNQRSHVTVNVVFDAAASIDVEGLIRTVEAQASCELWGLLKRVDEKFVTERAYENPKFVEDLVRDVAAQVKQLAGVQRFRIEAENFESIHNHSAYAVVEG

SEQ ID NO: 6392 - protein, 224 aa, Capnocytophaga canimorsus
  misc_feature (1)..(224): tr|F9YRM7|F9YRM7_CAPCC GTP cyclohydrolase 1 OS=Capnocyt ophaga canimorsus (strain 5) OX=860228 GN=folE PE=3 SV= 1
MKNEQISQEDFLGENHISTSAKTPLRDDAFELSEEEKIARIEKAMADIMHTLGLDLTDDSLKGTPRRVAKAYVKEIFGGLNPSRKPGSSTFANNYHYGEMLVEKNIVVYSTCEHHFLPIVGRAHVGYISNGKVIGLSKMNRIVEYFAKRPQVQERLTMQIVQEMQKVLGTEDVACVIDAKHLCVNSRGIKDIESSTVTAEFGGKFKDLAVRKEFLDYIKLETKY

SEQ ID NO: 6393 - protein, 224 aa, Capnocytophaga canimorsus; identical to SEQ ID NO: 6392
  misc_feature (1)..(224): tr|A0A0B7IGR8|A0A0B7IGR8_9FLAO GTP cyclohydrolase 1 OS= Capnocytophaga canimorsus OX=28188 GN=folE PE=3 SV=1

SEQ ID NO: 6394 - protein, 224 aa, Capnocytophaga canis
  misc_feature (1)..(224): tr|A0A0B7HY07|A0A0B7HY07_9FLAO GTP cyclohydrolase 1 OS= Capnocytophaga canis OX=1848903 GN=folE PE=3 SV=1
MIDKHNSEEDILGDNHVCTSAKTPLRNDAFDKSDSEKIDAIEKNVREIMHTLGLDLDDDSLRGTPKRVAKMFVKEIFGGLHPDRKPSASTFDNSYKYGEMLVEKNIVVYSTCEHHLLPIIGRAHVGYISNGRVIGLSKMNRIVEYYAKRPQVQERLTMQIVQEMQQALGTEDVACVIDAKHLCVNSRGIKDIESSTVTAEFGGKFKDPQIRKEFLEYIKLETRF

SEQ ID NO: 6395 - protein, 224 aa, Capnocytophaga cynodegmi
  misc_feature (1)..(224): tr|A0A250E8F1|A0A250E8F1_9FLAO GTP cyclohydrolase 1 OS= Capnocytophaga cynodegmi OX=28189 GN=folE PE=3 SV=1
MANKHISEEDALGDNHVCTSAKTPLRTDAFEKTDAEKISIIEENIRQIMHTLGLDLTDDSLRGTPKRVAKMFVKEIFGGLHPDRRPSASTFDNSYQYGEMLVEKNIVVYSTCEHHLLPIVGRAHVGYISNGKVIGLSKMNRIVEYYAKRPQVQERLTLQIVQEMQQALGTEDVACVIDAKHLCVNSRGIKDIESSTVTAEFGGKFKDPEVRKEFLEYIKLNTKY

SEQ ID NO: 6396 - protein, 224 aa, Capnocytophaga cynodegmi
  misc_feature (1)..(224): tr|A0A0B7HMY6|A0A0B7HMY6_9FLAO GTP cyclohydrolase 1 OS= Capnocytophaga cynodegmi OX=28189 GN=folE PE=3 SV=1
MANKHISEEDALGDNHVCTSAKTPLRTDAFEKTDAEKISIIEENIRQIMHTLGLDLTDDSLKGTPKRVAKMFVKEIFGGLHPDRRPSASTFDNSYQYGEMLVEKNIVVYSTCEHHLLPIVGRAHVGYISNGKVIGLSKMNRIVEYYAKRPQVQERLTLQIVQEMQQALGTEDVACVIDAKHLCVNSRGIKDIESSTVTAEFGGKFKDPEVRKEFLEYIKLNTKY

SEQ ID NO: 6397 - protein, 220 aa, Capnocytophaga gingivalis
  misc_feature (1)..(220): tr|C2M8R8|C2M8R8_CAPGI GTP cyclohydrolase 1 OS=Capnocyt ophaga gingivalis OX=553178 GN=folE PE=3 SV=1
MNHSDDFIGENHISTSAKTPLRADAFSLSDEEKIARIEKSMADIMETLGLDLTDDSLKGTPLRVAKAYVKELFGGLDPKRCPSSSTFENNYHYGEMLIEKNIVLYSTCEHHFLPIVGRAHVGYISNGRVLGLSKMNRIVDYFARRPQVQERLTMQIVQEMQRILGTEDVACVIDAKHLCVNSRGIRDIESSTVTAEYGGKFQDPIVRKEFLEYIKMETKY

SEQ ID NO: 6398 - protein, 220 aa, Capnocytophaga gingivalis
  misc_feature (1)..(220): tr|A0A250FQV6|A0A250FQV6_9FLAO GTP cyclohydrolase 1 OS= Capnocytophaga gingivalis OX=1017 GN=folE PE=3 SV=1
MNHSDDFIGENHISTSAKTPLRADAFSLSDEEKIARIEKSMADIMETLGLDLTDDSLKGTPLRVAKAYVKELFGGLDPKHCPSSSTFENNYHYGEMLIEKNIVLYSTCEHHFLPIVGRAHVGYISNGRVLGLSKMNRIVDYFARRPQVQERLTMQIVQEMQRILGTEDVACVIDAKHLCVNSRGIRDIESSTVTAEYGGKFQDPIVRKEFLEYIKMETKY

SEQ ID NO: 6399 - protein, 220 aa, Capnocytophaga granulosa
  misc_feature (1)..(220): tr|A0A381E117|A0A381E117_9FLAO GTP cyclohydrolase 1 OS= Capnocytophaga granulosa OX=45242 GN=folE PE=3 SV=1
MNPSDDFIGENHLSTSAKTPLRADAFSLSDEEKIARIQKSMADIMETLGLDLTDDSLKGTPLRVAKAYVKELFGGLDPKRCPSSSTFENNYHYGEMLIEKNIVLYSTCEHHFLPIVGRAHVGYISNGRVLGLSKMNRIVDYFARRPQVQERLTMQIVQEMQRILGTEDVACVIDAKHLCVNSRGIRDIESSTVTAEYGGKFQDPIVRKEFLEYIKMETKY

SEQ ID NO: 6400 - protein, 221 aa, Capnocytophaga haemolytica
  misc_feature (1)..(221): tr|A0A0X8JAS0|A0A0X8JAS0_9FLAO GTP cyclohydrolase 1 OS= Capnocytophaga haemolytica OX=45243 GN=folE PE=3 SV=1
MNREEDIIGENHIATSAVTPLRADAFDKSVDEKIAKIEEHVREILLTLGLDLTDDSLKGTPKRVAKAYVKELFGGLLPERKPSASTFNNSYHYGEMLVEKNIVVYSTCEHHLLPIVGRAHVAYISNGKVIGLSKMNRIVEYYAKRPQVQERLTLQIVQEMQNVLGTDDVACIIDAKHLCVNSRGIKDIESSTVTAEFGGKFKDPEVRKEFLEYIKLDTRFH

SEQ ID NO: 6401 - protein, 223 aa, Capnocytophaga leadbetteri
  misc_feature (1)..(223): tr|A0A250F782|A0A250F782_9FLAO GTP cyclohydrolase 1 OS= Capnocytophaga leadbetteri OX=327575 GN=folE PE=3 SV=1
MNKIQEEDIIGDNHVATSAVTPLRADAFEMSEAEKIADIETHMRAILHTLGMDLTDDSLKGTPKRVAKMFVKEIFGGLLPERKPSMSTFDNSYHYGEMLVEKNIVVYSTCEHHLLPIVGRAHVGYISNGKVLGLSKMNRIVEYYAKRPQVQERLTLQIVQEMQRALGTEDVACIIDAKHLCVNSRGIEDIDSSTVTAEFGGKFKDPEVRKEFLEYIKLETRFH

SEQ ID NO: 6402 - protein, 223 aa, Capnocytophaga ochracea
  misc_feature (1)..(223): tr|A0A2X2RQV6|A0A2X2RQV6_CAPOC GTP cyclohydrolase 1 OS= Capnocytophaga ochracea OX=1018 GN=folE PE=3 SV=1
MNKNQEEDILGDNHIATSAVTPLRADAFQMSETEKIAEIETHVRAILHTLGMDLTDDSLKGTPRRVAKMFVKEIFGGLLPERKPSMSTFENSYHYGEMLVEKNIVVYSTCEHHLLPIVGRAHVGYISNGKVLGLSKMNRIVEYYAKRPQVQERLTMQIVQEMQRALGTEDVACIIDAKHLCVNSRGIEDIDSSTVTAEFGGKFKDPEVRKEFLEYIKLDTRFH

SEQ ID NO: 6403 - protein, 223 aa, Capnocytophaga ochracea
  misc_feature (1)..(223): tr|C7M4J0|C7M4J0_CAPOD GTP cyclohydrolase 1 OS=Capnocyt ophaga ochracea (strain ATCC 27872 / DSM 7271 / JCM 129 66 / NCTC 12371 / VPI 2845) OX=521097 GN=folE PE=3 SV=1
MNKNQEEDILGDNHIATSAVTPLRADAFQMSETEKIAEIETHVRAILHTLGMDLTDDSLKGTPKRVAKMFVKEIFGGLLPERKPSMSTFENSYHYGEMLVEKNIVVYSTCEHHLLPIVGRAHVGYISNGKVLGLSKMNRIVEYYAKRPQVQERLTMQIVQEMQRALGTEDVACIIDAKHLCVNSRGIEDIDSSTVTAEFGGKFKDPEVRKEFLEYIKLDTRFH

SEQ ID NO: 6404 - protein, 223 aa, Capnocytophaga sp.
  misc_feature (1)..(223): tr|A0A0A6XYI0|A0A0A6XYI0_9FLAO GTP cyclohydrolase 1 OS= Capnocytophaga sp. oral taxon 329 str. F0087 OX=706436 GN=folE PE=3 SV=1
MNKIQEEDIIGNNHVATSAVTPLRADAFEMSEAEKIADIETHMRAILHTLGMDLTDDSLKGTPKRVAKMFVKEIFGGLLPERKPSMSTFDNSYHYGEMLVEKNIVVYSTCEHHLLPIVGRAHVGYISNGKVLGLSKMNRIVEYYAKRPQVQERLTLQIVQEMQRALGTEDVACIIDAKHLCVNSRGIEDIDSSTVTAEFGGKFKDPEVRKEFLEYIKLETRFH

SEQ ID NO: 6405 - protein, 223 aa, Capnocytophaga sp.; identical to SEQ ID NO: 6402
  misc_feature (1)..(223): tr|A0A2S0LEL5|A0A2S0LEL5_9FLAO GTP cyclohydrolase 1 OS= Capnocytophaga sp. oral taxon 864 OX=1316593 GN=folE PE =3 SV=1

SEQ ID NO: 6406 - protein, 223 aa, Capnocytophaga sputigena
  misc_feature (1)..(223): tr|A0A2A3N3B8|A0A2A3N3B8_CAPSP GTP cyclohydrolase 1 OS= Capnocytophaga sputigena OX=1019 GN=folE PE=3 SV=1
MNKNQKEDILGDNHIATSAVTPLRADAFQLNETEKIAEIETHVRAILHTLGMDLNDDSLKGTPKRVAKMFVKEIFGGLLPERKPSMSTFNNSYHYGEMLVEKNIVVYSTCEHHLLPIVGRAHVGYISNGKVLGLSKMNRIVEYYAKRPQVQERLTMQIVQEMQQALGTEDVACIIDAKHLCVNSRGIEDIDSSTVTAEFGGKFKDPEVRKEFLEYIKLETRFH

SEQ ID NO: 6407 - protein, 223 aa, Capnocytophaga sputigena
  misc_feature (1)..(223): tr|A0A3S4Y5B0|A0A3S4Y5B0_CAPSP GTP cyclohydrolase 1 OS= Capnocytophaga sputigena OX=1019 GN=folE PE=3 SV=1
MNKNQKEDILGDNHIATSAVTPLRADAFQLNETEKIAEIETHVRAILHTLGMDLNDDSLKGTPKRVAKMFVKEIFGGLLPERKPSMSTFNNSYHYGEMLVEKNIVVYSTCEHHLLPIVGRAHVGYISNGKVLGLSKMNRIVEYYAKRPQVQERLTMQIVQEMQQALGTEDVACIIDAKHLCVNSRGIEDIDSSTVTAEFGGKFKNPEVRKEFLEYIKLETRFH

SEQ ID NO: 6408 - protein, 224 aa, Capnocytophaga stomatis
  misc_feature (1)..(224): tr|A0A250FXV2|A0A250FXV2_9FLAO GTP cyclohydrolase 1 OS= Capnocytophaga stomatis OX=1848904 GN=folE PE=3 SV=1
MTDKHISEEDILGDNHVCTSAKTPLRADAFDKTDAEKISIIEENIRQIMHTLGLDLTDDSLRGTPKRVAKMFVKEIFGGLHPDRRPSASTFDNNYQYGEMLVEKNIVVYSTCEHHLLPIVGRAHVGYISNGKVIGLSKMNRIVEYYAKRPQVQERLTLQIVQEMQRALGTEDVACVIDAKHLCVNSRGIKDIESSTVTAEFGGKFKNPEVRKEFLEYIKLDTKY

SEQ ID NO: 6409 - protein, 264 aa, Caproiciproducens galactitolivorans
  misc_feature (1)..(264): tr|A0A4Z0XXB0|A0A4Z0XXB0_9FIRM Putative GTP cyclohydrol ase 1 type 2 OS=Caproiciproducens galactitolivorans OX= 642589 GN=CAGA_16300 PE=4 SV=1
MIFVGDIYDFIDGMAPFHTAMDFDNPGLLVGGRNMSVQSALLSLDITPAVVREAKEVQADLIISHHPVIFRPLKRIDTDTAPYLLAKYDIAAICAHTNLDMAAEGVNTCLAKRLGLKNIHMLKEYGNTGLPEGLVGETEREYSPRAFAEFVRDALGCDGLRYTDGGRAVSKVGLCSGGGADLVYDAAEYGCQAFVTGESKHNILLDAENMRVTMVDAGHFYTEDVVIEPLMEKLQKQFPQVRFAKSKRMHSPAKTIGCTRTGGI

SEQ ID NO: 6410 - protein, 222 aa, Capsulimonas corticalis
  misc_feature (1)..(222): tr|A0A402CP50|A0A402CP50_9BACT GTP cyclohydrolase 1 OS= Capsulimonas corticalis OX=2219043 GN=folE PE=3 SV=1
MSFLPTTDEENIEDLEIRPSRDQRPTGGGSKKNVSQEELEDKYRDILTFVGEDPDREGLLRTPHRVAEALKFLTSGYKQDVETLLNGAIFHEDYDDMVVVKDIEFYSMCEHHMLPFYGKVHVAYIPDGKIVGLSKIPRLVDMFSRRLQVQERLTTEIAEAIETALSPRGVAVVIEGAHMCMLMRGVQKQASTMVTSHVMGLFRDDRATRQEFMALVKGNSRA

SEQ ID NO: 6411 - protein, 186 aa, Carboxydocella sporoproducens
  misc_feature (1)..(186): tr|A0A1T4LPG8|A0A1T4LPG8_9FIRM GTP cyclohydrolase 1 OS= Carboxydocella sporoproducens DSM 16521 OX=1121270 GN=f olE PE=3 SV=1
MDIRKIETAMRMILEAIGEDPEREGLRDTPKRVARMYEEIFHGLENDPREHLQVLFTEDHDEMVLVKDIPFYSMCEHHFLPFFGKAHVAYIPAKGKITGLSKLARVVEGYAKRPQLQERLTSQIADAIMECLQPRGVLVVVEAEHMCMTMRGVKKPGSYTTTSAVRGIFKTNNATRAEAFSLINSN

SEQ ID NO: 6412 - protein, 186 aa, Carboxydocella thermautotrophica; identical to SEQ ID NO: 6411
  misc_feature (1)..(186): tr|A0A2R4N0C8|A0A2R4N0C8_9FIRM GTP cyclohydrolase 1 OS= Carboxydocella thermautotrophica OX=178899 GN=folE PE=3 SV=1

SEQ ID NO: 6413 - protein, 192 aa, Carboxydothermus hydrogenoformans
  misc_feature (1)..(192): sp|Q3ADI2|GCH1_CARHZ GTP cyclohydrolase 1 OS=Carboxydot hermus hydrogenoformans (strain ATCC BAA-161 / DSM 6008 / Z-2901) OX=246194 GN=folE PE=3 SV=1
MVDKEKIEIAVRMILEAIGEDPDREGLKDTPKRVARMYEEVFAGLSQDPSEHLERYFTEEHEEMVLVKDIPLYSMCEHHLLPFYGKAHVAYIPRKGKVTGLSKLARVVEGFAKRPQLQERLTSQIADAIMEKLNPRGVLVVIEAEHMCMTMRGVKKPGSKTITSAVRGIFATSVATRAEAMALIGHQSPLRD

SEQ ID NO: 6414 - protein, 192 aa, Carboxydothermus islandicus; identical to SEQ ID NO: 6413
  misc_feature (1)..(192): tr|A0A1L8D4L7|A0A1L8D4L7_9THEO GTP cyclohydrolase 1 OS= Carboxydothermus islandicus OX=661089 GN=folE PE=3 SV=1

SEQ ID NO: 6415 - protein, 192 aa, Carboxydothermus pertinax
  misc_feature (1)..(192): tr|A0A1L8CUE5|A0A1L8CUE5_9THEO GTP cyclohydrolase 1 OS= Carboxydothermus pertinax OX=870242 GN=folE PE=3 SV=1
MVDKEKIEIAVRMILEAIGEDPEREGLKDTPKRVARMYEEVFAGLSQDPSEHLERYFAEEHEEMVLVKDIPLYSMCEHHLLPFYGKAHVAYIPRKGKVTGLSKLARVVEGFAKRPQLQERLTSQIADAIMERLNPRGVLVVIEAEHMCMTMRGVKKPGSKTITSAVRGIFATSVATRAEAMALIGHQSPLRD

SEQ ID NO: 6416 - protein, 207 aa, Carboxylicivirga sp.
  misc_feature (1)..(207): tr|A0A553GMX8|A0A553GMX8_9BACT GTP cyclohydrolase 1 OS= Carboxylicivirga sp. M1479 OX=2594476 GN=folE PE=3 SV=1
MEFTLNGKKGYSKVESYDDETTNDLSNHYKKILESLGEDTEREGLEKTPLRVAKAMQFLTQGYHMDPEEIIKSAMFREDYQQMVVVKDIELYSMCEHHMLPFFGKAHVAYIPRHHITGLSKLARVVEAFARRLQVQERLTTQIKECIQDTLNPLGVAVVIEAQHMCMQMRGVQKQHSVTTTSDFTGAFQKNLATREEFMKIISARLH

SEQ ID NO: 6417 - protein, 263 aa, Cardiobacterium hominis
  misc_feature (1)..(263): tr|C8N6T9|C8N6T9_CARH6 GTP cyclohydrolase FolE2 OS=Card iobacterium hominis (strain ATCC 15826 / DSM 8339 / NCT C 10426 / 6573) OX=638300 GN=folE2 PE=3 SV=1
MNQTTIPDVQGKPDTRNIAITRVGIRDIRMPLHIATPHGPQPTVATAEMTVALPHHQKGTHMSRFIHLLNEAGAISLDGFAALHGEMLKRLNAAEGSILLTFPYFVKKQAPVSKTESLMDYEVTLIADGGHEDCIVSVEVTIAVTSLCPCSKEISQYGAHNQRSHIIINAEYDEKTPFALEDLIRIGEEEGSCEIWATLKRPDEKYVTERAYENPKFVEDIVRDVAARLNADPRIKAYRVSSENFESIHNHSAYAIIEHDKRD

SEQ ID NO: 6418 - protein, 268 aa, Cardiobacterium hominis
  misc_feature (1)..(268): tr|A0A1C3H2B0|A0A1C3H2B0_9GAMM GTP cyclohydrolase FolE2 OS=Cardiobacterium hominis OX=2718 GN=folE2 PE=3 SV=1
MKSKTMNQTTIPDVQGKPDTRNIAITRVGIRDIRMPLHIATPHGPQPTVATAEMTVALPHHQKGTHMSRFIHLLNEAGAISLDGFAALHGEMLKRLNAAEGSILLTFPYFVKKQAPVSKTESLMDYEVTLIADGGHEDCIVSVEVTIAVTSLCPCSKEISQYGAHNQRSHIIINAEYDEKTPFALEDLIRIGEEEGSCEIWATLKRPDEKYVTERAYENPKFVEDIVRDVAARLNADPRIKAYRVSSENFESIHNHSAYAIIEHDKRD

SEQ ID NO: 6419 - protein, 359 aa, Cardiobacterium valvarum
  misc_feature (1)..(359): tr|G9ZD60|G9ZD60_9GAMM GTP cyclohydrolase FolE2 OS=Card iobacterium valvarum F0432 OX=797473 GN=folE2 PE=3 SV=1
MMQVARYVAEDQGAARHHLAVQESVAGKKTVQGAALWRRPVEHRRHAEAVRVCGFKLHIFRGKTERHAYCGRGGGAVKRCGCRYNARLLSTIENTMTDTTIPDVQGKPDTRHIAITRVGIRDIRLPLRVINKDGSTQDTVATAEMTVALPHHQKGTHMSRFIHLLNETAVLDPATFAALHAEMLARLKAEEGSIELTFPFFIKKQAPVSKTESLLDYRVRLLADGNRAHCEVRVEVTVAVTSLCPCSKEISQYGAHNQRSHIIINAVYDPAAPFAIEELIRIGEEEGSCEIWATLKRPDEKYVTERAYENPKFVEDIVRDVAARLNDDARIQAYRVSSENFESIHNHSAYAQITCDKRV

SEQ ID NO: 6420 - protein, 264 aa, Cardiobacterium valvarum
  misc_feature (1)..(264): tr|A0A381DYE5|A0A381DYE5_9GAMM GTP cyclohydrolase FolE2 OS=Cardiobacterium valvarum OX=194702 GN=folE2 PE=3 SV =1
MTDTTIPDVQGKPDTRHIAITRVGIRDIRLPLRVINKDGSTQDTVATAEMTVALPHHQKGTHMSRFIHLLNETAVLDPATFAALHTEMLARLKAEEGSIELTFPFFIKKQAPVSKTESLLDYRVRLLADGNRAHCEVRVEVTVAVTSLCPCSKEISQYGAHNQRSHIIINAVYDPATPFAIEELIRIGEEEGSCEIWATLKRPDEKYVTERAYENPKFVEDIVRDVAARLNDDARIQAYRVSSENFESIHNHSAYAQITCDKRV

SEQ ID NO: 6421 - protein, 187 aa, Carnobacterium sp.
  misc_feature (1)..(187): tr|A0A5C1L6Q4|A0A5C1L6Q4_9LACT GTP cyclohydrolase 1 OS= Carnobacterium sp. PL17GRE32 OX=2592355 GN=folE PE=3 SV =1
MTIMDMERIEKAVREILLAVGEDPDREGLVETPERVAKMYAEIFDGLNRDPRIHTEKTFSESASEFVLVKDISFHSTCEHHLLPVIGQAHVAYIPKNGQVIGLSKLARIVEDFALRPQLQERLTNQVADVLAEELGAEGVFVVLEAEHMCMTLRGIKKPGAKTVTYATRGAYTDRGRRQEVLDMMNL

SEQ ID NO: 6422 - protein, 184 aa, Carnobacterium sp.
  misc_feature (1)..(184): tr|A0A5C1LNK0|A0A5C1LNK0_9LACT GTP cyclohydrolase 1 OS= Carnobacterium sp. PL26RED25 OX=2592352 GN=folE PE=3 SV =1
MDMERIEKAVREILLAVGENPDREGLVETPERVAKMYAEVFDGLNRNPRIHTEKTFSESASEFVLVKDIPFHSTCEHHLLPVIGQAHVAYIPKDGQVIGLSKLARIVEDFALRPQLQERLTNQVADVLAEELGAEGVFVVLEAEHMCMTLRGIKKPGAKTVTYATRGAYTDRGRRQEVLDMMNL

SEQ ID NO: 6423 - protein, 189 aa, Caryophanon latum
  misc_feature (1)..(189): tr|A0A1C0YQP1|A0A1C0YQP1_9BACL GTP cyclohydrolase 1 OS= Caryophanon latum OX=33977 GN=folE PE=3 SV=1
MTNVDLNKIEQAVKMILEAVGEDVNREGLLDTPKRVSKMYAEMFSGLQMDPREYFSTVFHEDHEEFVLVKDIGFHSMCEHHLVPFYGKAHVAYIPQDGKVAGLSKLGRCVETVARRPQLQERITSTVADTIMEMLQPKGVYVVVEAEHMCMTMRGLKKPGAKTITSVARGVYETDDVKRQEIISFIQMS

SEQ ID NO: 6424 - protein, 189 aa, Caryophanon tenue
  misc_feature (1)..(189): tr|A0A1C0Y4Y0|A0A1C0Y4Y0_9BACL GTP cyclohydrolase 1 OS= Caryophanon tenue OX=33978 GN=folE PE=3 SV=1
MTNVDLKKIEQAVKMILEAVGEDVNREGLQDTPKRVSKMYAEMFSGLQQDPREYFSTVFHEDHEEFVLVKDISFHSMCEHHLVPFYGKAHIAYIPKDGKVAGLSKLGRCVETVARRPQLQERITSTVADTIMEMLEPKGVYVVIEAEHMCMTMRGLKKPGAKTVTSVARGVYEEDNVKRQEIISFIQMS

SEQ ID NO: 6425 - protein, 270 aa, Castellaniella defragrans
  misc_feature (1)..(270): tr|W8X4Q4|W8X4Q4_CASDE GTP cyclohydrolase FolE2 OS=Cast ellaniella defragrans 65Phen OX=1437824 GN=folE2 PE=3 S V=1
MNTLLDPVAMSMPDVQSGPDTRRIAIERVGVRGVRHPLVVASGAGRPQATVADWEMTVALPADEKGTHMSRFIALLEAHRGEPMTPAALCALARSMLDLLHADAGDVAAGFPYFIEKPAPVSGVRSLMDYQVRWRVGVRRGEAPRFSLSVQVPVTSLCPCSKAISDYGAHNQRSHVCVDLEYDAVDAVDLDALIRGVESQASSELWGLLKRADEKFVTERAYENPKFVEDLVRDVAVMLQRLPGVASYQVTAENFESIHNHSAYAVVRSA

SEQ ID NO: 6426 - protein, 273 aa, Castellaniella defragrans
  misc_feature (1)..(273): tr|W8X379|W8X379_CASDE GTP cyclohydrolase FolE2 OS=Cast ellaniella defragrans 65Phen OX=1437824 GN=folE2 PE=3 S V=1
MNTLLDPLAVSMPDVQSGPDMRGISIQRVGVRGVRYPLRLAADANPSRQVVADWEMTVALSAADKGTHMSRFIEVLESWRETPLSAEGFCRMARAVYERLGVESADVSARFPYFLEKAAPVSGLRSLMDYQVVWTARAARGAPARFSQHVRVPVTSLCPCSKAISDYGAHNQRSHVLVRLEYGSPVAADLDALIRGVETRASAELWGLLKREDEKFVTERAYENPKFVEDLVRDVAVLVRRLPGVASYEVEAENFESIHNHSAYAIVISANAQ

SEQ ID NO: 6427 - protein, 270 aa, Castellaniella sp.
  misc_feature (1)..(270): tr|A0A522TXC0|A0A522TXC0_9BURK GTP cyclohydrolase FolE2 OS=Castellaniella sp. OX=1955812 GN=folE2 PE=3 SV=1
MNTLLDSVAAVMPDVQSSPDTRRIAIQRVGVRGVRHPLLVAAGMGQPQATIAEWEMTVALPAESKGTHMSRFIALLESYRSVPMTPQRLCEMAQAMLDRLQADSGDLTVDFPYFIEKPAPVSEVRSLMDYQVGWRVRAQRGQAARFTLQVQVPVTSLCPCSKAISEYGAHNQRSHVTVRLDFEAVPSLDLELLVHRIEAQASSELWGLLKRADEKYVTEHAYENPKFVEDLVRDVAVMLQRQPGVAAYEVAAENFESIHNHSAYAMVRSA

SEQ ID NO: 6428 - protein, 209 aa, Castellaniella sp.
  misc_feature (1)..(209): tr|A0A522TGK6|A0A522TGK6_9BURK GTP cyclohydrolase 1 OS= Castellaniella sp. OX=1955812 GN=folE PE=3 SV=1
MLECDQAIFPPAAAVTARITEAPRPSRAEAEAAVCTLIRWAGDEPSREGLLATPARVVRAYEEWFSGYRLDPANLLSRTFDEVGGYDDLVMLRDIPLQSTCEHHMAAIRGVVHIAYLPNRRVVGISKLARLVEAFGRRLQIQERLTVEIADTLAHVLQPRGVAVIVQASHECLSSRGVRLHGVSMLTRRLLGEFAQEPQRREILVALSD

SEQ ID NO: 6429 - protein, 240 aa, Catalinimonas alkaloidigena
  misc_feature (1)..(240): tr|A0A1G9NB98|A0A1G9NB98_9BACT GTP cyclohydrolase 1 OS= Catalinimonas alkaloidigena OX=1075417 GN=folE PE=3 SV= 1
MKPNETSSSTLSTERNGYSRNGQSPQELGDDHISTGDETPLREDAFDMDDETKMELIEKHFAQIMHILGLDLDDDSLRGTPRRVAKMYVQEIFSGLHPDNKPHATLFENQYRYNEMLVEKDITFYSNCEHHFVPIFGRAHVGYISNGKVIGLSKINRIVQYFAKRPQVQERLTVQIINELKRVLQTEDVAVVIDAKHMCVSSRGIQDDTSTTVTAKYSGKFQEEATKSEFLSHIYNTQPK

SEQ ID NO: 6430 - protein, 204 aa, Catellatospora citrea
  misc_feature (1)..(204): tr|A0A419XJK3|A0A419XJK3_9ACTN GTP cyclohydrolase 1 OS= Catellatospora citrea OX=53366 GN=folE PE=3 SV=1
MLPLIATETPPVTPASSLRPMIDQDAAERAAAALLTALGVPLDTPSTQRTPARMVKAYAELLTPREYVPTVFPNEAGYRELVLARQVPFVSLCAHHMLPFVGTAHLGYLPGERILGLSKLARLLSSAAARPQIQEVLTQQLGDWLESQLKPGGAAVVVTAEHMCMTLRGAGAMGSTVTTSTWRGSLADPAARAQFMAMAGEGAR

SEQ ID NO: 6431 - protein, 191 aa, Catellatospora citrea
  misc_feature (1)..(191): tr|A0A419XLS5|A0A419XLS5_9ACTN GTP cyclohydrolase 1 OS= Catellatospora citrea OX=53366 GN=folE PE=3 SV=1
MEETVDLARIEKAVREILLALGEDPDRDGLQKTPSRVARAYAELFAGLRANPADVLKTTFEADHDEFVLVRDISIFSLCEHHLLPFRGVAHVGYLPGEDGRITGLSKLARLVEVFARRPQVQERLTSQVADLLQEQLQARGVIVVLECEHMCMEMRGIRKAGARTVTSAVRGILKSDPKTRAEAMSLINSR

SEQ ID NO: 6432 - protein, 212 aa, Catenovulum agarivorans
  misc_feature (1)..(212): tr|W7R3C4|W7R3C4_9ALTE GTP cyclohydrolase 1 OS=Catenovu lum agarivorans DS-2 OX=1328313 GN=folE PE=3 SV=1
MASEAALKVKQALIARNLETPQVDTSLLPEEKKVKIAEHMSNVMQLLGLDLTDDSLSETPKRIAKMYVDEIFGGLNYDNFPKITDIENKMGVDEMITVDQISVSSTCEHHFITIDGYARVAYIPQDKVIGLSKINRIVRFFAQRPQVQERLTQQILIALQTLLETDDVAVSIKATHFCVKARGVMDANSLTQTTALGGLFKTNPSTRQEFLR

SEQ ID NO: 6433 - protein, 309 aa, Catenovulum agarivorans
  misc_feature (1)..(309): tr|W7QK21|W7QK21_9ALTE GTP cyclohydrolase FolE2 OS=Cate novulum agarivorans DS-2 OX=1328313 GN=folE2 PE=3 SV=1
MPTSMPDIANQSAAQHEGELDWVGMSEIEVPIMIAAKDEHERAVSARVEAFVNLTQAKAKGIHMSRLYLLLDQLSTEGSLTKESLTQLLNDFIDSHEELSDKAFVKFTFDYHMRRRSLISGKQGWKAYPVTIIGYFAEGQITTEMQVDVPYSSTCPCSAALARQLIQQAFSEKFGEENALDAKEVRQWLGTTEGIVATPHSQRSIAEVKVKLADEVTGFPITDIVDTVEQALKTPVQAAVKREDEQEFARLNGQNLMFCEDAGRRLKHALNQIPGYLDFWIRVNHYESLHAHDAVSVSTKGIAGGYRAY

SEQ ID NO: 6434 - protein, 309 aa, Catenovulum maritimum
  misc_feature (1)..(309): tr|A0A0J8GWU8|A0A0J8GWU8_9ALTE GTP cyclohydrolase FolE2 OS=Catenovulum maritimum OX=1513271 GN=folE2 PE=3 SV=1
MPTSMPDIANQSSAQTEGILDWVGMSEIEIPLMITAKGEPERPVSAKVEAFVNLMQATAKGIHMSRLYLLLDQLSTQGSLTKSSLLELLDNFISSHEELSDKAFVKFNFDYHMRRKSLISGKQGWKAYPIEIKGYFVEGEATIEMKVDVPYSSTCPCSAALARQLIQKSFNTKFAEQEFVSQQEVHKWLGTTEGIVATPHSQRSIAEIRVKLTTEVEEFPIGDLVDLIEQALQTPVQAAVKREDEQEFARLNGQNLMFCEDAGRRLKHALNLIPGYSDFWIRVNHYESLHAHDAVSVSTKGVENGYKAY

SEQ ID NO: 6435 - protein, 309 aa, Catenovulum sp.
  misc_feature (1)..(309): tr|A0A2S0VW62|A0A2S0VW62_9ALTE GTP cyclohydrolase FolE2 OS=Catenovulum sp. CCB-QB4 OX=2172099 GN=folE2 PE=3 SV =1
MPTAMPDIANSATAQTEGTLDWVGMSEIEVPIMVAAKNEAERPVSARVEAFVNLNEAKAKGIHMSRLYLLLDKLSTEDTLNLQNLTTLLQHFIESHQELSDRAFIKFNFDYHMRRKSLISGKQGWKAYPVEIVGVYLDGHIETELKIDVPYSSTCPCSAALARQLIQQAFEDKYGHEDTVNKADVHEWLGTTEGIVATPHSQRSIAEVKVKLSKEVEDFPITDLVDAIESALSTPVQAAVKRADEQEFARLNGQNLMFCEDAGRRLTHALNLVPGYSDFWVRVNHYESLHAHDAVSINTKGVKDGYLPY

SEQ ID NO: 6436 - protein, 212 aa, Catenovulum sp.
  misc_feature (1)..(212): tr|A0A2S0VRQ9|A0A2S0VRQ9_9ALTE GTP cyclohydrolase 1 OS= Catenovulum sp. CCB-QB4 OX=2172099 GN=folE PE=3 SV=1
MITAEAKRVRDKLIEKGLETPLVATSLSSEEKYQKLKGLLTEVVATLGLDLTDDSLQETPHRIAKMYVHEIFSGLDYQNFPSISLIENKMAVDEMVKVSDINLTSTCEHHFVTIDGLAKVAYIPENKIIGLSKINRIVRFFSQRPQVQERLTQQVLVAIQTLTETENVAVSIDATHYCVKSRGVMDVNSTTSTTALGGIFKTNPQTRAEFLR

SEQ ID NO: 6437 - protein, 234 aa, Catenulispora acidiphila
  misc_feature (1)..(234): tr|C7PWZ1|C7PWZ1_CATAD GTP cyclohydrolase 1 OS=Catenuli spora acidiphila (strain DSM 44928 / NRRL B-24433 / NBR C 102108 / JCM 14897) OX=479433 GN=folE PE=3 SV=1
MSESTTENQRGGDAASRAASDPGGGIARVSLAGQPGQAAPDLGRAVSGYDAERAERAVRELLLAVGEDPDREGLKETPARVSRAYREIFAGLHQGPEDVLTTTFDLGHDEMVLVRDIEVYSTCEHHLVPFHGVAHVGYIPSVDGRITGLSKLARLVDVYAKRPQVQERLTTQIADALVRILEPRGVIVVVECEHLCMSMRGIRKPGAKTVTSAVRGQLLAPASRAEAMSLILGR

SEQ ID NO: 6438 - protein, 211 aa, Catenulispora acidiphila
  misc_feature (1)..(211): tr|C7PZ98|C7PZ98_CATAD GTP cyclohydrolase 1 OS=Catenuli spora acidiphila (strain DSM 44928 / NRRL B-24433 / NBR C 102108 / JCM 14897) OX=479433 GN=folE PE=3 SV=1
MTNDTWLVDHESPILRPAPLRVVKQADGVDLAAAERAAAQFLHALGVDTETESMHGTPRRMARAYADLFSPRAFDLTTFPNEEGYDELVLARSIPMRSVCEHHLLPFTGTAHVGYLPGKRILGLSKLARVVEHFACRPQVQERLTKQIADWLQAQLSPKGVGVVIEAEHTCMTLRGVQATGSTTVTSTLLGLLRHDPSSRSEFLALTGVSR

SEQ ID NO: 6439 - protein, 198 aa, Catenulispora sp.
  misc_feature (1)..(198): tr|A0A1Q7W0B4|A0A1Q7W0B4_9ACTN GTP cyclohydrolase 1 OS= Catenulispora sp. 13_1_20CM_3_70_7 OX=1805055 GN=folE P E=3 SV=1
MASPDLGRAVAAYDAERAERAVRELLIAVGENPDRDGLKETPARVARAYREMFAGLHQAPEEVLTTTFDLGHDEMVLVRDIELFSTCEHHLVPFHGVAHVGYIPSVDGRITGLSKLARLVDVYAKRPQVQERLTTQIADALVRILQPRGVIVVVECEHLCMSMRGIRKPGAKTVTSAVRGQLLAPASRAEAMSLILGR

SEQ ID NO: 6440 - protein, 184 aa, Catenulispora sp.
  misc_feature (1)..(184): tr|A0A1Q7VZV6|A0A1Q7VZV6_9ACTN GTP cyclohydrolase 1 OS= Catenulispora sp. 13_1_20CM_3_70_7 OX=1805055 GN=folE P E=3 SV=1
MEALIRHQLILLGEDPSREGLRETPERVKESLEFLTRGYRMTLEDVFGGATFTEAYKDMIVVKDIEMYSLCEHHLLPFYGRVHIGYIPRGRLVGLSKMPRLVELYSRRLQVQERMTRQIAECLQKYLEPVGVAVVIEADHLCMKMRGVEKQNSRVFTSCVLGIFQTDPKTRAEFMGLIKGVPNI

SEQ ID NO: 6441 - protein, 212 aa, Caulobacter flavus
  misc_feature (1)..(212): tr|A0A2N5CR19|A0A2N5CR19_9CAUL GTP cyclohydrolase 1 OS= Caulobacter flavus OX=1679497 GN=folE PE=3 SV=1
MDALTRERTLIGSDDNAGLDLEPAQRPTRDEAMAAVRTLLAWAGDNPDREGLLDTPQRVVDAYGEWFAGYQGDPAKELSRTFEDVQGYDDMVMLRGIDVQSHCEHHMAPFLGKAWIAYMPTGKVVGLSKLARLTEIFAKRLQTQETMTMQIADAIEDHLSAAGVAVLIDAEHQCMSTRGVHHHDVSTITTQFRGLFKTDKVLQQRFMDLVRK

SEQ ID NO: 6442 - protein, 215 aa, Caulobacter henricii
  misc_feature (1)..(215): tr|A0A0P0NW99|A0A0P0NW99_9CAUL GTP cyclohydrolase 1 OS= Caulobacter henricii OX=69395 GN=folE PE=3 SV=1
MDAITPEAALIERCSCAADDLQHGHPSRPSRDEAMAAVRTLLAWAGDNPEREGLLDTPQRVVDAYGEWFAGYEGDPAKELSRTFEDVQGYDDMVMLRGIDVQSHCEHHMAPFLGKAWVAYMPTGKVVGLSKLARLVEIYAKRLQTQETMTMQVADAIEDHLSAAGVAVLIDAEHQCMSTRGVRHHDVSTITTQFRGVFKTDKVLQQRFMDLVVRK

SEQ ID NO: 6443 - protein, 210 aa, Caulobacter mirabilis
  misc_feature (1)..(210): tr|A0A2D2B249|A0A2D2B249_9CAUL GTP cyclohydrolase 1 OS= Caulobacter mirabilis OX=69666 GN=folE PE=3 SV=1
MDSSARERTLVSVPGLDLEPVQRPSREEAMEAVRTLIAWAGDDPRREGVIDTPKRVVDAYEEWFEGYRADPSKELSRIFEDVQGYDDIVFLKNIEVESHCEHHMAPFLGKAFVAYMPTNRVVGISKLARVVEIFAKRLQTQETMTQQIADAISDSLKPAGVAVLIDAEHQCMTTRGVHHRDVSTITTQFRGVFKTDATLRQRFLDFVAKS

SEQ ID NO: 6444 - protein, 211 aa, Caulobacter radicis
  misc_feature (1)..(211): tr|A0A2T9K6J0|A0A2T9K6J0_9CAUL GTP cyclohydrolase 1 OS= Caulobacter radicis OX=2172650 GN=folE PE=3 SV=1
MDALTRERTLIGSDDAALDLEPAQRPTRDEAMAAVRTLLAWAGDNPDREGLLDTPQRVVDAYGEWFAGYHGDPAKELSRTFEDVQGYDDMVMLRGIDVQSHCEHHMAPFLGKAWVAYMPTGKVVGLSKLARLVEIYAKRLQTQETMTMQVADAIEDHLSAAGVAVLIDAEHQCMSTRGVHHHDVSTITTQFRGVFKTDKVLQQRFMDLVRK

SEQ ID NO: 6445 - protein, 211 aa, Caulobacter radicis
  misc_feature (1)..(211): tr|A0A2T9IZX1|A0A2T9IZX1_9CAUL GTP cyclohydrolase 1 OS= Caulobacter radicis OX=2172650 GN=folE PE=3 SV=1
MDALTRERTLIGSDDTGLDLEPAQRPTRDEAMAAVRTLLAWAGDNPDREGLLDTPQRVVDAYGEWFAGYHGDPAKELSRTFEDVQGYDDMVMLRGIDVQSHCEHHMAPFLGKAWVAYMPTGKVVGLSKLARLVEIFAKRLQTQETMTMQVADAIEDHLSAAGVAVLIDAEHQCMSTRGVHHHDVSTITTQFRGVFKTDKVLQQRFMDLVRK

SEQ ID NO: 6446 - protein, 195 aa, Caulobacter rhizosphaerae
  misc_feature (1)..(195): tr|A0A561N2J4|A0A561N2J4_9CAUL GTP cyclohydrolase 1 OS= Caulobacter rhizosphaerae OX=2010972 GN=folE PE=3 SV=1
MSKPGPTQADAEAAVRVLLEWAGDDPSREGLLDTPERVAKSYRELFSGYETDPRGYLERTFQEVAGYDQLVVLSNIRVVSFCEHHMLPVTGVAHVGYLPTNKVVGISKLARVVNGFARRLQIQEKLTAEIAQAIEDVLQPHGVGVVIEAEHSCMTLRGVNTPGSRLTTSSLRGVVRDDPRTRAEFLRLVRQGAAA

SEQ ID NO: 6447 - protein, 218 aa, Caulobacter rhizosphaerae
  misc_feature (1)..(218): tr|A0A561MJU7|A0A561MJU7_9CAUL GTP cyclohydrolase 1 OS= Caulobacter rhizosphaerae OX=2010972 GN=folE PE=3 SV=1
MDALTRERTLIGLDSETGLDLEPGLHPQSWRPTRDEAMAAVRTLLAWAGDNPDREGLLDTPQRVVDAYGEWFAGYHGDPAVELSRTFEDVQGYDDMVMLRGIDVQSHCEHHMAPFLGKAWVAYMPTGKVVGLSKLARLVEIFAKRLQTQETMTMQIADAIEDHLSAAGVAVLIDAEHQCMSTRGVRHHDVSTITTQFRGVFKTDKVLQQRFMDLAARK

SEQ ID NO: 6448 - protein, 211 aa, Caulobacter segnis
  misc_feature (1)..(211): tr|A0A2W5V6Q5|A0A2W5V6Q5_9CAUL GTP cyclohydrolase 1 OS= Caulobacter segnis OX=88688 GN=folE PE=3 SV=1
MDALARERTLIGSDDGLDLEAAERPSREEAMAAVRTLLAWAGDNPEREGLIDTPKRVVDAFEEWFAGYQGDPAKELSRTFEDVQGYDDMVMLRGIDVQSHCEHHMAPFLGKAWVAYMPTGKVVGLSKLARLVEIFAKRLQTQETMTMQIADAIEDHLSAAGVAVLIDAEHQCMSTRGVHHHDVSTITTQFRGVFKTDKVLQQRFMDLVTRK

SEQ ID NO: 6449 - protein, 211 aa, Caulobacter segnis
  misc_feature (1)..(211): tr|D5VHQ4|D5VHQ4_CAUST GTP cyclohydrolase 1 OS=Caulobac ter segnis (strain ATCC 21756 / DSM 7131 / JCM 7823 / N BRC 15250 / LMG 17158 / TK0059) OX=509190 GN=folE PE=3 SV=1
MDALARERTLIGSDAGLDLEPAERPSREEAMAAVRTLLAWAGDNPEREGLIDTPKRVVDAFEEWFAGYQGDPAKELSRTFEDVQGYDDMVMLRGIDVQSHCEHHMAPFLGKAWVAYMPTGKVVGLSKLARLVEIFAKRLQTQETMTMQIADAIEDHLSAAGVAVLIDAEHQCMSTRGVHHHDVSTITTQFRGVFKTDKVLQQRFMDLVVRK

SEQ ID NO: 6450 - protein, 212 aa, Caulobacter sp.
  misc_feature (1)..(212): tr|A0A3Q9IJT7|A0A3Q9IJT7_9CAUL GTP cyclohydrolase 1 OS= Caulobacter sp. FWC26 OX=69665 GN=folE PE=3 SV=1
MDALTRERTLIGSDDTTGLDLEPAQRPTKDEAMAAVRTLLAWAGDNPEREGLIDTPKRVVEAFDEWFAGYHGDPAKELSRTFEDVQGYDDMVMLRGIDVQSHCEHHMAPFLGKAWVAYMPTGKVVGLSKLARLVEIFAKRLQTQETMTMQIADSIEDHLSAAGVAVLIDAEHQCMSTRGVHHHDVSTITTQFRGVFKTDKVLQQRFMDLVKK

SEQ ID NO: 6451 - protein, 211 aa, Caulobacter sp.
  misc_feature (1)..(211): tr|A0A0Q6V0A9|A0A0Q6V0A9_9CAUL GTP cyclohydrolase 1 OS= Caulobacter sp. Root343 OX=1736520 GN=folE PE=3 SV=1
MDALTRERTLIGTDDTGLDLEPAQRPTKDEAMAAVRTLLAWAGDNPDREGLLDTPERVVEAYGEWFAGYHGDPAKELSRTFEDVQGYDDMVMLRGIDVQSHCEHHMAPFLGKAWVAYMPTGKVVGLSKLARLVEIFAKRLQTQETMTMQIADAIEDHLSAAGVAVLIDAEHQCMSTRGVRHHDVSTITTQFRGVFKTDKVLQQRFMDLVRK

SEQ ID NO: 6452 - protein, 212 aa, Caulobacter vibrioides
  misc_feature (1)..(212): sp|Q9AAY3|GCH1_CAUVC GTP cyclohydrolase 1 OS=Caulobacte r vibrioides (strain ATCC 19089 / CB15) OX=190650 GN=fo lE PE=3 SV=1
MDALTRERTLIGSDDTTGLDLEPVQRPSKDEAMAAVRTLLAWAGDNPEREGLIDTPKRVVEAFDEWFAGYHGDPAKELSRTFEDVQGYDDMVMLRGIDVQSHCEHHMAPFLGKAWIAYMPTGKVVGLSKLARLVEIFAKRLQTQETMTMQIADAIEDHLSAAGVAVLIDAEHQCMSTRGVHHHDVSTITTQFRGVFKTDKVLQQRFMDLVKK

SEQ ID NO: 6453 - protein, 212 aa, Caulobacter vibrioides; identical to SEQ ID NO: 6452
  misc_feature (1)..(212): tr|A0A290MQI7|A0A290MQI7_CAUVI GTP cyclohydrolase 1 OS= Caulobacter vibrioides OX=155892 GN=folE PE=3 SV=1

SEQ ID NO: 6454 - protein, 211 aa, Caulobacter zeae
  misc_feature (1)..(211): tr|A0A2N5DNT3|A0A2N5DNT3_9CAUL GTP cyclohydrolase 1 OS= Caulobacter zeae OX=2055137 GN=folE PE=3 SV=1
MDALTRERTLIGSDDTGLDLEPAQRPTRDEAMAAVRTLLAWAGDNPDREGLLDTPQRVVDAYGEWFAGYDGDPAKELSRTFEDVQGYDDMVMLRGIDVQSHCEHHMAPFLGKAWVAYMPTGKVVGLSKLARLVEIYAKRLQTQETMTMQVADAIEDHLSAAGVAVLIDAEHQCMSTRGVHHHDVSTITTQFRGVFKTDKVLQQRFMDLVRK

SEQ ID NO: 6455 - protein, 204 aa, Caulobacteraceae bacterium
  misc_feature (1)..(204): tr|A0A1B1AF85|A0A1B1AF85_9CAUL GTP cyclohydrolase 1 OS= Caulobacteraceae bacterium OTSz_A_272 OX=1759059 GN=fol E PE=3 SV=1
MSEILKWRSPEEAEQKRPSREAAMEAVRTLIAWAGDDPEREGLKDTPKRVVDAYREWFKGYDECPADELNRVFEDVSGYDDMVMLKKIDVESHCEHHIAPFLGKAYVAYLPTDAVVGISKIARVVEIFAKRLQTQETMTSQIAQSIEETLKPRGVAVLIDAEHQCMSTRGVHHKDVTTVTTQFTGAFKDDAELRNRFLKLAGYG

SEQ ID NO: 6456 - protein, 192 aa, Caulobacteraceae bacterium
  misc_feature (1)..(192): tr|A0A4Q3S2P9|A0A4Q3S2P9_9CAUL GTP cyclohydrolase 1 OS= Caulobacteraceae bacterium OX=1978230 GN=folE PE=3 SV=1
MTDKPSRPSVEEAEAAVRTLIRWAGDDPDREGLLETPARVTRSYRELFHGYEEDPREYLKRTFEEVHGYDELVVLSNIPVVSFCEHHMLPFQGRAHVGYLPSNRVVGISKLARVVGGFARRLQIQEKLTAEIAGAIQDILQPRGVGVVIRSEHSCMTMRGVNTPGTWLTTSTLLGAVRDDSRTRHEFLELAR

SEQ ID NO: 6457 - protein, 208 aa, Caulobacterales bacterium
  misc_feature (1)..(208): tr|A0A258C6R8|A0A258C6R8_9PROT GTP cyclohydrolase 1 OS= Caulobacterales bacterium 32-67-6 OX=1970502 GN=folE PE =3 SV=1
MDAPTRDLNLNGPAGLEPLPRPTREEAMAAVRTLIAWAGDDPRREGVIDTPKRVVDAYADWFEGYGADPAKELSRTFEDVQGYDDIVMLREIEVESHCEHHMAPFLGKAYVAYMPTNRVVGISKLARVVEIYAKRLQTQETMTQQIADAITDSLRPAGVAVLIDAQHQCMTTRGVHHRHVSTITTQFTGVFKTDNSLRQRFLDFVNKR

SEQ ID NO: 6458 - protein, 175 aa, Caulobacterales bacterium
  misc_feature (1)..(175): tr|A0A1Q3JK37|A0A1Q3JK37_9PROT GTP cyclohydrolase 1 OS= Caulobacterales bacterium 68-7 OX=1895737 GN=folE PE=3 SV=1
MIAWAGDNPRREGLLDTPGRVVEAYEEWFKGYTGDPAVELSRTFEDVQGYDDMVMLRGIEVESFCEHHMAPFIGKAHVAYMPTGRVVGLSKLARLVEIFSKRLQTQETLTQQVIDAMDDVLRPAGSAVMVEAVHQCMSTRGVKHRDVSTITTQFTGVFKTDKQLQQRFLDLTNRK

SEQ ID NO: 6459 - protein, 218 aa, Caviibacterium pharyngocola
  misc_feature (1)..(218): tr|A0A2M8RUZ9|A0A2M8RUZ9_9PAST GTP cyclohydrolase 1 OS= Caviibacterium pharyngocola OX=28159 GN=folE PE=3 SV=1
MNNISPEAEKVRRALAEKGIETPMIALQQSKDQRRAEIERHMREVMRLIGLDLTDDSLEETPVRLAKMFIDEIFSGLDYANFPKITNIENRMKVSEMVLVNDITLTSTCEHHFVTIDGTVSVAYYPKKWVIGLSKINRVVSFFAQRPQVQERLTEQILLAFQTILETEDVAVYVKATHFCVKCRGIKDTNSYTVTSAFGGVFLDDRETRKEFLTLINK

SEQ ID NO: 6460 - protein, 231 aa, Cecembia calidifontis
  misc_feature (1)..(231): tr|A0A4Q7P7L6|A0A4Q7P7L6_9BACT GTP cyclohydrolase 1 OS= Cecembia calidifontis OX=1187080 GN=folE PE=3 SV=1
MKQKETLLNTVGIDYSQNIEDMGDEHVATSHETPLREDAFAMDDDLKIELIEKHFREIMHIMGLDLTDDSLRGTPRRVAKMFIKEVFSGLDPKNKPAAKLFENKFKYNEMLVEKDITFYSHCEHHFVPIFGRAHVAYISNGHVIGLSKINRIVQYFAKRPQVQERLTMQIGNELKEVLGTEDVAVVLDAHHMCVSSRGIQDVNSSTVTSFYSGKFEKDEQTRAEFMKYISL

SEQ ID NO: 6461 - protein, 231 aa, Cecembia lonarensis
  misc_feature (1)..(231): tr|K1LXB4|K1LXB4_9BACT GTP cyclohydrolase 1 OS=Cecembia lonarensis LW9 OX=1225176 GN=folE PE=3 SV=1
MKQRETLSNTVDLEFTRSIEEIGDEHIGTSDQTPLREDAFEMDDDLKMELIEKHFREIMNVLGLDLSDDSLRGTPKRVAKMYIKEIFSGLDPRNKPVVKLFENKYKYKEMLVEKDITFFSNCEHHFVPIYGKAHVAYISNGNVIGLSKINRIVQYFAKRPQVQERLTMQIGNELKELLGTDDIAVIIDAHHMCVSSRGIQDVSSSTVTSFYGGKFETDEQTRAEFMKYLSL

SEQ ID NO: 6462 - protein, 231 aa, Cecembia rubra
  misc_feature (1)..(231): tr|A0A2P8E6N5|A0A2P8E6N5_9BACT GTP cyclohydrolase 1 OS= Cecembia rubra OX=1485585 GN=folE PE=3 SV=1
MKQKETLLNTVGIDYTQNIDDIGDEHVATSHATPLREDAFEMDDDLKIELIEKHFREIMHIMGLDLTDDSLRGTPKRVAKMFIKEVFSGLDPKNKPAAKLFENKFKYNEMLVEKDITFYSHCEHHFVPIFGRAHVAYISNGHVIGLSKINRIVQYFAKRPQVQERLTMQIGNELKEALGTEDVAVVLDAHHMCVSSRGIQDVNSSTVTSYYSGKFEKDEQTRTEFMKYISL

SEQ ID NO: 6463 - protein, 221 aa, Cedecea davisae
  misc_feature (1)..(221): tr|S3J731|S3J731_9ENTR GTP cyclohydrolase 1 OS=Cedecea davisae DSM 4568 OX=566551 GN=folE PE=3 SV=1
MSSLSKEAALVHEALVARGLETPLRPPLRELDNETRKSQIAAHMTEIMQLLNLDLSDDSLMETPHRIAKMYVDEIFSGLDYANFPKITVIENKMKVDEMVTVRDITLTSTCEHHFVTIDGKATVAYIPKETVIGLSKINRIVQFFAQRPQVQERLTQQILIALQTLLGTNNVAVSIDAVHYCVKARGVKDATSATTTTSLGGLFKSSQNTRQEFLRAVRHS

SEQ ID NO: 6464 - protein, 309 aa, Cedecea davisae
  misc_feature (1)..(309): tr|S3JCZ1|S3JCZ1_9ENTR GTP cyclohydrolase FolE2 OS=Cede cea davisae DSM 4568 OX=566551 GN=folE2 PE=3 SV=1
MTVTPALCPKTLPDIQSLKGEHSDATLSWVGMEQIDLPVEIAGRPLTAKVSAGINLLSSPEAEKGIHMSRLYLLLDALTQQEVTPASLRNLLGEFLVSHQRCSNMASITLSGDLLLSRKSLTSNRFGWKAYPVQVQAGRGSDFTVTVRVGIPYSSTCPASAALSRNLAQQQFQLDFGERSDRLSVAEVEAWLGERGMPGTPHSQRSWAWVSCRLKPDARILPFIDVIDCCETALATAVQTVVKRADEQAFALANGQNLMFCEDAARRLNQALLGSAFCSAFEVRVEHQESLHAHNAVARINWTGNHYAA

SEQ ID NO: 6465 - protein, 312 aa, Cedecea lapagei
  misc_feature (1)..(312): tr|A0A447V4C9|A0A447V4C9_9ENTR GTP cyclohydrolase FolE2 OS=Cedecea lapagei OX=158823 GN=folE2 PE=3 SV=1
MHTMTVIPTLCPKTLPDIQSLRSHEFDMALSWVGMEQIDLPVEIAGRPLTAKVNAGINLLSTPEAEKGIHMSRLYLLLDELTQGEITPAALRTLLGKFLVSHQRSSSRASVEIMGELLLSRRSLTSNHFGWKAYPIRVLAEREETFAVTLEVGIPYSSTCPASAALSRNLAQQQFQRDFGERSGGVTVEEMMAWLGEKGMPGTPHSQRSWAWVRCQLKQDVTTLPFLELIDRCEAALGTAVQTVVKRGDEQAFARANGQNLMFCEDAARRLNKAMLDAPFSAAFSLRVEHQESLHAHNAVARIHWTGNHHAA

SEQ ID NO: 6466 - protein, 221 aa, Cedecea lapagei
  misc_feature (1)..(221): tr|A0A3S4JAF3|A0A3S4JAF3_9ENTR GTP cyclohydrolase 1 OS= Cedecea lapagei OX=158823 GN=folE PE=3 SV=1
MSSLSKEASLVHEALLARGLETPLRPPLRELDNETRKSQIAAHMTEIMQLLNLDLSDDSLMETPHRIAKMYVDEIFSGLDYANFPKITVIENKMKVDEMVTVRDITLTSTCEHHFVTIDGKATVAYIPKDTVIGLSKINRIVQFFAQRPQVQERLTQQILIALQTLLGTNNVAVSIDAVHYCVKARGVKDATSATTTTSLGGLFKSSQNTRQEFLRAVRHN

SEQ ID NO: 6467 - protein, 309 aa, Cedecea neteri
  misc_feature (1)..(309): tr|A0A291E5M9|A0A291E5M9_9ENTR GTP cyclohydrolase FolE2 OS=Cedecea neteri OX=158822 GN=folE2 PE=3 SV=1
MTVTSMLCPKTLPDIQSLRSHEFDTALSWVGMEQIDLPVEIAGRPLTAKVSAGINLLSTPEAEKGIHMSRLYLLLDELTQGEVTPAALRNLLGKFLVSHQRSSNRASVEIAGELLLSRRSLTSNHFGWKAYPIRVQAERGETFTVTLRVGMPYSSTCPASAALSRNLAQQQFQRDFAGRSDNISVEEMMAWLGEKGMPGTPHSQRSWAWIGCQLKPDVATLPFEELIDRGEAALGTAVQTVVKRGDEQAFALANGQNLMFCEDAARRLNKAMLDAPFSAAFTLRVEHQESLHAHNAVAHIHWTGNHHVA

SEQ ID NO: 6468 - protein, 221 aa, Cedecea neteri
  misc_feature (1)..(221): tr|A0A291DVK5|A0A291DVK5_9ENTR GTP cyclohydrolase 1 OS= Cedecea neteri OX=158822 GN=folE PE=3 SV=1
MSSLSKEAALVHEALLARGLETPLRPPLRELDNETRKSQIAAHMTEIMQLLNLDLSDDSLMETPHRIAKMYVDEIFSGLDYANFPKITVIENKMKVDEMVTVRDITLTSTCEHHFVTIDGKATVAYIPKDTVIGLSKINRIVQFFAQRPQVQERLTQQILIALQTLLGTNNVAVSIDAVHYCVKARGVKDATSATTTTSLGGLFKSSQNTRQEFLRAVRHN

SEQ ID NO: 6469 - protein, 221 aa, Cedecea sp.
  misc_feature (1)..(221): tr|A0A1X7I5C7|A0A1X7I5C7_9ENTR GTP cyclohydrolase 1 OS= Cedecea sp. NFIX57 OX=1566286 GN=folE PE=3 SV=1
MSSLSKEASLVHEALVARGLETPLRPPLRELDNETRKSQIAAHMTEIMQLLNLDLSDDSLMETPHRIAKMYVDEIFSGLDYANFPKITVIENKMKVDEMVTVRDITLTSTCEHHFVTIDGKATVAYIPKDTVIGLSKINRIVQFFAQRPQVQERLTQQILIALQTLLGTNNVAVSIDAVHYCVKARGVKDATSATTTTSLGGLFKSSQNTRQEFLRAVRHN

SEQ ID NO: 6470 - protein, 312 aa, Cedecea sp.
  misc_feature (1)..(312): tr|A0A1X7M031|A0A1X7M031_9ENTR GTP cyclohydrolase FolE2 OS=Cedecea sp. NFIX57 OX=1566286 GN=folE2 PE=3 SV=1
MCDMTVTPMLCPKMLPDIQSLRSHEFDTTLSWVGMEQIDLPVEVAGRPLTAKVNAGINLLSSPEAEKGIHMSRIYLLLDELTQGEITPGVLRHLLGEFLVSHQRSSDRASVEIAGELLLSRKSLTSNHFGWKAYPIRILAERGEDFAVTIRVGIPYSSTCPASAALSRNLAQQQFQRDFGSRKDGVSVDEMLAWLGEKGMPGTPHSQRSWAWVSCQLKPDVATLPFLALIDRCEAALGTAVQTVVKRSDEQAFAQANGQNLMFCEDAARRLNKAMLDASFSAAFTLRVEHQESLHAHNAVARIHWTGNHHAA

SEQ ID NO: 6471 - protein, 372 aa, Celeribacter baekdonensis
  misc_feature (1)..(372): tr|A0A1G7I5Q1|A0A1G7I5Q1_9RHOB GTP cyclohydrolase FolE2 OS=Celeribacter baekdonensis OX=875171 GN=folE2 PE=3 S V=1
MNMYPSDLETSSERAKAEAALAVLRDWATRATPTEVAELDPAISRLLPEADDFANYPALRRAYPEDFEASEAYRDTLPDLQNGPESLIKGAKRQIQHVGISNFRLPIRFHTRDSHDAGGDLTLETSVTGTVSLEAEKKGINMSRIMRSFYKHSERTFSFDVIQAALRDYKADLDSFDARIQMRFSFPVKRASLRSGLSGYQYYDIALELVETKGKMTEIMHLDYVYSSTCPCSLELSEHARRTRQQLATPHSQRSVARISVEVRDQPDTLWFEDLIDLCRAAVPTETQVMVKREDEQAFAELNAANPIFVEDAARLFAQNLENDHRIGDFRIIASHQESLHSHDAVSVLTEGDTFAAQSLDPKLFATLFHVG

SEQ ID NO: 6472 - protein, 372 aa, Celeribacter baekdonensis
  misc_feature (1)..(372): tr|K2K7J4|K2K7J4_9RHOB GTP cyclohydrolase FolE2 OS=Cele ribacter baekdonensis B30 OX=1208323 GN=folE2 PE=3 SV=1
MNMYPSDLETSSERAKAEAALAVLRDWATRATPTEVAELDPAISRLLPEADDFANYPALRRAYPEDFEASEAYRDTLPDLQNGPESLIKGAKRQIQHVGISNFRLPIRFHTRDSHDAGGDLTLETSVTGTVSLDAEKKGINMSRIMRSFYKHSERTFSFDVIQAALRDYKADLNSFDARIQMRFSFPVKRASLRSGLSGYQYYDIALELVETKGKITEIMHLDYVYSSTCPCSLELSEHARRTRHQLATPHSQRSVARISVEVRDQTDTLWFEDLIDLCRAAVPTETQVMVKREDEQAFAELNAANPIFVEDAARLFAQNLEHDHRIGDFRIIASHQESLHSHDAVSVLTEGDTFAAQSIDPKLFATLFHVG

SEQ ID NO: 6473 - protein, 367 aa, Celeribacter ethanolicus
  misc_feature (1)..(367): tr|A0A291GBB7|A0A291GBB7_9RHOB GTP cyclohydrolase FolE2 OS=Celeribacter ethanolicus OX=1758178 GN=folE2 PE=3 S V=1
MNMQTSDLEKNDRAAAEAALAILRDWAKGASPTEVAELDPAIARLLPEADDFANYPALRRAYPEDFEVSEAYKEGLPDLQNGPESLIKGAKRQIQHVGISNFRLPIRFKTRDDGDLTLETSVTGTVSLEAEKKGINMSRIMRSFYKHAERSFSFDVIEAALRDYQSDLESFDARIQMRFSFPVKRRSLRSGLAGYQYYDIALELVEQGGKMKEIMHLDYVYSSTCPCSLELSEHARRTRHQLATPHSQRSVARISVEVKNRQDTLWFEDLIDLCRRAIPTETQVMVKREDEQAFAELNAANPIFVEDAARLFSEVLENDRRIGDFRVIASHQESLHSHDAVSVLTEGETFAAQSLDPKLFSTLFHIG

SEQ ID NO: 6474 - protein, 367 aa, Celeribacter halophilus
  misc_feature (1)..(367): tr|A0A1I3N132|A0A1I3N132_9RHOB GTP cyclohydrolase FolE2 OS=Celeribacter halophilus OX=576117 GN=folE2 PE=3 SV= 1
MNMQTSERDQNDRAAAEAALKALRDWAAKATPTEVAELDPAISRLLPEADDFANYPALRRAYPEDFEVSEGYKDSLPDLQNGPESLIKGAKRQIQHVGISNFRLPIRFKTRDNGDLTLETSVTGTVSLEAEKKGINMSRIMRSFYKHAERSFSFDVIAAALRDYQSDLDSFDARIQMRFSFPVKRPSLRSGLEGYQYYDIALELVEQGGKMTEIMHLDYVYSSTCPCSLELSEHARRTRHQLATPHSQRSVARISVEVKNQPDTLWFEDLIDLCRSVVPTETQVMVKREDEQAFAELNAANPIFVEDAARLFAEALESDGRIGDFRVIASHQESLHSHDAVSVLTEGETFAAHSLDPKLFSTLFHVG

SEQ ID NO: 6475 - protein, 367 aa, Celeribacter indicus
  misc_feature (1)..(367): tr|A0A0B5DYZ3|A0A0B5DYZ3_9RHOB GTP cyclohydrolase FolE2 OS=Celeribacter indicus OX=1208324 GN=folE2 PE=3 SV=1
MNIHTGDPEREERARAAAALETLRAWAAKATPTEVAELDPAISRLLPEASDFANYPALRRAYPEDFEVSEAYKEGLPDLQNGPESLIRGAKRQIQHVGISNFRLPIRFHTRDGGDLTLETSVTGTVSLEAEKKGINMSRIMRSFYRHAERTFSFDVIEAALRDYQADLESFDARIQMRFSFPVKRRSLRSGLEGYQYYDIALELVEQGGRMIEIIHLDYVYSSTCPCSLELSEHARRTRHQLATPHSQRSVARLSVVVKNQPDTLWFEDLIDLCRTAVPTETQVMVKREDEQAFAELNAANPIFVEDAARLFAEAMENDRRIGDFRVIASHQESLHSHDAVSVLTEGATFAAQSLDPKVFATLFHVG

SEQ ID NO: 6476 - protein, 368 aa, Celeribacter marinus
  misc_feature (1)..(368): tr|A0A0P0A6T5|A0A0P0A6T5_9RHOB GTP cyclohydrolase FolE2 OS=Celeribacter marinus OX=1397108 GN=folE2 PE=3 SV=1
MNIQTGAMDKQAKREAAKAALHALRAWAEDATPTEVAELDPAISRLLPHSDDFANYPALRRAYPEDFQVDEAYRDTLPDLQNGPESLIKGARQQIQHVGISNFRLPIRFHTRDNGDLTLETSVTGTVSLEAEKKGINMSRIMRSFYKHAEQTFSFDVIETALDAYIADLDSFDARIQMRFSFPVKMPSLRSGLEGFQYYDIALELVEKNGVRRKFMHLDYVYSSTCPCSLELSEHARRTRQQLATPHSQRSVARISVEVLPNQACLWFEDLIDLARSAVATETQVMVKREDEQAFAELNAANPIFVEDAARLFCEALQGEPRVGDFRVVASHQESLHSHDAVSVLTQGDTFDAQSLDPRLFASLIHVG

SEQ ID NO: 6477 - protein, 369 aa, Celeribacter neptunius
  misc_feature (1)..(369): tr|A0A1I3J2X8|A0A1I3J2X8_9RHOB GTP cyclohydrolase FolE2 OS=Celeribacter neptunius OX=588602 GN=folE2 PE=3 SV=1
MNVPDNLKPSEKVSLRKASAALETLRDWAAQATPTEVAELDPAIARLLPEADDFANYPALRRAYPEDFEVSEGYKDSLPDLQNGPESLIKGAKRQIQHVGISNFRLPIRFKTRDDGDLSLETSVTGTVSLEAEKKGINMSRIMRSFYRHAERSFSFDVIEAALRDYQSDLESFDARIQMRFSFPVKRASLRSGLEGYQYYDIALELVEQGGKMKEIMHLDYVYSSTCPCSLELSEHARRTRHQLATPHSQRSVARISVEVKQRENTLWFEDLIDLCRKAVPTETQVMVKREDEQAFAELNAANPIFVEDAARLFAEALEGEPRVGDFRVVASHQESLHSHDAVSVLTEGETFAAQSLDPKLFSTLFHIG

SEQ ID NO: 6478 - protein, 371 aa, Celeribacter persicus
  misc_feature (1)..(371): tr|A0A2T5HM11|A0A2T5HM11_9RHOB GTP cyclohydrolase FolE2 OS=Celeribacter persicus OX=1651082 GN=folE2 PE=3 SV=1
MNIQTSDLEKNDRAAAEAALATLRDWAKSATPTEVAELDPAIARLLPEADDFANYPALRRAYPEDFEVSEAYKQGLPDLQNGPESLIKGAKRQIQHVGISNFRLPIRFKTRDSLNGAGDLTLETSVTGTVSLEAEKKGINMSRIMRSFYKHAERSFSFEVIEAALRDYQSDLESFDARIQMRFSFPVKRRSLRSGLEGYQYYDIALELVEQGGKMTEIMHLDYVYSSTCPCSLELSEHARRTRHQLATPHSQRSVARVSVEVKNQPDTLWFEDLIDLCRTAIPTETQVMVKREDEQAFAELNAANPIFVEDAARLFSEVLENDRRIGDFRVIASHQESLHSHDAVSVLTEGETFAAQSLDPKLFSTLFHVG

SEQ ID NO: 6479 - protein, 305 aa, Celerinatantimonas diazotrophica
  misc_feature (1)..(305): tr|A0A4V2PR90|A0A4V2PR90_9GAMM GTP cyclohydrolase FolE2 OS=Celerinatantimonas diazotrophica OX=412034 GN=folE2 PE=3 SV=1
MLNINHPILPDVAATQRARQPYPIKWVGMEKIVLPIVVSGPSHEPLSVSSQANVFVSLDDPLAKGIHMSRLYLKLCEHLANRPLTLDCLKTLLIELIESQKGMSHSARVDLSFDLIIAKKALLSEQVGYATYPLKLSIVQIADEIKLSAELQIIYSSTCPCSASLSRQLYKETVEERFLSDKIDKQALLDWLVSEQGTVATPHSQRSFAYLQLEFVKGYFPDFSVLLEHIEQVIATPVQTAVKRADEQAFAKLNAEHLMFCEDAARKLKAALESFNFIIDYWFKIEHQESLHAHNAVAIDYKNHL

SEQ ID NO: 6480 - protein, 218 aa, Celerinatantimonas diazotrophica
  misc_feature (1)..(218): tr|A0A4R1JAC7|A0A4R1JAC7_9GAMM GTP cyclohydrolase 1 OS= Celerinatantimonas diazotrophica OX=412034 GN=folE PE=3 SV=1
MSEFSNDALKVQTALVAAGIETPSIETTLQQSEKITHIENHFQEILKVLGMDLTDDSLTETPHRIAKMYVKEIFQGLDYRNFPKITLIDNKMDVDEMVTVKDIGMISTCEHHFAAIDGFAHVAYIPRTKVIGLSKINRVVRFFAQRPQVQERLTRQILVALQTILQTQDVAVRINAVHYCVKSRGVADHSSDTTTTALGGEFKSNLATRQEFLHQLKV

SEQ ID NO: 6481 - protein, 197 aa, Cellulomonas aerilata
  misc_feature (1)..(197): tr|A0A512DEJ9|A0A512DEJ9_9CELL GTP cyclohydrolase 1 OS= Cellulomonas aerilata OX=515326 GN=folE PE=3 SV=1
MVQAPGGARRPYDAARVEAAVRELLHAVGEDPDREGLRDTPARVARAYAETFVGLHLEPADVLTTTFDLGHEEMVLVKDIAVYSTCEHHLVPFHGVAHVGYIPGEDGRITGLSKLARLVDLYARRPQVQERLTSQVADALVDHLRPRGAIVVFECEHLCMSMRGVRKPGSRTVTSAVRGQMRDAATRAEAMSLILGR

SEQ ID NO: 6482 - protein, 207 aa, Cellulomonas biazotea
  misc_feature (1)..(207): tr|A0A402DRB9|A0A402DRB9_9CELL GTP cyclohydrolase 1 OS= Cellulomonas biazotea OX=1709 GN=folE_2 PE=3 SV=1
MSDGVPSQISPVTGVGRAVGEYDEARAERAVRELLLAVGEDPDREGLLETPARVARAYREIFAGLYQEPTDVLTTTFDIGHEEMVLVKDIEVYSTCEHHLVPFHGVAHVGYIPGADGRITGLSKLARLVDVYARRPQVQERLTSQVADALVEVLQPRGVLVVVECEHLCMSMRGVRKPGSRTVTSAVRGQMRDVATRAEAMSLVLGR

SEQ ID NO: 6483 - protein, 197 aa, Cellulomonas biazotea
  misc_feature (1)..(197): tr|A0A402DNM0|A0A402DNM0_9CELL GTP cyclohydrolase 1 OS= Cellulomonas biazotea OX=1709 GN=folE_1 PE=3 SV=1
MTLTTTDDLRLDAPPGADLDAAESAARAFLAALGVRCDSPGTERSPRRMAEAYAAMLAPRPFAMTTFPNDEGYDELVVVRSIPVQSLCEHHLLPFVGVAHVGYLPDGRILGLSKLARVVEMFARRPQVQERLTRQVADWLDAELAPRGVGVVVEAEHLCMALRGVRAVGAVTTTSALSGLVRDSPATRAEFLAAVHP

SEQ ID NO: 6484 - protein, 218 aa, Cellulomonas bogoriensis
  misc_feature (1)..(218): tr|A0A0A0BLE4|A0A0A0BLE4_9CELL GTP cyclohydrolase 1 OS= Cellulomonas bogoriensis 69B4 = DSM 16987 OX=1386082 GN =folE PE=3 SV=1
MRCRPATPSTPAGDVVTHTPDEGPGFEPVTVPYDAARAERAVRELLLAVGEDPDRDGLRDTPARVARAYGEIFAGLYTDPRDVLETTFDLGHEELVVVKDIPLYSTCEHHLVPFHGRAHVGYIPGAEGRVTGLSKIARLVDLYARRPQVQERLTTQVADAMVERLNPGGVLVVVECEHLCMSMRGVRKPGSRTVTSAVRGQLRDGATRAEAMSLVLGR

SEQ ID NO: 6485 - protein, 225 aa, Cellulomonas carbonis
  misc_feature (1)..(225): tr|A0A0A0BJS1|A0A0A0BJS1_9CELL GTP cyclohydrolase 1 OS= Cellulomonas carbonis T26 OX=947969 GN=folE PE=3 SV=1
MTHTADDAPGLDVAGDGHLVPADDVPQVGEDAAALPLPRYDAARAERAVRELLLAVGEDPDREGLQDTPARVARAYAETFAGLHQDPAAVLQTTFDLGHEEMVLVKDIEVYSTCEHHLVPFHGVAHVGYIPGDDGRITGLSKLARLVDVYARRPQVQERLTSQVADTLVEVLRPRGVIVVVECEHLCMSMRGVRKPGARTLTSAVRGQMRDVATRAEAMSLILGR

SEQ ID NO: 6486 - protein, 214 aa, Cellulomonas cellasea
  misc_feature (1)..(214): tr|A0A4Y3KZ67|A0A4Y3KZ67_9CELL GTP cyclohydrolase 1 OS= Cellulomonas cellasea OX=43670 GN=folE PE=3 SV=1
MTVDEHDDALRELLPAPVAAPERRLVPEYDAARAEAAIRELLLAVGEDPEREGLRDTPARVARAYREIFAGLRQEPEDVLTTTFDLGHEEMILVKDIEVYSTCEHHLVPFHGVAHVGYIPSSEGRITGLSKLARLVEVFARRPQVQERLTSQIADALVEHLDPKGVLVVIECEHLCMSMRGVRKPGSRTVTSAARGQMRDVATRAEAMSLVIGR

SEQ ID NO: 6487 - protein, 200 aa, Cellulomonas composti
  misc_feature (1)..(200): tr|A0A511JB86|A0A511JB86_9CELL GTP cyclohydrolase 1 OS= Cellulomonas composti OX=266130 GN=folE PE=3 SV=1
MITPITPPSGAVGEYDEARARAAVRELLIAVGEDPDREGLLETPARVARAYREIFAGLRQVPSDVLTTTFDLGHEEMVLVKDIEVYSTCEHHLVPFHGVAHVGYIPGEDGRITGLSKLARLVDVFARRPQVQERLTSQIADALVEHLEPRGAIVVVECEHLCMSMRGVRKPGSRTVTSAVRGQMRATATRAEAMSLILGR

SEQ ID NO: 6488 - protein, 211 aa, Cellulomonas fimi
  misc_feature (1)..(211): tr|F4GY32|F4GY32_CELFA GTP cyclohydrolase 1 OS=Cellulom onas fimi (strain ATCC 484 / DSM 20113 / JCM 1341 / NBR C 15513 / NCIMB 8980 / NCTC 7547) OX=590998 GN=folE PE= 3 SV=1
MSEAVTDGVPSRINPVTGGGRAVGEYDEQRAEAAVRELLLAVGEDPDREGLLETPARVARAYREIFAGLYQDPTDVLTTTFDLGHEEMVLVKDIEVYSTCEHHLVPFHGVAHVGYIPGEDGRITGLSKLARLVDVYARRPQVQERLTSQVADALVEVLQPRGVLVVVECEHLCMSMRGVRKPGSRTVTSAVRGQMRDVATRAEAMSLVLGR

SEQ ID NO: 6489 - protein, 216 aa, Cellulomonas flavigena
  misc_feature (1)..(216): tr|D5UIP1|D5UIP1_CELFN GTP cyclohydrolase 1 OS=Cellulom onas flavigena (strain ATCC 482 / DSM 20109 / NCIB 8073 / NRS 134) OX=446466 GN=folE PE=3 SV=1
MGDAPVGTPGTPPASTITRTQGHGGRAIAPFDEERAARAVRELLLAVGEDPDREGLQETPARVARAYREIFAGLTMDARDVLTTTFDLGHEEMVIVRDIEVYSTCEHHLVPFHGVAHVGYIPGADGRITGLSKLARLVDVYARRPQVQERLTSQVADALVEVLDPTGVLVVVECEHLCMSMRGVRKPGSRTVTSAVRGQMRDVATRAEAMSLLTAR

SEQ ID NO: 6490 - protein, 200 aa, Cellulomonas gelida
  misc_feature (1)..(200): tr|A0A4Y3KJF4|A0A4Y3KJF4_9CELL GTP cyclohydrolase 1 OS= Cellulomonas gelida OX=1712 GN=folE PE=3 SV=1
MVDPITEPTGPVGEYDQPRAEAAIRELLIAVGEDPDREGLQDTPARVARAYREIFAGLRMTPKDVLTTTFNLGHDEMVLVKDIEVYSTCEHHLVPFHGVAHVGYIPGADGRITGLSKLARLVDVFARRPQVQERLTTQIADALVAELEPRGVIVVIECEHLCMSMRGVRKPGSRTVTSAVRGQMRTAATRAEAMSLIQAH

SEQ ID NO: 6491 - protein, 200 aa, Cellulomonas gilvus
  misc_feature (1)..(200): tr|F8A4R2|F8A4R2_CELGA GTP cyclohydrolase 1 OS=Cellulom onas gilvus (strain ATCC 13127 / NRRL B-14078) OX=59390 7 GN=folE PE=3 SV=1
MVDPISAPTGAVGEYDQARAEAAIRELLIAVGEDPEREGLQDTPARVARAYREVFAGLRMTPQDVLTTTFDLGHEEMVLVKDIEVYSTCEHHLVPFHGVAHVGYIPGVDGRITGLSKLARLVDVYARRPQVQERLTAQIADAMVATLQPRGVIVVVECEHLCMSMRGVRKPGSRTVTSAVRGQMRDVATRAEAMSLIHAR

SEQ ID NO: 6492 - protein, 204 aa, Cellulomonas hominis
  misc_feature (1)..(204): tr|A0A511FDG4|A0A511FDG4_9CELL GTP cyclohydrolase 1 OS= Cellulomonas hominis OX=156981 GN=folE PE=3 SV=1
MPGSDGRGAHRPPHEVPAYDAPRAEAAIRELLLAVGEDPDREGLRDTPARVARAYQEIFAGLRQDPVDVLSATFDIGHEEMVLVKDIEVYSTCEHHLVPFHGVAHIGYIPGATGRVTGLSKLARLVDVYARRPQVQERMTGEIADALVEVLEPRGVLVVVECEHLCMSMRGVRKPGSRTVTSAVRGQMRDPATRAEAMSLVIGR

SEQ ID NO: 6493 - protein, 237 aa, Cellulomonas marina
  misc_feature (1)..(237): tr|A0A1I0WPD7|A0A1I0WPD7_9CELL GTP cyclohydrolase 1 OS= Cellulomonas marina OX=988821 GN=folE PE=3 SV=1
MSTGTDMSTGTSTGTDVTTDADTHLDGLDVPGAGAAHALTPLVASGRATGEYDAARAEAAVRELLAAVGEDPDREGLRDTPARVARAYREIFAGLYMDPREALTTTFDIGHQEMVLVRDIEVYSTCEHHLVPFHGVAHVGYIPGQDGRVTGLSKLARLVDVYARRPQVQERLTAQVADALVDILDPSGVIVVVECEHLCMSMRGVRKPGSRTMTSAVRGQLRDPATRAEAMSLVVGR

SEQ ID NO: 6494 - protein, 200 aa, Cellulomonas persica
  misc_feature (1)..(200): tr|A0A510V080|A0A510V080_9CELL GTP cyclohydrolase 1 OS= Cellulomonas persica OX=76861 GN=folE PE=3 SV=1
MVDPISEPTGVIGEYDQERAEAAIREFLLAVGEDPEREGLLDTPARVARAYREIFAGLRMSPQDVLTTTFDLGHEEMVLVKDIEVYSTCEHHLVPFHGVAHVGYIPGEDGRITGLSKLARLVDVFARRPQVQERLTSQVADALVEQLTPRGVIVVVECEHLCMSMRGVRKPGSRTVTSAVRGQMRNAATRAEAMSLIQAR

SEQ ID NO: 6495 - protein, 204 aa, Cellulomonas rhizosphaerae
  misc_feature (1)..(204): tr|A0A413RNT8|A0A413RNT8_9CELL GTP cyclohydrolase 1 OS= Cellulomonas rhizosphaerae OX=2293719 GN=folE PE=3 SV=1
MVDPVHISSPTSGKAVGEYDQPRAEAAIRELLIAVGEDPEREGLLETPARVARAYREIFAGLYQEPADVLTTTFDLGHEEMVLVKDIEVYSTCEHHLVPFHGVAHVGYIPGADGRITGLSKLARLVDVYARRPQVQERLTSQVADAMVEILKPRGVLVVIECEHLCMSMRGVRKPGSRTVTSAVRGQMRDVATRAEAMSLVLGR

SEQ ID NO: 6496 - protein, 217 aa, Cellulomonas soli
  misc_feature (1)..(217): tr|A0A512PEY5|A0A512PEY5_9CELL GTP cyclohydrolase 1 OS= Cellulomonas soli OX=931535 GN=folE PE=3 SV=1
MATDPTDGLAGRATVASTISPVTWSGKAVGQYDEARAEAAVRELLLAVGEDPDREGLRDTPGRVARAYKEIFAGLYQEPEDVLTTTFDLGHEELVLVKDIEVYSTCEHHLVPFHGVAHVGYIPGADGRITGLSKFARLVDVYARRPQVQERLTSQIADAMVRVLQPRGVLVVVECEHLCMSMRGVRKPGSRTVTSAVRGQLRDVATRAEAMSLVLGR

SEQ ID NO: 6497 - protein, 198 aa, Cellulomonas sp.
  misc_feature (1)..(198): tr|A0A1M3EIP4|A0A1M3EIP4_9CELL GTP cyclohydrolase 1 OS= Cellulomonas sp. 73-145 OX=1895739 GN=folE PE=3 SV=1
MSWRPRVAHEAAPVDLDAAERAAGALLAALGLPVDSAGMAETPRRMATAYAEMLAARAFDFTTFPNTEGYDELVLVQDIPVRSVCEHHMLPFVGVAHVGYLPRDRILGLSKFARVVELFAHRPQTQERLTKQVAQLLQDRLAPRGVGVVVEAEHTCMTLRGVRAAGTRTVTSALLGALRENASSRAEFLSLTRTHLEV

SEQ ID NO: 6498 - protein, 196 aa, Cellulomonas sp.
  misc_feature (1)..(196): tr|A0A1I3XB11|A0A1I3XB11_9CELL GTP cyclohydrolase 1 OS= Cellulomonas sp. KH9 OX=1855324 GN=folE PE=3 SV=1
MSDVTPPVVPYDEERAARAVRELLLAVGEDPDREGLRETPARVARAYREIFAGLRLEARDVLTTTFDLGHEEMVLVRDIEVYSTCEHHLVPFHGVAHVGYIPGADGRITGLSKLARLVDVYARRPQVQERLTTQIADALVEGLDPKGVLVVVECEHLCMSMRGVRKPGARTVTSAVRGQMRDVATRAEAMSLVTGR

SEQ ID NO: 6499 - protein, 208 aa, Cellulomonas terrae
  misc_feature (1)..(208): tr|A0A511JP85|A0A511JP85_9CELL GTP cyclohydrolase 1 OS= Cellulomonas terrae OX=311234 GN=folE PE=3 SV=1
MSTQLQGDGIGPVSFTGTAVGEYDQDRVEAAVRELLLAVGEDPDREGLRETPARVARAYREIFAGLYQEPGDVLTTTFDIGHEEMVLVKDIEVYSTCEHHLVPFHGVAHVGYIPGTDGRITGLSKLARLVDVYARRPQVQERLTSQIADALVNELEPRGVLVVVECEHLCMSMRGVRKPGSRTVTSAVRGQMRDVATRAEAMSLVLGR

SEQ ID NO: 6500 - protein, 200 aa, Cellulomonas uda
  misc_feature (1)..(200): tr|A0A4Y3KGJ6|A0A4Y3KGJ6_CELUD GTP cyclohydrolase 1 OS= Cellulomonas uda OX=1714 GN=folE PE=3 SV=1
MVDPITAPDQAVGEYDQDRAEAAIRELLLAVGEDPEREGLRETPARVARAYREIFAGLRMAPQDVLTTTFDLGHEEMVLVKDIEVYSTCEHHLVPFHGIAHVGYIPGEDGRITGLSKLARLVDVFARRPQVQERLTSQVADALVEQLKPRGVIVVVECEHLCMSMRGVRKPGSRTVTSAVRGQMRDAATRAEAMSLIHAR

SEQ ID NO: 6501 - protein, 210 aa, Cellulomonas xylanilytica
  misc_feature (1)..(210): tr|A0A510V6V6|A0A510V6V6_9CELL GTP cyclohydrolase 1 OS= Cellulomonas xylanilytica OX=233583 GN=folE PE=3 SV=1
MSAQGDGTPSSIGPVTFTGAAVGEYDQDRVEAAIRELLVAVGEDPDREGLRETPARVARAYREIFAGLYQEPADVLTTTFDLGHEEMVLVKDIEVFSTCEHHLVPFHGVAHVGYIPAADGRITGLSKLARLVDVYARRPQVQERLTSQIADALVAELQPRGVIVVIECEHLCMSMRGVRKPGSRTVTSAVRGQMRDVATRAEAMSLVLGR

SEQ ID NO: 6502 - protein, 199 aa, Cellulophaga algicola
  misc_feature (1)..(199): tr|E6X7N2|E6X7N2_CELAD GTP cyclohydrolase 1 OS=Cellulop haga algicola (strain DSM 14237 / IC166 / ACAM 630) OX= 688270 GN=folE PE=3 SV=1
MAPYKKFEEYNIEITDDVRSNYKTIIEGVGEDITREGLVKTPERAAKAMLYLTQGYQQDPVAILKGAMFKEDYDDMVIIKDIELYSLCEHHMLPFFGKAHIAYIPNGHIVGLSKIPRVVDVFSRRLQVQERLTHDILECLNDTLKPKGVAVVIEASHMCMMMRGVQKQNSVTTTSGFRGQFEKQETRNEFLKLISSKLS

SEQ ID NO: 6503 - protein, 226 aa, Cellulophaga algicola
  misc_feature (1)..(226): tr|E6XBK5|E6XBK5_CELAD GTP cyclohydrolase 1 OS=Cellulop haga algicola (strain DSM 14237 / IC166 / ACAM 630) OX= 688270 GN=folE PE=3 SV=1
MKIDSTLEDQFEEIGDNHVSTSEDTPLLDNAFDLSDEEKIVKIKANVSEIMETLGLDLTDDSLKGTPNRVAKMFVNEIFSGLHPDKKPKSSTFDNKYKYGEMLVEKNITLYSTCEHHFLPIVGRAHVAYISNGTVVGLSKMNRIVDYFAKRPQVQERLNIQIVRELQKVLNTEDVACIIDAKHLCVNSRGIRDIESSTVTAEYGGKFKEEATRKEFLNFIQLETRF

SEQ ID NO: 6504 - protein, 226 aa, Cellulophaga baltica
  misc_feature (1)..(226): tr|A0A1G7E8L5|A0A1G7E8L5_9FLAO GTP cyclohydrolase 1 OS= Cellulophaga baltica OX=76594 GN=folE PE=3 SV=1
MKIDSTLEDQFDEIGDNHVSTSEDTPLLANAFELSDEEKIVKIKANVSEIMETLGLDLTDDSLKGTPNRVAKMFVNEIFAGLHPNRKPKSSTFDNKYKYGEMLVEKNITLYSTCEHHFLPIVGRAHVAYISNGTVVGLSKMNRIVDYFAKRPQVQERLNIQIVRELQKVLNTEDVACVIDAKHLCVNSRGIRDIESSTVTAEYGGKFKEEATRREFLNFIKLETRF

SEQ ID NO: 6505 - protein, 221 aa, Cellulophaga baltica
  misc_feature (1)..(221): tr|A0A1G7HT77|A0A1G7HT77_9FLAO GTP cyclohydrolase 1 OS= Cellulophaga baltica OX=76594 GN=folE PE=3 SV=1
MDKSQVEITGDNHFSASIRTPLRTDAFEKSDEEKIINIQHHFKMIMEEMGLDLTDDSLSGTPYRVAKMYVKELFYGLNPVNKPKLSTFENKYGYQKMLVEQNINIDSACEHHFLPIVGHAHVAYVPKDKVIGLSKINRLVDYYARRPQVQERLVLQILNDLQNILDTRDVIVSVTAKHLYVSSRGIKDQSSFTTTLEYGGCFSDSDTRNEFLKIIGQERLH

SEQ ID NO: 6506 - protein, 236 aa, Cellulophaga fucicola
  misc_feature (1)..(236): tr|A0A1K1MUG8|A0A1K1MUG8_9FLAO GTP cyclohydrolase 1 OS= Cellulophaga fucicola OX=76595 GN=folE PE=3 SV=1
MLKLLYIIMSLDTVDITNTKSNISVEDIGDDHLYSGLNTPIKKNAFALSDEQKKEKIEVLFGEIMDVMGLDLTDDSLQGTPKRVAKMYIDEIFSGLNPINKPKIALFENKYQYNQILVEKNITFYSNCEHHFVPIIGKAHVAYKSSGKVIGLSKLNRIVQYYAKRPQVQERLTNQIGVELQKILKTEDVAVIIDAKHLCVASRGIKDDASTTITSFYGGEFNSSAKITEIQNYLKH

SEQ ID NO: 6507 - protein, 226 aa, Cellulophaga fucicola
  misc_feature (1)..(226): tr|A0A1K1NTA1|A0A1K1NTA1_9FLAO GTP cyclohydrolase 1 OS= Cellulophaga fucicola OX=76595 GN=folE PE=3 SV=1
MKIGSTIEGFDEDMDNDHLSAAENTPLREDAFDLNDDQKIEKIQASVRDILTTLGMDLTDDSLNDTPKRVAKMFVKDIFGGLNPERKPKSSSFDNKYKYGEMLVEKNITLYSTCEHHLLPIVGIAHVAYISKGTVVGLSKMNRIVDYYAKRPQVQERLNIQIVRELQEVLGTEDVACVIDAKHLCVNSRGIRDIQSSTVTAEYGGKFKEHNTRKEFLDYIKLDTNF

SEQ ID NO: 6508 - protein, 226 aa, Cellulophaga lytica
  misc_feature (1)..(226): tr|F0RGD1|F0RGD1_CELLC GTP cyclohydrolase 1 OS=Cellulop haga lytica (strain ATCC 23178 / DSM 7489 / JCM 8516 / NBRC 14961 / NCIMB 1423 / VKM B-1433 / Cy l20) OX=86790 0 GN=folE PE=3 SV=1
MKIESTIEGFDEEMDNDHLSAAEDTPLREDAFDLNDDQKIEKIQASVRDILTTLGMDLTDDSLNDTPKRVAKMFVKDIFGGLNPERKPKSSSFDNKYKYGEMLVEKNITLYSTCEHHLLPIVGIAHVAYISNGTVVGLSKMNRIVDYYAKRPQVQERLNIQIVRELQEVLGTEDVACVIDAKHLCVNSRGIRDIQSSTVTAEYGGKFKEQATRKEFLDYIKLDTNF

SEQ ID NO: 6509 - protein, 199 aa, Cellulophaga lytica
  misc_feature (1)..(199): tr|F0RCU0|F0RCU0_CELLC GTP cyclohydrolase 1 OS=Cellulop haga lytica (strain ATCC 23178 / DSM 7489 / JCM 8516 / NBRC 14961 / NCIMB 1423 / VKM B-1433 / Cy l20) OX=86790 0 GN=folE PE=3 SV=1
MSFYKNFEEYNLEATESVKEKYAKIIEGVGEDVSREGLVKTPERAAKAMMFLTQGYEQDPVEILKAAMFKEDYDDMVIIKDIELYSLCEHHMLPFFGKAHVAYIPNGHIVGLSKIPRIVDVFARRLQVQERLTHDILECLNNTLKPQGVAVVIEASHMCMMMRGVQKQNSVTTTSGFRGQFEKQETRNEFLKLISSDLS

SEQ ID NO: 6510 - protein, 199 aa, Cellulophaga sp.; identical to SEQ ID NO: 6509
  misc_feature (1)..(199): tr|A0A559N909|A0A559N909_9FLAO GTP cyclohydrolase 1 OS= Cellulophaga sp. RHA_52 OX=1250036 GN=folE PE=3 SV=1

SEQ ID NO: 6511 - protein, 220 aa, Cellulophaga sp.
  misc_feature (1)..(220): tr|A0A559NBD8|A0A559NBD8_9FLAO GTP cyclohydrolase 1 OS= Cellulophaga sp. RHA_52 OX=1250036 GN=folE PE=3 SV=1
MDKNNIETVGDNHIATSVDTPLRKNAFLKSDDEKISAIQHHFKKIMEELGLDITDDSLSGTPYRVAKMYVKELFYGLDPKNKPKLSVFENKYAYNKMLVEQNITIDSSCEHHFLPITGFAHIAYVPKDKVIGLSKINRLVDYYAHRPQVQERLSLQILKDLQNTLETQDVIVMVTAKHLCVSSRGIKDKNSFTTTIEYSGCFTNEQTRNDFLKIIEKTTV

SEQ ID NO: 6512 - protein, 199 aa, Cellulophaga tyrosinoxydans
  misc_feature (1)..(199): tr|A0A1W1ZUD3|A0A1W1ZUD3_9FLAO GTP cyclohydrolase 1 OS= Cellulophaga tyrosinoxydans OX=504486 GN=folE PE=3 SV=1
MAPYKKFEEYNIEITDDVRQNYSTIIEGVGEDITREGLVKTPERAAKAMLYLTQGYQQDPVKILQGAMFKEDYDDMVIIKDIELYSLCEHHMLPFFGKAHIAYIPNGHIVGLSKIPRVVDVFARRLQVQERLTHDILECLNNTLKPKGVAVVIEASHMCMMMRGVQKQNSVTTTSGFRGQFEKQETRNEFLKLISSNLS

SEQ ID NO: 6513 - protein, 226 aa, Cellulophaga tyrosinoxydans
  misc_feature (1)..(226): tr|A0A1W2AP58|A0A1W2AP58_9FLAO GTP cyclohydrolase 1 OS= Cellulophaga tyrosinoxydans OX=504486 GN=folE PE=3 SV=1
MKIDSTLEERFEELGDNHISTSEDTPLRKDAFDLSDEEKILKIKDNVSQIMETLGLDLTDDSLKGTPNRVAKMFVNEIFSGLHPKRQPKSSTFENKYKYGEMLVEKNITLYSTCEHHFLPIVGKAHVAYISNGTVVGLSKMNRIVDYFAKRPQVQERLNIQIVRELQKVLNTQDVACVIDAKHLCVNSRGIRDIESSTVTAEYGGKFKEEATRREFLNFIKLDTKF

SEQ ID NO: 6514 - protein, 217 aa, Cellulosimicrobium aquatile
  misc_feature (1)..(217): tr|A0A1N6UZS0|A0A1N6UZS0_9MICO GTP cyclohydrolase 1 OS= Cellulosimicrobium aquatile OX=1612203 GN=folE PE=3 SV= 1
MGTPTDASAGTGAITPARSAEGLRAPADVPPYDQDRAEAAVRELLLAVGEDPDREGLRETPARVARAYREIFAGLRQEAADVLTTTFDLGHEEMVLVKDIEVYSTCEHHLVPFHGVAHVGYIPNVDGRITGLSKLARLVEVYARRPQVQERLTSQVADALVEHLKPRGAIVVVECEHLCMSMRGVRKPGARTVTSAVRGQMRDGATRAEAMSLILGR

SEQ ID NO: 6515 - protein, 217 aa, Cellulosimicrobium cellulans
  misc_feature (1)..(217): tr|A0A1G7NMH5|A0A1G7NMH5_CELCE GTP cyclohydrolase 1 OS= Cellulosimicrobium cellulans OX=1710 GN=folE PE=3 SV=1
MGNPSGPSAGTGAITPARSAEGLRAPADVPPYDQDRAEAAVRELLLAVGEDPDREGLRETPARVARAYREIFAGLRQEAADVLTTTFDLGHEEMVLVKDIEVYSTCEHHLVPFHGVAHVGYIPNVDGRITGLSKLARLVEVYARRPQVQERLTSQVADALVEHLKPRGAIVVVECEHLCMSMRGVRKPGARTVTSAVRGQMRDGATRAEAMSLILGR

SEQ ID NO: 6516 - protein, 221 aa, Cellulosimicrobium cellulans
  misc_feature (1)..(221): tr|A0A0M0F8G2|A0A0M0F8G2_CELCE GTP cyclohydrolase 1 OS= Cellulosimicrobium cellulans F16 OX=1350482 GN=folE PE= 3 SV=1
MGTSTHPAPGTGAAPTAITRARAAEDLRAPADVPPYDQERAEAAVRELLLAVGEDPDREGLRETPARVARAYREIFAGLRQEAADVLTTTFDLGHEEMVLVKDIEVYSTCEHHLVPFHGVAHIGYIPNVDGRITGLSKLARLVEVFARRPQVQERLTSQIADALVEHLQPRGAIVVVECEHLCMSMRGVRKPGSRTVTSAVRGQMRDGATRAEAMSLILGR

SEQ ID NO: 6517 - protein, 221 aa, Cellulosimicrobium funkei; identical to SEQ ID NO: 6516
  misc_feature (1)..(221): tr|A0A0H2KJJ4|A0A0H2KJJ4_9MICO GTP cyclohydrolase 1 OS= Cellulosimicrobium funkei OX=264251 GN=folE PE=3 SV=1

SEQ ID NO: 6518 - protein, 204 aa, Cellulosimicrobium funkei
  misc_feature (1)..(204): tr|A0A4Y8R0H8|A0A4Y8R0H8_9MICO GTP cyclohydrolase 1 OS= Cellulosimicrobium funkei OX=264251 GN=folE PE=3 SV=1
MTPARSAEGLRAPADVPPYDQDRAEAAVRELLLAVGEDPDREGLRETPARVARAYREIFAGLRQEAADVLTTTFDLGHEEMVLVKDIEVYSTCEHHLVPFHGVAHVGYIPNVDGRITGLSKLARLVEVYARRPQVQERLTSQVADALVEHLKPRGAIVVVECEHLCMSMRGVRKPGARTVTSAVRGQMRDGATRAEAMSLILGR

SEQ ID NO: 6519 - protein, 217 aa, Cellulosimicrobium sp.
  misc_feature (1)..(217): tr|A0A085LEY9|A0A085LEY9_9MICO GTP cyclohydrolase 1 OS= Cellulosimicrobium sp. MM OX=1523621 GN=folE PE=3 SV=1
MGTPTGASAGTGAITPARSAEGLRAPADVPPYDQDRAEAAVRELLLAVGEDPDREGLRETPARVARAYREIFAGLRQEAADVLTTTFDLGHEEMVLVKDIEVYSTCEHHLVPFHGVAHVGYIPNVDGRITGLSKLARLVEVYARRPQVQERLTSQVADALVEHLKPRGAIVVVECEHLCMSMRGVRKPGARTVTSAVRGQMRDGATRAEAMSLILGR

SEQ ID NO: 6520 - protein, 217 aa, Cellulosimicrobium sp.; identical to SEQ ID NO: 6519
  misc_feature (1)..(217): tr|A0A1W6DP62|A0A1W6DP62_9MICO GTP cyclohydrolase 1 OS= Cellulosimicrobium sp. TH-20 OX=1980001 GN=folE PE=3 SV =1

SEQ ID NO: 6521 - protein, 204 aa, Cellulosimicrobium terreum; identical to SEQ ID NO: 6518
  misc_feature (1)..(204): tr|A0A4V6QJW7|A0A4V6QJW7_9MICO GTP cyclohydrolase 1 OS= Cellulosimicrobium terreum OX=412439 GN=folE PE=3 SV=1

SEQ ID NO: 6522 - protein, 179 aa, Cellvibrio japonicus
  misc_feature (1)..(179): tr|B3PHF6|B3PHF6_CELJU GTP cyclohydrolase 1 OS=Cellvibr io japonicus (strain Ueda107) OX=498211 GN=folE PE=3 SV =1
MREHFANIIASIGEDLNRPGLLDTPDRAAKAFQFLTRGYTQTLDDVVNNALFPSDSQEMIMVKDIELYSLCEHHLLPFIGKAHVAYIPTGKVLGLSKVARIVDMFARRLQIQEQLTLQIAESIQSITGASGVGVIIEAKHMCMMMRGVEKQNSSMKTSAMLGSFRTNQATRNEFLSLLR

SEQ ID NO: 6523 - protein, 312 aa, Cellvibrio mixtus
  misc_feature (1)..(312): tr|A0A266QAI2|A0A266QAI2_9GAMM GTP cyclohydrolase FolE2 OS=Cellvibrio mixtus OX=39650 GN=folE2 PE=3 SV=1
MNAPTALPDVALQQLSPVNHAIDWVGMSGIALPSLCRGTPVQLHLDISVNLSNRTAKGIHMSRLYQLAQTHLANMELTQGGIAKLLRAVIESHRDLGSTAAQLTLRTQLLLKRPALISDLEGWKYYPLRLNAQWDSNRNQAELRLQVGVDYSSTCPCSAALSRQLLQDAFLAHWKNEWRYEPPTAHAIGEWLAQHGSVATPHSQRSQALVSVSLSESANTSRDDNQLPIIALIDAVEAALGTPVQTAVKRVDEQAFAKLNGENLMYVEDAVRRLQAALQPQFSAVNIQVIHRESLHQHDAVASIHSALAVPF

SEQ ID NO: 6524 - protein, 180 aa, Cellvibrio mixtus
  misc_feature (1)..(180): tr|A0A266Q5H2|A0A266Q5H2_9GAMM GTP cyclohydrolase 1 OS= Cellvibrio mixtus OX=39650 GN=folE PE=3 SV=1
MKEHFASIIASIGEDLTRPGLLDTPERAAKAFQFLTRGYHQTLDDVVNDALFPSDSEEMIMVKDIELYSLCEHHLLPFIGKAHVAYIPTGKVLGLSKVARIVDMFARRLQIQEQLTVQIAECIQQITGASGVGVIIEAKHMCMMMRGVEKQNSSMKTSSMLGSFRTNQATRSEFLSLLRN

SEQ ID NO: 6525 - protein, 312 aa, Cellvibrio sp.
  misc_feature (1)..(312): tr|A0A1U9NEK6|A0A1U9NEK6_9GAMM GTP cyclohydrolase FolE2 OS=Cellvibrio sp. PSBB023 OX=1945512 GN=folE2 PE=3 SV= 1
MNAPTALPDVALQQLSPVNHAIDWVGMSGIALPSLCRGTPVQLHLDISVNLSNRTAKGIHMSRLYQLAQTHLANMELTQGGIAKLLRAVIESHRGLGSTAAQLTLRTQLLLKRPALISDLEGWKYYPLRLNAQWDSNRNQAELRLQVGVDYSSTCPCSAALSRQLLQDAFLAHWKNEWRYEPPCANAIGEWLAQHGSVATPHSQRSQALVSVSLSESVNTSSDDNQLPIIELIDAIEAALGTAVQTAVKRVDEQAFAKLNGENLMYVEDAVRRLQAALHAQFSAVNIQVIHRESLHQHDAVASIHNVPAVPF

SEQ ID NO: 6526 - protein, 179 aa, Cellvibrio sp.
  misc_feature (1)..(179): tr|A0A5J6P7E1|A0A5J6P7E1_9GAMM GTP cyclohydrolase I Fol E OS=Cellvibrio sp. KY-GH-1 OX=2303332 GN=folE PE=4 SV= 1
MRDHFASIIASIGEDLNRPGLLDTPDRAAKAFQFLTRGYNQTLDEVVNGALFPSDSEEMIMVKDIELYSLCEHHLLPFIGKAHVAYIPTGKVLGLSKIARIVDMFARRLQIQEQLTVQIAESVQEITGASGVGVIIEAKHMCMMMRGVEKQNSSMKTSAMLGSFRTNQATRNEFLSLLR

SEQ ID NO: 6527 - protein, 179 aa, Cellvibrionaceae bacterium
  misc_feature (1)..(179): tr|A0A2E2XNX3|A0A2E2XNX3_9GAMM GTP cyclohydrolase 1 OS= Cellvibrionaceae bacterium OX=2026723 GN=folE PE=3 SV=1
MKEQYANIISAIGEDLNRPGLQDTPERAAKAMKFLTRGYEQSIEDVVNDALFPSDSKEMIIVKDIELYSMCEHHMLPFIGKAHVAYIPTGKVLGLSKIARIVDMFARRLQIQEQLTVQIADTVKQVTGAEGVGVIVEAKHMCMMMRGVEKQNSSMKTSAMLGSFRDNTATRTEFLSLIR

SEQ ID NO: 6528 - protein, 179 aa, Cellvibrionaceae bacterium
  misc_feature (1)..(179): tr|A0A545SRT6|A0A545SRT6_9GAMM GTP cyclohydrolase 1 OS= Cellvibrionaceae bacterium R142 OX=2591008 GN=folE PE=3 SV=1
MKEHFARIIASIGEDLERPGLADTPERAAKAMQYLTRGYQQNIDEVINGALFPSDSSEMILVENIELYSLCEHHLLPFIGKAHVAYIPTGKVLGLSKIARIVDMFARRLQIQEQLTLQIAETLQQVTEATGVGVIIEAKHMCMMMRGVEKQDSMMKTSAMLGSFRNNPSTRSEFLSLLR

SEQ ID NO: 6529 - protein, 302 aa, Cellvibrionales bacterium
  misc_feature (1)..(302): tr|A0A1Z8Z1F8|A0A1Z8Z1F8_9GAMM GTP cyclohydrolase FolE2 OS=Cellvibrionales bacterium TMED79 OX=1986768 GN=folE 2 PE=3 SV=1
  misc_feature (2)..(2): Xaa can be any naturally occurring amino acid
  misc_feature (134)..(134): Xaa can be any naturally occurring amino acid
  misc_feature (143)..(143): Xaa can be any naturally occurring amino acid
MXPSDTLPDITSEALAQRGLPLQWVGMEQLDLPVSIALENGETVQAPAKANVFVSLDDTASKGIHMSRLHALVQKLGRQLCSRETIDRFLTECVESQAGISAHAKIELHFDLLLEKPALLSGEVGYQAYPVSLXGTVISGEFXYELGYTVPYSSTCPCSASLARQLFANAVDEQFEGDVIDKARLLEWMQSESGSVATPHAQRSYAYVKLVSDAPTWPAFDTVIRTIESTIGTPVQTAVKRVDEQEFARLNAQNLMFCEDAARRIKHALEAMPHVVDYWLKVDHQESLHAHNAVAIDRKSKN

SEQ ID NO: 6530 - protein, 191 aa, Cellvibrionales bacterium
  misc_feature (1)..(191): tr|A0A3D5SBS5|A0A3D5SBS5_9GAMM GTP cyclohydrolase 1 OS= Cellvibrionales bacterium OX=2026722 GN=folE PE=3 SV=1
MSEELDNTALVTSYETILSELGEDLDREGLHNTPMRAAKAMRAITRGYGQSLDDIVNGAVFESGTDEMIVVKSIELYSMCEHHMLPFVGTCHVGYIPNGKVLGLSKFARIVDMYSTRFQIQERLTRQIADAVESVTGAIGVGVIVEAKHMCMMMRGVEKQNSVMGSSVMLGEFRDSYNTRQEFLRLLGDLG

SEQ ID NO: 6531 - protein, 203 aa, Centipeda periodontii
  misc_feature (1)..(203): tr|F5RP13|F5RP13_9FIRM GTP cyclohydrolase 1 OS=Centiped a periodontii DSM 2778 OX=888060 GN=folE PE=3 SV=1
MEEACTTVDLARAERAMREFLTAVGVNLAARGMEETPTRVAQLYGELFAGLRADTSKLWADVLTEKTDGLIAVRAIPVYSICEHHLLPFFGTVHIVYRPHAGRVAGFGVFTRLVECMARRPQLQERLTADIASEIEQGLGAEGVLVVLDAQQLCMTMRGARAHGTRTTTSACRGIFREDKAMELQAWKMLGEWDDGRENISLS

SEQ ID NO: 6532 - protein, 263 aa, Centipeda periodontii
  misc_feature (1)..(263): tr|F5RP82|F5RP82_9FIRM GTP cyclohydrolase FolE2 OS=Cent ipeda periodontii DSM 2778 OX=888060 GN=folE2 PE=3 SV=1
MLDVQNREDSRGIAIQRVGVKEVRLPFLIKKQAGGYQQVLARIAFTVSLPMEFKGTHMSRFLEILLPWSEKPLAEEEMDAMLTEALDRLHAEEAEVSLAFTYFIEKCAPVSGRMSLLDVDASFTGRKRRNEPMQFELGLTMPFTSLCPCSKEISAYGAHNQRSIARVRLRYHEGVPCIYIEELAALLEQQGSAPIYSLLKRADEKYVTEAAYENPKFVEDILRDTVLALRAQPGLAYFSLECENEESIHNHNAFAAHEEYISK

SEQ ID NO: 6533 - protein, 312 aa, Cerasibacillus quisquiliarum
  misc_feature (1)..(312): tr|A0A511UVE6|A0A511UVE6_9BACI GTP cyclohydrolase FolE2 OS=Cerasibacillus quisquiliarum OX=227865 GN=folE2 PE= 3 SV=1
MEKHVDLIEKKQLPHKEERLKLFGSVKPGPKTKPVDKCQMTDIQNMKKDFLFELDAVGIDRVKHPITVTSQLSPQEQTTVAQFTFTSSIKQTSKGTNMSRFMEQLQAYHERGFVANFNSLKHFAKELSERLNQRDATISVKFPWFYERRGPASRLAGLNHADITMTVNYDQKEGYTLSAGMTVQVTTLCPCSKEISEYSAHNQRGNVTMEISFIDDNIDDYMNWKEELLEAAESNASARLHPVLKRPDEKMVTEQAYENPRFVEDMVRLVAADLYELDYIRKFKVSCRNEESIHMHDAIASLTYDKLKEKNA

SEQ ID NO: 6534 - protein, 312 aa, Cerasibacillus sp.
  misc_feature (1)..(312): tr|A0A5C8P3S7|A0A5C8P3S7_9BACI GTP cyclohydrolase FolE2 OS=Cerasibacillus sp. CC-CFT480 OX=2498845 GN=folE2 PE =3 SV=1
MDKFKFNNHLKQLPSKQERLKLFGSVSPGPKTKPVNKCDMKDLQNVQKDFLFKLDQVGIDRVKHPVTVISKTHPNEQTTIANFTFTSAIKQTSKGTNMSRFMEQLNNYHKKGFIADFTTLKTFTKELASRLKQEDATISVGFPWFFERRGPQSNLPGLNHADIEMTTTYHKTNGFSISASLTASITTLCPCSKEISEYSAHNQRGHVTMDVQFMEHYDEGEMDWKLELLEAAESNASARLHPVLKRPDEKMVTEQAYENPRFVEDVVRLVAADLYEMDFIRAFKVTCRNEESIHMHDAIASLSFDKLKEVGS

SEQ ID NO: 6535 - protein, 359 aa, Cereibacter changlensis
  misc_feature (1)..(359): tr|A0A2T4JTP5|A0A2T4JTP5_9RHOB GTP cyclohydrolase FolE2 OS=Cereibacter changlensis JA139 OX=1188249 GN=folE2 P E=3 SV=1
MNIQTPVADRKPSREEAEAALAVLRRWAGRSSDAEIATLDPAATALVYPELSRAYPKQFRVDAAYKDTLPDLQNGPASLIVGANRLIQHVGISNFRLPIRYHTRDNGDLMLETSVTGTVSLEAEKKGINMSRIMRSFYAHAERCFSFEVIEHALEDYKRDLDSFDARIQMRFSFPVRVQSLRSGLSGWQYYDIALELVDKGGVRKKFLHLDYVYSSTCPCSLELSEHARRERGQLATPHSQRSVARISVEVVGKTCLWFEDLIDLARAAVPTETQVMVKREDEQAFAELNAANPIFVEDAARSFAAQLLAEPRIGDFRVVASHQESLHSHDAVSVLTEGPTFAAESLDPRLFGTLFHVG

SEQ ID NO: 6536 - protein, 359 aa, Cereibacter changlensis; identical to SEQ ID NO: 6535
  misc_feature (1)..(359): tr|A0A2W7RGY4|A0A2W7RGY4_9RHOB GTP cyclohydrolase FolE2 OS=Cereibacter changlensis OX=402884 GN=folE2 PE=3 SV= 1

SEQ ID NO: 6537 - protein, 229 aa, Cesiribacter andamanensis
  misc_feature (1)..(229): tr|M7NQB3|M7NQB3_9BACT GTP cyclohydrolase 1 OS=Cesiriba cter andamanensis AMV16 OX=1279009 GN=folE PE=3 SV=1
MKQKETLLNIQPEGSLHIHEMGDEHVASSAETPLRPDAFELDDSLKVELITRHFKEIMHIMGLDLTDDSLAGTPQRVAKMFVQEIFSGLNPANKPDVRLFENKYQYNQMLVEKDITFYSNCEHHFVPIIGKAHVAYISSGKVIGLSKINRLVQFFAKRPQVQERLTVQIAQELSQALQTEDVAVVLDAAHLCVSMRGIQDDSSRTITSQFLGKFREEATKAEFLKYIGM

SEQ ID NO: 6538 - protein, 185 aa, Cetobacterium ceti
  misc_feature (1)..(185): tr|A0A1T4JWM1|A0A1T4JWM1_9FUSO GTP cyclohydrolase 1 OS= Cetobacterium ceti OX=180163 GN=folE PE=3 SV=1
MDKDKIKEGVRLILEGVGEDLNREGLIDTPSRVARMYEEIFEGLHKKSADEINAFFTVEENNRVIVKDIEFYSMCEHHLLPFYGKAHVAYIPSEKKVTGLSKIARLVTMASKKPQLQEKMTEEIKKGLEEKISCEGVLVVVEGEHMCMTMRGIKSKGSTTVTIGASGVFKENISLRDETLRLMGM

SEQ ID NO: 6539 - protein, 184 aa, Cetobacterium somerae
  misc_feature (1)..(184): tr|U7VBS5|U7VBS5_9FUSO GTP cyclohydrolase 1 OS=Cetobact erium somerae ATCC BAA-474 OX=1319815 GN=folE PE=3 SV=1
MNLKTHIKNIILEINNDNNLISDEVIENTPERIETFYKEIFSGLLLNPYDFLKRTFPIQNNDLIIEKNISFHSMCEHHFLPFFGKISVGYIPNNKIVGFGDIIKVIEAYCKRPQLQERLCDEIAETIYKGLECQGVYILMEAEHMCMTMRGVKSIGTKVTTTSSKGIFNTNNSLKTEFLTLVKN

SEQ ID NO: 6540 - protein, 231 aa, Chamaesiphon minutus
  misc_feature (1)..(231): tr|K9UPH3|K9UPH3_CHAP6 GTP cyclohydrolase 1 OS=Chamaesi phon minutus (strain ATCC 27169 / PCC 6605) OX=1173020 GN=folE PE=3 SV=1
MTISSPQGSNSTGNERVGKIDSRPDRNTHNGEPVKIHDPEEVSLEDMMASVRQIILGVGEDPEREGLLKTPKRVAESMRFLTSGYNQSLEDIINGAIFDEGHNEMVLVRDINFFSMCEHHMLPFMGRAHVAYIPNQKVVGLSKLARIVDMYSRRMQVQERLTRQVAEALQAVLEPKGVAVVMEASHMCMVMRGVQKPGSWTVTSAMLGVFQEDQRTREEFLNLIRHQPGAF

SEQ ID NO: 6541 - protein, 219 aa, Chamaesiphon minutus
  misc_feature (1)..(219): tr|K9UQM5|K9UQM5_CHAP6 GTP cyclohydrolase 1 OS=Chamaesi phon minutus (strain ATCC 27169 / PCC 6605) OX=1173020 GN=folE PE=3 SV=1
MTIADRNSFNSSSTPKSSGTIEILPTTAKVSPADMADAVRTIILGVAEDPNREGLLKTPDRVAKAMQFLTSGYQQSLEELINGAVFDEGHNEMVLVRDIDLFSLCEHHMLPFVGRAHIAYLPNQKVVGLSKLARIVEMYARRLQVQERLTRQIADAIQTVLEPQGVAVVIEATHMCMSMRGVQKPGAWTVTSAMVGAFQEDPKTREEFLSLIRHKPAFW

SEQ ID NO: 6542 - protein, 231 aa, Chamaesiphon polymorphus
  misc_feature (1)..(231): tr|A0A2T1GFX7|A0A2T1GFX7_9CYAN GTP cyclohydrolase 1 OS= Chamaesiphon polymorphus CCALA 037 OX=2107692 GN=folE P E=3 SV=1
MTISSPQGSNSTGNERVGKIDSRPDRNTHNGEPVKIHDPEEVSLEDMMASVRQIILGVGEDPDREGLLKTPKRVAESMRFLTSGYNQSLDDIINGAIFDEGHNEMVLVRDINFFSMCEHHMLPFMGRAHVAYIPNQKVVGLSKLARIVDMYSRRMQVQERLTRQVAEALQEVLEPKGVAVVMEASHMCMVMRGVQKPGAWTVTSAMLGAFQEDQRTREEFLNLIRHQPGAF

SEQ ID NO: 6543 - protein, 221 aa, Chania multitudinisentens
  misc_feature (1)..(221): tr|W0LHE0|W0LHE0_9GAMM GTP cyclohydrolase 1 OS=Chania m ultitudinisentens RB-25 OX=1441930 GN=folE PE=3 SV=1
MKSSLSNEATLVHAALEARGLETPLCGEVLDRETRKQRIKEHMTEIMKLLNLDLSDDSLAETPHRIAKMYVDEIFSGLDYANFPKITVIENKMKVDEMVTVRDITLTSTCEHHFVTIDGKATVAYIPKDSVIGLSKINRIVQFFAQRPQVQERLTQQILVALQTLLGTNNVAVSIDAVHYCVKARGVRDATSATTTTSLGGLFKSSQNTRQEFLRAVRHHG

SEQ ID NO: 6544 - protein, 222 aa, Chelativorans sp.
  misc_feature (1)..(222): sp|Q11JM4|GCH1_CHESB GTP cyclohydrolase 1 OS=Chelativor ans sp. (strain BNC1) OX=266779 GN=folE PE=3 SV=1
MDAIIKSFPPRPDQTSVPAEQAGYLDKPITDRPSREEAEAAVRTLLRWAGDNPDREGLKETPARVVKAYQELFGGYDLCPAEELGRTFEEVAGYEDMVLVKDIPFHSHCEHHMVPIVGKAHVGYLPDGKVVGLSKIARVVDIFARRLQTQEAITAQIAGAIQNVLQPLGVAVMVEAEHMCMAMRGVRKQGASTLTTTFTGAFKTRPEDQARFITMVRDSRSG

SEQ ID NO: 6545 - protein, 213 aa, Chelatococcus asaccharovorans
  misc_feature (1)..(213): tr|A0A2V3U6G0|A0A2V3U6G0_9RHIZ GTP cyclohydrolase 1 OS= Chelatococcus asaccharovorans OX=28210 GN=folE PE=3 SV= 1
MDAVVKSLSARMADATADKPSVTRPSREEAEAAVRVLLQWAGEDPDREGLIDTPRRVVRTYEELFRGYRDDPSIVLDRVFEEVAGYDGLVLLRDIPFYSHCEHHMVPIIGTAHIAYYPTQGVVGLSKLARVVDVYARRLQTQERLTAQITDALEETLKPRGVAVMIEAEHMCMSMRGIQKQGVSTLTTRFTGLFKEEPGEQARFMAMVRSKAA

SEQ ID NO: 6546 - protein, 217 aa, Chelatococcus sambhunathii
  misc_feature (1)..(217): tr|A0A0K6GYE0|A0A0K6GYE0_9RHIZ GTP cyclohydrolase 1 OS= Chelatococcus sambhunathii OX=363953 GN=folE PE=3 SV=1
MKTAAKSSNTGAAGSGCNKMAAPPPSRAEAEAAVRTLIRWAGDDPDREGLVGTPERVVRTFEEVYAGYRENPADLLGSTFTDVGGYEEMVLVRDIPFHSHCEHHMVPFVGRAHIAYYPAGGVVGLSKFARLVDAYARRLQTQETLTTQIADTIETHLSPRGTAVMIEAEHMCMSMRGVQKQGSLTVTTRFGGVFRDDPAEQVRFFTLLRCGRDRTAG

SEQ ID NO: 6547 - protein, 218 aa, Chelatococcus sp.
  misc_feature (1)..(218): tr|A0A0K2D8E2|A0A0K2D8E2_9RHIZ GTP cyclohydrolase 1 OS= Chelatococcus sp. CO-6 OX=1702325 GN=folE PE=3 SV=1
MKTAARSSNTGTVRNGCGKDAAAVRPSRAEAEAAVRTLIRWAGDDPDREGLVETPERVVRTFEEVYAGYRENPGELLDSIFTDVGGYDDMVLVRDIPFHSHCEHHMVPFVGRAHIAYYPAGGVVGLSKFARLVDAYAKRLQTQEALTAQIADAIETHLSPRGTAVMIEAEHMCMSMRGVQKQGSLTVTTRFGGVFRDDPAEQVRFFTLLRCGRDRTAG

SEQ ID NO: 6548 - protein, 213 aa, Chelatococcus sp.
  misc_feature (1)..(213): tr|A0A2W6YHB5|A0A2W6YHB5_9RHIZ GTP cyclohydrolase 1 OS= Chelatococcus sp. OX=1953771 GN=folE PE=3 SV=1
MNPVVKSLSVERAISPSADKFLIKQPSQEEAEAAIRTLILWAGDDPQREGLAETPRRVAKAFREFYKGYDEDPHEVLDRVFEEVEGYQDMILVRDIPFYSHCEHHMVPFVGKAHIGYYPSKGVVGLSKLARVVDVFARRLQTQETMTAQIAKAVEQALEPRGVAVLVEAEHMCMSMRGVRKQGSSTMTTQYTGVFREPAEQVRFFTMVKSPGL

SEQ ID NO: 6549 - protein, 218 aa, Chelonobacter oris
  misc_feature (1)..(218): tr|A0A0A3AU36|A0A0A3AU36_9PAST GTP cyclohydrolase 1 OS= Chelonobacter oris OX=505317 GN=folE PE=3 SV=1
MSNISVEAAKVRDALIAKGIETPMKSVGLSLEHRRKQIEKHMREVLQLIGLDLTDDSIEETPIRMAKMYLDEIFTGMDYANFPKITNIRNRMKVSEMVLVNDITLTSTCEHHFVTIDGKVSVAYYPKEWVIGLSKINRVVAFLAQRPQVQERLTEQVLTALQTILQTSDVAVYVKATHFCVKCRGIKDTNSYTVTSAFGGVFLEDRETRKEFLSLISK

SEQ ID NO: 6550 - protein, 225 aa, Chishuiella changwenlii
  misc_feature (1)..(225): tr|A0A1M6T936|A0A1M6T936_9FLAO GTP cyclohydrolase 1 OS= Chishuiella changwenlii OX=1434701 GN=folE PE=3 SV=1
MCDKHLHDEIGDDHMSANLETPLRDDAFELSAEEKVEKIEADFRNIMETLGLDLTDDSLKGTPKRVAKMFVKEIFGGLLPERKPGMSTFENKYNYNQMLVEKDIVVYSTCEHHFLPIVGRAHVGYISKGKVIGLSKMNRIVEYYAKRPQVQERLTMQIVKAMQEALGTDDVACIVDAKHLCVNSRGIKDIESSTVTAEYGGAFKDNEQLRKEFIAYIGMKTPFNV

SEQ ID NO: 6551 - protein, 270 aa, Chitinimonas sp.
  misc_feature (1)..(270): tr|A0A516SI58|A0A516SI58_9MICO GTP cyclohydrolase FolE2 OS=Chitinimonas sp. R3-44 OX=2594795 GN=folE2 PE=3 SV= 1
MNAALPPATIEDVQGSHDARNIAINKVGIKSIRHPVKVGDKADGVQHTIATFDMYVFLPQHFKGTHMSRFVQILNSHEKEISVESFETMLRETVAKLEADSGYIEMRFPFFINKTAPVSGVQSLLDYDVSLIGEIKHGVFTQTLKVLVAATSLCPCSKKISAYGAHNQRSHITITARVNQHVWIEDLIRVAEEEASCEVFGLLKRPDEKYVTERAYDNPKFVEDLVRDVAARLLADPRIDAYVVEAENFESIHNHSAYALIEHDKSSAAA

SEQ ID NO: 6552 - protein, 268 aa, Chitiniphilus sp.
  misc_feature (1)..(268): tr|A0A4U0PWK3|A0A4U0PWK3_9NEIS GTP cyclohydrolase FolE2 OS=Chitiniphilus sp. HX-2-15 OX=2571148 GN=folE2 PE=3 SV=1
MNAPQAPTSMEDVQSSPDHRNIAINKVGVKSIRHPVIVADRADGKQHTIATFDMYVFLPQHFKGTHMSRFVEILNSHQKEISVESFETILRQMCARLEADAGYLEMRFPYFINKEAPVSGVRSLLDYEVSLIGEIKEGRFVQQLKVLVPVTSLCPCSKKISQYGAHNQRSHVTITATLGDQHVWIEELVEVAESEASCELYGLLKRPDEKYVTERAYENPKFVEDMVRDVAARLNADPRVVSYIVESENFESIHNHSAYALIEHDKRV

SEQ ID NO: 6553 - protein, 181 aa, Chitinivibrio alkaliphilus
  misc_feature (1)..(181): tr|U7DAF4|U7DAF4_9BACT GTP cyclohydrolase 1 OS=Chitiniv ibrio alkaliphilus ACht1 OX=1313304 GN=folE PE=3 SV=1
MIDESIRSILTAVGENPDREGLIDTPRRVRKAYEHILGGYQISPEELLRNAIFTEDVNHMIIVRDIEIYSMCEHHMLPFFGKVHIGYISENRVYGVSKLARVADAFARRLQVQERMTQQIADTIMAPIGAEGVGVVVEAKHLCMMMRGVGKQNSVMTTSAMLGSFREDQKVRDEFLRLIGK

SEQ ID NO: 6554 - protein, 195 aa, Chitinophaga arvensicola
  misc_feature (1)..(195): tr|A0A1I0QRT5|A0A1I0QRT5_9BACT GTP cyclohydrolase 1 OS= Chitinophaga arvensicola OX=29529 GN=folE PE=3 SV=1
MAYNKIESYDDKITSGLVENYKECLHLLGEDPEREGLQKTPERVAKAMQFLTQGYQQDAKEILEGAKFTEAYSEMVIVKDIELYSMCEHHMLPFFGKAHVAYIPNGYITGLSKIARVVDVFARRLQVQERLTHQILDAIQETLQPQGVAVVIEAQHLCMMMRGVQKQNSLTTTSAFSGQFEHGTTRAEFMKLIAK

SEQ ID NO: 6555 - protein, 201 aa, Chitinophaga barathri
  misc_feature (1)..(201): tr|A0A3N4M6Q8|A0A3N4M6Q8_9BACT GTP cyclohydrolase 1 OS= Chitinophaga barathri OX=1647451 GN=folE PE=3 SV=1
MAYNKEESYDDNVTSGLIRNYTEAIQLLGEDPQREGLLKTPERVAKAMQFLTQGYQQDAKEILNSAKFTESYSEMVIVKDIELYSMCEHHMLPFFGKAHVAYIPNGYITGLSKIARVVDIFSRRMQVQERLTHQILDAIQETLEPQGVAVVIEAQHLCMMMRGVQKQNSVTTTSAFSGQFEHGATRAEFMKLISSDLMYRR

SEQ ID NO: 6556 - protein, 198 aa, Chitinophaga caeni
  misc_feature (1)..(198): tr|A0A291QTM5|A0A291QTM5_9BACT GTP cyclohydrolase 1 OS= Chitinophaga caeni OX=2029983 GN=folE PE=3 SV=1
MAYKKIESYDEAVTGGLMESYRKSIELLGENPDREGLEKTPERVAKAMQFLTQGYQQDARAILNSAKFKESYSEMVIVKDIELYSLCEHHMLPFFGKAHVAYIPNGHITGLSKIARVVDVYARRLQVQERMTHEILEAIQESLQPQGVAVVIEAQHLCMMMRGVQKQNSVTTTSAFSGQFEDGRTREEFLKLIRNKLS

SEQ ID NO: 6557 - protein, 198 aa, Chitinophaga costaii
  misc_feature (1)..(198): tr|A0A1C4BVD3|A0A1C4BVD3_9BACT GTP cyclohydrolase 1 OS= Chitinophaga costaii OX=1335309 GN=folE PE=3 SV=1
MAYHKEESFDEKITQELTAHYHDVIEKLGEDPAREGLLKTPERVAKAMQFLTQGYTLDAHAILNEAKFTEAYSEMVIVKDIELYSMCEHHMLPFFGKAHVAYIPNGYITGLSKLARVVDVFARRLQVQERLTHQVLDAIQETLQPLGVAVVIEAQHLCMMMRGVQKQNSVTTTSAFSGQFEDGRTRAEFIRLIGANII

SEQ ID NO: 6558 - protein, 206 aa, Chitinophaga cymbidii
  misc_feature (1)..(206): tr|A0A512RIJ9|A0A512RIJ9_9BACT GTP cyclohydrolase 1 OS= Chitinophaga cymbidii OX=1096750 GN=folE2 PE=3 SV=1
MRTIVEEKALLDTEAISLTTEERIEAIRYHFHKIMVTLGLDLENDSLKDTPMRVAKMFVNEAFAGLDPANEPAITLFKNRFKYNEMVLEKDIPLFTYCEHHFVPIIGKVHIAYISKGEVIGLSKLNRITHYLSKRPQVQERLTIQIAEYLKRTMQIEDVAVIVKAEHLCVASRGVNHTGCTTVTNSLHGHFVSESGYSKLVSLLAV

SEQ ID NO: 6559 - protein, 195 aa, Chitinophaga cymbidii
  misc_feature (1)..(195): tr|A0A512RJW1|A0A512RJW1_9BACT GTP cyclohydrolase 1 OS= Chitinophaga cymbidii OX=1096750 GN=folE PE=3 SV=1
MAYNKKESFDEEITSGLMDSYRECIALLGEDPTREGLLKTPERMAKAMQYLTQGYQADAKAILNGAKFTEAYSEMVIVKDIELYSMCEHHMLPFFGKAHVAYIPNGYITGLSKIARVVDVFARRMQVQERMTHQILDAIQDTLQPQGVAVVIEAQHLCMMMRGVQKQNSWTTTSAFSGQFEHGATRAEFMKLIGR

SEQ ID NO: 6560 - protein, 195 aa, Chitinophaga dinghuensis
  misc_feature (1)..(195): tr|A0A327VIL5|A0A327VIL5_9BACT GTP cyclohydrolase 1 OS= Chitinophaga dinghuensis OX=1539050 GN=folE PE=3 SV=1
MAYHKNDSYDELTTTGLMANYKECLELLGEDSEREGLVKTPERMAKAMQFLTQGYQQDAKAILHGAKFTEAYSEMVIVKDIELYSMCEHHMLPFFGKAHVAYIPNGYITGLSKLARVVDVFARRLQVQERLTHQILDAIQEALEPQGVGVVIEAQHLCMMMRGVQKQNSVTTTSAFSGQFLEGATRAEFLKLIGK

SEQ ID NO: 6561 - protein, 195 aa, Chitinophaga eiseniae
  misc_feature (1)..(195): tr|A0A1T4QAR2|A0A1T4QAR2_9BACT GTP cyclohydrolase 1 OS= Chitinophaga eiseniae OX=634771 GN=folE PE=3 SV=1
MAYNKVESYDEKITSGLVKNYKECLELLGEDAEREGLLKTPERMAKAMQYLTQGYQLDAREILNGAKFTEAYSEMVIVKDIELYSMCEHHMLPFFGKAHVAYIPNGYITGLSKLARVVDVYARRLQVQERMTHQILDAIQETLQPQGVAVVIEAQHLCMMMRGVSKQNSITTTSAFSGQFQDGTTRSEFMKLIKK

SEQ ID NO: 6562 - protein, 195 aa, Chitinophaga filiformis
  misc_feature (1)..(195): tr|A0A1G7GM70|A0A1G7GM70_CHIFI GTP cyclohydrolase 1 OS= Chitinophaga filiformis OX=104663 GN=folE PE=3 SV=1
MAYNKIETYDEKITNELIHHYKSSIELLGEDASREGLLKTPERVAKAMQFLTEGYQMDAKAILEGARFTEAYSEMVIVKDIELYSLCEHHMLPFFGKAHIAYIPNGYITGLSKLARVVDVFARRLQVQERMTHQILDAIQETLQPLGVGVVIEAQHLCMMMRGVQKQNSVTTTSAFSGQFEDGRTRNEFMRLITK

SEQ ID NO: 6563 - protein, 195 aa, Chitinophaga flava
  misc_feature (1)..(195): tr|A0A365Y203|A0A365Y203_9BACT GTP cyclohydrolase 1 OS= Chitinophaga flava OX=2259036 GN=folE PE=3 SV=1
MAYTKVESYDEKITSGLVKNYKECLELLGEDSEREGLLKTPERMAKAMQFLTQGYQQDARVILNGAKFTEAYSEMVIVKDIELYSMCEHHMLPFFGKAHVAYIPNGYITGLSKLARVVDVYARRLQVQERMTHQILDAIQETLEPQGVAVVIEAQHLCMMMRGVSKQNSLTTTSAFSGQFMDGTTRAEFMKLIGR

SEQ ID NO: 6564 - protein, 195 aa, Chitinophaga ginsengisegetis
  misc_feature (1)..(195): tr|A0A1T5NLW9|A0A1T5NLW9_9BACT GTP cyclohydrolase 1 OS= Chitinophaga ginsengisegetis OX=393003 GN=folE PE=3 SV= 1
MAYNKNESYDEKITSGLVENYKECLHLLGEDPEREGLQKTPERVAKAMQFLTQGYQQDAREILEGAKFTEAYSEMVIVKDIELYSMCEHHMLPFFGKAHVAYIPNGYITGLSKIARVVDVYARRLQVQERLTHQILDAIQETLQPQGVAVVIEAQHLCMMMRGVQKQNSLTTTSAFSGQFEHGTTRAEFLKLIAK

SEQ ID NO: 6565 - protein, 195 aa, Chitinophaga ginsengisoli
  misc_feature (1)..(195): tr|A0A2P8GGQ2|A0A2P8GGQ2_9BACT GTP cyclohydrolase 1 OS= Chitinophaga ginsengisoli OX=363837 GN=folE PE=3 SV=1
MAYNKIETYDEKITNDLIHHYKSSIELLGEDVSREGLLKTPERVAKAMQFLTEGYQMDAKAILEGARFTEAYSEMVIVKDIELYSLCEHHMLPFFGKAHIAYIPNGYITGLSKLARVVDVFARRLQVQERMTHQILDAIQETLQPLGVGVVIEAQHLCMMMRGVQKQNSVTTTSAFSGQFEDGRTRNEFMRLITK

SEQ ID NO: 6566 - protein, 195 aa, Chitinophaga japonensis
  misc_feature (1)..(195): tr|A0A562TAZ4|A0A562TAZ4_CHIJA GTP cyclohydrolase 1 OS= Chitinophaga japonensis OX=104662 GN=folE PE=3 SV=1
MAYKKIETFDEKVTSGLIDNYRECLGLIGEDADREGLQKTPERLAKAMQYLTQGYQLDARAILRGAKFTEAYSEMVIVKDIELYSLCEHHMLPFFGKAHVAYIPNGYITGLSKIARVVDVYARRLQVQERLTHQILDAIQETLEPLGVAVVIEAQHLCMMMRGVQKQNSVTTTSAFSGQFEDGRTRSEFMRLIGK

SEQ ID NO: 6567 - protein, 195 aa, Chitinophaga jiangningensis
  misc_feature (1)..(195): tr|A0A1M6W457|A0A1M6W457_9BACT GTP cyclohydrolase 1 OS= Chitinophaga jiangningensis OX=1419482 GN=folE PE=3 SV= 1
MAYNKIESYDEKITADLKDNYKRCLELLGEDSEREGLEKTPERMAKAMQFLTQGYQQDAKEILLGARFTEAYSEMVIVKDIELYSMCEHHMLPFFGKAHVAYIPNGYITGLSKIARVVDVFARRLQVQERLTHQILDAIQEALEPQGVAVVIEAQHLCMMMRGVQKQNSITTTSAFSGQFADGTTRDEFLKLIGR

SEQ ID NO: 6568 - protein, 201 aa, Chitinophaga niabensis
  misc_feature (1)..(201): tr|A0A1N6HE43|A0A1N6HE43_9BACT GTP cyclohydrolase 1 OS= Chitinophaga niabensis OX=536979 GN=folE PE=3 SV=1
MAYKKEESFDEKVTAGLIENYRGAIELLGEDPEREGLLKTPERMAKAMQYLTQGYGLDAKAILNGAKFTEAYSEMVIVKDIELYSMCEHHMLPFFGKAHVAYIPNGYITGLSKIARVVDVFSRRMQVQERLTHQILDAIQETLEPQGVAVVIEAQHLCMMMRGVSKQNSVTTTSAFSGQFEHAATRAEFMKLISSDLISRR

SEQ ID NO: 6569 - protein, 195 aa, Chitinophaga niastensis
  misc_feature (1)..(195): tr|A0A2P8HVD2|A0A2P8HVD2_9BACT GTP cyclohydrolase 1 OS= Chitinophaga niastensis OX=536980 GN=folE PE=3 SV=1
MAYNKIETFDEKVTSGLVDHYKECLELLGEDSEREGLLKTPERIAKAMQFLTQGYQQDAREILNGARFTEAYSEMVIVKDIELYSMCEHHMLPFFGKAHVAYIPNGYITGLSKIARVVDVYARRLQVQERLTHQILDAIQESLMPEGVAVVIEAQHLCMMMRGVQKQNSLTTTSAFSGQFQDGTTRAEFMKLIGK

SEQ ID NO: 6570 - protein, 198 aa, Chitinophaga parva
  misc_feature (1)..(198): tr|A0A2T7BNN4|A0A2T7BNN4_9BACT GTP cyclohydrolase 1 OS= Chitinophaga parva OX=2169414 GN=folE PE=3 SV=1
MAYHKEESYDAAITQELTAHYHAVIGKLGEDPEREGLLKTPERVAKAMQFLTQGYSQDARAILNGAKFTEAYSEMVIVKDIELYSMCEHHMLPFFGKAHVAYIPNGYITGLSKLARVVDVFARRLQVQERLTHQVLDAIQETLQPLGVAVVIEAQHLCMMMRGVQKQNSVTTTSAFSGQFEDGRTRAEFIRLIGANIM

SEQ ID NO: 6571 - protein, 197 aa, Chitinophaga pinensis
  misc_feature (1)..(197): tr|A0A561J1T0|A0A561J1T0_9BACT GTP cyclohydrolase 1 OS= Chitinophaga pinensis OX=79329 GN=folE PE=3 SV=1
MAYKKVESYDEKVTSDLIEHYKNSITLLGEDVEREGLQKTPERVAKAMQYLTTGYQQDAREILNSAKFTESYSEMVIVKDIELYSLCEHHMLPFFGKAHIAYIPNGYITGLSKLARVVDVYARRLQVQERMTHQILDAIQDTLQPLGVAVVIEAQHLCMMMRGVQKQNSVTTTSAFSGQFEDGRTRSEFMRLLGQSI

SEQ ID NO: 6572 - protein, 195 aa, Chitinophaga pinensis
  misc_feature (1)..(195): tr|C7PRB8|C7PRB8_CHIPD GTP cyclohydrolase 1 OS=Chitinop haga pinensis (strain ATCC 43595 / DSM 2588 / NCIB 1180 0 / UQM 2034) OX=485918 GN=folE PE=3 SV=1
MAYNKIETYDEKVTSDLIQHYKSSIALLGEDVEREGLQKTPERVAKAMQFLTEGYQMDAKAILEGAKFTETYSEMVIVKDIELYSLCEHHMLPFFGKAHIAYIPNGYITGLSKLARVVDVFARRLQVQERLTHQILDAIQETLQPLGVGVVIEAQHLCMMMRGVQKQNSVTTTSAFSGQFEDGRTRNEFMRLITK

SEQ ID NO: 6573 - protein, 195 aa, Chitinophaga polysaccharea
  misc_feature (1)..(195): tr|A0A561Q5B3|A0A561Q5B3_9BACT GTP cyclohydrolase 1 OS= Chitinophaga polysaccharea OX=1293035 GN=folE PE=3 SV=1
MAYNKIETYDDKITSGLVENYRECLQLLGEDPDREGLQKTPERMAKAMQVLTQGYQLDAKAILEGARFTEAYSEMVIVKDIELYSMCEHHMLPFFGKAHVAYIPNGYITGLSKIARVVDVFARRLQVQERLTHQILDAIQETLQPQGVAVVIEAQHLCMMMRGVQKQNSVTTTSAFSGQFENGTTRAEFLKLIGR

SEQ ID NO: 6574 - protein, 206 aa, Chitinophaga polysaccharea
  misc_feature (1)..(206): tr|A0A561PW05|A0A561PW05_9BACT GTP cyclohydrolase 1 OS= Chitinophaga polysaccharea OX=1293035 GN=folE PE=3 SV=1
MQTDFAKESIVAHSNITLTSEEKIKVIRYHFREIMLALGLDLEDDSLKDTPGRVAKMFVNETFSGLNPVNEPSVTLFENKFKYNEIVLEKDIPLYSYCEHHFVPIIGKVHIAYISKGMVIGLSKLNRITEYFSKRPQVQERLTIQIAEYLKKVMEMEDVAVIIKAEHLCVASRGVNHTGCSTVTQSLHGEFLRKERSSELYSLLAI

SEQ ID NO: 6575 - protein, 195 aa, Chitinophaga rupis
  misc_feature (1)..(195): tr|A0A1H8BR74|A0A1H8BR74_9BACT GTP cyclohydrolase 1 OS= Chitinophaga rupis OX=573321 GN=folE PE=3 SV=1
MAYKKTETFDEHVTSGLMDNYRECLQLIGEDADREGLQKTPERLAKAMQYLTQGYQLDAKAILRGAKFTEAYSEMVIVKDIELYSLCEHHMLPFFGKAHVAYIPNGYITGLSKIARVVDVFARRLQVQERLTHQVLDAIQETLEPLGVAVVIEAQHLCMMMRGVQKQNSVTTTSGFSGQFEDGRTRSEFMRLIGK

SEQ ID NO: 6576 - protein, 197 aa, Chitinophaga sancti
  misc_feature (1)..(197): tr|A0A1K1PCB2|A0A1K1PCB2_9BACT GTP cyclohydrolase 1 OS= Chitinophaga sancti OX=1004 GN=folE PE=3 SV=1
MAYKKVESYDEKVTADLIGHYKNSITLLGEDVEREGLQKTPERVAKAMQYLTTGYQQDAREILNSAKFTESYSEMVIVKDIELYSLCEHHMLPFFGKAHIAYIPNGYITGLSKLARVVDVYARRLQVQERMTHQILDAIQDTLQPLGVAVVIEAQHLCMMMRGVQKQNSVTTTSAFSGQFEDGRTRSEFMRLLGQSI

SEQ ID NO: 6577 - protein, 198 aa, Chitinophaga skermanii
  misc_feature (1)..(198): tr|A0A327Q1Z4|A0A327Q1Z4_9BACT GTP cyclohydrolase 1 OS= Chitinophaga skermanii OX=331697 GN=folE PE=3 SV=1
MAYNKIESYDEHVTASLMQHYRESIALLGEDPDREGLVKTPERMAKAMQVLTQGYQQDARAILNSAKFTEAYSEMVIVKDIELYSMCEHHMLPFFGKAHVAYIPNGYITGLSKIARVVDVYSRRLQVQERLTHQILDAIQDTLQPLGVAVVIEAQHLCMMMRGVQKQNSLTTTSAFSGQFGDGKTRAEFMKLITSRLG

SEQ ID NO: 6578 - protein, 195 aa, Chitinophaga sp.
  misc_feature (1)..(195): tr|A0A5B9WSU3|A0A5B9WSU3_9BACT GTP cyclohydrolase 1 OS= Chitinophaga sp. XS-30 OX=2604421 GN=folE PE=3 SV=1
MAYNKQESFDEEITSGLIDNYRECIALLGEDPEREGLQKTPERMAKAMQYLTQGYQTDAKAILEGAKFTEAYSEMVIVKDIELYSMCEHHMLPFFGKAHVAYIPNGYITGLSKIARVVDVYSRRMQVQERLTHQILDAIQDTLRPQGVAVVIEAQHLCMMMRGVQKQNSVTTTSAFSGQFEHGATRAEFMKLIGR

SEQ ID NO: 6579 - protein, 200 aa, Chitinophaga sp.
  misc_feature (1)..(200): tr|A0A1I0NC45|A0A1I0NC45_9BACT GTP cyclohydrolase 1 OS= Chitinophaga sp. YR573 OX=1881040 GN=folE PE=3 SV=1
MAYSKTESYDEKVTSGLIENYKNAIHLLGEDPEREGLLKTPERMAKAMQYMTVGYQQDAKAILEGAKFTESYSEMVIVKDIELYSMCEHHMLPFFGKAHIAYIPNGYITGLSKLARVVDVFSRRLQVQERLTHQILDAIQETLQPEGVAVVIEAQHLCMMMRGVQKQNSTTTTSAFSGQFQDNTTRSEFLRLISANLIGK

SEQ ID NO: 6580 - protein, 195 aa, Chitinophaga terrae
  misc_feature (1)..(195): tr|A0A1H4DBU5|A0A1H4DBU5_9BACT GTP cyclohydrolase 1 OS= Chitinophaga terrae Kim and Jung 2007 OX=408074 GN=folE PE=3 SV=1
MAYNKNETYDEDITTGLISNYKDCLRLLGEDPEREGLEKTPERVAKAMQFLTQGYQQDAKEILEGAKFTEAYSEMVIVKDIELYSMCEHHMLPFFGKAHVAYIPNGYITGLSKIARVVDVFARRLQVQERLTHQILDAIQETLQPQGVAVVIEAQHLCMMMRGVQKQNSLTTTSAFSGQFGSGATRAEFMKLIGK

SEQ ID NO: 6581 - protein, 239 aa, Chitinophagaceae bacterium
  misc_feature (1)..(239): tr|A0A257HZ98|A0A257HZ98_9BACT GTP cyclohydrolase 1 OS= Chitinophagaceae bacterium BSSC1 OX=2015574 GN=folE PE= 3 SV=1
MKQKETLLNIQLNGEKIELSDTMIDDMGDNHVSTSVDTPMRADAFVLSDDQKVEEITKHFTAIMETLGLDLTDDSLKGTPKRVAKMYVKEIFNGLNPANKPNMAMFENKYQYNQMLVEKNISFYSNCEHHFVPIIGKAHVAYISNGSVVGLSKLNRLVQYFAKRPQVQERLTMQIGKELQKALGTDDIAVLIDAKHLCVASRGVEDDTSSTITAFYSGKFKEDKTREEFLKYIEFKTEF

SEQ ID NO: 6582 - protein, 254 aa, Chitinophagaceae bacterium
  misc_feature (1)..(254): tr|A0A3D4TDH4|A0A3D4TDH4_9BACT GTP cyclohydrolase 1 OS= Chitinophagaceae bacterium OX=1869212 GN=folE PE=3 SV=1
MKPKETLLNTQHNGNGHHNGHHNGHHHGPAYVELSDVTIDEIGENHVSTSYDTPLRADAFELSDADKIAQIEQHFRSIMEIMGLDLTDDSLKGTPKRVAKMYVQEIFSGLNPANKPSVTLFENKYKYNQMLVEKDISFHSNCEHHFVPIFGKAHVAYISSGQVIGLSKLNRLVQYFAKRPQVQERLTMQIGKELQRALNTEDVAVVLDAKHMCVASRGVNDVTSSTITAFYGGKFKEEKTKSEFLKYLELKTEF

SEQ ID NO: 6583 - protein, 258 aa, Chlamydia avium
  misc_feature (1)..(258): tr|W8JGH8|W8JGH8_9CHLA GTP cyclohydrolase 1 type 2 OS=C hlamydia avium 10DC88 OX=1229831 GN=M832_04150 PE=4 SV= 1
MNLTFIMNVADLLTYLNDLFSPQIFSDYCPNGLQVGKDIQTPISKIAVATSADLETIQIAAESNVNVLIVHHGLFWNGMPYPITDMLYTRLQKLIENRIHLIAYHLPLDAHKTLGNNWKVALDLQWENLQSFGSSLPHLGVQGTFPPLPIEEFISILSKYYDAPIKAQALGGPESISSAAIISGGAYKELSQAIKSKVHCFITGNFDEPAWSIALENHIHFLAFGHTATEKVGPKALANYLEDQFRIPTIFIDTSNPF

SEQ ID NO: 6584 - protein, 251 aa, Chlamydia pneumoniae
  misc_feature (1)..(251): tr|A0A0F7WXX6|A0A0F7WXX6_CHLPN Putative GTP cyclohydrol ase 1 type 2 OS=Chlamydia pneumoniae OX=83558 GN=BN1224 _DC9_AP_00120 PE=4 SV=1
MNVADLLSHLETLLSSKIFQDYGPNGLQVGDPQTPVKKIAVAVTADLETIKQAVAAEANVLIVHHGIFWKGMPYPITGMIYKRIQLLIEHNIQLIAYHLPLDAHPTLGNNWRVALDLNWHDLKPFGSSLPYLGVQGSFSPIDIDSFIDLLSQYYQAPLKGSALGGPSRVSSAALISGGAYRELSSAATSQVDCFITGNFDEPAWSTALESNINFLAFGHTATEKVGPKSLAEHLKSEFPIPTTFIDTANPF

SEQ ID NO: 6585 - protein, 251 aa, Chlamydia pneumoniae
  misc_feature (1)..(251): tr|A0A0F7WN53|A0A0F7WN53_CHLPN Putative GTP cyclohydrol ase 1 type 2 OS=Chlamydia pneumoniae OX=83558 GN=BN1224 _CV15_B_00700 PE=4 SV=1
MNVADLLSHLETLLSSKIFQDYGPNGLQVGDPQTPVKKIAVAVTADLETIKQAVAAEANVLIVHHGIFWKGMPYPITGMIHKRIQLLIEHNIQLIAYHLPLDAHPTLGNNWRVALDLNWHDLKPFGSSLPYLGVQGSFSPIDIDSFIDLLSQYYQAPLKGSALGGPSRVSSAALISGGAYRELSSAATSQVDCFITGNFDEPAWSTALESNINFLAFGHTATEKVGPKSLAEHLKSEFPISTTFIDTANPF

SEQ ID NO: 6586 - protein, 225 aa, Chlamydia sp.
  misc_feature (1)..(225): tr|A0A1M3BEL5|A0A1M3BEL5_9CHLA GTP cyclohydrolase 1 OS= Chlamydia sp. 32-24 OX=1895742 GN=folE PE=3 SV=1
MFIDIEEEVGFSQNQIDFNLIPSSPFRKNNFSEEQKIQLISYHFEKILEIIGLDLTDDSICKTPHRFAKMLIQELFKGLDERNFPTITTQENKFNYDQMLFEANISIKSVCEHHFAPILGYCHIAYFPKNKVIGLSKLNRVAQYFASRPQVQERMTRQIKEALVQVLETDDIAVVVDAVHLCVRMRGVQDNDALTRTASYGGKFNESEFRREFLSSIPKLTDVKL

SEQ ID NO: 6587 - protein, 220 aa, Chlamydiae bacterium
  misc_feature (1)..(220): tr|A0A2H0VTU4|A0A2H0VTU4_9BACT GTP cyclohydrolase 1 OS= Chlamydiae bacterium CG10_big_fil_rev_8_21_14_0_10_35_9 OX=1973935 GN=folE PE=3 SV=1
MKSYLKEKNLNIEKATTTSYPSPFTEKVQESNRKKIRLIEKHFRAILEILGLDLENDSVAKSPIRISKMFVDELFSGMTPEAFPKLTFINADSITNTDSPIFTKNISVNSICEHHFLPMIGKAHIAYMPNQKIIGLSKLNRIVHYFARRPQLQERLTMQIADCLSYVLGTNDVAVYLDLQHYCVKLRGVEDISNTITSAYLGSFKKDFSFQESFERKFSR

SEQ ID NO: 6588 - protein, 228 aa, Chlamydiales bacterium
  misc_feature (1)..(228): tr|A0A1M3CQF4|A0A1M3CQF4_9CHLA GTP cyclohydrolase 1 OS= Chlamydiales bacterium 38-26 OX=1895743 GN=folE PE=3 SV =1
MKKKSNSNKTKSLHIRTRYPSPILASPPDLSDDEKVGLIAEKYKEIMEILGLDLSDDSLQKTPYRIAKMYVKEIFSGLNPKNFPEISFFENKFQPSRAENANIILVKVNFTSFCEHHFVPMRGYAYVAYVPHKKLIGLSKIPRIVRFFAKRPQVQERLAAQIVDSLSILLETENVAISIIAEHYCVISRGIENEHSNTVTNILRGNFQTHDSLRREFFEGIKQQDTHV

SEQ ID NO: 6589 - protein, 205 aa, Chloracidobacterium thermophilum
  misc_feature (1)..(205): tr|A8DJQ3|A8DJQ3_9BACT GTP cyclohydrolase I OS=Chloraci dobacterium thermophilum OX=458033 GN=YS_M60-F11.146 PE =4 SV=1
MPKDDEQTKLESSDELLTAARALRSTLEALRLTPDRDTHLERTAENVVEFWTEFFAPFIAAQPRPAVSTFSAGELSGQFVAIGKMAFHSMCAHHLAPFFGVAHIAYVPNALAMGIGAPAKLLEYAARRPQLQERLAMDVAMAIEQACHPQGVAVCLIARQMCMEMRGLRANGRVESTVLRGCFQEARWRDQFFNYLSRQATDPGE

SEQ ID NO: 6590 - protein, 207 aa, Chloracidobacterium thermophilum
  misc_feature (1)..(207): tr|G2LDV8|G2LDV8_CHLTF GTP cyclohydrolase I OS=Chloraci dobacterium thermophilum (strain B) OX=981222 GN=Cabthe r_A0009 PE=4 SV=1
MPKHDEQTKPESNEGMELLTAARALQRMLEALRLTADRDTHLERTAENVAEFWAEFFAPFIADQPPPVVSTFPAAELSGQFIAVGGMSFHSMCAHHLTPFFGAAYVAYVPAALAMGIGAPAKLLEHAARRPQLQERLAMDVATAIERVCHPQGVAVCLIARQMCMEMRGVRADGSVESTVLRGCFQEAPWREQFFNYLSRQATSRGG

SEQ ID NO: 6591 - protein, 224 aa, Chlorobaculum limnaeum
  misc_feature (1)..(224): tr|A0A1D8D2V0|A0A1D8D2V0_CHLLM GTP cyclohydrolase 1 OS= Chlorobaculum limnaeum OX=274537 GN=folE PE=3 SV=1
MKQEKTVSPILENNRIGQSSLASCDLDECFDETHDREEETLGSMADAVYTLLKGVGEDPEREGLLLTPERVAKSLRFLTKGYRQDPEQLLRKAVFTESYDEMVLVKDIDIYSMCEHHMLPFFGKAHVAYIPDGKIVGLSKIPRVVEVFARRLQVQERLTQQIRDAIQNVLNPRGVAVVIEATHMCMVMRGVEKQNSVTTTSAMSGEFMNNQSTRSEFLRLIGNR

SEQ ID NO: 6592 - protein, 230 aa, Chlorobaculum parvum
  misc_feature (1)..(230): tr|B3QP43|B3QP43_CHLP8 GTP cyclohydrolase 1 OS=Chloroba culum parvum (strain NCIB 8327) OX=517417 GN=folE PE=3 SV=1
MKSKYMKQEKTVSPIVENNRSAESRLSQCDLDECFDEACDHQEEERLSLMGNAVYSLLQGIGEDPEREGLLMTPERVAKSLRFLTKGYEQDPEELLMKALFTESYDEMVLVKDIDLYSMCEHHMLPFFGKAHVAYIPDGKIVGLSKIPRVVEVFARRLQVQERLTQQIRDAIQNVLNPRGVAVVIEATHMCMVMRGVEKQNSVTTTSAMSGDFMTSQSTRSEFLRLIGSH

SEQ ID NO: 6593 - protein, 225 aa, Chlorobaculum sp.
  misc_feature (1)..(225): tr|A0A4Q1DFD5|A0A4Q1DFD5_9CHLB GTP cyclohydrolase 1 OS= Chlorobaculum sp. 24CR OX=2508878 GN=folE PE=3 SV=1
MKQEKTALPTLENSHHTHSALSQCDLDECFEEARDRHEEERIGSMSSAVQTLLKGIGEDPEREGLLMTPERVAKSLRFLTKGYEQDPEELLMKALFTESYDEMVLVKDIDLYSMCEHHMLPFFGKAHVAYIPDGKIVGLSKIPRVVEVFARRLQVQERLTQQIRDAIQNVLSPRGVAVVIEATHMCMVMRGVEKQNSVTTTSAMSGDFMTSQSTRSEFLRLIGNR

SEQ ID NO: 6594 - protein, 224 aa, Chlorobaculum tepidum
  misc_feature (1)..(224): sp|Q8KEA8|GCH1_CHLTE GTP cyclohydrolase 1 OS=Chlorobacu lum tepidum (strain ATCC 49652 / DSM 12025 / NBRC 10380 6 / TLS) OX=194439 GN=folE PE=3 SV=1
MKQEKTVSPTVENNRSAESRLSQCDLDECFDESHDRDEEVLGSMTDAVYSLLKGVGEDPEREGLLLTPERVAKSLRFLTKGYRQDPEQLLKKAVFTESYDEMVLVKDIDIYSMCEHHMLPFFGKAHVAYIPDGKIVGLSKIPRVVEVFARRLQVQERLTQQIRDAIQNVLNPRGVAVVIEATHMCMVMRGVEKQNAVTTTSAMSGDFMTSQSTRSEFLRLIGNH

SEQ ID NO: 6595 - protein, 224 aa, Chlorobaculum thiosulfatiphilum
  misc_feature (1)..(224): tr|A0A5C4S6U6|A0A5C4S6U6_CHLTI GTP cyclohydrolase 1 OS= Chlorobaculum thiosulfatiphilum OX=115852 GN=folE PE=3 SV=1
MKQEKTVSPTVENNRIGQSHLASCNLDECFDEEHDREEETLDSMADAVYSLLKGVGEDPEREGLLLTPERVSKSLRFLTKGYRQDPEQLLKKAVFTESYDEMVLVKDIDIYSMCEHHMLPFFGKAHVAYIPDGKIVGLSKIPRVVEVFARRLQVQERLTQQIRDAIQNVLNPRGVAVVIEATHMCMVMRGVEKQNSVTTTSAMSGEFMSNQSTRSEFLRLIGNR

SEQ ID NO: 6596 - protein, 213 aa, Chlorobi bacterium
  misc_feature (1)..(213): tr|A0A136N9L4|A0A136N9L4_9BACT Putative GTP cyclohydrol ase 1 type 2 OS=Chlorobi bacterium OLB5 OX=1617412 GN=U Z05_CHB002002900 PE=4 SV=1
MANAAGTAQKYFGKANIKSIKYVSPVYAKKFKVVVFVPLESADELSFKMASAGAGNIGKYSLCSFRTKGIGTFMGSRTSNPATGTPGKFEMTEEIRLEMICPRESLDKVINIIYASHPYEEPACEIYPVIVKETQLHKDTALIELKKPVILNDVMKKMNRKIELPGMNIKAFSKKYKRIFIDLAGKTEFSITPAKEKTLVIKKINNIINIEVI

SEQ ID NO: 6597 - protein, 219 aa, Chlorobi bacterium
  misc_feature (1)..(219): tr|A0A136K5D8|A0A136K5D8_9BACT GTP cyclohydrolase 1 OS= Chlorobi bacterium OLB4 OX=1617411 GN=folE PE=3 SV=1
MNSENTVQKILNFNWHDNIENEQPAQSNELNDNSKIKLIEYHFARIMEALGLNLEDESLQGTPARVAKMYVNEIFSGLKQNSKPEISLFQNNYGYNKMIIEKDITLYSTCEHHFVPIIGKVHVAYIPNGQVIGLSKINRLVQYYAKRPQVQERLTVQISDALKDALGHDNVAVVIDADHLCVASRGIKDTSSKTVTFSFSGQFELGDIKKEFLSFVNIK

SEQ ID NO: 6598 - protein, 223 aa, Chlorobium chlorochromatii
  misc_feature (1)..(223): sp|Q3ATN0|GCH1_CHLCH GTP cyclohydrolase 1 OS=Chlorobium chlorochromatii (strain CaD3) OX=340177 GN=folE PE=3 S V=1
MKQEKTPSAITENKLPFSSSNCGCGCHNDDDTLTHDDGLLTDNLESAVYTMLQNVGEDPQREGLLKTPERVARSMRFLTKGYHENPEELLQKALFTESYDEMVLVRDIDLFSMCEHHMLPFFGKAHVAYIPDGKIVGLSKLARVVEVFSRRLQVQERLTQQIRDAIQNVLNPKGVAVVIEAKHLCMVMRGVEKLNSITTTSAMSGVFMTSPSTRGEFLRLIQK

SEQ ID NO: 6599 - protein, 223 aa, Chlorobium ferrooxidans
  misc_feature (1)..(223): tr|Q0YQ66|Q0YQ66_9CHLB GTP cyclohydrolase 1 OS=Chlorobi um ferrooxidans DSM 13031 OX=377431 GN=folE PE=3 SV=1
MKQEKIPSAISASNPLPSGRGSCCDDDDCYRDTPDTEPHILGGLSEAVTAMLEGIGEDPRREGLLKTPERVARSMRFLTRGYSQDPEELLKNAVFTESYDEMVLVKDIDIFSMCEHHMLPFFGKAHIAYIPDGKIVGLSKLARVAEVFSRRLQVQERLTQQIRDAIQSVLNPKGVGVVIEARHMCMVMRGVEKLNSVTTTSAMSGQFITSQSTRSEFLRLIKP

SEQ ID NO: 6600 - protein, 219 aa, Chlorobium limicola
  misc_feature (1)..(219): tr|B3EIA8|B3EIA8_CHLL2 GTP cyclohydrolase 1 OS=Chlorobi um limicola (strain DSM 245 / NBRC 103803 / 6330) OX=29 0315 GN=folE PE=3 SV=1
MLSDTSENESLVSSGRASQCIDDDCLHELQDTDTEALSRIADAVSSMLDGVGEDPEREGLVKTPERVARSMRFLTRGYRQDPEEVLKKAVFTEAYDEMVLVRDIDIFSMCEHHLLPFFGKAHVAYIPDGKIVGLSKIARVVEVYARRLQVQERLTQQIRDAIQNVLNPRGVAVVIEARHMCMVMRGVEKLNSITTTSAMSGEFLASPSTRSEFLRLIRP

SEQ ID NO: 6601 - protein, 224 aa, Chlorobium limicola
  misc_feature (1)..(224): tr|A0A101JTL3|A0A101JTL3_CHLLI GTP cyclohydrolase 1 OS= Chlorobium limicola OX=1092 GN=folE PE=3 SV=1
MKQEKMLSDTLENKSIVSSGRASQCIDDDCLHELQDTDTGALSRIADAVSSMLDGVGEDPEREGLVKTPERVARSMRFLTRGYRQDPEEVLKKAVFTEAYDEMVLVRDIDIFSMCEHHLLPFFGKAHVAYIPDGKIVGLSKIARVVEVYARRLQVQERLTQQIRDAIQNVLNPKGVAVVIEARHMCMVMRGVEKLNSITTTSAMSGEFLASPSTRSEFLRLIRP

SEQ ID NO: 6602 - protein, 223 aa, Chlorobium phaeobacteroides
  misc_feature (1)..(223): tr|B3EK82|B3EK82_CHLPB GTP cyclohydrolase 1 OS=Chlorobi um phaeobacteroides (strain BS1) OX=331678 GN=folE PE=3 SV=1
MKQEKTLSDIVANNKTSHSGYSSCADDDCCQENCDTDQEIISSMSEAVYTMLEGIGENPEREGLKKTPERVARSMRFLTKGYLEDPEEMLKKAVFTESYDEMVLVKEIELFSMCEHHMLPFFGKAHVAYIPDGKIVGLSKLGRVVDVYARRLQVQERLTQQIRDAIQNVLNPRGVGVVIEAKHMCMVMRGVEKQNSITTTSAMSGEFLSSQSTRSEFLRLIGL

SEQ ID NO: 6603 - protein, 219 aa, Chlorobium phaeobacteroides
  misc_feature (1)..(219): tr|A1BF47|A1BF47_CHLPD GTP cyclohydrolase 1 OS=Chlorobi um phaeobacteroides (strain DSM 266) OX=290317 GN=folE PE=3 SV=1
MPSDISVSKTPSSLNSGGFCEDDECLMDGDTASPEEISNLSGAVSMLLQGIGENPDREGLLKTPERVARSMRFLTRGYRQNPEELLKKAVFTESYDEMVLVRDIDIFSMCEHHLLPFFGKAHVAYIPDGKIVGLSKIGRVVEVFARRLQVQERLTQQIRDAIQDVLNPKGVAVVIEAKHLCMVMRGVEKLNSVTTTSAMSGEFISSPSTRSEFLRLIGA

SEQ ID NO: 6604 - protein, 223 aa, Chlorobium phaeovibrioides
  misc_feature (1)..(223): sp|A4SF37|GCH1_CHLPM GTP cyclohydrolase 1 OS=Chlorobium phaeovibrioides (strain DSM 265 / 1930) OX=290318 GN=f olE PE=3 SV=1
MKQEKTVSATLVNNPALTGRGTCCDDDECLNDPAQLPAEIMESMSESVYTLLEGVGEDPEREGLLKTPERVARSLAFLTRGYRQDPEEMLKKAVFTESYDEMVLVKDIDIFSMCEHHMLPFFGKAHVAYIPDGKIVGLSKLARVVEVFARRLQVQERLTQQIRDAIQDVLHPKGVGVVIEAKHMCMVMRGVEKLNSVTTTSAMSGEFISSESTRGEFLRLIRP

SEQ ID NO: 6605 - protein, 223 aa, Chlorobium phaeovibrioides
  misc_feature (1)..(223): tr|A0A5C2QDI9|A0A5C2QDI9_CHLPH GTP cyclohydrolase 1 OS= Chlorobium phaeovibrioides OX=1094 GN=folE PE=3 SV=1
MKQEKTVSATLVNNPALTGRGACCDDDECLNDPAQLPAEIMESMSESVYTLLEGVGEDPEREGLLKTPERVARSLAFLTRGYRQDPEEMLKKAVFTESYDEMVLVKDIDIFSMCEHHMLPFFGKAHVAYIPDGKIVGLSKLARVVEVFARRLQVQERLTQQIRDAIQDVLHPKGVGVVIEAKHMCMVMRGVEKLNSVTTTSAMSGEFISSESTRGEFLRLIRP

SEQ ID NO: 6606 - protein, 223 aa, Chlorobium sp.
  misc_feature (1)..(223): tr|A0A4R0QLV0|A0A4R0QLV0_9CHLB GTP cyclohydrolase 1 OS= Chlorobium sp. N1 OX=2491138 GN=folE PE=3 SV=1
MKQERTASAISENNSHLTGRGACCDDDEYPLDPQQLTPEASSALESAVSTMLESVGEDPEREGLLKTPERVARSLAFLTRGYRQDPEEMLRKAVFTESYDEMVLVRDIDIFSMCEHHMLPFFGKAHVAYIPDGKIVGLSKLARVVEVFARRLQVQERLTQQIRDAIQDVLNPKGVGVVIEARHMCMVMRGVEKLNSVTTTSAMSGQFITSESTRSEFLRLIRQ

SEQ ID NO: 6607 - protein, 222 aa, Chlorobium sp.
  misc_feature (1)..(222): tr|A0A533TQ24|A0A533TQ24_CHLSQ GTP cyclohydrolase 1 OS= Chlorobium sp. OX=1095 GN=folE PE=3 SV=1
MPSDILASNPIISGRGSCCDDDECFADIPENVPENDPLALGKLSSAVYQMLEGIGEDTGREGLLKTPERVARSLRFLTRGYSQNPEELLKNAVFTESYDEMVVVRDIDIFSMCEHHMLPFFGKAHVAYIPDGKIVGLSKLARVVEVFARRLQVQERLTQQIRDAIVSVLNPKGVGVVIEARHMCMVMRGVEKLNSVTTTSAMSGQFITSESTRSEFLRLIKP

SEQ ID NO: 6608 - protein, 188 aa, Chloroflexi bacterium
  misc_feature (1)..(188): tr|A0A2M7JXU7|A0A2M7JXU7_9CHLR GTP cyclohydrolase 1 OS= Chloroflexi bacterium CG_4_8_14_3_um_filter_45_15 OX=19 73939 GN=folE PE=3 SV=1
MIDKEKIRLAAISIIEAIGENPSRESLRDTPQRIAEMYAELFSGIDVDPKNELMIGFEEGHHEMIVLRDIPFYSMCEHHLLPFYGVAHVGYIPSEDGRVVGVSKLARVVEICARRPQLQERMTRQIADAIFEALHPDGVAVVVRAEHLCMTMRGIKKPGANVVTSAVRGTFRSKIATRSEFLSLISGS

SEQ ID NO: 6609 - protein, 210 aa, Chloroflexi bacterium
  misc_feature (1)..(210): tr|A0A1F8PEZ5|A0A1F8PEZ5_9CHLR GTP cyclohydrolase 1 OS= Chloroflexi bacterium RBG_16_51_16 OX=1797644 GN=folE P E=3 SV=1
MNAQEFDDDILENIENSGLDTTAIEEAVNRILQAVGEDPSRAGLQFTPKRVARMYAELLGGYTADPVKTVGDAIFEIKYDEMVLVRDIEFYSLCEHHILPFMGRVHVAYLPDGKVLGLSKIPRIVDIYAHRLQVQERMTRQIADFILDLLKPKGVAVVVEALHLCSMMRGVKKQNARMTTSAMHGAFRANLATRQEFLDNISRGAGPLQI

SEQ ID NO: 6610 - protein, 224 aa, Chloroflexus aggregans
  misc_feature (1)..(224): tr|B8GBZ6|B8GBZ6_CHLAD GTP cyclohydrolase 1 OS=Chlorofl exus aggregans (strain MD-66 / DSM 9485) OX=326427 GN=f olE PE=3 SV=1
MSTNDYHPTHDLDEDHYEHLIIPGRGKLEGMTFSSDPRIEDAVHTILTAIGEIPEREGLQKTPSRVAKMYAELTAGYHIDPQALINGAVFSVAYDEMVLVTNIDYYSLCEHHMLPFFGQVHVAYIPNGKVVGLSKIPRIVEMFARRLQVQERMTVQIADFINETLEPAGVAVVAEGIHMCGVMRGVKKANARMVTSAMRGAFREDPKTRAEFMAHVNRASSRQD

SEQ ID NO: 6611 - protein, 226 aa, Chloroflexus aggregans
  misc_feature (1)..(226): tr|A0A2J6XDD3|A0A2J6XDD3_9CHLR GTP cyclohydrolase 1 OS= Chloroflexus aggregans OX=152260 GN=folE PE=3 SV=1
MSTNGYHLTHNHDLDEDHYEHLIVPGRGKLEGMTFSSDPRIEDAVRTVLTAIGEIPEREGLQKTPSRVAKMYAELTAGYHIDPQALINGAIFHVAYDEMVLVTNIDYYSLCEHHMLPFFGQVHVAYIPNGKVVGLSKIPRIVEMFARRLQVQERMTVQIADFINETLEPAGVAVVAEGTHMCGVMRGVKKANARMVTSAMRGAFREDPKTRAEFMAHVNRASSRQD

SEQ ID NO: 6612 - protein, 227 aa, Chloroflexus aurantiacus
  misc_feature (1)..(227): tr|A9WIX0|A9WIX0_CHLAA GTP cyclohydrolase 1 OS=Chlorofl exus aurantiacus (strain ATCC 29366 / DSM 635 / J-10-fl ) OX=324602 GN=folE PE=3 SV=1
MSSNGNGYHHPTPELDEEHYESLIIPGRGKLEGMSFNADPRIEEAVRTILAAIGEVPDREGLQKTPSRVAKMYAELTAGYHIDPQALINGAVFSVAYDEMVLVTNIDYYSLCEHHMLPFFGQVHVAYIPNGKVVGLSKIPRIVEMFARRLQVQERMTVQIADFINATLEPAGVAVVAEGIHMCGVMRGVKKANARMVTSAMRGVFREDPKTRAEFMAHINRVNNRQE

SEQ ID NO: 6613 - protein, 227 aa, Chloroflexus islandicus
  misc_feature (1)..(227): tr|A0A178MJQ0|A0A178MJQ0_9CHLR GTP cyclohydrolase 1 OS= Chloroflexus islandicus OX=1707952 GN=folE PE=3 SV=1
MSSNGNGYHHIHDHDIDEEHYDSLIIPGRGKIEGMSFNSDPHIEEAVRTILGAIGEIPDREGLQKTPSRVAKMYAELTAGYHIDPKALINGAVFSVAYDEMVLVTNIDYYSLCEHHMLPFFGQVHVAYIPNGKVVGLSKIPRIVEMFARRLQVQERMTVQIADFINETLEPAGVAVVAEGVHMCGVMRGVKKANARMVTSAMRGAFREDPKTRAEFMAHIDRNRQER

SEQ ID NO: 6614 - protein, 241 aa, Chlorogloea sp.
  misc_feature (1)..(241): tr|A0A2T1EMT6|A0A2T1EMT6_9CHRO GTP cyclohydrolase 1 OS= Chlorogloea sp. CCALA 695 OX=2107693 GN=folE PE=3 SV=1
MNTNSDRAESFLISDMRESMDGQNSLNLNLSTRPDRNTQNGKEPNLQPPSEDLNEPMREAVRTLLLGVGEDPEREGLLKTPKRVAEAMRFLTSGYNQSLEDLVNGAIFDEGHNEMVLVRDISTFSLCEHHMLPFMGKTHVAYIPNQKVVGLSKLARIVEMYSRRLQVQERLTRQIAEAVQTILEPKGVAVVIEASHMCMVMRGVQKPGSWTVTSAMVGVFQDEQKTREEFFNLIRHQAAFF

SEQ ID NO: 6615 - protein, 245 aa, Chlorogloeopsis fritschii
  misc_feature (1)..(245): tr|A0A3S0ZJB2|A0A3S0ZJB2_CHLFR GTP cyclohydrolase 1 OS= Chlorogloeopsis fritschii PCC 6912 OX=211165 GN=folE PE =3 SV=1
MLIPRKNTWNLTTSKSKVSPVKTFQQNQNMTLSIPPELNSASEVLSSLSTQQTPKVTEAEMMQAVRTLLLGLGEDPEREGLKDTPKRVVKALQFLTKGYHESLDELLNGAVFTEDANEMVLVRDIDIFSSCEHHILPIIGRAHVAYIPNGKVIGLSKIARICEMYARRLQVQERLTLQIADALQGLLKPQGVAVVLEATHMCMVMRGVQKPGSWTVTSAMRGVFADDARTREEFMNLILHNTKFR

SEQ ID NO: 6616 - protein, 172 aa, Chlorogloeopsis fritschii
  misc_feature (1)..(172): tr|A0A3S1A111|A0A3S1A111_CHLFR GTP cyclohydrolase 1 OS= Chlorogloeopsis fritschii PCC 6912 OX=211165 GN=folE PE =3 SV=1
MGLLWGGLPEGMEETPQRVAKHWATITRGLHQDPLEPLKKTFTCDHDEIVLIKDISFNSLCEHHLLPFFGVAHVGYIPSGRVVGLSKIPRSLDILAARPQLQERLTSELTQVIEDAIAPVGVIVVMEATHTCMSTRGVVKANAITTTSCVRGVFKTDFQARQEVLSLINKDA

SEQ ID NO: 6617 - protein, 237 aa, Chloroherpeton thalassium
  misc_feature (1)..(237): tr|B3QUQ2|B3QUQ2_CHLT3 GTP cyclohydrolase 1 OS=Chlorohe rpeton thalassium (strain ATCC 35110 / GB-78) OX=517418 GN=folE PE=3 SV=1
MKHAEKSLTDARNGHRTATSFIDAVTEEIGDEHISTSVDTPIRPDAFDQDDELKMELIAEHFEKIMLILGLDLKDDSLRGTPKRVAKMYVKEIFSGLNPANKPKVALFDNSYKYNEMLIEKDIIVHSTCEHHFVPILGKAHVGYISSGKVIGLSKINRIVQYYAKRPQVQERMTMQIVKELKETLQTEDVAVVIDARHLCVSVRGVEDVASSTVTSSYNGKFLNEQTRNEFLKHIYG

SEQ ID NO: 6618 - protein, 242 aa, Chondrocystis sp.
  misc_feature (1)..(242): tr|A0A1Z4RRA0|A0A1Z4RRA0_9CHRO GTP cyclohydrolase 1 OS= Chondrocystis sp. NIES-4102 OX=2005460 GN=folE PE=3 SV= 1
MTIVSSNGSSRSESFDTNSSNPLKSTLLDQVASRPDRNTHNGKAAEIKATSEAAKEKMMEAVYTMLESVGEDPEREGLLKTPKRVAEAMQYLTSGYNQSLEELVNGAIFDEGHNEMVLVRDINFFSLCEHHMLPFMGRAHVAYIPNQKVVGLSKLARIVEMYARRLQVQERLTRQIAEAVQEILDPQGVAVVMEATHMCMSMRGVQKPGSWTVTSAMIGVFQDQQKTREEFLNLIRHQPNFH

SEQ ID NO: 6619 - protein, 212 aa, Chromatiaceae bacterium
  misc_feature (1)..(212): tr|A0A3D4RUP1|A0A3D4RUP1_9GAMM GTP cyclohydrolase 1 OS= Chromatiaceae bacterium OX=2049432 GN=folE PE=3 SV=1
MTGKIPRISAHTRYEDEDRFEPSDSQDVYDPDKEALIREMLVRLGEDPEREGLKRTPLRVAKAMDFLTQGYHLSAEDIIKKAMFDEDVTEMVVVRDIEFYSLCEHHMLPFFGHAHIGYLPNGRVVGLSKVARVVDAFARRLQVQERLTSQIADTLLKHLDAKGVAVVMEASHTCMMMRGVQKQSSITISSAMRGAFESDARTRAEFMGLIRR

SEQ ID NO: 6620 - protein, 285 aa, Chromatiaceae bacterium
  misc_feature (1)..(285): tr|A0A3D4S1I4|A0A3D4S1I4_9GAMM GTP cyclohydrolase FolE2 OS=Chromatiaceae bacterium OX=2049432 GN=folE2 PE=3 SV =1
MDRTVLTATVPATTTIADVQSRADTRRIPIDKVGIKDIRHPVRIKDRGGQEQHTVATFNMYVYLPHHFKGTHMSRFVAILNGHEHEIGVSTFREMLSEMAERLESEAGHIEMRFPFFIDKKAPISGVASLLDYDVTLIGDIHDGKPKMSIKVVVPVTSLCPCSKQISDYGAHNQRSHVTVEARTRGFLWIEELIEMVEAEASCELYGLLKRPDEKYVTERAYDNPKFVEDTVRDVARRLNDDERISAYIVEAENFESIHNHSAYALIECDKEIEARKAGSAPDCD

SEQ ID NO: 6621 - protein, 280 aa, Chromatiales bacterium
  misc_feature (1)..(280): tr|A0A257SYH8|A0A257SYH8_9GAMM GTP cyclohydrolase FolE2 OS=Chromatiales bacterium 21-64-14 OX=1970504 GN=folE2 PE=3 SV=1
MKATIPAPQPTAPIADVQNSVDTRRIPINKVGIKEIRHPVRVKDRSEGEQNTIATFNMYVNLPHDFKGTHMSRFVEILNHHEREISVQSFKDMLREMTTVLEAESGHIEMRFPYFVTKAAPVTKVHSLMDYDVSLIGEIHDRAVHTHIRVVVPVTSLCPCSKEISDYGAHNQRSHVTVMARTRGFIWIEELIDLVEQEASCELYGLLKRPDEKYVTERAYNNPKFVEDMVRDVAVRLNHDERIEAYIVESENFESIHNHSAYAMIERDKTQDEPAQQPRR

SEQ ID NO: 6622 - protein, 175 aa, Chromatiales bacterium
  misc_feature (1)..(175): tr|A0A524K6T6|A0A524K6T6_9GAMM GTP cyclohydrolase 1 (Fr agment) OS=Chromatiales bacterium OX=2026725 GN=folE PE =3 SV=1
EIMKVLGLDLRDDSLMDTPRRIAKMYVNEIFGGLDYRTFPKLTVVDNKMQCDEMIQVRKISMSSTCEHHFITIDGTATVAYIPKDKVIGLSKINRIVAFFAQRPQIQERLTEQVLLALQTLLVTDDVAVSITATHFCVKARGVRDANSETTTTALGGVFKTHPETRKEFLMGLEG

SEQ ID NO: 6623 - protein, 278 aa, Chromatium okenii
  misc_feature (1)..(278): tr|A0A2S7XNM1|A0A2S7XNM1_9GAMM GTP cyclohydrolase FolE2 OS=Chromatium okenii OX=61644 GN=folE2 PE=3 SV=1
MDHSLESTCCNTSTAEMVDVQGSADTRHIAIDKVGIKDIRHPVRVRERNGNEQHTVATFNMYVYLPHDFKGTHMSRFVQILNNHEREISVDSFKDMLTEMSARLESEAGHIEMRFPYFINKKAPVSGVESLLDYDVTFIGEICHGQPTLEIKVQIPVTSLCPCSKEISRYGAHNQRSHVTVQIRAQDFIWLEEIIEMVEQEASSELFGLLKRPDEKFVTERAYENPKFVEDMVRDVAKRLNDDVRVAAYIVEAENFESIHNHSAYALIARDKAIEVAP

SEQ ID NO: 6624 - protein, 182 aa, Chromatocurvus halotolerans
  misc_feature (1)..(182): tr|A0A4R2LEX8|A0A4R2LEX8_9GAMM GTP cyclohydrolase 1 OS= Chromatocurvus halotolerans OX=1132028 GN=folE PE=3 SV= 1
MREHWAGIIKAVGEDLSRPGLADTPERAAKAFEFLTHGYRQSVDEVVNGALFPSESSEMVLVQDIELYSLCEHHLLPFIGKCHVAYIPTGQVIGLSKVARIVDVFARRLQIQESLTTQIAETLMSVTNAAGVGVIIEARHMCMMMRGVEKQNSVMKTSSMLGNFRHDQKTRDEFLALLQMRV

SEQ ID NO: 6625 - protein, 226 aa, Chromatocurvus halotolerans
  misc_feature (1)..(226): tr|A0A4R2L190|A0A4R2L190_9GAMM GTP cyclohydrolase 1 OS= Chromatocurvus halotolerans OX=1132028 GN=folE PE=3 SV= 1
MTTAHAITCPDVTTNLSAEAAMVQKALTDKGLETPLVHNGLDRDEKYARIRDAFTEIAQVLGLDLRDDSLRETPHRIAKMYVDEIFSGLDYAKFPSISVIDNKMQVEEMVCIDKIDLVSTCEHHFVTIDGSARVAYIPRHRIIGLSKINRIVRFFSQRPQVQERLTQQILVALQTLLETDDVAVTVNAVHYCVKSRGVMDSNSTTRTTALGGAFKTDASTRGEFLG

SEQ ID NO: 6626 - protein, 226 aa, Chromatocurvus sp.
  misc_feature (1)..(226): tr|A0A2N5Y1Q3|A0A2N5Y1Q3_9GAMM GTP cyclohydrolase 1 OS= Chromatocurvus sp. F02 OX=1905677 GN=folE PE=3 SV=1
MTPALAKKNITFSHTLSPEAASVRQALLDKGLETPLVDNGLTRDEKYLKIAAAFTDITQTLGLDLTDDSLCDTPSRIARMYVDEIFSGLDYSHFPKIAVIANKMQVEEMVQIDDIGLVSTCEHHFVTIDGTAKVAYIPGNKIIGLSKINRIVRFFAQRPQVQERLTQQILVALQTLLETEDVAVSINAVHYCVKSRGVMDGNSRTRTTSLGGAFKETPSTRAEFLN

SEQ ID NO: 6627 - protein, 182 aa, Chromatocurvus sp.
  misc_feature (1)..(182): tr|A0A2N5Y4H3|A0A2N5Y4H3_9GAMM GTP cyclohydrolase 1 OS= Chromatocurvus sp. F02 OX=1905677 GN=folE PE=3 SV=1
MEEHWAHIIEAIGEDLSRPGLADTPKRAARAFEFLTRGYQQSVEEVVNNALFPSASSEIVLVQNVELYSLCEHHMLPFIGKCHVAYIPTGKVLGLSKIARLVDIFARRLQIQESLTMQIAETIMEVTGADGVGVIIEAQHMCMMMRGVEKQNSIMKTSAMLGSFRTEPKTRDEFLSLLQLGR

SEQ ID NO: 6628 - protein, 294 aa, Chromobacterium haemolyticum
  misc_feature (1)..(294): tr|A0A1W0CAS0|A0A1W0CAS0_9NEIS GTP cyclohydrolase FolE2 OS=Chromobacterium haemolyticum OX=394935 GN=folE2 PE= 3 SV=1
MNAPLPDIARSGAAAALLPLNWVGMDGIALPLRLADAAQGCVAARASVQVNLPRPAIKGIHMSRLYRLLQAHADAAPLNPDALSRLLQAMADSHADCGSDAARAEFRFELLCQRPALATPGLSGWKAYPAALGAELDGDGCRLWAEVEIAYSSTCPCSAALARRLIADAFLQQNCAATPDAVHAWLLEHATLATPHSQRSQARLRFDIPADAAGWELAARIDLAEQALATPVQTAVKRADEQAFAALNGANLMYVEDAARRLQAALAGHGLSRVDVRHQESLHPHDAVAASQLS

SEQ ID NO: 6629 - protein, 298 aa, Chromobacterium haemolyticum
  misc_feature (1)..(298): tr|A0A2T5NTP3|A0A2T5NTP3_9NEIS GTP cyclohydrolase FolE2 OS=Chromobacterium haemolyticum OX=394935 GN=folE2 PE= 3 SV=1
MNAPLPDIARSGAAAALLPLNWVGMDGIALPLRLADAAHGRVAARASVQVNLPRPTIKGIHMSRLYRLLQPHAEAAPLSPAALSRLLQEMVDSHADCGSNAARAEFRFELLCQRPALATPDLSGWKAYSAALGAERDGDGCRLWAEVEIAYSSTCPCSAALARRLIADAFLQQACAATPDAVYDWLLEHATLATPHSQRSQARLRFDIAADAAHWDLAARIDLAEQALATPVQTAVKRADEQAFAALNGANLMYVEDAARRLRAALTSHGLSRVDVRHQESLHPHDAVAASQLTEERA

SEQ ID NO: 6630 - protein, 294 aa, Chromobacterium sp.
  misc_feature (1)..(294): tr|A0A2T5NH92|A0A2T5NH92_9NEIS GTP cyclohydrolase FolE2 OS=Chromobacterium sp. Panama OX=2161826 GN=folE2 PE=3 SV=1
MNAPLPDIARSGAAAALLPLNWVGMDGIALPLRLADAAHGCVAARASAQVNLPRPAIKGIHMSRLYRLLQAHADAAPLSPDALGRLLRAMADSHADCGSDAARAELRFELLCQRPALATPGLSGWKAYPAALGAELDGDGCRLWAEVEIAYSSTCPCSAALARRLIADAFRQQERAATPDAVYDWLLEHATLATPHSQRSQARLRFDIPADAAGWDLAARIDLAEQALATPVQTAVKRADEQAFAALNGANLMYVEDAARRLQAALAGHGLSRVDVRHQESLHPHDAVAASQLS

SEQ ID NO: 6631 - protein, 210 aa, Chromobacterium sp.
  misc_feature (1)..(210): tr|A0A344ULJ1|A0A344ULJ1_9NEIS GTP cyclohydrolase 1 OS= Chromobacterium sp. IIBBL 274-1 OX=2202142 GN=folE PE=3 SV=1
MEPRMSFSDDHDHSACQRPLDRVRPFDAAAFEQAVADMLTASGIAIDPIHTGKTAQRVRELWQKRLLDGYDTEPAEALGSGFADERRDMVVIRSLAVHGMCPHHLLPFRGVAHVAYLPGGRLHGFGRIARMVDAISHRYTYQEWITHEISRTLVEHGGARGAACLIEAEQLCLLMGENRRGDERVITQCYAGEFETDASARNEFLRAIER

SEQ ID NO: 6632 - protein, 206 aa, Chromobacterium vaccinii
  misc_feature (1)..(206): tr|A0A1D9LKM7|A0A1D9LKM7_9NEIS GTP cyclohydrolase 1 OS= Chromobacterium vaccinii OX=1108595 GN=BKX93_18740 PE=3 SV=1
MSFIDDHDHSACQRPLDRVRPFDAAAFEKAVADMLTASGIAIDPIHTGKTAQRVRELWQKRLLDGYDTVPAEALGSGFADDRRDMVVIRSLAVHGMCPHHLLPFRGVAHVAYLPGGRLHGFGRIARMVDAISHRYTYQEWITHEISRTLVEHGGARGAACLIEAEQLCLLMGENRRGDERVITQCYAGDFETDANARNEFLRAIER

SEQ ID NO: 6633 - protein, 206 aa, Chromobacterium vaccinii
  misc_feature (1)..(206): tr|A0A2L2B9M4|A0A2L2B9M4_9NEIS GTP cyclohydrolase 1 OS= Chromobacterium vaccinii OX=1108595 GN=CFN79_09815 PE=3 SV=1
MSFIDDHDHSACQRPLDRIRPFDAAAFEKAVADMLTASGIAIDPIHTGKTAQRVRELWQKRLLDGYDTVPAEALGSGFADDRRDMVVIRSLAVHGMCPHHLLPFRGVAHVAYLPGGRLHGFGRIARMVDAISHRYTYQEWITHEISRTLVEHGGARGAACLIEAEQLCLLMGENRRGDERVITQCYAGDFETDANARNEFLRAIER

SEQ ID NO: 6634 - protein, 206 aa, Chromobacterium violaceum
  misc_feature (1)..(206): sp|Q7NYZ2|GCH1_CHRVO GTP cyclohydrolase 1 OS=Chromobact erium violaceum (strain ATCC 12472 / DSM 30191 / JCM 12 49 / NBRC 12614 / NCIMB 9131 / NCTC 9757) OX=243365 GN= folE PE=3 SV=1
MSFTDDHDHAACQRPLERVRPFDAAAFERAVADMLTASGIAIDPIHTGKTAQRVRELWQKRLLDGYDTVPAEALGSGFADERRDMVVIRSLAVHGMCPHHLLPFRGVAHVAYLPGGRLHGFGRIARMVDAISHRYTYQEWITHEIARTLVEHGEARGAACLIEAEQLCLLMGENRRGDERVITQCYAGDFETDAEARNQFLRAIER

SEQ ID NO: 6635 - protein, 206 aa, Chromobacterium violaceum; identical to SEQ ID NO: 6632
  misc_feature (1)..(206): tr|A0A381EPL7|A0A381EPL7_CHRVL GTP cyclohydrolase 1 OS= Chromobacterium violaceum OX=536 GN=folE_1 PE=3 SV=1

SEQ ID NO: 6636 - protein, 184 aa, Chromohalobacter canadensis
  misc_feature (1)..(184): tr|A0A285VPN2|A0A285VPN2_9GAMM GTP cyclohydrolase 1 OS= Chromohalobacter canadensis OX=141389 GN=folE PE=3 SV=1
MTEELATHYRDIIAGLGEDPDREGLRDTPMRAAKAMQFLNQGYGQTLESLVNGAVFESQTDEMILVKDIELYSMCEHHLLPFIGKCHIAYLPKGKVLGLSKFARIVDMYARRMQIQENLTRQIAEAVQEVTEARGVGVIVEAQHMCMMMRGVEKQNSCMKTSVMLGAFRNNLNTRQEFLTLVHG

SEQ ID NO: 6637 - protein, 300 aa, Chromohalobacter japonicus
  misc_feature (1)..(300): tr|A0A1Q8T905|A0A1Q8T905_9GAMM GTP cyclohydrolase FolE2 OS=Chromohalobacter japonicus OX=223900 GN=folE2 PE=3 SV=1
MNQHTLHDVANGASDLEGPLAWVGMEDIALPFRLANSTVNGRASAGVSLDDATARGIHMSRLYLALEALEHQEVTLSRVSAVLQRFLDSHDDLSRTAFLDLSGDVLIKRPALISPRSGWKAYPCALRCRQEAQGMQATLEVTIGYSSTCPCSAALARQSIQQVFDEDFTDMPISHDAVRAWLGSEQGILATPHSQRSQAHLSLRLADDLEALPVTALIDTVEEALGTALQTAVKRVDEQAFALANGHNLMFCEDAARRVRHALQARDEVQGFQVRIVHAESLHAHDAVAHAEWNWTSASP

SEQ ID NO: 6638 - protein, 184 aa, Chromohalobacter japonicus
  misc_feature (1)..(184): tr|A0A1Q8TAP2|A0A1Q8TAP2_9GAMM GTP cyclohydrolase 1 OS= Chromohalobacter japonicus OX=223900 GN=folE PE=3 SV=1
MTEELATHYRDIIAGLGEDPDREGLRDTPMRAAKAMQFLNQGYGQTLESLVNGAVFESKTDEMVLIKDIELYSMCEHHLLPFIGKCHIAYLPKGKVLGLSKFARIVDMYARRMQIQENLTRQIAEAVQEVTEARGVGVIVEAQHMCMMMRGVEKQNSCMKTSVMLGAFRNNLNTRQEFLTLVHG

SEQ ID NO: 6639 - protein, 184 aa, Chromohalobacter marismortui
  misc_feature (1)..(184): tr|A0A4R7NRA5|A0A4R7NRA5_9GAMM GTP cyclohydrolase 1 OS= Chromohalobacter marismortui OX=42055 GN=folE PE=3 SV=1
MTEELATHYRAIIAGLGEDPDREGLRDTPMRAAKAMQFLNQGYGQTLESLVNGAVFESQTDEMVLIKDIELYSMCEHHLLPFIGKCHIAYLPEGRVLGLSKFARIVDMYARRMQIQENLTRQIAEAVQQVTQARGVGVIIEAQHMCMMMRGVEKQNSSMKTSVMLGAFRNNLTTRQEFLTLVHG

SEQ ID NO: 6640 - protein, 304 aa, Chromohalobacter salexigens
  misc_feature (1)..(304): sp|Q1R153|GCH4_CHRSD GTP cyclohydrolase FolE2 OS=Chromo halobacter salexigens (strain DSM 3043 / ATCC BAA-138 / NCIMB 13768) OX=290398 GN=folE2 PE=3 SV=1
MQEPKNSQTLHDVANGASDLEGPLAWVGMEDIALPFRLANSAVNGRASAGVSLDATSARGIHMSRLYLALEALEHEEVTLSGLGAVLQRFLASHDGLARTAFLDLSGDVLIKRPALISPRAGWKAYPCALRCRQDTQGMQAVLEVTIGYSSTCPCSAALARQSIQQAFDEDFTDMPISHEAVRTWLGSEQGILATPHSQRSQAHLSLRLADDLETLPVTALIDTVEDALGTALQTAVKRVDEQAFALANGQNLMFCEDAARRVRHALQARDEVQGFRVRIVHAESLHAHDAVAHAEWNWTPNSP

SEQ ID NO: 6641 - protein, 184 aa, Chromohalobacter salexigens
  misc_feature (1)..(184): tr|A0A317R5N0|A0A317R5N0_CHRSL GTP cyclohydrolase 1 OS= Chromohalobacter salexigens OX=158080 GN=folE PE=3 SV=1
MTEELADNYRHIIAGLGEDPDREGLRDTPKRAAKAMQFLTQGYGQTLESLVNGAVFESQTDEMVLIKDIELYSMCEHHLLPFIGKCHIAYLPEGRVLGLSKFARIVDMYARRMQIQENLTRQIAEAVQQVTQARGVGVIIEAQHMCMMMRGVEKQNSSMKTSVMLGAFRNNLTTRQEFLTLVHG

SEQ ID NO: 6642 - protein, 239 aa, Chroococcales cyanobacterium
  misc_feature (1)..(239): tr|A0A2G7GRU5|A0A2G7GRU5_9CHRO GTP cyclohydrolase 1 OS= Chroococcales cyanobacterium IPPAS B-1203 OX=2049454 GN =folE PE=3 SV=1
MTIGFSGGSSRSNSPLMPDSLEDKINRIATRPDRNTQNGKEAKLQPPPEDLDEKMVDAVRTMLLGVGEDPDREGLLKTPKRVVEAMHFLTSGYNQSLEELVNDAIFDEGHNEMVLVRDINFFSLCEHHMLPFMGRAHVAYIPNEKVVGLSKLARIVEMYSRRLQVQERLTRQIAEAVQTILEPQGVAVVMEATHMCMVMRGVQKPGSWTVTSAMVGVFHDEQKTREEFLNLIRHQPAFF

SEQ ID NO: 6643 - protein, 179 aa, Chroococcales cyanobacterium
  misc_feature (1)..(179): tr|A0A3N5IUK2|A0A3N5IUK2_9CHRO GTP cyclohydrolase 1 (Fr agment) OS=Chroococcales cyanobacterium metabat2.561 OX =2485785 GN=folE PE=3 SV=1
MTIASSNGLNGNLTDAIQARVTTSPDRNTHNGKTAQIHPTSDENKEQMMDAVRNILISVGEDPEREGLLKTPKRVAEAMQFLTQGYQQSLETLVNGAIFDEGHNEMVLVRDIDFFSLCEHHMLPFMGRAHVAYIPNQKVVGLSKLARIVEMYSRRLQVQERLTRQIAEAIQEILDPQGV

SEQ ID NO: 6644 - protein, 241 aa, Chroococcidiopsis cubana
  misc_feature (1)..(241): tr|A0A433W6J4|A0A433W6J4_9CYAN GTP cyclohydrolase 1 OS= Chroococcidiopsis cubana SAG 39.79 OX=388085 GN=folE PE =3 SV=1
MTIAASNGSNGSTNRFQSSPLNSDLVEAIQSRPDRNTHNGQKPNLQTPTEAEAHESMMEAVRALLIGVGEDPEREGLLKTPKRVAEAMRFLTSGYSQSLEELVNGAIFDEGHNEMVLVRDINFFSLCEHHMLPFMGRAHVAYIPNQKVVGLSKLARIVEMYSRRLQVQERLTRQIAEAVQEILDPQGVAVVMEATHMCMVMRGVQKPGSWTVTSAMLGVFQDEQKTREEFFNLIRHQPAFF

SEQ ID NO: 6645 - protein, 239 aa, Chroococcidiopsis sp.
  misc_feature (1)..(239): tr|A0A2S6V473|A0A2S6V473_9CYAN GTP cyclohydrolase 1 OS= Chroococcidiopsis sp. TS-821 OX=1378066 GN=folE PE=3 SV =1
MTIGFPNGSPRSNSPLMPDSIEDTINRITTRPDRNTQNGKEAQLQPPSEELDEAMVEAVRTILLGVGEDPNREGLLKTPKRVVEAMRFLTSGYNQSLEEIVNNAIFDEGHNEMVLVRDINFFSLCEHHMLPFMGRAHVAYIPNEKVVGLSKLARIVEMYSRRLQVQERLTRQIAEAVQKILEPQGVAVVMEATHMCMVMRGVQKPGSWTVTSAMVGVFHDDQKTREEFLNLIRHQPAFF

SEQ ID NO: 6646 - protein, 241 aa, Chroococcidiopsis sp.
  misc_feature (1)..(241): tr|A0A2P8QQS9|A0A2P8QQS9_9CYAN GTP cyclohydrolase 1 OS= Chroococcidiopsis sp. CCALA 051 OX=869949 GN=folE PE=3 SV=1
MTIAASNGSNGSTNRFQSSPLNSDLVEAIQSRPDRNTHNGQKPNLQTPTEAEAHESMMEAVRALLIGVGEDPEREGLLKTPKRVAEAMRFLTSGYSQSLEELVNGAIFDEGHNEMVLVRDINFFSLCEHHMLPFMGKAHLAYIPNQKVVGLSKLARIVEMYSRRLQVQERLTRQIAEAVQEILEPQGVAVVMEATHMCMVMRGVQKPGSWTVTSAMLGVFQDEQKTREEFFNLIRHQPAFF

SEQ ID NO: 6647 - protein, 212 aa, Chroococcidiopsis thermalis
  misc_feature (1)..(212): tr|K9U4P6|K9U4P6_CHRTP GTP cyclohydrolase 1 OS=Chroococ cidiopsis thermalis (strain PCC 7203) OX=251229 GN=folE PE=3 SV=1
MTFSISPDEILKQSAIATAKSPVSEAEMMQAVRTLLLGMGEDPDREGLRDTPKRVVKALKFLTSGYRQSLDELLNGAIFHEDADEMVLVRDIDLFSSCEHHILPIIGRAHVAYIPNGKVIGLSKIARICEMYARRLQVQERLTVQIADALQGLLKPQGVAVVVEATHMCMVMRGVQKPGSWTVSSAMRGVFADDAKTRQEFMSLVRHSPAFH

SEQ ID NO: 6648 - protein, 241 aa, Chroococcidiopsis thermalis; identical to SEQ ID NO: 6644
  misc_feature (1)..(241): tr|K9TYJ1|K9TYJ1_CHRTP GTP cyclohydrolase 1 OS=Chroococ cidiopsis thermalis (strain PCC 7203) OX=251229 GN=folE PE=3 SV=1

SEQ ID NO: 6649 - protein, 239 aa, Chroogloeocystis siderophila
  misc_feature (1)..(239): tr|A0A1U7HG04|A0A1U7HG04_9CHRO GTP cyclohydrolase 1 OS= Chroogloeocystis siderophila 5.2 s.c.1 OX=247279 GN=fol E PE=3 SV=1
MTIGFPNGSPRSNSPLMPDSLEDTINRIATRPDRNTQNGKEAQLQPPSEELNEAMVEAVRTMLLGVGEDPEREGLIKTPKRVVEAMRFLTSGYNQSLEDLVNNAIFDEGHNEMVLVRDINFFSLCEHHMLPFMGRAHVAYIPNEKVVGLSKLARIVEMYSRRLQVQERLTRQIAEAVQTILEPQGVAVVMEATHMCMVMRGVQKPGSWTVTSAMIGVFHDEQKTREEFLNLIRHQPAFF

SEQ ID NO: 6650 - protein, 222 aa, Chryseobacterium angstadtii
  misc_feature (1)..(222): tr|A0A0J7IJ56|A0A0J7IJ56_9FLAO GTP cyclohydrolase 1 OS= Chryseobacterium angstadtii OX=558151 GN=folE PE=3 SV=1
MVDFTDNDDDIFTGKEHTPIRKDAFDKSPQEKIEKITELFGEIMETLGMDMTDDSLKDSPRRVAKMYVNEIFGGLLPENKPGISTFSNKYKYRQMLVEKDITVYSFCEHHFLPIIGRAHVAYISNGEVIGLSKINRIVDYYAKRPQVQERLTMQIVDALKEALGTKDVACIIDAKHLCVNCRGIKDTASSTITAELSGIFRTNPITRQEFLHYVGSHAKLDY

SEQ ID NO: 6651 - protein, 221 aa, Chryseobacterium antarcticum
  misc_feature (1)..(221): tr|A0A448NRT3|A0A448NRT3_9FLAO GTP cyclohydrolase 1 OS= Chryseobacterium antarcticum OX=266748 GN=folE PE=3 SV= 1
MNENLDNDDDVFTGKEHTPLRPDAFEKSPAEKIEIIQKHFHEIMETLGMDMTDDSLKDSPKRVAKMYVNEIFGGLLPENTPRISTFSNKYKYRQMLVEKDITVYSFCEHHFLPIIGRAHVAYISNGEVIGLSKINRVVDYYAKRPQVQERLTMQIVEALKGALGTNDVACIIEAKHLCVNCRGIKDTASSTTTAELSGLFRTNPITRQEFLHYVGSRSSLE

SEQ ID NO: 6652 - protein, 222 aa, Chryseobacterium aquaticum
  misc_feature (1)..(222): tr|A0A0Q3SGG9|A0A0Q3SGG9_9FLAO GTP cyclohydrolase 1 OS= Chryseobacterium aquaticum OX=452084 GN=folE PE=3 SV=1
MVDFTDNDDDIFIGKEHTPIRENAFEKSPQEKIEKITELFGEIMETLGLDMTDDSLKDSPKRVAKMYVNEIFGGLLPENKPGISTFSNKYKYRQMLVEKDITVYSFCEHHFLPIIGRAHVAYISNGDVIGLSKINRIVDYYAKRPQVQERLTMQIVDALKEALGTKDVACIIDAKHLCVNCRGIKDTASSTITAELSGIFRTNPITRQEFLHYVGSHAKLDY

SEQ ID NO: 6653 - protein, 221 aa, Chryseobacterium aquifrigidense
  misc_feature (1)..(221): tr|A0A543ECY3|A0A543ECY3_9FLAO GTP cyclohydrolase 1 OS= Chryseobacterium aquifrigidense OX=558021 GN=folE PE=3 SV=1
MVDFTDNDDDIFTGKEHTPIREDAFDKSPQEKIEKITELFGEIMETLGMDMTDDSLKDSPRRVAKMYVNEIFGGLLPENKPGISTFSNKYKYRQMLVEKDITVYSFCEHHFLPIIGRAHVAYISNGEVIGLSKINRIVDYYAKRPQVQERLTMQIVDALKEALGTKDVACIIDAKHLCVNCRGIKDTASSTITAELSGIFRTNPITRQEFLHYVGSHAKLD

SEQ ID NO: 6654 - protein, 221 aa, Chryseobacterium arachidiradicis
  misc_feature (1)..(221): tr|A0A420DB98|A0A420DB98_9FLAO GTP cyclohydrolase 1 OS= Chryseobacterium arachidiradicis OX=1617282 GN=folE PE= 3 SV=1
MEQFPDNDDDLFTGKDHTPLRKDAFDLSPDEKVKKIEQLFGEIMQTLGLDMTDDSLKDSPKRVAKMYVNEIFGGLLPENKPGVSTFKNQYKYRQMLVEKDITVYSFCEHHFLPIIGKAHVAYISNGEVIGLSKINRIVDYYAKRPQVQERLTMQIVDALKEALGTNNVACIIDAKHLCVNCRGIKDTASSTITAELSGIFRTNPITRQEFLHYVGSHAKFD

SEQ ID NO: 6655 - protein, 221 aa, Chryseobacterium arachidis
  misc_feature (1)..(221): tr|A0A1M4WT29|A0A1M4WT29_9FLAO GTP cyclohydrolase 1 OS= Chryseobacterium arachidis OX=1416778 GN=folE PE=3 SV=1
MVDFTDNDDDIFTGKEHTPIRKDAFDKSPEEKIEKITELFGEIMETLGMDMTDDSLKDSPRRVAKMYVNEIFGGLLPENKPGISTFSNKYKYRQMLVEKDITVYSFCEHHFLPIIGRAHVAYISNGEVIGLSKINRIVDYYAKRPQVQERLTMQIVDALKEALGTKDVACIIDAKHLCVNCRGIKDTASSTITAELSGIFRTNPITRQEFLHYVGSHAKLD

SEQ ID NO: 6656 - protein, 222 aa, Chryseobacterium arthrosphaerae
  misc_feature (1)..(222): tr|A0A1B8ZJJ5|A0A1B8ZJJ5_9FLAO GTP cyclohydrolase 1 OS= Chryseobacterium arthrosphaerae OX=651561 GN=folE PE=3 SV=1
MVDFTDNDDDIFTGKEHTPIRKDAFDKSPQEKIEKITELFGEIMETLGLDMTDDSLKDSPKRVAKMYVNEIFGGLLPENKPGISTFSNKYKYRQMLVEKDITVYSFCEHHFLPIIGRAHVAYISNGEVIGLSKINRIVDYYAKRPQVQERLTMQVVDALKEALGTKDVACIIDAKHLCVNCRGIKDTASSTITAELSGIFRTNPITRQEFLHYVGSHAKLDY

SEQ ID NO: 6657 - protein, 221 aa, Chryseobacterium artocarpi
  misc_feature (1)..(221): tr|A0A1B8ZE50|A0A1B8ZE50_9FLAO GTP cyclohydrolase 1 OS= Chryseobacterium artocarpi OX=1414727 GN=folE PE=3 SV=1
MVDFTDNDDDIFTGKEHTPIREDAFDKSPQEKIEKITELFGEIMETLGLDMTDDSLKDSPKRVAKMYVNEIFGGLLPENKPGISTFSNKYKYRQMLVEKDITVYSFCEHHFLPIIGRAHVAYISNGEVIGLSKINRIVDYYAKRPQVQERLTMQIVDALKEALGTKDVACIIDAKHLCVNCRGIKDTASSTITAELSGIFRTNPITRQEFLHYVGSHAKLD

SEQ ID NO: 6658 - protein, 222 aa, Chryseobacterium balustinum
  misc_feature (1)..(222): tr|A0A3G6TSE9|A0A3G6TSE9_9FLAO GTP cyclohydrolase 1 OS= Chryseobacterium balustinum OX=246 GN=folE PE=3 SV=1
MVDFTDNDDDIFTGKEHTPIREDAFEKSPQEKIEKITELFGEIMETLGLDMTDDSLKDSPKRVAKMYVNEIFGGLLPENKPGISTFSNKYKYRQMLVEKDITVYSFCEHHFLPIIGRAHVAYISNGDVIGLSKINRIVDYYAKRPQVQERLTMQIVDALKDALGTKNVACIIDAKHLCVNCRGIKDTASSTITAELSGIFRTNPITRQEFLHYVGSHAKLDY

SEQ ID NO: 6659 - protein, 221 aa, Chryseobacterium bernardetii; identical to SEQ ID NO: 6657
  misc_feature (1)..(221): tr|A0A3G6TD70|A0A3G6TD70_9FLAO GTP cyclohydrolase 1 OS= Chryseobacterium bernardetii OX=1241978 GN=folE PE=3 SV =1

SEQ ID NO: 6660 - protein, 221 aa, Chryseobacterium bovis
  misc_feature (1)..(221): tr|A0A1U7PXH5|A0A1U7PXH5_9FLAO GTP cyclohydrolase 1 OS= Chryseobacterium bovis DSM 19482 OX=1121284 GN=folE PE= 3 SV=1
MEDFPDNDDDLFTGKDHTPLRKDAFDLKPEEKVKKIEQLFGEIMQTLGLDMTDDSLKDSPKRVAKMYVNEIFGGLLPENKPGISTFKNQYKYRQMLVEKDITVYSFCEHHFLPIIGKAHVAYISNGEVIGLSKINRIVDYYAKRPQVQERLTMQIVEALKEALGTKNVACIIDAKHLCVNCRGIKDTASSTITAELSGIFRTNPITRQEFLHYVGSHAKFD

SEQ ID NO: 6661 - protein, 222 aa, Chryseobacterium carnipullorum
  misc_feature (1)..(222): tr|A0A1M7N7T4|A0A1M7N7T4_9FLAO GTP cyclohydrolase 1 OS= Chryseobacterium carnipullorum OX=1124835 GN=folE PE=3 SV=1
MVDFTDNDDDIFTGKEHTPIRKDAFDKSPQEKIEKITELFGEIMETLGMDMTDDSLKDSPKRVAKMYVNEIFGGLLPENKPGISTFSNKYKYRQMLVEKDITVYSFCEHHFLPIIGRAHVAYISNGEVIGLSKINRIVDYYAKRPQVQERLTMQIVDALKEALGTKDVACIIDAKHLCVNCRGIKDTASSTITAELSGIFRTNPITRQEFLHYVGSHAKLDY

SEQ ID NO: 6662 - protein, 221 aa, Chryseobacterium carnis
  misc_feature (1)..(221): tr|A0A3G8XMF0|A0A3G8XMF0_9FLAO GTP cyclohydrolase 1 OS= Chryseobacterium carnis OX=1241979 GN=folE PE=3 SV=1
MNQDIDFDDDVFTGKEHTPLRKDAFDKSPEEKIEIIQKHFHAIMETLGMDMTDDSLKDSPKRVAKMYVNEIFGGLLPENNPRISTFSNKYKYRQMLVEKDITVYSFCEHHFLPIIGRAHVAYISNGEVIGLSKINRVVDYYAKRPQVQERLTMQIVDALKKALGTNDVACIIEAKHLCVNCRGIKDTASSTTTAELSGLFRTNAITRQEFLHYVGNRSSLD

SEQ ID NO: 6663 - protein, 221 aa, Chryseobacterium chaponense
  misc_feature (1)..(221): tr|A0A1N7J422|A0A1N7J422_9FLAO GTP cyclohydrolase 1 OS= Chryseobacterium chaponense OX=713588 GN=folE PE=3 SV=1
MSKNFDNDDDLFTGKGFTPLRDDAFEKSPEEKIEIIQKHFHQIMETLGMDMTDDSLKDSPKRVAKMYVNEIFGGLLPENNPRISTFSNKYKYRQMLVEKDITVYSFCEHHFLPIIGRAHVAYISNGEVIGLSKINRVVDYYAKRPQVQERLTMQIVEALKVALGTKDVACIIEAKHLCVNCRGIKDTASSTTTAELSGLFRTNSITRQEFLHYVGNRSNLE

SEQ ID NO: 6664 - protein, 221 aa, Chryseobacterium contaminans
  misc_feature (1)..(221): tr|A0A1M6WPN4|A0A1M6WPN4_9FLAO GTP cyclohydrolase 1 OS= Chryseobacterium contaminans OX=1423959 GN=folE PE=3 SV =1
MVDFTDNDDDIFTGKEHTPIREDAFDKSPQEKIEKITELFGEIMETLGLDMTDDSLKDSPKRVAKMYVNEIFGGLLPENKPGISTFSNKYKYRQMLVEKDITVYSFCEHHFLPIIGRAHVAYISNGEVIGLSKINRIVDYYAKRPQVQERLTMQIVEALKEALGTKNVACIIDAKHLCVNCRGIKDTASSTITAELSGIFRTNPITRQEFLHYVGSHAKLD

SEQ ID NO: 6665 - protein, 221 aa, Chryseobacterium culicis; identical to SEQ ID NO: 6653
  misc_feature (1)..(221): tr|A0A2S9CT69|A0A2S9CT69_9FLAO GTP cyclohydrolase 1 OS= Chryseobacterium culicis OX=680127 GN=folE PE=3 SV=1

SEQ ID NO: 6666 - protein, 221 aa, Chryseobacterium culicis
  misc_feature (1)..(221): tr|A0A1H6HK36|A0A1H6HK36_9FLAO GTP cyclohydrolase 1 OS= Chryseobacterium culicis OX=680127 GN=folE PE=3 SV=1
MVDFTDNDDDIFTGKEHTPIREDAFDKSPQEKIEKITELFGEIMQTLGLDMTDDSLKDSPRRVAKMYVNEIFGGLLPENKPGISTFSNKYKYRQMLVEKDITVYSFCEHHFLPIIGRAHVAYISNGEVIGLSKINRIVDYYAKRPQVQERLTMQIVDALKEALGTKDVACIIDAKHLCVNCRGIKDTASSTITAELSGIFRTNPITRQEFLHYVGSHAKLD

SEQ ID NO: 6667 - protein, 221 aa, Chryseobacterium daecheongense
  misc_feature (1)..(221): tr|A0A3N0VS34|A0A3N0VS34_9FLAO GTP cyclohydrolase 1 OS= Chryseobacterium daecheongense OX=192389 GN=folE PE=3 S V=1
MVDFTDNDDDIFTGKEHTPIRKDAFDKSPEEKIEKITELFGEIMYTLGMDMTDDSLKDSPKRVAKMYVNEIFGGLLPENKPGISTFSNKYKYRQMLVEKDITVYSFCEHHFLPIIGKAHVAYISNGEVIGLSKINRIVDYYAKRPQVQERLTMQIVDALKEALGTKDVACIIDAKHLCVNCRGIKDTASSTITAELSGIFRTNPITRQEFLHYVGSHAKFD

SEQ ID NO: 6668 - protein, 221 aa, Chryseobacterium defluvii; identical to SEQ ID NO: 6667
  misc_feature (1)..(221): tr|A0A495S8C4|A0A495S8C4_9FLAO GTP cyclohydrolase 1 OS= Chryseobacterium defluvii OX=160396 GN=folE PE=3 SV=1

SEQ ID NO: 6669 - protein, 222 aa, Chryseobacterium elymi; identical to SEQ ID NO: 6661
  misc_feature (1)..(222): tr|A0A3D9DJ79|A0A3D9DJ79_9FLAO GTP cyclohydrolase 1 OS= Chryseobacterium elymi OX=395936 GN=folE PE=3 SV=1

SEQ ID NO: 6670 - protein, 221 aa, Chryseobacterium flavum
  misc_feature (1)..(221): tr|A0A3D9CSF8|A0A3D9CSF8_9FLAO GTP cyclohydrolase 1 OS= Chryseobacterium flavum OX=415851 GN=folE PE=3 SV=1
MVDFTDNDDDIFTGKEHTPIRKDAFDKSPQEKIEKITELFGEIMETLGLDMTDDSLKDSPKRVAKMYVNEIFGGLLPENKPGISTFSNKYKYRQMLVEKDITVYSFCEHHFLPIIGRAHVAYISNGEVIGLSKINRIVDYYAKRPQVQERLTMQIVDALKEALGTKDVACIIDAKHLCVNCRGIKDTASSTITAELSGIFRTNPITRQEFLHYVGSHAKLD

SEQ ID NO: 6671 - protein, 222 aa, Chryseobacterium formosense
  misc_feature (1)..(222): tr|A0A085Z300|A0A085Z300_9FLAO GTP cyclohydrolase 1 OS= Chryseobacterium formosense OX=236814 GN=folE PE=3 SV=1
MVDFTDNDDDIFTGKEHTPIRDDAFEKSPEEKIEKITGLFAEIMETLGLDMTDDSLKDSPKRVAKMYVNEIFGGLLPENKPGISTFSNKYKYRQMLVEKDITVYSFCEHHFLPIIGRAHVAYISNGEVIGLSKINRIVDYYAKRPQVQERLTMQIVNALKEALGTKDVACIIDAKHLCVNCRGIKDTASSTITAELSGIFRTNPITRQEFLHYVGSHAKLDY

SEQ ID NO: 6672 - protein, 221 aa, Chryseobacterium frigidisoli
  misc_feature (1)..(221): tr|A0A1I3GGX9|A0A1I3GGX9_9FLAO GTP cyclohydrolase 1 OS= Chryseobacterium frigidisoli OX=1125876 GN=folE PE=3 SV =1
MQDFLDNDDDVFTGKEHTPLREDAFDKLPAEKIEIIQHHFGKIMETLGLDMTDDSLKDSPKRVAKMYVNEIFGGLLPENKPTISSFSNKYKYRQMLVEKDITVYSFCEHHFLPIIGRAHVAYISNGEVIGLSKINRIVDYYSKRPQVQERLTMQIVDALKEALNTIDVACIIDAKHLCVNCRGIKDTASSTITAELSGIFRSNPITRQEFLHYVGSHAKID

SEQ ID NO: 6673 - protein, 221 aa, Chryseobacterium gallinarum
  misc_feature (1)..(221): tr|A0A0G3M7I9|A0A0G3M7I9_9FLAO GTP cyclohydrolase 1 OS= Chryseobacterium gallinarum OX=1324352 GN=folE PE=3 SV= 1
MVDFTDNDDDIFTGKEHTPIREDAFDKSPQEKIEKITELFGEIMETLGLDMTDDSLKDSPKRVAKMYVNEIFGGLLPENKPGISTFSNKYKYRQMLVEKDITVYSFCEHHFLPIIGRAHVAYISNGEVIGLSKINRIVDYYAKRPQVQERLTMQIVAALKEALGTKDVACIIDAKHLCVNCRGIKDTASSTITAELSGIFRTNPITRQEFLHYVGSHAKLD

SEQ ID NO: 6674 - protein, 221 aa, Chryseobacterium gambrini; identical to SEQ ID NO: 6136
  misc_feature (1)..(221): tr|A0A1N7QEW7|A0A1N7QEW7_9FLAO GTP cyclohydrolase 1 OS= Chryseobacterium gambrini OX=373672 GN=folE PE=3 SV=1

SEQ ID NO: 6675 - protein, 222 aa, Chryseobacterium geocarposphaerae
  misc_feature (1)..(222): tr|A0A2M9C136|A0A2M9C136_9FLAO GTP cyclohydrolase 1 OS= Chryseobacterium geocarposphaerae OX=1416776 GN=folE PE =3 SV=1
MVDFTDNDDDIFTGKEHTPIRKDAFDKSPEEKVEKITELFGEIMETLGLDMTDDSLKDSPKRVAKMYVNEIFGGLLPENKPGISTFSNKYKYRQMLVEKDITVYSFCEHHFLPIIGRAHVAYISNGEVIGLSKINRIVDYYAKRPQVQERLTMQIVDALKEALGTKDVACIIDAKHLCVNCRGIKDTASSTITAELSGIFRTNPITRQEFLHYVGSHAKLDY

SEQ ID NO: 6676 - protein, 221 aa, Chryseobacterium glaciei
  misc_feature (1)..(221): tr|A0A172XTC8|A0A172XTC8_9FLAO GTP cyclohydrolase 1 OS= Chryseobacterium glaciei OX=1685010 GN=folE PE=3 SV=1
MVDFTDNDDDIFTGKEHTPIREDAFDKSPQEKIEKITELFGEIMETLGLDMTDDSLKDSPTRVAKMYVNEIFGGLLPENKPGISTFSNKYKYSQMLVEKDITVYSFCEHHFLPIIGRAHVAYISNGEVIGLSKINRIVDYYAKRPQVQERLTMQIVNALKEALGTKNVACIIDAKHLCVNCRGIKDTASSTITAELSGIFKTNPITRQEFLHYVGSHAKLD

SEQ ID NO: 6677 - protein, 221 aa, Chryseobacterium gleum
  misc_feature (1)..(221): tr|A0A4U8WDD2|A0A4U8WDD2_9FLAO GTP cyclohydrolase 1 OS= Chryseobacterium gleum OX=250 GN=folE PE=3 SV=1
MVDFTDNDDDIFTGKEHTPIREDAFEKSPEEKIEKITALFGEIMETLGLDMTDDSLKDSPRRVAKMYVNEIFGGLLPENKPGISTFSNKYKYRQMLVEKDITVYSFCEHHFLPIIGRAHVAYISNGEVIGLSKINRIVDYYAKRPQVQERLTMQIVNALKEALGTKDVACIIDAKHLCVNCRGIKDTASSTITAELSGIFRTNPITRQEFLHYVGSHAKLD

SEQ ID NO: 6678 - protein, 221 aa, Chryseobacterium gleum
  misc_feature (1)..(221): tr|A0A3S4M314|A0A3S4M314_9FLAO GTP cyclohydrolase 1 OS= Chryseobacterium gleum OX=250 GN=folE PE=3 SV=1
MVDFTDNDDDIFTGKEHTPIREDAFDKSPQEKIEKITELFGEIMETLGLDMTDDSLKDSPRRVAKMYVNEIFGGLLPENKPGISTFSNKYKYRQMLVEKDITVYSFCEHHFLPIIGRAHVAYISNGEVIGLSKINRIVDYYAKRPQVQERLTMQIVDALKEALGTKDVACIIDAKHLCVNCRGIKDTASSTITAELSGIFRTNPITRQEFLHYVGSHAKLD

SEQ ID NO: 6679 - protein, 222 aa, Chryseobacterium greenlandense
  misc_feature (1)..(222): tr|A0A101CCS6|A0A101CCS6_9FLAO GTP cyclohydrolase 1 OS= Chryseobacterium greenlandense OX=345663 GN=folE PE=3 S V=1
MVDFTDNDDDIFTGKEHTPIRENAFEKSPQEKIEKITELFGEIMETLGLDMTDDSLKDSPKRVAKMYVNEIFGGLLPENKPGISTFSNKYKYRQMLVEKDITVYSFCEHHFLPIIGRAHVAYISNGDVIGLSKINRIVDYYAKRPQVQERLTMQIVDALKEALGTKDVACIIDAKHLCVNCRGIKDTASSTITAELSGIFRTNPITRQEFLHYVGSHAKLDY

SEQ ID NO: 6680 - protein, 221 aa, Chryseobacterium hagamense
  misc_feature (1)..(221): tr|A0A511YIT8|A0A511YIT8_9FLAO GTP cyclohydrolase 1 OS= Chryseobacterium hagamense OX=395935 GN=folE2 PE=3 SV=1
MVDFTDNDDDIFTGKEHTPIREDAFDKSPEEKIEKITELFGEIMQTLGMDMTDDSLKDSPRRVAKMYVNEIFGGLLPENKPGISTFSNKYKYRQMLVEKDITVYSFCEHHFLPIIGRAHVAYISNGDVIGLSKINRIVDYYAKRPQVQERLTMQIVDALKEALGTKDVACIIDAKHLCVNCRGIKDTASSTITAELSGIFRTNPITRQEFLHYVGSHAKLD

SEQ ID NO: 6681 - protein, 221 aa, Chryseobacterium haifense
  misc_feature (1)..(221): tr|A0A2D0A6H6|A0A2D0A6H6_9FLAO GTP cyclohydrolase 1 OS= Chryseobacterium haifense DSM 19056 OX=1450526 GN=folE PE=3 SV=1
MNQDIDNDDDLFTGKDHTPLRSDAFEKTPQEKIEIIQHHFHQIMETLGMDMNDDSLKDSPKRVAKMYVNEIFGGLLPENKPGISTFSNKYKYRQMLVEKDITVYSFCEHHFLPIIGKAHVAYISNGEVIGLSKINRLVDYYAKRPQVQERLTMQIVDALKQALGTKDVACIIDAKHLCVNCRGIKDTASSTITAELSGIFRTNPITRQEFLHYVGSHAKFD

SEQ ID NO: 6682 - protein, 221 aa, Chryseobacterium haifense
  misc_feature (1)..(221): tr|A0A3G6SWU5|A0A3G6SWU5_9FLAO GTP cyclohydrolase 1 OS= Chryseobacterium haifense OX=421525 GN=folE PE=3 SV=1
MNQDIDNDDDLFTGKDHTPLRSDAFEKTPQEKIEIIQHHFHQIMETLGMDMNDDSLKDSPKRVAKMYVNEIFGGLLPENKPGISTFSNKYKYRQMLVEKDITVYSFCEHHFLPIIGKAHVAYISNGEVIGLSKINRIVDYYAKRPQVQERLTMQIVDALKQALGTKDVACIIDAKHLCVNCRGIKDTASSTITAELSGIFRTNPITRQEFLHYVGSHAKFD

SEQ ID NO: 6683 - protein, 221 aa, Chryseobacterium halperniae
  misc_feature (1)..(221): tr|A0A085BIK2|A0A085BIK2_9FLAO GTP cyclohydrolase 1 OS= Chryseobacterium halperniae OX=421072 GN=folE PE=3 SV=1
MEHIPDNDDDLFTGKDHTPLRPDAFDLKPEEKIKKIEGLFGEIMETLGLDMTDDSLKDSPKRVAKMYVNEIFGGLLPENKPGISTFKNQYKYRQMLVEKDITVYSFCEHHFLPIIGKAHVAYISSGEVIGLSKINRIVDYYAKRPQVQERLTMQIVDALKEALGTNNVACIIDAKHLCVNCRGIKDTASSTITAELSGIFRTNPITRQEFLHYVGSHAKFD

SEQ ID NO: 6684 - protein, 221 aa, Chryseobacterium hispanicum
  misc_feature (1)..(221): tr|A0A3D9D3J1|A0A3D9D3J1_9FLAO GTP cyclohydrolase 1 OS= Chryseobacterium hispanicum OX=358687 GN=folE PE=3 SV=1
MEHFPDNDDDLFTGKDHTPLRADAFELKPEEKVKKIEGLFSEIMHTLGLDMTDDSLKDSPKRVAKMYVNEIFGGLLPENKPGVSTFKNQYKYRQMLVEKDITVYSFCEHHFLPIIGKAHVAYISNGEVIGLSKINRIVDYYAKRPQVQERLTMQIVEAMKEALGTENVACIIDAKHLCVNCRGIKDTASSTITAELSGIFRKNPTTRREFLHYVGTHMKLD

SEQ ID NO: 6685 - protein, 221 aa, Chryseobacterium hominis
  misc_feature (1)..(221): tr|A0A1H6J5K5|A0A1H6J5K5_9FLAO GTP cyclohydrolase 1 OS= Chryseobacterium hominis OX=420404 GN=folE PE=3 SV=1
MEQFPDNDDDVFTGKEHTPLRNDAFELDPDKKIRKIEGLFAEIMHTLGLDMTDDSLKDSPKRVAKMYVNEIFGGLLPENKPAISTFKNQYKYRQMLVEKDITVYSFCEHHFLPIIGKAHVAYISNGEVIGLSKINRIVDYYAKRPQVQERLTMQIVDALKDALGTNNVACIIDAKHLCVNCRGIKDTASSTITAELSGIFRTNPITRQEFLHYVGSHAKFD

SEQ ID NO: 6686 - protein, 221 aa, Chryseobacterium humi
  misc_feature (1)..(221): tr|A0A1H5W2U9|A0A1H5W2U9_9FLAO GTP cyclohydrolase 1 OS= Chryseobacterium humi OX=493375 GN=folE PE=3 SV=1
MQDFLDNDDDVFTGKEHTPLREDAFEKLPSEKIEIIQHHFGKIMETLGLDMTDDSLKDSPKRVAKMYVNEIFGGLLPENKPTISSFSNKYKYRQMLVEKDITVYSFCEHHFLPIIGRAHVAYISNGEVIGLSKINRIVDYYAKRPQVQERLTMQIVDALKEALNTTDVACIIDAKHLCVNCRGIKDTASSTITAELSGIFRSNPITRQEFLHYVGSHTKLD

SEQ ID NO: 6687 - protein, 221 aa, Chryseobacterium hungaricum
  misc_feature (1)..(221): tr|A0A1G7HD33|A0A1G7HD33_9FLAO GTP cyclohydrolase 1 OS= Chryseobacterium hungaricum OX=454006 GN=folE PE=3 SV=1
MEHFPDNDDDLFTGKDHTPLRPDAFELGPEDKVKKIEGLFSEIMHTLGLDMTDDSLKDSPKRVAKMYVNEIFGGLLPENKPGVSTFKNQYKYRQMLVEKDITVYSFCEHHFLPIIGKAHVAYISNGEVIGLSKINRIVDYYAKRPQVQERLTMQIVDALKEALGTKNVACIIDAKHLCVNCRGIKDTASSTITAELSGIFRTNPITRQEFLHYVGSHAKFD

SEQ ID NO: 6688 - protein, 221 aa, Chryseobacterium indologenes; identical to SEQ ID NO: 6678
  misc_feature (1)..(221): tr|A0A411DN92|A0A411DN92_9FLAO GTP cyclohydrolase 1 OS= Chryseobacterium indologenes OX=253 GN=folE PE=3 SV=1

SEQ ID NO: 6689 - protein, 221 aa, Chryseobacterium indologenes
  misc_feature (1)..(221): tr|A0A1Z3W7L7|A0A1Z3W7L7_9FLAO GTP cyclohydrolase 1 OS= Chryseobacterium indologenes OX=253 GN=folE PE=3 SV=1
MVDFTDNDDDIFTGKEHTPIRDDAFDKSPQEKIEKITELFGEIMETLGLDMTDDSLKDSPKRVAKMYVNEIFGGLLPENKPGISTFSNKYKYRQMLVEKDITVYSFCEHHFLPIIGRAHVAYISNGEVIGLSKINRIVDYYAKRPQVQERLTMQIVEALKEALGTKNVACIIDAKHLCVNCRGIKDTASSTITAELSGIFRTNPITRQEFLHYVGSHAKLD

SEQ ID NO: 6690 - protein, 222 aa, Chryseobacterium indoltheticum
  misc_feature (1)..(222): tr|A0A381FJQ4|A0A381FJQ4_9FLAO GTP cyclohydrolase 1 OS= Chryseobacterium indoltheticum OX=254 GN=folE PE=3 SV=1
MVDFTDNDDDIFTGKEHTPIREDAFEKSPQEKIEKITKLFGEIMETLGLDMTDDSLKDSPKRVAKMYVNEIFGGLLPENKPGISTFSNKYKYRQMLVEKDITVYSFCEHHFLPIIGRAHVAYISNGDVIGLSKINRIVDYYAKRPQVQERLTMQIVDALKDALGTKNVACIIDAKHLCVNCRGIKDTASSTITAELSGIFRTNPITRQEFLHYVGSHAKLDY

SEQ ID NO: 6691 - protein, 222 aa, Chryseobacterium indoltheticum; identical to SEQ ID NO: 6658
  misc_feature (1)..(222): tr|A0A381F7K5|A0A381F7K5_9FLAO GTP cyclohydrolase 1 OS= Chryseobacterium indoltheticum OX=254 GN=folE PE=3 SV=1

SEQ ID NO: 6692 - protein, 221 aa, Chryseobacterium jejuense; identical to SEQ ID NO: 6664
  misc_feature (1)..(221): tr|A0A2X2X2I8|A0A2X2X2I8_9FLAO GTP cyclohydrolase 1 OS= Chryseobacterium jejuense OX=445960 GN=folE PE=3 SV=1

SEQ ID NO: 6693 - protein, 221 aa, Chryseobacterium jeonii
  misc_feature (1)..(221): tr|A0A0C1F4T2|A0A0C1F4T2_9FLAO GTP cyclohydrolase 1 OS= Chryseobacterium jeonii OX=266749 GN=folE PE=3 SV=1
MSKNFDNDDDLFTGKGYTPLRDDAFEKSPEEKIEIIQKHFHEIMETLGMDMTDDSLKDSPRRVAKMYVNEIFGGLLPENNPRISTFSNKYKYRQMLVEKDITVYSFCEHHFLPIIGRAHVAYISNGEVIGLSKINRIVDYYAKRPQVQERLTMQIVEALKVALGTKDVACIIEAKHLCVNCRGIKDTASSTTTAELSGLFRTNPITRQEFLHYVGSRSNLD

SEQ ID NO: 6694 - protein, 222 aa, Chryseobacterium joostei
  misc_feature (1)..(222): tr|A0A1N7IB78|A0A1N7IB78_9FLAO GTP cyclohydrolase 1 OS= Chryseobacterium joostei OX=112234 GN=folE PE=3 SV=1
MVDFTDNDDDIFTGKEHTPIRKDAFDKSPQEKIEKITELFGEIMETLGLDMTDDSLKDSPKRVAKMYVNEIFGGLLPENKPGISTFSNKYKYRQMLVEKDITVYSFCEHHFLPIIGRAHVAYISNGEVIGLSKINRIVDYYAKRPQVQERLTMQIVDALKEALGTKDVACIIDAKHLCVNCRGIKDTASSTITAELSGIFRTNPITRQEFLHYVGSHAKLDY

SEQ ID NO: 6695 - protein, 221 aa, Chryseobacterium koreense
  misc_feature (1)..(221): tr|A0A0J7J0H9|A0A0J7J0H9_9FLAO GTP cyclohydrolase 1 OS= Chryseobacterium koreense CCUG 49689 OX=1304281 GN=folE PE=3 SV=1
MNPEFENDDDLFTGKDHTPLRKDAFEKSPAEKIEIIQEHFRAIMETLGMDMSDDSLKDSPKRVAKMYVNEIFGGLLPENKPGISTFSNKYKYRQMLVEKDITVYSFCEHHFLPIIGKAHVAYISNGEVIGLSKINRIVDYYAKRPQVQERLTMQIVDALKEALGTKDVACIIDAKHLCVNCRGIKDTASSTITAELSGIFRTNPITRQEFLHYVGSHAKFD

SEQ ID NO: 6696 - protein, 222 aa, Chryseobacterium kwangjuense; identical to SEQ ID NO: 6650
  misc_feature (1)..(222): tr|A0A135WDK7|A0A135WDK7_9FLAO GTP cyclohydrolase 1 OS= Chryseobacterium kwangjuense OX=267125 GN=folE PE=3 SV= 1

SEQ ID NO: 6697 - protein, 221 aa, Chryseobacterium lactis; identical to SEQ ID NO: 6664
  misc_feature (1)..(221): tr|A0A3G6RV52|A0A3G6RV52_9FLAO GTP cyclohydrolase 1 OS= Chryseobacterium lactis OX=1241981 GN=folE PE=3 SV=1

SEQ ID NO: 6698 - protein, 222 aa, Chryseobacterium lathyri; identical to SEQ ID NO: 6661
  misc_feature (1)..(222): tr|A0A511YBU7|A0A511YBU7_9FLAO GTP cyclohydrolase 1 OS= Chryseobacterium lathyri OX=395933 GN=folE2 PE=3 SV=1

SEQ ID NO: 6699 - protein, 221 aa, Chryseobacterium limigenitum; identical to SEQ ID NO: 6676
  misc_feature (1)..(221): tr|A0A1K2IGB6|A0A1K2IGB6_9FLAO GTP cyclohydrolase 1 OS= Chryseobacterium limigenitum OX=1612149 GN=folE PE=3 SV =1

SEQ ID NO: 6700 - protein, 222 aa, Chryseobacterium luteum
  misc_feature (1)..(222): tr|A0A085ZVG7|A0A085ZVG7_9FLAO GTP cyclohydrolase 1 OS= Chryseobacterium luteum OX=421531 GN=folE PE=3 SV=1
MVDFTDNDDDIFTGKEHTPIRKDAFDKSPQEKIEKITELFGEIMETLGMDMTDDSLKDSPKRVAKMYVNEIFGGLLPENKPGISTFSNKYKYRQMLVEKDITVYSFCEHHFLPIIGRAHVAYISNGEVIGLSKINRIVDYYAKRPQVQERLTMQIVDALKEALGTKDVACIIDAKHLCVNCRGIKDTSSSTITAELSGIFRTNPITRQEFLHYVGSHAKLDN

SEQ ID NO: 6701 - protein, 221 aa, Chryseobacterium molle
  misc_feature (1)..(221): tr|A0A1M6P0N0|A0A1M6P0N0_9FLAO GTP cyclohydrolase 1 OS= Chryseobacterium molle OX=216903 GN=folE PE=3 SV=1
MEQFPDNDDDVFTGKEHTPLRKDAFDLQPEEKINKIENLFSEIMHTLGLDMTDDSLKDSPRRVAKMYVNEIFGGLLPENKPSISTFKNQYKYRQMLVEKDITVYSFCEHHFLPIIGKAHVAYISNGEVIGLSKINRIVDYYAKRPQVQERLTMQIVDALKEALGTKNVACIIDAKHLCVNCRGIKDTASSTITAELSGIFRTNPITRQEFLHYVGSHAKFD

SEQ ID NO: 6702 - protein, 221 aa, Chryseobacterium mucoviscidosis; identical to SEQ ID NO: 6136
  misc_feature (1)..(221): tr|A0A202C6F9|A0A202C6F9_9FLAO GTP cyclohydrolase 1 OS= Chryseobacterium mucoviscidosis OX=1945581 GN=folE PE=3 SV=1

SEQ ID NO: 6703 - protein, 221 aa, Chryseobacterium nakagawai; identical to SEQ ID NO: 6664
  misc_feature (1)..(221): tr|A0A3G6QHL1|A0A3G6QHL1_9FLAO GTP cyclohydrolase 1 OS= Chryseobacterium nakagawai OX=1241982 GN=folE PE=3 SV=1

SEQ ID NO: 6704 - protein, 221 aa, Chryseobacterium nematophagum
  misc_feature (1)..(221): tr|A0A3M7TBQ9|A0A3M7TBQ9_9FLAO GTP cyclohydrolase 1 OS= Chryseobacterium nematophagum OX=2305228 GN=folE PE=3 S V=1
MVDLTDNDDDIFTGKEHTPIREDAFDKSPEEKIEKITQLFGEIMETLGLDMTDDSLKDSPKRVAKMYVNEIFGGLLPENKPGVSTFSNKYRYSQMLVEKDITVYSFCEHHFLPIIGRAHVAYISNGEVIGLSKINRIVDYYAKRPQVQERLTMQIVNALKEALGTKNVACIIDAKHLCVNCRGIKDTASSTITAELSGIFKTNPITRQEFLHYVGSHAKLD

SEQ ID NO: 6705 - protein, 222 aa, Chryseobacterium oleae; identical to SEQ ID NO: 6661
  misc_feature (1)..(222): tr|A0A1I4ZMP9|A0A1I4ZMP9_9FLAO GTP cyclohydrolase 1 OS= Chryseobacterium oleae OX=491207 GN=folE PE=3 SV=1

SEQ ID NO: 6706 - protein, 222 aa, Chryseobacterium oncorhynchi; identical to SEQ ID NO: 6694
  misc_feature (1)..(222): tr|A0A316WUM3|A0A316WUM3_9FLAO GTP cyclohydrolase 1 OS= Chryseobacterium oncorhynchi OX=741074 GN=folE PE=3 SV= 1

SEQ ID NO: 6707 - protein, 222 aa, Chryseobacterium oranimense
  misc_feature (1)..(222): tr|A0A1M5NQQ4|A0A1M5NQQ4_9FLAO GTP cyclohydrolase 1 OS= Chryseobacterium oranimense OX=421058 GN=folE PE=3 SV=1
MVDFTDNDDDIFTGKEHTPIRKDAFDKSPEEKIEKITELFGEIMETLGMDMTDDSLKDSPRRVAKMYVNEIFGGLLPENKPGISTFSNKYKYRQMLVEKDITVYSFCEHHFLPIIGRAHVAYISNGEVIGLSKINRIVDYYAKRPQVQERLTMQIVDALKEALGTKDVACIIDAKHLCVNCRGIKDTASSTITAELSGIFRTNPITRQEFLHYVGSHAKLDY

SEQ ID NO: 6708 - protein, 221 aa, Chryseobacterium piperi
  misc_feature (1)..(221): tr|A0A086B8I8|A0A086B8I8_9FLAO GTP cyclohydrolase 1 OS= Chryseobacterium piperi OX=558152 GN=folE PE=3 SV=1
MVDFTDNDDDIFTGKEHTPIREDAFDKSPQEKIEKITQLFGEIMETLGMDMTDDSLKDSPKRVAKMYVNEIFGGLLPENKPGISTFSNKYKYRQMLVEKDITVYSFCEHHFLPIIGKAHVAYISNGEVIGLSKINRIVDYYAKRPQVQERLTMQIVNALKEALGTKDVACIIDAKHLCVNCRGIKDTASSTITAELSGIFRTNPITRQEFLHYVGTHTTLG

SEQ ID NO: 6709 - protein, 222 aa, Chryseobacterium piscicola
  misc_feature (1)..(222): tr|A0A1N7KKT9|A0A1N7KKT9_9FLAO GTP cyclohydrolase 1 OS= Chryseobacterium piscicola OX=551459 GN=folE PE=3 SV=1
MVDFTDNDDDIFTGKDHTPIREDAFEKSPQEKIEKITQLFGEIMETLGLDMTDDSLKDSPKRVAKMYVNEIFGGLLPENKPGISTFSNKYKYRQMLVEKDITVYSFCEHHFLPIIGRAHVAYISNGDVIGLSKINRIVDYYAKRPQVQERLTMQIVDALKEALGTQNVACIIDAKHLCVNCRGIKDTASSTITAELSGIFRTNPITRQEFLHYVGSHAKLDY

SEQ ID NO: 6710 - protein, 222 aa, Chryseobacterium piscium; identical to SEQ ID NO: 6658
  misc_feature (1)..(222): tr|A0A3D9BUI6|A0A3D9BUI6_9FLAO GTP cyclohydrolase 1 OS= Chryseobacterium piscium OX=333702 GN=folE PE=3 SV=1

SEQ ID NO: 6711 - protein, 221 aa, Chryseobacterium polytrichastri; identical to SEQ ID NO: 6676
  misc_feature (1)..(221): tr|A0A1M7G0L0|A0A1M7G0L0_9FLAO GTP cyclohydrolase 1 OS= Chryseobacterium polytrichastri OX=1302687 GN=folE PE=3 SV=1

SEQ ID NO: 6712 - protein, 222 aa, Chryseobacterium rhizoplanae; identical to SEQ ID NO: 6650
  misc_feature (1)..(222): tr|A0A521BQL1|A0A521BQL1_9FLAO GTP cyclohydrolase 1 OS= Chryseobacterium rhizoplanae OX=1609531 GN=folE PE=3 SV =1

SEQ ID NO: 6713 - protein, 222 aa, Chryseobacterium rhizosphaerae
  misc_feature (1)..(222): tr|A0A3D9CYZ4|A0A3D9CYZ4_9FLAO GTP cyclohydrolase 1 OS= Chryseobacterium rhizosphaerae OX=395937 GN=folE PE=3 S V=1
MVDFTDNDDDIFTGKEHTPIRENAFDKSPQEKIEKITELFGEIMETLGLDMTDDSLKDSPKRVAKMYVNEIFGGLLPENKPGISTFSNKYKYRQMLVEKDITVYSFCEHHFLPIIGRAHVAYISNGEVIGLSKINRIVDYYAKRPQVQERLTMQIVDALKEALGTKDVACIIDAKHLCVNCRGIKDTASSTITAELSGIFRTNPITRQEFLHYVGSHAKLDY

SEQ ID NO: 6714 - protein, 222 aa, Chryseobacterium scophthalmum
  misc_feature (1)..(222): tr|A0A1N6HX08|A0A1N6HX08_9FLAO GTP cyclohydrolase 1 OS= Chryseobacterium scophthalmum OX=59733 GN=folE PE=3 SV= 1
MVDFTDNDDDIFTGKEHTPIREDAFEKSPQEKIEKITELFGEIMETLGLDMTDDSLKDSPKRVAKMYVNEIFGGLLPENKPGISTFSNKYKYRQMLVEKDITVYSFCEHHFLPIIGRAHVAYISNGEVIGLSKINRIVDYYAKRPQVQERLTMQIVDALKEALGTKDVACIIDAKHLCVNCRGIKDTASSTITAELSGIFRTNPITRQEFLHYVGSHAKLDY

SEQ ID NO: 6715 - protein, 221 aa, Chryseobacterium sediminis; identical to SEQ ID NO: 6653
  misc_feature (1)..(221): tr|A0A5B2U4H3|A0A5B2U4H3_9FLAO GTP cyclohydrolase 1 OS= Chryseobacterium sediminis OX=1679494 GN=folE PE=3 SV=1

SEQ ID NO: 6716 - protein, 221 aa, Chryseobacterium shandongense
  misc_feature (1)..(221): tr|A0A3G6QUB9|A0A3G6QUB9_9FLAO GTP cyclohydrolase 1 OS= Chryseobacterium shandongense OX=1493872 GN=folE PE=3 S V=1
MVDFTDNDDDIFTGKEHTPIRKDAFDKSPEEKIEKITELFGEIMETLGLDMTDDSLKDSPRRVAKMYVNEIFGGLLPENKPGISTFSNKYKYRQMLVEKDITVYSFCEHHFLPIIGRAHVAYISNGEVIGLSKINRIVDYYAKRPQVQERLTMQIVDALKESLGTKDVACIIDAKHLCVNCRGIKDTASSTITAELSGIFRTNPITRQEFLHYVGSHAKLD

SEQ ID NO: 6717 - protein, 222 aa, Chryseobacterium shigense; identical to SEQ ID NO: 6661
  misc_feature (1)..(222): tr|A0A1N7ID34|A0A1N7ID34_9FLAO GTP cyclohydrolase 1 OS= Chryseobacterium shigense OX=297244 GN=folE PE=3 SV=1

SEQ ID NO: 6718 - protein, 128 aa, Chryseobacterium shigense
  misc_feature (1)..(128): tr|A0A376EI22|A0A376EI22_9FLAO GTP cyclohydrolase 1 OS= Chryseobacterium shigense OX=297244 GN=folE PE=3 SV=1
MLVEKDITVYSFCEHHFLPIIGRAHVAYISNGEVIGLSKINRIVDYYAKRPQVQERLTMQIVDALKEALGTKDVACIIDAKHLCVNCRGIKDTASSTITAELSGIFRTNPITRQEFLHYVGSHAKLDY

SEQ ID NO: 6719 - protein, 222 aa, Chryseobacterium soldanellicola
  misc_feature (1)..(222): tr|A0A1H0ZWG1|A0A1H0ZWG1_9FLAO GTP cyclohydrolase 1 OS= Chryseobacterium soldanellicola OX=311333 GN=folE PE=3 SV=1
MVDFTDNDDDIFTGKEHTPIRKDAFDKSPQEKIEKITELFGEIMETLGMDMTDDSLKDSPKRVAKMYVNEIFGGLLPENKPGISTFSNKYKYRQMLVEKDITVYSFCEHHFLPIIGRAHVAYISNGEVIGLSKINRIVDYYAKRPQVQERLTMQIVDALKEALGTKDVACIIDAKHLCVNCRGIKDTSSSTITAELSGIFRTNPITRQEFLHYVGSHAKLDY

SEQ ID NO: 6720 - protein, 221 aa, Chryseobacterium soli
  misc_feature (1)..(221): tr|A0A086A4J4|A0A086A4J4_9FLAO GTP cyclohydrolase 1 OS= Chryseobacterium soli OX=445961 GN=folE PE=3 SV=1
MVDFTDNDDDIFTGKEHTPIREDAFDKSPQEKIEKITALFGEIMETLGLDMTDDSLKDSPKRVAKMYVNEIFGGLLPENKPGISTFSNKYKYSQMLVEKDITVYSFCEHHFLPIIGRAHVAYISNGEVIGLSKINRIVDYYAKRPQVQERLTMQIVNALKEALGTKNVACIIDAKHLCVNCRGIKDTASSTITAELSGIFKTNPITRQEFLHYVGSHAKLD

SEQ ID NO: 6721 - protein, 221 aa, Chryseobacterium solincola
  misc_feature (1)..(221): tr|A0A0C1F3Y0|A0A0C1F3Y0_9FLAO GTP cyclohydrolase 1 OS= Chryseobacterium solincola OX=510955 GN=folE PE=3 SV=1
MDQDIDFDDDVFTGKEHTPLRADAFDKLPAEKIQLIQQHFHEIMETLGLDMTDDSLKDSPRRVAKMYVNEIFGGLLPENKPRISTFSNKYKYRQMLVEKDITVYSFCEHHFLPIIGKAHVAYISNGEVIGLSKINRIVDYYSKRPQVQERLTMQIVDALKDALGTKDVACIIEAKHLCVNCRGIKDTASSTTTAELSGLFRTNPITRQEFLHYVGNHAKLD

SEQ ID NO: 6722 - protein, 222 aa, Chryseobacterium sp.
  misc_feature (1)..(222): tr|A0A0T0MBD0|A0A0T0MBD0_9FLAO GTP cyclohydrolase 1 OS= Chryseobacterium sp. Leaf394 OX=1736361 GN=folE PE=3 SV =1
MVDFTDNDDDIFTGKEHTPIREDAFEKSPQEKIEKITELFGEIMETLGLDMTDDSLKDSPKRVAKMYVNEIFGGLLPENKPGISTFSNKYKYRQMLVEKDITVYSFCEHHFLPIIGRAHVAYISSGDVIGLSKINRIVDYYAKRPQVQERLTMQIVDALKDALGTQNVACIIDAKHLCVNCRGIKDTASSTITAELSGIFRTNPITRQEFLHYVGSHAKLDY

SEQ ID NO: 6723 - protein, 222 aa, Chryseobacterium sp.
  misc_feature (1)..(222): tr|A0A2G6UBN4|A0A2G6UBN4_9FLAO GTP cyclohydrolase 1 OS= Chryseobacterium sp. 52 OX=2035213 GN=folE PE=3 SV=1
MVDFTDNDDDIFTGKEHTPIRKDAFDKSPQEKIEKITELFGEIMETLGMDMTDDSLKDSPKRVAKMYVNEIFGGLLPENKPGISTFSNKYKYRQMLVEKDITVYSFCEHHFLPIIGRAHVAYISNGEVIGLSKINRIVDYYAKRPQVQERLTMQIVDALKGALGTKDVACIIDAKHLCVNCRGIKDTASSTITAELSGIFRTNPITRQEFLHYVGSHAKLDY

SEQ ID NO: 6724 - protein, 221 aa, Chryseobacterium taeanense
  misc_feature (1)..(221): tr|A0A1G8GTX8|A0A1G8GTX8_9FLAO GTP cyclohydrolase 1 OS= Chryseobacterium taeanense OX=311334 GN=folE PE=3 SV=1
MVDFTDNDDDIFTGKEHTPIRKDAFEKSPEEKIEKITTLFGEIMETLGLDMTDDSLKDSPRRVAKMYVNEIFGGLLPENKPGISTFSNKYKYRQMLVEKDITVYSFCEHHFLPIIGRAHVAYISNGEVIGLSKINRIVDYYAKRPQVQERLTMQIVDALKEALGTKDVACIIDAKHLCVNCRGIKDTASSTITAELSGIFRTNPITRQEFLHYVGSHAKLD

SEQ ID NO: 6725 - protein, 221 aa, Chryseobacterium taichungense
  misc_feature (1)..(221): tr|A0A1H7Z8X6|A0A1H7Z8X6_9FLAO GTP cyclohydrolase 1 OS= Chryseobacterium taichungense OX=295069 GN=folE PE=3 SV =1
MVDFTDNDDDIFTGKEHTPIRKDAFDKSPEEKIEKITELFGEIMETLGLDMTDDSLKDSPRRVAKMYVNEIFGGLLPENKPGISTFSNKYKYRQMLVEKDITVYSFCEHHFLPIIGRAHVAYISNGEVIGLSKINRIVDYYAKRPQVQERLTMQIVDALKEALGTKDVACIIDAKHLCVNCRGIKDTASSTITAELSGIFRTNPITRQEFLHYVGSHAKLD

SEQ ID NO: 6726 - protein, 221 aa, Chryseobacterium taihuense; identical to SEQ ID NO: 6677
  misc_feature (1)..(221): tr|A0A1G9QS85|A0A1G9QS85_9FLAO GTP cyclohydrolase 1 OS= Chryseobacterium taihuense OX=1141221 GN=folE PE=3 SV=1

SEQ ID NO: 6727 - protein, 222 aa, Chryseobacterium taiwanense
  misc_feature (1)..(222): tr|A0A0B4D8P3|A0A0B4D8P3_9FLAO GTP cyclohydrolase 1 OS= Chryseobacterium taiwanense OX=363331 GN=folE PE=3 SV=1
MVDFTDNDDDIFTGKEHTPIREDAFDKSPEEKIEKITELFGQIMETLGMDMTDDSLKDSPKRVAKMYVNEIFGGLLPENKPGISTFSNKYKYRQMLVEKDITVYSFCEHHFLPIIGRAHVAYISNGEVIGLSKINRIVDYYAKRPQVQERLTMQIVDALKEALGTKDVACIIDAKHLCVNCRGIKDTASSTITAELSGIFRTNPITRQEFLHYVGSHAKLDY

SEQ ID NO: 6728 - protein, 221 aa, Chryseobacterium takakiae
  misc_feature (1)..(221): tr|A0A1M4VX88|A0A1M4VX88_9FLAO GTP cyclohydrolase 1 OS= Chryseobacterium takakiae OX=1302685 GN=folE PE=3 SV=1
MVDFTDNDDDIFTGKEHTPIRKDAFDKSPEEKIEKITALFGEIMETLGLDMTDDSLKDSPRRVAKMYVNEIFGGLLPENKPGISTFSNKYKYRQMLVEKDITVYSFCEHHFLPIIGRAHVAYISNGEVIGLSKINRIVDYYAKRPQVQERLTMQVVDALKEALGTKDVACIIDAKHLCVNCRGIKDTASSTITAELSGIFRTNPITRQEFLHYVGSHAKLD

SEQ ID NO: 6729 - protein, 220 aa, Chryseobacterium taklimakanense
  misc_feature (1)..(220): tr|A0A239X9M4|A0A239X9M4_9FLAO GTP cyclohydrolase 1 OS= Chryseobacterium taklimakanense OX=536441 GN=folE PE=3 SV=1
MTDFENDDDVFTGKDHTPLRSDAFNMSPSAKVEKIEKLFGEIMETLGLDMTDDSLKDSPKRVAKMYVNEIFGGLLPENKPGISTFSNKYKYRQMLVEKDITVYSFCEHHFLPIIGRAHVAYISNGEVIGLSKINRLVDYYAKRPQVQERLTMQIVDALKEALGTKDVACIIDAKHLCVNCRGIKDTASSTITAELSGIFRTNPITRQEFLHYVGSHAKLD

SEQ ID NO: 6730 - protein, 221 aa, Chryseobacterium treverense
  misc_feature (1)..(221): tr|A0A1I3NFS2|A0A1I3NFS2_9FLAO GTP cyclohydrolase 1 OS= Chryseobacterium treverense OX=631455 GN=folE PE=3 SV=1
MDQDIDFDDDVFTGKEHTPLRANAFDKLPAEKIQLIQQHFHEIMETLGLDMTDDSLKDSPRRVAKMYVNEIFGGLLPENKPRISTFSNKYKYRQMLVEKDITVYSFCEHHFLPIIGKAHVAYISNGEVIGLSKINRIVDYYSKRPQVQERLTMQIVDALKDALGTKDVACIIEAKHLCVNCRGIKDTASSTTTAELSGLFRTNPITRQEFLHYVGNHAKLD

SEQ ID NO: 6731 - protein, 221 aa, Chryseobacterium ureilyticum; identical to SEQ ID NO: 6657
  misc_feature (1)..(221): tr|A0A1N7QS86|A0A1N7QS86_9FLAO GTP cyclohydrolase 1 OS= Chryseobacterium ureilyticum OX=373668 GN=folE PE=3 SV= 1

SEQ ID NO: 6732 - protein, 222 aa, Chryseobacterium viscerum; identical to SEQ ID NO: 6661
  misc_feature (1)..(222): tr|A0A316X1N5|A0A316X1N5_9FLAO GTP cyclohydrolase 1 OS= Chryseobacterium viscerum OX=1037377 GN=folE PE=3 SV=1

SEQ ID NO: 6733 - protein, 222 aa, Chryseobacterium wanjuense
  misc_feature (1)..(222): tr|A0A1I0REE1|A0A1I0REE1_9FLAO GTP cyclohydrolase 1 OS= Chryseobacterium wanjuense OX=356305 GN=folE PE=3 SV=1
MVDFTDNDDDIFTGKEHTPIREDAFEKSPEEKIEKISELFGEIMETLGLDMTDDSLKDSPKRVAKMYVQEIFGGLLPENKPGISTFSNKYKYRQMLVEKDITVYSFCEHHFLPIIGRAHVAYISNGEVIGLSKINRIVDYYAKRPQVQERLTMQIVAALKEALGTKDVACIIDAKHLCVNCRGIKDTASSTITAELSGIFRTNPITRQEFLHYVGSHAKLDY

SEQ ID NO: 6734 - protein, 221 aa, Chryseobacterium xixisoli
  misc_feature (1)..(221): tr|A0A4R8IHM7|A0A4R8IHM7_9FLAO GTP cyclohydrolase 1 OS= Chryseobacterium xixisoli OX=1476462 GN=folE PE=3 SV=1
MEHIPDNDDDLFTGKDHTPLRPDAFDLNTDEKIKKIEGLFGEIMQTLGLDMTDDSLKDSPKRVAKMYVKEIFGGLLPENKPGISTFKNQYKYRQMLVEKDITVYSFCEHHFLPIIGKAHVAYISSGEVIGLSKINRIVDYYAKRPQVQERLTMQIVDALKEALGTNNVACIIDAKHLCVNCRGIKDTTSSTITAELSGIFRTNPITRQEFLHYVGSHAKFD

SEQ ID NO: 6735 - protein, 221 aa, Chryseobacterium zeae
  misc_feature (1)..(221): tr|A0A1N6DXF1|A0A1N6DXF1_9FLAO GTP cyclohydrolase 1 OS= Chryseobacterium zeae OX=1416779 GN=folE PE=3 SV=1
MEHFPDNDDDLFTGKDHTPLRKDAFDLKPEEKVEKIEGLFAEIMETLGLDMEDDSLKDSPKRVAKMYVNEIFGGLLPENKPGVSTFKNQYKYRQMLVEKDITVYSFCEHHFLPIIGKAHVAYISNGEVIGLSKINRIVDYYAKRPQVQERLTMQIVDALKEALGTNNVACIIDAKHLCVNCRGIKDTASSTITAELSGIFRTNPITRQEFLHYVGSHAKFD

SEQ ID NO: 6736 - protein, 227 aa, Chryseolinea flava
  misc_feature (1)..(227): tr|A0A364Y3K8|A0A364Y3K8_9BACT GTP cyclohydrolase 1 OS= Chryseolinea flava OX=2059302 GN=folE PE=3 SV=1
MRQKEISLNIQPEPDEFGDDHHGSSAADTPLRPDAFEMDDEVKIEKIEKHFREIMHILGLDLNDDSLNGTPRRVAKMFVKEVFSGLNPKNRPHARLFENKYNYDQMLVEKDITFYSHCEHHFVPIYGKAHVAYFSSGKVIGLSKINRIVQYFSKRPQVQERLTVQIGKELERILQTEDVGVVLDANHMCVASRGVGDTNSKTGTAYFSGKFKDENIKREFLNYINSK

SEQ ID NO: 6737 - protein, 229 aa, Chryseolinea serpens
  misc_feature (1)..(229): tr|A0A1M5L1C8|A0A1M5L1C8_9BACT GTP cyclohydrolase 1 OS= Chryseolinea serpens OX=947013 GN=folE PE=3 SV=1
MRQKGISLNIRPLKPEDDDFEDEHPYSSIETPLRADAFELEDDVKIERIEKHFTEIMNILGLDLTDDSLKGTPRRVAKMYVKEVFSGLNPKNRPNARLFENKYNYDQMLVEKDITFYSHCEHHFVPIYGKAHVAYFSNGKVIGLSKINRIVQYFAKRPQVQERLTVQIGKEIERVLHTENVGVVIDANHMCVASRGVGDTNSKTGTAYFSGKFKDENIKREFLNYINSK

SEQ ID NO: 6738 - protein, 229 aa, Chryseolinea sp.
  misc_feature (1)..(229): tr|A0A385SQD8|A0A385SQD8_9BACT GTP cyclohydrolase 1 OS= Chryseolinea sp. KIS68-18 OX=2321403 GN=folE PE=3 SV=1
MRQKGISLNIRPLKPEDDDFEDEHPYSSIETPLRADAFELDDDVKIERIEKHFTEIMNILGLDLNDDSLKGTPRRVAKMYVKEVFSGLNPKNRPNARLFENKYNYDQMLVEKDITFYSHCEHHFVPIYGKAHVAYFSNGKVIGLSKINRIVQYFAKRPQVQERLTVQIGKEIERVLHTENVGVVIDANHMCVASRGVGDTNSKTGTAYFSGKFKDENIKREFLNYINSK

SEQ ID NO: 6739 - protein, 189 aa, Chryseomicrobium excrementi
  misc_feature (1)..(189): tr|A0A2M9F2Y2|A0A2M9F2Y2_9BACL GTP cyclohydrolase 1 OS= Chryseomicrobium excrementi OX=2041346 GN=folE PE=3 SV= 1
MTAVDLHKIENAVKMILEAVGEDSSREGLIETPKRVAKMYAEMFEGLHQDPKEYFKTIFHEDHEELVLVKDIPFHSMCEHHLVPFYGKAHVAYIPRNGVVTGLSKLARAVETTARRPQLQERITSTIADSIMEMLNPYGAYVVIEAEHMCMTMRGIKKPGAKTITAVARGVYEDDAVKRSEIHSFIQMT

SEQ ID NO: 6740 - protein, 189 aa, Chrysiogenales bacterium
  misc_feature (1)..(189): tr|A0A524K1F8|A0A524K1F8_9BACT GTP cyclohydrolase 1 OS= Chrysiogenales bacterium OX=2528039 GN=folE PE=3 SV=1
MDIEKIKKGVGLILAGIGEDAASERLRETPARAAAMFAEVLSGTGKDPNDFLKCLTEEKHDEMVILKDIPIYSMCEHHLLPFSGKASIAYIPKKGRIIGLNNLGYLVDYLARRLQLQERLTKQIADYLVQALDPMGVMVVIKAEHLCMTMRGVKKPGSLTITSAVRGVFRENLGPRQEAMSLLMTPENR

SEQ ID NO: 6741 - protein, 184 aa, Chrysiogenales bacterium
  misc_feature (1)..(184): tr|A0A524Q4L2|A0A524Q4L2_9BACT GTP cyclohydrolase 1 OS= Chrysiogenales bacterium OX=2528039 GN=folE PE=3 SV=1
MDTDKLIKAVHEMIIAIGEDPARPGLQGTPERVARMFEEILGGEKKEIADILGKTHELEHDEMVVVKDISFYSMCEHHLLPFFGVCHVGYIPDERRIVGLSKIARIVDVFSKRLQVQEHLTAEIADAVMTHVRPKGVAVVVNARHLCMEMRGVSKPGSSTITSVVRGIFRSDIRTREEFLKLIG

SEQ ID NO: 6742 - protein, 268 aa, Chthoniobacter flavus
  misc_feature (1)..(268): tr|B4D398|B4D398_9BACT GTP cyclohydrolase FolE2 OS=Chth oniobacter flavus Ellin428 OX=497964 GN=folE2 PE=3 SV=1
MQSAPMKQLTPLSDTQSQRDERRIPIDRVGVRALRYPMQIRDKAREVQHTIATSTLTVDLPHHFKGTHMSRFVEVLNEFGPELHVDNIHTILRELTQRLHSVSAHVDFEFPYFLTKKAPVTGSPGMMDYTARFSATLEKDVIDFVVTVIVPVTTLCPCSKAISVHGAHNQRGQVTFSVRFSEPIWIEDLIRLVEESASSELYSLLKRPDEKAVTERAYENPVFVEDLVRNIALRSNAVPEITWYRVEAENFESIHNHNAYALIEHRKE

SEQ ID NO: 6743 - protein, 262 aa, Chthoniobacter sp.
  misc_feature (1)..(262): tr|A0A257X3Q7|A0A257X3Q7_9BACT GTP cyclohydrolase FolE2 OS=Chthoniobacter sp. 12-60-6 OX=1970334 GN=folE2 PE=3 SV=1
MSALTDTQNERDDRRLPIDRVGVRSLRFPLSIRDRDAAVQHTVATVSLAVDLPHQFKGTHMSRFVEVLHAHGKELTVSNIVKMPRELMKKLHADKAHVEMRFPYFRTKKAPVSGAEGMLDYGVIFEVNADKEETDFVLTVEVPVTTLCPCSKAISARGAHNQRGTVTLAIRFSEPVWIEDLLELVESSASSELYSVLKRPDEKFVTEAAYDNPVFVEDLVRNIAVKAKAHPRITWFRVEAENYESIHNHNAWAVIESHTSPS

SEQ ID NO: 6744 - protein, 207 aa, Chthoniobacterales bacterium
  misc_feature (1)..(207): tr|A0A2W5Z0W7|A0A2W5Z0W7_9BACT GTP cyclohydrolase 1 OS= Chthoniobacterales bacterium OX=2201154 GN=folE PE=3 SV =1
MRNHETELQAAERRIASLRPCGAAKLAGMEHSFRALLESIGEDPKRQGLLKTPQRAARAFEFITNGYRQSLDVVLNDAIFDSEASEIVLVKDIELYSMCEHHLLPFIGKAHVAYIPNGKVIGLSKVARIVDVFARRLQIQENLTIQIADALMKTLHPSGVAVVIEAKHLCMMMRGVEKQNSLMKTSCLLGSFKEDARTRSEFLALLA

SEQ ID NO: 6745 - protein, 233 aa, Chthoniobacterales bacterium
  misc_feature (1)..(233): tr|A0A2W6A2Y7|A0A2W6A2Y7_9BACT GTP cyclohydrolase 1 OS= Chthoniobacterales bacterium OX=2201154 GN=folE PE=3 SV =1
MFRSLLSDLRQPSRTLATSRNGHTCETPDRNRLAPSEPSPSPVVQLRDLSRVDSKELVREILRRIGDDPDREGLQQTPERIVRSWKEIYGGYAQRAEDVLVTQFQAEQYDAMVLLRDIEFFSTCEHHMLPFHGKVHIAYLPNEKIVGLSKLARLTEIYARRLQVQERMTYQIAMELERVLKPKGVAVMIEAMHQCMCSRGVRKRESKMVTSCLLGAFKENLASRTEFLALVKQ

SEQ ID NO: 6746 - protein, 187 aa, Chthonomonas calidirosea
  misc_feature (1)..(187): tr|S0ES81|S0ES81_CHTCT GTP cyclohydrolase 1 OS=Chthonom onas calidirosea (strain DSM 23976 / ICMP 18418 / T49) OX=1303518 GN=folE PE=3 SV=1
MKSKLEEIYASLLEEIGENPEREGLIKTPHRAAEAMRFVTRGYRMNLEDIVNGAIFKADSDDMVIVRGIEFFSMCEHHLFPFFGHANIAYIPDGRIIGLSKLARITEMFARRLQVQERLTVQIAEAVQEILKPKGVGVVLQAKHLCMMARGVEKKSSDMVTSHVLGVFRTDRSTRMEFMNLLDLKEA

SEQ ID NO: 6747 - protein, 201 aa, Ciceribacter sp.
  misc_feature (1)..(201): tr|A0A4Q2TDJ2|A0A4Q2TDJ2_9RHIZ GTP cyclohydrolase 1 OS= Ciceribacter sp. F8825 OX=2509717 GN=folE PE=3 SV=1
MDAFAKKLSQESARPTREEAEEAVRVLLRWAGDDPSREGLLDTPKRVVKAYSELFAGYDADIDDVLGTTFEEVAGYDDIVLVRDIPFFSHCEHHMLPVIGKAHIAYLPSGRVLGLSKIARIVEVFARRLQTQEAMTAQIADAINQGLSPRGVAVFVEAEHMCMAMRGVQKSGSTTLTTTFTGSFKDSAAEQARFMSMVRGR

SEQ ID NO: 6748 - protein, 365 aa, Citreicella sp.
  misc_feature (1)..(365): tr|A0A355QUY6|A0A355QUY6_9RHOB GTP cyclohydrolase FolE2 OS=Citreicella sp. OX=1960284 GN=folE2 PE=3 SV=1
MNVHTPEIDRKPSLEEAETALALLRQWTGKAQDAEIEALDPALLGLVPGALPYPDLSRDYPRDFGVDEAYRDTLPDLQNGPSSLIRGANRMIQHVGISNFRLPIRYRMRGEGELMLETSVTGTVSLDADKKGINMSRIMRSFYEHSEKTFSFEVIEAALDDYKSDLESFDARIQMRFSFPMQVPSLRSGLKGYQYYDIALELVELNGVRRRIVHLDYVYSSTCPCSLELSEHARRTRNQLATPHSQRSVARLSVELRPGQDILWFEDLVEICRSAVPTETQVMVKREDEQAFAELNAANPIFVEDAARLYAEALLNDPRIGDFRVLASHQESLHSHDAVAVLTEGPTFAATSLDPMLLPSLIHRG

SEQ ID NO: 6749 - protein, 365 aa, Citreicella sp.
  misc_feature (1)..(365): tr|D0D6D4|D0D6D4_9RHOB GTP cyclohydrolase FolE2 OS=Citr eicella sp. SE45 OX=501479 GN=folE2 PE=3 SV=1
MNVFTPEIDRKPSKEEAAKALEVLRSFAEMALDYEIDALDPGIAALRDGGVPYPDLSRVYPTAFRADEAYRETLPDLQNGPSSLIKGENRLIQHVGISNFRLPIHYRTRDHGELTLETSVTGTVSLEADKKGINMSRIMRSFYAHAEKTFSFEVIEAALDDYKSDLESFDARIMMRLSFPVRRDSLRSGLSGYQYYDIALELVELDGVRRKILHLDYVYSSTCPCSLELSEHARRTRGQLATPHSQRSVARVSAVLANEGDCLWFEDLIGLCRKAVPTETQVMVKREDEQAFAELNAANPIFVEDAARLFAEQLQADPRIGDFRVLASHQESLHSHDAVSVLTEGTTFANDSLDPKLFSTLFHVG

SEQ ID NO: 6750 - protein, 209 aa, Citricoccus muralis
  misc_feature (1)..(209): tr|A0A3D9LG23|A0A3D9LG23_9MICC GTP cyclohydrolase 1 OS= Citricoccus muralis OX=169134 GN=folE PE=3 SV=1
MEQTQNTLRDVDVDDEAELAPAGVDRPRIEAAVREILEAIGEDPDREGLQDTPKRVAKAYDEFFAGVKQDPGDILGTTFDIAHEELVLVKDIPFYSTCEHHLVPFHGTAHIGYIPSPEGLVTGLSKLARLVEVFARRPQVQERLTTQIVEALMTHLSPRGAIVVIEAEHMCMSMRGVRKPGAKTVTSAVRGQLRDSSTRSEAMSLILHG

SEQ ID NO: 6751 - protein, 202 aa, Citricoccus sp.
  misc_feature (1)..(202): tr|A0A4P9JDP9|A0A4P9JDP9_9MICC GTP cyclohydrolase 1 OS= Citricoccus sp. SGAir0253 OX=2567881 GN=folE PE=3 SV=1
MAGLLADPEAELPPAGVDLQRIEAAVREILEAVGEDPDREGLEDTPARVAKAYAEFFAGLHQDPADVLGTTFDISHEELVLVKDIPFYSTCEHHLVPFHGTVHIGYIPSKDGRVTGLSKLARLVEVFARRPQVQERLTTQVVEALMTHLHPRGAIVVVEAEHLCMSMRGVRKPGAKTVTSAVRGQLRDATTRAEAMGLILHG

SEQ ID NO: 6752 - protein, 223 aa, Citrobacter amalonaticus
  misc_feature (1)..(223): tr|A0A2S4S4C8|A0A2S4S4C8_CITAM GTP cyclohydrolase 1 OS= Citrobacter amalonaticus OX=35703 GN=folE PE=3 SV=1
MPSLSKEAALVHEALVARGLETPLRPPVHEMDNETRKRLISGHMTEIMQLLNLDLSDDSLMETPHRIAKMYVDEIFSGLDYANFPKITVIENKMKVDEMVTVRDITLTSTCEHHFVTIDGKATVAYIPKDSVIGLSKINRIVQFFAQRPQVQERLTQQILTALQTLLGTNNVAVSIDAVHYCVKARGIRDATSATTTTSLGGLFKSSQNTRQEFLRAVRHHNS

SEQ ID NO: 6753 - protein, 222 aa, Citrobacter amalonaticus
  misc_feature (1)..(222): tr|A0A0X8S188|A0A0X8S188_CITAM GTP cyclohydrolase 1 OS= Citrobacter amalonaticus OX=35703 GN=folE PE=3 SV=1
MSSLSKEAALVHEALVARGLETPLRPPVHEMDNETRKRLISGHMTEIMQLLNLDLSDDSLMETPHRIAKMYVDEIFSGLDYANFPKITVIENKMKVDEMVTVRDITLTSTCEHHFVTIDGKATVAYIPKESVIGLSKINRIVQFFAQRPQVQERLTQQILTALQTLLGTNNVAVSIDAVHYCVKARGIRDATSATTTTSLGGLFKSSQNTRQEFLRAVRHHN

SEQ ID NO: 6754 - protein, 222 aa, Citrobacter braakii
  misc_feature (1)..(222): tr|A0A1R0FQ85|A0A1R0FQ85_CITBR GTP cyclohydrolase 1 OS= Citrobacter braakii OX=57706 GN=folE PE=3 SV=1
MSSLSKEAALVHEALVARGLETPLRPPVQEMDNETRKRLISGHMTEIMQLLNLDLSDDSLMETPHRIAKMYVDEIFSGLDYANFPKITVIENKMKVDEMVTVRDITLTSTCEHHFVTIDGKATVAYIPKDSVIGLSKINRIVQFFAQRPQVQERLTQQILTALQTLLGTNNVAVSIDAVHYCVKARGIRDATSATTTTSLGGLFKSSQNTRQEFLRAVRHHN

SEQ ID NO: 6755 - protein, 222 aa, Citrobacter farmeri
  misc_feature (1)..(222): tr|A0A223JTW0|A0A223JTW0_9ENTR GTP cyclohydrolase 1 OS= Citrobacter farmeri OX=67824 GN=folE PE=3 SV=1
MSSLSKEAALVHEALVARGLETPLRPPVHEMDNETRKRLISGHMTEIMQLLNLDLSDDSLMETPHRIAKMYVDEIFSGLDYANFPKITVIENKMKVDEMVTVRDITLTSTCEHHFVTIDGKATVAYIPKDSVIGLSKINRIVQFFAQRPQVQERLTQQILTALQTLLGTNNVAVSIDAVHYCVKARGIRDATSATTTTSLGGLFKSSQNTRQEFLRAVRHHN

SEQ ID NO: 6756 - protein, 222 aa, Citrobacter freundii
  misc_feature (1)..(222): tr|A0A4P7Q034|A0A4P7Q034_CITFR GTP cyclohydrolase 1 OS= Citrobacter freundii OX=546 GN=folE PE=3 SV=1
MSSLSKEAALVHEALVARGLETPLRPPVQEMDNETRKRLISGHMTEIMQLLNLDLSDDSLMETPHRIAKMYVDEIFSGLDYANFPKITVIENKMKVDEMVTVRDITLTSTCEHHFVTIDGKATVAYIPKESVIGLSKINRIVQFFAQRPQVQERLTQQILTALQTLLGTNNVAVSIDAVHYCVKARGIRDATSATTTTSLGGLFKSSQNTRQEFLRAVRHHN

SEQ ID NO: 6757 - protein, 222 aa, Citrobacter freundii; identical to SEQ ID NO: 6754
  misc_feature (1)..(222): tr|A0A0A5P801|A0A0A5P801_CITFR GTP cyclohydrolase 1 OS= Citrobacter freundii OX=546 GN=folE PE=3 SV=1

SEQ ID NO: 6758 - protein, 222 aa, Citrobacter gillenii; identical to SEQ ID NO: 6756
  misc_feature (1)..(222): tr|A0A3E2KMX0|A0A3E2KMX0_9ENTR GTP cyclohydrolase 1 OS= Citrobacter gillenii OX=67828 GN=folE PE=3 SV=1

SEQ ID NO: 6759 - protein, 222 aa, Citrobacter koseri; identical to SEQ ID NO: 6755
  misc_feature (1)..(222): sp|A8AE79|GCH1_CITK8 GTP cyclohydrolase 1 OS=Citrobacte r koseri (strain ATCC BAA-895 / CDC 4225-83 / SGSC4696) OX=290338 GN=folE PE=3 SV=1

SEQ ID NO: 6760 - protein, 222 aa, Citrobacter koseri; identical to SEQ ID NO: 6755
  misc_feature (1)..(222): tr|A0A078LBW9|A0A078LBW9_CITKO GTP cyclohydrolase 1 OS= Citrobacter koseri OX=545 GN=folE PE=3 SV=1

SEQ ID NO: 6761 - protein, 222 aa, Citrobacter murliniae; identical to SEQ ID NO: 6753
  misc_feature (1)..(222): tr|A0A4S3RS55|A0A4S3RS55_9ENTR GTP cyclohydrolase 1 OS= Citrobacter murliniae OX=67829 GN=folE PE=3 SV=1

SEQ ID NO: 6762 - protein, 222 aa, Citrobacter pasteurii; identical to SEQ ID NO: 6754
  misc_feature (1)..(222): tr|A0A0A1RPV0|A0A0A1RPV0_9ENTR GTP cyclohydrolase 1 OS= Citrobacter pasteurii OX=1563222 GN=folE PE=3 SV=1

SEQ ID NO: 6763 - protein, 222 aa, Citrobacter portucalensis
  misc_feature (1)..(222): tr|A0A4P7USP7|A0A4P7USP7_9ENTR GTP cyclohydrolase 1 OS= Citrobacter portucalensis OX=1639133 GN=folE PE=3 SV=1
MSSLSKKAALVHEALVARGLETPLRPPVQEMDNETRKRLISGHMTEIMQLLNLDLSDDSLMETPHRIAKMYVDEIFSGLDYANFPKITVIENKMKVDEMVTVRDITLTSTCEHHFVTIDGKATVAYIPKDSVIGLSKINRIVQFFAQRPQVQERLTQQILTALQTLLGTNNVAVSIDAVHYCVKARGIRDATSATTTTSLGGLFKSSQNTRQEFLRAVRHHN

SEQ ID NO: 6764 - protein, 222 aa, Citrobacter portucalensis; identical to SEQ ID NO: 6754
  misc_feature (1)..(222): tr|A0A5B0T2A9|A0A5B0T2A9_9ENTR GTP cyclohydrolase 1 OS= Citrobacter portucalensis OX=1639133 GN=folE PE=3 SV=1

SEQ ID NO: 6765 - protein, 222 aa, Citrobacter rodentium
  misc_feature (1)..(222): tr|A0A482PFZ8|A0A482PFZ8_CITRO GTP cyclohydrolase 1 OS= Citrobacter rodentium OX=67825 GN=folE PE=3 SV=1
MSSLSKEAALVHEALVARGLETPLRPPVHEMDNETRKRLISGHMTEIMQLLNLDLSDDSLMETPHRIAKMYVDEIFSGLDYANFPKITVIENKMKVDEMVTVRDITLTSTCEHHFVTIDGKATVAYIPKDAVIGLSKINRIVQFFAQRPQVQERLTQQILTALQTLLGTNNVAVSIDAVHYCVKARGIRDATSATTTTSLGGLFKSSQNTRQEFLRAVRHHN

SEQ ID NO: 6766 - protein, 221 aa, Citrobacter sp.
  misc_feature (1)..(221): tr|A0A318W5D8|A0A318W5D8_9ENTR GTP cyclohydrolase 1 OS= Citrobacter sp. YR018 OX=2135606 GN=folE PE=3 SV=1
MPSLSKEAALVHEALLARGLETPLRPPVDMDNESRKRLIAGHMTEIMQLLNLDLSDDSLTETPHRIAKMYVDEIFSGLDYANFPKITVIENKMKVDEMVTVRDITLTSTCEHHFVTIDGKATVAYIPKESVIGLSKINRIVQFFAQRPQVQERLTQQILTALQTLLGTNNVAVSIDAVHYCVKARGIRDATSATTTTSLGGLFKSSQNTRQEFLRAVRHHN

SEQ ID NO: 6767 - protein, 222 aa, Citrobacter sp.; identical to SEQ ID NO: 6754
  misc_feature (1)..(222): tr|A0A0J1L6R1|A0A0J1L6R1_9ENTR GTP cyclohydrolase 1 OS= Citrobacter sp. MGH103 OX=1686378 GN=folE PE=3 SV=1

SEQ ID NO: 6768 - protein, 222 aa, Citrobacter werkmanii; identical to SEQ ID NO: 6754
  misc_feature (1)..(222): tr|A0A090TV66|A0A090TV66_9ENTR GTP cyclohydrolase 1 OS= Citrobacter werkmanii NBRC 105721 OX=1114921 GN=folE PE =3 SV=1

SEQ ID NO: 6769 - protein, 222 aa, Citrobacter werkmanii; identical to SEQ ID NO: 6754
  misc_feature (1)..(222): tr|A0A422VBH4|A0A422VBH4_9ENTR GTP cyclohydrolase 1 OS= Citrobacter werkmanii OX=67827 GN=folE PE=3 SV=1

SEQ ID NO: 6770 - protein, 235 aa, Citrobacter youngae
  misc_feature (1)..(235): tr|D4B7U5|D4B7U5_9ENTR GTP cyclohydrolase 1 OS=Citrobac ter youngae ATCC 29220 OX=500640 GN=folE PE=3 SV=1
MQGRGATPAGEKEMSSLSKEAALVHEALVARGLETPLRPPVQEMDNETRKRLISGHMTEIMQLLNLDLSDDSLMETPHRIAKMYVDEIFSGLDYANFPKITVIENKMKVDEMVTVRDITLTSTCEHHFVTIDGKATVAYIPKDSVIGLSKINRIVQFFAQRPQVQERLTQQILTALQTLLGTNNVAVSIDAVHYCVKARGIRDATSATTTTSLGGLFKSSQNTRQEFLRAVRHHN

SEQ ID NO: 6771 - protein, 222 aa, Citrobacter youngae; identical to SEQ ID NO: 6754
  misc_feature (1)..(222): tr|A0A549UQR7|A0A549UQR7_9ENTR GTP cyclohydrolase 1 OS= Citrobacter youngae OX=133448 GN=folE PE=3 SV=1

SEQ ID NO: 6772 - protein, 202 aa, Citromicrobium sp.
  misc_feature (1)..(202): tr|A0A2P0B1K4|A0A2P0B1K4_9SPHN GTP cyclohydrolase 1 OS= Citromicrobium sp. RCC1897 OX=1812182 GN=folE PE=3 SV=1
MSSLVGPDEDREDGKPAVPEDVQAAIRTLIEWAGDDPAREGLLDTPKRVARAWKEYCVGYTEDPAVHLGRVFEEVGGYNDIVLLKDIPFQSHCEHHMAPIIGVAHIAYLPTDFVVGISKLARVLHGFARRLQVQERLTAEVAECIWNNLKPEGVAVVIEASHACMTARGVRTPGVTMVTSRMMGVFRDDPRSREEVLKLMGH

SEQ ID NO: 6773 - protein, 203 aa, Citromicrobium sp.
  misc_feature (1)..(203): tr|A0A2E9V0M6|A0A2E9V0M6_9SPHN GTP cyclohydrolase 1 OS= Citromicrobium sp. OX=2024827 GN=folE PE=3 SV=1
MSSLVGPDEDDPRAKPPVPQHVQDAIRTLIEWTGDDPSREGLLDTPKRVARAWKEYCVGYEEDPAQHLGRVFEEVGGYNEIVLLKDIPFQSHCEHHMAPIIGKAAIAYLPNDRVVGISKLARVLHGFARRLQVQERLTAEVADCIWDNLQPQGVAVVIDAQHSCMTARGVRTPGVGMVTSRMMGTFLDDHRSREEVLKLMGYG

SEQ ID NO: 6774 - protein, 194 aa, Clavibacter cf.
  misc_feature (1)..(194): tr|A0A067LIZ2|A0A067LIZ2_9MICO GTP cyclohydrolase 1 OS= Clavibacter cf. michiganensis LMG 26808 OX=1291006 GN=f olE PE=3 SV=1
MGVDRARIEAAVAELILAIGEDPGREGLATTPARVAEAYGEFFSGVGADPLRHLRETFPLPETDAAPQPVIVTGIAFRSICEHHLLPFTGVAHLAYVPGERIVGLGRLPRVVDDLASRPQMQERLGEQIAEALEHGLGARGVAVILDATHGCVTARGTRQAGSTTITIAARGSLAEPAARAEVLALLPTAAGRT

SEQ ID NO: 6775 - protein, 194 aa, Clavibacter michiganensis
  misc_feature (1)..(194): tr|A5CP84|A5CP84_CLAM3 GTP cyclohydrolase 1 OS=Clavibac ter michiganensis subsp. michiganensis (strain NCPPB 38 2) OX=443906 GN=folE PE=3 SV=1
MGVDRARIEAAVAELILAIGEDPGREGLATTPARVAEAYAEFFSGVGADPLRHLRETFPLPETDAAPQPVIVTGIAFRSICEHHLLPFTGVAHLAYVPGERIVGLGRLPRVVDDLASRPQMQERLGEQIAEALERGLGARGVAVILDATHGCVTARGTRQAGSTTITIAARGSLAEPAARAEVLALLPTAAGRA

SEQ ID NO: 6776 - protein, 194 aa, Clavibacter michiganensis
  misc_feature (1)..(194): tr|A0A0D5CJF2|A0A0D5CJF2_9MICO GTP cyclohydrolase 1 OS= Clavibacter michiganensis subsp. insidiosus OX=33014 GN =folE PE=3 SV=1
MGVDRARIEAAVAELILAIGEDPGREGLATTPARVAEAYGEFFAGVGTDPLRHLRETFPLPETDAAPQPVIVTGIAFRSICEHHLLPFTGVAHLAYVPGERIVGLGRLPRVVDDLASRPQMQERLGEQIAEALEHGLGARGVAVILDATHGCVTARGTRQAGSTTITIAARGSLAEPAARAEVLALLPASGGRA

SEQ ID NO: 6777 - protein, 196 aa, Clavibacter sp.
  misc_feature (1)..(196): tr|A0A3D9PPN9|A0A3D9PPN9_9MICO GTP cyclohydrolase 1 OS= Clavibacter sp. 199 OX=2183923 GN=folE PE=3 SV=1
MGVDRARIEAAVAELILAIGEDPHREGLATTPQRVAEAYAEFFAGVGADPLRHLRETFPLPETAAAPQPVIVTGIAFRSICEHHLLPFTGVAHLAYVPGERIVGLGRLPRVVDDLASRPQMQERLGEQIAQVLEEGLGARGVAVILDATHGCVTARGTRQAGSTTVTIAARGSLAEPSARAEVLALLPAVGGRDRP

SEQ ID NO: 6778 - protein, 190 aa, Clavibacter sp.
  misc_feature (1)..(190): tr|A0A388P1J7|A0A388P1J7_9MICO GTP cyclohydrolase 1 OS= Clavibacter sp. OX=1871044 GN=folE PE=3 SV=1
MSKSFDQDRAERAISELLAALGEDLERDGLRDTPKRVARALKENFQGLYQDPKDVLTTTFDLGHEELIIVKDIEVYSHCEHHLAPFFGVAHIGYIPGESGKVTGLSKLARLVDLYARRPQVQERLTTQIADSMVEILQPGGVIVIIDCEHLCMSMRGVRKSQARTVTSAVRGMLRDPATRAEAMSLITGK

SEQ ID NO: 6779 - protein, 277 aa, Cloacibacillus porcorum
  misc_feature (1)..(277): tr|A0A1B2I797|A0A1B2I797_9BACT GTP cyclohydrolase FolE2 OS=Cloacibacillus porcorum OX=1197717 GN=folE2 PE=3 SV =1
MRDVQNETDNRNMAIDRVGIRDISWPISVPDRTNGTQETVAQVSLSVSLPQDYRGTHMSRFVEVLGAQEKRVTFHNMEGLLVTLKERLKARDAHAVFDFPYFITKAAPVSGAKGRLRCDVRFDAALRGDDFDLVTTVTSPIQTLCPCSKEISQFGAHNQRAHAVMEVRLAGFVWLEEFVQMADDCASAPIYSLLKREDEKYVTERAYENPRFVEDSVRELALAMQADERVVWYRVSVTSHESIHNHDAFAVIERDKRTGSIPSRENLPCSPRRTEEG

SEQ ID NO: 6780 - protein, 258 aa, Cloacibacillus sp.
  misc_feature (1)..(258): tr|A0A1Y4GEQ2|A0A1Y4GEQ2_9BACT GTP cyclohydrolase FolE2 OS=Cloacibacillus sp. An23 OX=1965591 GN=folE2 PE=3 SV =1
MRDVQNEADDRNLAIDRVGISGISWPISVPDRENGVQETVAEVSLSVSLPRDYRGTHMSRFVEVLSAQEKKVTFHNMEGLLANLKERLHASDAHAIFDFPYFITKTAPVSGARGRVRCDVRFDAALLGEDFDLVTTVEIPVQTLCPCSKEISEYGAHNQRAHASIAVRLASFVWLEEFIEIADRCASAPIYSLLKREDEKFVTERAYENPRFVEDAVRDLALAMQADERVRWFRVSVTSHESIHNHDAFAVIERDKRR

SEQ ID NO: 6781 - protein, 221 aa, Cloacibacterium normanense
  misc_feature (1)..(221): tr|A0A2S7I2C6|A0A2S7I2C6_9FLAO GTP cyclohydrolase 1 OS= Cloacibacterium normanense OX=237258 GN=folE PE=3 SV=1
MSNFFENDDDVFTGKDHTPLREDAFVKTPEEKIKIIEEKFAEIMHTLGLDMTDDSLKDSPKRVAKMYVNEIFGGLLPENKPGISTFSNKYKYRQMLVEKDITVYSFCEHHFLPIIGKAHVAYISNGDVIGLSKINRIVDYYAKRPQVQERLTMQIVDALKEALGTKDVACIIDAKHLCVNCRGIKDTASSTITAELSGIFRTNPITRQEFLHYVGSHAKLD

SEQ ID NO: 6782 - protein, 221 aa, Cloacibacterium normanense
  misc_feature (1)..(221): tr|A0A1E5UB93|A0A1E5UB93_9FLAO GTP cyclohydrolase 1 OS= Cloacibacterium normanense OX=237258 GN=folE PE=3 SV=1
MSNFFENDDDVFTGKDHTPLREDAFVKTPEEKIKIIEEKFAEIMHTLGLDMTDDSLKDSPKRVAKMYVNEIFGGLLPENKPGISTFSNKYKYRQMLVEKDITVYSFCEHHFLPIIGKAHVAYISNGEVIGLSKINRIVDYYAKRPQVQERLTMQIVDALKEALGTKDVACIIDAKHLCVNCRGIKDTASSTITAELSGIFRTNPITRQEFLHYVGSHAKLD

SEQ ID NO: 6783 - protein, 257 aa, Cloacimonas acidaminovorans
  misc_feature (1)..(257): tr|B0VHH4|B0VHH4_CLOAI GTP cyclohydrolase FolE2 OS=Cloa cimonas acidaminovorans (strain Evry) OX=459349 GN=folE 2 PE=3 SV=1
MSIPDIQSQTDNRKITIDKVGVKGIRYPIVVQDREKGIQHSVADLNIYVELPHHRRGTHMSRFLEVLNRYHTEVFIDKLDAFLSELKTTLKADSAYIDIMFPFFMKKQAPVSRVSSLLGYDCSFNASFKDCFELWIGVKVPVTTLCPCSKAISVYGAHNQRSDIFIKVRYREFVWLEELIQLAEKHSSCEIYPILKRSDEKYVTEKAYNNPKFVEDVVREITLELNKDKRITGFYVEAENFESVHNHNAYALISRNL

SEQ ID NO: 6784 - protein, 225 aa, Clostridia bacterium
  misc_feature (1)..(225): tr|A0A124FDD7|A0A124FDD7_9FIRM GTP cyclohydrolase 1 OS= Clostridia bacterium 41_269 OX=1635275 GN=folE PE=3 SV= 1
MQKRWIVIIKHMDLNKKETEDFYRSIFLFKYILEVKEKLDVKKIEEGVKLILQGLGTEVEIGQEVMENTPKRVAQMYAEIFGGLKEKPEELLEVFTEEHEEMVLIKDIPLYSMCEHHLLPFYGLAHVAYIPSKHKVTGLSKLARVVDSFCKRPQIQERLTRQIADTIMKVLTPQGVLVVIEAEHMCMTMRGIKKPGSKTVTSAVRGIFRTNPATRAEAFSLINSR

SEQ ID NO: 6785 - protein, 189 aa, Clostridia bacterium
  misc_feature (1)..(189): tr|A0A523C2C2|A0A523C2C2_9FIRM GTP cyclohydrolase 1 OS= Clostridia bacterium OX=2044939 GN=folE PE=3 SV=1
MDREKVIQGVRLLLEGIGEDLQREGLRDTPNRIASMCEEIFCGLEQDPRELLQVVFTEEQHEEIILVKDIPLYSVCEHHLLPFYGKSHVAYIPKRGRLTGLSKLARVVEVLAKRPQMQERLTSQIADTIMQGLQPRGVLVVVEAEHMCMTMRGVRKPGSMTVTSAVRGYFATNDATRAEAFALINSRGQ

SEQ ID NO: 6786 - protein, 202 aa, Clostridiaceae bacterium
  misc_feature (1)..(202): tr|A0A316N7Y0|A0A316N7Y0_9CLOT GTP cyclohydrolase 1 OS= Clostridiaceae bacterium OX=1898204 GN=folE PE=3 SV=1
MAIDKDAIEKHIRGILVALGDDPDREGLKETPARVAKMYEEVFEGMNYSNHEIAQMFNKTFQDKMDFEEAGNDMVMVKDIEIFSYCEHHLALMYDMKVSVAYVPNGKVIGLSKIARIADMVGKRLQLQERIGSDIAEIMQEILDTKDVAVVIEGTHSCMTARGIKKNAASTKTYTLRGAFREDSFLQMRLESSLAMPQNKTE

SEQ ID NO: 6787 - protein, 185 aa, Clostridiaceae bacterium
  misc_feature (1)..(185): tr|A0A3R6LG17|A0A3R6LG17_9CLOT GTP cyclohydrolase 1 OS= Clostridiaceae bacterium AF29-16BH OX=2292179 GN=folE P E=3 SV=1
MVDKAKVEQAIRLLLEGIGEDVEREGLKETPNRIARMCEEIYGGLNQEADEHLLKQFEVENNEMVLEKDITFYSMCEHHLMPFYGKAHIAYIPDGKVTGLSKLARTVDVYARRPQIQERLTVQIADALERALSPKGVMVMLEAEHTCMTMRGIKKPGSKTITTITRGQFKEDRELQKMFLSMVKD

SEQ ID NO: 6788 - protein, 194 aa, Clostridiales bacterium
  misc_feature (1)..(194): tr|U2CK87|U2CK87_9FIRM GTP cyclohydrolase 1 OS=Clostrid iales bacterium oral taxon 876 str. F0540 OX=1321778 GN =folE PE=3 SV=1
MQCNRSVKMIDKLKIKEAVKMILEAIGEDPEREGLIDTPDRIARMYEEIFSGNFESAKTHLDRVFTVEEDGIVLEKDIQFYSMCEHHLIPFYGKVHIAYISNGKVTGLSKLARTVEVFAKRPQLQERMTNQIAKALMDYLNPKGVMVVIEAEHLCMTMRGVKKPGSKTVTAAYLGDFKDNDNLKNEVFRMISLG

SEQ ID NO: 6789 - protein, 186 aa, Clostridiales bacterium
  misc_feature (1)..(186): tr|A0A349Q9X1|A0A349Q9X1_9FIRM GTP cyclohydrolase 1 OS= Clostridiales bacterium OX=1898207 GN=folE PE=3 SV=1
MKNNNIDREKIKKAVCDILEAIGEDPMREGLLQTPDRVERMLEELTAGYNDDAKTHLSKTFVESGSEVVVEKDIDFSSTCEHHLMPFFGKVHIAYIPCGKVVGLSKLARVVEVYAKRLQLQERLNAQIADAIFEQLNPKGVIVVIEAHHTCMSARGVKKIGAKTVTFAKRGEVDELVEKMLIEGIK

SEQ ID NO: 6790 - protein, 190 aa, Clostridioides difficile
  misc_feature (1)..(190): sp|Q18BW7|GCH1_CLOD6 GTP cyclohydrolase 1 OS=Clostridio ides difficile (strain 630) OX=272563 GN=folE PE=3 SV=1
MNKVDKEKIQHAVREILEAIGEDPDREGLIETPNRVARMYEEIFSGLSEEPRDHLKVLFADEKHEELVLVKDIPFYSCCEHHLVPFFGKAHIAYLPKGGRLTGLSKLARVIDTLAKRPQLQERITKNAADIIMEELQPYGVLVVVEAEHMCMTMRGVKKPGSKTVTSAVRGIFEKDIASRAEAMSLITMK

SEQ ID NO: 6791 - protein, 190 aa, Clostridioides difficile; identical to SEQ ID NO: 6790
  misc_feature (1)..(190): tr|A0A031WEP4|A0A031WEP4_CLODI GTP cyclohydrolase 1 OS= Clostridioides difficile OX=1496 GN=folEA PE=3 SV=1

SEQ ID NO: 6792 - protein, 188 aa, Clostridium aceticum
  misc_feature (1)..(188): tr|A0A0D8IEF0|A0A0D8IEF0_9CLOT GTP cyclohydrolase 1 OS= Clostridium aceticum OX=84022 GN=folE PE=3 SV=1
MDKPKIERAIRDILEAIGEDPDREGLIDTPKRIARMYEEIFMGLEADPKEHLDIYFQDEKHEELVLVKDISFYSSCEHHLVPFYGKAHVGYIPKDGKLTGLSKLARVVDTIARRPQLQERLTSMIADTIVEKLQPQGVIVVVEAEHMCMTMRGVKKPGAKTLTSVVRGVFQKDAKARAEAMALIDFGR

SEQ ID NO: 6793 - protein, 192 aa, Clostridium acetireducens
  misc_feature (1)..(192): tr|A0A1E8EYV4|A0A1E8EYV4_9CLOT GTP cyclohydrolase 1 OS= Clostridium acetireducens DSM 10703 OX=1121290 GN=folE_ 2 PE=3 SV=1
MVDEGKIKEAVKMIIEAVGEDPTREGLLETPDRIAKMYSEIFSGIEESPKKHLSKVFTVESDDLVIERDINFYSMCEHHFLPFFGKAHIAYVPNGKVAGLSKLARTLEIFAKRPQLQERLTSQIADALMENLNCKGVMIIVEAEHLCMSMRGIKKPGSKTTTMVIRGIFKEDYKLQQHVLNIINFKRIEDRA

SEQ ID NO: 6794 - protein, 195 aa, Clostridium acetireducens
  misc_feature (1)..(195): tr|A0A1E8EYJ1|A0A1E8EYJ1_9CLOT GTP cyclohydrolase 1 OS= Clostridium acetireducens DSM 10703 OX=1121290 GN=folE_ 1 PE=3 SV=1
MAIDTKAIQEHIKGILIALGDDPNREGLKDTPKRVAKMYEEVFEGMNYTNDEISEMFNKTFEDDLSIEENNKDMVLMKNIEIFSHCEHHLALMYNMKVTVAYVPNKKVIGLSKIARIADMVGKRLQLQERIGSDIAEIIQKITGSKDVAVIIEAEHGCMTTRGIKKPGTKTLSTTLKGRFNTDVILNNKLMMLYK

SEQ ID NO: 6795 - protein, 195 aa, Clostridium acetobutylicum
  misc_feature (1)..(195): sp|Q97D54|GCH1_CLOAB GTP cyclohydrolase 1 OS=Clostridiu m acetobutylicum (strain ATCC 824 / DSM 792 / JCM 1419 / LMG 5710 / VKM B-1787) OX=272562 GN=folE PE=3 SV=1
MSIDTKAIEKHIRGILIALGDDPDREGLKETPKRVAKMYEEVFKGMEYSNDDIAEMFNKTFEEDLKESEEDNIVLVKDIEIFSHCEHHLTLMYNMTVAVAYIPNKRLIGLSKIARIADMVSRRLQLQERIGKDIAEIMEKVTASKDIAVIIKGEHGCMTSRGIKKPGALTTTMTLKGRFKNDDSLVTKLMALYKA

SEQ ID NO: 6796 - protein, 263 aa, Clostridium acidisoli
  misc_feature (1)..(263): tr|A0A1W1XQH5|A0A1W1XQH5_9CLOT GTP cyclohydrolase FolE2 OS=Clostridium acidisoli DSM 12555 OX=1121291 GN=folE2 PE=3 SV=1
MEDIQNKKGDFDFKIDKVGVENIQHPFYIKKKDGNVIETIGNFSMSVSLEKYLKGINMSRLPIILSELYVDKWKMENYKEDTEFVLKKICEKLESKDSYFDIKFKYFLAKSAPVSKFEGLMPYECKIESALNKEKDKFDMILTVEVPITTLCPCSKAISEYSAHNQRGYVVVSVRYNGEIHIEDIISMIEEVGSCELYPILKRIDEKYVTEKAYENPRFVEDIVRLAAKKLYDNKNITWFKISSHHQESIHPHDAYAVIEINK

SEQ ID NO: 6797 - protein, 186 aa, Clostridium algidicarnis
  misc_feature (1)..(186): tr|A0A2S6FYN2|A0A2S6FYN2_9CLOT GTP cyclohydrolase 1 OS= Clostridium algidicarnis DSM 15099 OX=1121295 GN=folE P E=3 SV=1
MDNERIENAVREILYAIGEDPDREGLLDTPKRMARMYEEIFSGLNEDPKKHLEVYFQEEQYEELVLIKDIPFYSVCEHHLVPFYGKAHVGYLPKGGRLTGLSKLARVVDSISKRPQLQERLTASIANAIVEKLDPYGVIVVIEAEHMCMTMRGVKKPGSKTITSAVRGTFATDPKSRAEVLSMINK

SEQ ID NO: 6798 - protein, 191 aa, [Clostridium] algidixylanolyticum
  misc_feature (1)..(191): tr|A0A419T845|A0A419T845_9FIRM GTP cyclohydrolase 1 OS= [Clostridium] algidixylanolyticum OX=94868 GN=folE PE=3 SV=1
MAIDIEAIRKHIRGIIVALGDNPDREGLKDTPERVAHMYEEIFEGMNYSNHEISEMFDKTFEENLEFIQDNQDLIMVRDIDVFSYCEHHLALMYDMKVSVAYVPNGKVIGLSKIARIVDMVSKRLQLQERIGSDIAEIMQEITGSEDVAVLIEGYHSCMSTRGIKKVSAKTQTATFRGRFQTDVALQIRLR

SEQ ID NO: 6799 - protein, 185 aa, Clostridium argentinense
  misc_feature (1)..(185): tr|A0A0C1R3M1|A0A0C1R3M1_9CLOT GTP cyclohydrolase 1 OS= Clostridium argentinense CDC 2741 OX=1418104 GN=folE PE =3 SV=1
MVNEEKIREAVSMIIEAIGEDPEREGLKDTPDRIARMYSEIFSGLTEDPKEHLKKTFTVENDDIVIEKDIVFYSMCEHHFVPFYGKAHIAYIPNGKVAGLSKLARTVEVFAKRPQLQERMTSQIADSIMKNLQTKGALVIIEAEHLCMTMRGVRKPGTKTATIVSRGIFKDNISLQNQVISLIDK

SEQ ID NO: 6800 - protein, 195 aa, Clostridium argentinense
  misc_feature (1)..(195): tr|A0A0C1QZ87|A0A0C1QZ87_9CLOT GTP cyclohydrolase 1 OS= Clostridium argentinense CDC 2741 OX=1418104 GN=folE PE =3 SV=1
MAIDTKAIEGHVRGILIALGDNPDREGLKDTPKRVAKMYKEVFEGMNYTNDEIASMFNTTFENDLDIKENNKDMVFMKGIEIFSYCEHHLALMYNMKVSVAYIPNKKVVGLSKIARIADMVGRRLQLQERIGSDIAEIIQKVTGSEDVAVIIEGEHGCMTSRGIQKPGTKTISTTLEGRFNTDPILNNKLMMLYQ

SEQ ID NO: 6801 - protein, 186 aa, Clostridium autoethanogenum
  misc_feature (1)..(186): tr|A0A3M0SKZ4|A0A3M0SKZ4_9CLOT GTP cyclohydrolase 1 OS= Clostridium autoethanogenum OX=84023 GN=folE PE=3 SV=1
MMDEKKIREAVKMMLEAIGEDPEREGLVETPDRIARMYKEIFEGLDESPEKHLRKVFTVDSDDIVLEKDITFYSMCEHHLLPFYGKAHIAYIPDGKVVGLSKLARTVEVFAKRLQLQERMSAQIADAMMKYVKVKGVMVVVEAEHMCMTMRGIKKPGSKTVTAVARGLFKSEPRLRDEVYRMINME

SEQ ID NO: 6802 - protein, 185 aa, Clostridium autoethanogenum
  misc_feature (1)..(185): tr|U5RWI5|U5RWI5_9CLOT GTP cyclohydrolase 1 OS=Clostrid ium autoethanogenum DSM 10061 OX=1341692 GN=folE PE=3 S V=1
MDEKKIREAVKMMLEAIGEDPEREGLVETPDRIARMYKEIFEGLDESPEKHLRKVFTVDSDDIVLEKDITFYSMCEHHLLPFYGKAHIAYIPDGKVVGLSKLARTVEVFAKRLQLQERMSAQIADAMMKYVKVKGVMVVVEAEHMCMTMRGIKKPGSKTVTAVARGLFKSEPRLRDEVYRMINME

SEQ ID NO: 6803 - protein, 184 aa, Clostridium baratii
  misc_feature (1)..(184): tr|A0A174TNL8|A0A174TNL8_9CLOT GTP cyclohydrolase 1 OS= Clostridium baratii OX=1561 GN=folE PE=3 SV=1
MVNKEKIIEGVKLIIEGIGEDPNREGLIETPDRIARMYEEIFSGLHKTAKDHLSKTFKVSRDDLVIEKDIVFYSMCEHHFVPFFGKAHIAYIPNGKVAGLSKLARTLETYAKKPQLQENLTNEVADALMEYLDAKGVVVMIEAEHMCMTMRGVKKPGTKTITTTYRGICKEDKDLKNEILSLMK

SEQ ID NO: 6804 - protein, 184 aa, Clostridium baratii
  misc_feature (1)..(184): tr|A0A0A7G1U7|A0A0A7G1U7_9CLOT GTP cyclohydrolase 1 OS= Clostridium baratii str. Sullivan OX=1415775 GN=folE PE =3 SV=1
MVNKEKIIEGVKLIIEGIGEDPNREGLIETPDRIARMYEEIFAGLHKTAEEHLSKTFKVSRDDLVIEKDIVFYSMCEHHFVPFFGKAHIAYIPNGRVAGLSKLARTLEIYAKKPQLQENLTNEVADALMEYLDAKGVVVMIEAEHMCMTMRGVKKPGTRTITTTYRGICKEDKDLKNEILSLMK

SEQ ID NO: 6805 - protein, 188 aa, Clostridium bartlettii
  misc_feature (1)..(188): tr|R5Y0G5|R5Y0G5_9CLOT GTP cyclohydrolase 1 OS=Clostrid ium bartlettii CAG:1329 OX=1263063 GN=folE PE=3 SV=1
MAVDQAKIRKAVRDILEAIGEDPDREGLVGTPDRVARMYEEIFCGLHQDPREHLKVLFADEKHEEMVVVKDIPFYSSCEHHLVPFFGKAHVVYIPKDGRLTGLSKLARVIETIAKRPQLQERITKDTANIIMEELRPYGVMVVVEAEHMCMTMRGVKKPGSKTVTSAVRGVFESDALARSEAMALINL

SEQ ID NO: 6806 - protein, 197 aa, Clostridium beijerinckii
  misc_feature (1)..(197): sp|A6LWG6|GCH1_CLOB8 GTP cyclohydrolase 1 OS=Clostridiu m beijerinckii (strain ATCC 51743 / NCIMB 8052) OX=2904 02 GN=folE PE=3 SV=1
MPKKIDTKKIEECIREIIVALGDDPNREGLLDTPKRVSKMYEEVFQGMTLSNREIAEAFGTTFENEDYDSETHNNMVVVKDIPIHSYCEHHLALMYNMKVTVVYIPKDKIIGLSKISRIADMVGRRLQLQERIGTDIAEIVSMVTKSSDVGVLITGEHGCMTSRGIKKPGTLTTTTTFTGKFQTNDLLRQEALLIMK

SEQ ID NO: 6807 - protein, 197 aa, Clostridium beijerinckii
  misc_feature (1)..(197): tr|A0A0K2MEJ6|A0A0K2MEJ6_CLOBE GTP cyclohydrolase 1 OS= Clostridium beijerinckii NRRL B-598 OX=1428454 GN=folE PE=3 SV=1
MPKKIDTKKIEECIREIIVALGDDPDREGLLDTPKRVSKMYEEVFQGMTLSNREIAEAFGTTFENEDYDSETHNNMVVVKEIPIHSYCEHHLALMYNMKVTVVYIPKDKIIGLSKISRIADMVGRRLQLQERIGTDIAEIVSMVTKSSDVGVLITGEHGCMTSRGIKKPGTLTTTTTFTGKFQTNDLLRQEALLIMR

SEQ ID NO: 6808 - protein, 185 aa, [Clostridium] bolteae
  misc_feature (1)..(185): tr|R0B2T0|R0B2T0_9FIRM GTP cyclohydrolase 1 OS=[Clostri dium] bolteae 90B8 OX=997897 GN=folE PE=3 SV=1
MIDRNKVEQAVRLLLEGMGEDPSREGLIDTPERVARMYEELYSGMDEHPGMYLEKTFRAENNDLIVEKDITFYSVCEHHLLPFYGKVHVAYVPDKKVAGLSKLARTVEVFSRRLQIQEQLTAQIADALMDGLAPRGVMVMMEAEHMCMTMRGIKKPGSRTVTVVKRGCFCQREDLVNLFFQMVRG

SEQ ID NO: 6809 - protein, 185 aa, [Clostridium] bolteae
  misc_feature (1)..(185): tr|R0AMY7|R0AMY7_9FIRM GTP cyclohydrolase 1 OS=[Clostri dium] bolteae 90A9 OX=997894 GN=folE PE=3 SV=1
MIDRNKVEQAVRLLLEGMGEDPSREGLIDTPERVARMYEELYSGMDEHPGMYLEKTFRAENNDLIVEKDITFYSVCEHHLLPFYGKVHVAYVPDKKVAGLSKLARTVEVFSRRLQIQEQLTAQIADALMDGLAPRGVMVMMEAEHMCMTMRGIKKPGSRTVTVVKRGCFCRQEDLVNLFFQMVRG

SEQ ID NO: 6810 - protein, 185 aa, Clostridium bolteae
  misc_feature (1)..(185): tr|A8RZ27|A8RZ27_CLOBW GTP cyclohydrolase 1 OS=Clostrid ium bolteae (strain ATCC BAA-613 / WAL 16351) OX=411902 GN=folE PE=3 SV=1
MIDRNKVEQAVRLLLEGMGEDPSREGLIDTPERVARMYEELYSGMDEHPGMYLEKTFRAENNDLIVEKDITFYSVCEHHLLPFYGKVHVAYVPDKKVAGLSKLARTVEVFSRRLQIQEQLTAQIADALMDGLAPRGVMVMMEAEHMCMTMRGIKKPGSRTVTVVKRGCFCQRENLVNLFFQMVRG

SEQ ID NO: 6811 - protein, 185 aa, Clostridium bolteae; identical to SEQ ID NO: 6809
  misc_feature (1)..(185): tr|R5F5Y3|R5F5Y3_9CLOT GTP cyclohydrolase 1 OS=Clostrid ium bolteae CAG:59 OX=1263064 GN=folE PE=3 SV=1

SEQ ID NO: 6812 - protein, 263 aa, Clostridium bornimense
  misc_feature (1)..(263): tr|W6RYM9|W6RYM9_9CLOT Putative GTP cyclohydrolase 1 ty pe 2 OS=Clostridium bornimense OX=1216932 GN=CM240_1566 PE=4 SV=1
MKIKDFEVYMNGIAPTYLKEDFDNVGLMVGDFEDEISKILVALDGTIEVIEEAAEKKCDLILTHHPLIFSKPSSITNKTIQGIKIRNLIKNNIALYSAHTNLDSVNGGITDTLGQILELENMTLLSSNPLSSDAGIGRIGVTSGDITLKDILDKIKKKFGINNIRYCGDLTNKINRVALLNGSGQDFFKYAKEQSCDLIITGDTTYHYVSDYNEEKINIIDMEHFYSEWIPFIEISKNIKKDLKKYGVDVLLSEKSKSPYKNY

SEQ ID NO: 6813 - protein, 197 aa, Clostridium bornimense
  misc_feature (1)..(197): tr|W6RUY1|W6RUY1_9CLOT GTP cyclohydrolase 1 OS=Clostrid ium bornimense OX=1216932 GN=folE PE=3 SV=1
MAKKIDTNKIQECIREIIIALGDDPNREGLLETPKRVAKMYEEVFEGMNYTNKEIADMFGTTFEEEDYVGETYKNMVVVGNIPIHSYCEHHLALMYNMKVTVVYIPKDKIIGLSKIARIADMVGRRLQLQERIGSDIAEIISMVTETEDVGVLITGEHSCMTARGIKKPGTLTTTTTFLGKFQEDDMLRQEALLIMK

SEQ ID NO: 6814 - protein, 196 aa, Clostridium botulinum
  misc_feature (1)..(196): sp|A7FU67|GCH1_CLOB1 GTP cyclohydrolase 1 OS=Clostridiu m botulinum (strain ATCC 19397 / Type A) OX=441770 GN=f olE PE=3 SV=1
MAIDVKAIEEHIRGILIALGDNPEREGLKNTPKRVAKMYEEVFKGMCYSNDEIAEMFNVTFEDDLCINDNENDMVFMKEIEIFSHCEHHLALMYNMKVAIAYIPKKKIIGLSKIARIADMVGRRLQLQERIGSDIAEILQKITDSEDVAVIIEGEHGCMTTRGIKKPGTKTITTTLRGKFNTDPIVSNKLMMLYTK

SEQ ID NO: 6815 - protein, 196 aa, Clostridium botulinum
  misc_feature (1)..(196): tr|A0A0B4WEA4|A0A0B4WEA4_CLOBO GTP cyclohydrolase 1 OS= Clostridium botulinum Prevot_594 OX=1408284 GN=folE PE= 3 SV=1
MAIDVKAIEEHIRGILIALGDNPEREGLKDTPKRVAKMYQEVFKGMCYSNDEIAEMFNVTFEDDLCINDNVNDMVFMKDIEIFSHCEHHLALMYNMKVAIAYIPKGKIIGLSKIARIADMVGRRLQLQERIGSDIAEILQKVTNSEDVAVIIEGEHGCMTTRGIKKPGTKTITTTLRGKFNTDSIVSNKLMMLYTK

SEQ ID NO: 6816 - protein, 198 aa, Clostridium butyricum
  misc_feature (1)..(198): tr|C4IIS4|C4IIS4_CLOBU GTP cyclohydrolase 1 OS=Clostrid ium butyricum E4 str. BoNT E BL5262 OX=632245 GN=folE P E=3 SV=1
MKKKIDTEKIQECIREILIALGDNPDREGLKDTPKRVAKMYEEVFEGMTHTNEEIAAMFGTTFEEESCVEEVHNNMVIVRDIPIHSYCEHHLALMYNMKVNVVYIPNKKIIGLSKIARIADMVGKRLQLQERIGADIAEIVSMITETKDVGVVITGEHSCMTARGIKKPGTLTTTTTFIGDFEENYMLRQEALLLIKQ

SEQ ID NO: 6817 - protein, 198 aa, Clostridium butyricum
  misc_feature (1)..(198): tr|A0A2S7F9Q6|A0A2S7F9Q6_CLOBU GTP cyclohydrolase 1 OS= Clostridium butyricum OX=1492 GN=folE PE=3 SV=1
MKKKIDTEKIQECIREILIALGDNPDREGLKDTPKRVAKMYEEVFEGMTHTNEEIAAMFGTTFEEESCVEEVHNNMVIVRDIPIHSYCEHHLALMYNMKVSVVYIPNKKIIGLSKIARIADMVGKRLQLQERIGADIAEIVSMITETKDVGVVITGEHSCMTARGIKKPGTLTTTTTFIGDFEENSMLRQEALLLIKQ

SEQ ID NO: 6818 - protein, 185 aa, Clostridium carboxidivorans
  misc_feature (1)..(185): tr|C6Q2N5|C6Q2N5_9CLOT GTP cyclohydrolase 1 OS=Clostrid ium carboxidivorans P7 OX=536227 GN=folE PE=3 SV=1
MIDENKIKTAVRMIIEAIGENPDREGLQETPDRIARMYSEIFAGLEQSPEKHLKKIFTVKSNDIVLEKDIQFYSMCEHHLVPFYGKAHIAYIPDGKVTGLSKLARTVEVFAKRPQLQERLTGQVADAIMEYLNAKGVMVVVEAEHMCMTMRGVKKPGSRTVTVVTRGEFHENHSLKDEVYKMINL

SEQ ID NO: 6819 - protein, 33 aa, Clostridium carnis
  misc_feature (1)..(33): tr|A0A3P6K8T2|A0A3P6K8T2_9CLOT GTP cyclohydrolase I OS= Clostridium carnis OX=1530 GN=folE PE=4 SV=1
MMDKEKICEGVKLILEGIGEDINREGLIETPIK

SEQ ID NO: 6820 - protein, 184 aa, Clostridium cavendishii
  misc_feature (1)..(184): tr|A0A1M6EVP9|A0A1M6EVP9_9CLOT GTP cyclohydrolase 1 OS= Clostridium cavendishii DSM 21758 OX=1121302 GN=folE PE =3 SV=1
MDKQKIKEAVKMIIEAVGDDPNREGLLETPDRIARMYEEIFSGISQTAETYLTKNFSVEGEDIVLEKDITFYSMCEHHFLPFYGKVHIAYIPNGKVAGLSKLARCVDVYSKKPQLQERLTYEIADAIMEYLDAKGSMVIIEAEHMCMTMRGVRKPGTKTITSSYRGVFKEDSSLKNEVYKMLSM

SEQ ID NO: 6821 - protein, 183 aa, Clostridium celatum
  misc_feature (1)..(183): tr|L1QDR7|L1QDR7_9CLOT GTP cyclohydrolase 1 OS=Clostrid ium celatum DSM 1785 OX=545697 GN=folE PE=3 SV=1
MDKEKIMEGVKLILEGVGEDVTREGLIETPDRIARMYMEIFEGLGKDASEILSKTFSVEDNDLVIEKDINFFSMCEHHLVPFFGKAHVAYIPKGKVVGLSKLARTVDLYAKKPQLQERLTTEIADALMKYLDAEGAMVVIEAEHTCMTMRGIKKLGAKTVTTTYRGVFKENLELRREVMNFIK

SEQ ID NO: 6822 - protein, 260 aa, Clostridium cellulovorans
  misc_feature (1)..(260): tr|D9SS47|D9SS47_CLOC7 GTP cyclohydrolase FolE2 OS=Clos tridium cellulovorans (strain ATCC 35296 / DSM 3052 / O CM 3 / 743B) OX=573061 GN=folE2 PE=3 SV=1
MIDIQNTRGNYGKKIDKVGINNLIHPIRIQGKNNEIQNTVGNFSLSVSLAQELRGVNMSRLPIVLTELYEENFVFKNYREDLLYFLNEIKNKVEGEDSYISVCFDYFLYKKAPVSGFSGLMNYKCNFEGELKEDKYSYFLTVEVPITTLCPCSKAISISSAHNQRGYVTVRAELSENIEIEEFINIIEQAGSCDLYPILKREDEKYVTEKSYDNPRFVEDIVRIVADGLCEVDNVVSFNVKSVHEESIHAHNAFAEISYK

SEQ ID NO: 6823 - protein, 184 aa, Clostridium chauvoei
  misc_feature (1)..(184): tr|S6FNE0|S6FNE0_9CLOT GTP cyclohydrolase 1 OS=Clostrid ium chauvoei JF4335 OX=1351755 GN=folE PE=3 SV=1
MIDKDKVKAGVKLILEAIGEDVNREGLIETPDRIARMYEEIFSGIGQTAEEILSKTFKVESNDLVIEKDITFFSMCEHHLVPFYGKAHIAYIPKDRVAGLSKLARCVEIYAKKPQLQEKLTAEVADAIMEYLGAEGAMVVIEAEHMCMTMRGVKKPGTRTVTTTYRGRFKEDYELRREVLALIK

SEQ ID NO: 6824 - protein, 263 aa, Clostridium chromiireducens
  misc_feature (1)..(263): tr|A0A1V4IJJ1|A0A1V4IJJ1_9CLOT Putative GTP cyclohydrol ase 1 type 2 OS=Clostridium chromiireducens OX=225345 G N=CLCHR_31800 PE=4 SV=1
MIRVMDIEMEIERLAPKFLAESYDNVGLMVGDELKEVKKVFLALDCTKEVIKEAVENKSDLIITHHPLIFRKPKSIIKGELLGDKVIELIKEDIALYSCHTNLDSVKGGINETLVKMLGFNSDEIIEPCENSNYKDSGIGRIVRLQNETTLNDIINIVKKNLNIKNMRIVRGNDKIKALAIINGSGQDYFSKAKALGADCIITGDTTYHYASDFKEMGISIIDAGHFATEYLIFLKTLDFLREKFKGVEFTVSKKCEDPYEFV

SEQ ID NO: 6825 - protein, 197 aa, Clostridium chromiireducens
  misc_feature (1)..(197): tr|A0A1V4IBU3|A0A1V4IBU3_9CLOT GTP cyclohydrolase 1 OS= Clostridium chromiireducens OX=225345 GN=folE PE=3 SV=1
MPKKINTNKIEECIREIIIALGDDPNREGLLDTPKRVAKMYEEVFQGMTLSNEEIAEMFGTTFENEEFISDTYNNMVVVKDIPIHSFCEHHLALMYNMKVTVVYIPGEKIIGLSKISRIADMVGRRLQLQERIGSDIAEIVSMATGSNDVGVLITGEHSCMTSRGIKKPGTATTTTTFIGKFQVNDMLRQEALLIMK

SEQ ID NO: 6826 - protein, 185 aa, [Clostridium] clostridioforme; identical to SEQ ID NO: 6809
  misc_feature (1)..(185): tr|N9Z4Y6|N9Z4Y6_9FIRM GTP cyclohydrolase 1 OS=[Clostri dium] clostridioforme 90A7 OX=999407 GN=folE PE=3 SV=1

SEQ ID NO: 6827 - protein, 188 aa, [Clostridium] cocleatum
  misc_feature (1)..(188): tr|A0A1I0EX52|A0A1I0EX52_9FIRM GTP cyclohydrolase 1 OS= [Clostridium] cocleatum OX=69824 GN=folE PE=3 SV=1
MIDTKKIEKHIYGILEALGDDPNREGLKDTPKRVAKMYEEVFAGMNYTNQQIAEMFNKTFEDDLDFANQEVVVIKDIDIFSYCEHHLALMYDMKVTVAYIPCNKVIGLSKIARIADMAARRLQLQERIGTDIAEIISLVTGSKDIAVIIKGKHSCMSSRGIKKVNSTTITSILTGRFETDSKLQIYLR

SEQ ID NO: 6828 - protein, 110 aa, Clostridium colicanis
  misc_feature (1)..(110): tr|A0A151AL13|A0A151AL13_9CLOT Putative GTP cyclohydrol ase 1 type 2 OS=Clostridium colicanis DSM 13634 OX=1121 305 GN=CLCOL_20280 PE=4 SV=1
MDFQLFKVETFIPEEYVNELRFELNKVGALTVDEKYDNCMSTSRVKGSWRPLEGTNPYLGEVGEICEAEEIKVEFTCKKEVIRKAIEVIKEVHPYEVPVINVIPVMTNYF

SEQ ID NO: 6829 - protein, 191 aa, Clostridium colicanis
  misc_feature (1)..(191): tr|A0A151AQV4|A0A151AQV4_9CLOT GTP cyclohydrolase 1 OS= Clostridium colicanis DSM 13634 OX=1121305 GN=folE PE=3 SV=1
MAIDTEAIQEHIKGIIIALGDDPNREGLKDTPKRVARMFEEVFEGMNYSNHEIANMFNKTFEEDLAFVEENQDLIIVRDIEVFSHCEHHLALMYDMKVTVAYVPNGKVIGLSKIARIVDMVSKRLQLQERIGSDIAEIMQKITGSEDIAVLIEGYHSCMTARGINKVAAKTQTSTLRGRFKTDSSLRMRLK

SEQ ID NO: 6830 - protein, 189 aa, Clostridium collagenovorans
  misc_feature (1)..(189): tr|A0A1M5TXG4|A0A1M5TXG4_9CLOT GTP cyclohydrolase 1 OS= Clostridium collagenovorans DSM 3089 OX=1121306 GN=folE PE=3 SV=1
MENRHIDKEKIKTAVSMIIEAIGEDVNREGLKDTPDRIARMYEEVFSGMDEDASVHLSRTFHVEDDNLVLEKDIQFYSMCEHHFLPFFGKVHIAYIPNGKVAGLSKLARTVEVFAKRPQLQERLTFQVAEAIMKNLNAKGVMVVVEAEHLCMSMRGIKKPGSSTATIVAKGNFENNMDLQKQVLELIKL

SEQ ID NO: 6831 - protein, 196 aa, Clostridium combesii
  misc_feature (1)..(196): tr|A0A2G7HGK2|A0A2G7HGK2_9CLOT GTP cyclohydrolase 1 OS= Clostridium combesii OX=39481 GN=folE PE=3 SV=1
MAIDVKAIEEHIRGILIALGDNPEREGLKNTPKRVAKMYEEVFKGMCYSNDEIAEMFNVTFEDDLCINDNENDMVFMKKIEIFSHCEHHLALMYNMKVAIAYIPKKKIIGLSKIARIADMVGRRLQLQERIGSDIAEILQKVTDSEDVAVIIEGEHSCMTTRGIKKPGTKTITTTLRGKFNTDPIVSNKLMMLYTK

SEQ ID NO: 6832 - protein, 271 aa, Clostridium coskatii
  misc_feature (1)..(271): tr|A0A166SL08|A0A166SL08_9CLOT Putative GTP cyclohydrol ase 1 type 2 OS=Clostridium coskatii OX=1705578 GN=WX73 _00947 PE=4 SV=1
MYLKVQDIHDILEKRAPSILKESYDNVGLMVGDMKCEVGSILVALDCTLEVIEEALRNNCNLIFTHHPLLFKRPYTITTDTLIGKKIIELIRNNINVYSSHTNLDSVKGGINDIIMEKLGFTNYNVIEPSRIKNYGENDCGIGRIASLTEPMTLARFCNEVKKCLNISSVRYSGNELKIINKVALINGSGQDYFDAAKALGADCVITGDTTYHYVSDFQEQGIAVIDAGHFGTEWPAMEIIANFLRHEIKVRGFENTVILSKVNKSPYKYK

SEQ ID NO: 6833 - protein, 111 aa, Clostridium coskatii
  misc_feature (1)..(111): tr|A0A166TEW9|A0A166TEW9_9CLOT Putative GTP cyclohydrol ase 1 type 2 OS=Clostridium coskatii OX=1705578 GN=WX73 _04094 PE=4 SV=1
MEYKNYKMETFIPEEYVTKLRESLNDIGALTIGGNYDNCMSVSKVTGYWRPLSGANPFKGEKGEVSEEEECKVEFCCKSDIVEKAISTIRKVHPYDEPVINVIPLSNFVKY

SEQ ID NO: 6834 - protein, 258 aa, Clostridium cylindrosporum
  misc_feature (1)..(258): tr|A0A0J8D980|A0A0J8D980_CLOCY GTP cyclohydrolase FolE2 OS=Clostridium cylindrosporum DSM 605 OX=1121307 GN=fo lE2 PE=3 SV=1
MKDVQSQKDTRNIALKKVGINDLKWPIKVLDKTSGEQTTVSTMDLSVYLPHDQRGTHMSRFVEVIKEAPQFSPKGLEEMLKHLVERLEAKTGHCRIAFDYFVTKASPVTGIMAPYDVQCCFDAEYSVETGFKFILEVAVPATTLCPCSKEISEFGAHNQRAIIKMKIEMDKLIWIEDLVKIAEESASSPIFTLLKRQDEKWVTEQAYLNPRFVEDVARETAARLEAYEGITWYSTYVESIESIHNHNAFAYTEKGCTL

SEQ ID NO: 6835 - protein, 197 aa, Clostridium diolis; identical to SEQ ID NO: 6807
  misc_feature (1)..(197): tr|A0A2P8RLZ1|A0A2P8RLZ1_9CLOT GTP cyclohydrolase 1 OS= Clostridium diolis OX=223919 GN=folE PE=3 SV=1

SEQ ID NO: 6836 - protein, 195 aa, Clostridium disporicum
  misc_feature (1)..(195): tr|A0A174EQW7|A0A174EQW7_9CLOT GTP cyclohydrolase 1 OS= Clostridium disporicum OX=84024 GN=folE_1 PE=3 SV=1
MAIDKEKIEMHIKGILEAIGEKPEREGLIDTPKRVAKMYEEIFDGINYSNEDIVEMFNKTFSEELDGIDKCGNMIIIKDIDFFSYCEHHMALMYNMKAHIAYIPNEKIIGLSKVARIVDLVGKRLQLQERIGMDISEIIKTIVGTENVAVIIEGEHGCMTTRGIKKNNSKTITSIFSGLFETNESIKNQMLLLYK

SEQ ID NO: 6837 - protein, 183 aa, Clostridium disporicum
  misc_feature (1)..(183): tr|A0A173YEJ3|A0A173YEJ3_9CLOT GTP cyclohydrolase 1 OS= Clostridium disporicum OX=84024 GN=folE_2 PE=3 SV=1
MNKEMIMEGVKLILEGIGEDVNREGLIETPDRIARMYMEIFDGIGKDAKDVLSKTFSVENNDLVLEKDITFFSMCEHHLVPFFGKAHIAYIPKGKVAGLSKLARTVEVYAKKPQLQEKLTTEIADAIMEYLDAEGAMVVIEAEHTCMTMRGVKKPGAKTVTTTYRGVFRENIDLRREVMNFIK

SEQ ID NO: 6838 - protein, 185 aa, Clostridium drakei
  misc_feature (1)..(185): tr|A0A2U8DK98|A0A2U8DK98_9CLOT GTP cyclohydrolase 1 OS= Clostridium drakei OX=332101 GN=folE PE=3 SV=1
MIDEGKIKTAVRMIIEAIGENPDREGLQETPDRIARMYSEIFAGLDQNPEKHLKKIFTVKSNDIVLEKDVQFYSMCEHHLVPFYGKVHIAYIPNGKVTGLSKLARTVEVFAKRPQLQERLTGQVADAIMEYLNAKGVMVVIEAEHMCMTMRGIKKPGSKTVTVVTRGEFHENYSLKDEVYKMINL

SEQ ID NO: 6839 - protein, 196 aa, Clostridium estertheticum
  misc_feature (1)..(196): tr|A0A1J0GDY6|A0A1J0GDY6_9CLOT GTP cyclohydrolase 1 OS= Clostridium estertheticum subsp. estertheticum OX=1552 GN=folE PE=3 SV=1
MAIDTEAIEKHIRGILIALGDDPNREGLKDTPKRVAKMYEEVFAGMCYSNAEIAKMFDTTFADDLIVNDDSRDIVIMKDIQIFSHCEHHLALMYDMKVTVAYVPNKKIIGLSKIARIADMVGRRLQLQERIGTDIAETMEMVTTSSDIAVIIEGEHACMTTRGIKKPGTKTMSTTFRGRFNTDVILNNKLMMLYNK

SEQ ID NO: 6840 - protein, 268 aa, Clostridium felsineum
  misc_feature (1)..(268): tr|A0A1S8LFL8|A0A1S8LFL8_9CLOT Putative GTP cyclohydrol ase 1 type 2 OS=Clostridium felsineum DSM 794 OX=112131 0 GN=CLFE_21810 PE=4 SV=1
MSLKVKDLCNIIEDFAPISLKEDYDNVGLMLGDREDTVEGILTALDCTIKVIDEAIEKKCNMIITHHPILFKKPSSITNDTLLGKKIIKLIKNNINVYSAHTNLDSVKNGINDAIVSILGFDNSSILAKNFRAVKEAGIGRVVELEEGIQLKELCHRVKENLKVQNLRYCGNDDKKIQKIAIINGSGQDFFEEARKKGADCIITGDTSYHYVSDYNEMGMAVIDAGHFGTEWPSVIVMTKMLKDSLNSKGIDTSISVSQNNIDPYKIK

SEQ ID NO: 6841 - protein, 110 aa, Clostridium felsineum
  misc_feature (1)..(110): tr|A0A1S8LE73|A0A1S8LE73_9CLOT Putative GTP cyclohydrol ase 1 type 2 OS=Clostridium felsineum DSM 794 OX=112131 0 GN=CLFE_24440 PE=4 SV=1
MQINQFKIEIFIPKEFVEQLGDKLSEANVGKIGNYDHCMSINEVKGYWRPLKGAEPHEGNIGELCKGEECKIEMRCKREYVENALKIIRKVHPYEEPVINVIPILNELFE

SEQ ID NO: 6842 - protein, 191 aa, [Clostridium] fimetarium
  misc_feature (1)..(191): tr|A0A1I0RKX7|A0A1I0RKX7_9FIRM GTP cyclohydrolase 1 OS= [Clostridium] fimetarium OX=99656 GN=folE PE=3 SV=1
MAIDIEAIQEHIKGILVALGDNPDREGLKGTPERVARMYAEVFEGMNYSNHEIAVMFNKTFEDDLEFVQGNQDLIVVKDIEIFSYCEHHMALMYDMKVSVAYVPNGKVIGLSKIARIADMVSKRLQLQERIGSDIAEIMQEVTESVDVAVLIEGCHSCMSTRGIKKTSAKTQTSTLRGRFMTDINLQMRLK

SEQ ID NO: 6843 - protein, 188 aa, Clostridium formicaceticum
  misc_feature (1)..(188): tr|A0A1D9FLU5|A0A1D9FLU5_9CLOT GTP cyclohydrolase 1 OS= Clostridium formicaceticum OX=1497 GN=folE PE=3 SV=1
MDKPKIERAIRDILEAIGEDPDREGLKDTPKRIARMYEEIFLGLEADPKEHLDIYFQDEKHEELVLVKDISFYSSCEHHLVPFYGKAHVGYIPKDGKLTGLSKLARVVDTIAKRPQLQERLTSMIADTIVEKLQPHGVIVVVEAEHMCMTMRGVKKPGAKTLTSVVRGVFQKDAKARAEAMALIDFGR

SEQ ID NO: 6844 - protein, 185 aa, Clostridium frigidicarnis
  misc_feature (1)..(185): tr|A0A1I0WTL5|A0A1I0WTL5_9CLOT GTP cyclohydrolase 1 OS= Clostridium frigidicarnis OX=84698 GN=folE PE=3 SV=1
MIDENKIREGVKLIIEGIGENPNREGLKETPDRIARMYSEVFSGLYEDVSTHLSKTFEVKEDNLVIEKDITYYSMCEHHFLPFFGKAHIAYIPNGKVAGLSKLARCVDVYAKRPQLQEKMTTDIAEALMEHLDAKGVMVMVQGEHLCMTMRGIKKPGSRTVTLCYKGEFEKDKDLRDEVYKLMTL

SEQ ID NO: 6845 - protein, 196 aa, Clostridium gasigenes
  misc_feature (1)..(196): tr|A0A1H0NV01|A0A1H0NV01_9CLOT GTP cyclohydrolase 1 OS= Clostridium gasigenes OX=94869 GN=folE PE=3 SV=1
MAIDTKAIEEHIRGILIALGDNPDREGLQDTPKRVAKMYEDVFKGMNYSNDEIVTMFNTTFEDDLSVKGNPNDIVFMKDIEIFSHCEHHLALMYNMKVSVAYIPNGKVIGLSKIARIADMVGRKLQLQERIGTDIAYIMQKVTCSEDVAVIIEGEHGCMSTRGIQKPGTKTVSTTLRGRFNTDQILNNNLMMLYRK

SEQ ID NO: 6846 - protein, 184 aa, Clostridium gasigenes
  misc_feature (1)..(184): tr|A0A1H0MAL9|A0A1H0MAL9_9CLOT GTP cyclohydrolase 1 OS= Clostridium gasigenes OX=94869 GN=folE PE=3 SV=1
MVDKEKIRQGAKLILEAIGEDVNREGLLETPDRMARMYEEIFSGIGQTAEEVLSKTFEVENNDLVIEKDITFFSMCEHHLVPFYGKAHIAYIPNGRVAGLSKLARCVEIYGKKPQLQERLTTEIADAVMKYLDAEGVMVIIEAEHMCMTMRGVKKPGTKTVTTTYKGVFKENADLRREVISLIK

SEQ ID NO: 6847 - protein, 263 aa, Clostridium grantii
  misc_feature (1)..(263): tr|A0A1M5X204|A0A1M5X204_9CLOT GTP cyclohydrolase 1 OS= Clostridium grantii DSM 8605 OX=1121316 GN=folE PE=3 SV =1
MDYKLYYNQIESKMNKYNFKLLNKNDVVKFVIDPVTVVDLMKEHKLNNIKLQLQLHKIIWGHEERGVNVINKEKIEYHIREILLALGENPDREGLKKTPERYAKMCEEIFEGINYTNDEIADMFNVTFEEEDYYNEKSNDFVLMKDIEIFSQCEHHLALMYNMKVAVAYIPKEKIIGLSKIARIADMVAKRLQLQERIGSDIAEIMQKIAQTENVAVIIQGEHACMTTRGIKKPGTKTITTNFNGKFESDEKLASRLLNLYNA

SEQ ID NO: 6848 - protein, 183 aa, Clostridium haemolyticum
  misc_feature (1)..(183): tr|A0A0A0IUX9|A0A0A0IUX9_CLOHA GTP cyclohydrolase 1 OS= Clostridium haemolyticum NCTC 8350 OX=1443115 GN=folE P E=3 SV=1
MVDYEKIKKAVVMIIEAIGEDPSREGLKETPDRIARMYEEIFSGLKETPEKHLSKVFKVNNDDVVIEKDIQFYSMCEHHFLPFFGKVHIAYIPNEEVVGLSKLARTMEVFSKRPQLQERLTSQIADSLMKYLNCKGVMVVIEAEHLCMSMRGVKNWGAKTTTIVTRGTFQDDSSLKQNVLIRF

SEQ ID NO: 6849 - protein, 185 aa, Clostridium haemolyticum
  misc_feature (1)..(185): tr|A0A1V2YAS2|A0A1V2YAS2_CLOHA GTP cyclohydrolase 1 OS= Clostridium haemolyticum OX=84025 GN=folE PE=3 SV=1
MVDYEKIKKAVVMIIEAIGEDPSREGLKETPDRIARMYEEIFSGLKETPEKHLSKVFKVNNDDVVIEKDIQFYSMCEHHFLPFFGKVHIAYIPNEEVVGLSKLARTMEVFSKRPQLQERLTSQIADSLMKYLNCKGVMVVIEAEHLCMSMRGVKNWGAKTTTIVTRGTFQDDSSLKQNVLNIIRF

SEQ ID NO: 6850 - protein, 201 aa, [Clostridium] hiranonis
  misc_feature (1)..(201): tr|B6FWH6|B6FWH6_9FIRM GTP cyclohydrolase 1 OS=[Clostri dium] hiranonis DSM 13275 OX=500633 GN=folE PE=3 SV=1
MLDSKENVELKEGKMDKEKIKRAVRDILEAIGEDPDREGLKDTPDRVARMYEEIFCGIFQDPREHLKVTFPEESHEEMVIVKDIPFYSCCEHHLVPFFGKAHVVYIPKGGRLTGLSKLARVVETIAKRPQLQERIAKETADIIMEELRPYGVMVVIEAEHMCMTMRGVKKPGSKTVTSAVRGVFAKDIATRTEAMNLILMK

SEQ ID NO: 6851 - protein, 201 aa, [Clostridium] hiranonis; identical to SEQ ID NO: 6850
  misc_feature (1)..(201): tr|A0A5C0T553|A0A5C0T553_9FIRM GTP cyclohydrolase 1 OS= [Clostridium] hiranonis OX=89152 GN=folE PE=3 SV=1

SEQ ID NO: 6852 - protein, 195 aa, Clostridium homopropionicum
  misc_feature (1)..(195): tr|A0A0L6ZCL6|A0A0L6ZCL6_9CLOT GTP cyclohydrolase 1 OS= Clostridium homopropionicum DSM 5847 OX=1121318 GN=folE _1 PE=3 SV=1
MAIDIKAIEEHIKGILVALGDNPDREGLIETPNRVAKMYEEIFKGMCYTNDEIAEMFNKTFEEDLSVGENPQDMVLMKDIEIFSYCEHHLALMYNMKVAVAYIPNKKIIGLSKIARIADMVGRRLQLQERIGTDIAEIMQKITGSEDVAVIIEGEHGCMTTRGIEKPGARTSTTTLRGKFNSDPVLNNKLMMLYK

SEQ ID NO: 6853 - protein, 195 aa, Clostridium homopropionicum
  misc_feature (1)..(195): tr|A0A0L6Z6T8|A0A0L6Z6T8_9CLOT GTP cyclohydrolase 1 OS= Clostridium homopropionicum DSM 5847 OX=1121318 GN=folE _2 PE=3 SV=1
MAIDIKSIEEHIRGILIALGDDPDREGLKDTPNRVAKMYEEVFKGMCYTNDEIAEMFNKTFEEDLLLDENPQDMVLIKDIEIFSYCEHHLALMYNMKAAVAYIPNKKIIGLSKIARIADMVGRRLQLQERIGADIAEIMQKITDSEDVAVIIEGEHGCMTTRGIQKPGTKTISTTFKGKFITDSMLNNKLLTLYK

SEQ ID NO: 6854 - protein, 292 aa, [Clostridium] indolis
  misc_feature (1)..(292): tr|A0A3P6JA83|A0A3P6JA83_9FIRM GTP cyclohydrolase FolE2 OS=[Clostridium] indolis OX=69825 GN=folE2 PE=3 SV=1
MTEFDLSTREGRWKHFGSVDPIEGTKPTVKEEMKDLQSTNKNFLFEIEEVGIKNLVYPVLVDRFQTAGNFSFSTSLNQDEKGINMSRILESVEKHYDNGIELDFDSLYRLLRSLQERMEQNAAGLDVSAKWFFDRHSPITNIKAVGHADVTYGMAIDKENVTRKEITLQVAVTTLCPCSKEISEYSAHNQRGIVTVKAYLSKDANLTDDYKEKILDAMEANASSILYPILKRPDEKSVTEHAYENPRFVEDLIRLIAADLVDFDWIEGFDIECRNEESIHQHDAFAKLKYRR

SEQ ID NO: 6855 - protein, 185 aa, Clostridium intestinale
  misc_feature (1)..(185): tr|A0A1M5WSX9|A0A1M5WSX9_9CLOT GTP cyclohydrolase 1 OS= Clostridium intestinale DSM 6191 OX=1121320 GN=folE PE= 3 SV=1
MIDKNKIEEAVRMMLEAIGEDPEREGLKETPLRIAKMYEEIFDGIGKTAKEHLEKTFTVERDDLVIEKDITYYSMCEHHLVPFFGKAHIAYIPNGKVAGLSKLARCVEIYSKKPQLQERLTSEVCDALMAYLKPKGVMVLVEGEHMCMTMRGVKKPGTKTITYSYRGVFEEDAELRREVRELING

SEQ ID NO: 6856 - protein, 185 aa, Clostridium intestinale
  misc_feature (1)..(185): tr|U2PTN2|U2PTN2_9CLOT GTP cyclohydrolase 1 OS=Clostrid ium intestinale URNW OX=1294142 GN=folE PE=3 SV=1
MIDKNKIEEAVRMMLEAIGEDPDREGLKETPLRIAKMYEEIFDGIGKTAKEHLEKTFTVERDDLVIEKDITYYSMCEHHLVPFFGKAHIAYIPNGKVAGLSKLARCVEIYSKKPQLQERLTSEVCDALMEYLKPKGVMVLVEGEHMCMTMRGVKKPGTKTITYSYRGIFEEDAELRREVRELING

SEQ ID NO: 6857 - protein, 185 aa, Clostridium isatidis
  misc_feature (1)..(185): tr|A0A343JAD2|A0A343JAD2_9CLOT GTP cyclohydrolase 1 OS= Clostridium isatidis OX=182773 GN=folE PE=3 SV=1
MALNKEKIIEGVKLILEGVGEDINREGLIETPDRIARMYEEIFSGLNANAEKELSKTFEVDENNLVLEKDITFFSMCEHHLVPFYGKAHIAYIPKGRVVGLSKLARCVEIYAKKPQLQERLTNEIANAVMNYLDAEGVMVVIEGEHMCMAMRGIKKPGAKTLTTAFKGCFKEDFNLRKEVLDLIK

SEQ ID NO: 6858 - protein, 185 aa, Clostridium kluyveri
  misc_feature (1)..(185): sp|A5N6S3|GCH1_CLOK5 GTP cyclohydrolase 1 OS=Clostridiu m kluyveri (strain ATCC 8527 / DSM 555 / NCIMB 10680) O X=431943 GN=folE PE=3 SV=1
MDENKIKDAVRMIIEAIGENPEREGLAETPDRIARMYTEIFSGLKEKPEEHLKKVFTVNNDDIVLEKDIQFYSMCEHHFMPFYGKTHVAYIPNGKVVGLSKLARTVEVFAKRLQLQERMTVQIADSIMDYLKVKGVMVVIEAEHMCMTMRGIKKPGSKTVTVATRGIFKNKIEFRNQVYEMIKMK

SEQ ID NO: 6859 - protein, 185 aa, Clostridium kluyveri
  misc_feature (1)..(185): tr|A0A1L5F5R8|A0A1L5F5R8_CLOKL GTP cyclohydrolase 1 OS= Clostridium kluyveri OX=1534 GN=folE PE=3 SV=1
MDENKIKDAVRMIIEAIGENPEREGLAETPDRIARMYTEIFSGLKEKPEEHLKKVFTVNNDDIVLEKDIQFYSMCEHHFMPFYGKAHVAYIPNGKVVGLSKLARTVEAFAKRLQLQERMTVQIADSIMDYLEVKGAMVVIEAEHMCMTMRGIKKPGSKTVTVATRGIFKNKIEFRNEVYEMIKIR

SEQ ID NO: 6860 - protein, 189 aa, [Clostridium] leptum
  misc_feature (1)..(189): tr|A0A412R5S7|A0A412R5S7_9FIRM GTP cyclohydrolase 1 OS= [Clostridium] leptum OX=1535 GN=folE PE=3 SV=1
MDKKRIEAAVTEILLAVGENPDREGLKETPKRVAKMYEEIFSGLHDDPARHLKIFHEPEQHNELVIVRDIPLYSVCEHHLLPFIGAAHIAYIPQKGNIIGLSKFARIVDCFARRPQVQERLTAQIADFLFENLEPYGVAVIIEAEHLCMTMRGARAAGSKTQTSALRGIMRTDAKSRSEVMALLTGSGR

SEQ ID NO: 6861 - protein, 189 aa, [Clostridium] leptum
  misc_feature (1)..(189): tr|A7VNB6|A7VNB6_9FIRM GTP cyclohydrolase 1 OS=[Clostri dium] leptum DSM 753 OX=428125 GN=folE PE=3 SV=1
MDKKRIEAAVTEILLAVGENPEREGLKETPKRVAKMYEEIFSGLHDDPARHLKIFHEPEQHNELVIVRDIPLYSVCEHHLLPFIGAAHIAYIPQKGNIIGLSKFARIVDCFARRPQVQERLTAQIADFLFENLEPYGVAVIIEAEHLCMTMRGARAAGSKTQTSALRGIMRTDAKSRSEVMALLTGSGR

SEQ ID NO: 6862 - protein, 189 aa, Clostridium leptum; identical to SEQ ID NO: 6860
  misc_feature (1)..(189): tr|R6N144|R6N144_9CLOT GTP cyclohydrolase 1 OS=Clostrid ium leptum CAG:27 OX=1263068 GN=folE PE=3 SV=1

SEQ ID NO: 6863 - protein, 195 aa, Clostridium liquoris
  misc_feature (1)..(195): tr|A0A2T0B275|A0A2T0B275_9CLOT GTP cyclohydrolase 1 OS= Clostridium liquoris OX=1289519 GN=folE PE=3 SV=1
MAIDVKAIEQHIKGILIALGDDPNREGLKDTPKRVAKMYEEVFEGMCYSNDEIAEMFNKTFEDDLSVQEGSNDMVLMKDIEIFSHCEHHLALMYNMKVAVAYIPNKKIIGLSKIARIADMVGKRLQLQERIGTDIAYIIQKITDSEDVAVIIEGEHGCMTTRGIKKPGTKTITTTLRGRFNTDITLNNKLMMLYK

SEQ ID NO: 6864 - protein, 270 aa, Clostridium liquoris
  misc_feature (1)..(270): tr|A0A2T0B0U8|A0A2T0B0U8_9CLOT Putative GTP cyclohydrol ase 1 type 2 OS=Clostridium liquoris OX=1289519 GN=CLLI _23950 PE=4 SV=1
MPLKIKDIRKIMEDYAPLRLKESYDNVGLMIGDPDCEVTSILVALDCTMKVIKEAEEKGCNLIITHHPILFKKPNNITTETLQGRKIIELIKKDINIYSSHTNLDSTKGGINDLIMQLLDFRNCEVIEVNHMDAQDKECGIGRFTTLNVPITLEELCEKVKEAFEISSLKYSGEDKQVIEKVAVINGSGNDFLMKAKSLGADCIITGDTSYHYVSDLQEEGICIIDVGHFESEWPGMKIVGKWIGNRIRFMGYSNSVIISTETISPYKYK

SEQ ID NO: 6865 - protein, 185 aa, Clostridium ljungdahlii
  misc_feature (1)..(185): tr|A0A168NAB3|A0A168NAB3_9CLOT GTP cyclohydrolase 1 OS= Clostridium ljungdahlii OX=1538 GN=folE PE=3 SV=1
MDEKKIREAVKMILEAIGEDPEREGLLETPDRIARMYKEIFEGLDQSPEKHLRKVFTVDSDDIVLEKDITFYSMCEHHLLPFYGKAHIAYIPDGKVVGLSKLARTVEVFAKRLQLQERLSAQIADAMMKYVKVKGVMVVVEAEHMCMTMRGIKKPGSKTVTAVARGLFKGEPRLRDEVYRMINME

SEQ ID NO: 6866 - protein, 185 aa, Clostridium ljungdahlii; identical to SEQ ID NO: 6802
  misc_feature (1)..(185): tr|D8GN87|D8GN87_CLOLD GTP cyclohydrolase 1 OS=Clostrid ium ljungdahlii (strain ATCC 55383 / DSM 13528 / PETC) OX=748727 GN=folE PE=3 SV=1

SEQ ID NO: 6867 - protein, 272 aa, Clostridium luticellarii
  misc_feature (1)..(272): tr|A0A2T0BAQ9|A0A2T0BAQ9_9CLOT Putative GTP cyclohydrol ase 1 type 2 OS=Clostridium luticellarii OX=1691940 GN= CLLU_32530 PE=4 SV=1
MMYLKIMDIHNIVEKYAPSILKESYDNVGLMVGDMECRVTSILVALDCTLKVIEEAKQNNCNLIFTHHPLLFKRPDSITSDNLLGEKIIKLIESHINVYSCHTNLDSAEGGINDIIVELLGLNSDDIVDPIKTESRPGCKDGIGRISQLEEPIILSELCNRVKKYLEMSSLRYVGNEFKLIKKVAVINGSGQSYFNKARLQGVDCIITGDTTYHYVSDFEEQGMAVIDAGHFGTEWPAMEKVAVFLQKQIKSLGFENSVVLSKINRDPYKYK

SEQ ID NO: 6868 - protein, 208 aa, Clostridium luticellarii
  misc_feature (1)..(208): tr|A0A2T0BM50|A0A2T0BM50_9CLOT GTP cyclohydrolase 1 OS= Clostridium luticellarii OX=1691940 GN=folE PE=3 SV=1
MTYFRLFIGGENVEYSLLNMLIMMDDGKIRKAIKMIIEAIGEDPEREGLVETPDRIARMYKEIFSGFGESPEKHLKKVFTVDSADIVLEKDIVFYSMCEHHFMPFYGKVHIAYVPNDKVVGLSKLARTVEVFAKRLQLQERMTIQIADSIMKYLNAKGVMVVVKAEHMCMTMRGVKKPGSKTVTTATRGIFKEDSRYREEVYKMLNVE

SEQ ID NO: 6869 - protein, 196 aa, Clostridium magnum
  misc_feature (1)..(196): tr|A0A162T3E3|A0A162T3E3_9CLOT GTP cyclohydrolase 1 OS= Clostridium magnum DSM 2767 OX=1121326 GN=folE_1 PE=3 S V=1
MKIDRKAIEEHVRGILLALGDDPDREGLKDTPKRVAKMYEEIFDGMRYTNDEIAQMFNKTFEDDLALEESTSDIVIMKDIEIFSHCEHHLALMYNMKVTVAYVPSKKVIGLSKIARIADMVGRRLQLQERIGTDIAEIIQKITSSEDVAVIIEGEHGCMTTRGVKKPGTKTVSTTLRGRFNTDIMLNNRLMMLYNK

SEQ ID NO: 6870 - protein, 271 aa, Clostridium magnum
  misc_feature (1)..(271): tr|A0A162UHB6|A0A162UHB6_9CLOT Putative GTP cyclohydrol ase 1 type 2 OS=Clostridium magnum DSM 2767 OX=1121326 GN=CLMAG_09580 PE=4 SV=1
MTLKVKNLHRIMEEHAPAKFKESYDNVGLMVGDRDCEITSILVALDCTLEVIEEAKKKGCNLILTHHPLIFKKPNSITTDTLIGKKILQLIKNDINVYSSHTNLDSVKGGINEIIMELLGFNNYFTIDPSDRRGDNDNNTGIGRIATVTESTTLSELCDKVKTSLNIPVLRYSGEDSYKISKVAVINGSGQDYFSEARRLGADCIITGDTTYHYVSDFNEEGIPVIDAGHFGTEWPAMQVVAKWLKNQLKFKGYENFVFESEFSRSPYKYK

SEQ ID NO: 6871 - protein, 185 aa, Clostridium novyi
  misc_feature (1)..(185): sp|A0Q2L7|GCH1_CLONN GTP cyclohydrolase 1 OS=Clostridiu m novyi (strain NT) OX=386415 GN=folE PE=3 SV=1
MIDYEKIKKAVIMIIEAIGEDPNREGLKETPDRIARMYEEIFSGIRETPEKHLSKVFKVNNDDVVVEKDIQFYSMCEHHFLPFFGKVHIAYIPNGKVVGLSKLARTTEVFSKRPQLQERLTSQIADSLMEYLKCKGAMVIIEAEHLCMSMRGVKKWGSKTTTIVTRGEFQKDNSLKQDVLNILRL

SEQ ID NO: 6872 - protein, 185 aa, Clostridium novyi; identical to SEQ ID NO: 6849
  misc_feature (1)..(185): tr|A0A072YR49|A0A072YR49_CLONO GTP cyclohydrolase 1 OS= Clostridium novyi B str. NCTC 9691 OX=1443122 GN=folE P E=3 SV=1

SEQ ID NO: 6873 - protein, 270 aa, Clostridium oryzae
  misc_feature (1)..(270): tr|A0A1V4IHK9|A0A1V4IHK9_9CLOT Putative GTP cyclohydrol ase 1 type 2 OS=Clostridium oryzae OX=1450648 GN=CLORY_ 32850 PE=4 SV=1
MSIKLKKLIEVIENIAPLSLAEDYDNVGLMIGNEEADVSSALITLDCTLDVIQEAIDKKVDLIISHHPLLFVKPKNVTENSLQGKKMIKLIKNNINVYASHTNLDCVAGGLNDIIVKLLGFTDSIILEKSPLQHVYKNSGIGRLVKLDESVDLFTLCELVKNRLGCPKIRCVGEMQWSINKIAIINGSGEDYFHIAVKEGADCIISGDSTYHYASDMYEEQVALIDAGHFGTEWPAMKYFGSILENKCIDMGAKVNFTISQKNKDPYRYI

SEQ ID NO: 6874 - protein, 187 aa, [Clostridium] paradoxum
  misc_feature (1)..(187): tr|A0A150FQ87|A0A150FQ87_CLOPD GTP cyclohydrolase 1 OS= [Clostridium] paradoxum JW-YL-7 = DSM 7308 OX=1121328 G N=folE PE=3 SV=1
MDKDRIKKAVKELLEAIGEDPQREGLKGTPDRIARMFEEIYSGINEDPKKHLEIYFQDEKHEELVLVKDIPFYSTCEHHLVPFFGKAHVAYIPKGGKLTGLSKLARVVETVARRPQLQERITTTVADVINEVLNPHGVVVVVEAEHMCMTMRGIKKPGSKTVTSAVRGIFQKDAAARAEVMSLINHK

SEQ ID NO: 6875 - protein, 211 aa, Clostridium paraputrificum
  misc_feature (1)..(211): tr|A0A2X3BIN8|A0A2X3BIN8_9CLOT GTP cyclohydrolase 1 OS= Clostridium paraputrificum OX=29363 GN=folE PE=3 SV=1
MMYDHRDDEVHPDIAADRGEDLGPFDHARAEAAVRELLLAVGEDPEREGLRETPARVARAYREVFAGLHVDPTEVLEKTFDEGHQELVLVKDIPIYSTCEHHLVPFFGKAHIGYIPGPEGRVTGLSKLARLVDLYAKRPQVQERLTGQVADALVDKLQPTSAIVVIECEHLCMAMRGIRKPGATTITSAVRGGFKSDARSRAEAMSLITGR

SEQ ID NO: 6876 - protein, 185 aa, Clostridium paraputrificum
  misc_feature (1)..(185): tr|A0A174Q8F6|A0A174Q8F6_9CLOT GTP cyclohydrolase 1 OS= Clostridium paraputrificum OX=29363 GN=folE PE=3 SV=1
MVDKEKIKEGVKLILEAIGEDTNREGLIETPDRIARMYEEIFSGINATAEEHLKKTFEVDRDDLVLEKDITFYSMCEHHLVPFYGKAHIAYIPKGRVAGLSKLARTVETYAKKPQLQEKLTSEVADALMKYLNAEGVMVVIEAEHMCMTMRGVKKPGTRTFTTTYRGCFEENYNLRREVLDLIQR

SEQ ID NO: 6877 - protein, 187 aa, Clostridium pasteurianum
  misc_feature (1)..(187): tr|A0A1D9MZ19|A0A1D9MZ19_CLOPA GTP cyclohydrolase 1 OS= Clostridium pasteurianum OX=1501 GN=folE PE=3 SV=1
MIDKIKIEKAVREILIGIGENPDREGLIETPRRVSEMYEEIFAGLHKNPLDDVKKFHEDHDNGMIIVKDIPVYSMCEHHLLPFMGVAHVVYIPSGNEVLGLSKLARIVDTTAKKPQLQERLGNEIADVIIEAVDTKGVAVVIEAEHLCMTMRGIRKPGSKTITSALRGVIKTDSQIRMEALSLINGR

SEQ ID NO: 6878 - protein, 271 aa, Clostridium pasteurianum
  misc_feature (1)..(271): tr|A0A0H3J351|A0A0H3J351_CLOPA Putative GTP cyclohydrol ase 1 type 2 OS=Clostridium pasteurianum DSM 525 = ATCC 6013 OX=1262449 GN=CLPA_c22860 PE=4 SV=1
MSLRVKDICSIMNSIAPKELSESYDNVGLMIGNPEDNVSSVLVALDCTLAVIEEAKKKDCNFIFTHHPLLFRKPSSITTETLLGKKIMNLIKDDINLYSSHTNLDSVEGGLNDTLVDILGFSNSTVIESSLVEGFNDGNSGIGRIVILKEKIQLCELCNLVKQKLNLTHLTYVGEDENFIEKIALINGSGTDYMDISRKLGVDCIITGDVTYHYASDYREMGISVIDAGHFGTEWTALKKIASILKNEIDRLGHDNSVLLSEVVIDPYKMK

SEQ ID NO: 6879 - protein, 185 aa, Clostridium perfringens
  misc_feature (1)..(185): sp|Q0TRM0|GCH1_CLOP1 GTP cyclohydrolase 1 OS=Clostridiu m perfringens (strain ATCC 13124 / DSM 756 / JCM 1290 / NCIMB 6125 / NCTC 8237 / Type A) OX=195103 GN=folE PE= 3 SV=1
MIDKDKIREGMKLILEAIGEDINREGLIETPDRIARMYEEIFSGIGMNAKEHLSKTFEVHSNDLVLEKDITFYSMCEHHLVPFYGKVHIAYIPNGRVVGLSKLARCVEVYSKKPQLQERLTTEIADSIMEYLDAQGVMVVVEGEHMCMTMRGVRKPGAKTVTTTYRGKFLEDESLKNDVFRMISM

SEQ ID NO: 6880 - protein, 185 aa, Clostridium perfringens
  misc_feature (1)..(185): tr|A0A381J117|A0A381J117_CLOPF GTP cyclohydrolase 1 OS= Clostridium perfringens OX=1502 GN=folE PE=3 SV=1
MIDKDKIKEGMKLILEAIGEDVNREGLIETPDRIARMYEEIFSGIGMNAKDHLSKTFEVHSNDLVLEKDITFYSMCEHHLVPFYGKVHIAYIPNGRVVGLSKLARCVEVYSKKPQLQERLTTEIADSIMEYLDAQGVMVVVEGEHMCMTMRGVRKPGAKTVTTTYRGKFLEDESLKNDVFRMISM

SEQ ID NO: 6881 - protein, 184 aa, [Clostridium] polysaccharolyticum
  misc_feature (1)..(184): tr|A0A1I0EYP8|A0A1I0EYP8_9FIRM GTP cyclohydrolase 1 OS= [Clostridium] polysaccharolyticum OX=29364 GN=folE PE=3 SV=1
MDKNKIEKAVRLFLEGIGEDVNREGLLDTPSRISAMCEELFSGIGNDAEEHLSKTFTAENNEMVIEKDITFYSVCEHHFLPFYGKVHIAYIPDKKVVGLSKLARTVEVYARRAQIQEQLTCQIAEDIMEHLKPKGVMVYIEAEHMCMTMRGIKKPGSKTVSFVTKGIFEEKESLKQTFFQLIKG

SEQ ID NO: 6882 - protein, 188 aa, [Clostridium] populeti
  misc_feature (1)..(188): tr|A0A1I6KS52|A0A1I6KS52_9FIRM GTP cyclohydrolase 1 OS= [Clostridium] populeti OX=37658 GN=folE PE=3 SV=1
MNNKIDKNKIEEAVRLFLEGIGEDVTREGLLDTPTRISSMCEELFAGIGQDASCHLTKTFSAPNNEMVIEKDITFYSVCEHHFLPFYGKVHIAYVPDGKVVGLSKLARTVEVYARRAQIQEQMTSQIADDIMEHLQPRGVMVYIEAEHMCMTMRGIKKPGATTVSFATRGEFQTSEELRKSFLEIIKG

SEQ ID NO: 6883 - protein, 197 aa, Clostridium puniceum
  misc_feature (1)..(197): tr|A0A1S8TI61|A0A1S8TI61_9CLOT GTP cyclohydrolase 1 OS= Clostridium puniceum OX=29367 GN=folE PE=3 SV=1
MQKKINTKKIEECIREIIIALGDDPNREGLLDTPKRVSKMYEEVFEGMTLSNEEIAKMFGTTFENEEFMSETHKNMVVVRDIPMHSYCEHHLALMYNMKVTVVYMPKEKIIGLSKISRIADMVGRRLQLQERIGSDIAEIVSMATGSEDVGVLITGEHGCMTSRGIKKPGTLTTTTTFTGQFQSNDMLRQEALLIMK

SEQ ID NO: 6884 - protein, 263 aa, Clostridium puniceum
  misc_feature (1)..(263): tr|A0A1S8TBW5|A0A1S8TBW5_9CLOT Putative GTP cyclohydrol ase 1 type 2 OS=Clostridium puniceum OX=29367 GN=CLPUN_ 35460 PE=4 SV=1
MAKVMEISRKIEEFAPKFLKEDYDNVGLMVGDGQKEVKKVLLSLDCTNEVIKEAVKLNCDLIINHHPLLFKRPSSIVKGDLIGDKIITLIKEDIALYSCHTNLDSAKNGINETIVNMLGFNSSKIIETNESGNYKDGGIGRIVKLEKEMLFLDMVNLVKEKLNIKNMRIVRGNEKIKVLAIINGSGQDFFYKAKSLGADCIITGDTTYHFASDFKEMGVSIIDAGHFSTEYIVFLKTLEFLKEKFKEVEFIASKKSEDPYEFV

SEQ ID NO: 6885 - protein, 186 aa, Clostridium putrefaciens
  misc_feature (1)..(186): tr|A0A381J5I3|A0A381J5I3_9CLOT GTP cyclohydrolase 1 OS= Clostridium putrefaciens OX=99675 GN=folE PE=3 SV=1
MDNERIENAVREILYAIGEDPNREGLLDTPKRMARMYEEIFSGLNEDPKKHLEVYFQEEQYEELVLIKDIPFYSVCEHHLVPFYGKAHVGYLPKGGRLTGLSKLARVVDSVSKRPQLQERLTASIADSIVEKLDPYGVIVVIEAEHMCMTMRGVKKPGSKTITSAVRGTFATDSKSRAEVLSIINK

SEQ ID NO: 6886 - protein, 185 aa, Clostridium ragsdalei; identical to SEQ ID NO: 6802
  misc_feature (1)..(185): tr|A0A1A6AMR2|A0A1A6AMR2_9CLOT GTP cyclohydrolase 1 OS= Clostridium ragsdalei P11 OX=1353534 GN=folE PE=3 SV=1

SEQ ID NO: 6887 - protein, 111 aa, Clostridium ragsdalei
  misc_feature (1)..(111): tr|A0A1A6AYC6|A0A1A6AYC6_9CLOT Putative GTP cyclohydrol ase 1 type 2 OS=Clostridium ragsdalei P11 OX=1353534 GN =CLRAG_14000 PE=4 SV=1
MEYKNYKMETFIPEEYVTKLRESLNDIGALTIGGNYDNCMSVSKVTGYWRPLSGANPFKGEKGEVSREEECKVEFCCKSEIVEKAISTIRKVHPYEEPVINVIPISNFVKY

SEQ ID NO: 6888 - protein, 110 aa, Clostridium roseum; identical to SEQ ID NO: 6841
  misc_feature (1)..(110): tr|A0A1S8LZU3|A0A1S8LZU3_9CLOT Putative GTP cyclohydrol ase 1 type 2 OS=Clostridium roseum OX=84029 GN=CROST_17 030 PE=4 SV=1

SEQ ID NO: 6889 - protein, 195 aa, Clostridium roseum
  misc_feature (1)..(195): tr|A0A1S8L6Q8|A0A1S8L6Q8_9CLOT GTP cyclohydrolase 1 OS= Clostridium roseum OX=84029 GN=folE PE=3 SV=1
MSIDTKAIEKHIRGILLALGDDPDREGLKETPKRVAKMYEEVFEGMNYSNEAIAEMFNKTFEEDLKENEEDNIVLVKDIEIFSHCEHHMTLMYNMKVAVAYIPNKRLIGLSKIARIADMVSKRLQLQERIGKDIAEIMEKITNSRDVAVIIQGEHGCMTSRGIKRPGTKTTTMTLKGKFKTDDSLVNKLMALYKA

SEQ ID NO: 6890 - protein, 197 aa, Clostridium saccharobutylicum
  misc_feature (1)..(197): tr|U5MPQ4|U5MPQ4_CLOSA GTP cyclohydrolase 1 OS=Clostrid ium saccharobutylicum DSM 13864 OX=1345695 GN=folE PE=3 SV=1
MKKKIDTEKIQECIKEILIALGDDPNREGLIDTPKRVAKMYEEVFEGMTHSNEEIAEMFGTTFEEEDCTSENYKNMVVVKDIPIHSYCEHHLALMYNMKVTVIYKPKDKIIGLSKIARIADMVGRRLQLQERIGKDIAEIVSMVTETKDVGVLITGEHSCMTSRGVKKPGTLTTTTTFTGEFEENDLLRQEALLIMK

SEQ ID NO: 6891 - protein, 263 aa, Clostridium saccharobutylicum
  misc_feature (1)..(263): tr|A0A1S8MRB0|A0A1S8MRB0_CLOSA Putative GTP cyclohydrol ase 1 type 2 OS=Clostridium saccharobutylicum OX=169679 GN=CLOSAC_41430 PE=4 SV=1
MTKIKDIIREIEKFAPKCLQEDYDNVGLMVGDDEKEVKRVLLSLDCTNDAIEEAANLKCDFMITHHPLFFRKPKRIAKKDLLGNKVINLIKEDITLYSCHTNLDSAKDGINETIVKMLGFNSCITLEPNKIRNYKEDGIGRLVKLDNPISLNNLVDLIKKTLNINNMRIVKGSEMVTTLAIINGSGQDLFPLAKSFGADCIITGDTTYHFALDYKEMGISIIDAGHFSTEYLAFLKTLEFLKKEFNDVEFITSKTCQDPYEFT

SEQ ID NO: 6892 - protein, 197 aa, Clostridium saccharoperbutylacetonicum
  misc_feature (1)..(197): tr|M1MLD5|M1MLD5_9CLOT GTP cyclohydrolase 1 OS=Clostrid ium saccharoperbutylacetonicum N1-4(HMT) OX=931276 GN=f olE PE=3 SV=1
MPKKIDTDKIEKCIREILIALGDDPNREGLIDTPKRVAKMYEEVFAGMNLTNEEIAKMFGTTFENEEYVPENYNNMVVVKEIPIHSYCEHHLALMYNMKVSVVYIPKEKIIGLSKISRIADMVGRRLQLQERIGSDIAEIVAMATGSDDVGVLITGEHGCMTSRGIKKPGSVTTTTTFTGRFENNDMLRQEALIIMK

SEQ ID NO: 6893 - protein, 184 aa, Clostridium sartagoforme
  misc_feature (1)..(184): tr|A0A4S2DMP9|A0A4S2DMP9_9CLOT GTP cyclohydrolase 1 OS= Clostridium sartagoforme OX=84031 GN=folE PE=3 SV=1
MVDREKIMEGVKLIIEGIGEDTSREGLLETPDRIARMYEEIFSGIGQTAEKELSKTFTVEGNDLVLEKDITFFSMCEHHFVPFYGKVHIAYIPKGKVAGLSKLARCVEVYAKKPQLQERLTTEIADALMKYLDAKGVMVVIEGEHMCMTMRGVKKPGAKTVTTTYRGCFKEDYELRKEVMNFIR

SEQ ID NO: 6894 - protein, 184 aa, Clostridium sartagoforme
  misc_feature (1)..(184): tr|R9C9K4|R9C9K4_9CLOT GTP cyclohydrolase 1 OS=Clostrid ium sartagoforme AAU1 OX=1202534 GN=folE PE=3 SV=1
MIDREKVLEGVKLILEGIGEDPNREGLLETPDRIARMYEEIFSGIGKDAKCELEKTFTVEENDLVLEKDITFYSMCEHHLVPFYGKAHIAYIPKGKVAGLSKLARCVEVYAKKPQLQEKLTTEVADAIMKYLNAEGVMVVIEAEHMCMTMRGVKKPGTKTVTTTYRGCFKEDYQLRKEVMSLLK

SEQ ID NO: 6895 - protein, 185 aa, Clostridium scatologenes
  misc_feature (1)..(185): tr|A0A0E3K2I1|A0A0E3K2I1_CLOSL GTP cyclohydrolase 1 OS= Clostridium scatologenes OX=1548 GN=folE PE=3 SV=1
MIDEIKIKTAVRMIIEAIGENPDREGLQETPDRIARMYSEIFAGLDQNPEKHLKKIFTVKSNDVVLEKDVQFYSMCEHHLIPFYGKVHIAYIPNGKVTGLSKLARTVEVFAKRPQLQERLTGQVADAIMEHLNAKGVMVVIEAEHMCMTMRGIKKPGSKTVTVVTRGEFHENHFLKDEVYKMINL

SEQ ID NO: 6896 - protein, 186 aa, Clostridium scindens
  misc_feature (1)..(186): tr|B0NCH3|B0NCH3_CLOS5 GTP cyclohydrolase 1 OS=Clostrid ium scindens (strain ATCC 35704 / DSM 5676 / VPI 13733 / 19) OX=411468 GN=folE PE=3 SV=1
MIDQQKIKQAVTLLLEGIGEDVTREGLIDTPDRIARMYEEIYGGMEEDAATHLSKVFHVDSSEMVIEKDIPFYSTCEHHMLPFYGKVHIAYIPDGKVVGLSKLARTVEVFARRLQLQEQLTGQIVDALMTHMQPKGVMVMVEAEHLCMTMRGIKKPGSQTVTVARRGEFETNPVLEELFFRMLGRS

SEQ ID NO: 6897 - protein, 184 aa, Clostridium septicum
  misc_feature (1)..(184): tr|A0A386PIW5|A0A386PIW5_CLOSE GTP cyclohydrolase 1 OS= Clostridium septicum OX=1504 GN=folE PE=3 SV=1
MIDKEKIKTGVKLILEAIGEDVNREGLIETPDRIARMYEEIFSGIGQTAEDALSKTFKVENNDLVIEKDITFFSMCEHHLVPFYGKAHIAYIPNERVAGLSKLARCVEVYAKKPQLQEKLTSEVADALMEYLGAEGVMVVIEAEHMCMTMRGVRKPGTKTVTTTYRGRFKEDYELRKEVLSLIK

SEQ ID NO: 6898 - protein, 196 aa, Clostridium sp.
  misc_feature (1)..(196): tr|A0A099RUN4|A0A099RUN4_9CLOT GTP cyclohydrolase 1 OS= Clostridium sp. HMP27 OX=1487921 GN=folE PE=3 SV=1
MAIDIKAIEEHIRGILVALGDDPNREGLKDTPKRVAKMYEEVFKGMCFTNDEIAEMFNTTFEDDLSINENSSDIVFMKDIEIFSHCEHHLALMYNMKVAVAYVPNGKVIGLSKIARIADMVGRRLQLQERIGSDIAEIMKKITGSEDVAVIIEGEHGCMSTRGIKKPGTKTISTTLRGRFNTDTILNNKLMMLYTK

SEQ ID NO: 6899 - protein, 194 aa, Clostridium sp.
  misc_feature (1)..(194): tr|R5JSX4|R5JSX4_9CLOT GTP cyclohydrolase 1 OS=Clostrid ium sp. CAG:632 OX=1262830 GN=folE PE=3 SV=1
MAIDTKAIEEHIRGILEALGENPDREGLVETPQRVARMYEEVFAGMNYTNRELAEMYGKTFRVPTEHEDMVVVKDIEVFSYCEHHMALMYDMKVSVAYLPKERVIGLSKIARIADMAAKRLQLQERIGTDIAEIIQMATDSDDVAVLISANHSCMTARGIKKPSAKTVTTTFRGRFEKETELQNRFFCMLNQGA

SEQ ID NO: 6900 - protein, 188 aa, [Clostridium] spiroforme
  misc_feature (1)..(188): tr|A0A1Y4EL83|A0A1Y4EL83_9FIRM GTP cyclohydrolase 1 OS= [Clostridium] spiroforme OX=29348 GN=folE PE=3 SV=1
MIDTKKIEAHIYGIIEALGDDPNREGLKETPKRVAKMYEEVFMGMNYTNEQIAKMFDKTFLDDLDFSNQEVVVVKDINIFSYCEHHLALMYDMKVTVAYIPNKKVIGLSKIARIADMVARRLQLQERIGSDIAKIIELITDSNDIAVIIEGKHSCMNARGIKKANSKTITSTLTGRFKTDDKLQIYLR

SEQ ID NO: 6901 - protein, 196 aa, Clostridium sporogenes
  misc_feature (1)..(196): tr|A0A2X3BYM3|A0A2X3BYM3_CLOSG GTP cyclohydrolase 1 OS= Clostridium sporogenes OX=1509 GN=folE PE=3 SV=1
MAIDVKAIEEHIRGILIALGDNPEREGLKDTPKRVAKMYEEVFKGMCYSNDEIAEMFNVTFEDDLCINDNVNDMVFMKDIEIFSHCEHHLALMYNMKVAIAYIPKGKIIGLSKIARIADMVGRRLQLQERIGSDIAEILQKVTNSEDVAVIIEGEHGCMTTRGIKKPGTKTITTTLRGKFNTDSIVSNKLMMLYTK

SEQ ID NO: 6902 - protein, 196 aa, Clostridium sporogenes
  misc_feature (1)..(196): tr|J7TB44|J7TB44_CLOS1 GTP cyclohydrolase 1 OS=Clostrid ium sporogenes (strain ATCC 15579) OX=471871 GN=folE PE =3 SV=1
MAIDVKAIEEHIKGILIALGDNPEREGLKDTPKRVAKMYEEVFKGMCYTNDEIAEMFNVTFEDDLCVSDNVGDMVFMKDIEIFSHCEHHLALMYNMKVAIAYIPKGKIIGLSKIARIADMVGRRLQLQERIGSDIAEILKMVTDSEDVAVIIEGEHGCMTTRGIKKTNTKTITTTLRGKFNTDTIVSNKLMMLYTK

SEQ ID NO: 6903 - protein, 196 aa, Clostridium taeniosporum
  misc_feature (1)..(196): tr|A0A1D7XK22|A0A1D7XK22_9CLOT GTP cyclohydrolase 1 OS= Clostridium taeniosporum OX=394958 GN=folE PE=3 SV=1
MDIDVKAIEEHIKGILVALGDDPNREGLKDTPKRVAKMYEEIFKGMCYSNDEIANMFNTTFEDDLLLKENNNDIVFMKDIEIFSHCEHHLALMYNMKVAIAYIPDKKVIGLSKIARIADMVGRRLQLQERIGTDIAEILQKVTESEDVAVIIQGEHGCMTTRGIQKPGAKTISTTLRGRFNSDPMLNSKLMMLYSQ

SEQ ID NO: 6904 - protein, 196 aa, Clostridium tagluense
  misc_feature (1)..(196): tr|A0A401UUK8|A0A401UUK8_9CLOT GTP cyclohydrolase 1 OS= Clostridium tagluense OX=360422 GN=folE PE=3 SV=1
MAIDTKAIEEHIRGILIALGDDPCREGLKDTPARVAKMYEEVFAGMCYSNDEIAEMFNTTFVDDLIVNDDSLDIVIMKDIQIFSHCEHHLALMYNMKVSVAYVPTKKIIGLSKIARIADMVGRRLQLQERIGTDIADIMQKVTNSPDVAIIIEGEHGCMTTRGIKKPGTKTMSTTFRGRFNTDVILNNKLMMLYNK

SEQ ID NO: 6905 - protein, 111 aa, Clostridium tepidiprofundi
  misc_feature (1)..(111): tr|A0A151B3H7|A0A151B3H7_9CLOT Putative GTP cyclohydrol ase 1 type 2 OS=Clostridium tepidiprofundi DSM 19306 OX =1121338 GN=CLTEP_17680 PE=4 SV=1
MKFNIFKIETFIPEEYVTELRKSLNDIGVLSIGGNYDNCMTVSKVIGSWRPLEGANPFEGNIGEICIAEEIKVEFCCKRDIVKTAVETIKRVHPYEVPVINIIPIVNIEDI

SEQ ID NO: 6906 - protein, 189 aa, Clostridium tepidiprofundi
  misc_feature (1)..(189): tr|A0A151B3B6|A0A151B3B6_9CLOT GTP cyclohydrolase 1 OS= Clostridium tepidiprofundi DSM 19306 OX=1121338 GN=folE PE=3 SV=1
MAIDKKAIEEHIRGILIALGENPDREGLKETPKRVANMYEEVFEGINYTNDEIAEMFNKTFEDDLNIEKSTGDMVIMKDIDIFSYCEHHIALMYNMKVTVAYIPNKKVIGLSKIARIADMVGKRLQLQERIGSDIAEIIQKVTESEDVAVIIEGEHGCMTSRGIKKPGTKTLTTTLRGKFIDSIRLPLL

SEQ ID NO: 6907 - protein, 196 aa, Clostridium tepidum
  misc_feature (1)..(196): tr|A0A1S9I1E3|A0A1S9I1E3_9CLOT GTP cyclohydrolase 1 OS= Clostridium tepidum OX=1962263 GN=folE PE=3 SV=1
MAIDVKSIEEHIKGILIALGDNPEREGLKDTPKRVAKMYEEIFKGMSYSNDEIAEMFNVTFQDDLCVNENVGDMVFMKDIEIFSHCEHHLALMYNMKVAVAYIPNGKIIGLSKIARIADMVGRRLQLQERIGSDIAEILQKITDSEDVAVIIEGEHGCMTTRGIKKPGTKTITTTLRGKFNTDSILSNKLMMMYAK

SEQ ID NO: 6908 - protein, 195 aa, Clostridium tetanomorphum
  misc_feature (1)..(195): tr|A0A037Z706|A0A037Z706_CLOTT GTP cyclohydrolase 1 OS= Clostridium tetanomorphum DSM 665 OX=1230342 GN=folE PE =3 SV=1
MSIDVKAIQEHIKGILIALGDDPNREGLKDTPKRVAKMYEEVFKGMCYSNDEIAEMFNKTFEDDLSVEENSNDMVLMKDIEIFSHCEHHLALMYNMKVAVAYIPNKKIIGLSKIARIADMVGRRLQLQERIGTDIAYIIQKITDSKDVAVIIEGEHGCMTTRGIKKPGTKTISTTLKGRFNGDAILNNKLMMLYR

SEQ ID NO: 6909 - protein, 185 aa, Clostridium tetanomorphum
  misc_feature (1)..(185): tr|A0A037Z631|A0A037Z631_CLOTT GTP cyclohydrolase 1 OS= Clostridium tetanomorphum DSM 665 OX=1230342 GN=folE PE =3 SV=1
MVDEGKVKEAVRMILEAIGEDPSREGLLETPDRIARMYSEIFSGIGKDASEHLKKNFTIERDDLVIEKDIIFYSMCEHHLVPFYGKVNIAYVPNGKVAGLSKLARCVEVYARKPQLQERLTSEIADALYEHLGAQGVMVVIEAEHMCMTMRGVRKPGTKTVTSTYRGIFKEDNDLRDEVLRFIGK

SEQ ID NO: 6910 - protein, 187 aa, [Clostridium] thermoalcaliphilum
  misc_feature (1)..(187): tr|A0A1V4IBZ6|A0A1V4IBZ6_9FIRM GTP cyclohydrolase 1 OS= [Clostridium] thermoalcaliphilum OX=29349 GN=folE PE=3 SV=1
MDKEKIQRAVKDILEAIGENPEREGLKGTPDRIARMFEEIYCGLNEDPKKHLEIYFQDEKHEELVLVKDIPFYSTCEHHLVPFFGKAHVAYIPKGGKLTGLSKLARVVETVARRPQLQERITTTVADAINEVLNPHGVVVIVEAEHMCMTMRGIKKPGSKTVTSAVRGIFQKDAAARAEVMSLINHK

SEQ ID NO: 6911 - protein, 198 aa, Clostridium thermobutyricum
  misc_feature (1)..(198): tr|A0A1V4SXU0|A0A1V4SXU0_9CLOT GTP cyclohydrolase 1 OS= Clostridium thermobutyricum DSM 4928 OX=1121339 GN=folE _2 PE=3 SV=1
MNIWTSKEKEERAEELIKELLTLIGEDPNREGLKETPKRAVSMIKEVLEGTTLTNKEIAERYGKCFSADYEASGNSGMVIMRDIPIFSFCEHHLALMYNMKVTIAYVPKEKVIGLSKLARIADMVGKRLQLQEKIGTDIAEIIEMATGSSDVAVLISGEHSCMTARGIKKTGSLTKTSCFKGRFKEDILLRQELLLNN

SEQ ID NO: 6912 - protein, 261 aa, Clostridium thermobutyricum
  misc_feature (1)..(261): tr|A0A1V4SPS1|A0A1V4SPS1_9CLOT Putative GTP cyclohydrol ase 1 type 2 OS=Clostridium thermobutyricum DSM 4928 OX =1121339 GN=CLTHE_30350 PE=4 SV=1
MSRCVQDIINEMEAFAPSKLKEDFDNVGLMVGDRNREVKKVLLALDCTKEVIDEAIENKCEMIITHHPLIFRKPNRIVKGDLLGDKIIKLIENKISVYSSHTNLDAIKDGINDKVVNILGFKKSKIIDKSILEDSGIGRIVYLEEPIKTKDLINNIKEKLNIDMLTGNISSEYVSNIAIINGSGSSYFNKAYEMGADCIITGDTSYHFVSDYKELGVTILDAGHFGTEWLAFLSAMENIKENIKDVEFVKSIKTSNPYSFF

SEQ ID NO: 6913 - protein, 191 aa, Clostridium thermopalmarium; identical to SEQ ID NO: 6829
  misc_feature (1)..(191): tr|A0A2T0AQU1|A0A2T0AQU1_9CLOT GTP cyclohydrolase 1 OS= Clostridium thermopalmarium DSM 5974 OX=1121340 GN=folE PE=3 SV=1

SEQ ID NO: 6914 - protein, 271 aa, Clostridium thermopalmarium
  misc_feature (1)..(271): tr|A0A2T0AUC8|A0A2T0AUC8_9CLOT Putative GTP cyclohydrol ase 1 type 2 OS=Clostridium thermopalmarium DSM 5974 OX =1121340 GN=CPAL_10540 PE=4 SV=1
MALKIRDIKEIIEKFAPINLKESYDNVGLMVGELDKEITSILVALDCTMEVIKEAVEKNCNLIITHHPLLFKKPSSITGETLVGRKIMELIKNDISLYSAHTNLDSVDGGINDTVMNLLGLNEYVTMELSSERYFEDNKSGIGRLANLNETITLKDLCNRVKKSFKIPYVRYAGEDFMKIKKVAVINGSGQEYFSLAKKMGADCIITGDTSYHYVSDFSEEGIGIIDAGHFGTEWPAFKILAFMLESKLQRDGHKNRIFVSEKVKDPYKIY

SEQ ID NO: 6915 - protein, 187 aa, Clostridium tyrobutyricum
  misc_feature (1)..(187): tr|A0A4P8A3J7|A0A4P8A3J7_CLOTY GTP cyclohydrolase 1 OS= Clostridium tyrobutyricum OX=1519 GN=folE PE=3 SV=1
MIDETKIKKAVRMIIEAIGENPDREGLLQTPDRIARMYKEVFKGLNQDPEKHLSKMFTLESDDIVLEKDIIFYSMCEHHFLPFYGKAHIAYISSGKVVGLSKLARTVEVFAKRPQLQERMTRQIADAIFKYLNAKGVMVIVEAEHMCMTMRGIKKPGSKTVTAVTLGTFNGDPKLIDQVYSMINMGK

SEQ ID NO: 6916 - protein, 187 aa, Clostridium tyrobutyricum; identical to SEQ ID NO: 6915
  misc_feature (1)..(187): tr|W6N4S3|W6N4S3_CLOTY GTP cyclohydrolase 1 OS=Clostrid ium tyrobutyricum DIVETGP OX=1408889 GN=folE PE=3 SV=1

SEQ ID NO: 6917 - protein, 196 aa, Clostridium uliginosum
  misc_feature (1)..(196): tr|A0A1I1GR08|A0A1I1GR08_9CLOT GTP cyclohydrolase 1 OS= Clostridium uliginosum OX=119641 GN=folE PE=3 SV=1
MKIDIKAIEEHIRGILIALGDNPDREGLKDTPKRVAKMYEEVFQGMCCSNDDIASMFNTTFEDDLLIKENTKDIVFMKDIEIFSHCEHHLALMYNMKVAVAYIPNKKIIGLSKIARISDMVGRRLQLQERIGTDIAEILQKITESEDVAVIIEGEHGCMTTRGIQKPGAKTISTTLRGRFNTDPILNNKLMMLYTK

SEQ ID NO: 6918 - protein, 198 aa, Clostridium ventriculi
  misc_feature (1)..(198): tr|A0A173WTX5|A0A173WTX5_CLOVE GTP cyclohydrolase 1 OS= Clostridium ventriculi OX=1267 GN=folE PE=3 SV=1
MNIWESREKEERAISLVKEFIELLGEDPNREGLKDTPKRCVNMIKEVLEGVRYTNEEIAKMFDKCFTEDYESKASEGMVIMRDIPIFSFCEHHLALMYNMNVTVAYIPRKKVIGLSKIARIADMVGRRLQLQEKIGNDIAEIMCMITDSEDVAVVIEGEHACMTTRGIKKNGSKTRTTTFKGAFKEDSSLRQELLMSI

SEQ ID NO: 6919 - protein, 185 aa, Clostridium vincentii
  misc_feature (1)..(185): tr|A0A2T0BHS9|A0A2T0BHS9_9CLOT GTP cyclohydrolase 1 OS= Clostridium vincentii OX=52704 GN=folE PE=3 SV=1
MINKEKIIQGVKLILEGIGEDPTREGLIETPDRIARMYEEIFAGMDKTAEKHLSKTFSIGRDDLVLEKDITFYSTCEHHLVPFYGKVHIAYIPNGRVAGLSKLARTVEVYAKKPQLQEKLTSEIADAIMEYLGAQGVMVFIEAEHMCMTMRGVKKPGTKTITTTYRGVFEENSELRQEVLSLIKN

SEQ ID NO: 6920 - protein, 264 aa, Clostridium vincentii
  misc_feature (1)..(264): tr|A0A2T0BJ56|A0A2T0BJ56_9CLOT Putative GTP cyclohydrol ase 1 type 2 OS=Clostridium vincentii OX=52704 GN=CLVI_ 05580 PE=4 SV=1
MEINVRDIIREMEILAPPFLQESYDNVGLMVGTEEKKVEKILLALDCTKDVIEEAKENNVDLIITHHPLIFRKPSRIISEDLQGWKIIELIKNDISIYSSHTNLDAAKGGINEELVKSLGFKNSKLIDNKNIKGYEEAGIGRIVELEEEILVEDLINLVKEKLLIKSLRAVVADKGIKKIAFINGSGQDFFAKALDLGADCIITGDTTYHFALDYKEMGVTIIDAGHFSTEWIMFLKVMKKIEELFKDIEFIHSKVNKDPYIFF

SEQ ID NO: 6921 - protein, 198 aa, Cnuella takakiae
  misc_feature (1)..(198): tr|A0A1M5C345|A0A1M5C345_9BACT GTP cyclohydrolase 1 OS= Cnuella takakiae OX=1302690 GN=folE PE=3 SV=1
MAYNKQETYNEEVTEGLVKNYREALGLLGEDPNREGLLKTPERMAKAMQFMTQGYQQDAVAILNSAKFTENVSEMILVKDIELYSMCEHHMLPFYGKAHIAYIPNGTITGLSKLARVVDVFARRLQVQERLTTQILEAIMEGLNPLGVAVVIEAKHMCMLVRGVQKQNSVTTTSAFSGQFENTTTRMEFLKLIASKLS

SEQ ID NO: 6922 - protein, 244 aa, Cnuibacter physcomitrellae
  misc_feature (1)..(244): tr|A0A1X9LH97|A0A1X9LH97_9MICO GTP cyclohydrolase 1 OS= Cnuibacter physcomitrellae OX=1619308 GN=folE PE=3 SV=1
MGSVDRDRIRAAVGEILAAIGEDPAREGLRDTPRRVAELYGELFAGVGDDPADAFGGAFALRDGGSDAGADRAGSGAAKVAGLPDADADGDADATADAADATADAADEAADAADEALDRIGSVVLMRDLAFRSICEHHLLPFEGVVHIAYEPDAELAGLGRFAAVVEVASSRPQLQERLGDDIADAVERGLTARGVLVVIEARHGCVTARGPRQTASTTVTLSARGSLADPAARAEVMALVARS

SEQ ID NO: 6923 - protein, 183 aa, Cobetia crustatorum
  misc_feature (1)..(183): tr|A0A558HXK0|A0A558HXK0_9GAMM GTP cyclohydrolase 1 OS= Cobetia crustatorum OX=553385 GN=folE PE=3 SV=1
MTEEIANHYRQIITALGEDPQREGLLDTPKRAAKAMQFLTHGYHQSLEEIVNGAVFTSDTDEMVLVKDIELYSMCEHHLLPFIGKCHIAYLPAGKVLGLSKFARIVDMYSRRMQIQENLTKQIAEAVQQVTGARGVAVVVEARHMCMMMRGVEKQNSSMKTSVMLGAFRDNQPTRQEFLTLIS

SEQ ID NO: 6924 - protein, 299 aa, Cobetia marina
  misc_feature (1)..(299): tr|A0A4Y4GL83|A0A4Y4GL83_COBMA GTP cyclohydrolase FolE2 OS=Cobetia marina OX=28258 GN=folE2 PE=3 SV=1
MTAILPDVSLTERPRSLSPLDWVGMQGIDLPVLIEEGDYRRELHACVDAQVDLPMPHTKGIHMSRLYRLLDGLAEGKALTPGSLRDVLAAMVESHHDCASRNARVKMAFALLVKRPALVTPALYGWKSYPVTLEASLHEGRFTLQASVTVGYSSTCPCSAALSRQLIEQAFLEAHHNDATLTPEQVAEWLTHHATLATPHSQRSEAIVRVTLKPEAEDLGLIALIDAIEQAVATPVQTAVKRADEQAFAALNGQNLMFVEDAARRLINGLAVSQGEAHVHVRHIESLHPHDAVAWGGGA

SEQ ID NO: 6925 - protein, 183 aa, Cobetia marina
  misc_feature (1)..(183): tr|A0A4U1M3E9|A0A4U1M3E9_COBMA GTP cyclohydrolase 1 OS= Cobetia marina OX=28258 GN=folE PE=3 SV=1
MTEEIANHYRQIITALGEDPQREGLQDTPMRAAKAMQFLTHGYHQSLEEIVNGAVFTSDTDEMVLVKDIELYSMCEHHMLPFIGKCHIAYLPAGKVLGLSKFARITDMYSRRMQIQENLTKQIAEAVQQVTGARGVAVVVEARHMCMMMRGVEKQNSSMKTSVMLGAFRENQPTRQEFLTLIS

SEQ ID NO: 6926 - protein, 299 aa, Cobetia sp.
  misc_feature (1)..(299): tr|A0A2S4K5K5|A0A2S4K5K5_9GAMM GTP cyclohydrolase FolE2 OS=Cobetia sp. MM1IDA2H-1 OX=1268241 GN=folE2 PE=3 SV= 1
MTAILPDVSLTECSRSLSPLEWVGMQGIDLPVLIEEGDYRRELHAHVDAQVDLPMPHTKGIHMSRLYRLLDGLAEGKALTPGNLQEVLAAMVASHHDCASRNARVRLEFALLVKRPALVTPGLSGWKSYPVMLEANLQECRFTLQASVTVGYSSTCPCSAALSRQLIEQAFLEAHRNDITLTPEQVAEWLTQHATLATPHSQRSEALVQVTLKPEAKDLGLIGLIDAIEQAVATPVQTAVKRADEQAFAALNGQNLMFVEDAARRLINGLSITDGEAHVHVRHIESLHPHDAVAWGRRD

SEQ ID NO: 6927 - protein, 183 aa, Cobetia sp.
  misc_feature (1)..(183): tr|A0A0P7EFC8|A0A0P7EFC8_9GAMM GTP cyclohydrolase 1 OS= Cobetia sp. UCD-24C OX=1716176 GN=folE PE=3 SV=1
MTEEIANHYRQIITALGEDPEREGLLDTPKRAAKAMQYLTHGYQQSLEEIVNGAVFTSDTDEMVLVKDIELYSMCEHHLLPFIGKCHIAYLPSGKVLGLSKFARIVDMYSRRMQIQENLTKQIAEAVQQVTGARGVAVVVEARHMCMMMRGVEKQNSSMKTSVMLGAFRDNQPTRQEFLTLIS

SEQ ID NO: 6928 - protein, 324 aa, Cocleimonas flava
  misc_feature (1)..(324): tr|A0A4R1FAB5|A0A4R1FAB5_9GAMM GTP cyclohydrolase FolE2 OS=Cocleimonas flava OX=634765 GN=folE2 PE=3 SV=1
MSASESCNDNSCNLPDVTNEPHSGPNATLNWVGMSEIELPVHMLTGKGKEIQTVASVQAYVNLIDPESKGIHMSRLYLAVDQILSDNTITPDLLHTVVEQFANSQDGKSDSAYLECRFNFFERRDSLISDNTGWKSYPVRAISSLRQGELTTELSIEVPYSSTCPCSAALARDIIQQGFQTKFGDSGQIDASLVHQWLGTTEGISATPHSQRSIAQVRVKLTDQVKDMPISRLIDQIEDALSTPVQAAVKREDEQEFARLNAANLMFCEDAARRVQAALESDNTLEDFWIRVNHMESLHPHDAVAIVTKGLKDGYRDDPREFPH

SEQ ID NO: 6929 - protein, 183 aa, Cocleimonas flava
  misc_feature (1)..(183): tr|A0A4R1F3I9|A0A4R1F3I9_9GAMM GTP cyclohydrolase 1 OS= Cocleimonas flava OX=634765 GN=folE PE=3 SV=1
MDNSKLYSELLTNLGEDVNRDGLQKTPDRAAKAMEFLTKGYDQDLDDVINGAVFDSDNDQMVIVKDIEMYSLCEHHLLPFVGKVHVAYLPEGKVIGLSKVARITDMYARRLQIQENMTKQIAEAIKYATGSSSVGVVIEAQHFCMMMRGVEKQGSSTISSMMLGTFRENAKTREEFLNLIKKF

SEQ ID NO: 6930 - protein, 366 aa, Cognatishimia maritima
  misc_feature (1)..(366): tr|A0A1M5KSH0|A0A1M5KSH0_9RHOB GTP cyclohydrolase FolE2 OS=Cognatishimia maritima OX=870908 GN=folE2 PE=3 SV=1
MNIQSSKADTPMTKEDALEALEKLRAWAKAASPTEIAELDPAVARLIPGQEVSNYPDLKRSYPDDFVADEAYKATLPDLQNGPTSLIKGAKKQIQHVGISNFRLPITYRTREGGDVTLETSVTGTVSLEEDKKGINMSRIMRSFYKHAEKTFSFEVLEHALADYKADLGSFDARIQMRFRYPMKIPSLRSGLEGYQYYDLAMEKVETGGQPLKIMHLDYVYSSTCPCSLELSEHARQARGQLATPHSQRSVARISVVTKSLQRLWFEDLIEMARRAVPTETQVMVKREDEQAFAELNAANPIFVEDAARLFCRELQQDERIGDFRVIASHQESLHSHDAVSILTEGDTFVSGSIDPKLFTTLFHVG

SEQ ID NO: 6931 - protein, 405 aa, Cognatiyoonia koreensis
  misc_feature (1)..(405): tr|A0A1I0NE87|A0A1I0NE87_9RHOB GTP cyclohydrolase FolE2 OS=Cognatiyoonia koreensis OX=364200 GN=folE2 PE=3 SV= 1
MPIPNDPRAGLLRIYEQTIGKSSTKAQFEGSDARQKAADMNIHSPDFDRDPSREEAEAALAMLRRWVGNVTPEEVATLDPLVARLIPGQEVSNYPALARAYPEDFAVDDAYKASMPDLQNGPASLIRGAKQQIQHVGISNFRLPIRFHTRDNGDLTLETSVTGTVSLEAEKKGINMSRIMRTFYKHAEETFSFDVIEKALDAYKSDLESFDARIQMRFSFPMKVQSLRSGLEGYQYYDIALELVETAGVRKKIVHLDYVYSSTCPCSLELSEHARQFRGQLATPHSQRSVARISVLVEDGPCLWFEDLIDRARAAVPTETQVMVKREDEQAFAELNAANPIFVEDAARLFTQQLQLDARISDFRVIASHQESLHSHDAVSVLTEGTTFAAESLDPRLFASLFHVG

SEQ ID NO: 6932 - protein, 403 aa, Cognatiyoonia sediminum
  misc_feature (1)..(403): tr|A0A1M5MZ73|A0A1M5MZ73_9RHOB GTP cyclohydrolase FolE2 OS=Cognatiyoonia sediminum OX=1508389 GN=folE2 PE=3 SV =1
MIDLKAELSRIYWENVGKVSTEPHIDRSDGPEGAAEMNLHSRDLDRLPSREEAEDALALLRRWASDVSAEEVATLDPLVSRLIPGQEVSNYPALARAYPDAFEVDETYKASMPDLQNGPSSLIRGAKQQIQHVGISNFRLPIRFRTRDGGEITLETSVTGTVSLDAEKKGINMSRIMRTFYQHAEETFSFDVIERALDAYKTDLDSFDARIQMRFSFPMKVESLRSGLSGYQYYDIALELVETDGARKKIMHLDYVYSSTCPCSLELSEHARQYRGQLATPHSQRSVARISALVEDEGDVLWFEDLIDQARSAVPTETQVMVKREDEQAFAELNAANPIFVEDAARLFTEQLKLDQRISDFRVIASHQESLHSHDAVSVLTEGETFAAVSLDPRLFQSLFHVG

SEQ ID NO: 6933 - protein, 211 aa, Cohaesibacter gelatinilyticus
  misc_feature (1)..(211): tr|A0A285NG65|A0A285NG65_9RHIZ GTP cyclohydrolase 1 OS= Cohaesibacter gelatinilyticus OX=372072 GN=folE PE=3 SV =1
MDTIIKTDTSSRPAQGQTVTERKRPSRQEAEAAVRTLIEWIGDNPDREGLLDTPARFVKAYEEVYRGYREDPVEPLKRTFKEVNGYKDMVLLRDVEFFSACEHHMVPFVGKAHIAYYPSDGVVGLSKLARVIDTYARRLQTQETMTAQIIEVIEKTLNPRGIALMIEAEHMCMSMRGVQKKGVSTVTTTFTGVFEDDMAKQDRFMTLVGVR

SEQ ID NO: 6934 - protein, 238 aa, Cohaesibacter marisflavi
  misc_feature (1)..(238): tr|A0A1I5K7A3|A0A1I5K7A3_9RHIZ GTP cyclohydrolase 1 OS= Cohaesibacter marisflavi OX=655353 GN=folE PE=3 SV=1
MDMIVDTSNPAGDKAEEGQDNALKNNKQKQLQALATLEEKADDWALTERPSRQEAEEAVRTLIKWIGDDPEREGLIDTPKRVVKAYEELYRGYREDPAEPLGRTFEEVNGYEDMVLLRDVEFFSACEHHMVPFVGKAHIAYYPSKGVVGLSKLARLIDAFARRLQTQESLTEQIIETIETTLAPRGIALLIEAEHMCMTMRGVRKRGASTVTTRFTGVFAEDVDKQNRFMSLTGECRG

SEQ ID NO: 6935 - protein, 237 aa, Cohaesibacter sp.
  misc_feature (1)..(237): tr|A0A285MAG2|A0A285MAG2_9RHIZ GTP cyclohydrolase 1 OS= Cohaesibacter sp. ES.047 OX=1798205 GN=folE PE=3 SV=1
MAIVVDTSDTASASKSEHETALKNNKNTENLHPFPRAENTAEDWALTERPSREEAEEAVRTLIKWIGDDPEREGLIDTPRRVVNAYEDLYKGYREDPTVPLERVFEEVNGYKDMVLLRDVEFYSACEHHMVPFVGKAHIAYYPANGVVGLSKLARVIDTFARRLQTQESMTSQIIKTIETSLAPRGIALMIEAEHMCMSMRGVQKRGVSTVTTCFTGVFEDDADKQERFMRLVGERR

SEQ ID NO: 6936 - protein, 233 aa, Cohaesibacter sp.
  misc_feature (1)..(233): tr|A0A2N5XXR4|A0A2N5XXR4_9RHIZ GTP cyclohydrolase 1 OS= Cohaesibacter sp. H1304 OX=2067669 GN=folE PE=3 SV=1
MLVDTKTSTTLSHEGQGTILNNNKTPENLHPFPAVENKDEWALCERPSRDEAEAAVRTLIKWIGDNPDREGLLDTPKRVVRAYEDLYHGYREDPSAPLARTFEEVNGYKDMVLLRDVEFYSACEHHMVPFFGKAHIAYYPRNGVVGLSKLARVIDTFARRLQTQETLTSQIMDAIETTLAPRGVALLIEAEHMCMSMRGVQKKGVSTVTSSFTGVFENDIEKQNRFMTLVGER

SEQ ID NO: 6937 - protein, 197 aa, Cohnella kolymensis
  misc_feature (1)..(197): tr|A0A0C2R725|A0A0C2R725_9BACL GTP cyclohydrolase 1 OS= Cohnella kolymensis OX=1590652 GN=folE PE=3 SV=1
MAGTKDYVNTQVGQNREKIEHHVREILKLIGENVEREGLLETPARVTRMYEEIFGGYDVDPRSVLGVTFDEQHEELVIVKDIVYYSQCEHHMAPFFGKAHVGYIPSGKVAGLSKLARLVDAVTRRLQVQERITSQIADTLEEVLRPHGVMVVVEGEHLCMCARGVKKYGSNTVTSAVRGQFRQNPALRSEFLELLNR

SEQ ID NO: 6938 - protein, 197 aa, Cohnella luojiensis
  misc_feature (1)..(197): tr|A0A4Y8LZE3|A0A4Y8LZE3_9BACL GTP cyclohydrolase 1 OS= Cohnella luojiensis OX=652876 GN=folE PE=3 SV=1
MAGAKDYSNSQVSNNREQVEFHVREILKLIGENVEREGLLETPARVTRMYEEIFAGYAVDPRDVLGVTFDERHEELVIVKDIVYYSQCEHHMAPFFGMAHIGYIPSGKIAGLSKLARLVEAVSRRLQVQERITSQIADILEEVLQPHGVMVVVEGEHMCMCSRGVKKPGSKTVTSAVRGQFRQSAALRSEFLELLKR

SEQ ID NO: 6939 - protein, 197 aa, Cohnella lupini
  misc_feature (1)..(197): tr|A0A3D9INM6|A0A3D9INM6_9BACL GTP cyclohydrolase 1 OS= Cohnella lupini OX=1294267 GN=folE PE=3 SV=1
MAGAKDYSNSQVSHNREQMEFHIREILKLIGEDVEREGLLETPARVTRMYEEIFAGYAVDPRDVLGVTFDEQHEELVIVKDIVYYSQCEHHMAPFFGKAHIGYIPSGKIAGLSKLARLVEAVSRRLQVQERITSQIANILEEVLMPHGVMVVVEGEHLCMCARGVKKPGSKTVTSAVRGQFRQSSALRSEFLELLKR

SEQ ID NO: 6940 - protein, 197 aa, Cohnella phaseoli
  misc_feature (1)..(197): tr|A0A3D9IQJ1|A0A3D9IQJ1_9BACL GTP cyclohydrolase 1 OS= Cohnella phaseoli OX=456490 GN=folE PE=3 SV=1
MAGAKDYSNSHVGQNREQLEFHVREILKLIGENVEREGLLETPARVTRMYEEIFAGYAVNPRDVLGVTFDEQHEELVIVKDIVYYSQCEHHMAPFFGKAHIGYIPSGKIAGLSKLARLVEAISRKLQVQERITSQIADILEEVLQPHGVMVVVEGEHLCMCARGVKKPGSKTVTSAVRGEFRKSPALRSEFLELLNR

SEQ ID NO: 6941 - protein, 197 aa, Cohnella sp.
  misc_feature (1)..(197): tr|A0A1I0VX04|A0A1I0VX04_9BACL GTP cyclohydrolase 1 OS= Cohnella sp. OV330 OX=1855288 GN=folE PE=3 SV=1
MAGLKDYLNTNVTRNREQVEHHVREILKLIGEDVEREGLLDTPARVTRMYEEIFGGYAIDPRDALGVTFDEQHEELVIVKDIVYYSQCEHHMAPFFGKAHIGYIPSGKIAGLSKLARLVEAVTRRLQVQERITSQIADILDDVLKPNGVMVVVEGEHLCMCARGVKKYGSKTVTSAVRGQFRGSSALRSEFLSLLKE

SEQ ID NO: 6942 - protein, 197 aa, Cohnella sp.
  misc_feature (1)..(197): tr|A0A231RDX1|A0A231RDX1_9BACL GTP cyclohydrolase 1 OS= Cohnella sp. CIP 111063 OX=1955714 GN=folE PE=3 SV=1
MAGAKDYSNAQVGQNREQVEFHVREILKLIGENVEREGLLETPARVTRMYEEIFAGYAVDPRDVLGVTFDEQHEELVIVKDIVYYSQCEHHMAPFFGKAHIGYIPSGKIAGLSKLARLVEAISRRLQVQERITSQIADILEEVLKPHGVMVVVEGEHLCMCARGVKKPGSKTVTSAVRGEFRKSPALRSEFLELLNR

SEQ ID NO: 6943 - protein, 207 aa, Coleofasciculus chthonoplastes
  misc_feature (1)..(207): tr|B4W132|B4W132_9CYAN GTP cyclohydrolase 1 OS=Coleofas ciculus chthonoplastes PCC 7420 OX=118168 GN=folE PE=3 SV=1
MALNGVMPSLSTSDKPLVSDEEMRQAVRTLLLGLGENPDREGLQDTPKRVVKALKFLTSGYHQSLDELLNGAVFTEDANEMVLVRDIDIFSSCEHHILPILGRAHVAYIPNGKVIGLSKIARICEMYGRRLQVQERLTAQIADALTELLKPQGVAVVVEATHLCMVMRGVQKPGSWTVTSAVRGVFAEDARTRQEFMDLVRHNPRFN

SEQ ID NO: 6944 - protein, 224 aa, Coleofasciculus chthonoplastes
  misc_feature (1)..(224): tr|B4VSW2|B4VSW2_9CYAN GTP cyclohydrolase 1 OS=Coleofas ciculus chthonoplastes PCC 7420 OX=118168 GN=folE PE=3 SV=1
MTPVTRNTSSTQVEPRPDRNTQNGQEAKLQIPGEASTEDMMDAVRTLLLGVGEDPEREGLLKTPKRVAEAMRFLTGGYNQSLEELVNGAIFDEGHNEMVLVRDINFFSLCEHHMLPFMGRAHVAYIPNQKVVGLSKLARVVEMYARRLQVQERLTRQIAEAIQTILEPQGVAVVMEATHMCMVMRGVQKPGSWTVTSAMVGVFQEEQKTREEFLNLIRHQPSFM

SEQ ID NO: 6945 - protein, 208 aa, Collimonas arenae
  misc_feature (1)..(208): tr|A0A0A1FC62|A0A0A1FC62_9BURK GTP cyclohydrolase 1 OS= Collimonas arenae OX=279058 GN=folE PE=3 SV=1
MASTDSSSAAALPALSERPSRAEAESAIRTLLRWAGDDPDREGLLDTPARVARAYEEFFAGYSKDPVEILSTTFSEVEGYDEMVVLTNIRFESHCEHHMAPIIGKAHVAYLPDRRVVGISKLARLVDIYAKRLQIQEKMTVQIADTLQQVLLPKGVAVVIEASHGCMTTRGIHKPGTSLVTSRMLGAFRDDPSTRREFMSIIGQKRSE

SEQ ID NO: 6946 - protein, 208 aa, Collimonas arenae
  misc_feature (1)..(208): tr|A0A127QG07|A0A127QG07_9BURK GTP cyclohydrolase 1 OS= Collimonas arenae OX=279058 GN=folE PE=3 SV=1
MASKDALQTVAASALSERPSRAEAESAIRTLLRWAGDDPDREGLLDTPARVARAYEEFFAGYSKDPVEILSTTFSEVEGYDEMVVLTDIRFESHCEHHMAPIIGKAHVAYLPDRRVVGISKLARLVDIFAKRLQIQEKMTVQIADTLQQVLLPKGVAVVIEASHGCMTTRGIHKPGTSLVTSRMLGAFRDDPSTRREFMSIISQKRNG

SEQ ID NO: 6947 - protein, 267 aa, Collimonas fungivorans
  misc_feature (1)..(267): tr|A0A127P7D8|A0A127P7D8_9BURK GTP cyclohydrolase FolE2 OS=Collimonas fungivorans OX=158899 GN=folE2 PE=3 SV=1
MNTRDQNLTIPDVQSSVDTRHLAIQRVGVKGVRYPVTVRTGATAQPTIGSWNMYVHLPEQQKGTHMSRFIALLEGLEGPLDVASFGDLMRKMVTLLDAERGRIELTFPYFINKTAPVSGVQSLMDYEVGLTGEISQGQLEITLKVLVPVTSLCPCSKQISAYGAHNQRSHITVNAVLDGEIQVDQLIAKIEAQASCELFGLLKRPDEKYVTERAYENPKFVEDLVRDVAVALNNEPRVLAYVLEAENFESIHNHSAYALIEHDKRGK

SEQ ID NO: 6948 - protein, 206 aa, Collimonas fungivorans
  misc_feature (1)..(206): tr|A0A419TV57|A0A419TV57_9BURK GTP cyclohydrolase 1 OS= Collimonas fungivorans OX=158899 GN=folE PE=3 SV=1
MASKDPVPAASALSERPSRAEAESAIRTLLRWAGDDPDREGLLDTPARVARAYEEFFAGYSKDPVEILSTTFSEVEGYDEMVVLTNIRFESHCEHHMAPIIGKAHVAYLPDRRVVGISKLARLVDIFAKRLQIQEKMTVQIADTLQQVLLPKGVAVVIEASHECMTTRGIHKPGTSLVTSRMLGAFRDDPSTRREFMSIISQKRNE

SEQ ID NO: 6949 - protein, 267 aa, Collimonas pratensis
  misc_feature (1)..(267): tr|A0A127QTS9|A0A127QTS9_9BURK GTP cyclohydrolase FolE2 OS=Collimonas pratensis OX=279113 GN=folE2 PE=3 SV=1
MNTRDQNLTIPDVQSSVDTRRLAIQRVGVKGVRYPLTVRTGAAAQATVGSWNMYVHLPEQQKGTHMSRFIALLEGLDGPLDVASFGELLRKMVTLLDAERGRVELSFPYFINKTAPVSGVQSLMDYEVGLTGEINQGALEITLKVMVPVTSLCPCSKQISAYGAHNQRSHITVNAVLDGELQVDELIARIEAQASCELFGLLKRPDEKYVTERAYENPKFVEDLVRDVAVALNQEPRVLAYVLEAENFESIHNHSAYALIEHDKRSN

SEQ ID NO: 6950 - protein, 202 aa, Collimonas pratensis
  misc_feature (1)..(202): tr|A0A127QV17|A0A127QV17_9BURK GTP cyclohydrolase 1 OS= Collimonas pratensis OX=279113 GN=folE PE=3 SV=1
MPATAASTLPERPSRAEAESAIRTLLRWAGDDPDREGLLDTPARVARAYEEFFAGYSKDPVEILSTTFSEVEGYDEMVVLTNIRFESHCEHHMAPIIGKAHVAYLPDRRVVGISKLARLVDIYAKRLQIQEKMTVQIADTLQQVLLPKGVAVVIEASHGCMTTRGIHKPGTSLVTSRMLGAFRDDPSTRREFMSIISQKRSE

SEQ ID NO: 6951 - protein, 208 aa, Collimonas sp.
  misc_feature (1)..(208): tr|A0A1I3H2Q3|A0A1I3H2Q3_9BURK GTP cyclohydrolase 1 OS= Collimonas sp. OK307 OX=1801620 GN=folE PE=3 SV=1
MASKDPVPAVAVNALSERPSRAEAESAIRTLLRWAGDDPDREGLLDTPARVARAYEEFFAGYSKDPVEILSTTFSEVEGYDEMVVLTDIRFESHCEHHMAPIIGKAHVAYLPDRRVVGISKLARLVDIFAKRLQIQEKMTVQIADTLQQVLLPKGVAVVIEASHGCMTTRGIHKPGTSLVTSRMLGAFRDDPSTRREFMSIISQKRNG

SEQ ID NO: 6952 - protein, 206 aa, Collimonas sp.
  misc_feature (1)..(206): tr|A0A1I1Q309|A0A1I1Q309_9BURK GTP cyclohydrolase 1 OS= Collimonas sp. OK412 OX=1801619 GN=folE PE=3 SV=1
MASKDPVPAASALSERPSRAEAESAIRTLLRWAGDDPDREGLLDTPARVARAYEEFFAGYSKDPVEILSTTFSEVEGYDEMVVLTNIRFESHCEHHMAPIIGKAHVAYLPDRRVVGISKLARLVDIFAKRLQIQEKMTVQIADTLQQVLLPKGVAVVIEASHECMTTRGIHKPGTSLVTSRMLGAFRDDPSTRREFMSIISQKHGE

SEQ ID NO: 6953 - protein, 185 aa, Collinsella aerofaciens
  misc_feature (1)..(185): tr|A4E7U6|A4E7U6_9ACTN GTP cyclohydrolase 1 OS=Collinse lla aerofaciens ATCC 25986 OX=411903 GN=folE PE=3 SV=1
MVDQEKVETAIKLLLEGIGEDPTREGLLETPARVARMYGEIAGGMDQSAEEHLSKTFAVASNDLVIERDITFYSLCEHHLLPFYGKAAIGYIPNGRVAGLSKLARTVEVYARRLQLQEQLCTQVADALMEYLAPQGAIVLMEAEHMCMTMRGVQKPGTKTVTLARRGVFETDPSLEERFFRMLGR

SEQ ID NO: 6954 - protein, 185 aa, Collinsella aerofaciens
  misc_feature (1)..(185): tr|A0A5K1IVH1|A0A5K1IVH1_9ACTN GTP cyclohydrolase 1 OS= Collinsella aerofaciens OX=74426 GN=folE PE=4 SV=1
MVDQEKVETAIKLLLEGIGEEPSREGLLETPARVARMYSEIAGGMDQSAEEHLSKTFAVASNDLVIERDITFYSLCEHHLLPFYGKAAIGYIPNGRVAGLSKLARTVEVYARRLQLQEQLCAQVADALMDYLAPQGAIVLMEAEHMCMTMRGVQKPGTKTVTLARRGVFETDPALEERFFRMLGR

SEQ ID NO: 6955 - protein, 185 aa, Collinsella intestinalis
  misc_feature (1)..(185): tr|A0A414NH70|A0A414NH70_9ACTN GTP cyclohydrolase 1 OS= Collinsella intestinalis OX=147207 GN=folE PE=3 SV=1
MVDQDKVREAVRLLLEGIGEDPTREGLVETPDRVARMYSELCDGMDRSASEHLSKTFTVLGDDLVIERDITFYSLCEHHMLPFYGKAAIGYIPNGRVAGLSKLARTVEVFARRLQLQEQLTAQVADALMAELDCRGAIVYMEAEHMCMTMRGVQKPGTKTATLARRGAFVENPELEARFFRMLDR

SEQ ID NO: 6956 - protein, 193 aa, Collinsella intestinalis
  misc_feature (1)..(193): tr|A0A5K1JN08|A0A5K1JN08_9ACTN GTP cyclohydrolase 1 OS= Collinsella intestinalis OX=147207 GN=folE_2 PE=4 SV=1
MVRGKLVEMVDQDKVREAVRLLLEGIGEDPTREGLVETPDRVARMYSELCDGMDRSASEHLSKTFAVSGDDLVIERDITFYSLCEHHMLPFYGKAAIGYIPNGRVAGLSKLARTVEVFARRLQLQEQLTAQVADALMAELDCKGAIVYMEAEHMCMTMRGVQKPGTKTATLARRGAFVENPELEARFFRMLGR

SEQ ID NO: 6957 - protein, 188 aa, [Collinsella] massiliensis
  misc_feature (1)..(188): tr|A0A1Y3XY55|A0A1Y3XY55_9ACTN GTP cyclohydrolase 1 OS= [Collinsella] massiliensis OX=1232426 GN=folE PE=3 SV=1
MAVDRARAERAIREFLIAVGEDPDRPGLVETPNRVARAAEEVLGGYDDDPAHHLRKQFQESESDDMVIVRDIPFSSLCEHHILPFTGRAHVAYIPRGGRITGLSKIARCVTGFARRLQLQERLTSQIADALMEELDPQGVLVVLEAEHMCMTMRGVKSAGALTMTSAVRGAFRKDIKTREEALRLLGL

SEQ ID NO: 6958 - protein, 190 aa, Collinsella sp.
  misc_feature (1)..(190): tr|A0A1Y4AR88|A0A1Y4AR88_9ACTN GTP cyclohydrolase 1 OS= Collinsella sp. An307 OX=1965630 GN=folE PE=3 SV=1
MAVDLERAQAAVREFLLAVGEDPDRPGLVETPDRVARAAAELFGGYDEDPAVHLRKQFHESDNEEMVIVRDIPFSSMCEHHILPFTGKAHVVYIPRAGRITGLSKIARCVSGFAHRMQLQERLTAQIADALMAELEPLGVLVVLEAEHTCMTMRGVRAAGALTVTSAVRGGFKNDIKTREEALRLIGLNG

SEQ ID NO: 6959 - protein, 185 aa, Collinsella sp.
  misc_feature (1)..(185): tr|A0A374VF49|A0A374VF49_9ACTN GTP cyclohydrolase 1 OS= Collinsella sp. OM07-12 OX=2292328 GN=folE PE=3 SV=1
MVDQEKVEAAIKLLLEGIGEDPTREGLLETPARVARMYGEIAGGMDQSAEEHLSKTFAVASNDLVIERDITFYSLCEHHLLPFCGKAAIGYIPNGRVAGLSKLARTVEVYARRLQLQEQLCAQVADALMDYLAPQGAIVLMEAEHMCMTMRGVQKPGTKTVTLARRGVFETDPALEERFFRMLGR

SEQ ID NO: 6960 - protein, 194 aa, Collinsella stercoris
  misc_feature (1)..(194): tr|B6GEC9|B6GEC9_9ACTN GTP cyclohydrolase 1 OS=Collinse lla stercoris DSM 13279 OX=445975 GN=folE PE=3 SV=1
MKQHGKLVEMVDQEKARVAVRMLLEAIGEDPDREGLVETPDRVARMYSELCDGMDRRASEHLSKTFAVSGDDLVIERDITFYSLCEHHMLPFYGKAAIGYIPNGRVAGLSKLARAVEVFARRLQLQEQLTAQVADALMAELDCKGAIVYMEAEHMCMTMRGVQKSGTKTATLARRGAFVENPELEARFFRMLDR

SEQ ID NO: 6961 - protein, 186 aa, Collinsella tanakaei
  misc_feature (1)..(186): tr|A0A3E4QXJ8|A0A3E4QXJ8_9ACTN GTP cyclohydrolase 1 OS= Collinsella tanakaei OX=626935 GN=folE PE=3 SV=1
MVDQQKIEEAVRLLLEGIGEDPSREGLVETPARVARMYAELAAGMDQDGSEHLSKTFSVGSDDLVIERDITFYSLCEHHMLPFYGKAAIGYIPNGRVAGLSKLARTVETFARRLQLQEQLCAQVADAMMEFLAPQGVIVLMEAEHMCMTMRGVQKPGTKTVTLARRGVFEDDPALEQRFFNMLDRG

SEQ ID NO: 6962 - protein, 186 aa, Collinsella tanakaei
  misc_feature (1)..(186): tr|G1WFE1|G1WFE1_9ACTN GTP cyclohydrolase 1 OS=Collinse lla tanakaei YIT 12063 OX=742742 GN=folE PE=3 SV=1
MVDQQKIEEAVRLLLEGIGEDSSREGLVETPARVARMYAELAAGMDQDGSEHLSKTFSVGSDDLVIERDITFYSLCEHHMLPFYGKAAIGYIPNGRVAGLSKLARTVETFARRLQLQEQLCAQVADAMMEFLAPQGVIVLMEAEHMCMTMRGVQKPGTKTVTLARRGVFEDDPALEQRFFNMLDRG

SEQ ID NO: 6963 - protein, 180 aa, Colwellia beringensis
  misc_feature (1)..(180): tr|A0A222GDL7|A0A222GDL7_9GAMM GTP cyclohydrolase 1 OS= Colwellia beringensis OX=1967665 GN=folE PE=3 SV=1
MENNYKEILSAIGEDINRNGLIDTPKRAAKAMGFLTQGYQQNIDDVVNGALFDSDADEMVVVKNIELYSMCEHHMLPFIGKCHIAYIPSGKVLGLSKFARIVDMYARRLQIQENLAREIALSIQKITGSIGVGVIIEAQHLCMMMRGVEKQNSSMTTSVMLGQMRKNASARQEMLSLVKS

SEQ ID NO: 6964 - protein, 308 aa, Colwellia beringensis
  misc_feature (1)..(308): tr|A0A222G6P7|A0A222G6P7_9GAMM GTP cyclohydrolase FolE2 OS=Colwellia beringensis OX=1967665 GN=folE2 PE=3 SV=1
MPTLMPDIANHTTAQTEGTLDWVGMSNIEMPIMVASKGQSERMVSAYVDAFVNLKEPKAKGIHMSRLYLLLDELSNSNVLNHQSLVTLLDGFISSHQELSDNAKVKFSFDYHLRRKSLISGKQGWKAYPVTVTGRLNKGKLDIELSLDVRYSSTCPCSAALARQLIQKAFKEKFSDDANVDLADVHEWLGTTEGIVATPHSQRSVAEIKVKLNSSTTEFPITDLVDLIENSLKTPVQAAVKREDEQEFALLNGQNLMFCEDAARRLQHTMNITDQFDDFWLRINHLESLHAHDAVSVTTKGVVDGYQA

SEQ ID NO: 6965 - protein, 336 aa, Colwellia chukchiensis
  misc_feature (1)..(336): tr|A0A1H7LJ19|A0A1H7LJ19_9GAMM GTP cyclohydrolase FolE2 OS=Colwellia chukchiensis OX=641665 GN=folE2 PE=3 SV=1
MPTKILLGTEVTKDSPLPSAQANSGVKMPTLMPDIANHTTAQTEGTLDWVGMSNIEMPIMVASKGESERMVSAHVDAFVNLKEPKAKGIHMSRLYLLLDELSTADVLNHQSLVTLLDGFISSHQELSDNAKVKFSFDYPLRRKSLISGKQGWKAYPVTITGRLNKGKLDIELCLDVRYSSTCPCSAALARQLIQKAFKEKFSTQDGIDLETVHEWLGTTEGIVATPHSQRSVAEVKVKLNHATTEFPITDLVDLIENSLKTPVQAAVKREDEQEFALLNGQNLMFCEDAARRLQHTMNAATQFDDFWLRVNHLESLHAHDAVSITTKGIAGGYQAN

SEQ ID NO: 6966 - protein, 180 aa, Colwellia demingiae
  misc_feature (1)..(180): tr|A0A5C6Q5N9|A0A5C6Q5N9_9GAMM GTP cyclohydrolase 1 OS= Colwellia demingiae OX=89401 GN=folE PE=3 SV=1
MEQNFKSIIEQIGEDSSREGLVDTPKRAAKAMKFLTQGYEQDLDSVINGALFSSDCNSMVVVNNIELYSLCEHHMLPFTGRCHIGYIPNGKVLGLSKLARIVDMFARRLQIQENLTQEIANAIMDVTGAKGVGVVMSASHLCMRMRGVEKQNSEMKTSCMLGSFMKCKDTRAEFLQLIRD

SEQ ID NO: 6967 - protein, 181 aa, Colwellia demingiae
  misc_feature (1)..(181): tr|A0A5C6Q3Q6|A0A5C6Q3Q6_9GAMM GTP cyclohydrolase 1 OS= Colwellia demingiae OX=89401 GN=folE PE=3 SV=1
MSIESNYREIIATIGEDINRDGLVDTPKRTAKAMEFLTQGYQQNINDVVNGALFTSDADEMVVVKNIELYSMCEHHMLPFIGKCHIAYIPSGKVLGLSKFARIVDMYARRLQIQENLAREIALSIQEITGSIGVGVIIEAQHLCMMMRGVEKQNSSMTTSVMLGEMRENSAARQEMLSLVK

SEQ ID NO: 6968 - protein, 307 aa, Colwellia hornerae
  misc_feature (1)..(307): tr|A0A5C6QLC2|A0A5C6QLC2_9GAMM GTP cyclohydrolase FolE2 OS=Colwellia hornerae OX=89402 GN=folE2 PE=3 SV=1
MSTLMPDIANHTTAQTEGTLDWVGMSNIEMPMMVASQGENERMVSAFIDAFVNLKEPQAKGIHMSRLYLLLDELSTSNTLDFQSLVTLLDGFISSHHDLSDNAKVQFRFDYHLRRKSLISGKQGWKAYPVTLTGRLNKGKVDIELAVDVRYSSTCPCSAALARQLIQKAFKAKFHDQDADLDSIHEWLGTTEGIVATPHSQRSVAELKVKLNANTSEFPITALVDIIEGCLKTPVQAAVKREDEQEFALLNGQNLMFCEDAARRLQHAMNNTAEYDDFWLRINHLESLHAHDAVSITTKGIEGGYQP

SEQ ID NO: 6969 - protein, 180 aa, Colwellia marinimaniae
  misc_feature (1)..(180): tr|A0A1Z5I7D5|A0A1Z5I7D5_9GAMM GTP cyclohydrolase 1 OS= Colwellia marinimaniae OX=1513592 GN=folE2_2 PE=3 SV=1
MEQEFKSIIEQIGEDPQREGLIDTPKRAAKALKFLTQGYEQDLNSVINGALFNSDCDSMVVVNNIELYSLCEHHMLPFTGRCHIGYIPNGKVLGLSKIARIVDMYARRLQIQENLTQEIAHAIMAVTDAKGVGVVMSASHLCMRMRGVEKQNSEMKTSCMLGSFLKCKDTRAEFLTLIRD

SEQ ID NO: 6970 - protein, 308 aa, Colwellia marinimaniae
  misc_feature (1)..(308): tr|A0A1Z5HYJ6|A0A1Z5HYJ6_9GAMM GTP cyclohydrolase FolE2 OS=Colwellia marinimaniae OX=1513592 GN=folE2_1 PE=3 S V=1
MTTSMPDIANHTTAQTEGTLDWVGMSNIEMPIMVASKGESDRMVSAHIDAFVNLKDAQAKGIHMSRLYLLIDELSTSNVLNYQSLVSLLDGFISSHQELSDEAKVEFSFEYHLRRKSLISGKEGWKAYPVTLTGYLNKGKITIELTVNVPYSSTCPCSAALARQLIQQAFQDKFAQQDELALTDIHDWLGTTEGIMATPHSQRSIAEVKVKLNSTVNDFPITELVDLIEYSLKTPVQAAVKREDEQEFARLNGQNLMFCEDAARRLQHSMNQANHFDDFWLRINHLESLHAHDAVSITTKGIEGGYQP

SEQ ID NO: 6971 - protein, 308 aa, Colwellia psychrerythraea
  misc_feature (1)..(308): sp|Q47VM6|GCH4_COLP3 GTP cyclohydrolase FolE2 OS=Colwel lia psychrerythraea (strain 34H / ATCC BAA-681) OX=1678 79 GN=folE2 PE=3 SV=1
MTTSMPDIANHTTAQTEGTLDWVGMSNIEMPIMVASKGESERMVSAHIDAFVNLKDAQAKGIHMSRLYLLIDELSTSNILNYQSLVSLLDGFISSHQELSDQAKVQFCFDYHLRRKSLISGKEGWKAYPVTLTGNLNQGKLTIELTIDVPYSSTCPCSAALARQLIQKAFQDKFAQQSELALTDVHDWLGTTEGIVATPHSQRSVAEVKVKLNSSINDFPITEIVDLVENSLKTPVQAAVKREDEQEFARLNGQNLMFCEDAARRLQHSLNQTDQFDDFWLRINHLESLHAHDAVSVTTKGIKDGYQP

SEQ ID NO: 6972 - protein, 180 aa, Colwellia psychrerythraea
  misc_feature (1)..(180): tr|A0A099KUR3|A0A099KUR3_COLPS GTP cyclohydrolase 1 OS= Colwellia psychrerythraea OX=28229 GN=folE PE=3 SV=1
MEQNFKSIIEQIGEDSNREGLIDTPKRAAKALKFLTQGYEQNLDSVINGALFSSDCDSMVVVNNIELYSLCEHHMLPFTGVCHIGYIPNGKVLGLSKLARIVDMFARRLQIQENLTQEIANAIMAVTGAKGVGVVMSASHLCMRMRGVEKQNSTMKTSCMLGSFLKCKDTRAEFLQLIRD

SEQ ID NO: 6973 - protein, 308 aa, Colwellia sp.; identical to SEQ ID NO: 6971
  misc_feature (1)..(308): tr|A0A2N1HD72|A0A2N1HD72_9GAMM GTP cyclohydrolase FolE2 OS=Colwellia sp. Bg11-28 OX=2058305 GN=folE2 PE=3 SV=1

SEQ ID NO: 6974 - protein, 306 aa, Colwellia sp.
  misc_feature (1)..(306): tr|A0A2G2EHX1|A0A2G2EHX1_COLSX GTP cyclohydrolase FolE2 OS=Colwellia sp. OX=56799 GN=folE2 PE=3 SV=1
MQTNMPDIADTAPALQTGKLDWVGMGEIELPFIFESRDLSPVTVNAKARAFVNLHKEDAKGIHMSRLFLALDLLSTEQQVNPQTISQALNTFISSHEGLSNKAQIEFKFELPLRRKSLLSGKAGWKSYPITLTSTIEDNIISYELTVDVTYSSTCPCSAALARQLIQNAFSEKFNQDTLNQKEVLEWLGTTQGIVATPHSQRSIANVKVKLNSNINEFDVVNLINTLEGELKTPVQAAVKREDEQEFARLNGQNLMFCEDAARKIKAILETDGYADYWLQINHYESLHAHDAVAVAVKGINGGYKA

SEQ ID NO: 6975 - protein, 308 aa, Colwelliaceae bacterium
  misc_feature (1)..(308): tr|A0A2D6RCU3|A0A2D6RCU3_9GAMM GTP cyclohydrolase FolE2 OS=Colwelliaceae bacterium OX=2026726 GN=folE2 PE=3 SV =1
  misc_feature (224)..(224): Xaa can be any naturally occurring amino acid
  misc_feature (247)..(248): Xaa can be any naturally occurring amino acid
  misc_feature (255)..(255): Xaa can be any naturally occurring amino acid
MPTSMPDIANHTTAQTEGKLDWVGMSNIEMPLVVLSKGQPERMVSAHIDAFVNLKEPEAKGIHMSRLYLLLDELSTNNELSYSSLASLLDGFISSHQDLSDDAQVKFSFDYHLRRKSLISGKQGWKAYPVTITGRLNKGELDVELAIDVRYSSTCPCSAALARQLIQQAFMAKFEESDTIDKQTMHDWLGTTEGIVATPHSQRSVAEVKVKLAKGCAEFPIADXVNLLEDTLQTPVQAAVKREDEQXXARLNGQXLMFCEDAARKLQHAMNQATEYNDFWLKVNHLESLHAHDAVSITTKGVEGGYKA

SEQ ID NO: 6976 - protein, 188 aa, Comamonadaceae bacterium
  misc_feature (1)..(188): tr|A0A4Q3PCV5|A0A4Q3PCV5_9BURK GTP cyclohydrolase 1 OS= Comamonadaceae bacterium OX=1871071 GN=folE PE=3 SV=1
MFDQPRAEAAVRELLLAIGEDPDRPGLIDTPARVARSYREVFAGLYTDPAEVLGTTFDEGHSELVLVRDIPLYSTCEHHLVSFHGVAHVGYIPGATGKVTGLSKIARVVDLYAKRPQVQERLTSQVADAVMRKLNPRGAIVVIEAEHLCMAMRGIRKPGASTTTSAVRGTLQSSAASRSEALALILRN

SEQ ID NO: 6977 - protein, 900 aa, Comamonas testosteroni
  misc_feature (1)..(900): tr|A0A1Y1IVH3|A0A1Y1IVH3_COMTE Diguanylate cyclase OS=C omamonas testosteroni OX=285 GN=CTR2_0206 PE=4 SV=1
MKSEEGHSPLTPWVIVTLYLCVGMLWLGAQAGVLGYFDVSLNRQSLRWQIGLFIVWLLATALVALLFMQRKARADQRGRETAQELELVVRHAPAGMARVHVGGAEIVWANAKLAGWLGRSVESLRGQDFRVLVPVHDRDEVVLQLQRLLDGSTDYFQVLRQCVHAETGKVTPVLCTTSRVAASGVGGPVALVCVLQDLSEMVSARNAMMRSETMLRLALEGSGNGVWEWDALEQRLNFSTGMSALLRYQGQDLAREFDFHQRLHPEDAATARAQAEQALEQGSMLVLTARLLCFDGLYRWFRARGQAYKDESGRLIRISGLLSDQTASREADERSRLASTVVDNTIEGVVVTDAHSRILSVNHAFTKLLGFSEAEMLGKTPRMFKSGRHDKAFYDAMWASMHATGHWQGEIWNRRKNGEVFPERMSLSAVKDANDKVTHYVCMFTDISAEKAREQQLEFLAHRDTLTGLPNRSQFTRMLGEAVELSQSTNRRMAVLLFNIDRFKDVNDSYGHSIGDEVLRHVSVQMQGALRHGDIIGRLAGDEICVVAQSICGRDSAVDVAERLMAAAGQPWTTPDGLSVVVSVSAGICLYPDHALTADDLLQGAHAAVYGAKARGSNAWCFFHENMTQAARERLALEARLRRALELGHMRLYYQPQIDLATGRVVGAEALLRWLDPEEGLISPARFIPVAENSGVIGPLGLWVLGEACRQGQQWRAAGLPDLTIAVNVSLHQFLLTDIAGATADALNKSGFPASLLELEITESALAEKPEEALAVLNRLRELGLRLAIDDFGTGYSSLAHLKRFPLDLLKIDQGFIRDIPHSADDMTISSSVIALGHAMGLKVLAEGVETQEQLSFLQQKGCDYFQGYFCSRPLPAEDFTRLLEKTREGQSLVAVATAG

SEQ ID NO: 6978 - protein, 314 aa, Comamonas testosteroni
  misc_feature (1)..(314): tr|A0A1Y1J193|A0A1Y1J193_COMTE GTP cyclohydrolase FolE2 OS=Comamonas testosteroni OX=285 GN=folE2 PE=3 SV=1
MGAHPNWILSMNAALPDVSLTDIAPSLSPLAWVGMQGIDLPITVAEPGCRRELHARADVQVDLPAPHVKGIHMSRLYRLLDTLGQGEALSPTGLCHLLQDMIASHQDCDSRCARLRLNFALLVRRPALVTQGLSGWKSYPVRLDVSLIDGVFRCRVQVTAGYSSTCPCSAALSRQIIEQGFLKAFDRQSPVEPADVAAWLHQHATLATPHSQRSEAQVTVDVPSDADTLGLLALIDRIEQAVGTPVQTAVKRADEQAFAALNGQNLMFVEDAARRIEAALSGYVRPSVHVRHLESLHPHDAVAWAAPISEGVFA

SEQ ID NO: 6979 - protein, 200 aa, Commensalibacter intestini
  misc_feature (1)..(200): tr|G6F1V8|G6F1V8_9PROT GTP cyclohydrolase 1 OS=Commensa libacter intestini A911 OX=1088868 GN=folE PE=3 SV=1
MKPTDNSPPSREDAEEAIRTLIRWAGDNPEREGLLDTPKRVVNSFDEFFAGYKEDPREVLSRTFDEVGGYKEIVLLKDIRFESHCEHHMVPIIGTAHVAYFPNSRVVGISKLARIVEIFAKRLQIQERMTSEIANIIQEVLEPKGVAVIIEGSHQCMTTRGVHNPGVSMITSKMLGIFRDDPASRTELLMTLNRPTTLGL

SEQ ID NO: 6980 - protein, 200 aa, Commensalibacter intestini; identical to SEQ ID NO: 6979
  misc_feature (1)..(200): tr|A0A251ZVM2|A0A251ZVM2_9PROT GTP cyclohydrolase 1 OS= Commensalibacter intestini OX=479936 GN=folE PE=3 SV=1

SEQ ID NO: 6981 - protein, 200 aa, Commensalibacter sp.
  misc_feature (1)..(200): tr|W7DKM1|W7DKM1_9PROT GTP cyclohydrolase 1 OS=Commensa libacter sp. MX01 OX=1208583 GN=folE PE=3 SV=1
MNSKNNSAPTRQDAEEAIRTLIRWAGDNPEREGLLDTPARVVNSYDEFFSGYKEDPREVLSRTFDEVGGYKETVLLRDIRFESHCEHHMVPIIGTAHIAYFPHSRVVGISKLARVVEIFAKRLQIQERMTSEIANVIQEVLEPKGVAVIIEGSHQCMTTRGVHNTGVSMITSKMLGIFRDDPTTRNELLMTLNRPSTLGL

SEQ ID NO: 6982 - protein, 199 aa, Commensalibacter sp.
  misc_feature (1)..(199): tr|A0A318NBZ2|A0A318NBZ2_9PROT GTP cyclohydrolase 1 OS= Commensalibacter sp. ESL0284 OX=2070537 GN=folE PE=3 SV =1
MTDKKTSAPSRSEAEEAVRTLIRWAGDDPDREGLIDTPSRVINAYAEFFSGYKENPKEILGRTFEEVGGYKEIVLLRDIRFESHCEHHMVPIIGKAHVAYLPNNYVVGISKLARIVEVFAKRLQIQERMTAEIANIMQEVLQPRGVAVIIEATHQCMTTRGVHNPGVSMVTSKLLGVFQQDQNARAELSALLNRSVSFI

SEQ ID NO: 6983 - protein, 191 aa, Compostimonas suwonensis
  misc_feature (1)..(191): tr|A0A2M9C504|A0A2M9C504_9MICO GTP cyclohydrolase 1 OS= Compostimonas suwonensis OX=1048394 GN=folE PE=3 SV=1
MSGVDRARVEAAVTELLLAIGEDPARPGLESTPRRVAESYAEFFGGLGEDPLEHLRDAVPLGDHVGELVLVRDISFRSMCEHHLLPFVGTAHIAYLPSTRIVGLGRLPKVVDTLATRPQLQERLTEQIADTLVAGLEPLGVLVILEAVHGCVTTRGPRQINSSTVTIASRGALSEPAARAELIALATRGTE

SEQ ID NO: 6984 - protein, 260 aa, Conchiformibius steedae
  misc_feature (1)..(260): tr|A0A3P2A7V2|A0A3P2A7V2_9NEIS GTP cyclohydrolase FolE2 OS=Conchiformibius steedae OX=153493 GN=folE2 PE=3 SV= 1
MTHSIPDIQSTPDTRNMPINRVGIKDLHFPVRIESAQGVVHTTAKLKMAVYLPAEQKGTHMSRFVALMEEHDAALSPAALHHLTESMLARLHAHSGSIEAAFAFFRTKTAPVSGIKSLMDYQVTLACDINQGQTRHRLSVLVPVTSLCPCSKEISQYGAHNQRSHVTVSLESDGAVAVEEIIDLVENQASCQLYGLLKRPDEKFVTERAYENPKFVEDMVRDIALALQNDARIHRFSVESENFESIHNHSAYALIESAPV

SEQ ID NO: 6985 - protein, 195 aa, Confluentibacter sp.
  misc_feature (1)..(195): tr|A0A2N3HPF1|A0A2N3HPF1_9FLAO GTP cyclohydrolase 1 OS= Confluentibacter sp. 3B OX=1909700 GN=folE PE=3 SV=1
MPYKKFEEYNIQITDDVRERYKNIIKDLGEDTERDGLLKTPERAAKAMQFLTQGYHQDPIKVLKSAMFKESYNEMVIVKDIELYSLCEHHLLPFFGKAHIAYIPNGHIVGLSKLPRIVDIFSRRLQVQERLTEQILDCINDTLKPQGVAVVIEASHMCMMMRGVQKQNSITTTSGFRGQFEKIETRNEFLKLIGK

SEQ ID NO: 6986 - protein, 225 aa, Confluentibacter sp.
  misc_feature (1)..(225): tr|A0A2N3HMB8|A0A2N3HMB8_9FLAO GTP cyclohydrolase 1 OS= Confluentibacter sp. 3B OX=1909700 GN=folE PE=3 SV=1
MKIEKNIEDFDALGEDHIGTSSNTPMRQDAFKLSIEEKIDIIKDDVRHIMETLGLDLTDDSLNGTPNRVAKMFVKELFGGLDPKKKPSASTFENKYKYGEMLVEKNITVYSTCEHHLLPIVGKAHIAYISSGRVIGLSKMNRIVDYYAKRPQVQERLTIQVVKELQEALKTQDVACIIDAKHLCVNSRGIRDVESSTVTSEFGGKFKEEATRREFLDYIKLDTKF

SEQ ID NO: 6987 - protein, 363 aa, Confluentimicrobium lipolyticum
  misc_feature (1)..(363): tr|A0A238KKR5|A0A238KKR5_9RHOB GTP cyclohydrolase FolE2 OS=Confluentimicrobium lipolyticum OX=1524263 GN=folE2 PE=3 SV=1
MNIHDRDPDREEVEHALATLRRWAQTAPEEELAGLEPPLARLVPGAELSNGPALRRAYPEEFTVDEAYKATLPDLQNGPSSLIRGAKQAIQHVGISNFRLPIRFHTRDDGDLTLETSVTGTVSLEAEKKGINMSRIMRSFYGHAERAFSFEVIDSALDAYKRDLDSFDARIMMRFSFPVLRPSLRSGLEGYQYYDIALELVEQDGVRKKIMHVDYVYSSTCPCSLELAEHARQVRGQMATPHAQRSVARVSVLLADGAECLWFEDLIDMCRDAVPTETQVMVKREDEQAFAELNAANPIFVEDAARLFCEGLRNDARISDFRVVASHQESLHSHDAVSVLVEGPTFANESLDPQLFATLIHRG

SEQ ID NO: 6988 - protein, 191 aa, Confluentimicrobium sp.
  misc_feature (1)..(191): tr|A0A0N9NWH3|A0A0N9NWH3_9RHOB GTP cyclohydrolase 1 OS= Confluentimicrobium sp. EMB200-NS6 OX=1609966 GN=folE P E=3 SV=1
MKSAAEVQAQIEAAVRSILEALGEDPGREGLLETPARVARMYQEVFAGRNQDPAVHLQTQFTADAHEDVVIVKDISFFSMCEHHLLPFFGKASVAYLPDGGRLAGLSKLARVTHTIAARPQLQERLCAQIADTLDQALRPRGVMVSIEAEHMCMAMRGVRADKSTTITLVTRGELSTDPRLRSETLRLLRD

SEQ ID NO: 6989 - protein, 182 aa, Congregibacter litoralis
  misc_feature (1)..(182): tr|A4A3J9|A4A3J9_9GAMM GTP cyclohydrolase 1 OS=Congregi bacter litoralis KT71 OX=314285 GN=folE PE=3 SV=1
MESHWAGIITGIGEDLERPGLKDTPKRAAKAFEFLTRGYHQNVEDVVNDALFPSDSNEMVVVQNIEMYSMCEHHMLPFIGKCHVAYIPTGKVIGLSKIARLVDMYARRLQIQESLTMQVAETILDVTEAAGVGVIVEAQHMCMMMRGVEKQNSMMKTSAMLGSFRSDQKTRDEFLSLLQLHQ

SEQ ID NO: 6990 - protein, 226 aa, Congregibacter litoralis
  misc_feature (1)..(226): tr|A4AAA0|A4AAA0_9GAMM GTP cyclohydrolase 1 OS=Congregi bacter litoralis KT71 OX=314285 GN=folE PE=3 SV=1
MNQAVATETLDFIEDISPEALKVRQALEDRGLETPLVDNGLTRQQKYERIRDSFREITETLGLDLRDDSLQETPHRIAKMYVDEIFSGLNYSQFPKISVIENKMQVEEMVLVDDIDLVSTCEHHFVTIDGTARVAYIPGNKIIGLSKINRIVRFFAQRPQVQERLTQQVLVALQALLETDDVAITINAVHYCVKSRGVMDSNSSTRTTALGGVFKSDNATRSEFLR

SEQ ID NO: 6991 - protein, 218 aa, Conservatibacter flavescens
  misc_feature (1)..(218): tr|A0A2M8S5J1|A0A2M8S5J1_9PAST GTP cyclohydrolase 1 OS= Conservatibacter flavescens OX=28161 GN=folE PE=3 SV=1
MNNISPEAARVRQALQEKGIETPIIESHKSPHERREGIENHMREVMKLIGLDLNDDSLEETPKRLAKMFVDEIFSGLDYANFPKITNIENRMQVSEMVLVNDVTLTSTCEHHFVTIDGKVSVAYYPKKWVIGLSKINRVVSFFAQRPQVQERLTEQVLLAFQTILETDDVAVYVKATHFCVKCRGIKDSNSYTVTSAFGGVFLNDRETRKEFLTLINK

SEQ ID NO: 6992 - protein, 202 aa, Consotaella salsifontis
  misc_feature (1)..(202): tr|A0A1T4L7N2|A0A1T4L7N2_9RHIZ GTP cyclohydrolase 1 OS= Consotaella salsifontis OX=1365950 GN=folE PE=3 SV=1
MNAIVERFPNAAETARPSREEAEAAVATLIRWAGDDPSREGLLETPARVVRAYEELFGGYRQDPADILGRTFEEVAGYDDIVLVRDIDFFSHCEHHMVPIIGRAHVGYRPAGRVVGLSKIARCIEVFGRRLQTQEALTAQVASAIEEVLAPKGVAVVIEAEHMCMSMRGVRTKGAKTITTVFRGAFEDKDEQARFLGMLGTR

SEQ ID NO: 6993 - protein, 188 aa, Coprobacillus sp.
  misc_feature (1)..(188): tr|G9QXV6|G9QXV6_9FIRM GTP cyclohydrolase 1 OS=Coprobac illus sp. 3_3_56FAA OX=665941 GN=folE PE=3 SV=1
MIDTKKIEEHIYGILKALGDDPEREGLKDTPKRVAKMYGEVFAGMNYSNLEIATMFDKTFVDDLDFDNQEVVVIKDIDIFSYCEHHLALMYDMKVTVAYIPCGKVIGLSKIARIADMAARRLQLQERIGTDIAEIISLVTNSKDIAVIIEGKHSCMSSRGIKKVNSTTVTSTLTGRFKTDSKLQIYLH

SEQ ID NO: 6994 - protein, 188 aa, Coprobacillus sp.; identical to SEQ ID NO: 6993
  misc_feature (1)..(188): tr|H1AM48|H1AM48_9FIRM GTP cyclohydrolase 1 OS=Coprobac illus sp. 8_2_54BFAA OX=469597 GN=folE PE=3 SV=1

SEQ ID NO: 6995 - protein, 199 aa, Coprobacter fastidiosus
  misc_feature (1)..(199): tr|A0A495VNI7|A0A495VNI7_9BACT GTP cyclohydrolase 1 OS= Coprobacter fastidiosus NSB1 OX=1349822 GN=folE PE=3 SV =1
MQKVQDRLSDQEKEDLIAGHYKSILELLGEDVNREGLEKTPIRVARAMKFLTSGYDQSPEEILRSAIFHENYGDSQRIVLVKDIEFYSLCEHHLLPFFGKVHIGYMPGDKIVGLSKPARLVDAFARRFQVQERMTREILDCFDSVIEPYGTIVMVEARHLCMQMRGVEKQNASTTTCLYSGNFKDRELREEFFSMLRNR

SEQ ID NO: 6996 - protein, 199 aa, Coprobacter fastidiosus
  misc_feature (1)..(199): tr|A0A354M586|A0A354M586_9BACT GTP cyclohydrolase 1 OS= Coprobacter fastidiosus OX=1099853 GN=folE PE=3 SV=1
MQKVQDRLSDQEKEDLIAGHYKSILELLGEDVNREGLEKTPIRVARAMKFLTSGYDQSPEEILRSAIFHENYGDSQRIVLVKDIEFYSLCEHHLLPFFGKVHIGYMPGDKIVGLSKPARLVDAFARRFQVQERMTQEILDCFDSVIEPYGTIVMVEARHLCMQMRGVEKQNASTTTCLYSGNFKDRELREEFFSMLRNR

SEQ ID NO: 6997 - protein, 190 aa, Coprobacter secundus
  misc_feature (1)..(190): tr|A0A0B2JG33|A0A0B2JG33_9BACT GTP cyclohydrolase 1 OS= Coprobacter secundus OX=1501392 GN=folE PE=3 SV=1
MSSSEIQEQLAYHYKSIISLLGEDTDREGLVKTPERVAKAMQFLTQGYAQSPEEIISSAMFREDYRQMVIVKDIDFYSLCEHHMLPFYGKAHVAYIPNKYITGLSKIARIVDVFARRLQIQERMTMQIKDCLQKTLNPLGVMVVIEAQHMCMQMRGVEKRHSLTTTSDFTGAFKDLKTREEFISLIKNNR

SEQ ID NO: 6998 - protein, 199 aa, Coprobacter sp.
  misc_feature (1)..(199): tr|A0A316SQP2|A0A316SQP2_9BACT GTP cyclohydrolase 1 OS= Coprobacter sp. OX=1941478 GN=folE PE=3 SV=1
MMDEQKIGPEDEKNSVKEQLAYHYRCILSLLGEDVEREGLKKTPERVAKAMMFLTKGYKQSAKEILSSARFKYEGTQMVVVKDIEFYSMCEHHILPFFGKVHIGYIAADQIVGLSKIPRLVDAFARRLQVQERFTTEMMNALSCELSTHGVIVLVEARHLCMQMRGVEKQDSSTVTCDFCGDFKNESLRQEFYRRIGRY

SEQ ID NO: 6999 - protein, 193 aa, Coprococcus catus
  misc_feature (1)..(193): tr|D4J8R1|D4J8R1_9FIRM GTP cyclohydrolase 1 OS=Coprococ cus catus GD/7 OX=717962 GN=folE PE=3 SV=1
MAIDTEAIKEHVRGILVALGDDPEREGLKETPERVAKMYEEVFEGMNYTNHEIAQMFDKTFEQDLELSGKSDDMVYVRDIEIFSYCEHHMALMYDMKVSVAYIPNGKVIGLSKIARIADMAAKRLQLQERIGSDIAEIMAEVTGSDSIAVKIEGCHSCMTARGIKKTAAKTLTTTFTGRFKTDASLQMRVMMQ

SEQ ID NO: 7000 - protein, 193 aa, Coprococcus catus
  misc_feature (1)..(193): tr|A0A3E2XLA4|A0A3E2XLA4_9FIRM GTP cyclohydrolase 1 OS= Coprococcus catus OX=116085 GN=folE PE=3 SV=1
MAIDTEAIKEHVRGILVALGDDPEREGLKETPERVAKMYEEVFEGMNYTNHEIAQMFDKTFDQDLELSGKSDDMVYVRDIEIFSYCEHHMALMYDMKVSVAYIPNGKVIGLSKIARIADMAAKRLQLQERIGSDIAEIMAEVTGSDSIAVKIEGCHSCMTARGIKKTAAKTLTTTFTGRFKTDASLQMRVMMQ

SEQ ID NO: 7001 - protein, 184 aa, Coprococcus comes
  misc_feature (1)..(184): tr|R6LQW9|R6LQW9_9FIRM GTP cyclohydrolase 1 OS=Coprococ cus comes CAG:19 OX=1263070 GN=folE PE=3 SV=1
MVDHKKVEQAIRLLLEGIGEDPDREGLAETPDRIARMYEEICGGMNEDAAEHLKKTFTAENNEMVVEKDITFYSMCEHHMLPFYGKVHIAYIPDGKVVGLSKLARTVEVFARRLQLQEQMTAQIADALMENLHPKGVMVLAEAEHMCMTMRGIKKPGSKTVSVVTRGAFEENEKLQNMFFRMIG

SEQ ID NO: 7002 - protein, 207 aa, Coprococcus comes
  misc_feature (1)..(207): tr|A0A412QB02|A0A412QB02_9FIRM GTP cyclohydrolase 1 OS= Coprococcus comes OX=410072 GN=folE PE=3 SV=1
MEKHKKIDTKAIEYHIAGILKALGDNPEREGLIDTPKRVAKMYEEVFEGMNYTNEEIADMFNKTFALDRLEEEFENVECKSQNGNSDMVVVKDIDIFSYCEHHLALMYDMKVTVAYIPKGRVIGLSKIARIADMVSKRLQLQERIGSDIADIMQMVTGAEDIAVLIEGCHSCMTARGIKKTNTKTYTQTLRGRFNNESNGFVQWWNR

SEQ ID NO: 7003 - protein, 197 aa, Coprococcus eutactus
  misc_feature (1)..(197): tr|R5WKX0|R5WKX0_9FIRM GTP cyclohydrolase 1 OS=Coprococ cus eutactus CAG:665 OX=1263071 GN=folE PE=3 SV=1
MAIDKEAIKEHVRGILIALGDDPDREGLIETPDRVARMYEEVFEGMNYTNDELAEMFGKTFAEDGVARQAGDMVFVKDIEVFSYCEHHMALMYDMKVSVAYIPNGRVLGLSKIARIADMVAKRLQLQERIGSDIAYVISKAAGTEDVAVMIEAHHSCMTARGIKKPGSKTMTTTLRGRFESDTALQNKMLMMYNAGR

SEQ ID NO: 7004 - protein, 200 aa, Coprococcus eutactus
  misc_feature (1)..(200): tr|A8STP4|A8STP4_9FIRM GTP cyclohydrolase 1 OS=Coprococ cus eutactus ATCC 27759 OX=411474 GN=folE PE=3 SV=1
MYKMAIDKEAIKEHVRGILIALGDDPDREGLIETPDRVARMYEEVFEGMNYTNDELAEMFGKTFAEDGVARQAGDMVFVKDIEVFSYCEHHMALMYDMKVSVAYIPNGRVLGLSKIARIADMVAKRLQLQERIGSDIAYVISKAAGTEDVAVMIEAHHSCMTARGIKKPGSKTMTTTLRGRFESDTALQNKMLMMYNAGR

SEQ ID NO: 7005 - protein, 194 aa, Coprococcus sp.
  misc_feature (1)..(194): tr|A0A3R6Y7N0|A0A3R6Y7N0_9FIRM GTP cyclohydrolase 1 OS= Coprococcus sp. OM04-5BH OX=2293093 GN=folE PE=3 SV=1
MAIDKDAIREHVRGILIALGDDPDREGLKETPDRVARMYEEVFAGMNYTNDEIAEMYGKTFKEEDTRHTEDMVFVKDIEVFSYCEHHMALMYDMKVSIAYLPKDKLIGLSKLARIADMVARRLQLQERIGTDIAYIVSKVTGSEDVAVLIEANHSCMTARGIKKPGTKTFTTTFRGKFENDITLQNKLLLMNTH

SEQ ID NO: 7006 - protein, 197 aa, Coprococcus sp.
  misc_feature (1)..(197): tr|A0A1Q6MLG9|A0A1Q6MLG9_9FIRM GTP cyclohydrolase 1 OS= Coprococcus sp. CAG:131_42_139 OX=1896997 GN=folE PE=3 SV=1
MAIDKEAIKEHVRGILIALGDDPDREGLVETPDRVARMYEEVFEGMNYTNDELAEMFGKTFAEDGVARQAGDMVFVKDIEVFSYCEHHMALMYDMKVSVAYIPNGRVLGLSKIARIADMVAKRLQLQERIGSDIAYVISKAAGTEDVAVMIEAHHSCMTARGIKKPGSKTMTTTLRGRFESDTALQNKLLMMYNAGR

SEQ ID NO: 7007 - protein, 271 aa, Coprothermobacter proteolyticus
  misc_feature (1)..(271): sp|B5Y6R9|GCH4_COPPD GTP cyclohydrolase FolE2 OS=Coprot hermobacter proteolyticus (strain ATCC 35245 / DSM 5265 / BT) OX=309798 GN=folE2 PE=3 SV=1
MRDVQSERDPRNVPLDYVGIENVRLPITVRTKEGGKQPTVGTFSIGVDFPHSFRGTHMSRFMEVLYQHLEEISQTRLRVTLEDIKERLKATKAMIEVAFPFAIKKSTPVTKLETVMYVDASFKAELNSTRGYVVTSTVTVPVHSLCPCSRDISEFGAHNQRVDVTVSWQGDLWIEDVIALVESSASQPLYPLLKRPDEKYVTEKAYLNPKFVEDIAKDLFLKLDPLSPCFRIKVVSYESIHPHNAVAIKEKRAEVSESSVRSNDQEHRDCT

SEQ ID NO: 7008 - protein, 270 aa, Coprothermobacter sp.
  misc_feature (1)..(270): tr|A0A348VCU5|A0A348VCU5_9BACT GTP cyclohydrolase FolE2 OS=Coprothermobacter sp. OX=55509 GN=folE2 PE=3 SV=1
MRDVQSERDPRNVPLDYVGIENVRLPITVRTKEGGKQPTVGTFSIGVDFPHSFRGTHMSRFMEVLYQHLEEISQTRLRVTLQDIKERLKATKAMIEVAFPFAVKKSTPITKLETIMYVDASFKAELNSTGYVVTSTVTVPVHSLCPCSRDISEFGAHNQRVDVTVSWQGDLWIEDVIALVESSASQPLYPLLKRPDEKYVTEKAYLNPKFVEDIAKDLFLKLDPLSPCFRIKVVSYESIHPHNAVAIKEKRAEVTESSAKSNDQEHRDCT

SEQ ID NO: 7009 - protein, 326 aa, Coraliomargarita akajimensis
  misc_feature (1)..(326): tr|D5EM69|D5EM69_CORAD GTP cyclohydrolase FolE2 OS=Cora liomargarita akajimensis (strain DSM 45221 / IAM 15411 / JCM 23193 / KCTC 12865 / 04OKA010-24) OX=583355 GN=fo lE2 PE=3 SV=1
MKEKSSSQSQEILASDASKPSKIYDEEFVLTDEYRASLPDMQNADAQQIYGANVPILKVGISNFRLPLRYITPSSDTHRLETSVTGTVSLEANQKGINMSRIMRVFYEYQERIFTPDLLQDILMAYKDEIRAHRAQLKLEFEYPILKPSLRSGLEGWQYYRCAFEGKVDELNRFRKYLHFDFIYSSACPCSSELSEHARESRNIYGIPHSQRSTARVSVEIAQDVLLSIEELQQLCLAGLKTETQVMVKREDEQAFAELNGAYTKFVEDAARLLYEQLDGDERIVDFQVACAHLESLHSHDAVAVINKGVPGGFTGHFEDFKGLIR

SEQ ID NO: 7010 - protein, 326 aa, Coraliomargarita sp.
  misc_feature (1)..(326): tr|A0A3R7VL63|A0A3R7VL63_9BACT GTP cyclohydrolase FolE2 OS=Coraliomargarita sp. TMED73 OX=1986604 GN=folE2 PE= 3 SV=1
MSEDSIGTSRDTLSPATSKPSVRYDKDFVLTDEYRASMPDMQNEGSREIFGANVPILKVGISNFRLPLRYITPDSDTHTLETSVTGTVSLEAGQKGINMSRIMRVFYDYEERIFTPDLLCEILQEYKKTLRAHRAQIKLDFTYPIAQSSLRSGLEGWQYYPCAIEGRIDELDRFRKYIHFDYTYSSACPCSSELSEHARDKRNVYGIPHSQRSTARVSVEIAENEHLNIESIQQMCLEALKTETQVMVKREDEQAFAELNGAFTKFVEDAARLLYEQFNADSRIVDFQIACAHLESLHSHDAVAVINKGMPGGFSGQFEDFKSLIR

SEQ ID NO: 7011 - protein, 308 aa, Corallincola sp.
  misc_feature (1)..(308): tr|A0A368NQ87|A0A368NQ87_9GAMM GTP cyclohydrolase FolE2 OS=Corallincola sp. C4 OX=2282215 GN=folE2 PE=3 SV=1
MPSIMPDIANHASAQTEGTLDWVGMDNIELPLMVEVRGEAPRQVSAHVGAFVNLTRPKAKGIHMSRLYLLLDTLSTEGTLNSQALMTLLDNFITSHDELSDHAKVSFTFDYHMRRKSLISGKQGWKAYPVTLTGELKQGELSIEMGVQVPYSSTCPCSAALARQLIQDAFEAKFSGQGSIDRAEMHAWLGTTEGVVATPHSQRSIADVKIKLDNANLGFPLRQLIDQIEDALQTPVQAAVKRVDEQEFARLNGQNLMFCEDAARRLKHLLNQHAEYKDFLLRVNHYESLHAHDAVSITAKGVKGGYHA

SEQ ID NO: 7012 - protein, 205 aa, Coriobacteriaceae bacterium
  misc_feature (1)..(205): tr|U2VI65|U2VI65_9ACTN GTP cyclohydrolase 1 OS=Coriobac teriaceae bacterium BV3Ac1 OX=1111135 GN=folE PE=3 SV=1
MADEQTYTQMAGQATSKIDRPRAEAAIRELLYAIGEDPHREGLQGTPDRVARACEELFAGLSDDPARYLRKQFQEDHNEEMVIVRDIPFHSMCEHHLLPFIGKAHVAYIPRAGRITGLSKIARCVAGFAARPQVQERLTAEVADAMVAELNPLGVMVVIEAEHTCMTMRGVRAAGAVTVTSSVRGCFKQNEKTRTEALRLLGVSH

SEQ ID NO: 7013 - protein, 189 aa, Coriobacteriaceae bacterium
  misc_feature (1)..(189): tr|A0A143X160|A0A143X160_9ACTN GTP cyclohydrolase 1 OS= Coriobacteriaceae bacterium CHKCI002 OX=1780377 GN=folE PE=3 SV=1
MDRAKIEAGVRLILEGVGEDPDREGLLKTPERVAKMYEEVFAGLVEDPAEHFETTFDEHHEEMVLVRDIPFYSMCEHHLVPFFGVAHVAYVPAADGRICGLSKLARLVDAFAKRPQVQERLTSQIADTLMEQLHPRGVIVVLEAEHLCMSMRGVKKPGTRTTTSAVRGALERNQTTRAEALSLIFARRD

SEQ ID NO: 7014 - protein, 195 aa, Coriobacteriales bacterium
  misc_feature (1)..(195): tr|A0A437UY44|A0A437UY44_9ACTN GTP cyclohydrolase 1 OS= Coriobacteriales bacterium OH1046 OX=2491116 GN=folE PE =3 SV=1
MAGKLSYRILDEPRIEAAIRELLIGIGEDPDRAGLKDTPGRVARACKEIFGGMQEDPGSHLLRQFDEPGNEDMVIVKDIPFSSMCEHHLLPFVGRAHICYLPGNGKITGLSKLARCVDGFARRPQLQERLTQQIADALVERLSPRGVLVVLEAEHTCMTMRGIKSAGSKTVTSAVRGWFKDDLKAREEALGLIGV

SEQ ID NO: 7015 - protein, 201 aa, Coriobacteriales bacterium
  misc_feature (1)..(201): tr|A0A133ZG62|A0A133ZG62_9ACTN GTP cyclohydrolase 1 OS= Coriobacteriales bacterium DNF00809 OX=1588753 GN=folE PE=3 SV=1
MMEHNQERKETTPSRFDFDKVQQGVRLILEGIGENPAREGLRETPARVARMYQEVFSGMHTDPHEFFTTLFDEHHQEMVLVKDISFYSMCEHHLAPFFGYAHVAYIPSVDGRICGLSKLARLVEAFAHRPQVQERLTSQIADTLVKELKPQGVMVVIEAEHMCMSMRGVKKPSSKTTTSAVRGSFKMNLSTRNEVMHLMFN

SEQ ID NO: 7016 - protein, 185 aa, Coriobacteriia bacterium
  misc_feature (1)..(185): tr|A0A2V2EAA7|A0A2V2EAA7_9ACTN GTP cyclohydrolase 1 OS= Coriobacteriia bacterium OX=2052159 GN=folE PE=3 SV=1
MVDQEKIQQAVRLLLEGMGEDVEREGLLETPQRVGRMYAEICRGMDESALGHLSTTFSIDSDDMVVERDIQFYSLCEHHLLPFYGKVHLAYIPNGRVTGLSKLARTVEVFSRRLQLQERLTSQIADALMDDLGAKGAIVMVEGEHMCMSMRGVSKPGASTATLAKRGVFEGDQALVDEFFRLIGK

SEQ ID NO: 7017 - protein, 205 aa, Coriobacteriia bacterium
  misc_feature (1)..(205): tr|A0A357ZDW9|A0A357ZDW9_9ACTN GTP cyclohydrolase 1 OS= Coriobacteriia bacterium OX=2052159 GN=folE PE=3 SV=1
MPKSPERKGTLKTTRSEKTVDTRKIEEGVRLILEGIGENLDREGLLDTPGRVARMYEEVCAGIGKTPEGLFEKSFGEDHQELVLVKDIPFYSLCEHHLAPFFGLAHVGYIPGRDGRVCGISKLARLVDLYARRLQVQERLTSQVAETLVEQLSPRGAIVVIEAEHLCMSMRGVKKPGARTTTSAVRGVFETSQKSREEALSLVFR

SEQ ID NO: 7018 - protein, 186 aa, Coriobacterium glomerans
  misc_feature (1)..(186): tr|F2N7H8|F2N7H8_CORGP GTP cyclohydrolase 1 OS=Coriobac terium glomerans (strain ATCC 49209 / DSM 20642 / JCM 1 0262 / PW2) OX=700015 GN=folE PE=3 SV=1
MIDQKKIEQAVELLLEGIGEDPGRAGLIETPARVARMYAELCAGKLDDASKHLARTFSVSGNDLVIERDIMFHSLCEHHLLPFFGHVHIGYVPCGRVVGLSKLARLVEVFARRLQLQERMTAQIADALMEQLAPQGVIVMIEAEHLCMAMRGVAKPGTWTTTLAVRGIIEQDPEIEQRFFRMLGRP

SEQ ID NO: 7019 - protein, 311 aa, Corticibacter populi
  misc_feature (1)..(311): tr|A0A3M6QYY8|A0A3M6QYY8_9BURK GTP cyclohydrolase FolE2 OS=Corticibacter populi OX=1550736 GN=folE2 PE=3 SV=1
MTVSLPDISLTETSPTLSPLRWVGMQGIDLPLTVSEPGYRRELHARGDVQVDLPAPHIKGIHMSRLYRLLDDLGDGEALSPVGLRRCLQAIVESHRDCNTSSARMRLQFDLLARRQALVTKGLAGWKSYPVRLDATLRPGSFSKQGFFTLRAQVTVGYSSTCPCSAALTRQLIEQGFTRAFAGQPSVEVSEVADWLRRHATLATPHSQRSEAVVGVDVAAGAPDMGLLTLIDRIEQAVGTPVQTAVKRADEQAFAALNGQNLMFVEDAVRRIQAALTVGYAQPLVHVRHLESLHPHDAVAWAAPAAEGVLA

SEQ ID NO: 7020 - protein, 202 aa, Corynebacterium accolens
  misc_feature (1)..(202): tr|E0N052|E0N052_9CORY GTP cyclohydrolase 1 OS=Coryneba cterium accolens ATCC 49726 OX=862512 GN=folE PE=3 SV=1
MSENHTDNQQVPARAPYDQERAEAAVRELLLAVGEDPDREGLRETPARVARAYREVFAGLHEDPTEVLHKTFAEDHQELVLVRDIPIYSTCEHHLVPFYGVAHIGYIPGKDGHVTGLSKLARLADMYAKRPQVQERLTQQIADALVNVLEAQSVIVVIECEHLCMAMRGIRKPGATTTTSAVRGGFKNNAASRAEVLSFIRT

SEQ ID NO: 7021 - protein, 196 aa, Corynebacterium accolens
  misc_feature (1)..(196): tr|A0A2A4AHF5|A0A2A4AHF5_9CORY GTP cyclohydrolase 1 OS= Corynebacterium accolens OX=38284 GN=folE PE=3 SV=1
MSNNIPAKGEFDQARAEAAIRELLIAVGEDPDREGLQETPARVARAYKEVFAGLHADPTEVLHKTFAEEHQELVLVRDIPIYSTCEHHLVPFYGVAHIGYIPGPDGHVTGLSKLARLADMYAKRPQVQERLTSQVADALVEVLHAQSVIVVIECEHLCMAMRGIRKPGATTTTSAVRGGFKSNAASRAEVMSLIRS

SEQ ID NO: 7022 - protein, 191 aa, Corynebacterium afermentans
  misc_feature (1)..(191): tr|A0A1N6Q1D1|A0A1N6Q1D1_9CORY GTP cyclohydrolase 1 OS= Corynebacterium afermentans OX=38286 GN=folE PE=3 SV=1
MTNANFDRERAEAAVRELLIAVGEDPDREGLVETPARVARAYEEVFAGLHEDPKVHLEKSFSENHRELVLVRDIPIYSTCEHHLVPFYGEAHIGYIPGPEGKVTGLSKLARVADMYAKRPQVQERLTAQIADAIVEKLNASAVIVVIECEHLCMAMRGIRKPGATTTTSAVRGGFQNNAASRAEVLSLIRG

SEQ ID NO: 7023 - protein, 197 aa, Corynebacterium ammoniagenes
  misc_feature (1)..(197): tr|D5NY15|D5NY15_CORAM GTP cyclohydrolase 1 OS=Coryneba cterium ammoniagenes DSM 20306 OX=649754 GN=folE PE=3 S V=1
MSDNSIPARRPFDQERAEAAIRELLFAVGEDPDRKGLEETPARVARSYAEIFAGLHKDPTEVLKKTFAEDHQELVLVRDIPIYSTCEHHLVPFYGVAHIGYIPGSDGRVTGLSKLARLADGFAKRPQVQERLTRQIADALTEVLEAQSVIVVIECEHLCMGMRGVQKPGSVTTTSAVRGGFKNNSASRAEVLSLIRS

SEQ ID NO: 7024 - protein, 191 aa, Corynebacterium amycolatum
  misc_feature (1)..(191): tr|A0A1V2C292|A0A1V2C292_CORAY GTP cyclohydrolase 1 OS= Corynebacterium amycolatum OX=43765 GN=folE PE=3 SV=1
MEREFDQERAEAAVRELLIAVGEDPDREGLKETPARVARAYREVFAGLFEDPSEVLAKTFNEDHQELVLVKDIPIYSTCEHHLVPFFGVAHIGYIPGKDGRVTGLSKLARLVDGYAKRPQVQERLTSQVADALVERLDPASAIVVIEAEHLCMAMRGIRKPGARTVTSAVRGGFKTDARSRAEAMALIRKS

SEQ ID NO: 7025 - protein, 191 aa, Corynebacterium amycolatum
  misc_feature (1)..(191): tr|A0A2I1WXF8|A0A2I1WXF8_CORAY GTP cyclohydrolase 1 OS= Corynebacterium amycolatum OX=43765 GN=folE PE=3 SV=1
MEREFDQGRAEAAVRELLIAVGEDPDREGLKETPARVARAYREVFAGLFEDPSEVLAKTFNEDHQELVLVKDIPIYSTCEHHLVPFFGVAHIGYIPGKDGRVTGLSKLARLVDGYAKRPQVQERLTSQVADALVERLDPASAIVVIEAEHLCMAMRGIRKPGARTVTSAVRGGFKTDARSRAEAMALIRKS

SEQ ID NO: 7026 - protein, 205 aa, Corynebacterium appendicis
  misc_feature (1)..(205): tr|A0A1N7J729|A0A1N7J729_9CORY GTP cyclohydrolase 1 OS= Corynebacterium appendicis CIP 107643 OX=1161099 GN=fol E PE=3 SV=1
MTENDYAAVEQAEKEERPAFDRERAEAAVRELLLAVGEDPDREGLVDTPARVARAYEEVFAGLHTDPTTVLEKTFAENHEELVLVRDVPIYSTCEHHLVPFYGVAHIGYIPGEDGHVTGLSKLARLADMYAKRPQVQERLTSQIADALVDKLHAQSVIVVIECEHLCMAMRGIRKPGAMTTTSAVRGGFKRNAASRAEVLSLIRG

SEQ ID NO: 7027 - protein, 189 aa, Corynebacterium aquilae
  misc_feature (1)..(189): tr|A0A1L7CI55|A0A1L7CI55_9CORY GTP cyclohydrolase 1 OS= Corynebacterium aquilae DSM 44791 OX=1431546 GN=folE PE =3 SV=1
MGEFDSARAEAAVRELLIAVGEDPDREGLKDTPARVARAYEEIFAGLHTDPTVVLEKTFNEDHQELVLVKDIPIYSTCEHHLVPFYGHAHIGYIPGKNGKVTGLSKLARLVDLYAKRPQVQERLTSQVADALVDKLDASAVIVVLECEHLCMAMRGIRKPGARTTTSAVRGGFKTDSRSRAEALSLIRG

SEQ ID NO: 7028 - protein, 187 aa, Corynebacterium argentoratense
  misc_feature (1)..(187): tr|U3GUT8|U3GUT8_9CORY GTP cyclohydrolase 1 OS=Coryneba cterium argentoratense DSM 44202 OX=1348662 GN=folE PE= 3 SV=1
MFDRERAEAAVRELLIAVGEDPDREGLQDTPARVARAYEEVFAGLHVDPTEVLNKTFSEDHQELVLVKDIPIYSTCEHHLVPFFGHAHIGYIPGKNGQVTGLSKLARLVDLFAKRPQVQERLTTQVADAIVEKLGAQSVIVVIECEHLCMAMRGIRKPGARTTTSAVRGGFKANAASRAEVLSLIRG

SEQ ID NO: 7029 - protein, 177 aa, Corynebacterium atypicum
  misc_feature (1)..(177): tr|A0A075TWV3|A0A075TWV3_9CORY GTP cyclohydrolase 1 OS= Corynebacterium atypicum OX=191610 GN=folE PE=3 SV=1
MRELLIAVGEDPDREGLKETPARVARAYKETLAGLFCDPADVLEKVFNEGHQELVLVRDIPVYSTCEHHLLPFIGTAHVGYIPSADGKVTGLSKLARLVDMYAKRPQVQERLTSQVADALVERLHAQSVIVVIECEHLCMAMRGIRKPGAITTTSAVRGGFQRNAASRSEALALIRG

SEQ ID NO: 7030 - protein, 196 aa, Corynebacterium aurimucosum
  misc_feature (1)..(196): sp|C3PJE8|GCH1_CORA7 GTP cyclohydrolase 1 OS=Corynebact erium aurimucosum (strain ATCC 700975 / DSM 44827 / CN- 1) OX=548476 GN=folE PE=3 SV=1
MSDNIPAQREFDHERAEAAVRELLIAVGEDPDREGLRETPARVARAYAEVFAGLHQDPTEVLHKTFAEEHQELVLVRDIPIYSTCEHHLVPFYGTAHIGYIPGTDGHVTGLSKLARLADMYAKRPQVQERLTSQIADALVEVLHAQSVIVVIECEHLCMAMRGIRKPGATTTTSAVRGGFKKNAASRAEVMSLIRS

SEQ ID NO: 7031 - protein, 196 aa, Corynebacterium aurimucosum
  misc_feature (1)..(196): tr|A0A2I1MY40|A0A2I1MY40_9CORY GTP cyclohydrolase 1 OS= Corynebacterium aurimucosum OX=169292 GN=folE PE=3 SV=1
MSDNIPAQREFDHERAEAAVRELLIAVGEDPDREGLRETPARVARAYAEVFAGLHQDPTEVLHKTFAEEHQELVLVRDIPIYSTCEHHLVPFYGKAHIGYIPGPDGHVTGLSKLARLADMYAKRPQVQERLTSQIANALVDVLHAQSVIVVIECEHLCMAMRGIRKPGATTTTSAVRGGFKKNAASRAEVMSLIRS

SEQ ID NO: 7032 - protein, 207 aa, Corynebacterium auriscanis
  misc_feature (1)..(207): tr|A0A0A2DL37|A0A0A2DL37_9CORY GTP cyclohydrolase 1 OS= Corynebacterium auriscanis OX=99807 GN=folE PE=3 SV=1
MSDSPQPIDTDDTGNSFPTFDRERAEAAVRELLFAVGENPDREGLKDTPARVARAYEEIFAGLYTDPTEVLNKTFSEDHRELVLVRDIPFYSTCEHHLVPFFGHAHIGYIPGQSGKVTGLSKLARLIDGLGKRPQVQERLTSQVADALMERLEATAVIVVIEAEHLCMAMRGIRKPGANTVTSAVRGGFRTNASSRAEAMALIQRGR

SEQ ID NO: 7033 - protein, 191 aa, Corynebacterium bovis
  misc_feature (1)..(191): tr|A0A3R8PH92|A0A3R8PH92_9CORY GTP cyclohydrolase 1 OS= Corynebacterium bovis OX=36808 GN=folE PE=3 SV=1
MTGTFDHDRAAAAVRELLLAVGEDPDRPGLRDTPDRVARAYRETFAGLYTEPSDVLGTTFEENHRELVLVRDIPIFSTCEHHLVPFHGHAHIGYIPGESGTVTGLSKLARVVDLYARRPQVQERLTTQVADALVDRLDPSAVIVVIECEHMCMAMRGIRKPGASTVTSAVRGTFLDDAAARAEALTLIRGR

SEQ ID NO: 7034 - protein, 196 aa, Corynebacterium callunae
  misc_feature (1)..(196): tr|M1V0A5|M1V0A5_9CORY GTP cyclohydrolase 1 OS=Coryneba cterium callunae DSM 20147 OX=1121353 GN=folE PE=3 SV=1
MDDHVAIREFDEERAVAAVRELLIAVGEDPEREGLQETPARVARAYKEIFAGLHEDPTEVLEKTFSEGHEELVLVREIPIYSTCEHHLVPFFGVAHIGYIPGKSGKVTGLSKLARLADMYAKRPQVQERLTSQIADALVEKLDAQAVAVVIEAEHLCMAMRGIRKPGAVTTTSAVRGGFKNNAASRAEVFTLIRGR

SEQ ID NO: 7035 - protein, 197 aa, Corynebacterium camporealensis
  misc_feature (1)..(197): tr|A0A0F6TC02|A0A0F6TC02_9CORY GTP cyclohydrolase 1 OS= Corynebacterium camporealensis OX=161896 GN=folE PE=3 S V=1
MTNHNVPARAPFDQERAEAAVRELLLAVGEDPDREGLQETPARVARAYKEVFAGLHTDPTEVLHRTFAENHQELVLVRDIPIYSTCEHHLVPFYGTAHIGYIPGKDGHVTGLSKLARLADMYAKRPQVQERLTSQIADALVDVLGAQSVIVVIECEHLCMAMRGIRKPGATTTTSAVRGGFQSNPASRAEVLSLIRS

SEQ ID NO: 7036 - protein, 192 aa, Corynebacterium canis
  misc_feature (1)..(192): tr|A0A5C5UBD0|A0A5C5UBD0_9CORY GTP cyclohydrolase 1 OS= Corynebacterium canis OX=679663 GN=folE PE=3 SV=1
MSEAVFDQARAEAAVRELLFAVGEDPDREGLQDTPARVARAYAEMFVGLHTDPTEVLNKTFSENHQELVLVRDIPIYSTCEHHLVPFYGKAHIGYIPGRSGQVTGLSKLARLVDLFAKRPQVQERLTSQVADALVDKLGAQAVIVVIECEHLCMAMRGIRKPGTTTTTSAVRGLFQRNAASRAEVLSLIRGS

SEQ ID NO: 7037 - protein, 197 aa, Corynebacterium casei
  misc_feature (1)..(197): tr|W5XVU7|W5XVU7_9CORY GTP cyclohydrolase 1 OS=Coryneba cterium casei LMG S-19264 OX=1285583 GN=folE PE=3 SV=1
MSDNSIPARKPFDQARAEAAIRELLIAVGEDPEREGLQETPARVARSYAEIFSGLHTDPTEVLNKTFAEDHQELVLVRDIPIYSTCEHHLVPFYGVAHIGYIPGNDGKVTGLSKLSRLADGFAKRPQVQERLTRQIADALTEELGAQSVIVVIECEHLCMGMRGVRKPGAVTTTSAVRGGFKNNSASRAEVMSLIRS

SEQ ID NO: 7038 - protein, 197 aa, Corynebacterium casei
  misc_feature (1)..(197): tr|G7HYB5|G7HYB5_9CORY GTP cyclohydrolase 1 OS=Coryneba cterium casei UCMA 3821 OX=1110505 GN=folE PE=3 SV=1
MSDNSIPARKPFDQARAEAAIRELLIAVGEDPEREGLQETPARVARSYAEIFSGLHTDPTEVLNKTFAEDHQELVLVRDIPIYSTCEHHLVPFYGVAHIGYIPGKDGKVTGLSKLSRLADGFAKRPQVQERLTRQIADALTEELGAQSVIVVIECEHLCMGMRGVRKPGAVTTTSAVRGGFKNNSASRAEVMSLIRS

SEQ ID NO: 7039 - protein, 200 aa, Corynebacterium choanis
  misc_feature (1)..(200): tr|A0A3G6J491|A0A3G6J491_9CORY GTP cyclohydrolase 1 OS= Corynebacterium choanis OX=1862358 GN=folE PE=3 SV=1
MTDQQSHEVSGIDLPRAERAIRELLLAVGEDPDREGLRETPRRVAKAYAEIFAGMHVDPAAQLEKTFDEDHQELVLVRDIPIYSTCEHHLVPFFGHAHIGYIPSEEGTVTGLSKLARLADLYAKRPQVQERLTSQIADALVDKLNPQAVIVVVECEHLCMAMRGIRKPGAKTITSAVRGGFKTNAASRAEALSLISRRDR

SEQ ID NO: 7040 - protein, 191 aa, Corynebacterium coyleae
  misc_feature (1)..(191): tr|A0A1H4JKH4|A0A1H4JKH4_9CORY GTP cyclohydrolase 1 OS= Corynebacterium coyleae OX=53374 GN=folE PE=3 SV=1
MTTPKFDHERAEAAVRELLIAVGEDPDREGLVETPARVARAYAEVFAGLHEDPKVHLEKSFSENHRELVLVRDIPIYSTCEHHLVPFYGVAHIGYIPGQDGKVTGLSKLARVADMYAKRPQVQERLTAQIADAIVEKLDASAVIVVIECEHLCMAMRGIRKPGATTTTSAVRGGFQKNAASRAEVMSLIRG

SEQ ID NO: 7041 - protein, 196 aa, Corynebacterium crenatum
  misc_feature (1)..(196): tr|R0JQ08|R0JQ08_CORCT GTP cyclohydrolase 1 OS=Coryneba cterium crenatum MT OX=1310164 GN=folE PE=3 SV=1
MDNHAAVREFDEERATAAIRELLIAVGEDPDREGLLETPARVARAYKETFAGLHEDPTTVLEKTFSEGHEELVLVREIPIYSMCEHHLVPFFGVAHIGYIPGKSGKVTGLSKLARLADMFAKRPQVQERLTSQIADALVEKLDAQAVAVVIEAEHLCMAMRGIRKPGAVTTTSAVRGGFKNNAASRAEVFSLIRGH

SEQ ID NO: 7042 - protein, 201 aa, Corynebacterium crudilactis
  misc_feature (1)..(201): tr|A0A172QVZ1|A0A172QVZ1_9CORY GTP cyclohydrolase 1 OS= Corynebacterium crudilactis OX=1652495 GN=folE PE=3 SV= 1
MKETTVDNHAAVREFDEERATAAIRELLIAVGEDPDREGLLETPARVARAYKETFAGLHEDPTTVLEKTFSEGHEELVLVREIPIYSMCEHHLVPFYGVAHIGYIPGKSGKVTGLSKLARLADMYAKRPQVQERLTSQIADALVDKLDAQAVAVVIEAEHLCMAMRGIRKPGAVTTTSAVRGGFKTNAASRAEVFSLIRGR

SEQ ID NO: 7043 - protein, 1048 aa, Corynebacterium cystitidis
  misc_feature (1)..(1048): tr|A0A1H9V6X9|A0A1H9V6X9_9CORY Multifunctional fusion p rotein OS=Corynebacterium cystitidis DSM 20524 OX=11213 57 GN=folE PE=3 SV=1
MKNSKVVRYGIIAAVVLMILYLFTLLGDETRSFQRVETSVAMEQLKNQNVKEVQIDDREQRLRITLNEPITVEEREGVEEIMAQYPARTTPQVFDAVANSGAEKYTTNVTQESFLMSMLGFMLPMILIFGLLFFFMYRMQSGGIFGIGGSKAKEMTKDNPDTTFEDVAGADDAVDELQEVVDFLKDPTIYERLGAKIPRGVLLYGPPGTGKTLLARAVAGEAGVPFYTISGSDFVEMFVGVGASRVRDLFKQARENSPCIIFIDEIDAVGRQRGSGMGGGHDEREQTLNQLLVEMDGFGDREGVILMAATNRPDILDPALLRPGRFDRQIPVTNPDLAGRAQILKVHAQGKPLADDANLDSLAKRTAGMSGADLANVLNEAALLTARIGGNVITADALEEATDRVIGGPRRSSRVISEREKKITAYHEGGHTLSAWALKDIERVYKVTILARGRTGGHAMTAAEDDKGMYNRDELYARLVFAMGGRAAEELVFGEVTTGASADIEQATKIARAMVTEYGMSSTLGTVKYGEEQGDPFSGHGAGGALDYSPHVAETIDREVHALIDAAHERAYAILRDHRDYLDTLATKLLEKETLRRPDLEVIFDDIDPQPSGLELLDERFPQQPGYEPVKTPVELAEERGEEPPKQFSLLEASRAARAKREKERAERAKRDSTAPKWAGTGSTSINAGSWPGQPGQPGQPGQPGTAGPQVPPRYGGEQPPANWHVPGGAWPGQDGTNQPVQPVQPAQPDQPNSPQRPAEHPGIKNYGAGQPKQSSTLEPEEQIGFRLPEHERPDHAWPSEEKPHRCQRLTRPMSPARTSLSHSFPMGTTLIPPVMAIQESIGRTDRMDRVDNSTNIPAIAEFDHARAEAAVRELLIAIGEDPEREGLQDTPGRVARAYAEIFAGLHEDPTEVLGTTFAEDHQELVLVRDIPIYSTCEHHLVPFYGKAHIGYIPNKEGKVTGLSKLARLADLYAKRPQVQERLTSQIADALVDKLDAQSVIVVIECEHMCMGMRGIRKPGAITTTSAVRGGFKRNAASRAEVLSLIRR

SEQ ID NO: 7044 - protein, 196 aa, Corynebacterium deserti
  misc_feature (1)..(196): tr|A0A0M3QA32|A0A0M3QA32_9CORY GTP cyclohydrolase 1 OS= Corynebacterium deserti GIMN1.010 OX=931089 GN=folE PE= 3 SV=1
MDNHVAIREFDEERAVAAVRELLIAVGEDPDREGLLETPARVARAYKEIFAGLHEDPTMVLEKTFSEGHEELVLVREIPIYSTCEHHLVPFFGVAHIGYIPGKSGKVTGLSKLARLADMYAKRPQVQERLTSQIADALVEKLDAQAVAVVIEAEHLCMGMRGIRKPGAVTTTSAVRGGFKNNAASRAEVFSLIRGR

SEQ ID NO: 7045 - protein, 190 aa, Corynebacterium diphtheriae
  misc_feature (1)..(190): tr|A0A3M8PV27|A0A3M8PV27_CORDP GTP cyclohydrolase 1 OS= Corynebacterium diphtheriae OX=1717 GN=folE PE=3 SV=1
MTAQFDQQRAEAAVRELLIAVGEDPDREGLQETPARVAKAYAEMFAGLHTDPTEVLAKTFSEDHREVVLVRDIPIYSTCEHHLVPFFGKAHIGYIPGESGKVTGLSKLARLVDLYAKRPQVQERLTTQVADALVNKLQAQAVIVVIECEHLCMAMRGIRKPGAVTTTSAVRGGFKTNAASRAEVLSLIRS

SEQ ID NO: 7046 - protein, 190 aa, Corynebacterium diphtheriae
  misc_feature (1)..(190): tr|A0A0F5D962|A0A0F5D962_CORDP GTP cyclohydrolase 1 OS= Corynebacterium diphtheriae OX=1717 GN=folE PE=3 SV=1
MTAQFDQQRAEAAVRELLIAVGEDPDREGLQETPARVAKAYAEMFAGLHTDPTEVLAKTFSEDHREVVLVRDIPIYSTCEHHLVPFFGKAHIGYIPGESGKVTGLSKLARLVDLYAKRPQVQERLTTQVADALVDKLQAQAVIVVIECEHLCMAMRGIRKPGAVTTTSAVRGGFKTNAASRAEVLSLIRS

SEQ ID NO: 7047 - protein, 196 aa, Corynebacterium doosanense
  misc_feature (1)..(196): tr|A0A097II97|A0A097II97_9CORY GTP cyclohydrolase 1 OS= Corynebacterium doosanense CAU 212 = DSM 45436 OX=55817 3 GN=folE PE=3 SV=1
MISEVEFPENFDAPRAEAAIRELLIAVGEDPDREGLQDTPARVARAYAENFAGLHKDPTEVLERTFSEHHQELVLIKDIPIYSMCEHHLLPFYGHAHIGYIPNREGRVTGLSKLARLADLYAKRPQVQERLTSQIADAIQEKLQAQSVIVVIECEHLCMGMRGIRKPGAMTTTSAVRGGFKRSAASRAEVLSLIRD

SEQ ID NO: 7048 - protein, 192 aa, Corynebacterium durum
  misc_feature (1)..(192): tr|L1M9C4|L1M9C4_9CORY GTP cyclohydrolase 1 OS=Coryneba cterium durum F0235 OX=1035195 GN=folE PE=3 SV=1
MPSGVFDRERAEAAVRELLIAVGEDPDREGLLETPARVARAYAEMFAGLHTEPTDVLNKTFSEDHQELVLVRDIPIYSTCEHHLVPFFGVAHIGYIPGESGQVTGLSKLARLVDLFAKRPQVQERLTSQVADALVDKLGAQAVIVVIECEHLCMAMRGIRKPGAMTTTSAVRGGFKRNASSRAEALALIRGH

SEQ ID NO: 7049 - protein, 197 aa, Corynebacterium efficiens
  misc_feature (1)..(197): sp|Q8FMG3|GCH1_COREF GTP cyclohydrolase 1 OS=Corynebact erium efficiens (strain DSM 44549 / YS-314 / AJ 12310 / JCM 11189 / NBRC 100395) OX=196164 GN=folE PE=3 SV=1
MADKLGAVREFDQERAEAAVRELLIAVGENPEREGLLETPARVARAYREIFAGLHEDPTAVLNKTFSEDHQELVLVREIPIYSTCEHHLVPFFGVAHIGYIPGESGQVTGLSKLARLADMYAKRPQVQERLTSQIADALVDKLGAQSVAVVIEAEHLCMGMRGIRKPGAVTTTSAVRGGFKTSMASRAEVFALIRGN

SEQ ID NO: 7050 - protein, 197 aa, Corynebacterium endometrii
  misc_feature (1)..(197): tr|A0A4P7QJL5|A0A4P7QJL5_9CORY GTP cyclohydrolase 1 OS= Corynebacterium endometrii OX=2488819 GN=folE PE=3 SV=1
MTKKQTHTPGTFDQARAEAAVRELLIAVGEDPDREGLVETPARVARAYAECFAGLYTDPTEVLAKTFAEDHQELVLVRDIPIYSTCEHHLVPFYGKAHIGYIPGKEGHVTGLSKLARLADMYAKRPQVQERLTTQIADALVEKLHAQSVIVVLECEHLCMAMRGIRKPGAMTTTSAVRGGFKKNPASRAEVLSLIRG

SEQ ID NO: 7051 - protein, 195 aa, Corynebacterium epidermidicanis
  misc_feature (1)..(195): tr|A0A0G3GTX0|A0A0G3GTX0_9CORY GTP cyclohydrolase 1 OS= Corynebacterium epidermidicanis OX=1050174 GN=folE PE=3 SV=1
MTDPLPANIDHARAEAAVRELLIAVGEDPDREGLRETPARVARAYAEVFAGLHVDPTEVLNKTFSEDHRELVLVRDIPIYSTCEHHLVPFFGKAHIGYIPGKDGKVTGLSKLARLVDMYAKRPQVQERLTSQVADALLHKLDAHAVIVVIECEHLCMAMRGIRKPGAVTTTSAVRGGFQTNAASRAEVLSLIRGA

SEQ ID NO: 7052 - protein, 192 aa, Corynebacterium falsenii
  misc_feature (1)..(192): tr|A0A418Q4Z6|A0A418Q4Z6_9CORY GTP cyclohydrolase 1 OS= Corynebacterium falsenii OX=108486 GN=folE PE=3 SV=1
MSYPEFDQPRAEAAIRELLFAIGEDPDREGLVETPARVARAYKEACAGLHTDPTAVLEKTFNEDHQELVLVRDITFYSMCEHHLVPFFGKAHVGYIPGEEGKVTGLSKLARLVDGLAKRPQVQERLTSQIANALVERLDPTAVVAVLEAEHLCMAMRGIRKPGATTVTSAVRGLFQTSATSRAEAMALIRGH

SEQ ID NO: 7053 - protein, 197 aa, Corynebacterium flavescens
  misc_feature (1)..(197): tr|A0A1L7CQ11|A0A1L7CQ11_CORFL GTP cyclohydrolase 1 OS= Corynebacterium flavescens OX=28028 GN=folE PE=3 SV=1
MTSSEIPAIAAFDQDRAEAAVRELLLAVGEDPDREGLRETPARVARSYREVFAGLHEDPTEVLHKTFSEEHQELVLVRDIPIYSTCEHHLVPFFGVAHIGYIPGKDGRVTGLSKLARLADVYAKRPQVQERLTRQVADALVSVLGAQSVIVVIECEHLCMAMRGIRKPGATTTTSAVRGGFKTNAASRAEVLSLIRS

SEQ ID NO: 7054 - protein, 969 aa, Corynebacterium flavescens
  misc_feature (1)..(969): tr|A0A4Y3US87|A0A4Y3US87_CORFL Multifunctional fusion p rotein OS=Corynebacterium flavescens OX=28028 GN=ftsH P E=3 SV=1
MKITRNKNILRYGAIAALVLIAIYSFTFFTNDSRSYMPVDTSVAVQQLQDKNVAEAQIDDREQQVRLKLKNPVKVEEREGVEEVIAKYPARAGEQIFNAVKDSGADKYQTKVTQESFFGSMISFLLPMLILFAFLFWFMSRMQQNGGGMFGIGGSKAKELTKDMPTNTFADVAGADEAVDELREIKDFLDNPDRYYALGAKIPRGVLLYGPPGTGKTLLARAVAGEAGVPFYSISGSDFVEMFVGVGASRVRDLFKQAKENSPCIIFVDEIDAVGRQRGSGTGGGHDEREQTLNQLLVEMDGFGDREGVILIAATNRPDILDPALLRPGRFDRQIPVTNPDLAGREQILRVHAKDKPLAKEVDVAQLAKRTAGMSGADLANVLNEAALLTARIGGNVITYDALEEATDRVVGGPRRQGKIISEHEKKVTAYHEGGHTLAAWALKDIERVYKVTILARGRTGGHAMTAQEDDKGMYTRDELFARLVFAMGGRAAEELVFGAPTTGASSDIENATKIARSMLTEYGFSPDLGTVKYGKEQGDPFGYGMGGGSIEYSDAVAARIDDQLRYLLDRAHQQAYDILAQHRDYLDKLADLLLEKETVRRPDLERIFTGIEPRPAFDVFPNEDDRFPRQAGREPVKTPVELAQARGEEIPKRMTLLDASRAARERRQAGEEAKGQIGFNFGQHAGDVVDESVESTESSAGKRAQKAQRTLRAQRVPRTPRAQGIPRLSRNHPRSWPGGGTPSRAITGLCPAWKSRARTLMPPAPTRKKEKMTSSEIPAIAAFDQDRAEAAVRELLLAVGEDPDREGLRETPARVARSYREVFAGLHEDPTEVLHKTFSEEHQELVLVRDIPIYSTCEHHLVPFFGVAHIGYIPGKDGRVTGLSKLARLADVYAKRPQVQERLTRQVADALVSVLGAQSVIVVIECEHLCMAMRGIRKPGATTTTSAVRGGFKTNAASRAEVLSLIRS

SEQ ID NO: 7055 - protein, 196 aa, Corynebacterium frankenforstense
  misc_feature (1)..(196): tr|A0A1L7CUL6|A0A1L7CUL6_9CORY GTP cyclohydrolase 1 OS= Corynebacterium frankenforstense DSM 45800 OX=1437875 G N=folE PE=3 SV=1
MEGTAESGRHFDQERAEAAVRELLIAVGEDPDREGLRETPARVARAYKETLAGLFCDPADVLEKVFNEGHQELVLVRDIPVYSTCEHHLLPFLGKAHVGYIPSVDGKVTGLSKLARLVDMYAKRPQVQERLTSQVADALVERLHAQSVIVVIECEHLCMAMRGIRKPGAVTTTSAVRGGFQRNSASRAEALSLIRG

SEQ ID NO: 7056 - protein, 198 aa, Corynebacterium freneyi
  misc_feature (1)..(198): tr|A0A095XXP3|A0A095XXP3_9CORY GTP cyclohydrolase 1 OS= Corynebacterium freneyi DNF00450 OX=1287475 GN=folE PE= 3 SV=1
MAAGHATDSGTFDQPRAEAAVRELLLAVGEDPDREGLRETPARVARAYREVFAGLHVEPSEVLEKTFDEGHQELVLVKDIPIYSTCEHHLVPFFGKAHIGYIPGPKGRVTGLSKLARLVDLYAKRPQVQERLTGQVADALVEKLRPTSAIVVIECEHLCMAMRGIRKPGATTITSAVRGGFKSDARSRAEAMSLITGR

SEQ ID NO: 7057 - protein, 230 aa, Corynebacterium genitalium
  misc_feature (1)..(230): tr|D7W9Y8|D7W9Y8_9CORY GTP cyclohydrolase 1 OS=Coryneba cterium genitalium ATCC 33030 OX=585529 GN=folE PE=3 SV =1
MTVTKPEDNVDNIDDIVNPGLLAGDEEVEPIVEPGTGDGSGRPAFDRERAEAAVRELLLAVGEDPDREGLVDTPARVARAYEEVFAGLHVDPTEVLDKTFAENHEELVLVRDVPIYSTCEHHLVPFYGVAHIGYIPGSDGHVTGLSKLARLADMYAKRPQVQERLTSQIADALVDKLQAQSVIVVIECEHLCMAMRGIRKPGATTTTSAVRGGFKRNAASRAEVLSLIRG

SEQ ID NO: 7058 - protein, 191 aa, Corynebacterium genitalium; identical to SEQ ID NO: 7022
  misc_feature (1)..(191): tr|A0A433G9I4|A0A433G9I4_9CORY GTP cyclohydrolase 1 OS= Corynebacterium genitalium OX=38288 GN=folE PE=3 SV=1

SEQ ID NO: 7059 - protein, 188 aa, Corynebacterium geronticis
  misc_feature (1)..(188): tr|A0A3G6J3G2|A0A3G6J3G2_9CORY GTP cyclohydrolase 1 OS= Corynebacterium geronticis OX=2079234 GN=folE PE=3 SV=1
MAIDQARAEAAVRELLIAVGEDPDREGLLETPARVARAYAEMFAGLHEDPTEVLSKTFSEDHRELVLVRDIPIYSTCEHHLVPFFGVAHIGYIPGESGKVTGLSKLARLVDMFAKRPQVQERLTSQVADALVDKLQAHSVIVVIECEHLCMAMRGIRKPGATTTTSAVRGGFQRNAASRAEALSLIRG

SEQ ID NO: 7060 - protein, 390 aa, Corynebacterium geronticis
  misc_feature (1)..(390): tr|A0A3G6J1E4|A0A3G6J1E4_9CORY GTP cyclohydrolase 1 typ e 2 OS=Corynebacterium geronticis OX=2079234 GN=CGERO_0 7725 PE=4 SV=1
MSTLESSTHDHRAPATVADVVEVLEAAYPPHLAESWDAVGLVCGDPEAAVNTVCFALDCTLEVAQEAVNQGADMLVVHHPLLLRGVNSVAANTPKGKVIHTLIRAGVALFAAHTNADSARPGVNDKLAELCGITPGRPIAPKQQGLDKWGVQVPPQHAETLKEAIFGAGAGHIGEYSECAFNISGEGEFLPGSHANPTIGEAGKREVLQELRIECVAPRHRRGAILEALRSAHPYEEPAFDITALEASQPLDEACGLGRIGELDTPMRFEDYVQFIADQLPETTWGVRAAGDPERMVHTIAVSSGAGDSFLETAANLGVDVFLTSDLRHHPVDETLRAHDICVIDTAHWASEFPWTEQASRIVQQSLRHIDTKVLHIRTDPWTLSKHPQR

SEQ ID NO: 7061 - protein, 213 aa, Corynebacterium glaucum
  misc_feature (1)..(213): tr|A0A1Q2HZ17|A0A1Q2HZ17_9CORY GTP cyclohydrolase 1 OS= Corynebacterium glaucum OX=187491 GN=folE PE=3 SV=1
MSDNANILDPEQVSPGASDHLVAAKGTFDRERAEAAVRELLIAVGENPDREGLIETPARVARAYEECFAGLHTEPTEVLEKTFAENHRELVLVRDIPIYSTCEHHLVPFYGKAHIGYIPGKEGKVTGLSKLARLADLYAKRPQVQERLTAQIADALVSKLGASAVIVVIECEHLCMAMRGIRKPGAVTTTSAVRGGFQNNPASRAEVMSLIRS

SEQ ID NO: 7062 - protein, 189 aa, Corynebacterium glucuronolyticum
  misc_feature (1)..(189): tr|C2GEG7|C2GEG7_9CORY GTP cyclohydrolase 1 OS=Coryneba cterium glucuronolyticum ATCC 51866 OX=548478 GN=folE P E=3 SV=1
MADFDFERAQAAVRELLIAIGEDPDRPGLKETPRRVAKAFEENTGGLHINPADHLEKTFPENHTELVIVRDIPIYSMCEHHLLPFYGVAHIGYIPGGHGSVTGLSKLARLADGYARRPQVQERLTSQIADALVDRLDTQAVAVVLECEHMCMTMRGIRKPGSKTTTSAMRGGFKTSAASRAEFLTLIRG

SEQ ID NO: 7063 - protein, 189 aa, Corynebacterium glucuronolyticum; identical to SEQ ID NO: 7062
  misc_feature (1)..(189): tr|A0A1W1UNH7|A0A1W1UNH7_9CORY GTP cyclohydrolase 1 OS= Corynebacterium glucuronolyticum OX=39791 GN=folE PE=3 SV=1

SEQ ID NO: 7064 - protein, 196 aa, Corynebacterium glutamicum
  misc_feature (1)..(196): sp|A4QH94|GCH1_CORGB GTP cyclohydrolase 1 OS=Corynebact erium glutamicum (strain R) OX=340322 GN=folE PE=3 SV=1
MDNHAAVREFDEERATAAIRELLIAVGEDPDREGLLETPARVARAYKETFAGLHEDPTTVLEKTFSEGHEELVLVREIPIYSMCEHHLVPFFGVAHIGYIPGKSGKVTGLSKLARLADMLAKRPQVQERLTSQIADALVEKLDAQAVAVVIEAEHLCMAMRGIRKPGAVTTTSAVRGGFKNNAASRAEVFSLIRGH

SEQ ID NO: 7065 - protein, 201 aa, Corynebacterium glutamicum; identical to SEQ ID NO: 5766
  misc_feature (1)..(201): tr|A0A1B4WP45|A0A1B4WP45_CORGT GTP cyclohydrolase 1 OS= Corynebacterium glutamicum OX=1718 GN=folE PE=3 SV=1

SEQ ID NO: 7066 - protein, 204 aa, Corynebacterium glyciniphilum
  misc_feature (1)..(204): tr|X5EEY4|X5EEY4_9CORY GTP cyclohydrolase 1 OS=Coryneba cterium glyciniphilum AJ 3170 OX=1404245 GN=folE PE=3 S V=1
MTDSVTDSDNSRDGGRVFDQARAEAAVRELLLAVGEDPDREGLQETPARVARAYRESFGGLYEDPAEVLAKTFNEDHRELVLVKDIPIYSTCEHHLVPFYGHAHIGYIPGESGTVTGLSKLARLADGYAKRPQVQERLTSQIADAVSERLQAHAVIVVIEAEHLCMAMRGIRKPGASTVTSAVRGGFREDARSRAEALSLIRGH

SEQ ID NO: 7067 - protein, 190 aa, Corynebacterium godavarianum
  misc_feature (1)..(190): tr|A0A556Q8W5|A0A556Q8W5_9CORY GTP cyclohydrolase 1 OS= Corynebacterium godavarianum OX=2054421 GN=folE PE=3 SV =1
MTNKFDQQRAEAAVRELLIAVGEDPDREGLKETPARVARAYEEVFAGLHTDPTEVLEKTFAENHQELVLVRDIPIYSTCEHHLVPFYGKAHVGYIPGKDGKVTGLSKLARLTDMYAKRPQVQERLTGQVADAIVDKLGASAVIVVVECEHLCMAMRGIRKPGAVTTTSAVRGGFQSNAASRAEVMSLIRS

SEQ ID NO: 7068 - protein, 190 aa, Corynebacterium gottingense; identical to SEQ ID NO: 7067
  misc_feature (1)..(190): tr|A0A3M0UBZ8|A0A3M0UBZ8_9CORY GTP cyclohydrolase 1 OS= Corynebacterium gottingense OX=2041036 GN=folE PE=3 SV= 1

SEQ ID NO: 7069 - protein, 190 aa, Corynebacterium hadale; identical to SEQ ID NO: 7067
  misc_feature (1)..(190): tr|A0A269PF69|A0A269PF69_9CORY GTP cyclohydrolase 1 OS= Corynebacterium hadale OX=2026255 GN=folE PE=3 SV=1

SEQ ID NO: 7070 - protein, 190 aa, Corynebacterium halotolerans
  misc_feature (1)..(190): tr|M1N0G0|M1N0G0_9CORY GTP cyclohydrolase 1 OS=Coryneba cterium halotolerans YIM 70093 = DSM 44683 OX=1121362 G N=folE PE=3 SV=1
MSGNFDQARAEAAVRELLLAVGEDPDREGLKETPARVARACQEVFAGLHEEPAEVLAKTFAEDHQELVLVRDIPIYSLCEHHLLPFYGMAHIGYIPDENGRVTGLSKLARLVDLYAKRPQVQERLTSQVADALMEHLGAQSVIVVIECEHLCMGMRGIRKPGATTTTSAVRGGFRTSAASRAEVLSLIKG

SEQ ID NO: 7071 - protein, 197 aa, Corynebacterium heidelbergense
  misc_feature (1)..(197): tr|A0A364V5B9|A0A364V5B9_9CORY GTP cyclohydrolase 1 OS= Corynebacterium heidelbergense OX=2055947 GN=folE PE=3 SV=1
MTSDRPATGKFDHARVEAAVRELLFAVGEDPDREGLRETPARVARAYEEVFSGLFEDPREVLAKTFNEEHRELVLVRDIPFYSTCEHHLVPFYGKAHIGYIPGKEGKVTGLSKLARLIEGYSRRPQVQERLTSQVANALESALGAQAVVVVIEAEHLCMAMRGVRKPGASTVTSAVRGLFQTNPSSRAEAMSLIRGS

SEQ ID NO: 7072 - protein, 197 aa, Corynebacterium heidelbergense
  misc_feature (1)..(197): tr|A0A364VE65|A0A364VE65_9CORY GTP cyclohydrolase 1 OS= Corynebacterium heidelbergense OX=2055947 GN=folE PE=3 SV=1
MTSDRPATGKFDHARVEAAVRELLFAVGEDPDREGLRETPARVARAYEEVFSGLFEDPREVLAKTFNEEHRELVLVRDIPFYSTCEHHLVPFYGKAHIGYIPGKEGKVTGLSKLARLIEGYSRRPQVQERLTSQVANALESALGAQAVVVVIEAEHLCMAMRGVRKPGANTVTSAVRGLFQTNPSSRAEAMSLIRGS

SEQ ID NO: 7073 - protein, 193 aa, Corynebacterium humireducens
  misc_feature (1)..(193): tr|A0A0B5D507|A0A0B5D507_9CORY GTP cyclohydrolase 1 OS= Corynebacterium humireducens NBRC 106098 = DSM 45392 OX =1223515 GN=folE PE=3 SV=1
MTDTHNAFDRERAEAAVRELLIAVGEDPDREGLRDTPARVARAYEEVFAGLHCDPTDVLERTFAEDHQELVLVRDIPIYSTCEHHLVPFYGKAHIGYIPGRNGHVTGLSKLARLADMYAKRPQVQERLTSQIADALVDKLGAQAVIVVIECEHLCMAMRGIRKPGSTTTTSAVRGGFKTSAASRAEVLSLIRG

SEQ ID NO: 7074 - protein, 190 aa, Corynebacterium imitans
  misc_feature (1)..(190): tr|A0A076NTI9|A0A076NTI9_9CORY GTP cyclohydrolase 1 OS= Corynebacterium imitans OX=156978 GN=folE PE=3 SV=1
MTNNFDHARAEAAVRELLIAVGEDPDREGLKETPARVARAYEEVFAGLHTDPTEVLEKTFAENHQELVLVHDIPIYSTCEHHLVPFYGKAHVGYIPGKDGKVTGLSKLARLADLYAKRPQVQERLTGQVADAIVEKLGASAVIVVVECEHLCMAMRGIRKPGAITTTSAVRGGFQKNAASRAEVLSLIRR

SEQ ID NO: 7075 - protein, 198 aa, Corynebacterium jeikeium
  misc_feature (1)..(198): tr|A0A381KH45|A0A381KH45_CORJE GTP cyclohydrolase 1 OS= Corynebacterium jeikeium OX=38289 GN=folE PE=3 SV=1
MNNPQQPLDPGSFDQERAEAAIRELLFAIGEDPDREGLQETPARVARAYRETCAGLYEDPTEVLNKTFSEDHRELVLVRDITFYSMCEHHLVPFFGKAHIGYIPGESGKVTGLSKLARLIDGLAKRPQVQERLTSQVADALVEKLDPSAVIVVLEAEHLCMAMRGIRKPGANTVTSAVRGGFQKNAASRAEAMALIRP

SEQ ID NO: 7076 - protein, 198 aa, Corynebacterium jeikeium
  misc_feature (1)..(198): tr|A0A2X4TB72|A0A2X4TB72_CORJE GTP cyclohydrolase 1 OS= Corynebacterium jeikeium OX=38289 GN=folE PE=3 SV=1
MNNPQQPLDPGSFDQERAEAAIRELLFAIGEDPDREGLQETPARVARAYRETCAGLYEDPTEVLNKTFSEDHRELVLVRDITFYSMCEHHLVPFFGKAHIGYIPGESGKVTGLSKLARLIDGLAKRPQVQERLTSQVADALVDKLDPSAVIVVLEAEHLCMAMRGIRKPGANTVTSAVRGGFQKNAASRAEAMALIRP

SEQ ID NO: 7077 - protein, 197 aa, Corynebacterium kefirresidentii
  misc_feature (1)..(197): tr|A0A243VIL1|A0A243VIL1_9CORY GTP cyclohydrolase 1 OS= Corynebacterium kefirresidentii OX=1979527 GN=folE PE=3 SV=1
MPDNHIPARAPFDQDRAEAAVRELLLAVGEDPDREGLRETPARVARAYREVFAGLHEDPTEVLHKTFAEDHQELVLVRDIPIYSTCEHHLVPFYGVAHIGYIPGKDGHVTGLSKLARLADMYAKRPQVQERLTQQVADALVEVLGAQSVIVVIECEHLCMAMRGIRKPGATTTTSAVRGGFKNNAASRAEVLSLIRS

SEQ ID NO: 7078 - protein, 188 aa, Corynebacterium kroppenstedtii
  misc_feature (1)..(188): tr|C4LKM0|C4LKM0_CORK4 GTP cyclohydrolase 1 OS=Coryneba cterium kroppenstedtii (strain DSM 44385 / JCM 11950 / CIP 105744 / CCUG 35717) OX=645127 GN=folE PE=3 SV=1
MAVDHERARAAVRDLLIAVGEDPDREGLVDTPERVARAYEEIFAGLHQDPSEVLTKTFNEDHRELVLVRDIPVYSTCEHHLVPFYGKAHIGYIPGKSGKVTGLSKLARLVDLYAKRPQVQERLTKQVADAMVNRLQPQAVIVVIECEHLCMAMRGIRKPGATTTTSAVRGGFQTNPASRAEVLSLIRG

SEQ ID NO: 7079 - protein, 188 aa, Corynebacterium kroppenstedtii
  misc_feature (1)..(188): tr|A0A133Z5S4|A0A133Z5S4_9CORY GTP cyclohydrolase 1 OS= Corynebacterium kroppenstedtii OX=161879 GN=folE PE=3 S V=1
MAVDHERARAAVRDLLIAVGEDPDREGLVDTPERVARAYEEIFAGLHQDPSEVLTKTFNEDHRELVLVRDIPVYSTCEHHLVPFYGKAHIGYIPGKSGKVTGLSKLARLVDLYAKRPQVQERLTKQVADAMVKRLQPQAVIVVIECEHLCMAMRGIRKPGATTTTSAVRGGFQTNPASRAEVLSLIRG

SEQ ID NO: 7080 - protein, 191 aa, Corynebacterium kutscheri
  misc_feature (1)..(191): tr|A0A0F6R0Z7|A0A0F6R0Z7_9CORY GTP cyclohydrolase 1 OS= Corynebacterium kutscheri OX=35755 GN=folE PE=3 SV=1
MPKAFDYQRAEAAIRELLFAVGEDPDREGLAETPARVARAYAEIFAGLHSDPTEVLEKTFAEDHRELVLVKDIPIYSTCEHHLVPFFGVAHIGYIPGESGQVTGLSKLARLVDLYAKRPQVQERLTSQVADALVAKLGAQSVIVVIECEHLCMAMRGIRKPGASTTTSAVRGGFRSNAASRAEALSLIRGS

SEQ ID NO: 7081 - protein, 191 aa, Corynebacterium lactis
  misc_feature (1)..(191): tr|A0A0K2H2B5|A0A0K2H2B5_9CORY GTP cyclohydrolase 1 OS= Corynebacterium lactis RW2-5 OX=1408189 GN=folE PE=3 SV =1
MEENFDQARAEAAVRELLLAVGEDPDREGLLETPARVARAYREIFAGLYTDPSEVLAKTFSEDHQELVLVKDIPIYSTCEHHLVPFFGVAHIGYIPGKDGKVTGLSKLARLVDLYAKRPQVQERLTSQVADAIVEKLDPASAIVVIECEHLCMAMRGIRKPGATTVTSAVRGGFKSDARSRAEAMALIRKN

SEQ ID NO: 7082 - protein, 191 aa, Corynebacterium lipophiloflavum
  misc_feature (1)..(191): tr|C0XP51|C0XP51_CORLD GTP cyclohydrolase 1 OS=Coryneba cterium lipophiloflavum (strain DSM 44291 / CCUG 37336) OX=525263 GN=folE PE=3 SV=1
MSARAFDRDRAEAAVRELLIAVGEDPDREGLAETPARVARAYEEVFAGLHSEPTDVLEKTFAENHQELVLVRDIPIYSTCEHHLVPFFGTAHIGYIPGPDGKVTGLSKLARLADLYAKRPQVQERLTAQIADALVDKLGAQAVIVVIECEHLCMAMRGIRKPGAVTTTSAVRGGFQHNAASRSEVLSLIRR

SEQ ID NO: 7083 - protein, 192 aa, Corynebacterium lowii
  misc_feature (1)..(192): tr|A0A0Q0YHS1|A0A0Q0YHS1_9CORY GTP cyclohydrolase 1 OS= Corynebacterium lowii OX=1544413 GN=folE PE=3 SV=1
MSAEKNFDQARAEAAVRELLLAVGEDPDREGLRETPARVARAYRETFGGLHADPTEVLDKVFHEDHQELVLVRDIPVYSTCEHHLLPFLGKAHIGYIPNKQGMVTGLSKLARLVDLYARRPQVQERLTSQVADALVEKLGAQSVIVVIECEHLCMAMRGIRKPGAVTTTSAVRGGFKASAASRAEVLSLLKG

SEQ ID NO: 7084 - protein, 274 aa, Corynebacterium lowii
  misc_feature (1)..(274): tr|A0A0Q0UFJ1|A0A0Q0UFJ1_9CORY Putative GTP cyclohydrol ase 1 type 2 OS=Corynebacterium lowii OX=1544413 GN=Clo w_01038 PE=4 SV=1
MNTVARVREVIEEAYPPELAESWDQVGLICGDPQAPVTKVAFALDCTLAVAQRAVEIGAQMLAVHHPLLLRGVHSVAADTPKGKVLHTLITGGVALIAAHTNADSARPGVNDRLAQLVGITPGRPIKPTDPTFQPLNEATGLGRVGELPAPMRLGDFVQQVADALPETAWGVRATGDPEQMVRTVAVSSGSGDSFLDAVRDLGVDVYVTSDLRHHPVDEYLRAGGPAVIDTAHWASEFPWTSQAAEIVAKQTGLDTEVIDIRTDPWTISAHPRG

SEQ ID NO: 7085 - protein, 202 aa, Corynebacterium macginleyi
  misc_feature (1)..(202): tr|A0A3M0H2K6|A0A3M0H2K6_9CORY GTP cyclohydrolase 1 OS= Corynebacterium macginleyi OX=38290 GN=folE PE=3 SV=1
MSENHTDSQQVPARAPYDQERAEAAVRELLLAVGEDPDREGLRETPARVARAYREVFGGLHEDPTEVLHKTFAEDHQELVLVRDIPIYSTCEHHLVPFYGVAHIGYIPGKDGHVTGLSKLARLADMYAKRPQVQERLTQQIADALVNVLEAQSVIVVIECEHLCMAMRGIRKPGATTTTSAVRGGFKNNAASRAEVLSFIRT

SEQ ID NO: 7086 - protein, 190 aa, Corynebacterium marinum
  misc_feature (1)..(190): tr|A0A0B6TU32|A0A0B6TU32_9CORY GTP cyclohydrolase 1 OS= Corynebacterium marinum DSM 44953 OX=1224162 GN=folE PE =3 SV=1
MSNFFDQERAEAAVRELLIAVGEDPDREGLKDTPARVARSYREIFAGLHCDPTEVLHRTFAEDHQELVLVRDIPIYSTCEHHLVPFYGKAHIGYIPGKEGHVTGLSKLARLADMYAKRPQVQERLTSQVADALVETLGAQAVIVVIECEHLCMAMRGIRKPGSTTTTSAVRGGFKTNAASRAEVLSLIRG

SEQ ID NO: 7087 - protein, 197 aa, Corynebacterium maris
  misc_feature (1)..(197): tr|S5SWV7|S5SWV7_9CORY GTP cyclohydrolase 1 OS=Coryneba cterium maris DSM 45190 OX=1224163 GN=folE PE=3 SV=1
MSDTERSLPEGFDQKRAEAAVRELLIAVGEDPDREGLLETPARVARAYAETFAGLHEEPTAVLNKTFDEGHQELVLVRDIPIYSTCEHHLVPFYGTAHIGYIPNQDGKVTGLSKLARVADLYARRPQVQERLTAQIADALVEKLDAQSVIVVIECEHLCMAMRGIRKPGAMTTTSAVRGGFKNSAASRAEVLSLIRS

SEQ ID NO: 7088 - protein, 192 aa, Corynebacterium mastitidis
  misc_feature (1)..(192): tr|A0A2N0X6U9|A0A2N0X6U9_9CORY GTP cyclohydrolase 1 OS= Corynebacterium mastitidis OX=161890 GN=folE PE=3 SV=1
MSAERVFDQRRAEAAVRELLLAVGEDPDREGLRETPARVARAYRETFGGLHADPTEVLDKVFHEDHQELVLVRDIPVYSTCEHHLLPFLGKAHVGYIPNKRGVVTGLSKLARLVDLYARRPQVQERLTSQVADALVDKLQAQSVIVVIECEHLCMAMRGIRKPGAVTTTSAVRGGFKASAASRAEALSLLKG

SEQ ID NO: 7089 - protein, 206 aa, Corynebacterium matruchotii
  misc_feature (1)..(206): tr|E0DDL3|E0DDL3_9CORY GTP cyclohydrolase 1 OS=Coryneba cterium matruchotii ATCC 14266 OX=553207 GN=folE PE=3 S V=1
MAQEFERAEPGWEQSSVSQGVDHERAERAVRELLLAIGEDPDREGLRETPARVARAYAEIFAGLHTDPTAVLDRTFSEDHRELVVVKDIPIYSTCEHHLVPFFGRAHIGYIPGESGKVIGLSKLARVVDLFAKRPQVQERLTRQVADALVTKLEPHGVIVVIECEHLCMAMRGIRKPGAATVTSAVRGGFAHSAKSRAEALSLIRE

SEQ ID NO: 7090 - protein, 206 aa, Corynebacterium matruchotii; identical to SEQ ID NO: 7089
  misc_feature (1)..(206): tr|A0A448TIT2|A0A448TIT2_9CORY GTP cyclohydrolase 1 OS= Corynebacterium matruchotii OX=43768 GN=folE PE=3 SV=1

SEQ ID NO: 7091 - protein, 196 aa, Corynebacterium minutissimum
  misc_feature (1)..(196): tr|A0A2X4RQC3|A0A2X4RQC3_9CORY GTP cyclohydrolase 1 OS= Corynebacterium minutissimum OX=38301 GN=folE PE=3 SV=1
MSDNIPAQREFDHERAEAAVRELLIAVGEDPDREGLRETPARVARAYAEVFAGLHEDPTEVLHKTFAEEHQELVLVRDIPIYSTCEHHLVPFYGTAHIGYIPGPDGHVTGLSKLARLADMYAKRPQVQERLTSQIADALVEVLHAQSVIVVIECEHLCMAMRGIRKPGATTTTSAVRGGFKKNAASRAEVMSLIRS

SEQ ID NO: 7092 - protein, 196 aa, Corynebacterium minutissimum
  misc_feature (1)..(196): tr|A0A0M2XNB6|A0A0M2XNB6_9CORY GTP cyclohydrolase 1 OS= Corynebacterium minutissimum OX=38301 GN=folE PE=3 SV=1
MSDNIPAQRDFDHERAEAAIRELLIAVGEDPDREGLRETPARVARAYAEVFAGLHQDPTEVLHKTFAEEHQELVLVRDIPIYSTCEHHLVPFYGTAHIGYIPGSDGHVTGLSKLARLADMYAKRPQVQERLTSQIADALVEVLHAQSVIVVIECEHLCMAMRGIRKPGATTTTSAVRGGFKKNAASRAEVMSLIRS

SEQ ID NO: 7093 - protein, 189 aa, Corynebacterium mustelae
  misc_feature (1)..(189): tr|A0A0G3H564|A0A0G3H564_9CORY GTP cyclohydrolase 1 OS= Corynebacterium mustelae OX=571915 GN=folE PE=3 SV=1
MGSFDQARAEAAVRELLLAVGEDPDREGLRETPARVARAYAEIFAGLHSDPTEVLNKTFNEDHRELVLVKDIPIYSTCEHHLVPFFGKAHIGYIPGASGKVTGLSKLARLVDLFAKRPQVQERLTSQVADALVDKLEAHSVIVVIECEHLCMAMRGIRKPGASTTTSAVRGGFKRDAASRAEALSLIWG

SEQ ID NO: 7094 - protein, 192 aa, Corynebacterium mycetoides
  misc_feature (1)..(192): tr|A0A1G9P3W5|A0A1G9P3W5_9CORY GTP cyclohydrolase 1 OS= Corynebacterium mycetoides OX=38302 GN=folE PE=3 SV=1
MTVTAKFDRARAEAAVRELLIAVGEDPDREGLVETPARVARSYEEIFVGLHSEPTDVLEKTFAEDHQELVLVHDIPIYSTCEHHLVPFYGKAHIGYIPGPEGKVTGLSKLARLADLYAKRPQVQERLTGQIADALVSKLGAQAVIVVLECEHLCMAMRGIRKPGAVTTTSAVRGGFQHNAASRAEVLSLIRR

SEQ ID NO: 7095 - protein, 192 aa, Corynebacterium nuruki
  misc_feature (1)..(192): tr|A0A3D4SYS1|A0A3D4SYS1_9CORY GTP cyclohydrolase 1 OS= Corynebacterium nuruki OX=1032851 GN=folE PE=3 SV=1
MTGRTFDQERAEAAVRELLIAVGEDPDREGLQETPARVARAYHEIFEGLFTDPSEVLEKTFNENHRELVLVKDIPIYSTCEHHLVPFYGHAHIGYIPGASGKVTGLSKLARLVDGFAKRPQVQERLTSQVADAVAAHLEASAVIVVIECEHLCMAMRGIRKPGATTVTSAVRGGFQTDARTRAEAMSLIRGH

SEQ ID NO: 7096 - protein, 192 aa, Corynebacterium oculi
  misc_feature (1)..(192): tr|A0A0Q0UAM0|A0A0Q0UAM0_9CORY GTP cyclohydrolase 1 OS= Corynebacterium oculi OX=1544416 GN=folE PE=3 SV=1
MSADNAFDQARAEAAVRELLLAVGEDPDREGLRDTPARVARAYRETFGGLHTDPAEVLEKVFHEDHQELVLVRDIPVYSTCEHHLLPFLGKAHIGYIPNKQGMVTGLSKLARLVDLYARRPQVQERLTSQVADALVDKLDAQSVIVVIECEHLCMAMRGIRKPGATTTTSAVRGGFQASAASRAEVLSLIKG

SEQ ID NO: 7097 - protein, 288 aa, Corynebacterium oculi
  misc_feature (1)..(288): tr|A0A0Q1AEP8|A0A0Q1AEP8_9CORY Putative GTP cyclohydrol ase 1 type 2 OS=Corynebacterium oculi OX=1544416 GN=Coc ul_00287 PE=4 SV=1
MNHVNNATVRESGSAITVGEVRAALEAAYPPHLAESWDRVGLICGDPQAPVDTVAFALDCTQAVAERAVEMGAQMLVVHHPLLLRGVHSVAADTPKGRVIHTLIAGGVALMAAHTNADSARPGVNDRLAELVGITPGRPIRPTDPHAERLDEATGLGRIGTLPAAMPLKDFVQQVANALPTTAWGVRAAGDPEQMVRTVAVSSGSGDSFLDAVRELDVDVYVTSDLRHHPVDEYLRAGGPAVIDTAHWASEFPWTQQAAQIVADRTGLRTEVIDIRTDPWTLSAHPQG

SEQ ID NO: 7098 - protein, 190 aa, Corynebacterium otitidis
  misc_feature (1)..(190): tr|I7LCC0|I7LCC0_9CORY GTP cyclohydrolase 1 OS=Coryneba cterium otitidis ATCC 51513 OX=883169 GN=folE PE=3 SV=1
MSASFDQERAEAAVRELLAAVGEDPDREGLRDTPARVARAFKETFAGLHTDPAKVLERTFDEKHEELVLVKDIPVYSTCEHHLLPFYGTAHIGYIPSKEGRVTGLSKLARLVDMYAKRPQVQERLTTQVADAIVERLDAQAVIVVIECEHLCMAMRGIRKPGANTTTSAVRGGFKHSAASRAEVLSLIKS

SEQ ID NO: 7099 - protein, 188 aa, Corynebacterium pelargi
  misc_feature (1)..(188): tr|A0A410W6Q3|A0A410W6Q3_9CORY GTP cyclohydrolase 1 OS= Corynebacterium pelargi OX=1471400 GN=folE PE=3 SV=1
MSIDHARAEAAVRELLLAIGEDPDREGLQETPARVARAYEEMFAGLHVDPTEVLQKTFSEDHRELVLVRDIPIYSTCEHHLVPFYGVAHIGYIPGESGKVTGLSKLARLVDLYAKRPQVQERLTSQVADALVEKLQAHSVIVVIECEHLCMAMRGIRKPGATTTTSAVRGGFQRNAASRAEALSLIKE

SEQ ID NO: 7100 - protein, 194 aa, Corynebacterium phocae
  misc_feature (1)..(194): tr|A0A1L7D5K7|A0A1L7D5K7_9CORY GTP cyclohydrolase 1 OS= Corynebacterium phocae OX=161895 GN=folE PE=3 SV=1
MSDKATPRFDQERAEAAVRELLLAVGEDPDREGLQETPARVARSYREIFAGLHTDPTEVLAKTFAEDHQELVLVRGIPIYSTCEHHLVPFYGKAHIGYIPGKDGHVTGLSKLARLADMYAKRPQVQERLTSQIADALVEKLHAQSAIVVIEAEHLCMAMRGIRKPGATTTTSAVRGGFKTNPASRAEVMSLIRH

SEQ ID NO: 7101 - protein, 220 aa, Corynebacterium phoceense
  misc_feature (1)..(220): tr|A0A540R5M4|A0A540R5M4_9CORY GTP cyclohydrolase 1 OS= Corynebacterium phoceense OX=1686286 GN=folE PE=3 SV=1
MTNPEATAGSDALTEALTDAAEGGATPDIPAVRAFDQERAEAAVRELLIAVGEDPDREGLQETPARVARAYRETFAGLHEDPTAVLAKTFAEGHQELVLVRDIPIYSTCEHHLLPFYGKAHIGYIPGKDGHVTGLSKLARLADMYAKRPQVQERLTSQIANALMDKLGAQSAIVVIECEHLCMAARGIRKPGSTTTTSAVRGGFKKNAASRAEVMSLIRS

SEQ ID NO: 7102 - protein, 198 aa, Corynebacterium pilosum
  misc_feature (1)..(198): tr|A0A376CKY9|A0A376CKY9_9CORY GTP cyclohydrolase 1 OS= Corynebacterium pilosum OX=35756 GN=folE PE=3 SV=1
MDKNPNIPAVADFDHARAEAAVRELLIAVGEDPDREGLQDTPARVARAYAETFAGLHKDPTEVLGTTFAENHQELVLVRDIPIYSTCEHHLVPFYGKAHIGYIPNKEGKVTGLSKLARLADMYAKRPQVQERLTSQIADALVAKLEAQSVIVVIECEHMCMGMRGIRKPGAITTTSAVRGGFQRNAASRAEVLSLIRG

SEQ ID NO: 7103 - protein, 190 aa, Corynebacterium pollutisoli
  misc_feature (1)..(190): tr|A0A1X7J336|A0A1X7J336_9CORY GTP cyclohydrolase 1 OS= Corynebacterium pollutisoli OX=1610489 GN=folE PE=3 SV= 1
MTNAFDQERAEAAVRELLIAVGEDPDREGLKDTPARVARAYQEVFAGLHSEPTDVLERTFAEDHQELVLVRDIPIYSTCEHHLVPFYGKAHIGYIPGKSGHVTGLSKLARLADMYAKRPQVQERLTSQIADALVDKLGAQAVIVVIECEHLCMAMRGIRKPGSTTTTSAVRGGFKTSAASRAEVLSLIRG

SEQ ID NO: 7104 - protein, 198 aa, Corynebacterium propinquum
  misc_feature (1)..(198): tr|A0A433FGW2|A0A433FGW2_9CORY GTP cyclohydrolase 1 OS= Corynebacterium propinquum OX=43769 GN=folE PE=3 SV=1
MTNAESTGKVGSFDQQRAEAAVRELLFAVGEDPDREGLRDTPARVARAYKESFAGLHEDPTAVLERTFSEDHQELVLVRDIPIYSTCEHHLVPFFGSVHIGYIPGRNGDVTGLSKLARLADLYAKRPQVQERLTSQIADALMNKLQAQSVIVVIECEHLCMAMRGIRKPGAVTTTSAVRGGFRVNASSRAEVMSLIRS

SEQ ID NO: 7105 - protein, 198 aa, Corynebacterium propinquum
  misc_feature (1)..(198): tr|A0A2W5L5V1|A0A2W5L5V1_9CORY GTP cyclohydrolase 1 OS= Corynebacterium propinquum OX=43769 GN=folE PE=3 SV=1
MTNAESTGNVGSFDQQRAEAAVRELLFAVGEDPDREGLRDTPARVARAYKESFAGLHEDPTAVLERTFSEDHQELVLVRDIPIYSTCEHHLVPFFGSVHIGYIPGRNGDVTGLSKLARLADLYAKRPQVQERLTSQIADALMNKLQAQSVIVVIECEHLCMAMRGIRKPGAVTTTSAVRGGFRVNASSRAEVMSLIRS

SEQ ID NO: 7106 - protein, 220 aa, Corynebacterium provencense
  misc_feature (1)..(220): tr|A0A2Z3YTI3|A0A2Z3YTI3_9CORY GTP cyclohydrolase 1 OS= Corynebacterium provencense OX=1737425 GN=folE PE=3 SV= 1
MSATDSTDTPDNVPDKGDDRGTDPVRSLLTGRPFDRQRAEAAVRELLIAVGEDPDREGLQETPARVARAYREIFDGLYRDPAEVLAKTFNEDHRELVLVKDIPIYSTCEHHLVPFYGHAHIGYIPGSDGTVTGLSKLARLVDGFAKRPQVQERLTSQVADAVSGRLRASAVIVVIECEHLCMAMRGIRKPGATTVTSAVRGGFRSDARTRAEAMSLIRGH

SEQ ID NO: 7107 - protein, 127 aa, Corynebacterium pseudodiphtheriticum
  misc_feature (1)..(127): tr|A0A3S0UTN9|A0A3S0UTN9_9CORY GTP cyclohydrolase 1 (Fr agment) OS=Corynebacterium pseudodiphtheriticum OX=3763 7 GN=folE PE=3 SV=1
NDEMVILKDIELYSLCEHHLLPFIGKAHVAYIPTGKVLGLSKLARIVDMYARRLQIQENLTRQIADAIQQVTQAAGVAVVIEAKHMCMMMRGVEKQNSTMNTSVMLGAFRESNTTRMEFLQLIGRSK

SEQ ID NO: 7108 - protein, 174 aa, Corynebacterium pseudodiphtheriticum
  misc_feature (1)..(174): tr|U2I671|U2I671_9CORY GTP cyclohydrolase 1 OS=Coryneba cterium pseudodiphtheriticum 090104 OX=1381111 GN=folE PE=3 SV=2
MLIAVGEDPDREGLRDTPARVARAYKESFAGLHEDPTSVLERTFSEDHQELVLVRDIPIYSTCEHHLVPFFGTVHIGYIPGRNGDVTGLSKLARLADLYAKRPQVQERLTSQIADALMEKLQAQSVIVVIECEHLCMAMRGIRKPGAVTTTSAVRGGFRVNASSRAEVMSLIRS

SEQ ID NO: 7109 - protein, 197 aa, Corynebacterium pseudogenitalium
  misc_feature (1)..(197): tr|E2S309|E2S309_9CORY GTP cyclohydrolase 1 OS=Coryneba cterium pseudogenitalium ATCC 33035 OX=525264 GN=folE P E=3 SV=1
MPDNHIPARAAFDQDRAEAAVRELLLAVGEDPDREGLRETPARVARAYREVFAGLHEDPTEVLHKTFAEDHQELVLVRDIPIYSTCEHHLVPFYGVAHIGYIPGKDGHVTGLSKLARLADMYAKRPQVQERLTQQVADALVEVLGAQSVIVVIECEHLCMAMRGIRKPGATTTTSAVRGGFKNNAASRAEVLSLIRS

SEQ ID NO: 7110 - protein, 188 aa, Corynebacterium pseudopelargi
  misc_feature (1)..(188): tr|A0A3G6IV05|A0A3G6IV05_9CORY GTP cyclohydrolase 1 OS= Corynebacterium pseudopelargi OX=2080757 GN=folE PE=3 S V=1
MSIDHARAEAAVRELLLAVGEDPDREGLQETPARVARAYAEMFAGLHVDPTEVLSKTFSEDHRELVLVRDIPIYSTCEHHLVPFYGVAHIGYIPGESGKVTGLSKLARLVDLYAKRPQVQERLTSQVADALVEKLQAHSVIVVIECEHLCMAMRGIRKPGATTTTSAVRGGFQRNAASRAEALSLIKG

SEQ ID NO: 7111 - protein, 187 aa, Corynebacterium pseudotuberculosis
  misc_feature (1)..(187): tr|D9QCG3|D9QCG3_CORP2 GTP cyclohydrolase 1 OS=Coryneba cterium pseudotuberculosis (strain C231) OX=681645 GN=f olE PE=3 SV=1
MFDRVRAEAAVRELLIAVGEDPEREGLKETPARVAKAYAEVFAGLHTDPTEVLNKTFSEDHRELVLVRDIPIYSTCEHHLVPFFGIAHIGYIPGESGKVTGLSKLARLVDLYAKRPQVQERLTSQVADALVEKLEAQAVIVVLECEHLCMAMRGIRKPGATTTTSAVRGGFQTNAASRAEVLSLIRS

SEQ ID NO: 7112 - protein, 187 aa, Corynebacterium pseudotuberculosis; identical to SEQ ID NO: 7111
  misc_feature (1)..(187): tr|A0A515DWZ3|A0A515DWZ3_CORPS GTP cyclohydrolase 1 OS= Corynebacterium pseudotuberculosis OX=1719 GN=folE PE=3 SV=1

SEQ ID NO: 7113 - protein, 189 aa, Corynebacterium pyruviciproducens
  misc_feature (1)..(189): tr|S2YYA5|S2YYA5_9CORY GTP cyclohydrolase 1 OS=Coryneba cterium pyruviciproducens ATCC BAA-1742 OX=1125779 GN=f olE PE=3 SV=1
MSEFDFDRAEKAVRELLIAIGEDPDRPGLKETPRRVAKAFEENTGGLHIDPADHLEKTFPENHTELVIVRDIPIYSMCEHHLLPFYGLAHIGYIPGGHGSVTGLSKLARLADGYARRPQVQERLTSQIADAIVDRLDTQAVAVVLECEHMCMTMRGIRKPGSKTTTSAMRGGFKTSAASRAEFLTLIRG

SEQ ID NO: 7114 - protein, 189 aa, Corynebacterium pyruviciproducens
  misc_feature (1)..(189): tr|A0A2I1VSG7|A0A2I1VSG7_9CORY GTP cyclohydrolase 1 OS= Corynebacterium pyruviciproducens OX=598660 GN=folE PE= 3 SV=1
MPEFDFDRAEKAVRELLIAIGEDPDRPGLKETPRRVAKAFEENTGGLHMDPADNLEKTFPENHTELVIVRDIPIYSMCEHHLLPFYGLAHIGYIPGGHGSVTGLSKLARLADGYARRPQVQERLTSQIADAIVDRLDTQAVAVVLECEHMCMTMRGIRKPGSKTTTSAMRGGFKTSAASRAEFLTLIRG

SEQ ID NO: 7115 - protein, 189 aa, Corynebacterium renale
  misc_feature (1)..(189): tr|A0A2A9DPZ2|A0A2A9DPZ2_9CORY GTP cyclohydrolase 1 OS= Corynebacterium renale OX=1724 GN=folE PE=3 SV=1
MAEFDQQRAEAAVRELLLAVGEDPDREGLLETPTRVAKAYREVFAGLHEDPKEVLNKTFDEGHQELVLVRDIPIYSTCEHHLVPFFGHAHIGYIPNADGRVTGLSKLARLVDLYAKRPQVQERLTKQVADALVEKLDPQAVIVVIECEHLCMAMRGIRKPGAVTTTSAVRGGFQTNAASRAEALTLIRG

SEQ ID NO: 7116 - protein, 176 aa, Corynebacterium resistens
  misc_feature (1)..(176): tr|F8E1Z2|F8E1Z2_CORRG GTP cyclohydrolase 1 OS=Coryneba cterium resistens (strain DSM 45100 / JCM 12819 / GTC 2 026) OX=662755 GN=folE PE=3 SV=1
MLFAVGENPDREGLKDTPARVARAYEEIFAGLYTDPTEVLDKTFNEDHRELVLVRDIPFYSTCEHHLVPFFGHAHIGYIPGTSGKVTGLSKLARLIDGLAKRPQVQERLTSQVADALVERLEASAVIVVIEAEHLCMAMRGIRKPGANTVTSAVRGGFRTNASSRAEAMALIQRGR

SEQ ID NO: 7117 - protein, 189 aa, Corynebacterium riegelii
  misc_feature (1)..(189): tr|A0A2I1V3H4|A0A2I1V3H4_9CORY GTP cyclohydrolase 1 OS= Corynebacterium riegelii OX=156976 GN=folE PE=3 SV=1
MGTFDRERAEAAVRELLIAVGEDPDREGLVETPARVARAYEEVFAGLHQDPTTQLEKTFSENHRELVLVRDIPIYSTCEHHLVPFYGKAHIGYIPGKDGKVTGLSKLARLADLYAKRPQVQERLTAQIADALVEKLDASAVIVVIECEHLCMAMRGIRKPGAVTTTSAVRGGFQNNAASRAEVMSLIRS

SEQ ID NO: 7118 - protein, 189 aa, Corynebacterium riegelii
  misc_feature (1)..(189): tr|A0A0K1RE32|A0A0K1RE32_9CORY GTP cyclohydrolase 1 OS= Corynebacterium riegelii OX=156976 GN=folE PE=3 SV=1
MGTFDRKRAEAAVRELLIAVGEDPDREGLVETPARVARAYEEVFAGLHQDPTTQLEKTFSENHRELVLVRDIPIYSTCEHHLVPFYGKAHIGYIPGKDGKVTGLSKLARLADLYAKRPQVQERLTAQIADALVEKLDASAVIVVIECEHLCMAMRGIRKPGAVTTTSAVRGGFQNNAASRAEVMSLIRS

SEQ ID NO: 7119 - protein, 202 aa, Corynebacterium segmentosum
  misc_feature (1)..(202): tr|A0A448N8I4|A0A448N8I4_9CORY GTP cyclohydrolase 1 OS= Corynebacterium segmentosum OX=43990 GN=folE PE=3 SV=1
MSENHTDNQQVPARAPYDHERAEAAVRELLLAVGEDPDREGLRETPARVARAYREVFAGLHEDPTEVLHKTFAEDHQELVLVRDIPIYSTCEHHLVPFYGVAHIGYIPGKDGHVTGLSKLARLADLYAKRPQVQERLTQQIADALVNVLEAQSVIVVIECEHLCMAMRGIRKPGATTTTSAVRGGFKNNAASRAEVLSFIRT

SEQ ID NO: 7120 - protein, 196 aa, Corynebacterium simulans
  misc_feature (1)..(196): tr|A0A127NVM5|A0A127NVM5_9CORY GTP cyclohydrolase 1 OS= Corynebacterium simulans OX=146827 GN=folE PE=3 SV=1
MSNNIPARGEFDQARAEAAIRELLIAVGEDPDREGLQETPARVARAYKEVFAGLHADPTEVLHKTFAEEHQELVLVRDIPIYSTCEHHLVPFYGVAHIGYIPGPDGQVTGLSKLARLADMYAKRPQVQERLTSQIADALVEVLHAQSVIVVIECEHLCMAMRGIRKPGATTTTSAVRGGFKSNAASRAEVMSLIRS

SEQ ID NO: 7121 - protein, 196 aa, Corynebacterium singulare
  misc_feature (1)..(196): tr|A0A0B6ETH8|A0A0B6ETH8_9CORY GTP cyclohydrolase 1 OS= Corynebacterium singulare OX=161899 GN=folE PE=3 SV=1
MSDNIPATRDFDHERAEAAVRELLIAVGEDPDREGLRETPGRVARAYAEVFAGLHEDPTEVLHKTFAEEHQELVLVRDIPIYSTCEHHLVPFYGKAHIGYIPGPDGHVTGLSKLARLADMYAKRPQVQERLTSQIADALVEVLHAQSVIVVIECEHLCMAMRGIRKPGATTTTSAVRGGFKKNAASRAEVMSLIRS

SEQ ID NO: 7122 - protein, 191 aa, Corynebacterium sp.; identical to SEQ ID NO: 7025
  misc_feature (1)..(191): tr|S2XAS8|S2XAS8_9CORY GTP cyclohydrolase 1 OS=Coryneba cterium sp. HFH0082 OX=1078764 GN=folE PE=3 SV=1

SEQ ID NO: 7123 - protein, 190 aa, Corynebacterium sp.
  misc_feature (1)..(190): tr|A0A1S0YM45|A0A1S0YM45_9CORY GTP cyclohydrolase 1 OS= Corynebacterium sp. HMSC074A01 OX=1715030 GN=folE PE=3 SV=1
MTNKFDQARAEAAVRELLIAVGEDPDREGLKETPARVARAYEEVFAGLHTDPTEVLEKTFAENHQELVLVHDIPIYSTCEHHLVPFYGKAHVGYIPGKDGKVTGLSKLARLADLYAKRPQVQERLTGQVADAIVEKLGASAVIVVVECEHLCMAMRGIRKPGAITTTSAVRGGFQKNAASRAEVLSLIRR

SEQ ID NO: 7124 - protein, 188 aa, Corynebacterium sphenisci
  misc_feature (1)..(188): tr|A0A1L7D0B4|A0A1L7D0B4_9CORY GTP cyclohydrolase 1 OS= Corynebacterium sphenisci DSM 44792 OX=1437874 GN=folE PE=3 SV=1
MFDQERAEAAVRELLLAVGEDPDREGLVETPARVARAYREVFAGLHVDPREVLDKTFDEDHQELVLVKDIPIYSTCEHHLVPFFGHAHIGYIPGPRGRVTGLSKLARLVDLYAKRPQVQERLTSQVADALVERLEPTSAIVVIECEHLCMAMRGIRKPGSRTVTSAVRGGFKSDARSRAEALSLITGR

SEQ ID NO: 7125 - protein, 227 aa, Corynebacterium spheniscorum
  misc_feature (1)..(227): tr|A0A1I2T9R4|A0A1I2T9R4_9CORY GTP cyclohydrolase 1 OS= Corynebacterium spheniscorum OX=185761 GN=folE PE=3 SV= 1
MGLETKQHSATVFQWERCAADGLAKESEIRTHTMDDKQLTHFDQERAEKAVRELLLAVGEDPDREGLKQTPARVARAFQETFAGLHSDPREVLSTTFDENHQELVLVRDIPIYSTCEHHLVPFFGKAHIGYIPGKDGKVTGLSKLARLVDGYAKRPQVQERLTTQVADALVECLDAQSVIVVIECEHLCMAMRGIRKPGAMTTTSAVRGGFKRNAASRAEVLSLIRQ

SEQ ID NO: 7126 - protein, 197 aa, Corynebacterium stationis
  misc_feature (1)..(197): tr|A0A3D3IKW7|A0A3D3IKW7_9CORY GTP cyclohydrolase 1 OS= Corynebacterium stationis OX=1705 GN=folE PE=3 SV=1
MSASLIPARGPFDQERAEAAIRELLIAVGEDPDREGLLETPARVARSYAEIFAGLHVDPTEVLNKTFDEDHQELVLVRDIPIYSTCEHHLVPFYGAAHIGYIPGKDGHVTGLSKLARLADGFAKRPQVQERLTRQIADALTETLQAQSVIVVIECEHLCMGMRGVKKPGSVTTTSAVRGGFKSNAASRAEVLSLIRS

SEQ ID NO: 7127 - protein, 197 aa, Corynebacterium stationis
  misc_feature (1)..(197): tr|A0A241TXK6|A0A241TXK6_9CORY GTP cyclohydrolase 1 OS= Corynebacterium stationis OX=1705 GN=folE PE=3 SV=1
MSESLIPARGPFDQERAEAAIRELLIAVGEDPDREGLLETPARVARSYAEVFAGLHVDPTEVLHKTFDEDHQELVLVRDIPIYSTCEHHLVPFYGVAHIGYIPGKDGHVTGLSKLARLADGFAKRPQVQERLTRQIADALTESLQAQSVIVVIECEHLCMGMRGVKKPGSVTTTSAVRGGFKSNAASRAEVLSLIRS

SEQ ID NO: 7128 - protein, 196 aa, Corynebacterium striatum
  misc_feature (1)..(196): tr|A0A376GR93|A0A376GR93_CORST GTP cyclohydrolase 1 OS= Corynebacterium striatum OX=43770 GN=folE PE=3 SV=1
MSDNIPAKGEFDQARAEAAVRELLIAVGEDPDREGLQETPARVARAYKEVFAGLHADPTEVLHKTFAEEHQELVLVRDIPIYSTCEHHLVPFYGVAHIGYIPGPDGQVTGLSKLARLADMYAKRPQVQERLTSQIANALVDVLHAQSVIVVIECEHLCMAMRGIRKPGATTTTSAVRGGFKSNAASRAEVMSLIRS

SEQ ID NO: 7129 - protein, 196 aa, Corynebacterium striatum
  misc_feature (1)..(196): tr|A0A2Z2IXC5|A0A2Z2IXC5_CORST GTP cyclohydrolase 1 OS= Corynebacterium striatum OX=43770 GN=folE PE=3 SV=1
MSGNIPAKGEFDQARAEAAVRELLISVGEDPDREGLQETPARVARAYKEVFAGLHADPTEVLHKTFAEEHQELVLVRDIPIYSTCEHHLVPFYGVAHIGYIPGPDGQVTGLSKLARLADMYAKRPQVQERLTSQIANALVDVLHAQSVIVVIECEHLCMAMRGIRKPGATTTTSAVRGGFKSNAASRAEVMSLIRS

SEQ ID NO: 7130 - protein, 190 aa, Corynebacterium tapiri
  misc_feature (1)..(190): tr|A0A5C4U2Y2|A0A5C4U2Y2_9CORY GTP cyclohydrolase 1 OS= Corynebacterium tapiri OX=1448266 GN=folE PE=3 SV=1
MSANFDAARAEAAVRELLLAVGEDPDREGLRETPARVARAFRENFAGLGVDPAEVLERTFSEDHQELVLVKDIPIYSMCEHHLLPFFGVAHIGYIPNKQGKVTGLSKLARLADLYAKRPQVQERLTSQIADALVDRLQAQSVIVVIECEHLCMGMRGIRKPGAMTTTSAVRGGFKQSAASRAEVLSLIRG

SEQ ID NO: 7131 - protein, 212 aa, Corynebacterium terpenotabidum
  misc_feature (1)..(212): tr|S4XEL2|S4XEL2_9CORY GTP cyclohydrolase 1 OS=Coryneba cterium terpenotabidum Y-11 OX=1200352 GN=folE PE=3 SV= 1
MNTEDMTGSAGAAVDSAVSLSTGRVFDQARAEAAIRELLLAVGEDPDREGLRETPARVARAYREIFDGLYHDPAEVLAKTFNEDHRELVLVKDIPIYSTCEHHLVPFYGHAHIGYIPGVDGTVTGLSKLARLVDGFAKRPQVQERLTSQVADAVAEHLHASAVIVVIECEHLCMAMRGIRKPGASTVTSAVRGGFRNDARARAEAMSLIRGQ

SEQ ID NO: 7132 - protein, 189 aa, Corynebacterium testudinoris
  misc_feature (1)..(189): tr|A0A0G3H8N2|A0A0G3H8N2_9CORY GTP cyclohydrolase 1 OS= Corynebacterium testudinoris OX=136857 GN=folE PE=3 SV= 1
MTEFDQARAEAAVRELLIAVGEDPDREGLQETPARVARSYREIFAGLHSDPTEVLTKTFAEDHQELVLVRDIPIYSTCEHHLVPFYGKAHIGYIPGKAGHVTGLSKLARLADMYAKRPQVQERLTSQIADALVDKLGAQAAIVVIECEHLCMAMRGIRKPGATTTTSAVRGGFKTNAASRAEVLSLIRS

SEQ ID NO: 7133 - protein, 191 aa, Corynebacterium timonense
  misc_feature (1)..(191): tr|A0A1H1L5R6|A0A1H1L5R6_9CORY GTP cyclohydrolase 1 OS= Corynebacterium timonense OX=441500 GN=folE PE=3 SV=1
MTSSGVDRARAEAAVRELLLAVGEDPDRPGLEETPARVARAYEEVFAGLHTDPTEVLNKSFAEDHNELVLVRDIPIYSMCEHHLVPFYGKAHIGYIPGAEGKVTGLSKLARLADLYAKRPQVQERLTSQIADALVDKLGAQAVIVVIECEHLCMAMRGIRKPGSTTTTSAVRGGFKTNAASRAEVLSLIRS

SEQ ID NO: 7134 - protein, 197 aa, Corynebacterium tuberculostearicum; identical to SEQ ID NO: 7109
  misc_feature (1)..(197): tr|C6RC98|C6RC98_9CORY GTP cyclohydrolase 1 OS=Coryneba cterium tuberculostearicum SK141 OX=553206 GN=folE PE=3 SV=1

SEQ ID NO: 7135 - protein, 187 aa, Corynebacterium tuscaniense
  misc_feature (1)..(187): tr|A0A095YQA5|A0A095YQA5_9CORY GTP cyclohydrolase 1 OS= Corynebacterium tuscaniense DNF00037 OX=1401064 GN=folE PE=3 SV=1
MFDRARAEAAVRELLLAVGENPDREGLLETPARVARAYEEVFAGLHTDPTTVLEKTFAENHEELVLVRDVPIYSTCEHHLVPFYGVAHIGYIPGEDGHVTGLSKLARLADMYAKRPQVQERLTSQIADALVDKLNAQSVIVVIECEHLCMAMRGIRKPGATTTTSAVRGGFKRNAASRAEVLSLIRG

SEQ ID NO: 7136 - protein, 198 aa, Corynebacterium tuscaniense
  misc_feature (1)..(198): tr|A0A2N6T6Q0|A0A2N6T6Q0_9CORY GTP cyclohydrolase 1 OS= Corynebacterium tuscaniense OX=302449 GN=folE PE=3 SV=1
MTDPLNAEQNPVFDRTRAEAAVRELLLAVGENPDREGLLETPARVARAYEEVFAGLHTDPTTVLEKTFAENHEELVLVRDVPIYSTCEHHLVPFYGVAHIGYIPGEDGHVTGLSKLARLADMYAKRPQVQERLTSQIADALVDRLNAQSVIVVIECEHLCMAMRGIRKPGATTTTSAVRGGFKRNAASRAEVLSLIRG

SEQ ID NO: 7137 - protein, 197 aa, Corynebacterium ulcerans
  misc_feature (1)..(197): tr|V6V2R4|V6V2R4_CORUL GTP cyclohydrolase 1 OS=Coryneba cterium ulcerans NCTC 12077 OX=1258583 GN=folE PE=3 SV= 1
MRVVKAKGQIVFDRDRAEAAVRELLIAVGEDPEREGLQETPARVAKAYAEVFAGLHTDPTEVLNKTFSEDHRELVLVRDIPIYSTCEHHLVPFFGTAHIGYIPGQSGKVTGLSKLARLVDLYAKRPQVQERLTSQVADALVEKLEAQAVIVVIECEHLCMAMRGIRKPGATTTTSAVRGGFQTNAASRAEVLSLIRS

SEQ ID NO: 7138 - protein, 187 aa, Corynebacterium ulcerans
  misc_feature (1)..(187): tr|A0A5F0AB22|A0A5F0AB22_CORUL GTP cyclohydrolase 1 OS= Corynebacterium ulcerans OX=65058 GN=folE PE=3 SV=1
MFDRDRAETAVRELLIAVGEDPDREGLKETPARVAKAYAEVFAGLHTDPTEVLNKTFSEEHRELVLVRDIPIYSTCEHHLVPFFGTAHIGYIPGQSGKVTGLSKLARLVDLYAKRPQVQERLTSQVADALVEKLEAQAVIVVIECEHLCMAMRGIRKPGATTTTSAVRGGFQTNAASRAEVLSLIRS

SEQ ID NO: 7139 - protein, 204 aa, Corynebacterium urealyticum
  misc_feature (1)..(204): tr|B1VHL0|B1VHL0_CORU7 GTP cyclohydrolase 1 OS=Coryneba cterium urealyticum (strain ATCC 43042 / DSM 7109) OX=5 04474 GN=folE PE=3 SV=1
MADSTKPDSTTSESTRHFDRERAEAAVRELLIAVGEDPDREGLADTPARVARAYEEVFSGLGTDPTEVLNTTFNEDHRELVLVKDIPFYSTCEHHLVPFFGHAHIGYIPGRSGKVTGLSKLARLVEGFARRPQVQERLTTSIADALMERLDASAVIVVIEAEHLCMAMRGVRKPGANTVTSAVRGGFQNNAATRAEAMALIRGN

SEQ ID NO: 7140 - protein, 204 aa, Corynebacterium urealyticum; identical to SEQ ID NO: 7139
  misc_feature (1)..(204): tr|A0A5D4FQU3|A0A5D4FQU3_9CORY GTP cyclohydrolase 1 OS= Corynebacterium urealyticum OX=43771 GN=folE PE=3 SV=1

SEQ ID NO: 7141 - protein, 194 aa, Corynebacterium ureicelerivorans
  misc_feature (1)..(194): tr|A0A077HM99|A0A077HM99_9CORY GTP cyclohydrolase 1 OS= Corynebacterium ureicelerivorans OX=401472 GN=folE PE=3 SV=1
MTSQNVGGFDRERAEAAVRELLIAVGEDPDREGLAETPARVARAYEEVFAGLREDPKIHLEKSFSENHRELVLVRDIPIYSTCEHHLVPFYGVAHIGYIPGADGKVTGLSKLARLADMYAKRPQVQERLTAQIADAIVEKLDASAVIVVIECEHLCMAMRGIRKPGATTTTSAVRGGFQNNAASRAEVLSLIRG

SEQ ID NO: 7142 - protein, 191 aa, Corynebacterium uterequi
  misc_feature (1)..(191): tr|A0A0G3HL88|A0A0G3HL88_9CORY GTP cyclohydrolase 1 OS= Corynebacterium uterequi OX=1072256 GN=folE PE=3 SV=1
MADTNFDHARAEAAVRELLLAVGEDPDREGLRETPARVARAFAENLQGLRTDPTSVLEKTFSEDHQELVLVKDIPIYSMCEHHLLPFFGHAHIGYIPNKEGQVTGLSKLARLADLYARRPQVQERLTSQIADALVEKLRAQSVIVVIECEHLCMGMRGIRKPGAVTVTSAVRGGFKTSAASRAEALSLIRS

SEQ ID NO: 7143 - protein, 205 aa, Corynebacterium variabile
  misc_feature (1)..(205): tr|G0HBX9|G0HBX9_CORVD GTP cyclohydrolase 1 OS=Coryneba cterium variabile (strain DSM 44702 / JCM 12073 / NCIMB 30131) OX=858619 GN=folE PE=3 SV=1
MSNSESTDQPVSQITGRPFDQERAEAAVRELLFAVGADPDREGLQETPARVARAYREIFDGLFRDPAEVLNKTFNEDHRELVLVKDIPIYSTCEHHLVPFYGHAHIGYIPGNDGTVTGLSKLARLVDGFAKRPQVQERLTSQVADAVATRLNASAVIVVIECEHLCMAMRGIRKPGATTVTSAVRGGFRNDARTRAEAFSLIRGN

SEQ ID NO: 7144 - protein, 205 aa, Corynebacterium variabile; identical to SEQ ID NO: 7143
  misc_feature (1)..(205): tr|A0A0X2NMW9|A0A0X2NMW9_9CORY GTP cyclohydrolase 1 OS= Corynebacterium variabile OX=1727 GN=folE PE=3 SV=1

SEQ ID NO: 7145 - protein, 191 aa, Corynebacterium vitaeruminis
  misc_feature (1)..(191): tr|W5Y2Z2|W5Y2Z2_9CORY GTP cyclohydrolase 1 OS=Coryneba cterium vitaeruminis DSM 20294 OX=1224164 GN=folE PE=3 SV=1
MATGTFDRERAEAAVRELLIAVGEDPDREGLIETPARVARAYEECFAGLRTDPKEVLSKVFNEEHRELVLVRDIPIYSTCEHHLVPFFGKAHIGYIPGDSGKVTGLSKLARLVDLYAKRPQVQERLTSQVADALVEKLQAQSVIVVIECEHLCMAMRGIRKPGATTTTSAVRGGFQRNAASRAEALALIRS

SEQ ID NO: 7146 - protein, 210 aa, Corynebacterium xerosis
  misc_feature (1)..(210): tr|A0A494RVI7|A0A494RVI7_9CORY GTP cyclohydrolase 1 OS= Corynebacterium xerosis OX=1725 GN=folE PE=3 SV=1
MYDHRDDEVHPDIAADRGEDLGTFDHARAEAAVRELLLAVGEDPEREGLRETPARVARAYREVFAGLHVDPTEVLEKTFDEGHQELVLVKDIPIYSTCEHHLVPFFGKAHIGYIPGPEGRVTGLSKLARLVDLYAKRPQVQERLTGQVADALVDKLQPTSAIVVIECEHLCMAMRGIRKPGATTITSAVRGGFKSDARSRAEAMSLITGR

SEQ ID NO: 7147 - protein, 210 aa, Corynebacterium xerosis
  misc_feature (1)..(210): tr|A0A2N6SYA1|A0A2N6SYA1_9CORY GTP cyclohydrolase 1 OS= Corynebacterium xerosis OX=1725 GN=folE PE=3 SV=1
MYDHRDDEVHPDIAGDRGEDLGTFDHARAEAAVRELLLAVGEDPEREGLLETPARVARAYREVFAGLHVDPTEVLEKTFDEGHQELVLVKDIPIYSTCEHHLVPFFGKAHIGYIPGPEGRVTGLSKLARLVDLYAKRPQVQERLTGQVADALVDKLQPTSAIVVIECEHLCMAMRGIRKPGATTITSAVRGGFKSDARSRAEAMSLITGR

SEQ ID NO: 7148 - protein, 219 aa, Cosenzaea myxofaciens
  misc_feature (1)..(219): tr|A0A198F7R7|A0A198F7R7_9GAMM GTP cyclohydrolase 1 OS= Cosenzaea myxofaciens ATCC 19692 OX=1354337 GN=folE PE= 3 SV=1
MSSLSKEAQDVHAALVEHGLETPLREPQLSPSESKQQIEHHMTEVMKLLNLDLSDDSLMETPKRIAKMYVGEIFSGLDYHNFPKITLIDNKMQVDEMVTVRDITLTSTCEHHFVTIDGKATVAYIPKDKVIGLSKINRIVQFFAQRPQVQERLTQQILIALQVLLGTKNVAVSIDAVHYCVKARGIRDANSATATTSLGGLFKSSQNTRQEFLRAIRHP

SEQ ID NO: 7149 - protein, 212 aa, Couchioplanes caeruleus
  misc_feature (1)..(212): tr|A0A3N1GJW6|A0A3N1GJW6_9ACTN GTP cyclohydrolase 1 OS= Couchioplanes caeruleus OX=56438 GN=folE PE=3 SV=1
MTSTAWTGTRDPGTVDQPPHLRLVRAVAPIDLEAATDAVRALLKALGQDIDSAHLLDTPRRVAAAYAELLTPEPFVLTTFPNDDRYDELVLVREVPFRSLCEHHLLPFHGVAHIGYLPDQRIVGLSKLARVVEHYARGLQVQERLTRQIAVCLQDNLQAKGVAVVLEAEHLCMSLRGVRAAGARTTTSALLGLHREQPATRAEFFALTGLRH

SEQ ID NO: 7150 - protein, 212 aa, Couchioplanes caeruleus; identical to SEQ ID NO: 7149
  misc_feature (1)..(212): tr|A0A1K0FX83|A0A1K0FX83_9ACTN GTP cyclohydrolase 1 OS= Couchioplanes caeruleus subsp. caeruleus OX=56427 GN=fo lE PE=3 SV=1

SEQ ID NO: 7151 - protein, 184 aa, Coxiella burnetii
  misc_feature (1)..(184): sp|A9NDB3|GCH1_COXBR GTP cyclohydrolase 1 OS=Coxiella b urnetii (strain RSA 331 / Henzerling II) OX=360115 GN=f olE PE=3 SV=1
MSNTIADHVKAILIALGEDPNREGLRDTPKRYEKALEHLTKGYHEKLPSVVKKAVFQSGMDEMVILKDIELYSLCEHHLLPFIGRCHVAYLPSGKIIGISKLARIVDMFAKRLQVQENLTKQIAEAILTATEAKGVGVIIEAKHLCMMMRGVEKQNSEMTTSVMLGTFRKDDRTRSEFLSLIRK

SEQ ID NO: 7152 - protein, 184 aa, Coxiella burnetii; identical to SEQ ID NO: 7151
  misc_feature (1)..(184): sp|A9KFF3|GCH1_COXBN GTP cyclohydrolase 1 OS=Coxiella b urnetii (strain Dugway 5J108-111) OX=434922 GN=folE PE= 3 SV=1

SEQ ID NO: 7153 - protein, 184 aa, Coxiella endosymbiont
  misc_feature (1)..(184): tr|A0A0A8E8L1|A0A0A8E8L1_9COXI GTP cyclohydrolase 1 OS= Coxiella endosymbiont of Amblyomma americanum OX=325775 GN=folE PE=3 SV=1
MSSAIEKHIEAILVHLGENILREGLKETPRRFQKTLEYLTSGYQDKLCKIVKNAIFQSDINEIIIVRSIELYSLCEHHLLPFIGKCHVAYLPNGKIIGISKISRIVDMYSRRFQVQENLTKQIAESIAEVTDAKGVGVIIEAKHLCMMMRGVKKQNPEMITFLMLGAFCKDDRARTELLNLIKS

SEQ ID NO: 7154 - protein, 186 aa, Coxiella sp.
  misc_feature (1)..(186): tr|A0A2G2A064|A0A2G2A064_9COXI GTP cyclohydrolase 1 OS= Coxiella sp. (in: Bacteria) OX=59288 GN=folE PE=3 SV=1
MTTTDNLKDHYSKILTDLGEDVTREGLVKTPLRAAKAMQDLTHGYKSNLDEIINGAIFTSDADQMILINDIEFYSLCEHHLLPFYGKCHIAYIPDKKVLGISKFARIVDHFSRRLQIQEGLTNQIAESIYASTGAKGVGVIIEAQHFCMMMRGVEKQHSNMKTSVMLGSFRESSVTRNEFLQLLAI

SEQ ID NO: 7155 - protein, 198 aa, Coxiella sp.
  misc_feature (1)..(198): tr|A0A0S7XVZ5|A0A0S7XVZ5_9COXI GTP cyclohydrolase 1 OS= Coxiella sp. DG_40 OX=1703354 GN=folE PE=3 SV=1
MRTEKKMSDKDKTKVDTKRIEKAVKEILLAVGEDVGREGVKGTPERVAKMYAELLAGMDEDPKKHLRRVFSEDYDEIVLLRDIPFYSICEHHLMPFIGTAAVAYLPKGVVLGVSKLARIVDCFAHRLQTQERLTYQIADFIMNSLKPRGVAVVLEASHSCMTIRGIKKPGSMMVTSALRGIFKRDPRSRNEVMSLMQK

SEQ ID NO: 7156 - protein, 184 aa, Unknown
  misc_feature (1)..(184): tr|A0A2N6N5V2|A0A2N6N5V2_9COXI GTP cyclohydrolase 1 OS= Coxiella-like endosymbiont OX=1592897 GN=folE PE=3 SV=1
MTNTIKKHIEAILTNLGEDIHREGLKETPRRFQKALEYLTSGYQDKLHEIINNAIFQSDMDEIVIVKNIELYSLCEHHLLPFIGKCHVAYLPNGKIIGLSKIARIVDIYAKRLQVQENLTKQIAESIDKVTDAKGVAVIIEAKHLCMMMRGVEKQNSEMTTSMMLGIFRKDERTRAEFLSLIRN

SEQ ID NO: 7157 - protein, 184 aa, Unknown; identical to SEQ ID NO: 7153
  misc_feature (1)..(184): tr|A0A3S6R4B6|A0A3S6R4B6_9COXI GTP cyclohydrolase 1 OS= Coxiella-like endosymbiont of Amblyomma americanum OX=1 987500 GN=folE PE=3 SV=1

SEQ ID NO: 7158 - protein, 192 aa, Coxiellaceae bacterium
  misc_feature (1)..(192): tr|A0A3B9W6F2|A0A3B9W6F2_9COXI GTP cyclohydrolase 1 OS= Coxiellaceae bacterium OX=2026727 GN=folE PE=3 SV=1
MSTTQSPTSPFDTQTESVKQLIEFLGENPQREGLQGTPERAVKALQFLTKGYHEDLDTIINGALFSSNMDEMVLVKGIEFFSLCEHHLLPFIGKCHIAYIPQGKVLGLSKFARIVEHFSRRLQIQEQLTEDIANTIAEITGAKGVGVIIESQHLCMMMRGVEKQQASMTTSKMVGLFKDNEKTRTEFLSLIQ

SEQ ID NO: 7159 - protein, 179 aa, Coxiellaceae bacterium
  misc_feature (1)..(179): tr|A0A370CJ17|A0A370CJ17_9COXI GTP cyclohydrolase 1 OS= Coxiellaceae bacterium RA15029 OX=2016198 GN=folE PE=3 SV=1
MEKHIKAILTALGEDPEREGLKKTPERLAKSLRYLTSGTRESLPNILNDALFQSDMEEMILVKDIELYSLCEHHLLPFMGVCHMAYIPNGQIIGLSKIPRIINFYARRLQIQENLTRQIADTLMDKLNAKGVAIIIEAKHLCMMMRGVEKQQATMKTSVMLGIFQQNMRIRAEFFSLVV

SEQ ID NO: 7160 - protein, 186 aa, Crassaminicella sp.
  misc_feature (1)..(186): tr|A0A5C0SDL7|A0A5C0SDL7_9CLOT GTP cyclohydrolase 1 OS= Crassaminicella sp. SY095 OX=2599308 GN=folE PE=3 SV=1
MDKARIEKAIREILEAIGEDPNREGLKDTPKRIAKMYEEIFSGLNEDPKKHLEIFFQEEKHEELVLVKDIPFYSMCEHHFVPFFGKAHVGYLPKNGRLTGLSKLARVVETVAKRPQLQERLTSSIAEALVEKLDPYGVIVVVEAEHMCMTMRGVKKPGSKTITSAVRGLFERDAKARSEAMALIKF

SEQ ID NO: 7161 - protein, 264 aa, Crenobacter cavernae
  misc_feature (1)..(264): tr|A0A4Q2J696|A0A4Q2J696_9NEIS GTP cyclohydrolase FolE2 OS=Crenobacter cavernae OX=2290923 GN=folE2 PE=3 SV=1
MNAQTIPDVQSSHDSRNLPINKVGIKAIRHPVRLAEREGGVQHSVATFDMYVHLPAHFKGTHMSRFVEILHTQEKEISVSSFENIVRAMVDRLEAESGYIEMRFDYFVNKTAPVSGVKSLLDYQVTYIGEIKGGQYHFTMKVLVPVTSLCPCSKKISQYGAHNQRSHVTVTARTDEYIWIEELVDMVEQEASCELYGILKRPDEKYVTERAYENPKFVEDMVRDVAGRLNADPRVLAFVVESENFESIHNHSAYALIEQDKTAR

SEQ ID NO: 7162 - protein, 264 aa, Crenobacter cavernae
  misc_feature (1)..(264): tr|A0A345Y907|A0A345Y907_9NEIS GTP cyclohydrolase FolE2 OS=Crenobacter cavernae OX=2290923 GN=folE2 PE=3 SV=1
MNAQTIPDVQSSHDSRNLPINKVGIKAIRHPVRLAEREGGVQHSVATFDMYVHLPAHFKGTHMSRFVEILHTQEKEISVSSFENIVRAMVDRLEAESGYIEMRFDYFVNKTAPVSGVKSLLDYQVTYIGEIKGGQYHFTMKVLVPVTSLCPCSKKISQYGAHNQRSHVTVTARTDEYIWIEELVDMVEQEASCELYGILKRPDEKYVTERAYENPKFVEDMVRDVAGRLNADPRVLAFVVESENFESIHNHSAYALIEQDKRAR

SEQ ID NO: 7163 - protein, 266 aa, Crenobacter luteus
  misc_feature (1)..(266): tr|A0A163CMK2|A0A163CMK2_9NEIS GTP cyclohydrolase FolE2 OS=Crenobacter luteus OX=1452487 GN=folE2 PE=3 SV=1
MGVVEWLPDVQSAEADFGFDIDQVGIKSIRFPLTVATADGGTQATVASCDLYVALPSTQKGTHMSRFVELLEAQEAALDAHSLRALLASMVDRLDAEAGEVTLRFPLFVRKTAPVSGVQSLLDVDVTLFGRLSADGFAHRLTVTTPVTSLCPCSKQISQYGAHNQRSHITLSVELDGEMAPEELVRLAEAKASCELFGLLKRPDEKWVTERAYENPKFVEDLVREIALALRDDARVSAFTVESENFESIHNHSAFARIRWQRPAAR

SEQ ID NO: 7164 - protein, 264 aa, Crenobacter luteus
  misc_feature (1)..(264): tr|A0A161S4M8|A0A161S4M8_9NEIS GTP cyclohydrolase FolE2 OS=Crenobacter luteus OX=1452487 GN=folE2 PE=3 SV=1
MNALTIPDVQSSHDSRNLPINKVGIKAIRHPVRLAEREGGVQHSIATFDMYVHLPAHFKGTHMSRFVEILNAQEKEISVSSFESIVRAMVERLEAESGYIEMRFDYFVNKTAPVSGVQSLLDYQVTYIGEISDGEYRFTMKVLVPVTSLCPCSKKISQYGAHNQRSHVTVTARTASHVWIEELIEMVEQEASCELYGLLKRPDEKYVTERAYENPKFVEDMVRDVAGRLNADARVLAFVVESENFESIHNHSAYALIEQDKTAR

SEQ ID NO: 7165 - protein, 200 aa, Crenotalea thermophila
  misc_feature (1)..(200): tr|A0A1I7N4J5|A0A1I7N4J5_9BACT GTP cyclohydrolase 1 OS= Crenotalea thermophila OX=1393122 GN=folE PE=3 SV=1
MSYKKIEQYEEKITSHLVENYRETLTLLGENPDREGLKKTPHRVAKAMQYLTQGYHMDPKAILESAKFKESFSEMVLVKDIELYSLCEHHLLPFFGKAHVAYIPNGYIVGLSKIARVVDCFSRRLQVQERLTHQILDAIQDVLHPLGVAVVIEAQHLCMMMRGVQKQNSVTTTSAFSGQFEDERTRSEFIRLISADLMHR

SEQ ID NO: 7166 - protein, 180 aa, Crenothrix polyspora
  misc_feature (1)..(180): tr|A0A1R4HGU0|A0A1R4HGU0_9GAMM GTP cyclohydrolase 1 OS= Crenothrix polyspora OX=360316 GN=folE PE=3 SV=1
MEEQFAKIIESIGEDLNREGLVDTPKRAAKAFKFLNNGYDKTLEDVLNGAIFSAETEDMVIVKDIELYSLCEHHLLPFIGKCHVGYLPQGKVLGLSKIARIVDMYARRLQIQEKLTKQIADAISLAVDAKGVAVVIEAKHLCMMMRGVEKQNSVMTTSVMTGIFRKSISTRSEFLNLINR

SEQ ID NO: 7167 - protein, 180 aa, Crenothrix polyspora
  misc_feature (1)..(180): tr|A0A1R4H123|A0A1R4H123_9GAMM GTP cyclohydrolase 1 OS= Crenothrix polyspora OX=360316 GN=folE PE=3 SV=1
MEEQFAKIITAVGEDLTREGLVDTPKRAAKAFKFLNNGYEKTLEEVLNGAIFSAETEDMVIVKDIELYSLCEHHLLPFIGKCHVGYLPQGKVLGLSKIARIVDMYARRLQIQEKLTKQIADAISVAVDAKGVAVVIEAKHLCMMMRGVEKQNSVMTTSVMTGIFRKSISTRSEFLNLINR

SEQ ID NO: 7168 - protein, 180 aa, Crenothrix sp.
  misc_feature (1)..(180): tr|A0A1Y3A165|A0A1Y3A165_9GAMM GTP cyclohydrolase 1 OS= Crenothrix sp. D3 OX=1880899 GN=folE PE=3 SV=1
MEEHFAKIITAIGEDLSREGLVDTPKRAAKAFKFLNNGYDKTLEEVLNGAIFTADTEDMVIVKDIELYSLCEHHLLPFIGKCHVGYLPNGKVLGLSKIARVVDMYARRLQIQEQLTRQIADAIETAVGARGVAVVIEAKHLCMMMRGVEKQNSVMTTSAMTGIFRKDFSTRTEFLTLINR

SEQ ID NO: 7169 - protein, 222 aa, Criblamydia sequanensis
  misc_feature (1)..(222): tr|A0A090CYC7|A0A090CYC7_9BACT GTP cyclohydrolase 1 OS= Criblamydia sequanensis CRIB-18 OX=1437425 GN=folE PE=3 SV=1
MKEDDFFYEEAIQTSFPYPKSKTAPKLSKQEKMDLIASRFRDIMIALGLDLDHPSLARTPERVAKMYVNEVFTGLDDTTFPSLSFVDNEFRNSENGNIVFIKVNFNSFCEHHFVPISGNAYVAYIPKDKVIGLSKIPRIVRFFAQRPQMQERLGAQISDSLQKILGTEDVAVCIAAKHYCMIARGIEDAVSHTITYVLKGAFEKDLKRREEFYQALKAKDLD

SEQ ID NO: 7170 - protein, 367 aa, Cribrihabitans marinus
  misc_feature (1)..(367): tr|A0A1H6TMH7|A0A1H6TMH7_9RHOB GTP cyclohydrolase FolE2 OS=Cribrihabitans marinus OX=1227549 GN=folE2 PE=3 SV= 1
MNLHAGGLDDTPDRDAAQAALDTLRAWAASASPAEIAQLDPAVARLVPDLVPLNYPALSRDYPHDFRPDEAYRATLPDLQNGPTSLIRGARQQIQHVGISNFRLPIRFHRKDGKDLTLETSVTGTVSLEAGKKGINMSRIMRSFYKHAERTFSFEVIEAALDDYMTDLDSFDARIQMRFSYPDRIESLRSGLTGYQYYDIALELVEKGGVRQKIMHLDYVYSSTCPCSLELSEHARAQRGQLATPHSQRSVARISVQVNCDTDCLWFEDLIALCRRAVPTETQVMVKREDEQAFAELNAANPIFVEDAARLFCEQLQADHHIGDFRVVASHQESLHSHDAVSILTQGETFAADSLDPRLFASLFHVG

SEQ ID NO: 7171 - protein, 218 aa, Cricetibacter osteomyelitidis
  misc_feature (1)..(218): tr|A0A4R2SS93|A0A4R2SS93_9PAST GTP cyclohydrolase 1 OS= Cricetibacter osteomyelitidis OX=1521931 GN=folE PE=3 S V=1
MNNISPEAAKVRNALLEKGIETPMIELTQSQDERRDGIERHMRAVMGLIGLDLNDDSLEETPKRLAKMFVDEIFSGLDYANFPKITNIENRMKVSEMVLVNDVTLTSTCEHHFVTIDGMVSVAYYPKKWVIGLSKINRVVAFFAQRPQVQERLTEQILLAFQTILETEDVAVYVKATHFCVKCRGIKDTNSYTVTSAFGGVFLEDRETRKEFLSLINK

SEQ ID NO: 7172 - protein, 234 aa, Crinalium epipsammum
  misc_feature (1)..(234): tr|K9W6V1|K9W6V1_9CYAN GTP cyclohydrolase 1 OS=Crinaliu m epipsammum PCC 9333 OX=1173022 GN=folE PE=3 SV=1
MTIAHPDSAKDSQSAIGNTEIRVETRPDRNTLNGREPNLQRPSEEIHDEMMDAVTTLLLGVGEDPQREGLLKTPKRVAEAMRFLTSGYTQSLEELVNGAIFDEGHNEMVLVRDINVFSLCEHHMLPFMGKAHVAYIPNQKVVGLSKLARIVEMYSRRLQVQERLTRQIAEAVQTILEPKGVAVVMEASHMCMTMRGVQKPGSWTVTSAMLGIFQEEQKTREEFLNLIRHQPAFF

SEQ ID NO: 7173 - protein, 225 aa, Croceibacter atlanticus
  misc_feature (1)..(225): tr|A3U4S9|A3U4S9_CROAH GTP cyclohydrolase 1 OS=Croceiba cter atlanticus (strain ATCC BAA-628 / HTCC2559 / KCTC 12090) OX=216432 GN=folE PE=3 SV=1
MKLDDLLENVEERGDNHAGASRETPLRDNAFDLDDQEKITLIQDDVKRILETLGMDLTDDSLKGTPLRVAKMFVKEIFGGLHPDRKPKASTFENKYQYGEMLVEKNITVYSTCEHHLLPIVGKAHVAYISKGNVVGLSKMNRIVDYYAKRPQVQERLTLQIVEELQKVLGTEDVACVIDAKHLCVNSRGIRDIDSSTVTSEFGGQFKDKETKREFLDYIKLDTEF

SEQ ID NO: 7174 - protein, 199 aa, Croceibacter atlanticus
  misc_feature (1)..(199): tr|A3UBT5|A3UBT5_CROAH GTP cyclohydrolase 1 OS=Croceiba cter atlanticus (strain ATCC BAA-628 / HTCC2559 / KCTC 12090) OX=216432 GN=folE PE=3 SV=1
MALYRNFEEFNIEVTDEIKSQFSSIITNLGEDVAREGIVKTPERAAKAMQFLTSGYDIDAAEILKGAMFKEDYNDMVVVKNIELYSLCEHHMLPFFGKAHIAYIPNGHIVGLSKLPRVVDVFARRLQVQERLTHDILECINDTLKPKGVAVVIEASHMCMMMRGVQKQNSTTTTSGFRGQFEAQETRNEFLKLISSDLA

SEQ ID NO: 7175 - protein, 202 aa, Croceicoccus marinus
  misc_feature (1)..(202): tr|A0A1Z1FBQ3|A0A1Z1FBQ3_9SPHN GTP cyclohydrolase 1 OS= Croceicoccus marinus OX=450378 GN=folE PE=3 SV=1
MSSLVGPDEDNPRGKPPVPQEVQDAIRTLIRWTGDDPEREGLLDTPQRVARAWKEYCQGYGEDPAIHLSRIFEEVGGYDEVVLLKDIPFQSHCEHHMAPIIGKAAIAYLPRDHVVGISKLARVLHGFARRLQIQERLTAEVAECIWNHLKPHGVAVVIEASHACMTARGVRTPGVSMVTSRMMGTFRDDERSRKEVLSLMGY

SEQ ID NO: 7176 - protein, 202 aa, Croceicoccus naphthovorans
  misc_feature (1)..(202): tr|A0A0G3XDE1|A0A0G3XDE1_9SPHN GTP cyclohydrolase 1 OS= Croceicoccus naphthovorans OX=1348774 GN=folE PE=3 SV=1
MSSLVGPDEDNPLGKPPVPEDVQDAIRTLIRWAGDDPEREGLLDTPKRVARAWKEYCQGYTEDPAIHLSRIFEEVGGYDEVVLLKDIPFQSHCEHHMAPIIGKAAIAYLPRDHVVGISKLARVLHGFARRLQIQERLTAEVAQCIWDHLKPHGVAVVIEASHACMTARGVRTPGVAMTTSRMMGTFLEDDRTRKEVLSLMCY

SEQ ID NO: 7177 - protein, 202 aa, Croceicoccus ponticola
  misc_feature (1)..(202): tr|A0A437GVQ7|A0A437GVQ7_9SPHN GTP cyclohydrolase 1 OS= Croceicoccus ponticola OX=2217664 GN=folE PE=3 SV=1
MSSLVGPDEDDPQGKPPVPQDVQDAIRTLIRWTGDDPQREGLIDTPKRVARAWKEYCLGYNEDPAVHLSRIFEEVGGYDEVVLLKDIPFQSHCEHHMAPIIGKAAIAYLPRDHVVGISKLARVLHGFARRLQIQERLTAEVAQCIWEHLNPHGVAVVIEASHACMTARGVRTPGVAMTTSRMMGTFLDDERSRKEVLSLMGY

SEQ ID NO: 7178 - protein, 202 aa, Croceicoccus sp.
  misc_feature (1)..(202): tr|A0A2D8D9K6|A0A2D8D9K6_9SPHN GTP cyclohydrolase 1 OS= Croceicoccus sp. OX=1927144 GN=folE PE=3 SV=1
MSSLVGPDEDNPLGKPPVPEEVQEAIRTLLRWTGDDPSREGLLDTPKRVARAWKEYCQGYGEDPAIHLSRVFEEVGGYDEVVLLKDIPFQSHCEHHMAPIIGKAAIAYLPRDHVVGISKLARVLHGFARRLQIQERLTAEVAECIWNHLKPHGVAVVIEASHACMTARGVRTPGVGMVTSRMMGTFRDDERSRKEVLSLMGY

SEQ ID NO: 7179 - protein, 234 aa, Croceitalea dokdonensis
  misc_feature (1)..(234): tr|A0A0P7AZZ0|A0A0P7AZZ0_9FLAO GTP cyclohydrolase 1 OS= Croceitalea dokdonensis DOKDO 023 OX=1300341 GN=folE PE =3 SV=1
MEGKHILSQGLVESDTMITELSIDEIGDDHMYTGLETPIKADAFKLSDAEKKEKIAVLFGEIMEVMGLDLTDDSLKGTPKRVAKMYIDEIYSGLNPANKPKVALFDNKYQYNQMLVEKDITFYSNCEHHFVPIIGKAHVAYISSGKVIGLSKLNRMVQYFAKRPQVQERLTNQIGVELQNILGTKNVAVIIDAKHLCVSSRGIKDDTSATVTSFYGGQFLEQDKIQELYNYITN

SEQ ID NO: 7180 - protein, 226 aa, Croceitalea dokdonensis
  misc_feature (1)..(226): tr|A0A0P7ANJ4|A0A0P7ANJ4_9FLAO GTP cyclohydrolase 1 OS= Croceitalea dokdonensis DOKDO 023 OX=1300341 GN=folE PE =3 SV=1
MKLRETLDSKDDARGDDHVGSSHDTPMRKDAFVLSDMEKIEKIQGHVRDIMHTLGLDLNDDSLQGTPRRVAKMYVNELFGGLHPDKKPTSSTFDNKYKYGEMLVEKNITLYSTCEHHLLPIVGRAHIAYISNGTVVGLSKMNRIVDYYAKRPQVQERLNIQVVKELQAVLGTEDVACVMDAKHLCVNSRGIRDIESSTVTAEYGGKFKEESVRREFLDYINLDTEF

SEQ ID NO: 7181 - protein, 234 aa, Croceivirga radicis
  misc_feature (1)..(234): tr|A0A1V6LSP2|A0A1V6LSP2_9FLAO GTP cyclohydrolase 1 OS= Croceivirga radicis OX=1929488 GN=folE PE=3 SV=1
MKEKDLVLEALTGTNGYLNGHTHEEIGDDHLYTGVETPLKANAFELSNQEKKNRIAELFAEIMDVMGLDLTDDSLQGTPMRVAKMYIDEIYSGLDPANKPKVALFENKYQYNQMLVEKDITFYSNCEHHFVPIIGKAHVAYISSGKVIGLSKLNRIVQYFAKRPQVQERLTNQIALELQKILDTEDVAVIIDAKHLCVSSRGIKDDTSATVTSFYGGTFNTPEKIQELYNYINN

SEQ ID NO: 7182 - protein, 199 aa, Croceivirga radicis
  misc_feature (1)..(199): tr|A0A1V6LSI4|A0A1V6LSI4_9FLAO GTP cyclohydrolase 1 OS= Croceivirga radicis OX=1929488 GN=folE PE=3 SV=1
MAPYRNLEEYNIEVANEVKDRYAKIIDEIGEDVTREGLLKTPERAAKAMLFLTQGYKQDAEQILKSAMFKEDYDDMVIIKDIELYSLCEHHMLPFFGKAHVAYIPNGQIVGLSKIPRIVDVFARRLQVQERLTHDILECLNNTLQPKGVAVVIEASHMCMMMRGVQKQNSVTTTSGFRGQFEKIETRNEFLKLISAKLS

SEQ ID NO: 7183 - protein, 231 aa, Crocinitomicaceae bacterium
  misc_feature (1)..(231): tr|A0A2D5V1I5|A0A2D5V1I5_9FLAO GTP cyclohydrolase 1 OS= Crocinitomicaceae bacterium OX=2026728 GN=folE PE=3 SV= 1
  misc_feature (70)..(70): Xaa can be any naturally occurring amino acid
  misc_feature (72)..(72): Xaa can be any naturally occurring amino acid
  misc_feature (78)..(78): Xaa can be any naturally occurring amino acid
  misc_feature (94)..(94): Xaa can be any naturally occurring amino acid
  misc_feature (219)..(219): Xaa can be any naturally occurring amino acid
MKLKETSLYIQPETSSEFNYDEIGNDHLGNPYDTPIRSDAFDISNNEKKEIIAEHFRAIMETLGLDLDDXSXMGTPYXVAKMYVEEIFHGLDPXNKPKIALFENKYQYNEMLVEKNITFYSNCEHHFVPIIGKAHIAYISSGKVIGLSKINRIVDYFARRPQVQERLTNQIGNELKDILGTEDVAVVIDAKHLCVSSRGIKDDTSSTTTSFYSGKFKSXSAKKEFQNYLIS

SEQ ID NO: 7184 - protein, 221 aa, Crocinitomicaceae bacterium
  misc_feature (1)..(221): tr|A0A2E4YTA3|A0A2E4YTA3_9FLAO GTP cyclohydrolase 1 OS= Crocinitomicaceae bacterium OX=2026728 GN=folE PE=3 SV= 1
MSKFEELGDDHWMSSQETPVKKEALALSDQEKVSKISFHFKKIMELLGLDLNDMSLSGTPNRVAKMYVNEVFSGLNPKNAPKISLFPNNYRYTGMLVEKDIEVYSTCEHHFVPIIGKAHVAYIAKDNVIGLSKINRIVQHYCKRPQVQERLTIEITNELKKVLDIEDVACVIEAKHLCVNMRGVRDTKSVTITAKYSGAFNNESQKKEFLSHINLDSNFDL

SEQ ID NO: 7185 - protein, 220 aa, Crocinitomix sp.
  misc_feature (1)..(220): tr|A0A2W1N5A6|A0A2W1N5A6_9FLAO GTP cyclohydrolase 1 OS= Crocinitomix sp. SM1701 OX=2219161 GN=folE PE=3 SV=1
MKNNTEIEEMGDDHFGTAGDTPLRKDAFLLSDDQKIDIIQEKFAEIMETLGLDLTDDSLKATPKRVAKMYVKELFGGLNPDKSPKNSTFENKYAYTEMLVEKDITVYSTCEHHFLPIVGKAHIAYISSGRVIGLSKMNRIVDYYSKRPQVQERLTMQVVNHLKDYLQTEDVACVIDAKHLCVNSRGIQDIQSSTVTAEFGGKFAEPEVKKEFLSYLRMKL

SEQ ID NO: 7186 - protein, 218 aa, Crocosphaera chwakensis
  misc_feature (1)..(218): tr|A3IRZ7|A3IRZ7_9CHRO GTP cyclohydrolase 1 OS=Crocosph aera chwakensis CCY0110 OX=391612 GN=folE PE=3 SV=1
MTLAQSEPNPVNKIDNKLPSLTTTQQPPVSEEEMRQAVRTLLLGLGEDPDREGLKDTPKRVVKALKFLTSGYHQSLDELLNGAVFHENANEMVLVRDIDLFSSCEHHILPILGRAHVAYIPDGKVIGLSKIARICEMYGRRLQVQERLTAQIADALQGLLQPKGVAVVVEATHMCMVMRGVQKPGSWTSTSALRGEFANDAKTRQEFMSLIQHNPRLR

SEQ ID NO: 7187 - protein, 239 aa, Crocosphaera chwakensis
  misc_feature (1)..(239): tr|A3IMW7|A3IMW7_9CHRO GTP cyclohydrolase 1 OS=Crocosph aera chwakensis CCY0110 OX=391612 GN=folE PE=3 SV=1
MTIASSNGSNFRQSNGSNVLNPNLVDRVASRPDRNTHNGQQAKIQPTSDESTEKMKEAVYTMLEAVGEDPEREGLLKTPKRVAEAMKFLTQGYNQSLEELVNGAIFDEGHNEMVLVRDINFFSLCEHHMLPFMGQAHVAYIPNQKVVGLSKLARIVEMYSRRLQVQERLTRQIAEAIQEILEPRGVAVVMEASHMCMVMRGVQKPGSWTVTSAMIGEFDEEQKTREEFLNLIRHQPKFF

SEQ ID NO: 7188 - protein, 212 aa, Crocosphaera subtropica
  misc_feature (1)..(212): tr|B1WXA7|B1WXA7_CROS5 GTP cyclohydrolase 1 OS=Crocosph aera subtropica (strain ATCC 51142 / BH68) OX=43989 GN= folE2 PE=3 SV=1
MTLSKEYNSALPRLVSSSHPPVTEEEMRQAVRTLLLGLGEDPDREGLRDTPKRVVKALKFLTSGYHQSLDELLNGAVFHENTDEMVLVRDIDLFSSCEHHILPILGRAHVAYIPDGKVIGLSKIARICEMYGRRLQVQERLTAQIADALQGLLQPKGVAVVVEATHMCMVMRGVQKPGSWTTTSAVRGVFAEDAKTRQEFMSLIRHSPTFQG

SEQ ID NO: 7189 - protein, 239 aa, Crocosphaera subtropica
  misc_feature (1)..(239): tr|B1WPW8|B1WPW8_CROS5 GTP cyclohydrolase 1 OS=Crocosph aera subtropica (strain ATCC 51142 / BH68) OX=43989 GN= folE1 PE=3 SV=1
MTIASSNGSNFRQSNGSNVLNPNLVERVASRPDRNTHNGQQATIQPTSDESTEKMKEAVYTMLEAVGEDPEREGLLKTPKRVAEAMKFLTQGYNQSLEELVNGAIFDEGHNEMVLVRDINFFSLCEHHMLPFMGQAHVAYIPNQKVVGLSKLARIVEMYSRRLQVQERLTRQIAEAIQEILEPRGVAVVMEASHMCMVMRGVQKPGSWTVTSAMIGEFDEEQKTREEFLNLIRHQPKFF

SEQ ID NO: 7190 - protein, 218 aa, Crocosphaera watsonii
  misc_feature (1)..(218): tr|T2IEA7|T2IEA7_CROWT GTP cyclohydrolase 1 OS=Crocosph aera watsonii WH 8502 OX=423474 GN=folE PE=3 SV=1
MTLAQSQPNPLNNIDNKLPSLTTTQRPLVSDEEMRQAVRTLLLGLGEDPDREGLKDTPKRVVKALKFLTSGYHQSLDELLNEAVFHESANEMVLVRDIDLFSSCEHHILPILGRAHVAYIPDGKVIGLSKIARICEMYGRRLQVQERLTGQIADALQGLLQPKGVAVVVEATHMCMVMRGVQKPGSWTSTSAVRGEFANDAKTRQEFMSLIQHNPGLG

SEQ ID NO: 7191 - protein, 241 aa, Crocosphaera watsonii
  misc_feature (1)..(241): tr|T2J0G9|T2J0G9_CROWT GTP cyclohydrolase 1 OS=Crocosph aera watsonii WH 0005 OX=423472 GN=folE PE=3 SV=1
MTIASTNAPNLRQSNGSDLLNPDIVEQVVTTRLDRNTHDGQEAKIQPTSNDESMDRMEEAVYTMLEELGEDPEREGLLKTPKRVAEAMKFLTQGYNQSLEELVNGAIFDEGHNEMVLVRDINFFSLCEHHMLPFMGQAHVAYIPNQKVVGLSKLARIVEMYSRRLQVQERLTRQIAEAIQEILEPRGVAVVIEASHMCMVMRGVQKPGSWTVTSAMLGEFDEEQKTREEFLNLIRHQPKPF

SEQ ID NO: 7192 - protein, 223 aa, Cronobacter condimenti
  misc_feature (1)..(223): tr|K8AGJ6|K8AGJ6_9ENTR GTP cyclohydrolase 1 OS=Cronobac ter condimenti 1330 OX=1073999 GN=folE PE=3 SV=1
MPSLSKEAALVHEALLARGLETPLRPPVNELDNETRKRLIAGHMTEIMQLLNLDLSDDSLMETPHRIAKMYVDEIFSGLDYANFPKITVIENKMKVDEMVTVRDITLTSTCEHHFVTIDGKATVAYIPKDAVIGLSKINRIVQFFAQRPQVQERLTQQVLVALQTLLGTNNVAVSIDAVHYCVKARGIRDATSATTTTSLGGLFKSSQNTRQEFLRAVRHHNG

SEQ ID NO: 7193 - protein, 223 aa, Cronobacter dublinensis
  misc_feature (1)..(223): tr|K8B070|K8B070_9ENTR GTP cyclohydrolase 1 OS=Cronobac ter dublinensis 1210 OX=1208656 GN=folE PE=3 SV=1
MPSLSKEAALVHEALVARGLETPLRPPINELDNETRKRLIAGHMTEIMQLLNLDLSDDSLMETPHRIAKMYVDEIFSGLDYANFPKITVIENKMKVDEMVTVRDITLTSTCEHHFVTIDGKATVAYIPKDAVIGLSKINRIVQFFAQRPQVQERLTQQVLVALQTLLGTNNVAVSIDAVHYCVKARGIRDATSATTTTSLGGLFKSSQNTRQEFLRAVRHHNG

SEQ ID NO: 7194 - protein, 223 aa, Cronobacter dublinensis
  misc_feature (1)..(223): tr|K8BA57|K8BA57_9ENTR GTP cyclohydrolase 1 OS=Cronobac ter dublinensis 582 OX=1208661 GN=folE PE=3 SV=1
MPSLSKEAALVHEALVARGLETPLRPPVNELDNETRKRLIAGHMTEFMQLLNLDLSDDSLMETPHRIAKMYVDEIFSGLDYANFPKITVIENKMKVDEMVTVRDITLTSTCEHHFVTIDGKATVAYIPKDAVIGLSKINRIVQFFAQRPQVQERLTQQVLVALQTLLGTNNVAVSIDAVHYCVKARGIRDATSATTTTSLGGLFKSSQNTRQEFLRAVRHHNG

SEQ ID NO: 7195 - protein, 223 aa, Cronobacter malonaticus
  misc_feature (1)..(223): tr|V5TX72|V5TX72_9ENTR GTP cyclohydrolase 1 OS=Cronobac ter malonaticus OX=413503 GN=folE PE=3 SV=1
MPSLSKEAALVHEALVARGLETPLRPPVNELDNETRKRLIAGHMTEIMQLLNLDLSDDSLMETPHRIAKMYVDEIFSGLDYANFPKITVIENKMKVDEMVTVRDITLTSTCEHHFVTIDGKATVAYIPKDAVIGLSKINRIVQFFAQRPQVQERLTQQVLVALQTLLGTNNVAVSIDAVHYCVKARGIRDATSATTTTSLGGLFKSSQNTRQEFLRAVRHHNG

SEQ ID NO: 7196 - protein, 223 aa, Cronobacter muytjensii; identical to SEQ ID NO: 7195
  misc_feature (1)..(223): tr|A0A2T7AV94|A0A2T7AV94_9ENTR GTP cyclohydrolase 1 OS= Cronobacter muytjensii OX=413501 GN=folE PE=3 SV=1

SEQ ID NO: 7197 - protein, 243 aa, Cronobacter sakazakii
  misc_feature (1)..(243): tr|A7MLK2|A7MLK2_CROS8 GTP cyclohydrolase 1 OS=Cronobac ter sakazakii (strain ATCC BAA-894) OX=290339 GN=folE P E=3 SV=1
MSHAPPRPGRVWLHLQEKITMPSLSKEAALVHEALVARGLETPLRPPVNELDNETRKRLIAGHMTEIMQLLNLDLSDDSLMETPHRIAKMYVDEIFSGLDYANFPKITVIENKMKVDEMVTVRDITLTSTCEHHFVTIDGKATVAYIPKDAVIGLSKINRIVQFFAQRPQVQERLTQQVLVALQTLLGTNNVAVSIDAVHYCVKARGIRDATSATTTTSLGGLFKSSQNTRQEFLRAVRHHNG

SEQ ID NO: 7198 - protein, 223 aa, Cronobacter sakazakii; identical to SEQ ID NO: 7195
  misc_feature (1)..(223): tr|K8D4R8|K8D4R8_CROSK GTP cyclohydrolase 1 OS=Cronobac ter sakazakii 696 OX=1208664 GN=folE PE=3 SV=1

SEQ ID NO: 7199 - protein, 223 aa, Cronobacter turicensis
  misc_feature (1)..(223): tr|A0A2T7B8M9|A0A2T7B8M9_9ENTR GTP cyclohydrolase 1 OS= Cronobacter turicensis OX=413502 GN=folE PE=3 SV=1
MPSLSKEAALVHEALVARGLETPLRPPVNELDNETRKRLIAGHMTEIMQLLNLDLSDDSLMETPHRIAKMYVDEIFSGLDYANFPKITVIENKMKVDEMVTVRDITLTSTCEHHFVIIDGKATVAYIPKDAVIGLSKINRIVQFFAQRPQVQERLTQQVLVALQTLLGTNNVAVSIDAVHYCVKARGIRDATSATTTTSLGGLFKSSQNTRQEFLRAVRHHNG

SEQ ID NO: 7200 - protein, 223 aa, Cronobacter turicensis; identical to SEQ ID NO: 7199
  misc_feature (1)..(223): tr|C9XW48|C9XW48_CROTZ GTP cyclohydrolase 1 OS=Cronobac ter turicensis (strain DSM 18703 / LMG 23827 / z3032) O X=693216 GN=folE PE=3 SV=1

SEQ ID NO: 7201 - protein, 223 aa, Cronobacter universalis; identical to SEQ ID NO: 7195
  misc_feature (1)..(223): tr|A0A376EPV7|A0A376EPV7_9ENTR GTP cyclohydrolase 1 OS= Cronobacter universalis NCTC 9529 OX=1074000 GN=folE PE =3 SV=1

SEQ ID NO: 7202 - protein, 218 aa, Cruoricaptor ignavus
  misc_feature (1)..(218): tr|A0A1M6G6J0|A0A1M6G6J0_9FLAO GTP cyclohydrolase 1 OS= Cruoricaptor ignavus OX=1118202 GN=folE PE=3 SV=1
MKYSKDAALGNAIKEYLVEKGVETPVLMTDKSNTTKIRIIEKNFTNIMKTLGLDLSDDSLKDSPHRVAKMFVNEIFYGLDYGNFPKATAVENKMKYNEVVLVKNISITSTCEHHFVTIDGKCHIAYIPKEKVIGLSKINRIAKFFAKRPQIQERLSEQIYYALSFILETEDIAVIIDAEHYCVKSRGIEDISSSTTTSKIGGVFLDDSARAELIGLIK

SEQ ID NO: 7203 - protein, 219 aa, Cruoricaptor ignavus
  misc_feature (1)..(219): tr|A0A1M6A8F1|A0A1M6A8F1_9FLAO GTP cyclohydrolase 1 OS= Cruoricaptor ignavus OX=1118202 GN=folE PE=3 SV=1
MDFAENDDDIFTGKEHTPLREDAFAISPEEKMERIERHFAEIMHTLGLDMADDSLKDSPKRVAKMYVHEIFGGLLPENKPKISTFSNKYKYRQMLVEKDISVYSFCEHHFLPIIGKAHVAYISNGEVIGLSKINRIVDYYARRPQVQERLTMQVVDAMKEALGTKDVACIIEAKHLCVNCRGIKDTASSTITAELSGIFRTNPITRQEFLHYVNIGSLI

SEQ ID NO: 7204 - protein, 189 aa, Cryobacterium arcticum
  misc_feature (1)..(189): tr|A0A317ZK74|A0A317ZK74_9MICO GTP cyclohydrolase 1 OS= Cryobacterium arcticum OX=670052 GN=folE PE=3 SV=1
MAVDQPRIEAAVAEILAAIGEDPARPGLGSTPQRVAAAYAEFFAGLAQDPLDHLRDPVPVGDRTGELVLLRDIEFRSVCEHHLLPFLGTAHLAYLPGDHVVGLGKLAAVVETLAARPQLQERLTEEIADALQTGLAPRGVLVVLDASHGCVTTRGPRQVHSSTVTMASRGELALPVARSEIIALIGGSK

SEQ ID NO: 7205 - protein, 189 aa, Cryobacterium arcticum
  misc_feature (1)..(189): tr|A0A1B1BN49|A0A1B1BN49_9MICO GTP cyclohydrolase 1 OS= Cryobacterium arcticum OX=670052 GN=folE PE=3 SV=1
MGVDQPRIQAAVAEILAAIGEDPGRPGLETTPERVASAYAEFFSGLGTDPLEHLRDSVPVGERTGELVLLRDIEFRSVCEHHLLPFLGTAHLAYLPGDHIVGLGKLAAVVETIAARPQLQERLTEEIADTLEAGLAPRGILVVLDASHGCVTTRGPRQSRSSTVTMASRGELAQPVARSEIIALIGGSL

SEQ ID NO: 7206 - protein, 189 aa, Cryobacterium flavum
  misc_feature (1)..(189): tr|A0A4R8V8D6|A0A4R8V8D6_9MICO GTP cyclohydrolase 1 OS= Cryobacterium flavum OX=1424659 GN=folE PE=3 SV=1
MAVDRARIQAAVSEILAAIGEDPERVGLESTPRRVADAYAEFFAGLDQNPQDLLADSVPVGESTGELVLLRDIAFRSICEHHLLPFLGIAHVAYLPGDRVVGLGRLPAVVETIAARPQLQERLTEEIADALQTGLDPLGVLVVLDAVHGCVGTRGPRQSASSTVTMASRGALTDPTARAEIIALIAAGG

SEQ ID NO: 7207 - protein, 189 aa, Cryobacterium levicorallinum
  misc_feature (1)..(189): tr|A0A1I3D5Y6|A0A1I3D5Y6_9MICO GTP cyclohydrolase 1 OS= Cryobacterium levicorallinum OX=995038 GN=folE PE=3 SV= 1
MAVDRARIEAAVSEILAAIGENPERVGLESTPRRVADAYAEFFAGLDQDPQELLQDFVPVGDSTGELVLLRDIAFRSICEHHLLPFLGTAHVAYLPRGRVVGLGRLPAVVETIAARPQLQERLTEEIAGALQDGLDPLGVLVVLDAVHGCVGTRGPRQSASSTVTMASRGVLTEPTARAEIIALIAAGQ

SEQ ID NO: 7208 - protein, 189 aa, Cryobacterium luteum
  misc_feature (1)..(189): tr|A0A1H8BPA6|A0A1H8BPA6_9MICO GTP cyclohydrolase 1 OS= Cryobacterium luteum OX=1424661 GN=folE PE=3 SV=1
MAVDRARIQAAVAEILAAIGEDPTRAGLESTPRRVADAYAEFFAGLDQNPQDHLKDFVPVDGSTGELVLLRDIAFRSVCEHHLLPFLGIAHVAYLPRGRVVGLGRLPAVVETLAARPQLQERLTEEIADALHEGLDPLGVLVVLDAVHGCVGTRGPRQTASSTVTMATRGALTDPTARAEIIALISAGG

SEQ ID NO: 7209 - protein, 191 aa, Cryobacterium mesophilum
  misc_feature (1)..(191): tr|A0A4R8VA12|A0A4R8VA12_9MICO GTP cyclohydrolase 1 OS= Cryobacterium mesophilum OX=433647 GN=folE PE=3 SV=1
MSIDTARIRSAVTELLEAIGEDPSRAGLVETPARVAEAYTEYFAGIGQDPLEHLAHTETIADAGHQPGELIILRDIDFRSMCEHHLLPFVGIAHIAYVPRDRVVGLGKLPRVVETLAARPQLQERLTEQVADTIERGLDALGVLVVLDAVHGCVTARGARQSRSSTVTLAARGTLTDPAARAEAVTLIGKG

SEQ ID NO: 7210 - protein, 194 aa, Cryobacterium mesophilum
  misc_feature (1)..(194): tr|A0A4R8VD30|A0A4R8VD30_9MICO GTP cyclohydrolase 1 OS= Cryobacterium mesophilum OX=433647 GN=folE PE=3 SV=1
MPAPLHAIDINDQQVRAENAVAELLSALGRDVTSAHLVETPRRVAASLLEMLTPRDFTMTTFPNDEGYEELVIVRDIPFHSLCEHHLLPFRGVAHIGYVPGDRIVGLSKLARVVELFSRDLQVQERLTQQISAYLTEQLAPRGVGVVLEAEHLCMTMRGAQAAGAMTTTTSFTGVLSKDNPMRRQFRLAGDLTA

SEQ ID NO: 7211 - protein, 189 aa, Cryobacterium psychrophilum
  misc_feature (1)..(189): tr|A0A4Y8KR97|A0A4Y8KR97_9MICO GTP cyclohydrolase 1 OS= Cryobacterium psychrophilum OX=41988 GN=folE PE=3 SV=1
MGVDKARIQAAVAEILVAIGEDPDREGLESTPTRVADAYAEFFGGIGRDPLDHLRDFLPVGPHTGELVLLRDVSFRSICEHHLLPFLGTAHIAYLPRERVVGLGRLPAVIETIAARPQLQERLTEEIAEVLQDGLDPLGVLVVLDAVHGCVGTRGPRQTRSSTVTLASRGSLSSPVARAEIISLIASGS

SEQ ID NO: 7212 - protein, 189 aa, Cryobacterium psychrotolerans
  misc_feature (1)..(189): tr|A0A1G9DH36|A0A1G9DH36_9MICO GTP cyclohydrolase 1 OS= Cryobacterium psychrotolerans OX=386301 GN=folE PE=3 SV =1
MAVDKARIEAAVAEILAAIGEDPARPGLETTPRRVAEAYAELFAGLEQDPLAPLRDTIPVGPDTGELVLLRNISFRSTCEHHLLPFIGTAHLAYLPSDRVVGLGRLPAVVEILAARPQVQERLTEEIAEALQAGLRPRGILVVLDAVHGCVSARGQRQVSSSTVTMASRGELTDPVARAEIIALIGAGG

SEQ ID NO: 7213 - protein, 189 aa, Cryobacterium roopkundense
  misc_feature (1)..(189): tr|A0A099JJK3|A0A099JJK3_9MICO GTP cyclohydrolase 1 OS= Cryobacterium roopkundense OX=1001240 GN=folE PE=3 SV=1
MGVDRARIEAAVSEILAAIGEDTDREGLESTPKRVADAYAEFFGGLDRNPLDHLRDSIPVGPHTGELVLLRDVAFRSICEHHLLPFLGTAHVAYLPNKRVVGLGRLPAVVETISARPQLQERLTEEIAEALQEGLNPLGVLVVLDAVHGCVGTRGPRQASSSTVTMASRGTLSDPVARAEIIALIAAGS

SEQ ID NO: 7214 - protein, 189 aa, Cryobacterium sp.
  misc_feature (1)..(189): tr|A0A4R8Y3B4|A0A4R8Y3B4_9MICO GTP cyclohydrolase 1 OS= Cryobacterium sp. TmT2-59 OX=1259264 GN=folE PE=3 SV=1
MAVDRARIEAAVAEIIAAIGEDVARPGLEATPRRVAESYAEFFAGLDVDPVDHLRDTIPVGPHTGELVLLRDIAFRSVCEHHLLPFLGTAHLAYLPDERVVGLGKLPAVVDTLATRPQLQERLTEEIAEALHTGLRPRGVLVVLDAVHGCVTARGPRQSASSTVTMASRGELSEPAARAEIMALIGAGR

SEQ ID NO: 7215 - protein, 189 aa, Cryobacterium sp.; identical to SEQ ID NO: 7214
  misc_feature (1)..(189): tr|A0A5F0G8S0|A0A5F0G8S0_9MICO GTP cyclohydrolase 1 OS= Cryobacterium sp. TMT4-10 OX=1259256 GN=folE PE=3 SV=1

SEQ ID NO: 7216 - protein, 214 aa, Cryobacterium zongtaii
  misc_feature (1)..(214): tr|A0A2S3ZNE5|A0A2S3ZNE5_9MICO GTP cyclohydrolase 1 OS= Cryobacterium zongtaii OX=1259217 GN=folE PE=3 SV=1
MRTSPSAPPHANRAPQPRRPAPVGVDQPRIEAAVAEILAAIGEDPGRAGLASTPERVASAYAEFFAGLGQDPLDHLRDTVPVGDRTGELVLLRDIEFRSVCEHHLLPFLGTAHLAYLPGERIVGLGKLASVVTTLAARPQLQERLTEEIADTLETGLAPRGILVVLDASHGCVTTRGPRQTHSSTVTMASRGDLALPVARSEIIALIGGTQVGR

SEQ ID NO: 7217 - protein, 214 aa, Cryobacterium zongtaii
  misc_feature (1)..(214): tr|A0A2S3ZBZ6|A0A2S3ZBZ6_9MICO GTP cyclohydrolase 1 OS= Cryobacterium zongtaii OX=1259217 GN=folE PE=3 SV=1
MRTSPSAPPHSNRAPQPRRPAPVGVDQPRIEAAVAEILAAIGEDPGRAGLASTPERVASAYAEFFAGLGQDPLDHLRDTVPVGDRTGELVLLRDIEFRSVCEHHLLPFLGTAHLAYLPGERIVGLGKLASVVTTLAARPQLQERLTEEIADTLETGLAPRGILVVLDASHGCVTTRGPRQTHSSTVTMASRGDLALPVARSEIIALIGGTQVVR

SEQ ID NO: 7218 - protein, 223 aa, Cryomorphaceae bacterium
  misc_feature (1)..(223): tr|A0A3B8QSF4|A0A3B8QSF4_9FLAO GTP cyclohydrolase 1 OS= Cryomorphaceae bacterium OX=1898111 GN=folE PE=3 SV=1
MNPVDHHDDADHMGGAFDTPMRKDAFELSEDEKISRIETHVRGIMDALGLDLQDDSLRGTPKRVAKMYVKEAFGGLDPAKKPILNTFENNYQYGEMLVEKNIVVYSTCEHHLLPIVGRAHVAYLSKDRVIGLSKMNRIVDFYAKRPQVQERLTRQITAALQQALGTDDVAVMIDAKHLCVNARGIRDIDSSTVTAEYGGRFAKEAALKQDFLSYVQLKTEFGD

SEQ ID NO: 7219 - protein, 227 aa, Cryomorphaceae bacterium
  misc_feature (1)..(227): tr|A0A352EFV0|A0A352EFV0_9FLAO GTP cyclohydrolase 1 OS= Cryomorphaceae bacterium OX=1898111 GN=folE PE=3 SV=1
MSNHIDPILAEEIGDAHESFKAETPLKDDAFVKSDREKIDIISTHVRGILETLGMDLDDDSLKGTPLRVAKMYVTEAFAGLHPDKKPGMSTFNNTYRYNEMLVEKNIVLYSTCEHHLLPIIGRAHVAYISNGKVVGLSKMNRIVDYYAKRPQVQERLTRQVVQALQEVLETENVACVIDAKHLCVNSRGIRDIDSSTVTAEFGGVFQQEDKKAEFLDYINLKTDFGA

SEQ ID NO: 7220 - protein, 198 aa, Cryptobacterium curtum
  misc_feature (1)..(198): tr|C7MPL0|C7MPL0_CRYCD GTP cyclohydrolase 1 OS=Cryptoba cterium curtum (strain ATCC 700683 / DSM 15641 / 12-3) OX=469378 GN=folE PE=3 SV=1
MSNDLDITGTRMDLDKVAQGVRLILEGVGEDPNREGLRKTPERVAKMYAECFAGLYADPASYFETTFDENHEEMVLVRDIPFYSMCEHHLAPFFGRAHVAYVPAEDGRICGISKLARLVDAFARRPQVQERLTSQIADTLVEQLHPQGVIVVMEAEHLCMSMRGVKKPGSKTTTSAVRGLFRRNPATRAEALSLIFQR

SEQ ID NO: 7221 - protein, 201 aa, Cryptobacterium sp.
  misc_feature (1)..(201): tr|R7CJT8|R7CJT8_9ACTN GTP cyclohydrolase 1 OS=Cryptoba cterium sp. CAG:338 OX=1262868 GN=folE PE=3 SV=1
MSEQLTEPLKGSMDLEKIEAGVRMILEGIGEDPDREGLLKTPSRVARMYEEVFAGLYEDPAVHFETTFDEHHEELVIVHDIPFYSMCEHHLVPFFGKAHVAYIPAKSGRICGISKLARLVDAFARRPQVQERLTSQVADTLMEQLNPQGVIVIMEAEHLCMSMRGVKKPGSKTTTSAVRGIFKSSASAATRAEALSLLMGR

SEQ ID NO: 7222 - protein, 203 aa, Cryptosporangium arvum
  misc_feature (1)..(203): tr|A0A010YW51|A0A010YW51_9ACTN GTP cyclohydrolase 1 OS= Cryptosporangium arvum DSM 44712 OX=927661 GN=folE PE=3 SV=1
MTPAGEGGTSAAEAVDLPRIQRAVREILTAVGEDPDREGLRETPARVARAYAEIFSGLHVDPSTVLTTVFEEDHEELVLVKDIELYSTCEHHLVPFHGVAHVGYIPGEDGRITGLSKLARLVEAYARRPQVQERLTSQIADTLMAKLEPRGVIVVVECEHLCMSMRGVRKPGARTVTSAVRGWFQRSQAARAEAMSLILGSGR

SEQ ID NO: 7223 - protein, 203 aa, Cryptosporangium aurantiacum
  misc_feature (1)..(203): tr|A0A1M7NCB9|A0A1M7NCB9_9ACTN GTP cyclohydrolase 1 OS= Cryptosporangium aurantiacum OX=134849 GN=folE PE=3 SV= 1
MTPAGDGGTSAEHTVDLLRIQRAVREILSAVGEDPDREGLRETPARVARAYAEIFSGLHVDPSALLTTVFEEDHEEIVLVKDIELYSTCEHHLVPFHGVAHVGYIPGEEGRITGLSKLARLVEAYARRPQVQERLTSQIADTLMEKLEPRGVIVVVECEHLCMSMRGIRKPGARTVTSAVRGWFQRSQAARAEAMSLILGSGR

SEQ ID NO: 7224 - protein, 210 aa, Cryptosporangium sp.
  misc_feature (1)..(210): tr|A0A545AN77|A0A545AN77_9ACTN GTP cyclohydrolase 1 OS= Cryptosporangium sp. A-T 5661 OX=2593070 GN=folE PE=3 S V=1
MLNSPDEASGIVSRGAAGRVALVGERPHHEEAAACAAGMLTALDVDLDDEHRRDTPARLARALAEMLTPPAFDPTTFDNADGYDELVVVEAIPFHSLCEHHVLPFVGTATIAYLPDQHIAGLSKLAWVVQLFARCLQVQERMTGQIADWLVENLRPRGAAVLLRAEHLCMSLRGARALGAVTTTSACRGALAEDRPRRREWLELVATLPR

SEQ ID NO: 7225 - protein, 213 aa, Cryptosporangium sp.
  misc_feature (1)..(213): tr|A0A545AGY4|A0A545AGY4_9ACTN GTP cyclohydrolase 1 OS= Cryptosporangium sp. A-T 5661 OX=2593070 GN=folE PE=3 S V=1
MSTEAVASDALTPAGEPGKSAAEAVDLPRIQRAVREILIAVGEDPDRDGLKQTPARVARAYAEIFSGLHVDPAEVLTTVFEEDHEELVLVKDIELYSTCEHHLVPFHGVAHVGYIPGEDGRITGLSKLARLVEAYARRPQVQERLTSQIADTLMTQLEPRGVIVVVECEHLCMSMRGIRKPGARTVTSAVRGWFQRSQAARAEAMSLILGSGR

SEQ ID NO: 7226 - protein, 207 aa, Culturomica sp.
  misc_feature (1)..(207): tr|A0A356DKX9|A0A356DKX9_9BACT GTP cyclohydrolase 1 OS= Culturomica sp. OX=1926652 GN=folE PE=3 SV=1
MDQEITNEAEFYQKVEYFNTEKTEKLSYHYREILKLLGEDPEREGLQKTPLRVAKAMQFMTQGYYQNPEKILSSALFKEDYQQMVIVKDIEIYSLCEHHMLPFYGRVHVAYIPNGYVTGLSKIARVVETYARRLQVQERLTHEIKNCIQNTLHPLGVAVVIEAKHMCMAIRGVQKQNSVTTTSDFSGAFEKLATREEFIRLISSNLH

SEQ ID NO: 7227 - protein, 186 aa, Cuneatibacter caecimuris
  misc_feature (1)..(186): tr|A0A4Q7PNZ5|A0A4Q7PNZ5_9FIRM GTP cyclohydrolase 1 OS= Cuneatibacter caecimuris OX=1796618 GN=folE PE=3 SV=1
MVNHEKIETAVRMLLEGIGEDPEREGLKDTPARIARMYEEIFGGMEEDAGAYLSRTFTAENNEIVLEKDITLFSTCEHHLMPFYGKAHVAYIPDGMVVGLSKLARTVEAYARRLQLQERLTAQIADALMEYLKPRGAMVVIEAEHMCMTMRGVRKPGAKTLTYVCRGAFEENQALCDRVFRMIGRD

SEQ ID NO: 7228 - protein, 267 aa, Cupriavidus alkaliphilus
  misc_feature (1)..(267): tr|A0A329B022|A0A329B022_9BURK GTP cyclohydrolase FolE2 OS=Cupriavidus alkaliphilus OX=942866 GN=folE2 PE=3 SV =1
MNDINPAFIMPDVQSSPDTRQIPIQRVGVKGVRYPVTLKTPAGIVPTVGTFNLDVHLPAEQKGTHMSRFVALLEEERAPLELASFRLMLDKMLEKLEAEAGRIEVTFPYFISKIAPVSGVESLLDYEVTLTGEVRNGATRVFLKALVPVTSLCPCSKKISQYGAHNQRSHITMNVELAGELPVEALVRMAEEEASCELWGLLKRPDEKFVTERAYENPKFVEDLVRDIAMRLNADERIVAYVLEAENFESIHNHSAYAVIERDKRVA

SEQ ID NO: 7229 - protein, 267 aa, Cupriavidus alkaliphilus
  misc_feature (1)..(267): tr|A0A2W7QJ52|A0A2W7QJ52_9BURK GTP cyclohydrolase FolE2 OS=Cupriavidus alkaliphilus OX=942866 GN=folE2 PE=3 SV =1
MNDINPAFVMPDVQSSPDTRQIPIQRVGVKGVRYPVTLKTPAGIVPTVGTFNLDVHLPAEQKGTHMSRFVALLEEERAPLELASFRLMLDKMLEKLEAEAGRIEVTFPYFISKIAPVSGVESLLDYEVTLTGEVRNGATRVFLKALVPVTSLCPCSKKISQYGAHNQRSHITMNVELAGELPVEALVRMAEEEASCELWGLLKRPDEKFVTERAYENPKFVEDLVRDIAMRLNADERIVAYVLEAENFESIHNHSAYAVIERDKRVG

SEQ ID NO: 7230 - protein, 241 aa, Cupriavidus basilensis
  misc_feature (1)..(241): tr|A0A0C4YF64|A0A0C4YF64_9BURK GTP cyclohydrolase I typ e 1 OS=Cupriavidus basilensis OX=68895 GN=RR42_s2841 PE =4 SV=1
MESDHQAPDPGLDEALGSVSTRIRSRLQAARERFHANDNIAAYVEPGELDELLDEVQSRMEEVLRSLVIDIDHDHNTRETARRVAKMYLKEIFAGRYVNQPNVTEFPNAERINELMIVGPLRVRSACSHHLCPIIGKLWVGVMPNQHSNLIGLSKYARLAEWIMCRPQIQEEAVTQVADLLQEKMSPDGLAIVMEAEHFCMHWRGVRDTDAKMTNSVMRGSFLKDDSLRREFLTLLNRTRD

SEQ ID NO: 7231 - protein, 268 aa, Cupriavidus basilensis
  misc_feature (1)..(268): tr|H1S6E4|H1S6E4_9BURK GTP cyclohydrolase FolE2 OS=Cupr iavidus basilensis OR16 OX=1127483 GN=folE2 PE=3 SV=1
MNDINPAFVMPDVQSSLDTRQIPIQRVGVKGVRYPLSLKTPAGVLATVGTFNLDVHLPADQKGTHMSRFVALLEDEREPLELATFRTLLDKMLVKLEAEAGRIEVTFPYFINKIAPVSGVQSLMDYEVTLIGEVRNGTTKVFLKALVPVTSLCPCSKKISQYGAHNQRSHITMNVELAGDLPVEALVRMAEEEASCELWGLLKRPDEKFVTERAYENPKFVEDLVRDIAMRLNADERIVAYVLEAENFESIHNHSAYAVIERDKRTAQ

SEQ ID NO: 7232 - protein, 268 aa, Cupriavidus campinensis
  misc_feature (1)..(268): tr|A0A556UR39|A0A556UR39_9BURK GTP cyclohydrolase FolE2 OS=Cupriavidus campinensis OX=151783 GN=folE2 PE=3 SV= 1
MNDINPAFVMPDVQSSVDTRQIVIQRVGVKGVRYPLTLKTPAGVVATVGTFDLDVRLPADQKGTHMSRFVALLEDYRAPLDLAAFRTLLDDMLVRLEADAGRIEVTFPYFISKTAPVSGVESLMDYAVTLTGEVRDGQSRLWLTALVPVTSLCPCSKKISQYGAHNQRSHITMRVELAGDLPVEALVRMAEEEASCELWGLLKRPDEKFVTERAYENPKFVEDLVRDIAMRLNADARIVAYTLEAENFESIHNHSAYAVIEHDKRQPA

SEQ ID NO: 7233 - protein, 267 aa, Cupriavidus gilardii
  misc_feature (1)..(267): tr|A0A0M4LEM2|A0A0M4LEM2_9BURK GTP cyclohydrolase FolE2 OS=Cupriavidus gilardii CR3 OX=1267562 GN=folE2 PE=3 S V=1
MNDINPAFVMPDVQSSLDTRQIPIQRVGVRGVRYPLTMRTPGGVHPTVGTFNLDVHLPADQKGTHMSRFVALLEDEREPLDLAAFRALVGKMLQRLEAQAGRIEVTFPYFINKIAPVSGVASLMDYEVTLIGEARDGVTKVWLKALVPVTSLCPCSKKISQYGAHNQRSHITMCVELAADLPVETLVRMAEEEASCELWGLLKRPDEKYVTERAYENPKFVEDLVRDIAMRLNADERIVAYVLEAENFESIHNHSAYAVIERDKRLS

SEQ ID NO: 7234 - protein, 271 aa, Cupriavidus gilardii
  misc_feature (1)..(271): tr|A0A5A8EWL4|A0A5A8EWL4_9BURK GTP cyclohydrolase FolE2 OS=Cupriavidus gilardii OX=82541 GN=folE2 PE=3 SV=1
MNDINPAFVMPDVQSSLDTRQIPIQRVGVRGVRYPLTMRTAQGVHPTVGTFNLDVHLPADQKGTHMSRFVALLEDEREPLDLASFPALLDKMLQRLEAQAGRIEVTFPYFINKIAPVSGVASLMDYEVTLIGEARDGVTRVWLKALVPVTSLCPCSKKISQYGAHNQRSHITMSVELAADLPIEALVRMAEEEASCELWGLLKRPDEKYVTERAYENPKFVEDLVRDIAMRLNADERIVAYVLEAENFESIHNHSAYAVIERDKRVSQLAG

SEQ ID NO: 7235 - protein, 267 aa, Cupriavidus metallidurans
  misc_feature (1)..(267): sp|Q1LK35|GCH42_CUPMC GTP cyclohydrolase FolE2 2 OS=Cup riavidus metallidurans (strain ATCC 43123 / DSM 2839 / NBRC 102507 / CH34) OX=266264 GN=folE2-2 PE=3 SV=1
MNDINPAFVMPDVQSSVDTRQIVIQRVGVKGVRYPLTLKTPAGAVGTVGTFNMDVRLPADQKGTHMSRFVALLEENRAPLDLAAFRALVDDMLVRLEADAGRIEVSFPYFITKTAPVSGVQSLLDYEVTLVAEARDGQTRMFMTALVPVTSLCPCSKKISQYGAHNQRSHITMRVELAGDLDVEALVRMAEEEASCELWGLLKRPDEKFVTERAYENPKFVEDLVRDIAMRLNADDRIVAYTLEAENFESIHNHSAYAVIEHDKRHQ

SEQ ID NO: 7236 - protein, 267 aa, Cupriavidus metallidurans; identical to SEQ ID NO: 7235
  misc_feature (1)..(267): tr|A0A132HKK3|A0A132HKK3_9BURK GTP cyclohydrolase FolE2 OS=Cupriavidus metallidurans OX=119219 GN=folE2_1 PE=3 SV=1

SEQ ID NO: 7237 - protein, 267 aa, Cupriavidus nantongensis
  misc_feature (1)..(267): tr|A0A142JMN7|A0A142JMN7_9BURK GTP cyclohydrolase FolE2 OS=Cupriavidus nantongensis OX=1796606 GN=folE2 PE=3 S V=1
MNDINPAFVMPDVQSSPDTRQIPIQRVGVKGVRYPVTLKTPAGVVPTVGTFNLDVHLPADQKGTHMSRFVALLEEERAPLELASFRLMLDKMLEKLEAEAGRIEVTFPYFISKIAPVSGVESLLDYEVTLTGEVRNGATRVFLKALVPVTSLCPCSKKISQYGAHNQRSHITMNVELAGELPVEALVRMAEEEASCELWGLLKRPDEKFVTERAYENPKFVEDLVRDIAMRLNADERIVAYVLEAENFESIHNHSAYAVIERDKRVG

SEQ ID NO: 7238 - protein, 267 aa, Cupriavidus necator
  misc_feature (1)..(267): sp|Q0K861|GCH4_CUPNH GTP cyclohydrolase FolE2 OS=Cupria vidus necator (strain ATCC 17699 / H16 / DSM 428 / Stan ier 337) OX=381666 GN=folE2 PE=3 SV=1
MNDINPAFVMPDVQSSPDTRQIPIQRVGVKGVRYPVTLKTPAGIMPSVGTFNLDVHLPADQKGTHMSRFVALLEEERAPLELSSFRLMLDKMLEKLEAEAGRIEVTFPYFISKTAPVSGVESLLDYEVTLTGEVRDGAARVFLKALVPVTSLCPCSKKISQYGAHNQRSHITMNVELAGELPVEALVRMAEEEASCELWGLLKRPDEKFVTERAYENPKFVEDLVRDIAMRLNADDRIVAYVLEAENFESIHNHSAYAVIERDKRVD

SEQ ID NO: 7239 - protein, 267 aa, Cupriavidus necator
  misc_feature (1)..(267): tr|A0A1K0JE45|A0A1K0JE45_CUPNE GTP cyclohydrolase FolE2 OS=Cupriavidus necator OX=106590 GN=folE PE=3 SV=1
MNDINPAFIMPDVQSSPDTRQIPIQRVGVKGVRYPVTLKTPTGIVPTVGTFNLDVHLPADQKGTHMSRFVALLEEERAPLELASFRLMLDKMLEKLEAEAGRIEVAFPYFISKTAPVSGVESLLDYEVTLTGEVRNGAARVFLKALVPVTSLCPCSKKISQYGAHNQRSHITMDVELAGELPVEALVRMAEEEASCELWGLLKRPDEKFVTERAYENPKFVEDLVRDIAMRLNADDRIVAYVLEAENFESIHNHSAYAVIERDKRVD

SEQ ID NO: 7240 - protein, 249 aa, Cupriavidus oxalaticus
  misc_feature (1)..(249): tr|A0A375FT78|A0A375FT78_9BURK GTP cyclohydrolase I OS= Cupriavidus oxalaticus OX=96344 GN=CO2235_MP60216 PE=4 SV=1
MNSKDAAHRPHDPHPADAAAGDPASSVSERIRARLQAAQERFHANDNIARYIEPGELEELQAEVQSRIEGVLRALVIDVDNDHNTQETARRVAKMYLKEIFAGRYAKSPAVTEFPNVGQLNELMIVGPLRVRSACSHHLCPIIGKLWVGVMPNQHSNLIGLSKYARLAEWIMCRPQIQEEAVAQVADLLQEKMNPDGLAIVMEAEHFCMHWRGVRDTDAKMTNSVMRGSFLKDDSLRREFLTLLNNNRG

SEQ ID NO: 7241 - protein, 267 aa, Cupriavidus oxalaticus
  misc_feature (1)..(267): tr|A0A4P7LK71|A0A4P7LK71_9BURK GTP cyclohydrolase FolE2 OS=Cupriavidus oxalaticus OX=96344 GN=folE2 PE=3 SV=1
MNDINPAFVMPDVQSSLDTRQIPIQRVGVKGVRYPVTLKTPAGIMPSVGTFNLDVHLPADQKGTHMSRFVALLEEERAPLELASFRLLLGKMLEKLEAEAGRIEVTFPYFISKIAPVSGVESLLDYEVTLTGEVRNGQTRVFLKAMVPVTSLCPCSKKISQYGAHNQRSHITMDVELAAELPVEALVRMAEEEASCELWGLLKRPDEKFVTERAYENPKFVEDLVRDIAMRLNADERIVAYVLEAENFESIHNHSAYAVIERDKRVN

SEQ ID NO: 7242 - protein, 267 aa, Cupriavidus pauculus
  misc_feature (1)..(267): tr|A0A2N5CHF6|A0A2N5CHF6_9BURK GTP cyclohydrolase FolE2 OS=Cupriavidus pauculus OX=82633 GN=folE2 PE=3 SV=1
MNDINPAFVMPDVQSSVDTRQIVIQRVGVKGVRYPLTLKTPAGDIGTVGTFNLDVRLPADQKGTHMSRFVALLEDNRAPLDLAGFRALLDDMLVRLEADAGRIEVSFPYFISKTAPVSGVQSLLDYEVTLAGEKRDGQTRLFLTALVPVTSLCPCSKKISQYGAHNQRSHITMQVELAGDLDVETLVRMAEEEASCELWGLLKRPDEKFVTERAYENPKFVEDLVRDIAMRLNADDRIVAYTLEAENFESIHNHSAYAVIERDKRVQ

SEQ ID NO: 7243 - protein, 267 aa, Cupriavidus pauculus
  misc_feature (1)..(267): tr|A0A3G8GZS1|A0A3G8GZS1_9BURK GTP cyclohydrolase FolE2 OS=Cupriavidus pauculus OX=82633 GN=folE2 PE=3 SV=1
MNDIHPAFVMPDVQSSVDTRQIVIQRVGVKGVRYPLTLKTPAGQVGTVGTFNLDVRLPADQKGTHMSRFVALLEDNRAPLDLAGFRALLDDMLVRLEADAGRIEVTFPYFISKIAPVSGVQSLLDYEVTLAGERRDGQTRLFLTALVPVTSLCPCSKKISQYGAHNQRSHITMQVELGGDLDVETLVRMAEEEASCELWGLLKRPDEKFVTERAYENPKFVEDLVRDIAMRLNADDRIVAYTLEAENFESIHNHSAYAVIERDKRVG

SEQ ID NO: 7244 - protein, 270 aa, Cupriavidus pinatubonensis
  misc_feature (1)..(270): sp|Q474C1|GCH4_CUPPJ GTP cyclohydrolase FolE2 OS=Cupria vidus pinatubonensis (strain JMP 134 / LMG 1197) OX=264 198 GN=folE2 PE=3 SV=1
MNDINPAFVMPDVQSSRDTRQIPIQRVGVKGVRYPVSLKTPAGVVPSVGTFNLDVHLPAEVKGTHMSRFVALLEEERAPLELASFRVLLDKMLEKLEAEAGRIEVTFPYFISKIAPVSGVESLMDYEVTLTGEIRNGVTRVFLKALVPVTSLCPCSKKISQYGAHNQRSHITMNVELAGELPVEALVRMAEEEASCELWGLLKRPDEKFVTERAYENPKFVEDLVRDIAMRLNADERIVAYVLEAENFESIHNHSAYAVIERDKRLEPTA

SEQ ID NO: 7245 - protein, 247 aa, Cupriavidus pinatubonensis
  misc_feature (1)..(247): tr|Q46V05|Q46V05_CUPPJ GTP cyclohydrolase I OS=Cupriavi dus pinatubonensis (strain JMP 134 / LMG 1197) OX=26419 8 GN=Reut_B3671 PE=4 SV=1
MTDKDAAHHGAKHKTSDAAPGESSVSDRIRSRLLAARERFHANDNIARYIEPGELDALQEEVQARLEEVLRALVIDVDQDHNTRETARRVAKMYLKEIFAGRYAKAPAVTEFPNVEQLSELMIVGPLRVRSACSHHLCPIIGKLWVGVMPNQHSNLIGLSKYARLAEWIMCRPQIQEEAVAQVADLLQEKMNPDGLAIVMEAEHFCMHWRGVRDTDAKMTNSVMRGSFLKDGSLRREFLALLNRNGK

SEQ ID NO: 7246 - protein, 267 aa, Cupriavidus plantarum
  misc_feature (1)..(267): tr|A0A316F3S6|A0A316F3S6_9BURK GTP cyclohydrolase FolE2 OS=Cupriavidus plantarum OX=942865 GN=folE2 PE=3 SV=1
MNDINPAFVMPDVQSSLDTRQIPIERVGVRGVRYPLSVKTPNGVVATVGTFDLDVRLPADQKGTHMSRFVALLEEGQAPLDLAAFRAMMDTMLARLEADAGRISVRFPYFISKTAPVSGVQSLMDYEVTLTAEARDGQTRVFLTALVPVTSLCPCSKKISQYGAHNQRSHITMKVELAAELPVEALVRMAEEEASCELWGLLKRPDEKYVTERAYENPKFVEDLVRDIAMRLNADDRIVAYTLEAENFESIHNHSAYALIERDKRGG

SEQ ID NO: 7247 - protein, 267 aa, Cupriavidus sp.
  misc_feature (1)..(267): tr|A0A388RRU1|A0A388RRU1_9BURK GTP cyclohydrolase FolE2 OS=Cupriavidus sp. P-10 OX=2027911 GN=folE2 PE=3 SV=1
MNDINPAFVMPDVQSSVDTRQIPIQRVGVKGVRYPVTLKTPTGIVPSVGTFNLDVHLPADQKGTHMSRFVALLEEERAPLELASFRLLLDKMLEKLEAEAGRIEVTFPYFISKIAPVSGVQSLLDYEVTLTGEVRNGRTRVFLKAMVPVTSLCPCSKKISQYGAHNQRSHITMDVELADELPVEALVRMAEEEASCELWGLLKRPDEKFVTERAYENPKFVEDLVRDIAMRLNADDRIAAYVLEAENFESIHNHSAYAVIERDKRVN

SEQ ID NO: 7248 - protein, 267 aa, Cupriavidus sp.; identical to SEQ ID NO: 7235
  misc_feature (1)..(267): tr|L2EBD1|L2EBD1_9BURK GTP cyclohydrolase FolE2 OS=Cupr iavidus sp. HMR-1 OX=1249621 GN=folE2 PE=3 SV=1

SEQ ID NO: 7249 - protein, 267 aa, Cupriavidus taiwanensis
  misc_feature (1)..(267): tr|A0A375F316|A0A375F316_9BURK GTP cyclohydrolase FolE2 OS=Cupriavidus taiwanensis OX=164546 GN=folE2 PE=3 SV= 1
MNDINPAFIMPDVQSSPDTRQIPIQRVGVKGVRYPVTLKTPTGIVPTVGTFNLDVHLPADQKGTHMSRFVALLEEERAPLELASFRLMLDKMLEKLEAEAGRIEVTFPYFISKIAPVSGVESLLDYEVTLTGEVRNGATRVFLKALVPVTSLCPCSKKISQYGAHNQRSHITMNVELAGELPVEALVRMAEEEASCELWGLLKRPDEKFVTERAYENPKFVEDLVRDIAMRLNADERIVAYVLEAENFESIHNHSAYAVIERDKRVD

SEQ ID NO: 7250 - protein, 248 aa, Cupriavidus taiwanensis
  misc_feature (1)..(248): tr|A0A375DKW3|A0A375DKW3_9BURK GTP cyclohydrolase I OS= Cupriavidus taiwanensis OX=164546 GN=CBM2597_B10227 PE= 4 SV=1
MTSKDAAHRAQDSNAGDSASHPAGSVSARIRARLEAAQERFHANDNIARYIEPGEMEQLQAEVQARLQDVLRALVIDVDNDHNTQETARRVAKMYLKEIFAGRYAKAPPVTEFPNVGQLNELMIVGPLRVRSACSHHLCPIIGKLWIGVMPNQHSNLIGLSKYARLAEWIMCRPQIQEEAVAQVADLLQEKMSPDGLAIVMEAEHFCMHWRGVRDTDAKMTNSVMRGSFLKDDSLRREFLTLLNHNRG

SEQ ID NO: 7251 - protein, 207 aa, Curtobacterium citreum
  misc_feature (1)..(207): tr|A0A542FF61|A0A542FF61_9MICO GTP cyclohydrolase 1 OS= Curtobacterium citreum OX=2036 GN=folE PE=3 SV=1
MNERLDRARIEAAVRELLLAVGDDPDRPELERTPARVADSYAEFFAGIGVDATAIALDGAVHSEDGERGQLVVVREVRFRSMCEHHLLPFIGVAHLAYAPGEQLIGLGTLSRVLDAVASRPQLQERLGEQVAAAVAEGLDAAGVLVVLDARHQCVTARGERQSGSSTVTVAATGSLAEAAGRAEAIALIGAGLGAAAGTGNDHGADA

SEQ ID NO: 7252 - protein, 203 aa, Curtobacterium citreum
  misc_feature (1)..(203): tr|A0A1C7C3Q9|A0A1C7C3Q9_9MICO GTP cyclohydrolase 1 OS= Curtobacterium citreum OX=2036 GN=folE PE=3 SV=1
MDRARIEAAVRELLLAVGDDPDRPELERTPARVADSYAEFFAGIGVDATAIARDGAVHSEDGERGQLVVVREVRFRSMCEHHLLPFIGVAHLAYAPGEQLIGLGTLSRVLDAVASRPQLQERLGEQVAAAVAEGLDAAGVLVVLDARHQCVTARGERQSGSSTVTVAATGSLAEAAGRAEAIALIGAGVGAAMAAGTDHGADA

SEQ ID NO: 7253 - protein, 199 aa, Curtobacterium flaccumfaciens
  misc_feature (1)..(199): tr|A0A4R6DKI6|A0A4R6DKI6_9MICO GTP cyclohydrolase 1 OS= Curtobacterium flaccumfaciens OX=2035 GN=folE PE=3 SV=1
MDRARVEAAVRELLLGIGEDPDRPELVRTPSRVADAYAEFFAGIGTDAVAIARNGTVHAEDGDRGQLVIVRDVRFRSVCEHHLLPFTGVAHMAYAPGDRLIGLGTLSRVLDAVASRPQLQERLGEQVAATIAEGLGAVGVLVVLDAQHQCVTTRGERQSASTTVTVAATGTLSDAAGRAEAIALIGAGVRSGADHEAGA

SEQ ID NO: 7254 - protein, 203 aa, Curtobacterium flaccumfaciens
  misc_feature (1)..(203): tr|A0A022LVC6|A0A022LVC6_9MICO GTP cyclohydrolase 1 OS= Curtobacterium flaccumfaciens UCD-AKU OX=1292022 GN=fol E PE=3 SV=1
MDRARVEAAVRELLLAIGEDPDRPELTRTPARVADSYSEFFSGIGTDAVAIARDGTVHAEDGERGRLVIVRDVKFRSVCEHHLLPFLGVAHLAYAPGERLIGLGTLARVLDAVASRPQLQERLGEQVTATIAEGLGAEGVLVVLDAQHQCVTTRGERQTGSTTVTVAATGSLADTAGRAEAIALIGAGRRTDAAGAATAEAGA

SEQ ID NO: 7255 - protein, 209 aa, Curtobacterium luteum
  misc_feature (1)..(209): tr|A0A175RRT7|A0A175RRT7_9MICO GTP cyclohydrolase 1 OS= Curtobacterium luteum OX=33881 GN=folE PE=3 SV=1
MDRARIEGAVRELLLAVGDDPDRPELARTPGRVAASYAEFFSGIGTDAVAIARDGVVHAEDGDRGQLVIVRDVKFRSMCEHHLLPFIGVAHLAYAPGDQLIGLGTLSRVLDAVASRPQLQERLGEQVAATVAEGLDATGVLVVLDAQHQCVTTRGERQTGSTTVTVAATGTLATPAGRAEAIALIGAGVGTAGGPTAGADHRADHGADA

SEQ ID NO: 7256 - protein, 205 aa, Curtobacterium oceanosedimentum
  misc_feature (1)..(205): tr|A0A147DNI0|A0A147DNI0_9MICO GTP cyclohydrolase 1 OS= Curtobacterium oceanosedimentum OX=465820 GN=folE PE=3 SV=1
MDRARVEAAVRELLLAVGDDPDRPELERTPARVADSYAEFFAGMGVDATAIARDGAVHSEDGERGQLVVVRDVRFRSMCEHHLLPFIGVAHLAYAPGEQLIGLGTLSRVLDAVASRPQLQERLGEQVAAAVAEGLDADGVLVVLDATHQCVTARGERQSGSSTVTVAATGSLADAAGRAEAIALIGAGAGAGAVTGAGPDHGADA

SEQ ID NO: 7257 - protein, 221 aa, [Curtobacterium] plantarum
  misc_feature (1)..(221): tr|A0A3M7U1U7|A0A3M7U1U7_9GAMM GTP cyclohydrolase 1 OS= [Curtobacterium] plantarum OX=221276 GN=folE PE=3 SV=1
MSTLSQEAALVHEALLARGLETPLRAPTRDIDDNTRKSLIAGHMTEIMQLLNLDLEDDSLMETPHRIAKMYVDEVFSGLDYANFPKITVIENKMKVDEMVTVRDITLTSTCEHHFVIIDGKATVAYIPKEKVIGLSKINRIVQFFAQRPQVQERLTQQVLVALQTLLGTNNVAVSIDAVHYCVKARGVKDATSATTTTSLGGLFKSSQNTRQEFLRAVRHS

SEQ ID NO: 7258 - protein, 207 aa, Curtobacterium sp.
  misc_feature (1)..(207): tr|A0A3N1YDJ6|A0A3N1YDJ6_9MICO GTP cyclohydrolase 1 OS= Curtobacterium sp. JUb34 OX=2485109 GN=folE PE=3 SV=1
MTSRMDRARVEAAVRELLLGIGEDPDRPELERTPARVADSYAEFFSGIGTDAVAIARDGTVHAEDGERGRLVIVRDVKFRSVCEHHLLPFLGVAHLAYAPGDRLIGLGTLARVLDAVASRPQLQERLGEQVAATIAEGLGAEGVLVVLDAQHQCVTTRGERQTGSTTVTVAATGSLADAAGRSEAIALIGAGRVTDTTHVASDGADA

SEQ ID NO: 7259 - protein, 197 aa, Curtobacterium sp.
  misc_feature (1)..(197): tr|A0A4R8BMW9|A0A4R8BMW9_9MICO GTP cyclohydrolase 1 OS= Curtobacterium sp. PhB190 OX=2485201 GN=folE PE=3 SV=1
MDRARVEAAVRELLLGIGEDPDRPELERTPARVADSYAEFFAGIGTDAVAIARDGTVHAEDGERGRLVIVRDVKFRSVCEHHLLPFLGVAHLAYAPGDRLIGLGTLSRVLDAVASRPQLQERLGEQVAATIAEGLGAEGVLVVLDAQHQCVTTRGERQTGSTTVTVAANGSLADAAGRAEAIALIGAGRVPDPEADA

SEQ ID NO: 7260 - protein, 233 aa, Curvibacter putative
  misc_feature (1)..(233): tr|C9Y8H6|C9Y8H6_9BURK GTP cyclohydrolase 1 OS=Curvibac ter putative symbiont of Hydra magnipapillata OX=667019 GN=folE PE=4 SV=1
MSSSDTFEGTSVSVKIRERLKASRKRFHANDNIAEYIQPGELETLLDEVEVQMRGVLNSLVIDIENDHNTDNTARRVAKMYLNEVFRGRYVPAPTITEFPNVGHLNELMIVGPITVRSACSHHFCPVIGKIWIGVMPNEHTNVIGLSKYARLAEWIMGRPQIQEEAVVQLADLIQEKTQPDGLAIVMEASHYCMAWRGVKDMDSKMINSVMRGVFLKDPNLRREFLSLIPQKG

SEQ ID NO: 7261 - protein, 251 aa, Curvibacter sp.
  misc_feature (1)..(251): tr|A0A1Y0NDD2|A0A1Y0NDD2_9BURK Putative GTP cyclohydrol ase 1 type 2 OS=Curvibacter sp. AEP1-3 OX=1844971 GN=AE P_03436 PE=4 SV=1
MIERHALLQSLQTLLQPERFKDYCHNGLQVEGRTDIRHLVSGVTASEALIQAAIDCGADAILVHHGLFWKGFDGQVSGWMRKRLSLLLSHDINLFAYHLPLDAHPVLGNNTQLGRLLGLQSHASFGEQSLGLLGSSSSGAWESDAALAQHVEAVLDRPVTLVSGRRGPVSLVGWCTGGAQGYFEPAIAAGAQVFITGEISEPQAHYARECGVSYIACGHHASERYGAPAVASKMAADFGIRHTFIDIPNPA

SEQ ID NO: 7262 - protein, 239 aa, Curvibacter sp.
  misc_feature (1)..(239): tr|A0A1Y0NFU1|A0A1Y0NFU1_9BURK GTP cyclohydrolase 1 OS= Curvibacter sp. AEP1-3 OX=1844971 GN=folE PE=4 SV=1
MKKKSTMSSSDTFEGTPVSVKIRERLKASRKRFHANDNIAEYIQPGELETLLDEVEVQMRGVLNSLVIDIENDHNTDNTARRVAKMYLNEVFRGRYVPAPTITEFPNVGHLNELMIVGPITVRSACSHHFCPVIGKIWIGVMPNEHTNVIGLSKYARLAEWIMGRPQIQEEAVVQLADLIQEKTQPDGLAIVMEASHYCMAWRGVKDMDSKMINSVMRGVFLKDPNLRREFLSLIPQKG

SEQ ID NO: 7263 - protein, 215 aa, Cuspidothrix issatschenkoi
  misc_feature (1)..(215): tr|A0A2S6CX13|A0A2S6CX13_9CYAN GTP cyclohydrolase 1 OS= Cuspidothrix issatschenkoi CHARLIE-1 OX=2052836 GN=folE PE=3 SV=1
MTLSIRPELTAADIISTFSNQQQPTVTEADMMQAVRTLLIGLGENPDREGLKDTPKRVVKALKFLTNGYDQSVDELLNGAVFTEDANEMVLVRDIDIFSSCEHHILPIIGRAHVAYIPNGKVIGLSKIARICEMYARRLQVQERLTLQIANALQGLLKPQGVAVVIEATHMCMVMRGVQKPGSWTVTSAMRGVFSEDARTREEFMNLIRHNANFK

SEQ ID NO: 7264 - protein, 234 aa, Cuspidothrix issatschenkoi
  misc_feature (1)..(234): tr|A0A2S6CYP0|A0A2S6CYP0_9CYAN GTP cyclohydrolase 1 OS= Cuspidothrix issatschenkoi CHARLIE-1 OX=2052836 GN=folE PE=3 SV=1
MTIASPNGSNLSQSPLIPDLAEVIVRPDRNTHDGKVAEIHPPSDETMDEMMAAVRTMLVGVGEDPEREGLLKTPKRVAKAMKFLTSGYNESLEDLINGAIFDEGHDEMVLVRDINFFSLCEHHMLPFMGRAHVAYIPNQKVVGLSKLARIVEMYSRRLQVQERLTRQIAEALQTVLEPKGVAVVMEASHMCMVMRGVQKPGSWTVTSSMVGVFQEEHKTREEFFNLIRHQASFF

SEQ ID NO: 7265 - protein, 194 aa, Cutibacterium acnes
  misc_feature (1)..(194): tr|D1Y9P6|D1Y9P6_CUTAC GTP cyclohydrolase 1 OS=Cutibact erium acnes J139 OX=679194 GN=folE PE=3 SV=1
MSSMKLSVDRERAAAAIREFLLAVGEDPDREGLRDTPMRVAQAAEELFGGLSQDPGELLATTFDISHDEMVLVRDIELQSMCEHHLLPFIGVAHVGYIPARDGRVTGLSKIARLVEVYARRPQVQERLTTQVADALVEHLDARGVIVVVEAEHMCMTTRGVRKPGARTVTSAVRGILRNPATRAEAMGLITAGR

SEQ ID NO: 7266 - protein, 79 aa, Cutibacterium acnes
  misc_feature (1)..(79): tr|W4TG62|W4TG62_CUTAC GTP cyclohydrolase 1 OS=Cutibact erium acnes JCM 18909 OX=1302241 GN=JCM18909_1036 PE=3 SV=1
MLATTFDISHDEMVLVRDIELQSMCEHHLLPFIGVAHVGYIPARDGRVTGLSKIARLVEVYARRPQVQERLTTQVADAW

SEQ ID NO: 7267 - protein, 191 aa, Cutibacterium avidum
  misc_feature (1)..(191): tr|A0A1B3PZ99|A0A1B3PZ99_9ACTN GTP cyclohydrolase 1 OS= Cutibacterium avidum OX=33010 GN=folE PE=3 SV=1
MPELPVDLRRARAAVREFLLAIGEDPDREGLRETPERVARAAAEIFRGLAQDPAEILSKTFDISHDELVLVRDIEVQSCCEHHLLPFTGVAHVGYIPAKDGRVTGLSKIARLVDVYSRRPQVQERLTTQVADAMVEYLHARGVIVVIECEHMCMTMRGVRKPGSRTVTSAVRGILRDSATRAEAMGLITGR

SEQ ID NO: 7268 - protein, 195 aa, Cutibacterium avidum
  misc_feature (1)..(195): tr|G4CXS2|G4CXS2_9ACTN GTP cyclohydrolase 1 OS=Cutibact erium avidum ATCC 25577 OX=997355 GN=folE PE=3 SV=1
MSESMPELPVDLSRARAAVREFLLAIGEDPDREGLRETPERVARAAAEIFRGLAQDPAEILSKTFDISHDELVLVRDIEVQSCCEHHLLPFTGVAHVGYIPAKDGRVTGLSKIARLVDVYSRRPQVQERLTTQVADAMVEYLHARGVIVVIECEHMCMTMRGVRKPGSRTVTSAVRGILRDPATRAEAMGLITGR

SEQ ID NO: 7269 - protein, 196 aa, Cutibacterium granulosum
  misc_feature (1)..(196): tr|A0A239W3U3|A0A239W3U3_9ACTN GTP cyclohydrolase 1 OS= Cutibacterium granulosum OX=33011 GN=folE PE=3 SV=1
MSESTPEFRVDVVRAQAAVREFLLAIGEDPDRDGLRETPTRVAKAAGELFSGMGQDPAEILATTFDMSHDEMVLVRDIEVHSFCEHHLLPFIGVAHVAYIPARNGRVTGLSKIARLVDAYAHRPQVQERLTTQVADAMMACLDARGVMAVVECEHMCMTLRGIRKSGARTITSAVRGIMKDPATRAEAMGLITAGR

SEQ ID NO: 7270 - protein, 196 aa, Cutibacterium granulosum
  misc_feature (1)..(196): tr|U1EYR2|U1EYR2_9ACTN GTP cyclohydrolase 1 OS=Cutibact erium granulosum DSM 20700 OX=1160719 GN=folE PE=3 SV=1
MSESTPEFRVDVVRAQAAVREFLLAIGEDPDRDGLRETPARVAKAAGELFSGMGQDPAEILATTFDMSHDEMVLVRDIEVHSFCEHHLLPFIGVAHVAYIPARNGRVTGLSKIARLVDVYARRPQVQERLTTQVADAMMACLDARGVMAVVECEHMCMTLRGIRKSGARTITSAVRGIMKDPATRAEAMGLITAGR

SEQ ID NO: 7271 - protein, 244 aa, Cyanobacteria bacterium
  misc_feature (1)..(244): tr|A0A3M1L765|A0A3M1L765_9CYAN GTP cyclohydrolase 1 OS= Cyanobacteria bacterium J083 OX=2420336 GN=folE PE=3 SV =1
MTKVSSNGSNPITNSIMNNSSSPLNPNLIDRVTARPDRNTHNGKAAEIHAASIEAKERMMDAVNCMLQAVGEDPEREGLLKTPKRVAEAMQFLTEGYSQSLEEIVNDAIFDEGHNEMVLVRDIDFFSLCEHHMLPFMGRAHVAYIPNQKVVGLSKLARIVEMYSRRLQVQERLSCQIAEAINSILQPQGVAVVMEAIHMCMSMRGVQKPGSWTVTSSMIGVFQEDQKTREEFLNLIRHQPTFFS

SEQ ID NO: 7272 - protein, 238 aa, Cyanobacteria bacterium
  misc_feature (1)..(238): tr|A0A352AL02|A0A352AL02_9CYAN GTP cyclohydrolase 1 OS= Cyanobacteria bacterium UBA9273 OX=2055791 GN=folE PE=3 SV=1
MTIASSNGFSCSDSTTMTNSTNVTGRIETRPDRNTQNGREPKLHPPSEDMNEEMTNAVRTLLLGVGEDPEREGLLKTPKRVVEAMRFLTGGYNQSLEEIVNGAIFDEGHNEMVLVRDINFFSLCEHHMLPFMGKAHVAYIPNQKVVGLSKLARVVEMYARRLQVQERLTRQIAEAIQTILEPKGVAVVMEATHMCMVMRGVQKPGSWTVTSAMLGVFQESQKTRDEFLNLIRHQANFF

SEQ ID NO: 7273 - protein, 219 aa, Cyanobacterium aponinum
  misc_feature (1)..(219): tr|K9ZAG3|K9ZAG3_CYAAP GTP cyclohydrolase 1 OS=Cyanobac terium aponinum (strain PCC 10605) OX=755178 GN=folE PE =3 SV=1
MTYTESSIIKSANQNNSLPNLITESQPPVTEADMIQAVRTLLLGLGENPDREGLKDTPKRVVKALKFLTSGYGQSLDELLNGAVFHENANEMVLVRDIDLFSSCEHHILPILGRAHVAYIPNGKVIGLSKIARICEMYARRLQVQERLTAQIADALQGLLQPQGVAVVIEATHMCMVMRGVQKPGSWTSTSALRGVFNDDAKTRQEFMNLIQHRPTFNS

SEQ ID NO: 7274 - protein, 220 aa, Cyanobacterium aponinum
  misc_feature (1)..(220): tr|A0A2G3PA61|A0A2G3PA61_9CHRO GTP cyclohydrolase 1 OS= Cyanobacterium aponinum IPPAS B-1201 OX=2047986 GN=folE PE=3 SV=1
MTTETYNNVASRPDRNTHNGKEAQIHEAKEENKIQMMDAVRNILDAVGEDPEREGLLKTPKRVAEAMQFLTQGYNQSLEKLVNGAIFDEGHNEMVLVRDIDFFSLCEHHMLPFMGRAHVAYIPNQKVVGLSKLARIVEMYSRRLQVQERLTRQIAEAIQTILDPQGVAVVMEATHMCMVMRGVQKPGSWTVTSAMIGEFQDNDKTRQEFLDLIRHKPSFL

SEQ ID NO: 7275 - protein, 239 aa, Epithemia turgida
  misc_feature (1)..(239): tr|A0A077JLI4|A0A077JLI4_9CYAN GTP cyclohydrolase 1 OS= cyanobacterium endosymbiont of Epithemia turgida isolat e EtSB Lake Yunoko OX=1228987 GN=folE PE=3 SV=1
MTIASSKGFNPLDSNGFNNLSPSLVECVSSQPDHNAHDGEQVHFRPAEKPNKEKIMAAVRTILEALGEDPDREGLLKTPKRVAEAMAFLTDGYNQSLKSLVNDAIFDEGHSEMVLVRDIHFSSLCEHHMLPFIGKAHVAYIPNQKVVGLSKLARIVEMYSRRLQVQERLTHQIAEAIQEILYPQGVAVVMEATHMCMVMRGVQKLGSSTVTSTMLGVFQEEQKTREEFLNFIRRQPSFF

SEQ ID NO: 7276 - protein, 243 aa, Rhopalodia gibberula
  misc_feature (1)..(243): tr|A0A2Z5TC11|A0A2Z5TC11_9CYAN GTP cyclohydrolase 1 OS= cyanobacterium endosymbiont of Rhopalodia gibberula OX= 1763363 GN=folE PE=3 SV=1
MTIASSKGFNPLDSNDFNDRSPDLSPSLVECVSSRPDRNAHNGEQVDFRPAEEANKEEIMAAVRTMLEALGEDPNREGLLKTPKRVAEAMAFLTDGYNQSLETLVNDAIFDEGHNEMVLVRDIHFYSLCEHHMLPFMGKAHVAYIPNKKVVGLSKLARIVEMYSRRLQVQERLTRQIAEAIQEILDPQGVAIVMEATHMCMVMRGVQKLGSWTVTSTMLGVFQEEQKNREEFLNLVRHQPSFF

SEQ ID NO: 7277 - protein, 219 aa, Cyanobacterium sp.
  misc_feature (1)..(219): tr|A0A1E5QRK9|A0A1E5QRK9_9CHRO GTP cyclohydrolase 1 OS= Cyanobacterium sp. IPPAS B-1200 OX=1562720 GN=folE PE=3 SV=1
MTFTESSMMKATVKEKQLPSLATESKPQVTQEEMIQAVRTLLIGLGENPEREGLKDTPKRVVKALKFLTSGYDQSLDELLNGAVFHEKSNEMVLVRDIDLFSSCEHHILPILGRAHVAYIPNGKVIGLSKIARICEMYARRLQVQERLTSQIADALQGLLQPQGVAVVVEASHMCMVMRGVQKPGSWTSTSALRGVFSEDAKTRQEFMNLIQHRPTFNN

SEQ ID NO: 7278 - protein, 240 aa, Cyanobacterium sp.
  misc_feature (1)..(240): tr|A0A2K8WKX2|A0A2K8WKX2_9CHRO GTP cyclohydrolase 1 OS= Cyanobacterium sp. HL-69 OX=2054282 GN=folE2 PE=3 SV=1
MTVFSNGSDSLKENSLNSQSIVTEVFNNVGSRPDRNTHDGKEAQVQAIKEENKQKMMDSVHQMLECLGEDPEREGLLKTPKRVAEAMQFLTQGYSQSLEQLVNGAIFDEGHNEMVLVRDIDFFSLCEHHMLPFMGRAHVAYIPNQKVVGLSKLARIVEMYSRRLQVQERLTRQIAEAVQTILDPRGVAVVMEASHMCMSMRGVQKPGSWTVTSAMVGVFQDEDKTREEFLNLIQHQPRFR

SEQ ID NO: 7279 - protein, 240 aa, Cyanobacterium stanieri
  misc_feature (1)..(240): tr|K9YNA3|K9YNA3_CYASC GTP cyclohydrolase 1 OS=Cyanobac terium stanieri (strain ATCC 29140 / PCC 7202) OX=29256 3 GN=folE PE=3 SV=1
MTVFSNGSDSLKENSLNSQSIVTEVFNNVGSRPDRNTHDGKEAKIQAIKEENKQKMMDAVHQMLECLGEDPEREGLLKTPKRVAEAMQFLTQGYSQSLEKLVNGAIFDEGHNEMVLVRDIDFFSLCEHHMLPFMGRAHVAYIPNQKVVGLSKLARIVEMYSRRLQVQERLTRQIAEAVQTILDPRGVAVVMEASHMCMSMRGVQKPGSWTVTSAMIGVFQDEDKTREEFLNLIQHQPQFR

SEQ ID NO: 7280 - protein, 219 aa, Cyanobacterium stanieri
  misc_feature (1)..(219): tr|K9YKI3|K9YKI3_CYASC GTP cyclohydrolase 1 OS=Cyanobac terium stanieri (strain ATCC 29140 / PCC 7202) OX=29256 3 GN=folE PE=3 SV=1
MTFTQSSIKKTVGEKNQLPSLVTEAQPQVSEAEMIEAVKTLLIGLGENPDREGLKDTPKRVVKALKFLTSGYHQSLDELLNGAVFHENADEMVLVRDIDLFSSCEHHILPILGRAHVAYIPNGKVIGLSKIARICEMYARRLQVQERLTAQIADALQGLLKPQGVAVVVEASHMCMVMRGVQKPGSWTSTSALRGVFADDAKTRQEFMNLIQHRPRFNN

SEQ ID NO: 7281 - protein, 247 aa, Cyanobium sp.
  misc_feature (1)..(247): tr|B5ILM0|B5ILM0_9CYAN GTP cyclohydrolase I OS=Cyanobiu m sp. PCC 7001 OX=180281 GN=mtrA PE=4 SV=1
MTSTLPSSFSAKGSAPAATPLPVSLRIRDRLEKAGVSFFANDNIADHLLDGELDQLEIEVAGKVRELLRSLVIDIDNDHNTEETAERVARMYLHEVFKGRYHEQPKIASFPNVKKLDEIYTVGPISVRSACSHHLVPILGNCWIGIKPGDQVIGLSKFSRVADWVFSRPHIQEEAVMILADEIERLCKPQGLAILVKAQHYCMKWRGVKEPQTSMVNSIVRGDFRHDPSLKAEFFELVKQQEALLST

SEQ ID NO: 7282 - protein, 229 aa, Cyanobium sp.
  misc_feature (1)..(229): tr|A0A182ALZ7|A0A182ALZ7_9CYAN GTP cyclohydrolase I OS= Cyanobium sp. NIES-981 OX=1851505 GN=mtrA PE=4 SV=1
MPLPVSLRIRDRLEKAGASFFANDNIADHLLEGELDQLEIEVAGKVRELLRSLVIDIDNDHNTEETAERVARMYLQEVFKGRYHQQPKIASFPNVKKLDEIYTVGPISVRSACSHHLVPILGNCWIGIKPGEHVIGLSKFSRVADWVFSRPHIQEEAVMILADEIERLCKPQGLAILVKAQHYCMKWRGVKEPQTSMVNSIVRGDFRHDPSLKAEFFELVKQQEALLAT

SEQ ID NO: 7283 - protein, 241 aa, Cyanosarcina cf.; identical to SEQ ID NO: 6644
  misc_feature (1)..(241): tr|A0A2T1FEE0|A0A2T1FEE0_9CHRO GTP cyclohydrolase 1 OS= Cyanosarcina cf. burmensis CCALA 770 OX=2107697 GN=folE PE=3 SV=1

SEQ ID NO: 7284 - protein, 212 aa, Cyanosarcina cf.; identical to SEQ ID NO: 6647
  misc_feature (1)..(212): tr|A0A2T1FHF3|A0A2T1FHF3_9CHRO GTP cyclohydrolase 1 OS= Cyanosarcina cf. burmensis CCALA 770 OX=2107697 GN=folE PE=3 SV=1

SEQ ID NO: 7285 - protein, 235 aa, Cyanothece sp.
  misc_feature (1)..(235): tr|B8HSZ7|B8HSZ7_CYAP4 GTP cyclohydrolase 1 OS=Cyanothe ce sp. (strain PCC 7425 / ATCC 29141) OX=395961 GN=folE PE=3 SV=1
MTLASNSFNANSSNGNPNRVKGISQPRPDRNTLHGRETEIQLPPEERAKEEMMDAVRSILLGVGENPEREGLLKTPKRVAEAMMFLTGGYSQSLEELVNGAIFDEGHDEMVLVRDIHAFSLCEHHMLPFIGKAHVAYIPNQKVIGLSKLARIVEMYSRRLQVQERLTRQIAEAVQTVLEPKGVAVVMEASHMCMVMRGVQKPGSWTVTSSMLGVFKEDQKTREEFLNLIRHQPNF

SEQ ID NO: 7286 - protein, 228 aa, Cyanothece sp.
  misc_feature (1)..(228): tr|A0A3B8Y6A1|A0A3B8Y6A1_9CYAN GTP cyclohydrolase 1 (Fr agment) OS=Cyanothece sp. UBA12306 OX=2055757 GN=folE P E=3 SV=1
MTIASSNGFNRLNANGSTNLSPNLVERVSSRPDRNTHNGQPAQFHRDTEINKEKMMTAVRTMLEALGEDPDREGLLKTPKRVAEAMQFLTEGYDQSLETLVNGAIFDEGHSEMVLVRDINFFSLCEHHMLPFMGRAHVAYIPNQKVVGLSKLARIVEMYSRRLQVQERLTRQIAEAVQEILEPQGVAVVMEASHMCMVMRGVQKPGSWTVTSAMLGVFQDEQWINLKK

SEQ ID NO: 7287 - protein, 231 aa, Cyclobacteriaceae bacterium
  misc_feature (1)..(231): tr|A0A3N4H6Z4|A0A3N4H6Z4_9BACT GTP cyclohydrolase 1 OS= Cyclobacteriaceae bacterium YHN15 OX=2487897 GN=folE PE =3 SV=1
MKQKETLLNTMGIDFSHSIDEIGDEHLGTSTETPLRADAFEMDDQLKMELIEKHFKEIMHILGLDLTDDSLKGTPKRVAKMYVKEIFSGLNPKNMPDAKLFENKYKYNEMLVEKDITFYSNCEHHFVPIHGKAHVAYISSGHVIGLSKINRIVQYFAKRPQVQERLTMQIGNAFKEILGTDDVAVIIDAHHMCVSSRGIQDVNSSTVTAFYSGKFDRDENTRKEFMNYISL

SEQ ID NO: 7288 - protein, 228 aa, Cyclobacteriaceae bacterium
  misc_feature (1)..(228): tr|A0A5C7Z8W4|A0A5C7Z8W4_9BACT GTP cyclohydrolase 1 OS= Cyclobacteriaceae bacterium OX=2099675 GN=folE PE=3 SV= 1
MRQKEISLNIRPINPLDDQDEDHMLTSWNTPLREDAFALSDDEKVEQIEKRFREIMEILGLDLNDDSLKGTPRRVAKMYVKEVFSGLNPKNRPQARLFENKYKYDQMLVEKDITFYSHCEHHFVPIYGKAHVGYFSNGKVIGLSKINRIVQYFAKRPQVQERLTVQIGKELQRILGTESVAVVMDANHMCVASRGVGDTNSKTGTAFFGGKFEEENTRREFLNYINSK

SEQ ID NO: 7289 - protein, 233 aa, Cyclobacterium amurskyense
  misc_feature (1)..(233): tr|A0A0H4P834|A0A0H4P834_9BACT GTP cyclohydrolase 1 OS= Cyclobacterium amurskyense OX=320787 GN=folE PE=3 SV=1
MKQKETLLNSAEIDLNQTIDDLGDEHISSSHETPLREDAFEMDDDLKMELIEKHFKEIMNILGMDLKDDSLKGTPRRVAKMFVKEVFSGLDPKNKPEVKLFQNKYRYNEMLVEKDITFFSHCEHHFVPIYGKAHVAYISKGNVIGLSKINRIVQYFAKRPQVQERLTVQIGNELKTALGTDDVAVIMDADHMCVSSRGVRDTTSSTVTSFYSGQFENDSQKRNEFLKYISMAR

SEQ ID NO: 7290 - protein, 233 aa, Cyclobacterium halophilum
  misc_feature (1)..(233): tr|A0A1H6Y5D2|A0A1H6Y5D2_9BACT GTP cyclohydrolase 1 OS= Cyclobacterium halophilum OX=1416801 GN=folE PE=3 SV=1
MKQKETLLNSAGIDLNQTIEELGDEHMASSHDTPLREDAFEMDDDLKMELIEKHFKEIMYILGLDLTDDSLKGTPKRVAKMFVKEVFSGLDPRNKPDAKLFENKFRYSEMLVEKDITFYSHCEHHFVPIYGKAHVAYISNGHVIGLSKINRIVQYYAKRPQVQERLTVQIGNELKAALGTEDVAVILDADHMCVSSRGVRDTSSSTVTSFYSGQFEHSAQKRNEFLKYLELPR

SEQ ID NO: 7291 - protein, 233 aa, Cyclobacterium lianum
  misc_feature (1)..(233): tr|A0A1M7QDF3|A0A1M7QDF3_9BACT GTP cyclohydrolase 1 OS= Cyclobacterium lianum OX=388280 GN=folE PE=3 SV=1
MKQKETLLNTAGIDINQAIEEFGNEHVASSHDTPLREDAFEMDDELKMELIEKHFRDIMYVLGLDLTDDSLKGTPKRVAKMFVKEVFSGLDPKNKPEAKLFENKFRYNEMLVEKDITFHSHCEHHFVPIFGRAHVAYISNGHVIGLSKINRIVQYFAKRPQVQERLTMQIGNELKEALGTEDVAVVLDADHMCVSSRGVKDNSSSTVTSFYSGIFENNDQKRNEFLKYLELPR

SEQ ID NO: 7292 - protein, 233 aa, Cyclobacterium marinum
  misc_feature (1)..(233): tr|G0IUI6|G0IUI6_CYCMS GTP cyclohydrolase 1 OS=Cyclobac terium marinum (strain ATCC 25205 / DSM 745) OX=880070 GN=folE PE=3 SV=1
MKQKETLLNSAGIDLNQAIDDIGDDHISSSHDTPLREDAFEMDDDLKMELIEKHFKEIMNILGMDLKDDSLKGTPKRVAKMFVKEVFSGLDPKNKPEVKLFENKYKYNEMLVEKDITFFSHCEHHFVPIYGKAHVAYISNGSVIGLSKINRIVQYFAKRPQVQERLTVQIGNELKKALGTDDVAVIMDADHMCVSSRGVRDTSSSTVTSFYSGKFENDNQKRTEFLKYISLSR

SEQ ID NO: 7293 - protein, 217 aa, Cyclobacterium marinum
  misc_feature (1)..(217): tr|A0A5D9BC73|A0A5D9BC73_9BACT GTP cyclohydrolase 1 OS= Cyclobacterium marinum OX=104 GN=folE PE=3 SV=1
MDKNEIENIGDNHLSTNVQTPLRPDAFEKSDEEKIQNIQQYFSKIMEELGLDLNDDSLSGTPYRFAKMYVKELFYGLNPDKKPKLSVFENKFGYKKMLVEQNITIDSSCEHHFLPITGEANIAYVPKEKVIGLSKINRLVDYYSHRPQVQERLSLQILKDLQYALETEDVIVVISAKHLCVSSRGIKDKNSFTTTIEYGGCFEEEKYRNEFFKILGQ

SEQ ID NO: 7294 - protein, 233 aa, Cyclobacterium qasimii
  misc_feature (1)..(233): tr|A0A512CGL4|A0A512CGL4_9BACT GTP cyclohydrolase 1 OS= Cyclobacterium qasimii OX=1350429 GN=folE2 PE=3 SV=1
MKQKETLLNSAGIDLNQTIDDLGDEHISSSHETPLREDAFEMDDDLKMELIEKHFKGIMNILGLDLTDDSLKGTPKRVAKMFIKEVFSGLDPKNKPEVKLFQNKYRYNEMLVEKDITFFSHCEHHFVPIYGKAHVAYISKGNVIGLSKINRIVQYFAKRPQVQERLTVQIGNELKMALGTDDVAIILDADHMCVSSRGVRDTTSSTVTSFYSGQFENDPQKRNEFLKYISMAR

SEQ ID NO: 7295 - protein, 233 aa, Cyclobacterium qasimii; identical to SEQ ID NO: 7294
  misc_feature (1)..(233): tr|S7WRH4|S7WRH4_9BACT GTP cyclohydrolase 1 OS=Cyclobac terium qasimii M12-11B OX=641524 GN=folE PE=3 SV=1

SEQ ID NO: 7296 - protein, 260 aa, Cycloclasticus sp.
  misc_feature (1)..(260): tr|A0A1M6B316|A0A1M6B316_9GAMM GTP cyclohydrolase FolE2 OS=Cycloclasticus sp. DSM 27168 OX=1884353 GN=folE2 PE =3 SV=1
MTIEDVQNHPDSRNMPINKVGIKDIRHPFVFVDRDGHQRATVGTFNMSVNLPHHQKGTHMSRFVALLNEDCQQLSIKGFSALLEKMTHTLEAETGYLTTEFLYFVNKSAPITGVKSLLDYQIKLDGHWSKSDHKIKITVVIPVTSLCPCSKKISEYGAHNQRSHITVTAEIGDNICAEDIIQLVEKQASSELFSLLKRPDEKYVTELAYDNPKFVEDVVRDIASALNDDQRILAYTLEAENFESIHNHSAYAVIENNKLT

SEQ ID NO: 7297 - protein, 183 aa, Cycloclasticus sp.
  misc_feature (1)..(183): tr|A0A1Y5F3K1|A0A1Y5F3K1_9GAMM GTP cyclohydrolase 1 OS= Cycloclasticus sp. 44_32_T64 OX=1856282 GN=folE PE=3 SV =1
MMEKLYKQIIKDIGEDTERQGLVETPKRAAKAMSFLTSGYQQSLEQIVNGAVFDSDADDMVIVKNIELYSMCEHHLLPFIGKCHVAYLPAGKVLGLSKVARIVDMFARRLQIQEQLTTQIADSLLEVTGARGVAVVVEAQHLCMMMRGVEKQNSQMTTSSMLGQFRKNSETRAEFLSLLRMAH

SEQ ID NO: 7298 - protein, 260 aa, Cycloclasticus zancles
  misc_feature (1)..(260): tr|S5TWJ2|S5TWJ2_9GAMM GTP cyclohydrolase FolE2 OS=Cycl oclasticus zancles 78-ME OX=1198232 GN=folE2 PE=3 SV=1
MTIEDVQNHPDSRNMPINKVGIKDIRHPFVFVDRDGHQRATVGTFNMSVNLPHHQKGTHMSRFVALLNEDCQQLSIKGFNALLEKMTHTLEAETGYLTTEFLYFVNKSAPITGVKSLLDYQIKLDGHWSKSDQKIKITVVIPVTSLCPCSKKISEYGAHNQRSHITVTAEIGDNICAEDIIQLVEKQASSELFSLLKRPDEKYVTELAYDNPKFVEDVVRDIASVLNDDQRILAYTLEAENFESIHNHSAYAVIENNKLT

SEQ ID NO: 7299 - protein, 181 aa, Cycloclasticus zancles
  misc_feature (1)..(181): tr|S5TH29|S5TH29_9GAMM GTP cyclohydrolase 1 OS=Cyclocla sticus zancles 78-ME OX=1198232 GN=folE PE=3 SV=1
MEKLYKQIISQVGEDVNRQGLVDTPKRAAKAMSFLTSGYQQSLENIVNGAVFDSDADDMVIVKNIELYSMCEHHLLPFIGKCHVAYLPDGKVLGLSKVARIVDMYARRLQIQEQLTTQIADSILEVTGAKGVAVVVEAKHLCMMMRGVEKQNSQMTTSSMLGQFRKNSETRAEFLSLLKMG

SEQ ID NO: 7300 - protein, 235 aa, Cylindrospermopsis raciborskii
  misc_feature (1)..(235): tr|A0A1S1ZTS3|A0A1S1ZTS3_9CYAN GTP cyclohydrolase 1 OS= Cylindrospermopsis raciborskii MVCC14 OX=940191 GN=folE PE=3 SV=1
MTIASSNGSSRLQSPLIPDLSQAISTRPDRNTHNGKQADLHQPSEESIEQIKAAVRTMLIGVGEDPEREGLLKTPKRVAEAMKFLTSGYNQSLEELVNGAIFDEGHEEMVLVRDINFFSLCEHHMLPFMGRAHVAYIPNKKVVGLSKLARIVEMYARRLQVQERLTRQIAEAVQTILEPKGVAVVMEATHMCMVMRGVQKPGSWTVTSSMIGVFQEEQKTREEFLNLIRHQAAFF

SEQ ID NO: 7301 - protein, 235 aa, Cylindrospermopsis raciborskii
  misc_feature (1)..(235): tr|A0A1X4GAB8|A0A1X4GAB8_9CYAN GTP cyclohydrolase 1 OS= Cylindrospermopsis raciborskii CENA303 OX=1170769 GN=fo lE PE=3 SV=1
MTIASSNGSSRLQSPLIPDLSQAISTRPDRNTHNGKQPDLHQPSEESIEQMKAAVQTMLIGVGEDPQREGLLKTPKRVAEAMKFLTSGYNQSLEELVNGAIFDEGHEEMVLVRDINFFSLCEHHMLPFMGRAHVAYIPNKKVVGLSKLARIVEMYARRLQVQERLTRQIAEAVQTILEPKGVAVVMEATHMCMVMRGVQKPGSWTVTSSMIGVFQDEQKTREEFLNLIRHQAAFF

SEQ ID NO: 7302 - protein, 235 aa, Cylindrospermopsis sp.
  misc_feature (1)..(235): tr|A0A0R0M1Y3|A0A0R0M1Y3_9CYAN GTP cyclohydrolase 1 OS= Cylindrospermopsis sp. CR12 OX=1747196 GN=folE PE=3 SV= 1
MTIASSNGSSRLQSPLIPDLSQAISTRPDRNTHNGKQPDLHEPSEESIEQMKAAVRTMLIGVGEDPEREGLLKTPKRVAEAMKFLTSGYNQSLEELVNGAIFNEGHEEMVLVRDINFFSLCEHHMLPFMGRAHVAYIPNQKVVGLSKLARIVEMYARRLQVQERLTRQIAEAVQTILEPKGVAVVMEATHMCMVMRGVQKPGSWTVTSSMIGVFQEEQKTREEFLNLIRHQAAFF

SEQ ID NO: 7303 - protein, 235 aa, Cylindrospermum sp.
  misc_feature (1)..(235): tr|A0A1Z4QL59|A0A1Z4QL59_9NOST GTP cyclohydrolase 1 OS= Cylindrospermum sp. NIES-4074 OX=2005457 GN=folE PE=3 S V=1
MTIASSNGSNRAQSPLIPDLADAINPRPDRNTHDGGEPVLLSPTEENTEQMMEAVRTMLLGVGEDPEREGLLKTPKRVAEAMQFLTSGYNQSLEKLVNDAIFDEGHNEMVLVRDINFFSLCEHHMLPFMGRAHVAYIPNQKVVGLSKLARIVEMYSRRLQVQERLTRQIAEAIQTVLEPQGVAVVMEASHMCMVMRGVQKPGSWTVTSAMLGVFQDEQKTREEFFNLIRHQGGFY

SEQ ID NO: 7304 - protein, 235 aa, Cylindrospermum stagnale
  misc_feature (1)..(235): tr|K9WTB3|K9WTB3_9NOST GTP cyclohydrolase 1 OS=Cylindro spermum stagnale PCC 7417 OX=56107 GN=folE PE=3 SV=1
MTIASSNGSNRAQSPLNPDLAEAINPRPDRNTHDGREPVLLSPTEENKEQMMEAARTLLLGVGEDPEREGLLKTPKRMAEALLFLTSGYDQSLEELVNGAIFDEGHNEMVLVRDINFFSLCEHHMLPFMGRAHVAYIPNQKVVGLSKLARIVEMYSRRLQVQERLTRQIAEAIQTVLEPQGVAVVMEATHMCMAMRGVQKPGSWTVTSAMVGLFQEEQKTREEFFNLIRHQGSFF

SEQ ID NO: 7305 - protein, 239 aa, Cytophaga hutchinsonii
  misc_feature (1)..(239): tr|Q11W80|Q11W80_CYTH3 GTP cyclohydrolase 1 OS=Cytophag a hutchinsonii (strain ATCC 33406 / NCIMB 9469) OX=2697 98 GN=folE PE=3 SV=1
MEKRIVESDPLRNTPESFNTLSVDEIGDDHLFKGIATPMLPQAFLKTDEEKIASIAGHFKAIMETLGLDLSDDSLAGTPQRVAKMYVQEIFSGLDERNKPKIALFENKYRYGQMLVEKNITFYSNCEHHFVPIFGKVHVAYISSGKVIGLSKLNRIVNYFAKRPQVQERLTMQIAGEMESVLNTKDIAVLIDAKHLCVSSRGIKDDNSATITAYYGGRFSDDAVKNEFLNYLNLNTTYV

SEQ ID NO: 7306 - protein, 227 aa, Cytophaga hutchinsonii
  misc_feature (1)..(227): tr|Q11VG1|Q11VG1_CYTH3 GTP cyclohydrolase 1 OS=Cytophag a hutchinsonii (strain ATCC 33406 / NCIMB 9469) OX=2697 98 GN=folE PE=3 SV=1
MNLVHMKITKAVHIEKEELNDDHYSSNPETPLRVDAFELEDDIKVELISRKFKDIMEILGLDLSDDSLKDTPNRVAKMYVKEIFSGLNPLNKPAVALFENKYKYDEMILEKNITFYSNCEHHFVPIIGKAHVAYISNGKVIGLSKLNRIVDYFARRPQVQERLTVQIANELKSILGTEDVAIVLDAKHLCVSMRGVKDEASSTVTAHYSGKFKEEGVKNEFLAYIKD

SEQ ID NO: 7307 - protein, 234 aa, Cytophaga sp.
  misc_feature (1)..(234): tr|A0A4R4KJC6|A0A4R4KJC6_9BACT GTP cyclohydrolase 1 OS= Cytophaga sp. DMA-K-7a OX=2070510 GN=folE PE=3 SV=1
MKPNGILLNTQPMAETSFSEENMDENGHDHILTSYDTPLRVDAFEMDDDLKIELIEKHFRHIMEIMGLDLTDDSLKGTPRRVAKMYVKEIFSGMNPENKPSITLFDNKYKYDQMLVEKDITVFSNCEHHFVPIHGKAHVAYISSGKVIGLSKLNRIVHHYSKRPQVQERLTVQIANELKEVLKTEDVAVVIDAQHMCVHSRGVQDTGSSTITSYYGGKFEKEATRREFLSYLGM

SEQ ID NO: 7308 - protein, 207 aa, Cytophaga xylanolytica
  misc_feature (1)..(207): tr|A0A2W7NM44|A0A2W7NM44_9BACT GTP cyclohydrolase 1 OS= Cytophaga xylanolytica OX=990 GN=folE PE=3 SV=1
MDFTLNGGKGYSKTESYDDEVTQGLTDHYRGVLELLGEDVHREGLEKTPLRVAKAMQFLTQGYHMNPEEIIRSAMFREDYQQMVIVKDIELYSMCEHHILPFFGKAHVAYIPRHHITGLSKIARVVEAFARRLQVQERLTTQIKDCIQKTLNPLGVAVVIEAQHMCMQMRGVQKQHSVTTTSDFTGAFLKNQATREEFFNIIGGKLH

SEQ ID NO: 7309 - protein, 185 aa, Cytophagaceae bacterium
  misc_feature (1)..(185): tr|A0A4Q3PVK9|A0A4Q3PVK9_9BACT GTP cyclohydrolase 1 OS= Cytophagaceae bacterium OX=2026729 GN=folE PE=3 SV=1
MTLEQNYTAILGQLGEDVSREGLLDTPKRAAKAMQYLCRGYEQTLEEVTNGALFSSDNSEMVLVKDIELYSLCEHHLLPIVGRAHVAYISNGTVVGLSKMNRIVDYFAKRPQVQERLTIQIVQELKKVLNTEDVACVIDAKHLCVNSRGIRDIESSTVTSEFGGKFKEEQVRREFLDYIKLDTQF

SEQ ID NO: 7310 - protein, 227 aa, Cytophagaceae bacterium
  misc_feature (1)..(227): tr|A0A1E4A255|A0A1E4A255_9BACT GTP cyclohydrolase 1 OS= Cytophagaceae bacterium SCN 52-12 OX=1660162 GN=folE PE =3 SV=1
MKQNGTSSNILLDDQVEEAGDQHLLTSLETPMREDAFGLDDELKAELIAEHFRSIMGILGLDLSDDSLKGTPARVAKMYVQEIFSGLNPANKPEVTLFDNKYRYSQMLVEKDITVFSNCEHHFVPIYGKAHVAYISSGKVIGLSKLNRIVQYYSRRPQVQERLTVQIANELKQVLRTEDVAVLIDAKHMCVSMRGIEDHASSTVTSFYGGRFEQEETRSEFLKYLGL

SEQ ID NO: 7311 - protein, 229 aa, Cytophagales bacterium
  misc_feature (1)..(229): tr|A0A286IIF1|A0A286IIF1_9BACT GTP cyclohydrolase 1 OS= Cytophagales bacterium TFI 002 OX=1945892 GN=folE PE=3 SV=1
MLNTPDKDKKTIEKLYEELGENHVMTNIATPLREDAFQLDDETKIELIGKHFKEIMQILGLDLTDDSLKGTPHRVAKMYVNEIFSGLNPGNMPQLTLFENQYRYSEMLVERDIKFHSNCEHHFVPINGFAHIAYISSGKVIGLSKLHRIVNHYARRPQVQERMTIQVGNALKEALGTEDVAVILDADHMCVSMRGVGDQSSSTVTSFYSGAFKEAARKEEFLKNLSLRK

SEQ ID NO: 7312 - protein, 219 aa, Cytophagales bacterium
  misc_feature (1)..(219): tr|A0A2M6GM13|A0A2M6GM13_9BACT GTP cyclohydrolase 1 OS= Cytophagales bacterium CG18_big_fil_WC_8_21_14_2_50_42_ 9 OX=1973956 GN=folE PE=3 SV=1
MDKYNIDEEGNGLDHLPSSLHTPLREDAFKMTDDLKIELIEKHFREIMHVLGLDLSDDSLQGTPHRVAKMYVNEIFRGLNPEHKPAAKLFENRFSYNQMLVERDITLYSYCEHHFVPIIGKAHVAYIPDKHVVGLSKLNRIVQYYARRPQVQERLTMQIADELRSMLFTENVAVFIEADHLCVMSRGVNDVSSSTITTEYSGLFQQEQYRNEFLNYIRK

SEQ ID NO: 7313 - protein, 233 aa, Cytophagia bacterium
  misc_feature (1)..(233): tr|A0A2E0GY69|A0A2E0GY69_9BACT GTP cyclohydrolase 1 OS= Cytophagia bacterium OX=2026730 GN=folE PE=3 SV=1
MSKDSQSDFELLQIMKDQFEDEGDNHVSSNIDTPLRDDAFDLSDNQKIKKIEKYFQKIMITLGLDLSDDSLKGTPHRVAKMYVKEMCSGLNLSNKPSISLFENQYDYNKMIVEKNINFYSNCEHHFLPIIGKAHIAYISSGKVIGLSKMHRIVNYFAKRPQVQERMTVQIFNELKQALQTKSVALLIDADHLCVASRGIKDVTSSTITFEKGGDFDNHETWTEFLSLINVKLK

SEQ ID NO: 7314 - protein, 184 aa, Cytophagia bacterium
  misc_feature (1)..(184): tr|A0A2E9WI28|A0A2E9WI28_9BACT GTP cyclohydrolase 1 OS= Cytophagia bacterium OX=2026730 GN=folE PE=3 SV=1
MEKITKDLLKELGEDPSREGLLKTPSRVAKSWSFLTSGYKKDLKKLVNNAIFHEDCDNMIVIKDIEFYSLCEHHLLPFFGRAHVSYIPNGKIIGLSKIPRIVDLFSRRLQVQERLTVQIAQTIDSILSPKGVAVVLESNHMCMQMRGVQNKNSYASTSSMIGLFRKDHKTRKEFLDLINMNKKF

SEQ ID NO: 7315 - protein, 213 aa, Dactylococcopsis salina
  misc_feature (1)..(213): tr|K9YWD2|K9YWD2_DACSA GTP cyclohydrolase 1 OS=Dactyloc occopsis salina PCC 8305 OX=13035 GN=folE PE=3 SV=1
MTLSTQESPSPALPSLETEAQPVVSEEEMRQAVRTLLLGLGEDPDREGLLDTPKRVVKALQFLTSGYHQSIDDLLNGAVFHEDTDEMVLVRDIDLFSSCEHHILPIIGRVHVAYMPNGKVIGLSKLARICEMYGRRLQVQERLTAQIADAIEGLLQPKGVAVVVEATHMCMVMRGVQKPGSWTVSSAMRGVFADDPKTRQEFMSLIQHPQNFR

SEQ ID NO: 7316 - protein, 224 aa, Dactylococcopsis salina
  misc_feature (1)..(224): tr|K9YWI9|K9YWI9_DACSA GTP cyclohydrolase 1 OS=Dactyloc occopsis salina PCC 8305 OX=13035 GN=folE PE=3 SV=1
MSNGSAKVTKTVSLDSASSVEAAVSQNGSEEFSRPEIGEMMEAVKTILEGVGEDPEREGLLKTPKRVAEAMQFLTQGYEQSLDDLVNGAIFDEGHNEMVLVRDIDVFSLCEHHMLPFMGKAHVAYIPNEKVVGLSKLARIVEMYARRLQVQERLTRQIAEAIQTILEPQGVAVVMEASHMCMVMRGVQKPGSWTVTSAMLGVFQEDQKTREEFLNLIRHQPSFH

SEQ ID NO: 7317 - protein, 213 aa, Dankookia rubra
  misc_feature (1)..(213): tr|A0A4R5QA27|A0A4R5QA27_9PROT GTP cyclohydrolase 1 OS= Dankookia rubra OX=1442381 GN=folE PE=3 SV=1
MNIQTPPAEIIPTHASLEGRPSRAEAEAAVRTLLRWTGDDPDREGLVDTPARVVRAYEEFFAGYETDPVDLLARSFEETDGYDEMVVLRDIRLESHCEHHVVPILGRAHIAYLPAGRVVGISKLARVLEVYAKRLQIQEKLTAQVANCINDVLKPKGVAVVIEAAHQCMTTRGIHKPGVTMVTSRMLGAFRDDASTRREFLAMIGGQRGAMEG

SEQ ID NO: 7318 - protein, 202 aa, Dankookia rubra
  misc_feature (1)..(202): tr|A0A4V6PKC5|A0A4V6PKC5_9PROT GTP cyclohydrolase 1 OS= Dankookia rubra OX=1442381 GN=folE PE=3 SV=1
MVAKPLAETPIPIARPSRAEAEAAVRTLLRWAGDDPAREGLLDTPARVVRSYEEFFAGYAVDPVALLERTFAETEGYDEIVLLKDIRLESYCEHHMVPIIGRAHVAYLPSNRVVGISKLARVVNAYAKRLQIQEKLTAQIANTIEAVLQPRGVGVVIESEHQCMTTRGVHQHGASMVTSRMLGVFRDDANTRRELMALIGRS

SEQ ID NO: 7319 - protein, 266 aa, Dechloromonas aromatica
  misc_feature (1)..(266): sp|Q47IT5|GCH41_DECAR GTP cyclohydrolase FolE2 1 OS=Dec hloromonas aromatica (strain RCB) OX=159087 GN=folE2-1 PE=3 SV=1
MNAPENIFLPDVQAAADTRRLAIQSVGVKGLRYPLQLENAAGELTSTVATFAMSVGLPPEVKGTHMSRFVELLEARTGPLTQVGLLRMMADMLLRLDASSGRIELAFPYFIRKMAPVSGVESLLDYDATLIVDQRAWESATLTLRVVAPVTSLCPCSKKISDYGAHNQRSHITLEARLRSPMSIEDLVRIAEEEASCEVFGLLKRPDEKWVTERAYDNPKFVEDLVRDIALRLMNEPRIAEWKVASENFESIHNHSAYAELYGCNE

SEQ ID NO: 7320 - protein, 270 aa, Dechloromonas aromatica
  misc_feature (1)..(270): sp|Q47BI9|GCH42_DECAR GTP cyclohydrolase FolE2 2 OS=Dec hloromonas aromatica (strain RCB) OX=159087 GN=folE2-2 PE=3 SV=1
MSTPTSNIPDVQNSADTRHIAINKVGIKSIRHPIKVQDKSAGIQHTIAMFNMYVGLPHNFKGTHMSRFVEILNSHEREISVENFPTMLRDMVVKLEAETGHIEMNFPYFINKTAPVSGVQSLMDYDVTFIGDICHGEIATSVKVVVPVTSLCPCSKKISEYGAHNQRSHVTVTAKTNDFMWIEEIVQLVEQEASCELFGLLKRPDEKYVTERAYDNPKFVEDMVRDVAARLNAEARVDAYVVESENFESIHNHSAYALIENDKKNPLAHA

SEQ ID NO: 7321 - protein, 266 aa, Dechloromonas denitrificans
  misc_feature (1)..(266): tr|A0A133XMN2|A0A133XMN2_9RHOO GTP cyclohydrolase FolE2 OS=Dechloromonas denitrificans OX=281362 GN=folE2 PE=3 SV=1
MSTPTPNIPDVQNSADTRQIAINKVGIKSIRHPIRVQDKSAGIQHTIAMFNMYVGLPHNFKGTHMSRFVEILNSHEREISVESFPVMLGDMIVKLEAETGHIEMNFPYFINKTAPISGVQSLMDYDVTFIGDICNGQITTSVKVVVPVTSLCPCSKKISEYGAHNQRSHVTVTARTNDFVWIEELVQLVEAEASCELFGLLKRPDEKYVTERAYDNPKFVEDMVRDVAARLNAEGRIDAYTVESENFESIHNHSAYALIERDKTTA

SEQ ID NO: 7322 - protein, 266 aa, Dechloromonas denitrificans
  misc_feature (1)..(266): tr|A0A133XGK1|A0A133XGK1_9RHOO GTP cyclohydrolase FolE2 OS=Dechloromonas denitrificans OX=281362 GN=folE2 PE=3 SV=1
MNAPENIFLPDVQSTADTRRLAIQNVGVKGLRYPLQLAAANGELLNTVATLAMTVGLPPEVKGTHMSRFVELLEARRGALSQDGLFRMFEEMLLRLEARSGRIELAFPYFIRKAAPVSGVESLLDYDATLIIDQPEGQVASLTLRVVAAVTSLCPCSKKISDYGAHNQRSHITLEAKLRSTMSIEELVRIAEEEASCEVFGLLKRPDEKWVTERAYDNPKFVEDLVRDIALRLMNEPRIAEWKVASENFESIHNHSAFAELFGVNA

SEQ ID NO: 7323 - protein, 266 aa, Dechloromonas sp.
  misc_feature (1)..(266): tr|A0A5C7ZWZ8|A0A5C7ZWZ8_9RHOO GTP cyclohydrolase FolE2 OS=Dechloromonas sp. OX=1917218 GN=folE2 PE=3 SV=1
MNAPDRFFLPDVQAFADTRALAIQNVGVKGLRYPLRIETGNGEQMSTVATLAMTVGLPPEVKGTHMSRFVEILESRHGVLTQDGVFRMLDEMLLRLEARSGRIEMSFPYFIRKAAPVSGVESLLDYDVTYIIDAPEGEYANLTLRVTAPVTSLCPCSKKISDYGAHNQRSHITLEAKLRSLMSIEELVRIAEDEASCEVFGLLKRPDEKWVTERAYDNPKFVEDLVRDIALRLMNEPRIASWKVASENFESIHNHSAYAELYGTNV

SEQ ID NO: 7324 - protein, 270 aa, Dechloromonas sp.
  misc_feature (1)..(270): tr|A0A3B7A5L1|A0A3B7A5L1_9RHOO GTP cyclohydrolase FolE2 OS=Dechloromonas sp. HYN0024 OX=2231055 GN=folE2 PE=3 SV=1
MNTPNSPIADVQNTVDTRHIAINKVGIKSIRHPIKVQDKSTGVQHTIAMFNMYVGLPHNFKGTHMSRFVEILNSHEREISVENFPVMLRDMVAKLEAETGHIEMNFPYFINKTAPISGVQSLMDYDVTFIGDICHGEIATSVKVVVPVTSLCPCSKKISEYGAHNQRSHVTVTARTNDFVWIEEIVQLVEQEASCELFGLLKRPDEKYVTERAYDNPKFVEDMVRDVAARLNAETRIDAYVVESENFESIHNHSAYALIENDKTRPPAHP

SEQ ID NO: 7325 - protein, 260 aa, Deferribacter autotrophicus
  misc_feature (1)..(260): tr|A0A5A8F8U6|A0A5A8F8U6_9BACT GTP cyclohydrolase FolE2 OS=Deferribacter autotrophicus OX=500465 GN=folE2 PE=3 SV=1
MLKDIQSQFDDRNLAIDKVGIKGIKYPIILRDKRKGSQHTIATINMFVKLPHNFKGTHMSRFVEILNKYRENISISSFKEILEEMRIRLNSEEAHFDMEFTYFLEKEAPVSKQTSLMDYLCRFSGNVSDEKMDFILSVTVPVISVCPCSKEISAYGAHNQRSYVTISVRYNRMVWIEDLIEIAEKSGSSPIFSLLKREDEKFITECSYDNPVFVEDIVRNAAQYLLEDDRIDWFEVSSENFESIHNHSAFASITIDKKKK

SEQ ID NO: 7326 - protein, 261 aa, Deferribacter desulfuricans
  misc_feature (1)..(261): tr|D3PA15|D3PA15_DEFDS GTP cyclohydrolase FolE2 OS=Defe rribacter desulfuricans (strain DSM 14783 / JCM 11476 / NBRC 101012 / SSM1) OX=639282 GN=folE2 PE=3 SV=1
MNLKDIQSLYDHRNLTIDKVGIKGIKYPIVLKDKRKGNQHTIAAINMFVKLPHNFKGTHMSRFVEILNKYRDNISISSFKEILEEMRVKLDSEEAHFDMQFTYFLEKEAPISKLPSLIDYECRFSGTVSDNKKDFVLTVTVPVVSVCPCSKEISDYGAHNQRSYVTIAVRYNKMVWIEDLIEIAEKSGSSPIYSLLKREDEKFVTERSYENPAFVEDIVRNAAELLLKDERITWFEVSSENFESIHNHSAFASICIDKTNK

SEQ ID NO: 7327 - protein, 363 aa, Defluviimonas alba
  misc_feature (1)..(363): tr|A0A159Z463|A0A159Z463_9RHOB GTP cyclohydrolase FolE2 OS=Defluviimonas alba OX=1335048 GN=folE2 PE=3 SV=1
MNIHVSEIDRRPSREEAEAALALLRKWAGACADDEAAGLDHEALMLKGSGYPEFSRRYPADFTADAVYKAGLPDLQNGPASLIVGARAQIQHVGISNFRLPIRYHTRGGGEGLTLETSVTGTVSLEADKKGINMSRIMRSFYAHAERTFSFAVMEAALDDYKTDLGSFDARIQMRLSFPARVQALRSGLTGWQYYDLALELVETAGLRKRIVHLDYVYSSTCPCSLELSEHARATRGQLATPHSQRSVARISAELVGSQCLWFEDLIDIARAAVPTETQVMVKREDEQAFAELNAAHPIFVEDAARSFAAGLLTDPRVGDFRIIASHQESLHSHDAVSVLTEGPTFAAQSLDPRLFASLHKAG

SEQ ID NO: 7328 - protein, 365 aa, Defluviimonas aquaemixtae
  misc_feature (1)..(365): tr|A0A2R8B381|A0A2R8B381_9RHOB GTP cyclohydrolase FolE2 OS=Defluviimonas aquaemixtae OX=1542388 GN=folE2 PE=3 SV=1
MNFVGEIGREPDRRDAEQALDLLRRWAEKADPAEIVRLDPAIARLLPGREVGNYPELSRIYPENFTPDASYRASMPDLQNGPASLIVGAQAPIQHVGISNFRLPIRFHTRDGGDITLETSVTGTVSLIGEKKGINMSRIMRSFYAHAERTFSFSVLEAVLEDYKKDHDSVDARLMMRFSFPARVDSLRSGLTGWQYYDIALELMEGEGRQKRITHLDYVYSSTCPCSLELSEHARQSRGQLATPHSQRSVARISVVEEGGKILWYEDLIDLARAAVPTETQVMVKREDEQAFAELNAANPIFVEDAARSFAERLLAEPRVGDFRIVASHQESLHSHDAVSILTEGPTFAAESIDPKLFSTLHRPG

SEQ ID NO: 7329 - protein, 365 aa, Defluviimonas denitrificans
  misc_feature (1)..(365): tr|A0A2S8SDN8|A0A2S8SDN8_9RHOB GTP cyclohydrolase FolE2 OS=Defluviimonas denitrificans OX=404881 GN=folE2 PE=3 SV=1
MNFIKKIGENPDAKDAQEALAVLRAWAETADPVEVARLDPAIARLLPDGKVSNYPDLSRVYPEDFTPDATYRASMPDLQNGPSSLIVGAKAQIQHVGISNFRLPIRFHTRDGGDLTLETSVTGTVSLGAEKKGINMSRIMRSFYAHAESTFSFDVMESALDDYKAHLGSFDARIQMRFSFPMKVASLRSGLAGWQYYDIALELVEMHGVRKRVIHLDYVYSSTCPCSLELSEHARQRRGQLATPHSQRSVARLSAVEEGAKCLWYEDLIDMARAAVPTETQVMVKREDEQAFAELNAANPIFVEDAARSFAERLLADPRVGDFRIVASHQESLHSHDAVSVLTEGATFASESLDPRLFSSLHKPG

SEQ ID NO: 7330 - protein, 352 aa, Defluviimonas sp.
  misc_feature (1)..(352): tr|A0A059INW8|A0A059INW8_9RHOB GTP cyclohydrolase FolE2 OS=Defluviimonas sp. 20V17 OX=1417296 GN=folE2 PE=3 SV =1
MNMRIDEPQDEAKNAAAALKTLKTWLETAPEAERAARAAELAALTGSELSRDYDSEFAVDAAYRESLPDLQNGPASLIRGQNRPIQHVGISNFRLPLRHPTRAGAPQLLETSVTGTVSLEAEQKGINMSRILRSFYAHAEKEMGLGVVAAALDDYKRDLGSFDARIALRFAFPMQVESLRSGLSGYQYYDVTLELAEAAGARSAVLHLDYVYSSTCPCSLELSEHARASRGRLATPHSQRSVARISVALTEAPLTVEDLVDLCRAAVPTETQVMVKREDEQAFAELNAANPIFVEDAVRLFAEKLQADPRVGDFRVVASHKESLHSHDAVSVLCEGKTFAADTLDPRLFAAL

SEQ ID NO: 7331 - protein, 190 aa, Dehalobacter sp.
  misc_feature (1)..(190): tr|A0A1C2XWW2|A0A1C2XWW2_9FIRM GTP cyclohydrolase 1 OS= Dehalobacter sp. TeCB1 OX=1843715 GN=folE PE=3 SV=1
MMAIDHAKIERAVRDILEAIGEDPEREGLKDTPKRVARFYEEAFAGLHEDPSKNLSVLFSENHEEMVLVRDIPIYSMCEHHLLPFVGQAHIAYIPRHGKVTGLSKLARVAEDYARRPQLQERLTSQIANTVNDMLNPRGVIVVIEAEHMCMTVRGIKKPGAQTVTSAVRGMFETSAATRAEAFSLIMGRH

SEQ ID NO: 7332 - protein, 190 aa, Dehalobacter sp.
  misc_feature (1)..(190): tr|T0J911|T0J911_9FIRM GTP cyclohydrolase 1 OS=Dehaloba cter sp. UNSWDHB OX=1339256 GN=folE PE=3 SV=1
MMAIDHAKIERAVRDILEAIGEDPEREGLKDTPKRVARFYEEAFAGLHEDPSKNLSVLFSEKHEEMVLVRDIPIYSMCEHHLLPFVGQAHIAYIPRHGKVTGLSKLARVAEDYARRPQLQERLTSQIADTVNDMLNPRGVIVVIEAEHMCMTVRGIKKPGAQTVTSAVRGMFETSAATRAEAFSLIMGRH

SEQ ID NO: 7333 - protein, 191 aa, Dehalococcoidaceae bacterium
  misc_feature (1)..(191): tr|A0A2E8TBN8|A0A2E8TBN8_9CHLR GTP cyclohydrolase 1 OS= Dehalococcoidaceae bacterium OX=2026731 GN=folE PE=3 SV =1
MKKFDEKKAMDGITMFLQAYGVDLNEPGLQETPRRIVQAYKEFLSGDNELNTKILSTDFIQQYDEMIVVRDIPFVSMCEHHFLPFWGKAHVSYLPKGKVVGLSKVARLVENIARQPQIQERMTKQVADSIENTLETDGVGVVITAEHSCLSFRGIKKHGSTMITSAMNGNFRTDAKTRSEFMSIIQVGILK

SEQ ID NO: 7334 - protein, 191 aa, Dehalococcoidales bacterium
  misc_feature (1)..(191): tr|A0A2D6J068|A0A2D6J068_9CHLR GTP cyclohydrolase 1 OS= Dehalococcoidales bacterium OX=2026733 GN=folE PE=3 SV= 1
MARVIDGTEIKQAITAIIKAIGEDPDREGLAETPSRVAEMYTELFMGLNVDPGRELQAGYELGHREMVIVRDIPFYSMCEHHLLPFYGIVHIGYIPDISGRVVGISKLARVVEIIARRPQIQERMTTQIADTIMDGLKASGVAVVVQAEHMCMVMRGVKKPGSNIVTSALRGSFRTKPETRTEFFSLLQGK

SEQ ID NO: 7335 - protein, 188 aa, Dehalococcoidales bacterium
  misc_feature (1)..(188): tr|A0A2E9M5N9|A0A2E9M5N9_9CHLR GTP cyclohydrolase 1 OS= Dehalococcoidales bacterium OX=2026733 GN=folE PE=3 SV= 1
  misc_feature (8)..(8): Xaa can be any naturally occurring amino acid
  misc_feature (24)..(24): Xaa can be any naturally occurring amino acid
  misc_feature (46)..(46): Xaa can be any naturally occurring amino acid
  misc_feature (89)..(89): Xaa can be any naturally occurring amino acid
  misc_feature (96)..(96): Xaa can be any naturally occurring amino acid
  misc_feature (103)..(103): Xaa can be any naturally occurring amino acid
  misc_feature (105)..(105): Xaa can be any naturally occurring amino acid
  misc_feature (111)..(111): Xaa can be any naturally occurring amino acid
  misc_feature (117)..(117): Xaa can be any naturally occurring amino acid
  misc_feature (130)..(130): Xaa can be any naturally occurring amino acid
  misc_feature (132)..(132): Xaa can be any naturally occurring amino acid
  misc_feature (148)..(148): Xaa can be any naturally occurring amino acid
  misc_feature (174)..(174): Xaa can be any naturally occurring amino acid
MFDEAAIXKAITSIIKAIGVDPEXGGLADTPKRVAEMYAELFMGIXVDPAEELKVEFEEGYREMVILRDIPFYSMCEHHLLPFYGVAHXGYIPNAXGRVVGAXKXARVVEXVARRLXLQERMTTQIAEAXCXGIKPDGVGVVIHAEHXCMIMRGIKKPGSTVVTSAVRGLFRRXSKTRAEFFSLVQSK

SEQ ID NO: 7336 - protein, 189 aa, Dehalococcoides mccartyi
  misc_feature (1)..(189): sp|A5FQD3|GCH1_DEHMB GTP cyclohydrolase 1 OS=Dehalococc oides mccartyi (strain ATCC BAA-2100 / JCM 16839 / KCTC 5957 / BAV1) OX=216389 GN=folE PE=3 SV=1
MFDEQAIKQSVQNILVAIGEDPDREGLKETPRRVAQMYTELFSGMNQDPAEVLRVGYELGHREMVIIKDIPFYSMCEHHLLPFSGVVHIGYIPNIDGRVVGISKLARVVEIYAKRPQIQERMATQIADAIMDGLKCDGVAVVIEAEHMCMVMRGIKKPGSRVITSALRGSFHKSPAARAEFLSLIQHKG

SEQ ID NO: 7337 - protein, 189 aa, Dehalococcoides mccartyi
  misc_feature (1)..(189): tr|A0A0V8M029|A0A0V8M029_9CHLR GTP cyclohydrolase 1 OS= Dehalococcoides mccartyi OX=61435 GN=folE PE=3 SV=1
MFDEQAIKQSVQNMLLAIGEDPEREGLKETPRRVAQMYAELFSGMNQDPAEVLRVGYELGHREMVIIKDIPFYSMCEHHLLPFSGVVHIGYIPNIDGRVVGISKLARVVEIYAKRPQIQERMATQIADAIIDGLKCDGVAVVIEAEHMCMVMRGIKKPGSRVITSALRGSFHKSPAARAEFLSLIQQKH

SEQ ID NO: 7338 - protein, 189 aa, Dehalococcoides sp.
  misc_feature (1)..(189): tr|A0A0C6EEK6|A0A0C6EEK6_9CHLR GTP cyclohydrolase 1 OS= Dehalococcoides sp. UCH007 OX=1522671 GN=folE PE=3 SV=1
MFDEQSIKQSVQNMLLAIGEDPEREGLKETPRRVAQMYAELFSGMNQDPAEVLRVGYELGHREMVIIKDIPFYSMCEHHLLPFSGVVHIGYIPNIDGRVVGISKLARVVEIYAKRPQIQERMATQIADAIIDGLKCDGVAVVIEAEHMCMVMRGIKKPGSRVITSALRGSFHKSPAARAEFLSLIQHKS

SEQ ID NO: 7339 - protein, 186 aa, Dehalococcoidia bacterium
  misc_feature (1)..(186): tr|A0A0S7WPC8|A0A0S7WPC8_9CHLR GTP cyclohydrolase 1 OS= Dehalococcoidia bacterium DG_18 OX=1703392 GN=folE PE=3 SV=1
MVNKGRIKKAVTSIIEAVGENPSREGLKGTPRRIADMYADIFSGLDMDPRDELTVGFDEGHHEMVIVKDIPFYSMCEHHFLPFFGLVHVGYIPKGRIAGASKVARAVDILAKRPQLQERLTTQIAEAMVEALKPNGVGVVIEAEHMCMTMRGVKKPRSKIVTSAMRGLFRENPATRAEFMSLLQGS

SEQ ID NO: 7340 - protein, 186 aa, Dehalococcoidia bacterium
  misc_feature (1)..(186): tr|A0A0S8EJX0|A0A0S8EJX0_9CHLR GTP cyclohydrolase 1 OS= Dehalococcoidia bacterium SM23_28_2 OX=1703396 GN=folE PE=3 SV=1
MVDRAKIAEAVRRIIEAIGEDPQREGLAETPRRIGDMYAYFFSGLERDPVEVLRSGFQGEKDEPVILRDIPFYSLCEHHFLPFYGVAHVGYIPNGRLVGISKIARALDILARRPQIQERLTRQLADCILEALDADGVGVVVEAEHLCLSMRGAHKPGTRVVTFAVQGPFRKGTFARSEFLALVQGR

SEQ ID NO: 7341 - protein, 190 aa, Dehalogenimonas alkenigignens
  misc_feature (1)..(190): tr|A0A0W0GIP8|A0A0W0GIP8_9CHLR GTP cyclohydrolase 1 OS= Dehalogenimonas alkenigignens OX=1217799 GN=folE PE=3 S V=1
MFMMIDEEAIKAAVESILKAIGDDPAREGLAGTPRRVAQMYSEIFGGMPQNPVDELQVGYELGHREMVILRDIPFYSMCEHHLLPFSGVAHIGYVPGEDGRVVGISKLARVVDIIARRPQIQERMATEIADAIMEGLKPDGVGVVISAEHMCMTMRGIKKPGARVVTSALRGIFAKRAATRAEFMALIQD

SEQ ID NO: 7342 - protein, 187 aa, Dehalogenimonas formicexedens
  misc_feature (1)..(187): tr|A0A1P8F7G0|A0A1P8F7G0_9CHLR GTP cyclohydrolase 1 OS= Dehalogenimonas formicexedens OX=1839801 GN=folE PE=3 S V=1
MIDEKMIKGAVENILTAIGDDPKREGLIDTPQRVAQMYAEIFGGMRQNPVDELKVGYELGHREMVILKDIPFYSMCEHHLLPFSGVAHVGYVPGIDGRVVGISKLARVVDIIARRPQIQERMATEIADAIMEGLKPDGVGVVIEAEHMCMTMRGIKKPGAKVVTSALRGIFSKKAATRAEFMSLIQK

SEQ ID NO: 7343 - protein, 186 aa, Dehalogenimonas lykanthroporepellens
  misc_feature (1)..(186): tr|D8K0Y7|D8K0Y7_DEHLB GTP cyclohydrolase 1 OS=Dehaloge nimonas lykanthroporepellens (strain ATCC BAA-1523 / JC M 15061 / BL-DC-9) OX=552811 GN=folE PE=3 SV=1
MIDENAIAAAVETMLEAIGDDPNREGLRDTPERVARMYAEIFSGIDKNPADDLKVGYELGHREMVILKDIPFYSMCEHHLLPFSGVVHIGYVPGQDGRVVGISKLARVVETVARRPQIQERMATEIADAIVDGLSPDGVGVVITAEHMCMTMRGIKKPGSKVLTSALRGGFAKRPATRAEFMSLIQ

SEQ ID NO: 7344 - protein, 187 aa, Dehalogenimonas sp.
  misc_feature (1)..(187): tr|A0A0F7GDT0|A0A0F7GDT0_9CHLR GTP cyclohydrolase 1 OS= Dehalogenimonas sp. WBC-2 OX=943347 GN=folE PE=3 SV=1
MIDEDAIKTAVESILKAIGDDPEREGLKETPRRVAQMYSEIFSGMDRDPVEDLKVGYELGHREMVILKDIPFYSMCEHHLLPFSGVVHIGYVPGKDGRVVGISKLARVVETIARRPQIQERMATDIANAIMEGLSPDGVGVVITAEHMCMTMRGIKKPGSRVVTSALRGGFAKRAATRAEFMSLIQG

SEQ ID NO: 7345 - protein, 187 aa, Dehalogenimonas sp.
  misc_feature (1)..(187): tr|A0A2P5P925|A0A2P5P925_9CHLR GTP cyclohydrolase 1 OS= Dehalogenimonas sp. GP OX=1536648 GN=folE PE=3 SV=1
MIDEKTIKTAVENILKAIGDDPLREGLIDTPQRVAQMYAEIFGGMNQNPVDELKVGYELGHREMVILRDIPFYSMCEHHLLPFSGVAHVAYVPGVDGRVVGISKLARVVDIIARRPQIQERMATEIADAIMDGLKPDGVGVVIEAEHMCMTMRGIKKPGAKVVTSALRGIFSKRAATRAEFMSLIQK

SEQ ID NO: 7346 - protein, 203 aa, Deinococcus actinosclerus
  misc_feature (1)..(203): tr|A0A0U4BSP1|A0A0U4BSP1_9DEIO GTP cyclohydrolase 1 OS= Deinococcus actinosclerus OX=1768108 GN=folE PE=3 SV=1
MTIEPLISAADEKQEVPGLRALTQDWLGAIGEDPEREGLLKTPHRVAKAWGFLTAGYHKSLQEAVGDAVFEADGSEMVIVKDIEFYSMCEHHMLPFYGRAHIAYIPDGKILGLSKFARIVDLYSRRLQVQERITTQVADAVQELLAPRGVAVMMEGVHLCMAMRGVQKQNSSTSTSAMRGLFKSDARTRAEFMSAVQGTLRGR

SEQ ID NO: 7347 - protein, 203 aa, Deinococcus actinosclerus
  misc_feature (1)..(203): tr|A0A2Z3Z752|A0A2Z3Z752_9DEIO GTP cyclohydrolase 1 OS= Deinococcus actinosclerus OX=1768108 GN=folE PE=3 SV=1
MTIEPMISAADEKQEVPGLRALTQDWLGAIGEDPDREGLLKTPHRVAKAWGFLTAGYHKSLQEAVGDAVFAADGSEMVIVKDIEFYSMCEHHMLPFYGRAHIAYIPDGKILGLSKFARIVDLYSRRLQVQERITTQVADAVQELLAPKGVAVMMEGVHLCMAMRGVQKQNSSTSTSAMRGLFKSDARTRAEFMSAVQGTLRGR

SEQ ID NO: 7348 - protein, 203 aa, Deinococcus aerius
  misc_feature (1)..(203): tr|A0A2I9DVI0|A0A2I9DVI0_9DEIO GTP cyclohydrolase 1 OS= Deinococcus aerius OX=200253 GN=folE PE=3 SV=1
MTIPPTISAADERQEVPGLRALTQDWLSAIGEDPDREGLQKTPHRVAKAWSFLTAGYQKTLADAAGDAVFAADGSEMVIVKDIEFYSMCEHHMLPFYGRAHIAYIPDGHILGLSKFARIVDLYSRRLQVQERITTQIADAVEELLNPRGVAVLMEGIHLCMAMRGVQKQNSSTTTSAMRGLFKEDARTRAEFMSAVQTTLRGR

SEQ ID NO: 7349 - protein, 200 aa, Deinococcus cellulosilyticus
  misc_feature (1)..(200): tr|A0A511MZU9|A0A511MZU9_9DEIO GTP cyclohydrolase 1 OS= Deinococcus cellulosilyticus NBRC 106333 = KACC 11606 O X=1223518 GN=folE PE=3 SV=1
MTATHTVTFEEACKAIEVLLRHLGENPSREGLLDTPHRVVKAWQELVGGYHLDPHEILSTTFDLGDVEEGGALRHVNFVISKNLPFVSYCEHHMLPFEGEAHLAYVPQPGGRVVGLSKLARLLDAYARRFQVQERLTEQLAGTLDRALQPMGVAIMVEASHSCQCARGIRKKGRMVTTAYTGIFQMDAASRQEFLQLVKP

SEQ ID NO: 7350 - protein, 306 aa, Deinococcus cellulosilyticus
  misc_feature (1)..(306): tr|A0A511MYT0|A0A511MYT0_9DEIO GTP cyclohydrolase FolE2 OS=Deinococcus cellulosilyticus NBRC 106333 = KACC 116 06 OX=1223518 GN=folE2 PE=3 SV=1
MANHNPTLTQGSSRLPSKQERHRLFGSVDPIPGNKPTEKEKMVDLQNTPKDFLFALDQVGISSVKHPAVVHSTLSPTVQTTVANFALTTSLVQNSKGINMSRLTEQLDLYHQQGWDLSLKHLCQFAEELAGRMKQSAATIEVTFPWFYERPAPVTGMTGLMHAEAMMRVHFDEVEGFTATVGLKAMVTTLCPCSKEISEYSAHNQRGVVTAEIELTDAQTDWDWKKALLEAEETNASACMHPILKRPDEKRVTESAYENPRFVEDMVRLVAADLYEMPEVAAFFVECRNEESIHLHDAIARVRYRK

SEQ ID NO: 7351 - protein, 205 aa, Deinococcus deserti
  misc_feature (1)..(205): tr|C1CZ41|C1CZ41_DEIDV GTP cyclohydrolase 1 OS=Deinococ cus deserti (strain VCD115 / DSM 17065 / LMG 22923) OX= 546414 GN=folE PE=3 SV=1
MTEFDTEHHHIQQEKQELPGLSELTTQWLSAVGEDPQREGLLKTPHRVAKAWNFLTDGYRLTLDDAVGDAVFAAEGSEMVIVKDIEFYSMCEHHMLPFFGRAHVAYIPDGKILGLSKFARIVDLYSRRLQVQERITTQVADAVQDLLQPKGVAVLMEGVHLCMAMRGVQKQNSSTTTSAMRGLFRSDPRTRAEFMSAVQGTLRGR

SEQ ID NO: 7352 - protein, 188 aa, Deinococcus ficus
  misc_feature (1)..(188): tr|A0A221SZA0|A0A221SZA0_9DEIO GTP cyclohydrolase 1 OS= Deinococcus ficus OX=317577 GN=folE PE=3 SV=1
MPGLNPLTREWLAAIGEDPNREGLQRTPHRVAKAWQFMTAGYGQDVREVVGDGVFAAEGSEMVIVKDIEFYSMCEHHMLPFYGRAHVAYIPDRKILGLSKFARIVDLYSRRLQVQERITTQVADAVQDLLEPKGVAVFMEGVHLCMAMRGVQKQNSSTTTSAMRGLFRSDPRTRAEFMSAVQGTLRGR

SEQ ID NO: 7353 - protein, 202 aa, Deinococcus geothermalis
  misc_feature (1)..(202): tr|Q1J1X5|Q1J1X5_DEIGD GTP cyclohydrolase 1 OS=Deinococ cus geothermalis (strain DSM 11300) OX=319795 GN=folE P E=3 SV=1
MTTSTISAADERQEVPGLSALTYDWLTAIGENPEREGLLKTPHRVAKAWRFLTAGYHQTLADAAGDAVFEAEGSEMVIVKDIEFYSMCEHHMLPFYGRAHIAYIPDGKILGLSKFARIVDLYARRLQVQERITTQIADAVEELLSPRGVAVLMEGVHLCMAMRGVQKQNSSTTTSAMRGVFKEDARTRAEFMSAVQNTLRSR

SEQ ID NO: 7354 - protein, 188 aa, Deinococcus gobiensis
  misc_feature (1)..(188): tr|H8GUH6|H8GUH6_DEIGI GTP cyclohydrolase 1 OS=Deinococ cus gobiensis (strain DSM 21396 / JCM 16679 / CGMCC 1.7 299 / I-0) OX=745776 GN=folE PE=3 SV=1
MPGLSGLTRDWLSAIGEDPEREGLERTPHRVAKAWSYLTSGYEQTLQSVVGEGVFASEGSEMVIVKDIEFYSMCEHHMLPFYGRAHVAYIPEGRILGLSKFARIVDLYSRRLQVQERITTQIADAVQDLLAPQGVAVLMEGVHLCMAMRGVQKQNSSTTTSAMRGLFRSDARTRAEFMSAVQGTLRGR

SEQ ID NO: 7355 - protein, 203 aa, Deinococcus grandis
  misc_feature (1)..(203): tr|A0A117DRC9|A0A117DRC9_9DEIO GTP cyclohydrolase 1 OS= Deinococcus grandis OX=57498 GN=folE PE=3 SV=1
MTIEPLISAADEKQEVPGLRALTHEWLGAIGEDPDREGLLKTPHRVAKAWGFLTAGYQKTLHEAVGDAVFAADGSEMVIVKDIEFYSMCEHHMLPFYGRAHIAYIPDGKILGLSKFARIVDLYSRRLQVQERITTQVADAVQELLAPRGVAVMMEGVHLCMAMRGVQKQNSSTSTSAMRGLFKSDARTRAEFMSAVQGTLRGR

SEQ ID NO: 7356 - protein, 203 aa, Deinococcus hopiensis
  misc_feature (1)..(203): tr|A0A1W1V7T0|A0A1W1V7T0_9DEIO GTP cyclohydrolase 1 OS= Deinococcus hopiensis KR-140 OX=695939 GN=folE PE=3 SV= 1
MTIHPTISADDEGQEVPGLRDLTHGWLAAVGEDPEREGLLKTPHRVAKAWGFLTAGYHKSLQDAAGDAVFEADGSEMVIVKDIEFYSMCEHHMLPFYGRAHIAYIPDGKILGLSKFARIVDLYSRRLQVQERITTQIADAVSELLDPRGVAVLMEGVHLCMAMRGVQKQNSSTTTSAMRGLFKSDARTRAEFMSAVQGTLRSR

SEQ ID NO: 7357 - protein, 203 aa, Deinococcus indicus
  misc_feature (1)..(203): tr|A0A246BRQ3|A0A246BRQ3_9DEIO GTP cyclohydrolase 1 OS= Deinococcus indicus OX=223556 GN=folE PE=3 SV=1
MTIETVISAADEKQEVPGLSALTHSWLGAIGEDPEREGLIKTPHRVAKAWGFLTAGYQKTLHEAVGDAVFAADGSEMVIVKDIEFYSMCEHHMLPFYGRAHIAYIPDGQILGLSKFARIVDLYSRRLQVQERITTQVADAVQELLAPKGVAVVMEGVHLCMAMRGVQKQNSSTSTSAMRGLFKSDPRTRAEFMSAVQTTLRSR

SEQ ID NO: 7358 - protein, 203 aa, Deinococcus irradiatisoli
  misc_feature (1)..(203): tr|A0A2Z3JFZ2|A0A2Z3JFZ2_9DEIO GTP cyclohydrolase 1 OS= Deinococcus irradiatisoli OX=2202254 GN=folE PE=3 SV=1
MTVYPLISAADEKQEVPGLSALTTDWLSAIGEDPEREGLLKTPHRVAKAWGFLTAGYTKTLGDAAGDAVFDAEGSEMVIVKDIEFYSMCEHHMLPFYGRAHIAYVPSGKILGLSKFARIVDLYSRRLQVQERITAQIADAVEELLAPAGVAVMMEGTHLCMAMRGVQKQNSSTTTSSMRGVFKEDSRTRAEFMSAVQHTLRNR

SEQ ID NO: 7359 - protein, 211 aa, Deinococcus koreensis
  misc_feature (1)..(211): tr|A0A2K3UVQ5|A0A2K3UVQ5_9DEIO GTP cyclohydrolase 1 OS= Deinococcus koreensis OX=2054903 GN=folE PE=3 SV=1
MDGGRSPTLTIEPLISAADEKQEVPGLRALTHSWLDAIGEDPEREGLLKTPHRVAKAWGFLTAGYHKTLHDAVGDAVFAAEGSEMVIVKDIEFYSMCEHHMLPFYGRAHIAYIPDGQILGLSKFARVVDLYSRRLQVQERITTQIADAVQELLAPRGVAVMMEGVHLCMAMRGVQKQNSSTTTSAMRGLFKDDPRTRAEFMSAVQVTLRSR

SEQ ID NO: 7360 - protein, 335 aa, Deinococcus maricopensis
  misc_feature (1)..(335): tr|E8U4X8|E8U4X8_DEIML GTP cyclohydrolase I OS=Deinococ cus maricopensis (strain DSM 21211 / LMG 22137 / NRRL B -23946 / LB-34) OX=709986 GN=Deima_0457 PE=4 SV=1
MTANEILEPEGTPSTPKKAYLYPNKSGAQPVIARRYDADFRPDDAYKATLPDMTETVDAIEGAPVAIQQVGISGFRLPLRFESPQGELMLEGRVVGTVSLDAAEKGINMSRVMRTFYTFGEETFTPDTLVRIVQAYQQQVGTLCARLKVSFSYPALLGSLRSGLSGYQYYAASFEASVDADGTARRYIELDFVYSSACPCSAELAEHARDVRGAYAIPHSQRSKARVKVELQAGAQLPLIDLIEHLRRALMTETQVMVKREDEQAFAELNGAYVKFVEDAARLIYRELHGDARIVDFRAACSHMESLHSHDAVSVIVRGIPGGFRADFMDFPDLA

SEQ ID NO: 7361 - protein, 209 aa, Deinococcus marmoris
  misc_feature (1)..(209): tr|A0A1U7NWU3|A0A1U7NWU3_9DEIO GTP cyclohydrolase 1 OS= Deinococcus marmoris OX=249408 GN=folE PE=3 SV=1
MTTNAPDVDIAADPFMQEELELPGLSALTEQWLSAVGEDPQREGLLKTPHRVAKAWNFLTDGYRMTLEEAAGNAVFEAEGSEMVIVKDIEFYSMCEHHMLPFYGRAHVAYIPDGKILGLSKFARIVDLYARRLQVQERITTQLADAVVELLAPKGVAVLMEGTHLCMAMRGVQKQNSSTTTSAMRGVFRDDPRTRAEFMSATQTTLRSR

SEQ ID NO: 7362 - protein, 216 aa, Deinococcus metallilatus
  misc_feature (1)..(216): tr|A0A4Q0VZM8|A0A4Q0VZM8_9DEIO GTP cyclohydrolase 1 OS= Deinococcus metallilatus OX=1211322 GN=folE PE=3 SV=1
MHSCPRAREGAVTLTTPPTISAAEERQEVPGLRGLTYDWLSAIGEDPEREGLQRTPHRVAKAWSFLTAGYQKTLADAAGDAVFEAEGSEMVIVKDIEFYSMCEHHMLPFYGRAHIAYIPDGKILGLSKFARIVDLYSRRLQVQERITTQIADAVEELLAPKGVAVLMEGVHLCMAMRGVQKQNSSTTTSAMRGVFKEDARTRAEFMSAVQNTLRNR

SEQ ID NO: 7363 - protein, 220 aa, Deinococcus peraridilitoris
  misc_feature (1)..(220): tr|K9ZZN9|K9ZZN9_DEIPD GTP cyclohydrolase 1 OS=Deinococ cus peraridilitoris (strain DSM 19664 / LMG 22246 / CIP 109416 / KR-200) OX=937777 GN=folE PE=3 SV=1
MPTDNAQLIGQTEVDDLEQLQDSDTLPEELIKTPGLAQLTHEWLGLIGEDPQREGLLKTPQRVEKAWHYLTAGYRMELADVSNGAVFEAEGSEMVVVKDIEFYSMCEHHMLPFFGRAHIGYIPERKILGLSKFARITDMFARRLQVQERITTQIAQAVQELLEPKGVAVVLEGVHLCMAMRGVEKQHSSTTTSAMRGAFREDARTRAEFMQAIQKRAVSL

SEQ ID NO: 7364 - protein, 203 aa, Deinococcus phoenicis
  misc_feature (1)..(203): tr|A0A016QKA8|A0A016QKA8_9DEIO GTP cyclohydrolase 1 OS= Deinococcus phoenicis OX=1476583 GN=folE PE=3 SV=1
MTVPPTISAAEEKQEVPGLSGLTYDWLSAIGEDPEREGLQKTPHRVAKAWGFLTAGYHKSLADAAGDAVFEAEGSEMVIVKDIEFYSMCEHHMLPFYGRAHIAYIPDGKILGLSKFARIVDLYSRRLQVQERITTQIADAVGELLAPRGVAVLMEGVHLCMAMRGVQKQNSSTTTSAMRGLFKEDARTRAEFMSAVQNTLRSR

SEQ ID NO: 7365 - protein, 208 aa, Deinococcus proteolyticus
  misc_feature (1)..(208): tr|F0RIY2|F0RIY2_DEIPM GTP cyclohydrolase 1 OS=Deinococ cus proteolyticus (strain ATCC 35074 / DSM 20540 / JCM 6276 / NBRC 101906 / NCIMB 13154 / VKM Ac-1939 / CCM 27 03 / MRP) OX=693977 GN=folE PE=3 SV=1
MSSAPDKITLPGAAAQAELEVPGLADLTHSWLSAIGEDPQREGLQRTPHRVAKAWAYMTEGYGQTLADVVGEGVFAAEGSEMVIVKDIEFYSMCEHHMLPFYGRAHVAYIPDGKILGLSKFARIVDLYSRRLQVQERITTQVAEAVEELLQPKGVAVLMEGVHLCMAMRGVQKQNSSTTTSAMRGLFRTDPRTRAEFMSAVQGTLRSR

SEQ ID NO: 7366 - protein, 192 aa, Deinococcus puniceus
  misc_feature (1)..(192): tr|A0A172TD95|A0A172TD95_9DEIO GTP cyclohydrolase 1 OS= Deinococcus puniceus OX=1182568 GN=folE PE=3 SV=1
MGAVRPDLKLLTHDWLSAIGEDPEREGLLKTPERVAKAWGFLTGGYTQTLTGVTNDAVFEAEGSEMVIVKDIEFYSMCEHHMLPFYGRAHIAYIPDGKILGLSKFARIVDLYARRLQVQERITTQVADAVLELLAPKGVAVLMEGVHLCMAMRGVQKQNSSTTTSAMRGLFKDDARTRAEFMSAVQGTLRSR

SEQ ID NO: 7367 - protein, 216 aa, Deinococcus radiodurans
  misc_feature (1)..(216): sp|Q9RYB4|GCH1_DEIRA GTP cyclohydrolase 1 OS=Deinococcu s radiodurans (strain ATCC 13939 / DSM 20539 / JCM 1687 1 / LMG 4051 / NBRC 15346 / NCIMB 9279 / R1 / VKM B-142 2) OX=243230 GN=folE PE=3 SV=1
MPQARGEGATPPTSLPNPSLKGVPLPDNPNNLEPLTREWLAAIGEDPDREGLQRTPQRVAKAWAYMTEGYGQTLAQVVGEGVFAAEGSEMVIVKDIEFYSMCEHHMLPFYGRAHVAYIPGTRILGLSKFARIVDLYSRRLQVQERITTQVADAVEELLAPKGVAVLMEGIHLCMAMRGVQKQNSSTTTSAMRGLFRSDPRTRAEFMSAVQGTLRGR

SEQ ID NO: 7368 - protein, 216 aa, Deinococcus radiodurans; identical to SEQ ID NO: 7367
  misc_feature (1)..(216): tr|A0A5C1MQY7|A0A5C1MQY7_DEIRD GTP cyclohydrolase 1 OS= Deinococcus radiodurans OX=1299 GN=folE PE=3 SV=1

SEQ ID NO: 7369 - protein, 215 aa, Deinococcus radiophilus
  misc_feature (1)..(215): tr|A0A431VWX5|A0A431VWX5_9DEIO GTP cyclohydrolase 1 OS= Deinococcus radiophilus OX=32062 GN=folE PE=3 SV=1
MRQTAGHEKGSELTTPPNISAADEQIEVPGLSGLTRDWLSAIGEDPDREGLQRTPHRVAKAWGFLTAGYGQTLEDAAGSAVFAAEGSEMVIVKDIEFYSMCEHHMLPFYGRAHVAYIPGDKILGLSKFARIVDLYSRRLQVQERITTQVADAIEELLEPKGVAVLMEGIHLCMAMRGVQKQNSSTTTSAMRGLFRNDPRTRAEFMSAVQGTLRNR

SEQ ID NO: 7370 - protein, 209 aa, Deinococcus radiopugnans
  misc_feature (1)..(209): tr|A0A5C4Y7D0|A0A5C4Y7D0_9DEIO GTP cyclohydrolase 1 OS= Deinococcus radiopugnans ATCC 19172 OX=585398 GN=folE P E=3 SV=1
MTTNVPDVDIAADPFMQEELELPGLSALTGQWLAAVGEDPQREGLLKTPHRVAKAWNFLTDGYRMTLEEAAGNAVFEAEGSEMVIVKDIEFYSMCEHHMLPFYGRAHIAYIPDGKILGLSKFARIVDLYSRRLQVQERITTQLADAVQELLDPKGVAVLMEGTHLCMAMRGVQKQNSSTTTSAMRGVFRDDPRTRGEFMSAVQTTLRSR

SEQ ID NO: 7371 - protein, 214 aa, Deinococcus reticulitermitis
  misc_feature (1)..(214): tr|A0A1H6Z1D8|A0A1H6Z1D8_9DEIO GTP cyclohydrolase 1 OS= Deinococcus reticulitermitis OX=856736 GN=folE PE=3 SV= 1
MLYTRLALETSPVTPPEDALRDDPPGLPGLGDLTRAWLSAIGEDPDREGLTRTPQRVARAWAHLTAGYHQTLAEVVGEGVFAAEGSEMVIVKDIEFYSMCEHHMLPFYGRAHVAYIPREKILGLSKFARIVDLYSRRLQVQERVTTQVADAVEELLAPKGVAVLMEGIHLCMAMRGVQKQNSSTTTSAMRGLFRSDPRTRAEFMSAVQVTLRGR

SEQ ID NO: 7372 - protein, 203 aa, Deinococcus soli
  misc_feature (1)..(203): tr|A0A0F7JV94|A0A0F7JV94_9DEIO GTP cyclohydrolase 1 OS= Deinococcus soli Cha et al. 2016 OX=1309411 GN=folE PE= 3 SV=1
MTIEPLISAADEKQEVPGLRALTHDWLGAIGEDPDREGLLKTPHRVAKAWGFLTAGYQKTLHEAVGDAVFAADGSEMVIVKDIEFYSMCEHHMLPFYGRAHIAYIPDGKILGLSKFARIVDLYSRRLQVQERITTQVADAVQELLAPRGVAVMMEGVHLCMAMRGVQKQNSSTSTSAMRGLFKSDARTRAEFMSAVQGTLRGR

SEQ ID NO: 7373 - protein, 212 aa, Deinococcus sp.
  misc_feature (1)..(212): tr|A0A3G8YG57|A0A3G8YG57_9DEIO GTP cyclohydrolase 1 OS= Deinococcus sp. S14-83 OX=2489213 GN=folE PE=3 SV=1
MWPTKEVTDLTTSPIIRADNERLEVPGVAALTHDWLAAIGEDPDREGLLKTPQRVARAWGFLTGGYQLTLGEAAGDAVFEAEGSEMVIVKDIEFYSMCEHHMLPFYGRAHIAYIPDGKILGLSKFARIVDLYARRLQVQERITTQVAEAVEELLAPKGVAVLLEGTHLCMAMRGVQKQNSSTTTSAMRGSFRDDPRTRGEFMSAVQQTFKNR

SEQ ID NO: 7374 - protein, 212 aa, Deinococcus sp.; identical to SEQ ID NO: 7373
  misc_feature (1)..(212): tr|A0A553ULB6|A0A553ULB6_9DEIO GTP cyclohydrolase 1 OS= Deinococcus sp. H1 OX=2592048 GN=folE PE=3 SV=1

SEQ ID NO: 7375 - protein, 209 aa, Deinococcus swuensis; identical to SEQ ID NO: 7370
  misc_feature (1)..(209): tr|A0A0A7KHK3|A0A0A7KHK3_9DEIO GTP cyclohydrolase 1 OS= Deinococcus swuensis OX=1182571 GN=folE PE=3 SV=1

SEQ ID NO: 7376 - protein, 194 aa, Deinococcus wulumuqiensis
  misc_feature (1)..(194): tr|A0A345IIU0|A0A345IIU0_9DEIO GTP cyclohydrolase 1 OS= Deinococcus wulumuqiensis OX=980427 GN=folE PE=3 SV=1
MNMTDPKLPLEPLTREWLSAIGEDPDREGLQRTPQRVAKAWAYMTEGYGQTLAQVVGEGVFAAEGSEMVIVKDIEFYSMCEHHMLPFYGRAHVAYIPNSRILGLSKFARIVDLYSRRLQVQERITTQVADAVEELLAPKGVAVLMEGIHLCMAMRGVQKQNSSTTTSAMRGLFRSDPRTRAEFMSAVQGTLRSR

SEQ ID NO: 7377 - protein, 220 aa, Deinococcus yavapaiensis
  misc_feature (1)..(220): tr|A0A318S869|A0A318S869_9DEIO GTP cyclohydrolase 1 OS= Deinococcus yavapaiensis KR-236 OX=694435 GN=folE PE=3 SV=1
MLIERSIPTGQVDVDEIDQMRDSDTLPDEHIKTSGLADLTDEWLTIIGEDPDREGLLKTPKRVEKAWQFITSGYRMDLQEVANDAVFAAEGSEMVIVKDIEFYSMCEHHMLPFFGRAHIGYIPNGKILGLSKFARITDMFARRLQVQERVTTQIAEAIQELLQPLGTAVVLEGVHLCMAMRGVEKQHSSTTTLAMRGAFKDDARTRAEFMTAIRQRSVTL

SEQ ID NO: 7378 - protein, 342 aa, Unknown
  misc_feature (1)..(342): tr|A0A3M2F2C2|A0A3M2F2C2_9DEIN GTP cyclohydrolase FolE2 OS=Deinococcus-Thermus bacterium OX=1913990 GN=folE2 P E=3 SV=1
MLRYDDKQTLEPLPPSGQNGGRKAYLFRNTDGAEPVIPRVYDAHFRPDEAYRASLPDMTETVDAVEGANVPIPQVGIAGFRLPLRFAVPSGEPLLLEARVTGTVSLEADLKGINMSRIIRTFYARKEAIFDLDTLAQVVRDYQRELGSLSARVRVAFSYPMLVPSLRSGLEGYQYYDGRYEAAVEGSGPVRRYVELDFVYSSACPCSAELAEHARDVRGAYAIPHSQRSVAHLRVEVAEGARLHLEDLVHHAREALKTEVQVMVKREDEQAFAELNGVYVKFVEDAVRLLYARLVADPRIRDFQVACAHLESLHAHDAVAVIAKGVPGGFRPDFTDFSSLVR

SEQ ID NO: 7379 - protein, 296 aa, Delftia acidovorans
  misc_feature (1)..(296): sp|A9C020|GCH4_DELAS GTP cyclohydrolase FolE2 OS=Delfti a acidovorans (strain DSM 14801 / SPH-1) OX=398578 GN=f olE2 PE=3 SV=1
MLAPLPDVSLTDPAPSLSPLQWVGMQGIDLPVTVAEPGYWRELHARADVQVDLPAAHVKGIHMSRLYRQLDSLAEESALSALALRHALQAMIDSHLDCQSRSARMRLSLDLLAQRPALVTHDLSGWKSYPVRLDATLAQGVFQLRLQVGVGYSSTCPCSAALSRQLLEQGFLQAFAGEPLVEPDQVASWLRRHGTLATAHSQRSEAQVSVDLACDAPDLGILPLIARVEQALGTPVQTAVKRADEQAFAALNGRNLMFVEDAARRIQAALEGIYARPRVHVRHMESLHPHDAVAWA

SEQ ID NO: 7380 - protein, 296 aa, Delftia acidovorans
  misc_feature (1)..(296): tr|A0A286J291|A0A286J291_DELAC GTP cyclohydrolase FolE2 OS=Delftia acidovorans OX=80866 GN=folE2 PE=3 SV=1
MPAPLPDVSLTDPAPSLSPLQWVGMQGIDLPVTVAEPGYWRELHARADVQVDLPAAHVKGIHMSRLYRQLDSLAEESALSALALRHALQAMIDSHLDCQSRSARLRLSLDLLAQRPALVTHDLSGWKSYPVRLDATLAQGVFQLRLQVGVGYSSTCPCSAALSRQLLEQGFLQAFAGEPLVEPDQVASWLRRHGTLATAHSQRSEAQVSVDLACDAPDLGILPLIARVEQALGTPVQTAVKRADEQAFAALNGRNLMFVEDAARRIQAALEGIYARPRVHVRHMESLHPHDAVAWA

SEQ ID NO: 7381 - protein, 296 aa, Delftia lacustris
  misc_feature (1)..(296): tr|A0A1H3NTI4|A0A1H3NTI4_9BURK GTP cyclohydrolase FolE2 OS=Delftia lacustris OX=558537 GN=folE2 PE=3 SV=1
MLAPLPDVSLTDPAPSLSPLQWVGMQGIDLPVTVAEPGYWRELHARADVQVDLPAAHVKGIHMSRLYRQLDSLAEESALSALALRHALQAMIDSHLDCQSRSARLRLSLDLLTQRPALVTHDLSGWKSYPVRLDATLAQGVFQLRLQVGVGYSSTCPCSAALSRQLLEQGFLQAFAGEPLVEPDQVASWLRRHGTLATAHSQRSEAQVSVDLACDAPDLGILPLIARVEQALGTPVQTAVKRADEQAFAALNGRNLMFVEDAARRIQAALEGSYAQPRVHVRHMESLHPHDAVSWA

SEQ ID NO: 7382 - protein, 296 aa, Delftia sp.
  misc_feature (1)..(296): tr|A0A543B958|A0A543B958_9BURK GTP cyclohydrolase FolE2 OS=Delftia sp. HK171 OX=1920191 GN=folE2 PE=3 SV=1
MPAPLPDVSLTDPAPSLSPLQWVGMQGIDLPVTVAEPGYWRELHARADVQVDLPAAHVKGIHMSRLYRQLDSLAEESALSALALRHALQAMIDSHLDCQSRSARLRLSLDLLTQRPALVTHDLSGWKSYPVRLDATLAQGVFQLRLQVGVGYSSTCPCSAALSRQLLEQGFLQAFAGEPLVEPDQVASWLRRHGTLATAHSQRSEAQVSVDLACDAPDLGILPLIARVEQALGTPVQTAVKRADEQAFAALNGRNLMFVEDAARRIQAALEGSYAQPRVHVRHMESLHPHDAVAWA

SEQ ID NO: 7383 - protein, 296 aa, Delftia sp.
  misc_feature (1)..(296): tr|A0A1C7LBJ9|A0A1C7LBJ9_9BURK GTP cyclohydrolase FolE2 OS=Delftia sp. JD2 OX=469553 GN=folE2 PE=3 SV=1
MPAPLPDVSLTDPAPSLSPLQWVGMQGIDLPVTVAEPGYWRELHARADVQVDLPAAHVKGIHMSRLYRQLDSLAEESALSALALRHALQAMIDSHLDCQSRSARLRLSLDLLAQRPALVTHDLSGWKSYPVRLDATLAQGVFQLRLQVGVGYSSTCPCSAALSRQLLEHGFLQAFAGEPLVEPDQVASWLRRHGTLATAHSQRSKAQVSVDLACDGPDLGILPLIARVEQALGTPVQTAVKRADEQAFAALNGRNLMFVEDAARRIQAALEGIYARPRVHVRHMESLHPHDAVAWA

SEQ ID NO: 7384 - protein, 296 aa, Delftia tsuruhatensis
  misc_feature (1)..(296): tr|A0A072T4U5|A0A072T4U5_9BURK GTP cyclohydrolase FolE2 OS=Delftia tsuruhatensis OX=180282 GN=folE2 PE=3 SV=1
MLAPLPDVSLTDPAPSLSPLQWVGMQGIDLPVTVAEPGYWRELHARADVQVDLPAAHVKGIHMSRLYRQLDSLAEESALSALALRHALQAMIDSHLDCQSRSARLRLSLDLLAQRPALVTHDLSGWKSYPVRLDATLAQGVFQLRLQVGVGYSSTCPCSAALSRQLLEQGFLQAFAGEPLVEPDQVASWLRRHGTLATAHSQRSEAQVSVDLACDAPDLGILPLIARVEQALGTPVQTAVKRADEQAFAALNGRNLMFVEDAARRIQAALEGSYAQPRVHVRHMESLHPHDAVSWA

SEQ ID NO: 7385 - protein, 296 aa, Delftia tsuruhatensis; identical to SEQ ID NO: 7381
  misc_feature (1)..(296): tr|A0A1D8IW74|A0A1D8IW74_9BURK GTP cyclohydrolase FolE2 OS=Delftia tsuruhatensis OX=180282 GN=folE2 PE=3 SV=1

SEQ ID NO: 7386 - protein, 258 aa, Unknown
  misc_feature (1)..(258): tr|A0A1V4MPR4|A0A1V4MPR4_9DELT GTP cyclohydrolase FolE2 OS=delta proteobacterium MLS_D OX=1775673 GN=folE2 PE= 3 SV=1
MVDVQSQQDYRNIAIQKVGVKGVKYPVIVLDRANGTQHVNATINMYVNLPHRFKGTHMSRFLEILNKYRGQINIKTFQTILTTIREKLDGESAYMEIEFPYFVEKKAPVSRSRSLMEYHCSFTGENSWHRSDFLVSVTVPVTTVCPCSKEISAGGAHNQRSMVTVKLRFKKFFWIEDVISLVENSASAEVFSLLKRSDEKFVTEKAYENPMFVEDVVRSVAEKLNSDVNFTWYSVEAENLESIHNHSAYAYIESDVDC

SEQ ID NO: 7387 - protein, 244 aa, Unknown
  misc_feature (1)..(244): tr|Q1NY05|Q1NY05_9DELT GTP cyclohydrolase FolE2 OS=delt a proteobacterium MLMS-1 OX=262489 GN=folE2 PE=3 SV=1
MELKSVGIKDIRYPITVRERSGGLQQTVASIDLLANLPRQYRESCVSDFVEVLNRYQEEMSNRIFRQLLAEVKERLRADSAHVEMTFPYFLEKTAPVSGTTSLMEYRCRFTGGIGAGEDFMLSVWVPATTLCPCSREISACGAHNQRAEINLNVKYREFIWLEELISLAAAGASCEVYALLKRPDEKYVTEQAYHNPRFVEDVVRRVAEAALDHPAITWFSVGAESFESIHKHSAYAYVDSDDL

SEQ ID NO: 7388 - protein, 262 aa, Deltaproteobacteria bacterium
  misc_feature (1)..(262): tr|A0A1Q7Z5I1|A0A1Q7Z5I1_9DELT GTP cyclohydrolase FolE2 OS=Deltaproteobacteria bacterium 13_1_20CM_2_69_21 OX= 1805109 GN=folE2 PE=3 SV=1
MRRTLSALRDVHSEDDSRRLALDRAGVKGLRYPICVLDRARGLQHTVAEIDMSVSVPHKRKGAHMSRFVELLNRHRREIDIRKFRTLCAELRRDHDADAARVEVRFPYFIEKKAPVTGAVGLLHYSCTFGASVTRDDYDLWVALEVPVTTLCPCSKAISEHGAHNQRSLVAVRVWFDRFFWIEDLIALVEDSASCDLYALLKRPDEKYVTERAWQRPRFVEDLVREVGTRLRRDPNFTRWEVEAESFESIHAHSAYATLKHP

SEQ ID NO: 7389 - protein, 255 aa, Deltaproteobacteria bacterium
  misc_feature (1)..(255): tr|A0A2N2I0S3|A0A2N2I0S3_9DELT GTP cyclohydrolase FolE2 OS=Deltaproteobacteria bacterium HGW-Deltaproteobacter ia-2 OX=2013747 GN=folE2 PE=3 SV=1
MIDIQNQKDFRNIDIKKVGVKNIKYPIIVLDRVKGTQIVNATINMYVNLPHHFKGTHMSRFIEALNEFKGQISIKTFQSILEKTRQKLHAHSAHMEIEFAYFLEKTAPVSKAKSLMEYHCIFCGESNAEKSDFQVGVMVPVTTVCPCSREISQFGAHNQRSIVTTKVRFRKFFWIEDLIKIVEDSASGEVYSLLKRVDEKYVTEKAYENPKFVEDVVRSVAVKLNKDDNFTWYCIEAENFESIHNHSAYAYVEKG

SEQ ID NO: 7390 - protein, 261 aa, Dendrosporobacter quercicolus
  misc_feature (1)..(261): tr|A0A1G9LG50|A0A1G9LG50_9FIRM GTP cyclohydrolase FolE2 OS=Dendrosporobacter quercicolus OX=146817 GN=folE2 PE =3 SV=1
MKDVQNLADERGIEIQKVGVSDVHLPFFIKTKNGSLQSVLARIKLTVDLPKEYKGTHMSRFIEILSEWSQKPVSFREMEQILSDTLTRLSARSAYLKIDFKYFIEKIAPVSGLKSMLDLDCSFSAKLLQGQPLDFVMGVNVPFTSLCPCSKEIAQYGAHNQRGLMRVRLKQAAGFIWIEDLAALMEAQGSCPVFPLLKREDEKYVTELAYENPKFVEDILRDLVLALRKLEHITWFEIECENYESIHNHSAYASHTEFVER

SEQ ID NO: 7391 - protein, 267 aa, Denitratisoma sp.
  misc_feature (1)..(267): tr|A0A518U856|A0A518U856_9PROT GTP cyclohydrolase FolE2 OS=Denitratisoma sp. DHT3 OX=1981880 GN=folE2 PE=3 SV= 1
MHSRNTHAIPDVQNFADSRELPINKVGIKSIRHPVKVLDKSEGIQHTVATFNMYVGLPHNFKGTHMSRFVEILNSQEREISVENFESMLRDMVQKLEAETGHVEMTFPYFIRKEAPISGVASLMDYEVTFIGEILAEGRYRQSIKVLVPTTSLCPCSKKISERGAHNQRSHVTITATTNALVWIEELVRMAEDQASCELFGLLKRPDEKYVTERAYDNPKFVEDLVRDVAAALNAEPRIDAYVIEAENFESIHNHSAYALIEHDKQQ

SEQ ID NO: 7392 - protein, 197 aa, Denitrobacterium detoxificans
  misc_feature (1)..(197): tr|A0A1H8TF60|A0A1H8TF60_9ACTN GTP cyclohydrolase 1 OS= Denitrobacterium detoxificans OX=79604 GN=folE PE=3 SV= 1
MSNELDISGKSMDLKKVEEGVRLILEGVGEDPNREGLLKTPERVAKMYAECFAGLAADPAEYFETTFDEHHEEMVLVRDIPFYSMCEHHLAPFFGKAHVAYIPASDGRICGISKLARLVDAFARRPQVQERLTSQIADTLIEQLHPQGVIVVMEAEHLCMSMRGVKKPGSKTTTSAVRGAFEKNHATRAEALSLIFR

SEQ ID NO: 7393 - protein, 265 aa, Denitromonas halophilus
  misc_feature (1)..(265): tr|A0A557R2M7|A0A557R2M7_9RHOO GTP cyclohydrolase FolE2 OS=Denitromonas halophilus OX=1629404 GN=folE2 PE=3 SV =1
MSAIDSQAIPDVQNSQDSRQIAIDKVGIKAIRHPVTVSDRSGGVQHTIAMFNMYVGLPHNFKGTHMSRFVEILNGGEREISVESFEPMLRDMVQRLEAETGHVEMTFPYFINKAAPISGVNSLMDYDVTFIGEITEGGVYSFRMKIVVPVTSLCPCSKKISDYGAHNQRSHVTVTASLREHVWIEEIVEQVEAQASCELYGLLKRPDEKYVTERAYDNPKFVEDMVRDVAGVLDRESRIGAYVVESENFESIHNHSAYALIERQK

SEQ ID NO: 7394 - protein, 265 aa, Denitromonas halophilus
  misc_feature (1)..(265): tr|A0A558EPV8|A0A558EPV8_9RHOO GTP cyclohydrolase FolE2 OS=Denitromonas halophilus OX=1629404 GN=folE2 PE=3 SV =1
MSAIDSQAIPDVQNSQDSRQIAIDKVGIKAIRHPVTVSDRSGGVQHTIAMFNMYVGLPHNFKGTHMSRFVEILNGGEREISVESFEPMLREMVQRLEAETGHVEMTFPYFINKAAPISGVNSLMDYDVTFIGEITEGGVYSFRMKIVVPVTSLCPCSKKISDYGAHNQRSHVTVTANLREHVWIEEIVEQVEAQASCELYGLLKRPDEKYVTERAYDNPKFVEDMVRDVAGVLDRESRIGAYVVESENFESIHNHSAYALIERQK

SEQ ID NO: 7395 - protein, 256 aa, Denitrovibrio acetiphilus
  misc_feature (1)..(256): tr|D4H3R9|D4H3R9_DENA2 GTP cyclohydrolase FolE2 OS=Deni trovibrio acetiphilus (strain DSM 12809 / N2460) OX=522 772 GN=folE2 PE=3 SV=1
MKDIQSQSDTRNLDVDKVGIKDIRYPIVLSDKERGSQHTVALINMYVKLPHNFKGTHMSRFVEILSRHSSNIDLYTVGDILNEMQERLDSEEAYIELSFDYFMKKKAPVTGLEAVMDYKCRYFGAAGNEGRDQVMTVKVPVMTLCPCSKEISKYGAHNQRSFISISVRMKKMIWIEELIELAESCGSSPIYPLLKREDEKYVTEKSYENPAFVEDVVRNVAEKLMKEDRVTWFEVSSENLESIHNHSAYAVITRSK

SEQ ID NO: 7396 - protein, 271 aa, Denitrovibrio sp.
  misc_feature (1)..(271): tr|A0A2N6D645|A0A2N6D645_9BACT GTP cyclohydrolase FolE2 OS=Denitrovibrio sp. OX=2053308 GN=folE2 PE=3 SV=1
MPAVSYELENEKKVILKDIQSQHDGRNLDIDKVGIKDIQYPIVLSDKEKGRQHTVARINMYVKLPHNFKGTHMSRFVEILSNHSSNIDLYKVNDILEEMKEKLDSEESFIELSFQYFLNRKAPVSGQSAMMDYHCRYVGSAGAKGRDQVLTIRVPVMTLCPCSKEISSYGAHNQRSYINISVRMKKMVWIEELIELAESCGSSPIYPLLKREDEKYVTEQSYNNPAFVEDVVRNVAEKLMKEDRVTWFEVSSENIESIHNHSAYAVITRSK

SEQ ID NO: 7397 - protein, 200 aa, Dermabacter hominis
  misc_feature (1)..(200): tr|A0A069SYM8|A0A069SYM8_9MICO GTP cyclohydrolase 1 OS= Dermabacter hominis 1368 OX=1450519 GN=folE PE=3 SV=1
MSESHNAVGSVDHARIERAVREILEAIGEDPSRDGLVDTPSRVARMYAEVFRGLHEDPRVHMQTKFEVEHRELVLVRDIRFYSMCEHHLVPFFGRAHVGYVPGKDGTVAGLSKFARLVEGYAARPQVQERLTSQIADAIHEELQAHGTIVVLQAEHLCMAMRGVKSPNAETVTSAVRGSLQSNAATRSEAMSLILTGLHH

SEQ ID NO: 7398 - protein, 200 aa, Dermabacter hominis
  misc_feature (1)..(200): tr|A0A2I1LKI9|A0A2I1LKI9_9MICO GTP cyclohydrolase 1 OS= Dermabacter hominis OX=36740 GN=folE PE=3 SV=1
MTENHNVVESIDRERIERAVREILEAVGEDPSRDGLVDTPSRVARMYAEVFRGLHEDPRVHMQTKFEVEHRELVLVRDIRFYSMCEHHLVPFFGRAHVGYVPGKDGTVAGLSKFARLVEGYAARPQVQERLTSQIADAIHEELQAHGTIVVLQAEHLCMAMRGVKSPNAETVTSAVRGSLQSNAATRSEAMSLILTGLHH

SEQ ID NO: 7399 - protein, 200 aa, Dermabacter sp.; identical to SEQ ID NO: 7397
  misc_feature (1)..(200): tr|A0A1F1U1Q4|A0A1F1U1Q4_9MICO GTP cyclohydrolase 1 OS= Dermabacter sp. HMSC08H10 OX=1581144 GN=folE PE=3 SV=1

SEQ ID NO: 7400 - protein, 200 aa, Dermabacter sp.
  misc_feature (1)..(200): tr|A0A3S0T6C7|A0A3S0T6C7_9MICO GTP cyclohydrolase 1 OS= Dermabacter sp. HSID17554 OX=2419511 GN=folE PE=3 SV=1
MSENHNAVESIDRERIERAVREILEAIGEDPDRDGLLDTPARVARMYGEVFRGLHENPREHMHTKFEVEHRELVLVRDIRFYSMCEHHLVPFFGRAHVGYVPGKDGTVAGLSKFARLVEGYAARPQVQERLTSQIADAIHEELHAHGTIVVLQAEHLCMAMRGVKSPNAETVTSAVRGSLQSNAATRSEAMSLILTGLHH

SEQ ID NO: 7401 - protein, 200 aa, Dermabacter vaginalis
  misc_feature (1)..(200): tr|A0A1B0ZHM8|A0A1B0ZHM8_9MICO GTP cyclohydrolase 1 OS= Dermabacter vaginalis OX=1630135 GN=folE PE=3 SV=1
MSENHNAVESIDQERIERAVREILEAIGEDPSRDGLLDTPARVARMYSEVFRGLHENPREHMHTKFEVEHRELVLVRDIRFYSMCEHHLVPFFGRAHVGYVPGRDGTVAGLSKFARLVEGYAARPQVQERLTSQIADAIHEELHAHGTIVVLQAEHLCMAMRGVKSPNAETVTSAVRGSLQSNAATRSEAMSLILTGLHH

SEQ ID NO: 7402 - protein, 195 aa, Dermacoccaceae bacterium
  misc_feature (1)..(195): tr|A0A563DVD5|A0A563DVD5_9MICO GTP cyclohydrolase 1 OS= Dermacoccaceae bacterium C5-26 OX=1660198 GN=folE PE=3 SV=1
MTNPSGVDLTRAAAAVRELLIALGEDPDREGLKDTPGRVARAYAESFAGMWQHPSEALNRTFDVDHDELIIVKDIEVYSTCEHHLVPFHGVAHVGYIPDRDGRVTGLSKIARLVEVFAKRPQVQERLTTQIADALVEHLGALGVIVVVDCEHLCMSMRGVRKPGAHTITSAVRGQLRNPATRAEAMSLLLSDSRR

SEQ ID NO: 7403 - protein, 214 aa, Dermacoccaceae bacterium
  misc_feature (1)..(214): tr|A0A563E5J1|A0A563E5J1_9MICO GTP cyclohydrolase 1 OS= Dermacoccaceae bacterium C5-26 OX=1660198 GN=folE PE=3 SV=1
MSLNELSEVDLDGQRRAPSGRHLEVVHDRDAVDLPAAARAVSDLLVALGRDPSSAHLQDTPRRVAQSYAELLTPRKFALTTFPNDEAYSELVLVKDIPVQSLCEHHLLPFQGVAHVGYVPGERILGLSKLARVVELFARDLQVQERLTEQVADWLQDNLAPQGVGVVIEAEHLCMSLRGVRATGAHTVTSATRGSLHDDKDARHEFLARSGIYS

SEQ ID NO: 7404 - protein, 197 aa, Dermacoccus abyssi
  misc_feature (1)..(197): tr|A0A417Z1F2|A0A417Z1F2_9MICO GTP cyclohydrolase 1 OS= Dermacoccus abyssi OX=322596 GN=folE PE=3 SV=1
MADTNAVPSGEVDLPRIEAAVREILAAVGEDPDREGLLDTPARVARAYAETFAGLRRTPADVLDKTFDVEHEELILVRDIEVYSTCEHHLVPFHGVAHVGYIPSPSGRVTGLSKLARLVDVYAKRPQVQERLTTQIADALVEHLDAQGVIVVIEAEHLCMSMRGIRKPGARTITSAVRGQLRNTATRAEAMSLLMAK

SEQ ID NO: 7405 - protein, 200 aa, Dermacoccus nishinomiyaensis
  misc_feature (1)..(200): tr|A0A4U0RPC1|A0A4U0RPC1_9MICO GTP cyclohydrolase 1 OS= Dermacoccus nishinomiyaensis OX=1274 GN=folE PE=3 SV=1
MSAVAETHDVVGAEVDLARLEAAVREILLAVGENPDREGLVETPARVARAYAEIFAGLRQNPEDVLVKTFDVDHEELILVRDIEVYSTCEHHLVPFHGVAHVGYIPSTSGRVTGLSKLARLVDVFAKRPQVQERLTTQIADALVEHLDAQGVIVVIEAEHLCMSMRGIRKPGARTITSAVRGQLRNPATRAEAMSLVMGK

SEQ ID NO: 7406 - protein, 197 aa, Dermacoccus nishinomiyaensis
  misc_feature (1)..(197): tr|A0A075JJY4|A0A075JJY4_9MICO GTP cyclohydrolase 1 OS= Dermacoccus nishinomiyaensis OX=1274 GN=folE PE=3 SV=1
MAETHDVVGAEVDLARLEAAVREILLAVGENPDREGLVETPARVARAYAEIFAGLRQNPEDVLVKTFDVDHEELILVRDIEVYSTCEHHLVPFHGVAHVGYIPSTSGRVTGLSKLARLVDVFAKRPQVQERLTTQIADALVEHLDAQGVIVVIEAEHLCMSMRGIRKPGARTITSAVRGQLRNPATRAEAMSLVMGK

SEQ ID NO: 7407 - protein, 197 aa, Dermacoccus sp.; identical to SEQ ID NO: 7406
  misc_feature (1)..(197): tr|A0A4R1FHD9|A0A4R1FHD9_9MICO GTP cyclohydrolase 1 OS= Dermacoccus sp. SAI-028 OX=2485144 GN=folE PE=3 SV=1

SEQ ID NO: 7408 - protein, 200 aa, Dermacoccus sp.
  misc_feature (1)..(200): tr|A0A0J0A9C1|A0A0J0A9C1_9MICO GTP cyclohydrolase 1 OS= Dermacoccus sp. PE3 OX=1641401 GN=folE PE=3 SV=1
MRVLADTNAVPSGEVDLPRIEAAVREILTAVGEDPDREGLLDTPARVARAYAETFVGLRQTPADVLDKTFDVEHEELILVRDIEVYSTCEHHLVPFHGVAHVGYIPSASGRVTGLSKLARLVDVYAKRPQVQERLTTQIADALVEHLDAQGVIVVIEAEHLCMSMRGIRKPGARTITSAVRGQLRNTATRAEAMSLLMGK

SEQ ID NO: 7409 - protein, 228 aa, Dermatophilus congolensis
  misc_feature (1)..(228): tr|A0A376EZA0|A0A376EZA0_9MICO GTP cyclohydrolase 1 OS= Dermatophilus congolensis OX=1863 GN=folE PE=3 SV=1
MSGSTPVGNEGGQEIVEQADKGPDTGQVRAASTAPVTDREVDQPRIAAAVREILIAIGEDPDRDGLRDTPLRVARAYQEIFGGLAMSGPDALTVTFDVHHDELIIVKDIEVYSVCEHHLLPFHGVAHVGYLPNEDGRVTGLSKLARLVDVYARRPQVQERLTAQVADALQETLDPRGVIVVIEAEHMCMSMRGVRKPGATTLTSAVRGQLRNAATRSEALGLILGGRK

SEQ ID NO: 7410 - protein, 228 aa, Dermatophilus congolensis
  misc_feature (1)..(228): tr|A0A239VCS7|A0A239VCS7_9MICO GTP cyclohydrolase 1 OS= Dermatophilus congolensis OX=1863 GN=folE PE=3 SV=1
MSGSTPVGNEGGQEIVEQAEKGPDTGQVRAASTAPVTDREVDQPRIAAAVREILIAIGEDPDRDGLRDTPLRVARAYQEIFGGLAMSGPDALTVTFDVHHDELIIVKDIEVYSVCEHHLLPFHGVAHVGYLPNEDGRVTGLSKLARLVDVYARRPQVQERLTAQVADALQETLDPRGVIVVIEAEHMCMSMRGVRKPGATTLTSAVRGQLRNAATRSEALGLILGGRK

SEQ ID NO: 7411 - protein, 201 aa, Desertifilum sp.
  misc_feature (1)..(201): tr|A0A1E5QJ09|A0A1E5QJ09_9CYAN GTP cyclohydrolase 1 OS= Desertifilum sp. IPPAS B-1220 OX=1781255 GN=folE PE=3 S V=1
MAALRTQAAPRVSEEEMRQAVRTLLIGLGEDPDREGLRDTPKRVVKALKFLTQGYNQSLDELLNGAVFHEDTNEMVLVRDIDLFSSCEHHILPILGRAHVAYIPNGKVIGLSKVARICEMYARRLQVQERLTDQIAEALQGLLKPQGVAVVVEATHMCMVMRGVQKPGSWTVTSSMRGVFAEDGRTRQEFMSLIRHTPTFH

SEQ ID NO: 7412 - protein, 232 aa, Desertifilum sp.
  misc_feature (1)..(232): tr|A0A1E5QQI9|A0A1E5QQI9_9CYAN GTP cyclohydrolase 1 OS= Desertifilum sp. IPPAS B-1220 OX=1781255 GN=folE PE=3 S V=1
MTIASSNGSRFSDSAQEKDANNRLVTRPDRSTSTTQKATEANISDEQMMEAVRTMLLDVGEDPEREGLIKTPKRVMEAMRFLTSGYNQSLEELVNGAIFDEGHNEMVLVRDISLFSLCEHHMLPFMGKAHVAYIPNERVVGLSKLARIVEMYARRLQVQERLTRQVAEAIQEILDPKGVAVVVEASHMCMVMRGVQKPGSWTVTSAMVGVFQDDQKTREEFLNLIRHQPAFF

SEQ ID NO: 7413 - protein, 189 aa, Desmospora activa
  misc_feature (1)..(189): tr|A0A2T4Z9X8|A0A2T4Z9X8_9BACL GTP cyclohydrolase 1 OS= Desmospora activa DSM 45169 OX=1121389 GN=folE PE=3 SV= 1
MEVNHEQIKQAVRMILEAVGEDPNREGLQDTPARVARMYEEVFGGIGQDPEEYFSTIFSEDHEELVLVKDIPFFSMCEHHLVPFFGKAHVGYIPQSGRVTGLSKLARAVEAISRRPQLQERITYTVADSIMKTLRPHGVVVVMEAEHMCMTMRGVKKPGAKTVTSAVRGVFEKDPASRAEVFSLIGIGK

SEQ ID NO: 7414 - protein, 249 aa, Desmospora sp.
  misc_feature (1)..(249): tr|F5SBH5|F5SBH5_9BACL GTP cyclohydrolase 1 OS=Desmospo ra sp. 8437 OX=997346 GN=folE PE=3 SV=1
MKPTTRVQSGVEGDPFTICAHRPFGAFVFLSAGGFQVVKFLIGSGLPTRKKLRKREATQDMGVNHEQIQQAVRMILEAVGEDPDREGLKETPARVARMYEEIFSGMGEDPDEYFSTVFGEDHEELVLVKDIPFFSLCEHHLVPFFGKAHVGYIPKSGRVTGLSKLARAVDTVARRPQLQERITYTVADSLERTLQPHGVIVVVEAEHMCMTMRGIKKPGSRTVTSAVRGVFEKNSAARAEAFSLIGFGK

SEQ ID NO: 7415 - protein, 257 aa, Desulfacinum hydrothermale
  misc_feature (1)..(257): tr|A0A1W1XGE3|A0A1W1XGE3_9DELT GTP cyclohydrolase FolE2 OS=Desulfacinum hydrothermale DSM 13146 OX=1121390 GN= folE2 PE=3 SV=1
MIDVQSQLDHRNINIDKVGVKNIRYPITVMDKKNGVQHTVASINMYVNLPRKFKGTHMSRFIEILNEFYGHLDIREFSKILEAMQERLNAQSAHLEIAFPYFIEKNSPVTGTPGLMEYLCRVSGSLSDQDGYDLVVEVNVPITTVCPCSREISNHGAHNQRGMARLAVRFNRFMWIEDLVRIVEEAASCEVYSLLKRPDEKFVTEKGYENPKFVEDVVRDVAFELKQNEDITWFQVDVENFESIHNHSAYAFIERMR

SEQ ID NO: 7416 - protein, 258 aa, Desulfacinum infernum
  misc_feature (1)..(258): tr|A0A1M4TL47|A0A1M4TL47_9DELT GTP cyclohydrolase FolE2 OS=Desulfacinum infernum DSM 9756 OX=1121391 GN=folE2 PE=3 SV=1
MIDVQSQYDHRNINIDKVGVKNIRYPITVMDRKNGVQHTVASINMYVNLPRKFKGTHMSRFIEILNEFYGHLDIREFSKILEAMQERLNAQSAHLEISFPYFIEKASPVTGTSGLMEYLCRVSGSLSHQDGYDLVVEVNVPITTVCPCSREISDHGAHNQRGMARLAVRFKKFMWIEDLVRIVEEAASCEVYSLLKRPDEKYVTEKGYENPKFVEDVVRDVAYELKQNSNITWFQVDVENFESIHNHSAYAFIERYRT

SEQ ID NO: 7417 - protein, 213 aa, Desulfallas geothermicus
  misc_feature (1)..(213): tr|A0A1I6DLZ9|A0A1I6DLZ9_9FIRM GTP cyclohydrolase 1 OS= Desulfallas geothermicus DSM 3669 OX=1121426 GN=folE PE =3 SV=1
MKNGEILKYRSKSYNNRQEGLRKEKITMIDQNKIETAVRMILEAIGEDPEREGLKETPARVARMYNEIFCGLWDDPDRHLQKMFAEEHEEMVLVKDIPIYSMCEHHLLPFYGKAHVAYIPRRGNVTGLSKLARVVEGFSKRPQLQERLTTQIADTIMKRLNPHGVLVVIEAEHMCMTLRGVRKPGSKTVTSAVRGQFQRNEATRAEAFSLIRR

SEQ ID NO: 7418 - protein, 186 aa, Desulfallas gibsoniae
  misc_feature (1)..(186): tr|R4KP85|R4KP85_9FIRM GTP cyclohydrolase 1 OS=Desulfal las gibsoniae DSM 7213 OX=767817 GN=folE PE=3 SV=1
MIDMEKIEVAVRMILEAIGEDPDREGLKETPARVARMYNEIFCGLWDDPERHLQKMFSEEHEEMVLVKDIPIYSMCEHHLLPFYGKAHVAYIPRKGNVTGLSKLARVVEGFSKRPQLQERLTSQIADTIMKKLNPHGVLVVIEAEHMCMTLRGVRKPGSKTLTSAVRGSFQRNEATRAEAFSLIRK

SEQ ID NO: 7419 - protein, 262 aa, Desulfamplus magnetovallimortis
  misc_feature (1)..(262): tr|A0A1W1HKL9|A0A1W1HKL9_9DELT GTP cyclohydrolase FolE2 OS=Desulfamplus magnetovallimortis OX=1246637 GN=folE PE=3 SV=1
MIDIQKQRDYRNIPIDKVGIKELRYPIKVLDKQNGMQSTVAMINMYVNLPHQAKGTHMSRFVQMLHTFRSQVSLESITHILEDMKKTLEAQSSHIEITFPYFVEKRSPVTGSRGLMDYTCSIMGTSSSKGSEQNSDLMVKVGVPITSVCPCSREISDFGAHNQRGEVLVSTRFKKFIWIEDIINLVENAASCDVFSVLKREDEKHVTEHAYQNPKFVEDVVRDVAKVLIEDENITWFSVSAENFESIHNHSAYAYIESSQDS

SEQ ID NO: 7420 - protein, 262 aa, Desulfarculus baarsii
  misc_feature (1)..(262): tr|E1QJ50|E1QJ50_DESB2 GTP cyclohydrolase FolE2 OS=Desu lfarculus baarsii (strain ATCC 33931 / DSM 2075 / VKM B -1802 / 2st14) OX=644282 GN=folE2 PE=3 SV=1
MKDVQNQQDHRNIVIDKVGVKNVRYPITVLDQVNVTQNTVATINMYVKLPHQYKGTHMSRFVEILAEHNNNININNIPGILEEMKRRLDAPSAHIEVDFPYFIEKAAPVSGAMGLMEYNIAFRGSLGRRGMDLIVEVAVPITTLCPCSREISRHGAHNQRGMVRLAVRFRSFIWIEKLIRVVEDSASCEVFSLLKREDEKHVTEKAYENPMFVEDIVRDVAEKMDADPNIFWYSVESENFESIHNHSAYAYIERDKRPQPGA

SEQ ID NO: 7421 - protein, 260 aa, Desulfarculus sp.
  misc_feature (1)..(260): tr|A0A3A6PAM7|A0A3A6PAM7_9DELT GTP cyclohydrolase FolE2 OS=Desulfarculus sp. OX=2093367 GN=folE2 PE=3 SV=1
MIDVQNQPDHRNIDIDKVGVKNIRYPITVLDRANGSQQTVASINMYVNLPHLYKGTHMSRFIELLSHYSSNINLSNLPDILEAMKQRLDAASAHIEIEFPYFISKAAPVSRSQGLMEYNIRFRGSLGSEGMDLVVEIAVPVTTLCPCSKEISASGAHNQRGLVRLAVRFKRFIWIEDLIAMVEESASSDVFSLLKREDEKYVTERAYDNPMFVEDVVREVSRKLGEDPNITWFAVDSENFESIHNHSAYAYIECDKRGRA

SEQ ID NO: 7422 - protein, 260 aa, Desulfatibacillum aliphaticivorans
  misc_feature (1)..(260): tr|B8F9J3|B8F9J3_DESAL GTP cyclohydrolase FolE2 OS=Desu lfatibacillum aliphaticivorans OX=218208 GN=folE2 PE=3 SV=1
MNDMIDVQSQYDDRNMPINKVGIKNLRYPITVLDKEKRFQPTVATINMYVDLPHEYKGTHMSRFVEMLHDTKPQVSLKTFSVLLDQMKKLLNAASAHIEMTFPYFIEKKAPMSGSLGLMDYTCCLKGSSDAQDQVDLILEISVPITSVCPCSKEISDEGAHNQRGEVKLATRFEKFRWIEDMIELVEKAASCDVYSVLKRVDEKYVTERAFRRPRFVEDVVRDIACVLSQDKNIKWFSVSAENFESIHNHSAYASITSDQ

SEQ ID NO: 7423 - protein, 276 aa, Desulfatibacillum alkenivorans
  misc_feature (1)..(276): tr|A0A1M7AL40|A0A1M7AL40_9DELT GTP cyclohydrolase FolE2 OS=Desulfatibacillum alkenivorans DSM 16219 OX=1121393 GN=folE2 PE=3 SV=1
MIICNDRFAPWIQEIKLNDMIDVQNQYDDRNMPINKVGIKNLRYPITVLDKEKRFQPTVATINMYVDLPHEYKGTHMSRFVEMLHETKPQVSLKTFSVLLDQMKKLLNAASAHIEMTFPYFIEKKAPMSGSLGLMDYTCCLKGSSDAQDQVDLILEISVPITSVCPCSKEISDEGAHNQRGEVKLATRFEKFRWIEDMIELVEKAASCDVYSVLKRVDEKYVTERAFRRPRFVEDVVRDIACVLSQDKNIKWFSVSAENFESIHNHSAYASITSDQ

SEQ ID NO: 7424 - protein, 261 aa, Desulfatitalea sp.
  misc_feature (1)..(261): tr|A0A0F2QZ17|A0A0F2QZ17_9DELT GTP cyclohydrolase FolE2 OS=Desulfatitalea sp. BRH_c12 OX=1629708 GN=folE2 PE=3 SV=1
MKDVQNQPDTRNLPIDKVGIKNLRYPVTVRDRREGRQATVAMINMYVDLPHEFKGTHMSRFVEMLHLLRTDVSLKRFADLLDQMKQHLNAASAHIEMTFPYFIEKKAPISGSPGLMDYTCRIIGFSNSRNEVDLISEVNVPISSVCPCSKEISDEGAHNQRGEVKLQTRFNRFIWLEDMIELVESCASCDVFSVLKRVDEKRVTEKSYNNPKFVEDVVRDIASRLLQDDNITWFSVSAENFESIHNHSAYAHITSGPWPIS

SEQ ID NO: 7425 - protein, 188 aa, Desulfitibacter sp.
  misc_feature (1)..(188): tr|A0A101VCH8|A0A101VCH8_9FIRM GTP cyclohydrolase 1 OS= Desulfitibacter sp. BRH_c19 OX=1734395 GN=folE PE=3 SV= 1
MDREKIAKGVRLILEAIGEDPQREGLLDTPDRVARMYEEIFCGLKQDADKHLNVLFNEDHEEMILVKDIPIYSMCEHHLLPFYGYAHVAYISKNGKVTGLSKLARVVETFAKRPQLQERLTSQVADTLMDKLTPRGVMVVIEAEHMCMTMRGIKKAGSMTLTSAVRGIFKTNEATRAEGFSLIRGGRH

SEQ ID NO: 7426 - protein, 185 aa, Desulfitobacterium chlororespirans
  misc_feature (1)..(185): tr|A0A1M7UHT4|A0A1M7UHT4_9FIRM GTP cyclohydrolase 1 OS= Desulfitobacterium chlororespirans DSM 11544 OX=1121395 GN=folE PE=3 SV=1
MDLEKIEEAVTMILEAIGEDPRREGLLDTPKRVARMYQEVFAGLHEDPSQHLKVQFSEDHEEMIIVKDIPVYSMCEHHLVPFYGKAHVAYIPRRGKVTGLSKIARVVEGYAKRPQLQERLTGQIADSVMGMLNARGVLVVIEAEHMCMTMRGVKKPGSMTLTSAVRGIFKTNEITRSEGFALIKQ

SEQ ID NO: 7427 - protein, 185 aa, Desulfitobacterium dehalogenans
  misc_feature (1)..(185): tr|I4A9Z7|I4A9Z7_DESDJ GTP cyclohydrolase 1 OS=Desulfit obacterium dehalogenans (strain ATCC 51507 / DSM 9161 / JW/IU-DC1) OX=756499 GN=folE PE=3 SV=1
MDLEKIEEAVTMILEAIGEDPRREGLLDTPKRVARMYQEVFAGLHEDPSQHLKVQFSEDHEEMIIVKDIPVYSMCEHHLVPFYGKAHVAYIPRKGKVTGLSKIARVVEGYAKRPQLQERLTGQIADSVMSMLNARGVLVVIEAEHMCMTMRGVKKPGSMTLTSAVRGIFKTNEITRSEGFALIKQ

SEQ ID NO: 7428 - protein, 190 aa, Desulfitobacterium dichloroeliminans
  misc_feature (1)..(190): tr|L0F918|L0F918_DESDL GTP cyclohydrolase 1 OS=Desulfit obacterium dichloroeliminans (strain LMG P-21439 / DCA1 ) OX=871963 GN=folE PE=3 SV=1
MENLSIDLEKIEEAVKMILDAIGEDPQREGLLDTPKRVARMYQEVFSGIHEDPSQHLKVQFSEDHEEMIIVKDIPVYSMCEHHLVPFYGKAHVAYIPRKGKITGLSKIARVVEGYAKRPQLQERLTGQVADSVMSMLNARGVLVVIEAEHMCMTMRGVKKPGSRTLTSAVRGIFKTNEVTRAEGFALIKQ

SEQ ID NO: 7429 - protein, 187 aa, Desulfitobacterium hafniense
  misc_feature (1)..(187): tr|Q24WH8|Q24WH8_DESHY GTP cyclohydrolase 1 OS=Desulfit obacterium hafniense (strain Y51) OX=138119 GN=folE PE= 3 SV=1
MGMDLEKIEEAVTMILEAIGEDPRREGLLDTPKRVARMYQEVFAGLHEDPSQHLKVQFSEDHEEMIIVKDIPVYSMCEHHLVPFYGKAHVAYIPRKGKVTGLSKIARVVEGYAKRPQLQERLTGQIADSVMSMLNARGVLVVIEAEHMCMTMRGVKKPGSMTLTSAVRGIFKTNEITRSEGFALIKQ

SEQ ID NO: 7430 - protein, 185 aa, Desulfitobacterium hafniense; identical to SEQ ID NO: 7427
  misc_feature (1)..(185): tr|B8FYT0|B8FYT0_DESHD GTP cyclohydrolase 1 OS=Desulfit obacterium hafniense (strain DCB-2 / DSM 10664) OX=2725 64 GN=folE PE=3 SV=1

SEQ ID NO: 7431 - protein, 188 aa, Desulfitobacterium metallireducens
  misc_feature (1)..(188): tr|W0EB74|W0EB74_9FIRM GTP cyclohydrolase 1 OS=Desulfit obacterium metallireducens DSM 15288 OX=871968 GN=folE PE=3 SV=1
MGFDIDKIEQAVSMILEAIGEDPEREGLRDTPKRVARMYAEVFAGLHEDPSQHLKVQFSEDHEEMVLVKDIPVYSMCEHHLVPFYGKAHVAYIPRKGKVTGLSKLARVVEGFAKRPQLQERLTSQIADSIMNMLEPRGVLVVIEAEHMCMTMRGVKKPGSSTITSAVRGIFKTSPVTRSEAFSLIEHK

SEQ ID NO: 7432 - protein, 185 aa, Desulfitobacterium sp.; identical to SEQ ID NO: 7427
  misc_feature (1)..(185): tr|A0A562HBN2|A0A562HBN2_9FIRM GTP cyclohydrolase 1 OS= Desulfitobacterium sp. LBE OX=884086 GN=folE PE=3 SV=1

SEQ ID NO: 7433 - protein, 188 aa, Desulfitobacterium sp.
  misc_feature (1)..(188): tr|A0A562HJL2|A0A562HJL2_9FIRM GTP cyclohydrolase 1 OS= Desulfitobacterium sp. LBE OX=884086 GN=folE PE=3 SV=1
MQLIEQAKIREAVLMILEAIGEDPEREGLKDTPDRVARMYAEIFSGLAEDAGVYLECVFTEEHEEMIVVKDIPFYSTCEHHLVPFIGKAHVAYIPAGGKVTGLSKLARVVESIARRPQLQERLTREIADVIMKKLNPQGVAVVVEAEHLCMSMRGIKKPGSKTVTSAVRGLFRKSAKTRAEFLSLIKT

SEQ ID NO: 7434 - protein, 283 aa, Desulfobacca acetoxidans
  misc_feature (1)..(283): tr|F2NJA1|F2NJA1_DESAR GTP cyclohydrolase FolE2 OS=Desu lfobacca acetoxidans (strain ATCC 700848 / DSM 11109 / ASRB2) OX=880072 GN=folE2 PE=3 SV=1
MHKGKVAAAITPLAEIADVQSRPDHRNIDIDKVGVKNISYPIIVLDKFNGTQNTVARINIYVNLPYRHKGTHMSRFIEILSEFRRNISIKNIPQILEETRHRLHAQSAHIEMIFPYFIQKQAPVSRARALMEYICTIKGSLNGEGLIDLVVCVKVPITTLCPCSKEISSVGAHNQRGEVRVQVRFKKFFWIEDLIRLVEASASCEVYSLLKRQDEKFVTERAYSNPMFVEDVVREIALKLDKDDNFTWYSIDSENYESIHNHSAYAYIETDKRQENRRSKPAS

SEQ ID NO: 7435 - protein, 256 aa, Desulfobacca sp.
  misc_feature (1)..(256): tr|A0A1F9PAS3|A0A1F9PAS3_9DELT GTP cyclohydrolase FolE2 OS=Desulfobacca sp. RBG_16_60_12 OX=1797909 GN=folE2 P E=3 SV=1
MADVQNHVSPHTIDIDKVGVKNISYPIVVLDKFNGTQHTVACINMYVNLPHRHKGTHMSRFIEILSEYRRDISLKKIGPILEETRRRLHAQSAHIEMTFPYFIDKEAPVSKARGLMEYICTFTGALDADGRLDLVVGITVPITTLCPCSKEISQVGAHNQRGEVRVQVRYRKFFWIEDLIRLVEESASCEVYALLKRQDEKFVTEKAYSNPMFVEDVVREIAHRMSQNDNFTWYAVESENFESIHNHSAYAYIESK

SEQ ID NO: 7436 - protein, 243 aa, Desulfobacca sp.
  misc_feature (1)..(243): tr|A0A1F9MRE5|A0A1F9MRE5_9DELT GTP cyclohydrolase I (Fr agment) OS=Desulfobacca sp. RBG_16_58_9 OX=1797908 GN=A 3K23_07455 PE=3 SV=1
MPTHKTPTILPVDMADVQNHVSPHTIDIDKVGVKNISYPIVVLDKFNGTQHTVAKINMYVNLPHRHKGTHMSRFIEILSEYRRDVSLKKIGAILEETRRRLHAQSAHIEMTFPYFIDKEAPVTKARGLMEYICTFTGALYEDGRLDLVVGITVPITTLCPCSKEISQVGAHNQRGEVRVQVRYQKFFWIEDLIRLVEESASCEVYALLKRQDEKYVTEKAYTNPMFVEDVVREIAHKLSQNDN

SEQ ID NO: 7437 - protein, 259 aa, Desulfobacter hydrogenophilus
  misc_feature (1)..(259): tr|A0A328FB75|A0A328FB75_9DELT GTP cyclohydrolase FolE2 OS=Desulfobacter hydrogenophilus OX=2291 GN=folE2 PE=3 SV=1
MMIDIQNQPDFRNIPIDKVGIKGLKHPVIVRDKANGSQSTVAEVNMYVDLPHQCKGTHMSRFVELLHTVNTPVSLDSLTSILEDMKASLGAKSAHIDISFPYFIEKTSPCTQSKGLMDYNCTIIGSSNGRKKADIVLKVAVPVTSVCPCSKEISDYGAHNQRGEVLVAARFHKFIWIEEIVNLVEQAASCDIYSVLKRADEKYVTEKAYNNPKFVEDIVRDVAKVLIEDSNITWFSVSAENFESIHNHSAYAYIEHSRD

SEQ ID NO: 7438 - protein, 260 aa, Desulfobacter postgatei
  misc_feature (1)..(260): tr|I5B504|I5B504_9DELT GTP cyclohydrolase FolE2 OS=Desu lfobacter postgatei 2ac9 OX=879212 GN=folE2 PE=3 SV=1
MMKDIQNQPDFRNIPIDKVGIKGLKYPVVVRDKLNGSQSTVAEINMYVDLPHQCKGTHMSRFVELLHTVVKTLVSLETLTSILEDMKASLGAKSAHIEIFFPYFIEKTSPCTQSKGLMDYNCTIIGSSNGRKKADIVLKVAVPVTSVCPCSKEISEYGAHNQRGEVLVAARFHKFIWIEDIVNLVERAASSDIYSVLKRADEKYVTEKAYDNPKFVEDIVRDVAKALIADSNITWFSVSAENFESIHNHSAYASIEHSRD

SEQ ID NO: 7439 - protein, 258 aa, Desulfobacter postgatei
  misc_feature (1)..(258): tr|A0A2G6MQQ6|A0A2G6MQQ6_9DELT GTP cyclohydrolase FolE2 OS=Desulfobacter postgatei OX=2293 GN=folE2 PE=3 SV=1
MKDMQNQPDFRNIPIDKVGIKGLKYPVVVRDKAKGSQSTVAEINMYVDLPHQCKGTHMSRFVELLHTVNTPVSPESLTSILDDMKASLGAKSAHIEISFPYFIEKNAPSTQSKGLMDYNCTIIGSSGDRKTADMVLKVAVPVTSVCPCSKEISDHGAHNQRGEVRVAVRCHKFIWIEEIVNLVEQAASCDIYSVLKRADEKYVTEKGYNNPKFVEDIVRDVAKALIEDANITWFSVSAENFESIHNHSAYAWIEHSRA

SEQ ID NO: 7440 - protein, 261 aa, Desulfobacter sp.
  misc_feature (1)..(261): tr|A0A2D6ETE0|A0A2D6ETE0_9DELT GTP cyclohydrolase FolE2 OS=Desulfobacter sp. OX=2294 GN=folE2 PE=3 SV=1
MKDLQSQRDYRKIPVNKVGIKNLRYPITVRDRKDGFQATIAHINMYVDLPHKNRGTHMSRFVEILHIFRPEVSLDTFSMTLEKMKKHLSAASAHIEMTFPYFIEKNAPISNSSGLMDYTCGIIGSSDSNGKIDLVSEVIVPISSVCPCSKEISDAGAHNQRGKVELRTRFKKFIWLEDMIELVERASSCDIYSVLKRIDEKCVTEKGFANPKFVEDIVRDIAKKLKTDDNIIWFSVSAESFESIHNHSAYAYITSGTDPGS

SEQ ID NO: 7441 - protein, 260 aa, Desulfobacter sp.
  misc_feature (1)..(260): tr|A0A357YWB5|A0A357YWB5_9DELT GTP cyclohydrolase FolE2 OS=Desulfobacter sp. OX=2294 GN=folE2 PE=3 SV=1
MMKDIQNQPDFRNIPIDKVGIKGLKYPVVVRDKVNGSQSTVAEINMYVDLPHQCKGTHMSRFVELLHTVVKTLVSLETLTSILEDMKASLGAKSAHIEIVFPYFIEKTSPCTQSKGLMDYNCTIIGSSNGRKKADIVLKVAVPVTSVCPCSKEISAYGAHNQRGEVLVAARFHKFIWIEDIVNLVERAASSDIYSVLKRADEKYVTEKAYDNPKFVEDIVRDVAKALIADSNITWFSVSAENFESIHNHSAYAYIEHSRD

SEQ ID NO: 7442 - protein, 256 aa, Desulfobacteraceae bacterium
  misc_feature (1)..(256): tr|A0A1J5E4C1|A0A1J5E4C1_9DELT GTP cyclohydrolase FolE2 OS=Desulfobacteraceae bacterium CG2_30_51_40 OX=180512 8 GN=folE2 PE=3 SV=1
MEDIQNHRDYRNIDIDQVGVKGISYPITVLDKDMGEQQTVALINMYVNLPRYYKGTHMSRFVEILNEHSRRISLQNFTVILKEMKERLTAQSARMEIRFPYFIKKAAPVTGAEGLMEYKCTFKGTLVERPDLVIMINVPISTLCPCSKEISDYGAHNQRGEVKVQVRFKKFVWLEDLIKLVEESASSEVYSVLKREDEKFVTEKAYRNPMFVEDIVREIALKLEGDPNITWFSVESENFESIHNHSAYAYVEKHKI

SEQ ID NO: 7443 - protein, 261 aa, Desulfobacteraceae bacterium
  misc_feature (1)..(261): tr|A0A1W9TI75|A0A1W9TI75_9DELT GTP cyclohydrolase FolE2 OS=Desulfobacteraceae bacterium 4572_187 OX=1971620 GN =folE2 PE=3 SV=1
MKDIQNQHDTRNISIDKVGIKDLKYPITVLDRKDRIQHTVASICMYVDLPHEYKGTHMSRFVEILHMFHPEVALRKISGILEEMKKYLNAASANIEVTFPYFIKKESPVTKTVGLMDYSCSILGSSNSEGKTDIELVVVVPISSVCPCSKEISDAGAHNQRGNVRLSTRFKKFIWIEDMIELVEKSASCEVYSILKRADEKHVTEKGYANPKFVEDIVRDIAEKLQKDRNITWFSVSAENFESIHNHSAYAFITNGQHPRL

SEQ ID NO: 7444 - protein, 258 aa, Desulfobacterales bacterium
  misc_feature (1)..(258): tr|A0A1V1WVV0|A0A1V1WVV0_9DELT GTP cyclohydrolase FolE2 OS=Desulfobacterales bacterium S7086C20 OX=1869302 GN= folE2 PE=3 SV=1
MKDVQNSRDHRNIDIKKVGIKGIKYPVNVLDRANKVQATVATINMYVHLPHRFKGTHMSRFIEVLNDYCGNLNLKTFFEILDVMKDALEARTANLEISFPYFIRKKAPISRVSSLMEYNCEYLGKCDGNKHELFVCVKVPVCTLCPCSKEISSNGAHNQRGMVLVTLLYKEFFWIEEIIELVESSASSEVYALLKREDEKYITEHAYDNPMFVEDVVREVTEKLRFDPRFPWFSVEVENFESIHNHSAYAYTESPPRA

SEQ ID NO: 7445 - protein, 270 aa, Desulfobacterales bacterium
  misc_feature (1)..(270): tr|A0A1E7GL38|A0A1E7GL38_9DELT GTP cyclohydrolase FolE2 OS=Desulfobacterales bacterium S3730MH5 OX=1869298 GN= folE2 PE=3 SV=1
MGVKDLKDVQNEPDHRNIDLTRVGIKDIKYPMNVLDRANKTQSTVATVNMYVHLPHWFKGTHMSRFVEVLNDYCADLNLKTFFQMLDRIKKNLDAPAANLEIRFPYFVKKTAPVSGVPSLMEYTCKYIGEINGEERRLHIGVKVPVCTLCPCSKEISAKGAHNQRGMVSVTLLFKEFFWIEEIIEIVEGSASSDVYALLKREDEKFITEQAFSRPMFVEDIVREVTDKLRKDPRFVCFSVEAESFESIHNHSAYAYTEMDTRTPNHDIAD

SEQ ID NO: 7446 - protein, 261 aa, Desulfobacterium autotrophicum
  misc_feature (1)..(261): tr|C0QKM7|C0QKM7_DESAH GTP cyclohydrolase FolE2 OS=Desu lfobacterium autotrophicum (strain ATCC 43914 / DSM 338 2 / HRM2) OX=177437 GN=folE2 PE=3 SV=1
MIDIQKQRDYRNIPIDKVGIKNLRYPIKVMDKSNGVQSTIATIGMFVDLPHQCKGTHMSRFVELLNLFREQVSLDSIDNILEDMKTTLGAQSSHIEITFPYFVEKEAPVTGCKGLMDYICSIHGSSTPERDRDMVLKVAVPITSVCPCSKEISKYGAHNQRGEVLVSTRFKRLIWIEDMINLVEGCASCDVYSVLKREDEKAVTERGYENPKFVEDVVRDVSQILNDDENITWFSVSAENFESIHNHSAYAYIENGDRTNF

SEQ ID NO: 7447 - protein, 268 aa, Desulfobacterium vacuolatum
  misc_feature (1)..(268): tr|A0A1W1ZDE7|A0A1W1ZDE7_9DELT GTP cyclohydrolase FolE2 OS=Desulfobacterium vacuolatum DSM 3385 OX=1121400 GN= folE2 PE=3 SV=1
MIDMQKMRDYRNIPIDKVGIKGLRYPIKVRDKKSSGLQSTIAEISMYVDLPHQCKGTHMSRFVQMLHTFRSQVSLESIMTILENMKTTLEATSSHIEIIFPYFIEKKSPVTGSKGLMDYTCTIIGSSHPDEDRDMVLRVAVPITSVCPCSKEISDFGAHNQRGEVCVSTRFKKFVWIEDIIELVEHAASCEVYSVLKREDEKHVTEFAYNNPKFVEDVVRDVGKVLLEDDNITWFSVSAENFESIHNHSAYAFIEHGDPGIHGGGTSH

SEQ ID NO: 7448 - protein, 259 aa, Desulfobacula phenolica
  misc_feature (1)..(259): tr|A0A1H2DPA8|A0A1H2DPA8_9DELT GTP cyclohydrolase FolE2 OS=Desulfobacula phenolica OX=90732 GN=folE2 PE=3 SV=1
MIDIQNQPDYRNIPIDKVGIKGLKYPVKVLDKTTGLQSTVAQISMYVDLPHQCKGTHMSRFVEILHLFRTKVSLESITNILEDMKKILGAKSSHIEITFPYFIEKKSPETGSKGLMDYTCSIIGSSNGKTDTDIVLTVAVPVTSVCPCSKEISEYGAHNQRGEVLVSTRFKRLIWIEHIVELVEACASCDIFSVLKREDEKFVTEKAYDNPKFVEDIARDVAKALMEDDNITWFSVSAENFESIHNHSAYAYIEKAVIS

SEQ ID NO: 7449 - protein, 259 aa, Desulfobacula sp.
  misc_feature (1)..(259): tr|A0A1F9NDD8|A0A1F9NDD8_9DELT GTP cyclohydrolase FolE2 OS=Desulfobacula sp. GWF2_41_7 OX=1797910 GN=folE2 PE= 3 SV=1
MIDIQNQPDFRNIPIDKVGIKGLKYPVKVLDKTTGLQPTVAQINMYVDLPHQCKGTHMSRFVEILNLVRTTVSLESLTNILEDMKIILGAKSSHIEISFPYFIEKKSPATGSKGLMDYNCSIIGSSNGKKNTDIVLTVAVPVTSVCPCSKEISEYGAHNQRGEVLVSTRFKKFIWIEDIVELVEASASCDIFSVLKREDEKFVTETAYNNPKFVEDITRDVAKELMADKNITWFSVSAENFESIHNHSAYAYIEKGPIS

SEQ ID NO: 7450 - protein, 259 aa, Desulfobacula sp.
  misc_feature (1)..(259): tr|A0A1F9Q4I4|A0A1F9Q4I4_9DELT GTP cyclohydrolase FolE2 OS=Desulfobacula sp. RIFOXYB2_FULL_45_6 OX=1797912 GN= folE2 PE=3 SV=1
MIDIQNQPDFRNIPIDKVGIKGLKYPVKVLDKSTGLQSTIAQINMYVDLPHHCKGTHMSRFVEILNLVRTKVSLESLTNILEDMKTILGAKSSHIEISFPYFIEKKSPETGSKGLMDYNCSITGSSNGTKNTDLVLTVAVPVTSVCPCSKEISEYGAHNQRGEVSVSARFKKFIWIEDIVGLVEASASCDIFSVLKREDEKHVTEKAYDNPKFVEDITRDVAQALMADKNITWFSVSAENFESIHNHSAYAYIERGSVS

SEQ ID NO: 7451 - protein, 259 aa, Desulfobacula toluolica
  misc_feature (1)..(259): tr|K0NLL9|K0NLL9_DESTT GTP cyclohydrolase FolE2 OS=Desu lfobacula toluolica (strain DSM 7467 / Tol2) OX=651182 GN=folE PE=3 SV=1
MIDIQNQPDYRNIPIDKVGIKGLKYPVKVLDKTTGLQSTVAQISMYVDLPHQCKGTHMSRFVEILHLFRTKVSLESITNILEDMKKILGAKSSHIEITFPYFIEKKSPETGSKGLMDYTCSIIGSSNGKTDTDIVLTVAVPVTSVCPCSKEISEYGAHNQRGEVLVSTRFKRLIWIEHIVELVETCASCDIFSVLKREDEKFVTEKAYDNPKFVEDIARDVAKALMEDNNITWFSVSAENFESIHNHSAYAYIEKGIVS

SEQ ID NO: 7452 - protein, 260 aa, Desulfobotulus alkaliphilus
  misc_feature (1)..(260): tr|A0A562S916|A0A562S916_9DELT GTP cyclohydrolase FolE2 OS=Desulfobotulus alkaliphilus OX=622671 GN=folE2 PE=3 SV=1
MKDVQSQRDERNLPIDKVGIKNLRYPITVLDREQGRQQTVADISMYVDLPHDAKGTHMSRFVEMLHLFRQEVSLRSFSTILQEMRTLLEAERAHIDVTFPYFVEKKAPVSAEPGLMDYTCTISGSISPEGRTDLLSTVRVPVMSVCPCSLEISEIGAHTQRGMVTVSVRFRKFFWIEALIQRIEKCASSDVFSVLKRVDEKAVTEQAFRNPKFVEDIVRDVALSLKEDANITWFSVSAENYESIHNHSAFAQISSESLLA

SEQ ID NO: 7453 - protein, 255 aa, Desulfobulbaceae bacterium
  misc_feature (1)..(255): tr|A0A1E7HHM7|A0A1E7HHM7_9DELT GTP cyclohydrolase FolE2 OS=Desulfobulbaceae bacterium S3730MH12 OX=1869305 GN= folE2 PE=3 SV=1
MKKCNNRAKIMHIQTVGLKDIKTPVRVKEKSGKLQNTIATISMQARLADGHTDNCVETFISILNSSLGEISVTSFSSILSKVKEELQAKSVRLEMSFPYFINKKAPISNTHSLMEYSCTFSGGIGHDEKFILSVRVPVTTLCPCSKEISAGGAHNQRAEVTLNVKFNNFIWVEDLISMVEESASCELYALLKRPDEKYVTEKAFNNPMFVEDVVRKVAVLALENPDITWFSASVESFESIHKHSAYAYVDSDEVR

SEQ ID NO: 7454 - protein, 247 aa, Desulfobulbaceae bacterium
  misc_feature (1)..(247): tr|A0A1Q6DJC7|A0A1Q6DJC7_9DELT GTP cyclohydrolase FolE2 OS=Desulfobulbaceae bacterium DB1 OX=1920419 GN=folE2 PE=3 SV=1
MKLKTVGIKNIRYPVMIREKSGGGLQSTVASITLQANMPRRFRETCVATFLDVLRKYQEDMSVTIFPKLLVETRDQLQANSAHLEMTFPYFLEKKAPVTKTSGLMEYTCRFAGGIGEDEDFILSVWVPSTTLCPCSKEISEFGAHNQRAEINLNVKSKGFIWVEDLISLVESGASCEVYSILKRPDEKFVTEQAYKNPMFVEDVVRKVAEMAQAHPDIYWFSVGVESFESIHKHSAYAYVDSSGIEA

SEQ ID NO: 7455 - protein, 245 aa, Desulfocapsa sp.
  misc_feature (1)..(245): tr|A0A432R0L0|A0A432R0L0_9DELT GTP cyclohydrolase FolE2 OS=Desulfocapsa sp. OX=2066021 GN=folE2 PE=3 SV=1
MKIQTVGIQDIQIPVRIREKQGSLQNSVARVSLQVSFPGKYSQSCVHTFTSVLNKYMDEMSVTIFPELLNEVKNDLQAESARLQMSFPYFIEKKAPVSGTRSLMEYDCSFTGEVGTDDDFVLTVTVPVTTLCPCSKEISTAGAHNQRAEVTLNIKFKKFIWVEDLIRMVEESASCELWALLKRPDEKYVTEKAYENPMFVEDVVRKVAVSALKDPKITWFSVSVESFESIHKHSAYAYVDSNEIR

SEQ ID NO: 7456 - protein, 245 aa, Desulfocapsa sulfexigens
  misc_feature (1)..(245): tr|M1PCY0|M1PCY0_DESSD GTP cyclohydrolase FolE2 OS=Desu lfocapsa sulfexigens (strain DSM 10523 / SB164P1) OX=11 67006 GN=folE2 PE=3 SV=1
MKIRSVGIKDIQVPVRIREKNGGLQNSVATISLQASLPGKYRESCVLTFTTVLNKYMDDLSVTNFPELLAEVKEGLCAESARVEMSFPYFIEKKAPVSGTRSLMEYECSFTGEVGTDDDFILSVRVPITTLCPCSKEISTAGAHNQRAEVTLNVKFNKFIWAEDLIAMIEKSASCELWALLKRPDEKYVTERAYENPMFVEDVVRKVAVSALDDSKITWFSASVESFESIHKHSAYAYVDSNEIR

SEQ ID NO: 7457 - protein, 261 aa, Desulfocarbo indianensis
  misc_feature (1)..(261): tr|A0A0K9I5V8|A0A0K9I5V8_9DELT GTP cyclohydrolase FolE2 OS=Desulfocarbo indianensis OX=1348163 GN=folE2 PE=3 S V=1
MKDVQSQPDHRNIAIDKVGVKNIRHPVTVLDRANGTQQTVANINMYVDLPHLYKGTHMSRFIEVLSEHSNNINLRNIPGILEEMKKRLDAACAHIEVEFPYFIKKAAPVSSAQGLMEYNVAFRGSVNGEGLDLVVEMRVPVTTLCPCSREISEHGAHNQRGMVKLAVRFKRFFWIEDLIQLVEESASSDVFSLLKREDEKYVTERAYEHPMFVEDVVREVARKLEDDPNIVWFSVDSENFESIHNHSAYAFIERDKRSAQA

SEQ ID NO: 7458 - protein, 268 aa, Desulfococcus multivorans
  misc_feature (1)..(268): tr|S7TWA1|S7TWA1_DESML GTP cyclohydrolase FolE2 OS=Desu lfococcus multivorans DSM 2059 OX=1121405 GN=folE2 PE=3 SV=1
MMIDIQSQRDDRNIPIDKVGIKNLRYPITVRDRRNGRQHTVASINMYVDLPGKYKGTHMSRFVELLHIIRPEISLDKFAHILEQMKAHLDAASAHIEISFPYFIEKKAPVSDSPGLLDYSCKLIGVSDSSDGIDIVSEVTVPISSVCPCSKEISDVGAHNQRGEVRLRTRFKRFIWIEDVIELVEGCASCEVYSVLKRVDEKCVTERGYNNPKFVEDVVRDIAAKLLEDQNITWFSVSAENFESIHNHSAYASITRGENPNAGAESII

SEQ ID NO: 7459 - protein, 260 aa, Desulfococcus oleovorans
  misc_feature (1)..(260): sp|A8ZUJ6|GCH4_DESOH GTP cyclohydrolase FolE2 OS=Desulf ococcus oleovorans (strain DSM 6200 / Hxd3) OX=96561 GN =folE2 PE=3 SV=1
MKDIQKERDFRNMPIDKVGIKNLKYPIRVLDRKNGCQQTVGTINMYVDLPHESKGTHMSRFVEMLHILQPEISPKTFSVILDQMKKDLDAASAHMEVTFPYFIEKAAPVSGTPGFMEYTCKLMGTSRADGRVDLVSEVVVPISSVCPCSKEISDGGAHNQRGEVRLAIRSKKFVWIEDLIQLVEAAASCELYSVLKRVDEKWVTEKGYQNPKFVEDIVRDVAVALKNDTNITWFNISVENFESIHNHSAYATITCGRINP

SEQ ID NO: 7460 - protein, 260 aa, Desulfococcus sp.
  misc_feature (1)..(260): tr|A0A1W9PYG9|A0A1W9PYG9_9DELT GTP cyclohydrolase FolE2 OS=Desulfococcus sp. 4484_241 OX=1968522 GN=folE2 PE=3 SV=1
MKDVQKERDNRNMPIDKVGVKNLKYPIKVLDREKGCQHTVGTINMYVDLPHESKGTHMSRFVEMLHMLQPEISPKSFSMILDQMKKDLDAASAHMEVTFPYFIEKQAPVSHTKGYMEYSCRLIGTSRADGSVDLISEVTVPISSVCPCSKEISDYGAHNQRGEAKLAIRSKRFVWIEDIIKVVENAASCDLYSVLKRVDEKWVTEKGYQNPKFVEDIVRDIAVALEKDPNITWFSISVENFESIHNHSAYAMITRGNPDV

SEQ ID NO: 7461 - protein, 264 aa, Desulfocurvibacter africanus
  misc_feature (1)..(264): tr|F3Z005|F3Z005_DESAF GTP cyclohydrolase FolE2 OS=Desu lfocurvibacter africanus subsp. africanus str. Walvis B ay OX=690850 GN=folE2 PE=3 SV=1
MAGQTPPTMQDVQSAPAEVALSIDRVGVKHLMLPLVVRDRAQGVQHTVARVDLGVDLPAAFKGTHMSRFVEALENWKEELDYHSFKALLTDIRQRLSARKAYVVFRFPYFLKQASPKSGSPGWMSYECTLTGEMAGETMVFTLAVDVPAMTVCPCSLAISDQGAHSQRAMVRVMARFTGFLWLEDLIEIAEASASSPVYTLLKREDEKHVTESAFAKPTFVEDVVRGAAQRLDRHPQVNWYRVEVESFESIHAHSAFASIEKTK

SEQ ID NO: 7462 - protein, 264 aa, Desulfocurvibacter africanus
  misc_feature (1)..(264): tr|M5Q3F9|M5Q3F9_DESAF GTP cyclohydrolase FolE2 OS=Desu lfocurvibacter africanus PCS OX=1262666 GN=folE2 PE=3 S V=1
MAGQTPPTMQDVQSAPAEVALSIDRVGVKHLMLPLVVRDRAQGVQHTVARVDLGVDLPAAFKGTHMSRFVEALENWKEELDYHSFKALLTDIRQRLSARKAYVVFRFPYFLKQASPKSGSPGWMSYECTLTGEMAGETMIFTLAVDVPVMTVCPCSLAISDQGAHSQRAMVRVMARFTGFLWLEDLIEIAEASASSPVYTLLKREDEKHVTESAFAKPTFVEDVVRGAAQRLDRHPQVNWYRVEVESFESIHAHSAFASIEKTK

SEQ ID NO: 7463 - protein, 260 aa, Desulfofaba hansenii
  misc_feature (1)..(260): tr|A0A2M9DRW9|A0A2M9DRW9_9DELT GTP cyclohydrolase FolE2 OS=Desulfofaba hansenii OX=157842 GN=folE2 PE=3 SV=1
MIDIQKQPDYRNIPIDKVGIKNLRYPIRILDRAGGYQSTVASIDMYVDLPHHCKGTHMSRFVEMLNMFRAEVSLNSFSVTLGDMKQYLGAASSHIEMRFPYFMEKRAPVSEAAGLMDYTCCFRGGCNAAGRIDLVTEVCVPITSVCPCSKEISDAGAHNQRGEVRLATRFKRFIWIEDMIELVEEEASCDVYSVLKRVDEKSVTERGYANPKFVEDIVRDIAVAVKKDDNITWFSVSTENFESIHNHSAYAYIDGGQKPC

SEQ ID NO: 7464 - protein, 188 aa, Desulfofarcimen acetoxidans
  misc_feature (1)..(188): tr|C8W6F0|C8W6F0_DESAS GTP cyclohydrolase 1 OS=Desulfof arcimen acetoxidans (strain ATCC 49208 / DSM 771 / VKM B-1644 / 5575) OX=485916 GN=folE PE=3 SV=1
MIDQEKIEKAVYMILEAIGEDPEREGLLETPARVARMYKEVFCGLSEDPNIHLRKIFNEEHEELVLVKDIAFSSMCEHHLLPFFGKAHVAYIPHKGRVTGLSKLARVVDSYAKRPQLQERLTSQIADCIMKHLNPYGVIVVVEAEHMCMTLRGIKKPGSKTVTSAVRGAFKSNDATRAEAFALIRTLN

SEQ ID NO: 7465 - protein, 186 aa, Desulfofundulus australicus
  misc_feature (1)..(186): tr|A0A1M5C704|A0A1M5C704_9FIRM GTP cyclohydrolase 1 OS= Desulfofundulus australicus DSM 11792 OX=1121425 GN=fol E PE=3 SV=1
MIDTEKIEKAVRMILEAIGEDPDREGLRETPARVARMYKEIFCGLWEDPEIHLEKIFTEQHEEMILVKDIPIYSMCEHHLLPFFGKAHVAYIPRKGKVTGLSKLARVVEGFAKRPQLQERLTTQIADSIMRRLNPQGVLVIIEAEHMCMTLRGIRKPGSKTITSAVRGSFQRSEATRAEALALIKG

SEQ ID NO: 7466 - protein, 187 aa, Desulfofundulus kuznetsovii
  misc_feature (1)..(187): tr|A0A101HXC3|A0A101HXC3_9FIRM GTP cyclohydrolase 1 OS= Desulfofundulus kuznetsovii OX=58135 GN=folE PE=3 SV=1
MDLKKIQEAVRMILEAVGEDPDRPGLKGTPERIAKMYEEIFSGLCEEPKKHLEKIFLEDHEEMVLVKDIPMYSVCEHHLLPFFGVAHVAYIPRQWRVTGLSKLARVVEGYSRRPQLQERLTTQIADAVMSELDPYGVLVVIEAEHMCMTLRGVRKPGSKTVTSAVRGVFQKSVATRAEAMALIKKND

SEQ ID NO: 7467 - protein, 186 aa, Desulfofundulus salinum
  misc_feature (1)..(186): tr|A0A494WUY2|A0A494WUY2_9FIRM GTP cyclohydrolase 1 OS= Desulfofundulus salinum OX=2419843 GN=folE PE=3 SV=1
MIDTEKIEKAVRMILEAIGEDPDREGLRETPARVARMYKEIFCGLWEDPELHLEKIFTEEHEEMILVKDIPIYSMCEHHLLPFFGKAHVAYIPRRGKVTGLSKLARVVEGFAKRPQLQERLTTQIADSIMRRLNPQGVLVVIEAEHMCMTLRGIRKPGSKTITSAVRGSFQRSEATRAEALALIKG

SEQ ID NO: 7468 - protein, 186 aa, Desulfofundulus thermosubterraneus
  misc_feature (1)..(186): tr|A0A1M6DG92|A0A1M6DG92_9FIRM GTP cyclohydrolase 1 OS= Desulfofundulus thermosubterraneus DSM 16057 OX=1121432 GN=folE PE=3 SV=1
MIDTEKIEKAVRMILEAIGEDPDREGLRETPARVARMYKEIFCGLWEDPELHLEKIFTEEHEEMILVKDIPIYSMCEHHLLPFFGKAHVAYIPRRGKVTGLSKLARVVEGFAKRPQLQERLTTQIADSIMRRLNPQGVLVVIEAEHMCMTLRGIRKPGSKTITSAVRGSFQRSEATRAEALALIKD

SEQ ID NO: 7469 - protein, 269 aa, Desulfofustis glycolicus
  misc_feature (1)..(269): tr|A0A1M5Y478|A0A1M5Y478_9DELT GTP cyclohydrolase FolE2 OS=Desulfofustis glycolicus DSM 9705 OX=1121409 GN=fol E2 PE=3 SV=1
MIAQETERFILVRMAIKIAGVKNIKLPITVVQKDGNHQDTVATINLLVRLPAVLQPDCIATFTAVLNRHIERISVEDFPGLLADVCASFSAESARIDMRFPYYLEKTAPVSGTRSLMEYQCIFSGGVGADDGFLLTVKVPVTTLCPCSREISEVGAHNQRAEVTLSARFKKMIWAEDLIALVEQCASCELFALLKRPDEKYVTETAFRNPMFVEDVVRKVAQLTLENPLVTWFSVGVESYESIHKHSAYAYVDSGDISVKNGHVTGMGG

SEQ ID NO: 7470 - protein, 260 aa, Desulfoglaeba alkanexedens
  misc_feature (1)..(260): tr|A0A4P8L124|A0A4P8L124_9DELT GTP cyclohydrolase FolE2 OS=Desulfoglaeba alkanexedens ALDC OX=980445 GN=folE2 PE=3 SV=1
MIDVQNQEDHRNINIDKVGVKNIRYPLTVMDRENDFQHTVATINMYVNLPRKFKGTHMSRFIEILNEFYGHLDIREFSKILGAMQKRLEAQSAHLEIAFPYFIEKKSPVTETTGLMEYGCRVIGSMDHRKGYDLIVEVNVPITTVCPCSREISNYGAHNQRGMARLAVRYKKFVWIEDLIRVVEEAASCEVYSLLKRPDEKYVTERGYENPKFVEDVVRDIAAQLKPDPNILWFQVDVENFESIHNHSAYAFIERSKANP

SEQ ID NO: 7471 - protein, 264 aa, Desulfohalobium retbaense
  misc_feature (1)..(264): tr|C8WZN6|C8WZN6_DESRD GTP cyclohydrolase FolE2 OS=Desu lfohalobium retbaense (strain ATCC 49708 / DSM 5692 / J CM 16813 / HR100) OX=485915 GN=folE2 PE=3 SV=1
MQDVQNTPAGIPLAIDRVGVKDLRFPLLVQDRERGHQHTVSRVDMFVDLPAHFKGTHMSRFVEVLQDFSGILDYPNFKNLLREVRQRLQAHRAHLSFSFPYFLHQNAPVSASASLMDYQCTLHGELDDADQLRMFLQVQVPVMTVCPCSLAIADEGAHSQRAMVTMNCRFAGMLWLEDLIHIGQHAASCQVHSLLKREDEKFVTEKAFATPTFVEDVVRNAAHQLQSHELISWFRVEVESFESIHNHSAYACIEAPGSQTGAGQ

SEQ ID NO: 7472 - protein, 266 aa, Desulfoluna butyratoxydans
  misc_feature (1)..(266): tr|A0A4U8YTH7|A0A4U8YTH7_9DELT GTP cyclohydrolase FolE2 OS=Desulfoluna butyratoxydans OX=231438 GN=folE2 PE=3 SV=1
MIDMQKQPDYRNIPIDQVGIKNLKYPVRVLDRSNGTQHTVASINMYVDLPHHSKGTHMSRFVELLHSFRNDLELSLPTLSRILVEMKKILGAKSSHVDITFPYFIEKTAPESHSPGLVDYSCRFLGTSNEHDEIDLISEVVVPITSLCPCSKEISTHGAHNQRGEVRLATRFRKFNWIEDMIELVEQAASCEIYSVLKRVDEKYVTEQAYNNPKFVEDIVRDIATALNRDDNITWFELSAENFESIHNHSAYAYIASTKEGIVAGA

SEQ ID NO: 7473 - protein, 266 aa, Desulfoluna spongiiphila
  misc_feature (1)..(266): tr|A0A1G5FPS4|A0A1G5FPS4_9DELT GTP cyclohydrolase FolE2 OS=Desulfoluna spongiiphila OX=419481 GN=folE2 PE=3 SV =1
MIDMQKQPDYRNIPIDQVGIKNLKYPVRVLDRSNGTQHTVASINMYVDLPHHSKGTHMSRFVELLHSFRNDLELSLTTLSHILDEMKKILGAKSSHVDITFPYFIEKKAPESGSPGLVDYSCRFLGTSNEHDEIDLISEVVVPITSLCPCSKEISTHGAHNQRGEVRLATRFRKFNWIEDMIELVEQAASCEIYSVLKRVDEKFVTEQAYNNPKFVEDIVRDIATALNRDDNITWFQLSAENFESIHNHSAYAYIASSKEGIVAGS

SEQ ID NO: 7474 - protein, 273 aa, Desulfomicrobiaceae bacterium
  misc_feature (1)..(273): tr|A0A3D1NEE7|A0A3D1NEE7_9DELT GTP cyclohydrolase FolE2 OS=Desulfomicrobiaceae bacterium OX=2053547 GN=folE2 P E=3 SV=1
MRDVQRDPAEVPLPIDRVGVRHVAVPLRVRDRERGVQHTVAQVELGVELPAHFKGTHMSRFLEALAAADFALDAQTCRTLLADVRARLEARRAFLCFRFPYFLARHAPVTGSAAPMDYSCWLRGSLREDGARMTLGVEVPVMTVCPCSKAISREGAHSQRALVRMEAQFSGMLWIEDLIAIAQDSASSPVYPLLKREDEKHVTETAFAHPAFVEDVVRAAAQRLAAHPRVQGFRVEVESMESIHNHSAYACIESWADGEAPTPQLPRDPHPSC

SEQ ID NO: 7475 - protein, 274 aa, Desulfomicrobium apsheronum
  misc_feature (1)..(274): tr|A0A1I3N530|A0A1I3N530_9DELT GTP cyclohydrolase FolE2 OS=Desulfomicrobium apsheronum OX=52560 GN=folE2 PE=3 SV=1
MRDVQSGPADVALRIDRVGVKNLSIPLTVRDRAKGRLHTVARVDLSVDLPAEFKGTHMSRFLEALRDMDTTLDADSCKNLLLDLRDRLHAESSHLCFLFTYFMEQRAPVTGSPALMDYSCFLRGVLRDGEVSLMLGVEVPVMTVCPCSKAISREGAHSQRAMVRIEAQCLGMLWLEDLIAIAQESGSSPVYALLKREDEKYVTEAAFAAPTFVEDVVRGAAARLAAHPKVNGFRVEVESFESIHNHSAYACIDQMDEDTDAGHAGLDGSPARVR

SEQ ID NO: 7476 - protein, 274 aa, Desulfomicrobium baculatum
  misc_feature (1)..(274): tr|C7LXR9|C7LXR9_DESBD GTP cyclohydrolase FolE2 OS=Desu lfomicrobium baculatum (strain DSM 4028 / VKM B-1378) O X=525897 GN=folE2 PE=3 SV=1
MRDVQSGPADVALRIDRVGVKNLSIPLTVRDRAKGRLHTVARVDLSVDLPARFKGTHMSRFLEALRDMDTTLDADSCKNLLLDLRDRLQAESSHLCFFFTYFLEQRAPVTGSAALMDYSCFLRGVLRNGEVSLILGVEVPVMTVCPCSKAISREGAHSQRAMVRIEAQCLGMLWLEDLIAIAQESGSSPVYALLKREDEKYVTEAAFAAPTFVEDVVRGAASRLAAHPKVNGFRVEVESFESIHNHSAYACIDQMDEGADTAHTALDGSPACGR

SEQ ID NO: 7477 - protein, 274 aa, Desulfomicrobium norvegicum
  misc_feature (1)..(274): tr|A0A1I4HVB0|A0A1I4HVB0_DESNO GTP cyclohydrolase FolE2 OS=Desulfomicrobium norvegicum (strain DSM 1741 / NCIM B 8310) OX=52561 GN=folE2 PE=3 SV=1
MRDVQSGPADVALRIDRVGVKNLSIPLTVRDRAKGRLHTVARVDLSVDLPAEFKGTHMSRFLEALRDMDKTLDADSCKNLLLDLRDRLHAQSSHLCFLFTYFMEQRAPVTGSPALMDYSCFLRGVLRDGEVSLMLGVEVPVMTVCPCSKAISREGAHSQRAMVRIEAQCLGMLWLEDLIAIAQESGSSPVYALLKREDEKYVTETAFAAPTFVEDVVRGAAARLAAHPKVNGFRVEVESFESIHNHSAYACIDQMDEDADAGHAGLDGSPARVR

SEQ ID NO: 7478 - protein, 268 aa, Desulfomicrobium orale
  misc_feature (1)..(268): tr|A0A0X8JSC1|A0A0X8JSC1_9DELT GTP cyclohydrolase FolE2 OS=Desulfomicrobium orale DSM 12838 OX=888061 GN=folE2 PE=3 SV=1
MADVQSQAPSIPLHINRVGIRNMTMPILVRQRDYVEAQCTVAEITLSVDLPAEAKGTHMSRFVETLQGMLRRSGGETSTLDYPLALRLMRETCARLKADRAYLAFSFPYFLVRTTPVSGIRTTMTYHCTLSGEIDETSRETSSFAPFTLAVTVPVMTVCPCSKAISDEGAHSQRAEIHISSRMSGYIWIEDLIELAEEAGSSPVYSLLKRADEKFVTEYAFAHPCFVEDVARCVAASLTVHPLVSSFHVRVESHESIHAHNAFAYIKG

SEQ ID NO: 7479 - protein, 256 aa, Desulfomicrobium orale
  misc_feature (1)..(256): tr|A0A0X8JND3|A0A0X8JND3_9DELT GTP cyclohydrolase FolE2 OS=Desulfomicrobium orale DSM 12838 OX=888061 GN=folE2 PE=3 SV=1
MRDVQSGPADVPLRIDRVGVKSLSIPLTVRDRARGEQRTVARVDLSVDLPARFKGTHMSRFLEALRGMDTLDMPGCTRLLHDLRDRLQARSAHLCFQFSYFLEHRAPATGIPALVDYACFLRGTMRDAEAELALGVEVPVMTVCPCSKAISREGAHSQRAMIRMEAGCSGMLWLEDLIDIGRESGSSPVYALLKREDEKFVTEAAFAAPAFVEDVVRNAASRLAAHPRVRGFRVEVESMESIHNHSAYACIDQMDG

SEQ ID NO: 7480 - protein, 307 aa, Desulfomonile tiedjei
  misc_feature (1)..(307): tr|I4C2Z0|I4C2Z0_DESTA GTP cyclohydrolase FolE2 OS=Desu lfomonile tiedjei (strain ATCC 49306 / DSM 6799 / DCB-1 ) OX=706587 GN=folE2 PE=3 SV=1
MADHKREQHVPGTLPANGDGAVDSGRVFANYATLPDIQSLPDERKIPIDKVGVKGLRYPISVKDRQKGLQHTVGLFDLFVNLPHDFKGAHMSRFIEVLNEFRGEISMEKFREILEKIKSKLNAKSAHMNVEFPYFIEKNAPITGTPGLMSYTCFMRGALADRFDLIVGVEVPVTTVCPCSKEISEYGAHNQRGIVRVQLRFRKLFWIEEIIEVVESSVSSEIYSLLKRPDEKFVTEKAYENPMFVEDVVRLALSRLREKNNFPWYKIEAENFESIHNHSAYASIEKDFSPEPDCFTGGSSIRYNGAL

SEQ ID NO: 7481 - protein, 258 aa, Desulfonatronospira thiodismutans
  misc_feature (1)..(258): tr|D6SNX4|D6SNX4_9DELT GTP cyclohydrolase FolE2 OS=Desu lfonatronospira thiodismutans ASO3-1 OX=555779 GN=folE2 PE=3 SV=1
MQDVQSGMPEFPLPIDRVGVKNLKLPLLVQDRLHGQQHTVADVDLCVDLPGEFKGTHMSRFLESLSHWSKVLTYESIKELLAEIIHRLEAQKALLRFDFPYFYSRRTPVSGHEFLMDYKSFLAGEFSMGEIRMTQGVEVPVMTVCPCSLAISKQGAHSQRAYVKIKCGYKGLLWLEELIDTGMSAGSSPVYPLLKREDEKYVTDEAFANPTFVEDVVRCVAFSLSRHPRIIWYEVEVESFESIHNHSAYATITGRGKH

SEQ ID NO: 7482 - protein, 257 aa, Desulfonatronovibrio sp.
  misc_feature (1)..(257): tr|A0A424Y085|A0A424Y085_9DELT GTP cyclohydrolase FolE2 OS=Desulfonatronovibrio sp. MSAO_Bac4 OX=2293858 GN=fo lE2 PE=3 SV=1
MQDVQSSPSEVPMSIDRVGVKNLQIPLLVQDRLKGSQHTVADVDLCVDLPARFKGTHMSRFLEVLSSWSQVLDYDSFKDLLSRVRQSLKAERAVLRFDFPYFYGRKAPVSKHEFVINYKSFLSGELSGQKVKMILGVEVPVMTVCPCSLAISEKGAHSQRALVRIKCGFKGLLWLEELIDIASHSGSSPVYPLLKREDEKYVTEAAFSMPSFVEDVVRRAAQSLDEHELIKWYEVDVESFESIHNHSAYARICRPAV

SEQ ID NO: 7483 - protein, 98 aa, Desulfonatronum sp.
  misc_feature (1)..(98): tr|A0A2T5C764|A0A2T5C764_9DELT GTP cyclohydrolase 1 (Fr agment) OS=Desulfonatronum sp. SC1 OX=2109626 GN=C6366_ 18705 PE=3 SV=1
YIPRHHITGLSKIARVVEAFARRLQVQERLTTQIKECIQETLNPLGVAVVIEAQHMCMQMRGVQKQHSVTTTSDFTGAFLKNIATREEFFNIIGHKLH

SEQ ID NO: 7484 - protein, 263 aa, Desulfonatronum sp.
  misc_feature (1)..(263): tr|A0A2T5CC52|A0A2T5CC52_9DELT GTP cyclohydrolase FolE2 OS=Desulfonatronum sp. SC1 OX=2109626 GN=folE2 PE=3 SV =1
MLDDVQNTPATVPVDIDRVGIRHVHFPLAVLDRAQGRQHTVAQVEMGVDLPARFKGTHMSRFVEALQAWSGVLDYPNLKHLLGDVQNRLDARKAWISFYFPFFLERSAPVSGSRSRMDYQCRVIGEHQDGRLLFGLEVEVPVMTVCPCSLAICDRGAHSQRAMVRIRTRNKGLIWLEDLIELAQESASSPVYALLKREDEKRIIDNAFEKPCFVEDVVRTVSRGLERLNKLLWYRVEVESQESIHNHSAYARIERSLAQAGKG

SEQ ID NO: 7485 - protein, 261 aa, Desulfonatronum thiosulfatophilum
  misc_feature (1)..(261): tr|A0A1G6C989|A0A1G6C989_9DELT GTP cyclohydrolase FolE2 OS=Desulfonatronum thiosulfatophilum OX=617002 GN=folE 2 PE=3 SV=1
MLDVQNDPASVPVDIDRVGIKHVHFPLMVLDRAQGRQHTVAQVEMGVDLPACFKGTHMSRFVEALQDWSGILDYPSLKHLLNDVQARLDAQRAWISFSFPFFLERAAPASGSKARMDYHCRVAGEFQGSRLLFSLEVEVPVMTVCPCSLAICDQAAHSQRAVVRVQTRNKGLIWLEDLIELAQESASSPVYALLKREDEKLVIDNAFKRPCFVEDVVRNVSHELEKLTQLLWYRVEVESQESIHNHSAYACIERSLTGMKA

SEQ ID NO: 7486 - protein, 259 aa, Desulfonauticus sp.
  misc_feature (1)..(259): tr|A0A124F8S7|A0A124F8S7_9DELT GTP cyclohydrolase FolE2 OS=Desulfonauticus sp. 38_4375 OX=1635258 GN=folE2 PE= 3 SV=1
MLDVQNTPAKIPLRIDKVGVKNLKLPLTVQDKNKGIQHTTAQVDISVDLPKEFKGTHMSRFLEVLSQWQGTLHYDSLKQLLWDLKGKLRAKDAHVLFTFPYFLSQKAPQSGQDFLLDFLAQVEGSLIDDRLTFTLGVEVPVFTVCPCSLAISEKGAHSQRAVIKISAGIKEFLWLEDLIFIAQKAGSSPVYPLLKREDEKEVTEKAFDNPMFVEDVVRKVARELDKLDKILWYKVEVESFESIHNHSAYAIIGPKNKEF

SEQ ID NO: 7487 - protein, 267 aa, Desulfonauticus submarinus
  misc_feature (1)..(267): tr|A0A1H0C1V9|A0A1H0C1V9_9DELT GTP cyclohydrolase FolE2 OS=Desulfonauticus submarinus OX=206665 GN=folE2 PE=3 SV=1
MSKGLEDIQNTPADVPLDINRVGIKSLKLPLEILDKQKGLQHTVAEVDLSVDLPKEFKGTHMSRFLEALASWEKKLSYESLKKLLLDLQHKLHAKQAHVSFVFPYFLEQKSPASGQVFEMDFLAKVEGNMKGKELSFVLKVAVPVMTVCPCSLAISDKGAHSQRTFVSITAQIKKFLWLEDLIEIALKSGSSPVYPLLKREDEKKVTENAFSNPTFVEDVVRNVARELNDLDNILWYKVEVESYESIHNHSAYAIIESFDATKLNKS

SEQ ID NO: 7488 - protein, 266 aa, Desulfonema ishimotonii
  misc_feature (1)..(266): tr|A0A401FRL4|A0A401FRL4_9DELT GTP cyclohydrolase FolE2 OS=Desulfonema ishimotonii OX=45657 GN=folE2 PE=3 SV=1
MIDIQSQRDERNIPIDKVGIKNLRYPITVRDRKNGFQHTVATINMYVDLPGNYKGTHMSRFVEMLHLFRPEISLQKISQILDQMKSHLDAASAHIEVMFPYFIEKKAPVSRSVGLMDYTCRFIGTSDPVGKVDLVSEVRVPISSVCPCSKEISDAGAHNQRGEVRLSTRFRKFIWIEDMIELVENAASCEVYSILKRVDEKCVTERGYGNPKFVEDVVRDIAGNLYLDDNITWFSVSAENFESIHNHSAYAFIASGDVPSPCHCRR

SEQ ID NO: 7489 - protein, 195 aa, Desulfonispora thiosulfatigenes
  misc_feature (1)..(195): tr|A0A1W1ULI9|A0A1W1ULI9_DESTI GTP cyclohydrolase 1 OS= Desulfonispora thiosulfatigenes DSM 11270 OX=656914 GN= folE PE=3 SV=1
MSINQAEIAKHIRGILVALGEDPDREGLQDTPQRVASMYAEIFAGIAYTNDQLVDMFNKTFEEDINTTEDSQDIVVMKDIEIFSHCEHHLALMYNMKVTIAYIPKDKVIGLSKMARIADMVGKRLQLQERIGQDIAEIMQKITETEDVAVIIEGEHGCMTTRGIKKPNAKTVTMTLRGNFNTDINLLNRLLILCK

SEQ ID NO: 7490 - protein, 245 aa, Desulfopila sp.
  misc_feature (1)..(245): tr|A0A4U1A408|A0A4U1A408_9DELT GTP cyclohydrolase FolE2 OS=Desulfopila sp. IMCC35005 OX=2569541 GN=folE2 PE=3 SV=1
MHIQVVGIKNICTPVKVLEKGGGSQHTIATISMQASMPSSKRESCVETFTSILNQSLDTLSVESFHRILSDVQGSLGSESARLEMTFPYFIEKKAPVTDTRSLMEYSCTFSGGIGKDQDFILSVVVPVTTLCPCSKEISQDGAHNQRAEVTLNVEMRKFVWIEDLITMIEQSASCELYALLKRPDEKYVTERAFNNPMFVEDVVRKVAECALAHEDIGWFSASVESFESIHKHSAYAYVDSDEIR

SEQ ID NO: 7491 - protein, 245 aa, Desulfopila sp.
  misc_feature (1)..(245): tr|A0A4U1ARV8|A0A4U1ARV8_9DELT GTP cyclohydrolase FolE2 OS=Desulfopila sp. IMCC35004 OX=2569540 GN=folE2 PE=3 SV=1
MHIQAVGINNIHTPVKVLQKGGGLQHTIATISMQAKLPSSKRESCVETFTSILNQSLDELSWESFGEILREVQSALGSQSARLEMTFPYFIEKKAPVTETRSLMEYSCTFSGGIGEAEGLTLSVAVPVTTLCPCSKEISQHGAHNQRAEVKLNVEMKKFVWIEDLISLVEQSASCELYALLKRPDEKYVTERAFNNPMFVEDVVRKVAESAMAHPEIDRFSASVESFESIHKHSAYAYVDSDEIR

SEQ ID NO: 7492 - protein, 255 aa, Desulfoplanes formicivorans
  misc_feature (1)..(255): tr|A0A194AFU7|A0A194AFU7_9DELT GTP cyclohydrolase FolE2 OS=Desulfoplanes formicivorans OX=1592317 GN=folE2 PE= 3 SV=1
MQDIQSGPSRVPLAIDRVGVKNLTHPLIVRDREQGQQHTVATMDMSVDLPAAFKGTHMSRFLEALGDWTGILDYASFKQLLEDLTIRLQAKRAHLHFSFPYFREQSAPVSKSPALMDYQCSLQGRLEGRDMEMILGVDVPVMTVCPCSLAICDHGAHSQRAMVRIEARFSGLLWIEDLIDIGQQAGSSPVHALLKREDEKFVTDAAFDNAAFVEDVVRNAAQNLAKHPQVHGYKVEVESMESIHNHSAYACIETM

SEQ ID NO: 7493 - protein, 186 aa, Desulforudis audaxviator; identical to SEQ ID NO: 6162
  misc_feature (1)..(186): tr|B1I3V9|B1I3V9_DESAP GTP cyclohydrolase 1 OS=Desulfor udis audaxviator (strain MP104C) OX=477974 GN=folE PE=3 SV=1

SEQ ID NO: 7494 - protein, 257 aa, Desulfosoma caldarium
  misc_feature (1)..(257): tr|A0A3N1UU51|A0A3N1UU51_9DELT GTP cyclohydrolase FolE2 OS=Desulfosoma caldarium OX=610254 GN=folE2 PE=3 SV=1
MIDVQSLIDHRNIHVDKVGVKNIRYPLTVMDKKNGVQHTVASINMYVNLPREFKGTHMSRFVEILNEFYGHLDIREFSKILEAMQSRLNAQSAHLEISFPYFIEKLSPVTGTSGLMEYLCRVSGSLNNQNGFDLVVEVNVPITTVCPCSREISEHGAHNQRGMARLAVRFKKFIWIEDLIRIVEEAASCEVYSLLKRPDEKFVTEKGYDNPKFVEDVVRDVAYRLKKNPHILWFQVDVENFESIHNHSAYAFIERAL

SEQ ID NO: 7495 - protein, 190 aa, Desulfosporosinus acididurans
  misc_feature (1)..(190): tr|A0A0J1IT92|A0A0J1IT92_9FIRM GTP cyclohydrolase 1 OS= Desulfosporosinus acididurans OX=476652 GN=folE PE=3 SV =1
MGMDLEKIEQAVYMILEAIGEDPKREGLQDTPKRVARMYAEVFAGLHEDPSRHLKVQFSEEHEEMVIVKDIPVYSMCEHHLVPFYGKAHVAYIPRKGKITGLSKFARVVEGFARRPQLQERLTSEIADAIMAELTPLGVLVVIEAEHMCMTMRGVKKAGSRTLTSAVRGIFKTNPITRSEAFSLIQGHKS

SEQ ID NO: 7496 - protein, 289 aa, Desulfosporosinus acididurans
  misc_feature (1)..(289): tr|A0A0J1IMH8|A0A0J1IMH8_9FIRM Putative GTP cyclohydrol ase 1 type 2 OS=Desulfosporosinus acididurans OX=476652 GN=DEAC_c19320 PE=4 SV=1
MAVSIGLVAQHIEKLAPKCWAEEWDNVGLLVGSGSAPVERILIALDGTLEVIEEAKDFGAQLIVAHHPLMFRPLKNLRSDNPAAKIPLTLFNYQIGYYAAHTNLDQSRLSSSITLGEILGLKELKLLEEQSNSSNYSRQANLSSANSTEELRGYGVIGYLERPEPLEVVWENFLEGLLQSNCYAHPYNLTGVRLAGSLKKDVRKVAIVNGSGGRFVPKALFKGADLLITGDVDHHAVLDALEGGMAVGDLGHFLSEAPMLQALYYYLSSERSLQGIEFKVSSKNVSPWL

SEQ ID NO: 7497 - protein, 190 aa, Desulfosporosinus acidiphilus
  misc_feature (1)..(190): tr|I4D850|I4D850_DESAJ GTP cyclohydrolase 1 OS=Desulfos porosinus acidiphilus (strain DSM 22704 / JCM 16185 / S J4) OX=646529 GN=folE PE=3 SV=1
MGMDLEKIEKAVYMILEAIGEDPEREGLLDTPKRVARMYAEVFAGLHEDPSRHLKVQFSEEHEEMVIVKDIPVYSMCEHHLVPFYGKAHVAYIPRKGKITGLSKFARVVEGYARRPQLQERLTSQIADAIMGELTPLGVLVVIEAEHMCMTMRGVKKAGSQTLTSAVRGIFKSNSITRSEAFSLIQGNRS

SEQ ID NO: 7498 - protein, 189 aa, Desulfosporosinus fructosivorans
  misc_feature (1)..(189): tr|A0A4Z0R3N1|A0A4Z0R3N1_9FIRM GTP cyclohydrolase 1 OS= Desulfosporosinus fructosivorans OX=2018669 GN=folE PE= 3 SV=1
MDIEKIEQAVYMILEAIGEDPDREGLRDTPKRVARMYAEVFAGLHEDPSQHFKVQFTEEQHEEMVIVKDIPVYSMCEHHLVPFYGKAHVAYIPRKGKITGLSKFARVVEGFAHRPQLQERLTSQIANAVMGELDPLGVVVVIEAEHMCMTMRGVKKAGSQTLTSAVRGIFKTNPITRSEAFSLIQGHRS

SEQ ID NO: 7499 - protein, 266 aa, Desulfosporosinus fructosivorans
  misc_feature (1)..(266): tr|A0A4Z0R5C4|A0A4Z0R5C4_9FIRM GTP cyclohydrolase FolE2 OS=Desulfosporosinus fructosivorans OX=2018669 GN=folE 2 PE=3 SV=1
MIDVQGCADERGISIQKVGVKEIYLPFLIQTKNGDYQTVSANIQLTVDLSMENKGTHMSRFIEVLNEWRQKTFSNKELESLLENVLERLDASSAHMDIHFKYFIEKTAPVSLIKSVVDYDCTFSGVLSKENGFEFTLGVVVPFTALCPCSKEISRFGAHNQRGVMRMKLQQSRAEESLCLEDVVELMEAQGSSQIYSVLKREDEKYVTEKAYENPKFVEDVIRDLILAMRALDGVTWFEIECENFESIHNHSAYAYHNEAITNLDR

SEQ ID NO: 7500 - protein, 190 aa, Desulfosporosinus hippei
  misc_feature (1)..(190): tr|A0A1G7XKE1|A0A1G7XKE1_9FIRM GTP cyclohydrolase 1 OS= Desulfosporosinus hippei DSM 8344 OX=1121419 GN=folE PE =3 SV=1
MGMDLDKIEQAVQMILEAIGEDPDREGLKDTPKRVARMYAEVFSGLHEDPSHHLNVQFSEEHEEMVIVKDIPVYSMCEHHLVPFYGKAHVAYIPRKGKITGLSKFARVVEGFARRPQLQERLTSDIADAIVAKLSPLGVLVVIEAEHMCMTMRGVKKAGSQTLTSAVRGIFKTNPITRSEAFSLIQGHRY

SEQ ID NO: 7501 - protein, 190 aa, Desulfosporosinus lacus
  misc_feature (1)..(190): tr|A0A1M5WJ32|A0A1M5WJ32_9FIRM GTP cyclohydrolase 1 OS= Desulfosporosinus lacus DSM 15449 OX=1121420 GN=folE PE =3 SV=1
MGMDLQKIEQAVYMILEAIGEDPEREGLRDTPKRVAKMYAEVFSGLHEDPGYHLNVQFSEEHEEMVIVKDIPVYSMCEHHLVPFYGKAHVAYIPRKGKITGLSKFARVVEGFARRPQLQERLTSEIADAIMAKLAPLGVLVVIEAEHMCMTMRGVKKAGSQTLTSAVRGIFKTNPITRSEAFSLIQGHRR

SEQ ID NO: 7502 - protein, 189 aa, Desulfosporosinus lacus
  misc_feature (1)..(189): tr|A0A1M5V3S0|A0A1M5V3S0_9FIRM GTP cyclohydrolase 1 OS= Desulfosporosinus lacus DSM 15449 OX=1121420 GN=folE PE =3 SV=1
MKECDMKKVEEAVRNILEAIGEDPEREGLKDTPKRVARFYQEVFAGLKEEPGDYLNVQFTENHEEMIIVKDIPIYSMCEHHLLPFFGLVHVAYIPKDGKITGLSKLARVAEGYARRPQLQERLTSQIANSMEKILTAWGVLVVIEAEHMCMTIRGIKKPGSRTVTSAVRGIFKSNAATRAEAFSLILSG

SEQ ID NO: 7503 - protein, 190 aa, Desulfosporosinus meridiei
  misc_feature (1)..(190): tr|J7IRL7|J7IRL7_DESMD GTP cyclohydrolase 1 OS=Desulfos porosinus meridiei (strain ATCC BAA-275 / DSM 13257 / N CIMB 13706 / S10) OX=768704 GN=folE PE=3 SV=1
MGMDLDKIEQAVQMILEAIGEDPDREGLKDTPKRVARMYAEVFSGLHEDPSYHLNVQFSEEHEEMVIVKDIPVYSMCEHHLVPFYGKAHVAYIPRKGKITGLSKFARVVEGFARRPQLQERLTSDIADAIVAKLSPLGVLVVIEAEHMCMTMRGVKKAGSQTLTSAVRGIFKTNPITRSEAFSLIQGHRC

SEQ ID NO: 7504 - protein, 190 aa, Desulfosporosinus orientis
  misc_feature (1)..(190): tr|G7WDS9|G7WDS9_DESOD GTP cyclohydrolase 1 OS=Desulfos porosinus orientis (strain ATCC 19365 / DSM 765 / NCIMB 8382 / VKM B-1628) OX=768706 GN=folE PE=3 SV=1
MGMDLEKIEQAVYMMLEAIGEDPDREGLVDTPKRVARMYAEVFNGLHEDPSEHLNVQFSEEHEEMVIVKDIPVYSMCEHHLVPFYGKAHVAYIPRKGKITGLSKFARVVEGFARRPQLQERLTSEIADAIVAKLSPLGVLVVIEAEHMCMTMRGVKKAGSQTLTSAVRGIFKTNPITRSEAFSLIQGHRR

SEQ ID NO: 7505 - protein, 190 aa, Desulfosporosinus sp.
  misc_feature (1)..(190): tr|A0A0F2JG23|A0A0F2JG23_9FIRM GTP cyclohydrolase 1 OS= Desulfosporosinus sp. I2 OX=1617025 GN=folE PE=3 SV=1
MGMDLEKIEQAVYMILEAIGEDPEREGLRDTPKRVARMYAEVFSGLHEDPSRHLNVQFSEEHEEMVIVKDIPVYSMCEHHLVPFYGKAHVAYIPRKGKITGLSKFARVVEGFARRPQLQERLTSQIADAIMGELTPLGVLVVIEAEHMCMTMRGVKKAGSQTLTSAVRGIFKTNPITRSEAFSLIQGHKR

SEQ ID NO: 7506 - protein, 188 aa, Desulfosporosinus sp.
  misc_feature (1)..(188): tr|A0A101WM45|A0A101WM45_9FIRM GTP cyclohydrolase 1 OS= Desulfosporosinus sp. BRH_c37 OX=1734396 GN=folE PE=3 S V=1
MDLEKIEQAVHMILEAIGEDPDREGLRDTPKRVARMYAEVFTGLHEDPSQHLKVQFSEIHEEMVIVKDIPVYSMCEHHLVPFYGKAHVAYIPRKGKISGLSKFARVVEGFARRPQLQERLTSQVADAIMGELSPLGVLVVIEAEHMCMTMRGVKKAGSQTLTSAVRGIFKTNPLTRSEAFSLIQSQRR

SEQ ID NO: 7507 - protein, 190 aa, Desulfosporosinus youngiae
  misc_feature (1)..(190): tr|H5XVK6|H5XVK6_9FIRM GTP cyclohydrolase 1 OS=Desulfos porosinus youngiae DSM 17734 OX=768710 GN=folE PE=3 SV= 1
MGMDLEKIEQAVYMILEAIGEDPEREGLRDTPKRVARMYDEVFHGLHEDPGQHLNVQFSEEHEEMVIVKDIPVYSMCEHHLVPFYGKAHIAYIPRKGKITGLSKFARVIEGFARRPQLQERLTSEVADAIMNKLTPLGVLVVIEAEHMCMTMRGVKKAGSQTLTSAVRGIFKTNPITRSEAFSLIQGHSR

SEQ ID NO: 7508 - protein, 251 aa, Desulfotalea psychrophila
  misc_feature (1)..(251): sp|Q6AMT5|GCH4_DESPS GTP cyclohydrolase FolE2 OS=Desulf otalea psychrophila (strain LSv54 / DSM 12343) OX=17743 9 GN=folE2 PE=3 SV=1
MSKKQSTICQKVGIADLEIPIILGQKDGKLQHSIASCKITATIKETLKGDISGEVQRLLPSFTKEIEPKSWHRLLEEFKENIGVEKITLSLSCPFFVSKKAPVSELRGLMEYNCTFSASTGESGITTSLYVPVTTLCPCSKEISDGGAHNQRAEAIFRVEMKEHLWLEDLIQLVEESASCQVYSVLKRPDEKYVTEKAFDNPMFVEDVVRKIAVRAGEHPLIHAFSISVESFESIHKHNAYAYVNSEDLNL

SEQ ID NO: 7509 - protein, 255 aa, Desulfotignum phosphitoxidans
  misc_feature (1)..(255): tr|S0G6Z1|S0G6Z1_9DELT GTP cyclohydrolase FolE2 OS=Desu lfotignum phosphitoxidans DSM 13687 OX=1286635 GN=folE PE=3 SV=1
MIDTQNQPDYRKIPINKVGIKGLKYPVKVLDKTRGTQSTVADISMYVDLPHQCKGTHMSRFVEILHQSRTRISLESLTTILADMKKILGAQSSHIEITFPYFIAKQSPSAGVSGLMDYTCSIIGSSNSGHPTDIILKVAVPVTSVCPCSKAISDCGAHNQRGEVLVSTRFKKLIWIEDIVAIVERSASCDIFSVLKREDEKYVTEKAYNNPKFVEDLARDVAKILMADPNITWFSVSAENFESIHNHSAYAFIEK

SEQ ID NO: 7510 - protein, 191 aa, Desulfotomaculum aeronauticum
  misc_feature (1)..(191): tr|A0A1M6NEU7|A0A1M6NEU7_9FIRM GTP cyclohydrolase 1 OS= Desulfotomaculum aeronauticum DSM 10349 OX=1121421 GN=f olE PE=3 SV=1
MTIFDLPKIEQAVRMILEAIGEDPEREGLVETPARVAKMYQEIFAGLQEDPEEHLGKIFAEDHEEMVLVKDIRLFSMCEHHLIPFIGKAHVCYIPRNGKVTGLSKLARLVNGYARRPQLQERLTKQIADAIMKKLNPYGVMVVVEAEHLCMSMRGVRSPGATTVTSAVRGIFKKHESSRAEALRLITKGEL

SEQ ID NO: 7511 - protein, 180 aa, Desulfotomaculum aquiferis
  misc_feature (1)..(180): tr|A0A4Q2WKL4|A0A4Q2WKL4_9FIRM GTP cyclohydrolase 1 OS= Desulfotomaculum aquiferis OX=1397668 GN=folE PE=3 SV=1
MFDLPKIEKAVKMILEAIGEDPNREGLVETPTRVAKMYQEIFAGIGENPAAHLDKTFSEEHEEMVLVKDIPLFSMCEHHLVPFLGKAHVCYIPRNGKVTGLSKLARLVEGFARRPQLQERLTKQIADAVMDRLNPYGVVVVVEAEHLCMSMRGVRAPGAHTVTSAVRGIFLKNEASRPRP

SEQ ID NO: 7512 - protein, 186 aa, Desulfotomaculum arcticum
  misc_feature (1)..(186): tr|A0A1I2S627|A0A1I2S627_9FIRM GTP cyclohydrolase 1 OS= Desulfotomaculum arcticum DSM 17038 OX=1121424 GN=folE PE=3 SV=1
MVDREKVEVAVKMILEAIGEDPEREGLRETPARVARMYSEIFCGLWEDPQTHLSKMFSEEHEEMVLVKDIPIYSMCEHHLLPFYGKAHVAYIPRKGNVTGLSKLARVVEGFAKRPQLQERLTSQIADTIMKKLNPHGVIVVIEAEHMCMTLRGVKKPGSKTITSAVRGQFQRSEATRAEAFSLIGK

SEQ ID NO: 7513 - protein, 186 aa, Desulfotomaculum copahuensis
  misc_feature (1)..(186): tr|A0A1B7LE22|A0A1B7LE22_9FIRM GTP cyclohydrolase 1 OS= Desulfotomaculum copahuensis OX=1838280 GN=folE PE=3 SV =1
MIDTAKIENAVRMILEAIGEDPEREGLLETPARVARMYGEIFCGLWQDPEVHLQKVFSEEHEEMIIVKDIPMYSMCEHHLLPFFGKAHVAYIPRKGNVTGLSKLARVVEGYAKRPQLQERLTKQIADSIMHRLNPQGVLVVVEAEHMCMTLRGVRKPGSKTITSAVRGSFQRNEATRAEAMSLIKG

SEQ ID NO: 7514 - protein, 189 aa, Desulfotomaculum ferrireducens
  misc_feature (1)..(189): tr|A0A1S6J0L4|A0A1S6J0L4_9FIRM GTP cyclohydrolase 1 OS= Desulfotomaculum ferrireducens OX=1833852 GN=folE PE=3 SV=1
MFDLPKIEQAVRMILEAIGEDPDREGLVETPARVAKMYQEVFAGLQEDPQEHLSKIFSEEHEEMVLVKDIRLYSMCEHHLIPFIGKAHVCYIPRNGKVTGLSKLARLVNGYARRPQLQERLTKQIADAIMNRLNPYGVMVVVEAEHLCMSMRGVRSPGATTVTSAVRGIFKKNESSRAEALRLITKGKL

SEQ ID NO: 7515 - protein, 188 aa, Desulfotomaculum hydrothermale
  misc_feature (1)..(188): tr|K8DX41|K8DX41_9FIRM GTP cyclohydrolase 1 OS=Desulfot omaculum hydrothermale Lam5 = DSM 18033 OX=1121428 GN=f olE PE=3 SV=1
MFDLPKIEQAVRMILEAIGEDPAREGLVETPARVAKMYQEIFAGLTEDPMIHLDKTFSEEHEEMVLVKDIRLFSMCEHHLIPFIGKAHVCYIPRNGNVTGLSKLARLVNGYARRPQLQERLTKQIADAIMTRLNPYGVLVVVEAEHLCMSMRGVKAPGAKTVTSAVRGIFKKNDACRAEALSLIMKSQ

SEQ ID NO: 7516 - protein, 187 aa, Desulfotomaculum nigrificans
  misc_feature (1)..(187): tr|F6B587|F6B587_DESCC GTP cyclohydrolase 1 OS=Desulfot omaculum nigrificans (strain DSM 14880 / VKM B-2319 / C O-1-SRB) OX=868595 GN=folE PE=3 SV=1
MFDLHKIEQAVKMILEAIGEDPQREGLLETPARVAKMYQEIFMGLEEDPSEHLSKTFSEEHEEMVLVKDIPLFSMCEHHLIPFIGKAHVCYIPRNGNVTGLSKLARLVNGYARRPQLQERLTKQIADAIMTKLNPYGVVVVVEAEHLCMSMRGVRVPGAHTVTSAVRGLFKKNDASRAEAMSLILKS

SEQ ID NO: 7517 - protein, 188 aa, Desulfotomaculum profundi
  misc_feature (1)..(188): tr|A0A2C6ME54|A0A2C6ME54_9FIRM GTP cyclohydrolase 1 OS= Desulfotomaculum profundi OX=1383067 GN=folE PE=3 SV=1
MFDLAKIEQAVKMILQAIGEDPDREGLVETPSRVAKMYQEIFAGLDEDPEEHLDKTFSEEHEEMVLVKDIRLFSMCEHHLIPFIGKAHVCYIPRNGNVTGLSKLARLVNGYARRPQLQERLTKQIADAIMSRLNPYGVLVVVEAEHLCMSMRGVRAPGAKTVTSAVRGIFKKNEASRAEALSLILKNE

SEQ ID NO: 7518 - protein, 188 aa, Desulfotomaculum putei
  misc_feature (1)..(188): tr|A0A1M4T0W5|A0A1M4T0W5_9FIRM GTP cyclohydrolase 1 OS= Desulfotomaculum putei DSM 12395 OX=1121429 GN=folE PE= 3 SV=1
MFDLPKIEQAVKMILEAIGEDPAREGLVETPARVAKMYQEIFAGLEEDPEAHLDKTFSEEHEEMVLVKDIRLFSMCEHHLIPFIGKAHVCYIPRNGNVTGLSKLARLVNGYARRPQLQERLTKQIADAIMSRLNPYGVLVVVEAEHLCMSMRGVRAPGAKTVTSAVRGIFKKNEASRAEAISLIMKSE

SEQ ID NO: 7519 - protein, 187 aa, Desulfotomaculum reducens
  misc_feature (1)..(187): sp|A4J5D0|GCH1_DESRM GTP cyclohydrolase 1 OS=Desulfotom aculum reducens (strain MI-1) OX=349161 GN=folE PE=3 SV =1
MFDLPKIEKAVKMILEAIGEDPNREGLEETPARVARMYQEIFAGLGEDPEEHLGKTFSEEHEEMVIVKDIRLFSMCEHHLIPFIGKAHVCYIPRNGNVTGLSKLARLVNGYARRPQLQERLTKQIADAIMKRLNPYGVVVVVEAEHLCMSMRGVRSPGARTVTSAVRGIFKKNEASRAEAMSLIMKS

SEQ ID NO: 7520 - protein, 188 aa, Desulfotomaculum ruminis
  misc_feature (1)..(188): tr|F6DLB7|F6DLB7_DESRL GTP cyclohydrolase 1 OS=Desulfot omaculum ruminis (strain ATCC 23193 / DSM 2154 / NCIMB 8452 / DL) OX=696281 GN=folE PE=3 SV=1
MFDKPKIEQAVRMILEAIGEDPDREGLLETPARVARMYEEIFAGLSQDPREHLGKTFSEEHEEMVLVKDIPLYSVCEHHLIPFIGKAHVCYIPRHGNVTGLSKLARLVEGYARRPQLQERLTKQIADAVMEELRPYGVAVVVQAEHLCMSMRGVRAPGAHTVTSAVRGIFQKNEASRAEAMSLILKSE

SEQ ID NO: 7521 - protein, 186 aa, Desulfotomaculum sp.
  misc_feature (1)..(186): tr|A0A3C2C6J6|A0A3C2C6J6_9FIRM GTP cyclohydrolase 1 OS= Desulfotomaculum sp. OX=41211 GN=folE PE=3 SV=1
MVDIPKIEKAIRMVLEAVGEDPDRPGLKGTPGRVAKMYKEIFCGLREDPRKHLEKIFMEDHKEMVLVKDIPMYSICEHHLLPFFGMAHVAYIPREGRVTGLSKLARVVEGYSKRPQLQERLTTQIADAIVSELNPQGVLVVVEAEHMCMTLRGVRKPGSKTVTSAVRGLFERSEATRAEALALIKE

SEQ ID NO: 7522 - protein, 187 aa, Desulfotomaculum sp.; identical to SEQ ID NO: 7466
  misc_feature (1)..(187): tr|A0A101G875|A0A101G875_9FIRM GTP cyclohydrolase 1 OS= Desulfotomaculum sp. 46_296 OX=1635262 GN=folE PE=3 SV= 1

SEQ ID NO: 7523 - protein, 256 aa, Desulfovibrio alaskensis
  misc_feature (1)..(256): sp|Q30X45|GCH4_DESAG GTP cyclohydrolase FolE2 OS=Desulf ovibrio alaskensis (strain G20) OX=207559 GN=folE2 PE=3 SV=1
MEDVQNSPSQVPLAIDTVGVKSLHLPLIVSDRANGHQHTVAVVDIGVELPARFKGTHMSRFVEALAHWDEHLNYRTIKSLLEDVKTRLQARKAHVHFRFPYFIAKKAPATGSPGLVSYNCCLTGELADGRPAMMLDVEVPVMTVCPCSKAISDEGAHSQRALVRISLRMKEFCWLEEFIELAERSASSPVYTLLKREDEKFVTEDAFAHPTFVEDVVRAAAQQLEAHPSVSWFRVEVESIESIHNHSAFARIEKHK

SEQ ID NO: 7524 - protein, 260 aa, Desulfovibrio alkalitolerans
  misc_feature (1)..(260): tr|S7UM30|S7UM30_9DELT GTP cyclohydrolase FolE2 OS=Desu lfovibrio alkalitolerans DSM 16529 OX=1121439 GN=folE2 PE=3 SV=1
MQDIQSGPSDVALAIDRVGVKGLKAPLTVRDRARGEQHTVASVDLAVDLPAEFKGTHMSRFVEALGQWSGGLDFASCKRLLADLRERLQASSAHARFAFPYFVTRAAPVSGSVGPMHFDCLLDGELSGDKLVFTLRVEVPVMTVCPCSKAISLEGAHSQRALVRIACRSKSFFWIEELVEIAEAAGSSRVYSLLKREDEKFVTEASFANPCFVEDVVRAAAKRLAEDGRFTWFRVECESQESIHNHAAYASIQLPGPAGP

SEQ ID NO: 7525 - protein, 260 aa, Desulfovibrio bizertensis
  misc_feature (1)..(260): tr|A0A1T4W6K3|A0A1T4W6K3_9DELT GTP cyclohydrolase FolE2 OS=Desulfovibrio bizertensis DSM 18034 OX=1121442 GN=f olE2 PE=3 SV=1
MQDVQNGPAKVAMPIDRVGVKELRTPILVRNRDHKENVQHTVASVDLSVDLPAEFKGTHMSRFVEALEAWDEELDYKSFKRLLGNVRERLQAKRAHLTFRFPYFLERTAPSTGSKGLMDYQCELTGVLEGDQLSFVLGVEVPVMTVCPCSLAICHGGAHSQRAIVTIRTRSTGLVWIEDLIAVAEKAGSSPVHSVLKREDERDVVDSAFANPAFVEDVVRSAAHSLQKMEQVSWFRVDVESQESIHNHSAYASIEMENTH

SEQ ID NO: 7526 - protein, 258 aa, Desulfovibrio carbinolicus
  misc_feature (1)..(258): tr|A0A4V0YRD8|A0A4V0YRD8_9DELT GTP cyclohydrolase FolE2 OS=Desulfovibrio carbinolicus OX=296842 GN=folE2 PE=3 SV=1
MQDVQSGPPEVPIDLDRVGIKNFRLPLLVRDRTRGRQHTVADVELSVDLPAQFKGTHMSRFVEALSGFAGELDLVTFKALLEDVRARLEAQNAHMTLRFPYFLSKASPATGASALVDYACLVSGEFEGDKFRLTLGVDVPVMTVCPCSLAISDQGAHSQRAVISIRCRFSGLLWLEELIETAEAAGSSPVYALLKREDEKHVTEQAFANPTFVEDVARQVARSLREHPKVTWFRVEVESFESIHNHSAFAGIEGRNAR

SEQ ID NO: 7527 - protein, 263 aa, Desulfovibrio carbinoliphilus
  misc_feature (1)..(263): tr|G7QCL7|G7QCL7_9DELT GTP cyclohydrolase FolE2 OS=Desu lfovibrio carbinoliphilus subsp. oakridgensis OX=694327 GN=folE2 PE=3 SV=1
MRDIQSGPPDVAIAVDRVGIKNFRLPLSVRDRASKGRQHTVAEVELSVDLPARFKGTHMSRFVEALSGFTGELDLVSFRALLSDVRARLEAENAHMTLTFPYFLAKSSPSSGAASLMDYVCQVSGEFEGEKFRQTLGVEVPVMTVCPCSLAISDQGAHSQRAVVSIRCRFSGFVWLEELIEMAEAAGSSPVYALLKREDEKHVTEQAFANPTFVEDVARRVASALAAHPKVTWYRVEVESFESIHNHSAFAGIEGRNGPPPAA

SEQ ID NO: 7528 - protein, 260 aa, Desulfovibrio desulfuricans
  misc_feature (1)..(260): sp|B8J1Q5|GCH4_DESDA GTP cyclohydrolase FolE2 OS=Desulf ovibrio desulfuricans (strain ATCC 27774 / DSM 6949) OX =525146 GN=folE2 PE=3 SV=1
MEDVQSHAPQIPLNIDRVGVRELRLPLLVRDRTRGTQQTVASVDLGVDLPSEFKGTHMSRFVEALEQWNDEISYQSVRRLLQDIRQRLEARRAYARFCFPYFISKAAPASGSPALVSYQCRLTGELDDAGQHFILEVDVPVMTVCPCSKAISNEGAHSQRAMVRMRLRMKAFSWLEDFIDIAEASGSSAVYTLLKREDEKYVTEHAFAHPTFVEDVVRNVAQRLSEHGQVEWFSVEVESMESIHNHNAFARIERHISDRS

SEQ ID NO: 7529 - protein, 259 aa, Desulfovibrio desulfuricans
  misc_feature (1)..(259): tr|F0JCS3|F0JCS3_DESDE GTP cyclohydrolase FolE2 OS=Desu lfovibrio desulfuricans ND132 OX=641491 GN=folE2 PE=3 S V=1
MIFMEDVQQSQATIAMPIDRVGVKGLRLPIVVRDRESGVQHTVAQVSMSVDLPAEFKGTHMSRFVEALEHWEGTLDYHSFLTLLDDIVDRLQARSAHLRFVFPYFLRRRSPVSKAGGMMDYTCRVDGYLKDGKLTFTLGADVPVMTVCPCSKAISDEGAHSQRAEVRILTRFEGFLWLEDLIEIGERAGSCQVYSLLKREDEKYVTETAFAHPTFVEDVVREAAKGLDEHPKVTWYKVEVESFESIHNHSAFAVIESDG

SEQ ID NO: 7530 - protein, 267 aa, Desulfovibrio fairfieldensis
  misc_feature (1)..(267): tr|A0A0X8JHK8|A0A0X8JHK8_9DELT GTP cyclohydrolase FolE2 OS=Desulfovibrio fairfieldensis OX=44742 GN=folE2 PE=3 SV=1
MEDVQSHAPTVPLNIDRVGVRELRLPLLVRDRARGSQQTVASVDLGVDLPSAFKGTHMSRFVEALEEWNEEISYQSVRRLLENIKERLGARRAWARFSFPYFIRKAAPASGSPGTVAYACRLTGELDENGQSFLLDLDVPVMTVCPCSKAISREGAHSQRAIVRMRVRMTGFSWLEEFIEMAEESGSSAVYTLLKREDEKFVTEHAFAAPAFVEDVVRNVAQRLSRHTHVDWFSVEVESMESIHNHNAFARIERSLAASGARKGARP

SEQ ID NO: 7531 - protein, 255 aa, Desulfovibrio ferrireducens
  misc_feature (1)..(255): tr|A0A1G9J884|A0A1G9J884_9DELT GTP cyclohydrolase FolE2 OS=Desulfovibrio ferrireducens OX=246191 GN=folE2 PE=3 SV=1
MEDVQNGPSQVAMSIDRVGVRDLTLPLVVRDRASKSQHTMAKVTLSVDLPAHFKGTHMSRFIEALEDWSEELDYKSFFNLLNDILKRLEAKSAHAKLCFPYCLKKTSPVSGRKGFMSYDCSVEGELIGGHLEFTLGVKVPVMTVCPCSKAISDEGAHSQRAVIHIKTRSKGFVWIEDLIEIAEASGSSQVYSLLKREDEKYVTEDSFANPTFVEDVVRNVAKGLEKQPKVIWYKVDVESFESIHNHCAFASIEKK

SEQ ID NO: 7532 - protein, 260 aa, Desulfovibrio ferrophilus
  misc_feature (1)..(260): tr|A0A2Z6AXI7|A0A2Z6AXI7_9DELT GTP cyclohydrolase FolE2 OS=Desulfovibrio ferrophilus OX=241368 GN=folE2 PE=3 S V=1
MKDVQSGPADVALPIDRVGVKNLSLPVRVRTRDDKEEVRHTVAEVDLYVDLPAHFKGTHMSRFIEALEGWSEALDYVSFKTLLQSVCDRLEARRAHIRFRFPYFLTKKAPASGSPGTMDYKVTLTGELEDDQLTWGLGVDVPVMTVCPCSLAICDGGAHSQRAIVRVLTRHTGFLWIEDLIAIAEAAGSSPVYALLKREDEKVVTDDAFANPAFVEDVVRAAARALSDHPQIDWYRVEVESQESIHNHNAYASIESENEL

SEQ ID NO: 7533 - protein, 262 aa, Desulfovibrio fructosivorans
  misc_feature (1)..(262): tr|E1JZE8|E1JZE8_DESFR GTP cyclohydrolase FolE2 OS=Desu lfovibrio fructosivorans JJ OX=596151 GN=folE2 PE=3 SV= 1
MRDVQSGPPDVAIAVDRVGIKDFKLPLVVRDRAKGRQHTVADVELSVDLPARFKGTHMSRFVEALSGFAGELDLVSFRTLLTDVRSRLEAENAHLTLRFPYFLAKASPASGAISLMDYACQLSGEFVGDKFRQTLTVSVPVMTVCPCSLAISDQGAHSQRALVTLRCRFSGFVWLEELIELAEAAGSSPVYALLKREDEKHVTEQAFANPTFVEDVARRAASALAAHPKVTWYQVEVESFESIHNHSAFAGIEGVNAPGNGA

SEQ ID NO: 7534 - protein, 267 aa, Desulfovibrio gigas
  misc_feature (1)..(267): tr|T2GBW1|T2GBW1_DESGG GTP cyclohydrolase FolE2 OS=Desu lfovibrio gigas (strain ATCC 19364 / DSM 1382 / NCIMB 9 332 / VKM B-1759) OX=1121448 GN=folE2 PE=3 SV=1
MLEDTQNQAAPWPIFIDAVGVCGLRLPVLVADNARAPQLVTATLSLSASLAHDAKGSHMSRFVEVLEEARTQVFSPQRLAALLDELRRRLQARQAALDMAFPFFLERRAPHTGAAALMDYACSYHVRSGDADPQFTLAVEAPVAALCPCSKAISDYGAHNQRGRIRMEITPRRAAEGGWDVPGIEECIAVAEGAASSPVYPLLKRPDERVVTMRMYENPVFVEDMARHTAAALMADERVQAFRVHAETLESIHNHNAFARIAWTRDA

SEQ ID NO: 7535 - protein, 255 aa, Desulfovibrio gilichinskyi
  misc_feature (1)..(255): tr|A0A1X7DNU1|A0A1X7DNU1_9DELT GTP cyclohydrolase FolE2 OS=Desulfovibrio gilichinskyi OX=1519643 GN=folE2 PE=3 SV=1
MEDVQNSPSQVAMSIDRVGVRDLTLPLLVKDRAAKSQNTMAKVALSVDLPAHFKGTHMSRFIEALEDWSEELDYKSFFNLLSDILKRLEAKSAHAELCFPFCLQKTSPVSGRKGIMSYDCSVEGELIGGQLEFTLGVKVPVMTVCPCSKAISDEGAHSQRAVVHIKTRSKGFVWIEDLIEIAERSGSSQVYSLLKREDEKYVTEKSFSNPTFVEDVVRNAANGLEKQPKITWYKVDVESFESIHNHCAFASIEKK

SEQ ID NO: 7536 - protein, 277 aa, Desulfovibrio gracilis
  misc_feature (1)..(277): tr|A0A1T4WDQ8|A0A1T4WDQ8_9DELT GTP cyclohydrolase FolE2 OS=Desulfovibrio gracilis DSM 16080 OX=1121449 GN=folE 2 PE=3 SV=1
MSKTQRGADHVRPADAKAGMEDVQNGRASIAMPIDRVGVKDIRLPLLVRDRVQGSQHTVASVDLSVDLPAHFKGTHMSRFVEALEGWSEELDYASFKRLLANITERLNARRAYAELRFPFFLHRSAPASGGKSMMGYDCSLVGEYEDGELVFTLGVEVPVMTVCPCSLAISEQGAHSQRAIVRVLARFTGLLWLEDLIEICESAGSSPVYTLLKRADEKYVTESAFANPAFVEDVVRSVARGLSEHPKVSWFRASVESQESIHAHSAYAIIERDLRD

SEQ ID NO: 7537 - protein, 255 aa, Desulfovibrio hydrothermalis
  misc_feature (1)..(255): tr|L0RE68|L0RE68_9DELT GTP cyclohydrolase FolE2 OS=Desu lfovibrio hydrothermalis AM13 = DSM 14728 OX=1121451 GN =folE PE=3 SV=1
MEDIQNSPAKVAMSIDRVGVRDLTLPLVVRDRESGSQHTMAKVALSVDLPAHFKGTHMSRFVEALEDWSEELDYKSFFNLLSDILRRLEARSAHAKLSFPYCLKKTSPVSGRKGFMSYDCSVEGELIGDKLEFTLGVEVPVMTVCPCSKAISKEGAHSQRAVITIKSKSKGFVWIEDLVEIAEQAGSCEVYSLLKREDEKYVTEKSFSNPTFVEDVVRNVAMGLENHSKILWYKVDVESFESIHNHCAFASIAKK

SEQ ID NO: 7538 - protein, 276 aa, Desulfovibrio legallii
  misc_feature (1)..(276): tr|A0A1G7PJS6|A0A1G7PJS6_9DELT GTP cyclohydrolase FolE2 OS=Desulfovibrio legallii OX=571438 GN=folE2 PE=3 SV=1
MMEDVQSHAPQVALNIDRVGVRDLHLPLLVRDRSRGSQQTVARVDLGVDLPSSFKGTHMSRFVEALEAWNDEISYQSVRRLLLTIKERLGARRAFACFSFPYFISKKAPVSGSPATVAYACRLTGELDDSGQSFVLEADVPVMTVCPCSKAISKEGAHSQRALVRMRLRMRAFSWLEDFIDIAEASASSAVYTLLKREDEKFVTENAFAHPAFVEDVVRNVAQRLLEHGQVEQFSVEVESMESIHNHNAFARIERDLSAVRRPYATTEQSDGPAAT

SEQ ID NO: 7539 - protein, 260 aa, Desulfovibrio litoralis
  misc_feature (1)..(260): tr|A0A1M7TGB9|A0A1M7TGB9_9DELT GTP cyclohydrolase FolE2 OS=Desulfovibrio litoralis DSM 11393 OX=1121455 GN=fol E2 PE=3 SV=1
MQDIQNSPSSVPIAIDRVGIKSLRVPIWIKDRSKGRQHSVATINLGADLPACKKGTHMSRLVEVIENWEEELDYSTLKKLLENIQQRLQAHKAYVSFMFPYFMSKLAPATQISGLMGYDCVLTGELTEHKKPVFTLTVIVPVMTVCPCSKAISDEGAHSQRALATVSVKQKGFAWIEEFIEIIESSASSQVYSILKRADEKTVTENAFASPCFVEDVVRNIALKLAEHKHVSWYKVEVESFESIHAHNAYAYIESENLSE

SEQ ID NO: 7540 - protein, 260 aa, Desulfovibrio magneticus
  misc_feature (1)..(260): tr|K6GLP9|K6GLP9_9DELT GTP cyclohydrolase FolE2 OS=Desu lfovibrio magneticus str. Maddingley MBC34 OX=1206767 G N=folE2 PE=3 SV=1
MAMQDVQSGPPEVPIDLDRVGIKNFRLPLLVRDRTRGRQHTVADVELSVDLPAQFKGTHMSRFVEALSGFAGELDLVTFKALLEDVRARLEAQNAHMTLRFPYFLSKASPATGASALMDYACLVSGEFEGDKFRLTLGVDVPVMTVCPCSLAISDQGAHSQRAVISIRCRFSGLLWLEELIETAEAAGSSPVFALLKREDEKHVTEQAFANPTFVEDVARQVARSLREHPKVTWFRVEVESFESIHNHSAFAGIEGRNAR

SEQ ID NO: 7541 - protein, 304 aa, Desulfovibrio magneticus
  misc_feature (1)..(304): tr|C4XJB5|C4XJB5_DESMR GTP cyclohydrolase FolE2 OS=Desu lfovibrio magneticus (strain ATCC 700980 / DSM 13731 / RS-1) OX=573370 GN=folE2 PE=3 SV=1
MPAGRAGRPAAGFTGASARRRKRLPRARRHGGPGAGHPSRRHAIMAMQDVQSGPPEVPIDLDRVGIKNFRLPLLVRDRTRGRQHTVADVELSVDLPAQFKGTHMSRFVEALSGFAGELDLVTFKALLEDVRARLEAQNAHMTLRFPYFLSKASPATGAAALMDYACLVSGEFEGDKFRLTLGVDVPVMTVCPCSLAISDQGAHSQRAVISIRCRFSGLLWLEELIETAEAAGSSPVYALLKREDEKHVTEQAFANPTFVEDVARQVARSLREHPKVTWFRVEVESFESIHNHSAFAGIEGRNAR

SEQ ID NO: 7542 - protein, 263 aa, Desulfovibrio mexicanus
  misc_feature (1)..(263): tr|A0A238Z2X7|A0A238Z2X7_9DELT GTP cyclohydrolase FolE2 OS=Desulfovibrio mexicanus OX=147047 GN=folE2 PE=3 SV= 1
MAAPMEDVQKHPAPVQLPIDRVGVKDLHLPLVVRDRQSGTQHTVARVDLAVDLPAAFKGTHMSRFVEALENWEEELSRASLEKLLSDISVRLEARRAYARFDFPYFLRQSSPKSGAKCLMGYPCSVIGAWENGRLDFTLGVDVPVMTVCPCSKAISDEGAHSQRTSVRINAKFKGFLWLEDLIEIAERSGSSPVYTLLKREDEKFVTEAAFANPAFVEDVVRAAAKGLSEHPRITWYKVEVESHESIHGHSAQASIESSAKQG

SEQ ID NO: 7543 - protein, 263 aa, Desulfovibrio piger
  misc_feature (1)..(263): tr|A0A1K1LHV2|A0A1K1LHV2_9DELT GTP cyclohydrolase FolE2 OS=Desulfovibrio piger OX=901 GN=folE2 PE=3 SV=1
MEDVQRHAPKVPINIDRVGIRGITVPLLVRDRAQGSRQTVARVDLGVDLPASFKGTHMSRFIEALEGWNDEINYQSVRRLLATVKERLGARRSYVRFCFPYFVHKPAPSSGIRSIISYECRLTGELDEKGQSFLLEVDVPVMTVCPCSKAISREGAHSQRTMIRLAVRMSGFSWIEEFIEMAEASGSSAVYTLLKREDEKYVTEHAFAQPTFVEDVVRNVAQRLTEHEHVRWFRVEVESMESIHSHNAFACIERDLRTQDGQA

SEQ ID NO: 7544 - protein, 263 aa, Desulfovibrio piger
  misc_feature (1)..(263): tr|B6WTX4|B6WTX4_9DELT GTP cyclohydrolase FolE2 OS=Desu lfovibrio piger ATCC 29098 OX=411464 GN=folE2 PE=3 SV=1
MEDVQRHAPKVPINIDRVGIRGITVPLLVRDRAQGSRQTVARVDLGVDLPASFKGTHMSRFIEALEEWNDEINYQSVRRLLATVKERLEARRSYVRFCFPYFVHKPAPSSGIKSIISYECRLTGELDEKGQSFLLEVDVPVMTVCPCSKAISREGAHSQRTMIHLAVRMSGFSWIEEFIEMAEASGSSAVYTLLKREDEKYVTEHAFAQPTFVEDVVRNVAQRLTEHEHVRWFRVEVESMESIHSHNAFACIERDLRTQDEQA

SEQ ID NO: 7545 - protein, 256 aa, Desulfovibrio salexigens
  misc_feature (1)..(256): sp|C6C0U6|GCH4_DESAD GTP cyclohydrolase FolE2 OS=Desulf ovibrio salexigens (strain ATCC 14822 / DSM 2638 / NCIB 8403 / VKM B-1763) OX=526222 GN=folE2 PE=3 SV=1
MEDVQNSPAKVAMSIDRVGVRDLTLPLVVRDRESGSQSTMAKVALSVDLPAHFKGTHMSRFVEALEDWSEELDYQSFYNLLSDILRRLEAERAHAELSFPYCLQKKSPVSGRKGIMSYECTVEGEMVGDNLEFTLGVKVPVMTVCPCSKAISDEGAHSQRAVVHIRTKSKGFVWIEDLVEIAEASGSCEVFSLLKREDEKHVTEKSFSNPTFVEDVVRNAAMGLEKHSKILWYQVDVESFESIHNHCAFASIAKPK

SEQ ID NO: 7546 - protein, 263 aa, Desulfovibrio sp.; identical to SEQ ID NO: 7527
  misc_feature (1)..(263): tr|I2Q2Y5|I2Q2Y5_9DELT GTP cyclohydrolase FolE2 OS=Desu lfovibrio sp. U5L OX=596152 GN=folE2 PE=3 SV=1

SEQ ID NO: 7547 - protein, 262 aa, Desulfovibrio sp.
  misc_feature (1)..(262): tr|A0A231P2F6|A0A231P2F6_9DELT GTP cyclohydrolase FolE2 OS=Desulfovibrio sp. MES5 OX=1899016 GN=folE2 PE=3 SV= 1
MEDVQSHAPQVALNINRVGVRELRLPLLVRDRTKGTQQTVASVDLGVDLPSAFKGTHMSRFVEALEQWNAEISYQSVRRLLLDIKQRLEARRAYARFCFPYFIKKSAPASGIPALVSYQCRLTGELDDEGQHFCLEVDVPVMTVCPCSKAISDEGAHSQRAMVRMNLRMKVFSWLEDFIDIAEASGSSAVYTLLKREDEKFVTEYAFAHPTFVEDVVRNVAQRLSEHGQVEWFSVEVESMESIHNHNAFARIERHMSDKKPA

SEQ ID NO: 7548 - protein, 259 aa, Desulfovibrio vulgaris
  misc_feature (1)..(259): sp|B8DLK8|GCH4_DESVM GTP cyclohydrolase FolE2 OS=Desulf ovibrio vulgaris (strain Miyazaki F / DSM 19637) OX=883 GN=folE2 PE=3 SV=1
MEDVQNSPAQVAMPIDRVGVKNLKLPLVVRDRAQGSQHTVATVDIGVDLPAEFKGTHMSRFVEALENWSEELDYNSMKRLLEDVKERLHARKAYALFRFPYFVRKGAPATASSGLVWYECRLTGELGDGKPSFLLELEVPVMTVCPCSKAISDEGAHSQRAVVRMSIRMTGFSWMEEFIDLAEAAGSSPVYTLLKREDEKFVTEDAFAHPTFVEDVVRAAAQRLEGHPHVAWFRVEVESFESIHCHNAFASIEREVRKG

SEQ ID NO: 7549 - protein, 266 aa, Desulfovibrio vulgaris
  misc_feature (1)..(266): tr|A0A0E0T5Z5|A0A0E0T5Z5_DESVR GTP cyclohydrolase FolE2 OS=Desulfovibrio vulgaris (strain RCH1) OX=573059 GN=f olE2 PE=3 SV=1
MEMEDVQNSPAQVAMPIDRVGVKNLQLPLVVSDRAQGRQHTVATVDIGVDLPAHFKGTHMSRFVEALENWTEELDYASMKRLLEDVKTRLEARKAYVLFRFPYFIRKKAPATGSPGLVCYQCRLTGELEEGRPSFLLEVEVPVMTVCPCSKAISDEGAHSQRAVVRIAVRMTRFSWLEEFIDLAEVSGSSPVYTLLKREDEKYVTEDAFAHPTFVEDVVRAAAQRLERHPQISWFRVEVESFESIHCHNAFASIERTITPETQPGS

SEQ ID NO: 7550 - protein, 267 aa, Desulfovibrionaceae bacterium
  misc_feature (1)..(267): tr|A0A1J4SM26|A0A1J4SM26_9DELT GTP cyclohydrolase FolE2 OS=Desulfovibrionaceae bacterium CG1_02_65_16 OX=18051 30 GN=folE2 PE=3 SV=1
MAASASSTMEDVQKHPAPVPMPIDRVGVKDLHLPLVVRDRESGTQHTVARVDLAVDLPASFKGTHMSRFVEALENWGEELSRASLEKLLSDICRRLEARRAYARFDFPYFLRQTSPKSRAKGVMGYPCSVVGAYENGRLDFTLGVDVPVMTVCPCSKAISDEGAHSQRTSVRIKAKFKGFLWLEDLIEIAERSGSSPVYTLLKREDEKFVTESSFANPAFVEDVVRAAAKGLSEHKRITWFHVEVESFESIHGHSAQASIESFAEQG

SEQ ID NO: 7551 - protein, 273 aa, Desulfovibrionaceae bacterium
  misc_feature (1)..(273): tr|A0A316N4Y4|A0A316N4Y4_9DELT GTP cyclohydrolase FolE2 OS=Desulfovibrionaceae bacterium OX=2049043 GN=folE2 P E=3 SV=1
MHKLQDVQNSPSDLAVDIDRVGIKEFRLPLVVRDRDTGLQHTVATVDLGVDLPAAFKGTHMSRFVEALEAWREHAPEGPVPALDYPSMRGLLEDVRLRLDARRAYVRFRFPYFRAKAAPATGSKAPVAYDCTMTGEMTKGEHPVFTLEADVPVTTVCPCSRAISRAGAHGQRALVKLAVRMTRFEWLEEFIDIAESSGSAQVYSLLKRQDEKFVTEQAYDDACFVEDVVRRVAEKLDRHVHVSWFRVEVESFESIHCHNAFAVIERERGPRRC

SEQ ID NO: 7552 - protein, 259 aa, Desulfovibrionales bacterium
  misc_feature (1)..(259): tr|A0A1F9Q5W3|A0A1F9Q5W3_9DELT GTP cyclohydrolase FolE2 OS=Desulfovibrionales bacterium GWA2_65_9 OX=1797915 G N=folE2 PE=3 SV=1
MEDVQKHPASVQMPIDRVGVKDLRLPVVVRDRESGRQHTVARLDLSVDLPAAFKGTHMSRFVEALENWGEELSRSSMEKLLSDMALRLEARRSFARFDFLYFLRQSSPVSKAKGLMGYPCSVVGAWEDGKLDFTLGVDVPVMTVCPCSKAISDEGAHSQRASVRILAKFKGFLWLEDLIEIAERSGSSRVYTLLKREDEKFVTETAFANPAFVEDVVRTAAKGLSEHPRITWFRVEVEAFESIHGHSAQATIESPAQKA

SEQ ID NO: 7553 - protein, 256 aa, Desulfurella acetivorans
  misc_feature (1)..(256): tr|W0JIF8|W0JIF8_DESAE GTP cyclohydrolase FolE2 OS=Desu lfurella acetivorans A63 OX=694431 GN=folE2 PE=3 SV=1
MSLKDVQSQRDFRNININKVGVKGVKYPITLLDKKNGLQHTIADINMYVLLPSKFKGTHMSRFIEIINENKNEINIKKIHHILSQMKTKLNAQKAYLEINFDYFIEKQAPVSKIKSLMSYTCGLYAFSGDADELTLFVKVPVTSLCPCSKEISDYGAHNQRAFVSVYVKFTDMVWIEDIISIVEANASSDIYCLLKRPDEKFVTEKAYNNPMFVEDIARNIVKDLKLDKRIYWYKVEVESLESIHNHNAYACIEKN

SEQ ID NO: 7554 - protein, 256 aa, Desulfurella amilsii
  misc_feature (1)..(256): tr|A0A1X4XUS1|A0A1X4XUS1_9DELT GTP cyclohydrolase FolE2 OS=Desulfurella amilsii OX=1562698 GN=folE2 PE=3 SV=1
MSLKDVQSQKDFRNININKVGVKGVKYPITLLDKKNGLQHTIADINMYVLLPSKFKGTHMSRFIEIINENKNEINIKKIHHILAQTKAKLNAKKAYLEINFDYFVEKQAPVSKIKSLMSYSCGLHAFSSDVDELTLFVKVPVTSLCPCSKEISDYGAHNQRAFVSVYVKFSDMVWIEDVIGIVEANSSSDIYCLLKRPDEKYVTEKAYDNPMFVEDIARNVVKALESDKRIYWYKVEVESLESIHNHNAYACIEKD

SEQ ID NO: 7555 - protein, 256 aa, Desulfurella multipotens; identical to SEQ ID NO: 7553
  misc_feature (1)..(256): tr|A0A1G6M445|A0A1G6M445_9DELT GTP cyclohydrolase FolE2 OS=Desulfurella multipotens OX=79269 GN=folE2 PE=3 SV= 1

SEQ ID NO: 7556 - protein, 256 aa, Desulfurella sp.; identical to SEQ ID NO: 7553
  misc_feature (1)..(256): tr|A0A2N7Q4X1|A0A2N7Q4X1_9DELT GTP cyclohydrolase FolE2 OS=Desulfurella sp. OX=1962857 GN=folE2 PE=3 SV=1

SEQ ID NO: 7557 - protein, 186 aa, Desulfurellales bacterium
  misc_feature (1)..(186): tr|A0A5C7Q6Z6|A0A5C7Q6Z6_9DELT GTP cyclohydrolase 1 OS= Desulfurellales bacterium OX=2482794 GN=folE PE=3 SV=1
MPSNPSNREVAQRFLNHVFVDRIDWSDEHHKDTPVRFVKMLRELTSQEEPEFTTFKANTDEMVIVKDIPFNSLCAHHIIPFVGYCHIGYIPGGTIAGLSKFARVVKYLSATLTVQEDLNRDIALYLMSKLQPKGIAVVMEAEHMCMTLRGVQVPGTKTITSSMHGVFADHNRLARQEFLELIRDRK

SEQ ID NO: 7558 - protein, 188 aa, Desulfuribacillus alkaliarsenatis
  misc_feature (1)..(188): tr|A0A1E5G6G3|A0A1E5G6G3_9BACL GTP cyclohydrolase 1 OS= Desulfuribacillus alkaliarsenatis OX=766136 GN=folE PE= 3 SV=1
MEKFDLNKIEKAVTMILEAVGEDVNREGLIDTPKRVAKMYKEIFAGLHEDPSEHLNTIFSENHEELVIVKDIPFYSLCEHHLVPFFGVAHVAYIPTGGKVTGLSKLARVVEVVTKRPQLQERITTTVANTIVDKIKPLGVAVVIEAEHMCMTMRGVKKPGSKTITSAVRGIFETDIALRSEAFSLIKG

SEQ ID NO: 7559 - protein, 188 aa, Desulfuribacillus stibiiarsenatis
  misc_feature (1)..(188): tr|A0A1E5L6W5|A0A1E5L6W5_9BACL GTP cyclohydrolase 1 OS= Desulfuribacillus stibiiarsenatis OX=1390249 GN=folE PE =3 SV=1
MTNFDHDKIVKAVTMILEAIGEDPTREGLQDTPKRVAKMYEEVFAGIHEDPASPLGTIFNENHGELVIVKDIPFHSMCEHHLVPFFGVAHVAYIPSDGKVTGLSKLARVIDIVTKRPQLQERITTTVAEVIVEKLNPLGVAVVIEAEHMCMTMRGIKKPGSKTITSAVRGIFENDIALRAEAFSLIKG

SEQ ID NO: 7560 - protein, 204 aa, Desulfurispirillum indicum
  misc_feature (1)..(204): tr|E6W2D0|E6W2D0_DESIS GTP cyclohydrolase 1 OS=Desulfur ispirillum indicum (strain ATCC BAA-1389 / S5) OX=65373 3 GN=folE PE=3 SV=1
MKTMDYDTKQSSSLPAIEDSVATILQAIGEDSDREGLLKTPQRVARMYRELTSGYRTDIHEIINDAIFASEDEDMVLVKDISFSSLCEHHMLPFLGKAHVAYIPDGNIIGLSKIPRIVEMYARRLQVQERMTAQIGKTLFDVLKPRGVAVMVESVHMCAIIRGVKNHSTTMTTTSMFGSFKEDRHLRSEFMEHTANTSRTSIHW

SEQ ID NO: 7561 - protein, 244 aa, Desulfurivibrio alkaliphilus
  misc_feature (1)..(244): tr|D6Z0G6|D6Z0G6_DESAT GTP cyclohydrolase FolE2 OS=Desu lfurivibrio alkaliphilus (strain DSM 19089 / UNIQEM U26 7 / AHT2) OX=589865 GN=folE2 PE=3 SV=1
MELQSVGIKDISYPITVREKSGGLQPTVATIDLRANLPRQYRDTCVTTFIEVLNRYQEEMSNRIFRKLLAEVKDKLRADSAHVEMTFPYFLEKKAPVSGTTSLMEYTCRFTGGVGPDEDFLLTVQVPATTLCPCSREISACGAHNQRAEITLSVKYREFIWLEELIEMAEAGSSCEVFALLKRPDEKYVTEAAYQNPMFVEDVVRKVAELAAGHPAISWFGVGAESFESIHKHSAYAYVDSNDL

SEQ ID NO: 7562 - protein, 254 aa, Desulfurivibrio sp.
  misc_feature (1)..(254): tr|A0A3A6NVQ6|A0A3A6NVQ6_9DELT GTP cyclohydrolase FolE2 OS=Desulfurivibrio sp. OX=2093369 GN=folE2 PE=3 SV=1
MKLKTVGIKNIRYPVKIREKSGGLQDTVASIMLQVNMPRDYRETCVSTFLAVLNKYQEEMSVAIFSKLLREVQDRLQANSAHLEMTFPYFLEKKAPVTRTSGLMEYTCRFTGGIGEGEDFILSVWVPSTTLCPCSKEISRYGAHNQRAEINLNIKSRSFIWVEDLISLVESGVSCEVFSILKRPDEKFVTEQAYDNPMFVEDVVRKVAELVHARPDIYWFSVGVESFESIHKHSAYAFVDSSCLIEDSPDGDLP

SEQ ID NO: 7563 - protein, 186 aa, Desulfurobacterium atlanticum
  misc_feature (1)..(186): tr|A0A238ZEF6|A0A238ZEF6_9BACT GTP cyclohydrolase 1 OS= Desulfurobacterium atlanticum OX=240169 GN=folE PE=3 SV =1
MIDTERIEKAVREILLAIGEDPDREGLKDTPKRVAKMYKEVLAGYDDSPENHSVLFTERYDEMIIVKDIPFFSMCEHHMLPFFGKIHIAYIPGEDRVTGLSKLARIADVYAKRLQLQERMTEQIASAIMEKFNAKGVMVVVEAQHLCMIMRGVKKPGSFTITSAIKGMLRKEPTRTEALFLIKGGK

SEQ ID NO: 7564 - protein, 185 aa, Desulfurobacterium indicum
  misc_feature (1)..(185): tr|A0A1R1MKV0|A0A1R1MKV0_9BACT GTP cyclohydrolase 1 OS= Desulfurobacterium indicum OX=1914305 GN=folE PE=3 SV=1
MDKERIKKAVREILIAIGEDPDREGLKDTPKRVANMYEEILAGYEDSPENHSVLFSEKYDEMIIVKDIPFFSMCEHHMLPFFGKIHIAYIPSEEKVTGLSKLARIADVYAKRLQLQERMTEQIADAIMEKFNAKGVMVIVEAQHLCMIMRGAKKPGSFTITSAIKGILRNEPTRTEALFLIKDRK

SEQ ID NO: 7565 - protein, 186 aa, Desulfurobacterium sp.
  misc_feature (1)..(186): tr|A0A432R455|A0A432R455_9BACT GTP cyclohydrolase 1 OS= Desulfurobacterium sp. OX=2004706 GN=folE PE=3 SV=1
MAFDRERIERAVREILLAIGEDPDREGLRDTPKRVAKMYEEVLSGYNDSPDNHLVLFSEKYDEMIIVKDIPIYSLCEHHMLPFFGKAHVAYIPGNNKVTGLSKLARIVDVYSKRLQLQERMTEQIADAIMEKLKAKGVMVIVEAQHLCMIMRGVKKPGSYTVTSAVKGVMRNEPTRMEALFLIKGR

SEQ ID NO: 7566 - protein, 186 aa, Desulfurobacterium sp.
  misc_feature (1)..(186): tr|A0A432QRH0|A0A432QRH0_9BACT GTP cyclohydrolase 1 OS= Desulfurobacterium sp. OX=2004706 GN=folE PE=3 SV=1
MAFDRERIEKAVREILIAIGEDPDREGLKDTPKRVAKMYEEVLAGYNDSVENHLVLFTEKYDEMIIVRDIPVYSLCEHHMLPFFGKAHVAYIPGNEKVTGLSKLARIVDVYAKRLQLQERMTEQIADAIMEKLGAKGVMVVIEAQHLCMIMRGVKKPGSYTVTSAVKGAMRKEPTRMEALFLIKGM

SEQ ID NO: 7567 - protein, 186 aa, Desulfurobacterium thermolithotrophum
  misc_feature (1)..(186): tr|F0RZZ7|F0RZZ7_DESTD GTP cyclohydrolase 1 OS=Desulfur obacterium thermolithotrophum (strain DSM 11699 / BSA) OX=868864 GN=folE PE=3 SV=1
MAFDRERIEKAVREILIAIGEDPDREGLKDTPKRVAKMYEEILAGYNDSAENHLVLFTEKYDEMIIVRDIPIYSLCEHHMLPFFGKAHVAYIPGEDKVTGLSKLARIVDVYAKRLQLQERMTEQIADAIMEKLGAKGVMVVVEAQHLCMIMRGVKKPGSYTVTSAVKGAMRKEPTRMEALFLIKGR

SEQ ID NO: 7568 - protein, 261 aa, Desulfuromonadaceae bacterium
  misc_feature (1)..(261): tr|A0A1G2VVU8|A0A1G2VVU8_9DELT GTP cyclohydrolase FolE2 OS=Desulfuromonadaceae bacterium GWC2_58_13 OX=1801896 GN=folE2 PE=3 SV=1
MSSMPDLQQSRDDRNIPIDKVGVKNIRYPIVVLDKSRDKQHTVARINMYVDLPHHFKGTHMSRFIEILNQHHGEISIERMDTILQDMKDRLEASSAHLELEFPYFIEKQAPVSRARSLMEYQCQMIGSLGDEADFVLGVTVPVTSLCPCSREISERGAHNQRSSVSVRIRYRSDRHHIWLEDLIEWIESCGSAPIYSLLKREDEKAVTEQAYDNPMFVEDIVRAVTVKLQSVEDIEWFRVECENFESIHNHSAYALVEQRR

SEQ ID NO: 7569 - protein, 270 aa, Desulfuromonadales bacterium
  misc_feature (1)..(270): tr|A0A1E7HM41|A0A1E7HM41_9DELT GTP cyclohydrolase FolE2 OS=Desulfuromonadales bacterium C00003094 OX=1869310 G N=folE2 PE=3 SV=1
MSTMRDIQMERDTRNIPIDKVGVKDIRYPIVVMDKNKDQQHTVARINMYVDLPHHFKGTHMSRFIEILNQYRGEITMRNMGSILQEMKDRLEASCAHLEMDFPYFIEKEAPVSKARSLMEYRCRLSGTLGEHKDFVLGVEVPMTSLCPCSKEISQRGAHNQRSAVRVEIRSEKFVWIEDLISWVEDCGSSPVYSLLKREDEKAVTEQAYDNPMFVEDIVRAVTEKLKSVESIQWFRVECENFESIHNHSAYALVEHPSTFSGPHDASGQS

SEQ ID NO: 7570 - protein, 270 aa, Desulfuromonadales bacterium
  misc_feature (1)..(270): tr|A0A1E7H0Q9|A0A1E7H0Q9_9DELT GTP cyclohydrolase FolE2 OS=Desulfuromonadales bacterium C00003096 OX=1869311 G N=folE2 PE=3 SV=1
MSTMRDIQMERDTRNIPIDKVGVKDIRYPIVVMDKNKDQQHTVARINMYVDLPHHFKGTHMSRFIEILNQYRGEITMRNMGSILQEMKDRLEATCAHLEMEFPYFIEKEAPVSKARSLMEYQCRLSGTLDDHKDFVLGVEVPMTSLCPCSKEISQRGAHNQRSAVRVEIRSDKFVWIEDLISWVEDCGSAPVYSLLKREDEKAVTEQAYDNPMFVEDIVRAVTEKLKGVEGIQWFRVECENFESIHNHSAYALVEHPSAFSGPHNTSGES

SEQ ID NO: 7571 - protein, 255 aa, Desulfuromonas acetexigens
  misc_feature (1)..(255): tr|A0A550JBZ0|A0A550JBZ0_9DELT GTP cyclohydrolase FolE2 OS=Desulfuromonas acetexigens OX=38815 GN=folE2 PE=3 S V=1
MPDLQQSRDERNIPIDKVGVKNIHYPIVVLDKSKDRQHTVASINMYVDLPHHFKGTHMSRFIEILNEHHGEISIEGIDAILVEMKERLEASSAHLELEFPYFIEKRAPVSGARGLMEYQCRMLGSLGETGDFILGVTVPVTSLCPCSREISARGAHNQRSAVTVQVRYRDHIWLEDLIDWIEVCGSAPVYSLLKREDEKAVTEQAYDNPRFVEDIVRAVTEKLQSIENVTWFRVECENFESIHNHSAYALVEQRR

SEQ ID NO: 7572 - protein, 264 aa, Desulfuromonas acetoxidans
  misc_feature (1)..(264): tr|Q1JZH5|Q1JZH5_DESA6 GTP cyclohydrolase FolE2 OS=Desu lfuromonas acetoxidans (strain DSM 684 / 11070) OX=2816 89 GN=folE2 PE=3 SV=1
MTPSSMPDLQKSQDTRNIAIDKVGIKDVRYPIVVEDKNTSRQQTVASINMYVELPHQFKGTHMSRFLEILNQYRGEQVTLNDMEGLLQAMKERLESDCAHIELTFPYFIEKQAPVSQAKGLMEYECRFIGTLREKKDFVLEVRVPVTSLCPCSRDISRYGAHNQRSSVTVAIRSKKMIWIEDLINWVESCGSAPVYSLLKREDEKAVTEQAYENPMFVEDIVRAVTEKLKSVSSIEWFCVECENYESIHNHSAYATLEYPRRSD

SEQ ID NO: 7573 - protein, 259 aa, Desulfuromonas soudanensis
  misc_feature (1)..(259): tr|A0A0M3QGR9|A0A0M3QGR9_9DELT GTP cyclohydrolase FolE2 OS=Desulfuromonas soudanensis OX=1603606 GN=folE PE=3 SV=1
MTVMPDLQKSLDSRNIAIDKVGVKDIRYPIVVMDRSKVHQHTVARINMYVDLPHHFKGTHMSRFIEILNQYHGEISIESLDTILVEMKERLEASSAHLEMEFPYFIEKTAPVSGSRGLMEYQCRMTGSLGKESDFVLGVTVPVTSLCPCSKEISARGAHNQRSAISVQIRYTGHIWLEDLIAWVESCASAPVYSLLKREDEKAVTEQAYDNPMFVEDLVRGVTERLSEVPEIVWFKVECENFESIHNHSAFALVERDRR

SEQ ID NO: 7574 - protein, 257 aa, Desulfuromonas sp.
  misc_feature (1)..(257): tr|A0A2N6DQ37|A0A2N6DQ37_9DELT GTP cyclohydrolase FolE2 OS=Desulfuromonas sp. OX=892 GN=folE2 PE=3 SV=1
MPDLQKAHDPRNIAIDKVGVKDIRYPIVVQDKHRERQQTVARINMYVDLPHHFKGTHMSRFIEILNQYHGEISIERMDTLLADMKRHLEASCAHIEFDFPYFIEKQAPVSKARSLMEYQCRMTASLGAGYDFVLGVTVPVTSLCPCSKEISARGAHNQRSAVRVEIRYREHVWLEDLIDWVESCGSAPVYALLKREDEKALTEQAYDNPMFVEDVVRAVTQRLQREPAITWFRVACENFESIHNHSAYAMVEQSGAG

SEQ ID NO: 7575 - protein, 255 aa, Desulfuromonas sp.
  misc_feature (1)..(255): tr|A0A357YCD1|A0A357YCD1_9DELT GTP cyclohydrolase FolE2 OS=Desulfuromonas sp. OX=892 GN=folE2 PE=3 SV=1
MPDLQKSLDGRNIAIDKVGVKDIRYPIVVLDKQRSQQHTVARVNMYVDLPHHFKGTHMSRFIEILNHYHGEISIDRMDAILQAMKDRLEASRAHLEFDFPYFIEKRAPVSGARSLMEYQCQMVGTLGSERDFILGVTVPATSLCPCSREISERGAHNQRSLISVQIRYQGHVWIEDLVTWIEECASSPVYALLKREDEKAVTENAYDNPMFVEDMVRAVTEKLAAVPEITWFRVECENFESIHNHSAYALVESPR

SEQ ID NO: 7576 - protein, 259 aa, Desulfuromonas thiophila
  misc_feature (1)..(259): tr|A0A1G7CLJ2|A0A1G7CLJ2_9DELT GTP cyclohydrolase FolE2 OS=Desulfuromonas thiophila OX=57664 GN=folE2 PE=3 SV= 1
MKTMPDLQQSRDTRQIAIDRVGIKDVRYPIVVLDKNRSRQHTIASVNMYVELPHQFKGTHMSRFVEILNQYRGEITFYNMDRILAAMKERLESDCAHMELSFPYFIEKTAPVSGARSLMSYDCRFIGTLATDKDFVLEVCVPLTSLCPCSREISRYGAHNQRSYVRVAIRAHDMVWIEDLVALVEECGSAPVYALLKREDEKAVTEQAYENPRFVEDIVREVTRRLKAVAAIDWFSVECENFESIHDHSAYATLEYRRG

SEQ ID NO: 7577 - protein, 268 aa, Desulfuromusa kysingii
  misc_feature (1)..(268): tr|A0A1H4DCX3|A0A1H4DCX3_9DELT GTP cyclohydrolase FolE2 OS=Desulfuromusa kysingii OX=37625 GN=folE2 PE=3 SV=1
MSNHHKQQRPAVMPDMQQSRDTRNIAIDKVGVKDIGYPIVVMDKYREKQHTVARINMFVDLPEHFKGTHMSRFIEVLNQHHAGISVENMETILTEMKSRLGSGRAHLELDFPYFIEKRAPISGARSLMEYQCRMIGTQAETYDFILEASIPVTSLCPCSKEISERGAHNQRSIVTVQIRYSEHIWLEDLIEWVEDCASCPVYALLKREDEKAVTEQAYDNPMFVEDMVRAVTQKLRSIPQISWFKIQCENFESIHNHSAYAMVEGGNN

SEQ ID NO: 7578 - protein, 190 aa, Dethiobacter alkaliphilus
  misc_feature (1)..(190): tr|C0GCX5|C0GCX5_9FIRM GTP cyclohydrolase 1 OS=Dethioba cter alkaliphilus AHT 1 OX=555088 GN=folE PE=3 SV=1
MIDQEKIQKAVRMILEGIGEDPDREGLQDTPARVAKMYGEVFSGLHCDPCDHLETCFYEEKHDEMVLIKDISIYSMCEHHLLPFYGKAHVAYIPNPEKITGLSKLVRVVETLSRRPQLQERLTTQIADTIVEKLDAKGVVVVIEAEHLCMTIRGVKKPGSTTVTSAVRGICRTNHLTRAEAFSLLKGTHR

SEQ ID NO: 7579 - protein, 187 aa, Dethiobacter sp.
  misc_feature (1)..(187): tr|A0A3A6NK27|A0A3A6NK27_9FIRM GTP cyclohydrolase 1 OS= Dethiobacter sp. OX=2093370 GN=folE PE=3 SV=1
MIDEKKLQKAVRMILEAIGEDPEREGLRDTPRRVTKMYKEVFKGLYQDPKEYLQICFSEDQHDELVLVKDISLYSICEHHLLPFYGKAHIAYIPAKGRIVGLSKLVRVVESIARRPQLQERLTSTVANIIMEVLKPKGVVVVVEAEHLCMSIRGVKKPGSITVTSAVRGIFRQNQVSRSEAFSLIKG

SEQ ID NO: 7580 - protein, 258 aa, Dethiosulfatarculus sandiegensis
  misc_feature (1)..(258): tr|A0A0D2J0U8|A0A0D2J0U8_9DELT GTP cyclohydrolase FolE2 OS=Dethiosulfatarculus sandiegensis OX=1429043 GN=folE 2 PE=3 SV=1
MEDVQNQTDHRNIPIDKVGVKDIRHPITVLDRANGVQKTVASINMYVNLPHHYKGTHMSRFIEVLSDYSDNINLRNLKDILEAMKKRLNAHSAHIEVDFPYFIKKTAPVSGARSLLEYNIAYRGSINGSGLDLVVEVKVPVTTLCPCSQMISDQGAHNQRGVVNVAVRFKEFIWIEDIIRLVEESASCEVFSLLKRQDEKYVTEKAYGNPMFVEDVVREVSGKLDKVPEIIWFTVESENFESIHNHSAYAYVEKDKRK

SEQ ID NO: 7581 - protein, 208 aa, Dethiosulfatibacter aminovorans
  misc_feature (1)..(208): tr|A0A1M6AS32|A0A1M6AS32_9FIRM GTP cyclohydrolase 1 OS= Dethiosulfatibacter aminovorans DSM 17477 OX=1121476 GN =folE PE=3 SV=1
MEIRKITEFAKREKKIDTAAIEKHIRGILVALGDDPGREGLIDTPKRVAKMYEEVFEGMCYSNEEIAEMFDVTFEDDLDVEQGSNDFVLLKDIEIFSYCEHHLALMYNMKVAVAYIPTEKVIGLSKIVRVAEMAGKRLQLQERIGMDIAEIIGMITESEDVAVIIEGEHSCISARGIRKPGTKTLTTTLKGRFNEPELMGKLMMMYRG

SEQ ID NO: 7582 - protein, 208 aa, Devosia chinhatensis
  misc_feature (1)..(208): tr|A0A0F5FLU1|A0A0F5FLU1_9RHIZ GTP cyclohydrolase 1 OS= Devosia chinhatensis OX=429727 GN=folE PE=3 SV=1
MDAPATPLKPAVAAGQPVDRPSREQAEAAVRTLIAWAGDDPNREGLLETPARVAKAYGELFAGYGQDAEAVLSKTFKEVGGYDDLVLVKDIPFYAHCEHHMVPFYGKAHIAYLPHDGVVGLSKLARLVEVFARRLQTQETMTAQIIDAINENLGPRGAAVMLEAEHMCMTMRGVKAHDVKTVTHRFTGVFAEDRVEQDRFFAMVAGRR

SEQ ID NO: 7583 - protein, 207 aa, Devosia crocina
  misc_feature (1)..(207): tr|A0A1I7N900|A0A1I7N900_9RHIZ GTP cyclohydrolase 1 OS= Devosia crocina OX=429728 GN=folE PE=3 SV=1
MDASVKHAFSAPASATALPRPTREEAEAAVRTLIAWAGDDPRREGLLETPARVAKAYEELFAGYGQDAREVLSKMFREVGGYDDIVFVRDIPFYAHCEHHMVPFFGKAHIAYLPHDGVVGLSKLARLVEVFARRLQTQETMTAQIIDAINENLGPRGAAVMLEAEHMCMTMRGVRAHDVKTITHRFTGVFAEDRIEQDRFFAMISRR

SEQ ID NO: 7584 - protein, 208 aa, Devosia elaeis
  misc_feature (1)..(208): tr|A0A178I2P0|A0A178I2P0_9RHIZ GTP cyclohydrolase 1 OS= Devosia elaeis OX=1770058 GN=folE PE=3 SV=1
MDAQVKPLKPVPATPGASPRPSREEAEAAVRTLIAWAGDDPNREGLLETPARVAKAYGELFAGYGQDAREVLSKTFREVGGYDDLVLVKDIPFYAHCEHHMVPFYGKAHIAYLPHEGVVGLSKLARLVEVFARRLQTQETMTAQIIDAINENLGPRGAAVMLEAEHMCMTMRGVKAHDVKTVTHRFTGVFAEDRVEQDRFFAMVAGRR

SEQ ID NO: 7585 - protein, 209 aa, Devosia enhydra
  misc_feature (1)..(209): tr|A0A1K2HWG9|A0A1K2HWG9_9RHIZ GTP cyclohydrolase 1 OS= Devosia enhydra OX=665118 GN=folE PE=3 SV=1
MDASAKLQTVKTLEQPRQIVRPSQAEAEAAVRTLIAWAGDDPEREGLLDTPRRVAKAYKELYGGYGQNPREVLERTFKEVGGYDDIVLVRDIPFHSHCEHHMVPFVGKAHIAYLPHDGVVGLSKLARVVEVFARRLQTQENLTAQIIDAINETLNPRGAAVMLEAEHMCMTMRGVHTHGVSTLTHRFTGVFAEDRNEQDRFYALVGKRA

SEQ ID NO: 7586 - protein, 207 aa, Devosia epidermidihirudinis
  misc_feature (1)..(207): tr|A0A0F5Q9B0|A0A0F5Q9B0_9RHIZ GTP cyclohydrolase 1 OS= Devosia epidermidihirudinis OX=1293439 GN=folE PE=3 SV= 1
MDARTKPIGATPVTATALPRPTREEAEAAVRTLIAWAGDDPTREGLLETPARVAKAYGEFYSGYEQDAGVVLSKTFKEVGGYDDIVLVRDIPFNSHCEHHMVPFVGKAHIAYLPHDGVVGLSKLARLVEVFARRLQTQENLTAQIIDAINEHLGPRGAAVMLEAEHMCMSMRGVRAHGAATITHRFTGVFAEDRVEQDRFFGLIGKR

SEQ ID NO: 7587 - protein, 207 aa, Devosia geojensis
  misc_feature (1)..(207): tr|A0A0F5FT51|A0A0F5FT51_9RHIZ GTP cyclohydrolase 1 OS= Devosia geojensis OX=443610 GN=folE PE=3 SV=1
MDARVKPHEVITLDHAPVPRPSLKEVEEAVRTLIAWAGDDPEREGLRDTPMRVAKAYRELFSGYEQEPGEVLERTFKEVGGYDDIVLVRDIPFHSHCEHHMVPFVGKAHIAYLPHDGVVGLSKLARLVDVFARRLQTQENLTAQILDAINEHLGPRGAAVMLEAEHMCMTMRGVRAHGVATITHRFTGVFAEDREEQDRFFSMVGKR

SEQ ID NO: 7588 - protein, 205 aa, Devosia insulae
  misc_feature (1)..(205): tr|A0A1E5XV24|A0A1E5XV24_9RHIZ GTP cyclohydrolase 1 OS= Devosia insulae DS-56 OX=1116389 GN=folE PE=3 SV=1
MDASAKPQHVKLVPEITRPSREEAEAAVRTLIAWAGDDPTREGLLETPHRVTKAYREFFAGYGDDPREVLHKTFKEVGGYDDVVLVRDIPFSSHCEHHMVPFFGKVHIAYLPHDGVVGLSKLARLVEVYARRLQVQENMTAQIIDAVNEHLNPRGAAVMIEAEHMCMSMRGVRAHGALTITQRFTGVFAEDRNEQDRFFAMVGKR

SEQ ID NO: 7589 - protein, 207 aa, Devosia limi
  misc_feature (1)..(207): tr|A0A0F5LP45|A0A0F5LP45_9RHIZ GTP cyclohydrolase 1 OS= Devosia limi DSM 17137 OX=1121477 GN=folE PE=3 SV=1
MDARVKPLEVNAVEAQPTTRPSRAEAEAAVRTLIAWTGDNPDREGLLETPARVVKAFGELYAGYDQHPKTILERTFKEVGGYDDIVLVRDIPFHSHCEHHMVPFIGKAHIAYLPHDGVVGLSKLARLVEVFARRLQTQENLTAQIIDAINEHLGPRGAAVMLDAEHMCMSMRGVHAHGVSTVTHRFTGVFAEDRQEQDRFFAMVGKR

SEQ ID NO: 7590 - protein, 207 aa, Devosia lucknowensis
  misc_feature (1)..(207): tr|A0A1Y6ETK4|A0A1Y6ETK4_9RHIZ GTP cyclohydrolase 1 OS= Devosia lucknowensis OX=1096929 GN=folE PE=3 SV=1
MDAHVNPLKPATANSNVPSRPSREEAEAAVRTLIAWAGDDPNREGLLETPARVAKAYGELFAGYDLDAKAVLSKTFKEVGGYDDLVLVKGIPFYAHCEHHMVPFYGQAHIAYLPHDGVVGLSKLARLVEVFARRLQTQETMTAQIIDAINENLGPRGAAVMLEAEHMCMTMRGVRAHDVKTVTHRFTGVFAEDRVEQDRFFAMVGHR

SEQ ID NO: 7591 - protein, 206 aa, Devosia psychrophila
  misc_feature (1)..(206): tr|A0A0F5Q0C5|A0A0F5Q0C5_9RHIZ GTP cyclohydrolase 1 OS= Devosia psychrophila OX=728005 GN=folE PE=3 SV=1
MDAPSKPFGSVLMSTAPYPRPSREEAEAAVRTLLAWAGDNPNREGLLETPARVTRAYGELFSGYEQDASTILSKTFKEVGGYDDIVLVKDIPFSSHCEHHMVPFIGKAHIAYLPHDGVVGLSKLARLVESFARRLQTQENLTAQIIDAINEHLGPRGAAVMLEAEHMCMSMRGVRAHGASTITQRFTGVFAEDRHEQDRFFAMIKR

SEQ ID NO: 7592 - protein, 207 aa, Devosia riboflavina
  misc_feature (1)..(207): tr|A0A087M1S9|A0A087M1S9_9RHIZ GTP cyclohydrolase 1 OS= Devosia riboflavina OX=46914 GN=folE PE=3 SV=1
MDATVKLPFPAPATSTSLPRPSREEAEAAVRTLIAWAGDDPTREGLLETPARVAKAYEELFAGYGQDAKEVLSKMFREVGGYDDIVFVRDIPFYAHCEHHMVPFFGKAHIAYLPHDGVVGLSKLARLVEVFARRLQTQETMTAQIIDAINENLGPRGAAVMLEAEHMCMTMRGVRAHDVKTITHRFTGVFAEDRVEQDRFFAMISRR

SEQ ID NO: 7593 - protein, 207 aa, Devosia soli
  misc_feature (1)..(207): tr|A0A0F5LBN3|A0A0F5LBN3_9RHIZ GTP cyclohydrolase 1 OS= Devosia soli OX=361041 GN=folE PE=3 SV=1
MDASIKSVFPAPLSSTALPRPTREEAEAAVRTLIAWAGDDPNREGLLETPSRVAKAYGELFAGYGQDAKEILSKTFREVGGYDDIVFVRDIPFYAHCEHHMVPFYGKAHIAYLPHDGVVGLSKLARLVEVFARRLQTQETMTAQIIDAINENLNPRGAAVMLEAEHMCMTMRGVRAHDVKTITHRFTGVFAEDRIEQDRFFVMINRR

SEQ ID NO: 7594 - protein, 207 aa, Devosia sp.
  misc_feature (1)..(207): tr|A0A087LVM2|A0A087LVM2_9RHIZ GTP cyclohydrolase 1 OS= Devosia sp. 17-2-E-8 OX=1535287 GN=folE PE=3 SV=1
MDATAKSGTVTALDKVTRHKPSQEEVENAVRTLIAWAGDDPTREGLIETPGRVARAYSELFAGYEQSASDALSKIFREVGGYDDIVLLKDIPFHSHCEHHMVPFFGKAHIAYLPHEGVVGLSKLARLVDVFARRLQTQETMTQQIIDALNENLNPRGAAVMLEAEHMCMTMRGVHSHGVTTITHRFTGVFAEEREERERFFAFVGKR

SEQ ID NO: 7595 - protein, 206 aa, Devosia sp.
  misc_feature (1)..(206): tr|A0A1H9C4P2|A0A1H9C4P2_9RHIZ GTP cyclohydrolase 1 OS= Devosia sp. YR412 OX=1881030 GN=folE PE=3 SV=1
MDATTKPFGAVATSTAPYPRPTREEAEAAVRTLLAWAGDDPTREGLLETPARVTKAYGEFFAGYGQNAGEILSKTFKEVGGYDDIVLVKDIPFSSHCEHHMVPFVGKAHIAYLPHDGVVGLSKLARLVEVFARRLQTQENLTAQIIDAINEHLGPRGAAVMLEAEHMCMSMRGVRAHGASTVTHRFTGVFAEDRNEQDRFFSMTRR

SEQ ID NO: 7596 - protein, 187 aa, Dialister invisus
  misc_feature (1)..(187): tr|C9LPX0|C9LPX0_9FIRM GTP cyclohydrolase 1 OS=Dialiste r invisus DSM 15470 OX=592028 GN=folE PE=3 SV=1
MDQKKLEQAARLIIEAVGEDPEREGLVETPRRFAEMVAEQLAYAAVPNEEIARTFEKTFSSPESDMVVVKDISLFSHCEHHIALMYNMKAAVGYIPRGRVIGLSKIARIADAVSKRLQIQERIGADIRDVMERITGAGDVIVLLEGEHSCMTARGIRKPGTLTRTISASGRFRTDGDLRKEFLSLAK

SEQ ID NO: 7597 - protein, 187 aa, Dialister invisus
  misc_feature (1)..(187): tr|R5TE03|R5TE03_9FIRM GTP cyclohydrolase 1 OS=Dialiste r invisus CAG:218 OX=1263072 GN=folE PE=3 SV=1
MDQRKLEQAARLIIEAVGEDPEREGLLETPRRFAEMVAEQLAYAAVPNEEIARAFDKTFSSPESDMVVVKDISLFSHCEHHIALMYNMKAAVGYIPRGRVIGLSKIARIADAVSKRLQIQERIGADIRDIMERITGAGDVIVLLEGEHSCMTARGIRKPGTLTRTISASGRFRTDGDLRKEFLSLAK

SEQ ID NO: 7598 - protein, 196 aa, Dialister micraerophilus
  misc_feature (1)..(196): tr|F2BWC5|F2BWC5_9FIRM GTP cyclohydrolase 1 OS=Dialiste r micraerophilus DSM 19965 OX=888062 GN=folE PE=3 SV=1
MESGGKRSMNKEKLEQAAKLLIEAIGDDPKREGLFETPKRFAEMIQEQFAYVGITNDEIAKKFDKTFETTENDIVIVKQIPIFSHCEHHIAIMYNMKVSIGYKPKGRVIGLSKMARIADAVGKRFQIQERIGTDIREIMKKITKSEDVIVHISGEHSCMTARGIQKPGAVTETIASSGIFKENYETRAEFLKMVKN

SEQ ID NO: 7599 - protein, 188 aa, Dialister microaerophilus
  misc_feature (1)..(188): tr|E4L7B2|E4L7B2_9FIRM GTP cyclohydrolase 1 OS=Dialiste r microaerophilus UPII 345-E OX=910314 GN=folE PE=3 SV= 1
MNKEKLEQAAKLLIEAIGDDPKREGLFETPKRFAEMIQEQFAYVGITNDEIAKKFDKTFETTENDIVIVKQIPIFSHCEHHIAIMYNMKVSIGYKPKGRVIGLSKMARIADAVGKRFQIQERIGTDIREIMKKITKSEDVIVHISGEHSCMTARGIQKPGAVTETIASSGIFKENYETRAEFLKMVKN

SEQ ID NO: 7600 - protein, 188 aa, Dialister pneumosintes
  misc_feature (1)..(188): tr|A0A1B3WEV7|A0A1B3WEV7_9FIRM GTP cyclohydrolase 1 OS= Dialister pneumosintes OX=39950 GN=folE PE=3 SV=1
MVDLKKLEKAARLILEAVGENPMREGLLETPRRFAEMIEEQLAYTNISNEEIAKNFGKTFTSSEEGLVVVKDIPIFSYCEHHIALMYNMKVSVGYIPCGRVIGLSKVARIADAVSKRLQIQERIGQDIREIIEEVTDSSDVIVHIEGEHSCMTARGIKKVTSVTRTLSAGGKCKEPAWQSLFLKLCKE

SEQ ID NO: 7601 - protein, 187 aa, Dialister sp.; identical to SEQ ID NO: 7597
  misc_feature (1)..(187): tr|A0A3D5K8S7|A0A3D5K8S7_9FIRM GTP cyclohydrolase 1 OS= Dialister sp. OX=1955814 GN=folE PE=3 SV=1

SEQ ID NO: 7602 - protein, 188 aa, Dialister sp.
  misc_feature (1)..(188): tr|R6BA56|R6BA56_9FIRM GTP cyclohydrolase 1 OS=Dialiste r sp. CAG:486 OX=1262870 GN=folE PE=3 SV=1
MVDLKKLEEAARLIIEAVGDDPTREGLVETPKRFADMMAEQFAYNAVSNEDIAREFEKTFETPESDMVVVKDIDIFSHCEHHIALMYNMKVAVGYIPRGRVIGLSKIARIADAVSKRFQLQERIGTDIRDIMRLVTHADDVIVFIEGEHSCMTARGIKKPGTKTRTLASSGAFKTDSALRKEFLEMVK

SEQ ID NO: 7603 - protein, 190 aa, Dialister succinatiphilus
  misc_feature (1)..(190): tr|H1D0W6|H1D0W6_9FIRM GTP cyclohydrolase 1 OS=Dialiste r succinatiphilus YIT 11850 OX=742743 GN=folE PE=3 SV=1
MDLKKLEQAARLIIEAVGDDPDREGLRETPKRFADMMAEQFAYTAVSNEDIAREFEKTFATPENDMVVVKDIPIFSHCEHHIALMYNMKAAVGYIPHGRVIGLSKIARIADAVSKRFQIQERIGTDIRDVMEMVTDSPDVIVYIEGEHSCMTARGIKKPGTRTRTIASSGAFKTDSALRGEFMKLALGKE

SEQ ID NO: 7604 - protein, 196 aa, Diaminobutyricimonas aerilata
  misc_feature (1)..(196): tr|A0A2M9CNE1|A0A2M9CNE1_9MICO GTP cyclohydrolase 1 OS= Diaminobutyricimonas aerilata OX=1162967 GN=folE PE=3 S V=1
MAIDTRRIEAAVVELLTAIGEDPTRSGLATTPQRIAEAYGEFFSGLDADPLDHLRETIDVGDRTGEAVVLRDIEFRSMCEHHLLPFTGVAHLAYLPDRRVVGLGRLPRVVETLSSRPQVQERLTDEIADALETGLEPRGVLVVLDAKHGCVNARGVRQAHSSTVTMASRGLLTDPVARADVMALIGGRGDAGSRDG

SEQ ID NO: 7605 - protein, 262 aa, Dichelobacter nodosus
  misc_feature (1)..(262): sp|A5EXB0|GCH4_DICNV GTP cyclohydrolase FolE2 OS=Dichel obacter nodosus (strain VCS1703A) OX=246195 GN=folE2 PE =3 SV=1
MTETAIPDVQSSPDKRHIAINRVGIRDLRLPLFIENAAGEAMPTVARAALMVALPHTQKGTHMSRFIRLLDLKTPISVSALPTLHQKMLDTLHAEEGTISLSFPFFIEKSAPVSGEKALLDYEVVLAVDGNRKHVEVSVEVTVPVTSLCPCSKEISQYGAHNQRSHIVIYAQYNPNQPFSIEDLIHIAEEGASCPIWSLLKRPDEKYITERAYEHPKFVEDIVRDIAMVLNDDPRISFYRISSENFESIHNHSAFALIEHQK

SEQ ID NO: 7606 - protein, 262 aa, Dichelobacter nodosus; identical to SEQ ID NO: 7605
  misc_feature (1)..(262): tr|A0A5F1AA58|A0A5F1AA58_DICNO GTP cyclohydrolase FolE2 OS=Dichelobacter nodosus OX=870 GN=folE2 PE=3 SV=1

SEQ ID NO: 7607 - protein, 225 aa, Dichotomicrobium thermohalophilum
  misc_feature (1)..(225): tr|A0A397Q502|A0A397Q502_9RHIZ GTP cyclohydrolase 1 OS= Dichotomicrobium thermohalophilum OX=933063 GN=folE PE= 3 SV=1
MKAALNTSTGDLEAPTRNNGAGDGGADSHLEPAPTREEAETAVRTLIRWAGDDPAREGLRDTPRRVVDAYREYFAGYHEDPFEVLSRTFEEVHGYDDLVMLRDIRLESHCEHHIAPILGVAHVAYLPRDRVVGISKLARVVEIFSKRLQTQETMTAQIAEAIEQALKPRGVAVLVDALHQCMTTRGVHKTDVSTITTRFTGVFKEDGDYRDRFLNMVHGRRPSVG

SEQ ID NO: 7608 - protein, 223 aa, Dickeya aquatica
  misc_feature (1)..(223): tr|A0A375AA66|A0A375AA66_9GAMM GTP cyclohydrolase 1 OS= Dickeya aquatica OX=1401087 GN=folE PE=3 SV=1
MSAVLSKEAALVHEALLARGLETPLRGEMLDSETRKRLIAEHMTEIMNLLNLDLDDDSLAETPRRIAKMYVEEIFSGLDYANFPKITIIENKMKVDEMVTVRDITLTSTCEHHFVTIDGKATVAYIPKEGVIGLSKINRIVQFFSQRPQVQERLTQQILVALQTLLGTNNVAVSIDAVHYCVKARGIRDATSATTTTSLGGLFKSSQNTRQEFLRAVRHHSHG

SEQ ID NO: 7609 - protein, 222 aa, Dickeya chrysanthemi
  misc_feature (1)..(222): tr|C6CKD1|C6CKD1_DICC1 GTP cyclohydrolase 1 OS=Dickeya chrysanthemi (strain Ech1591) OX=561229 GN=folE PE=3 SV =1
MSAVLTKEAAMVHEALLARGLETPLRGEMLESETRKRLIAQHMTEIMNLLNLDLEDDSLAETPHRIAKMYVEEIFSGLDYANFPKITIIENKMKVDEMVTVRDITLTSTCEHHFVTIDGKATVAYIPKDGVIGLSKINRIVQFFSQRPQVQERLTQQILVALQTLLGTNNVAVSIDAVHYCVKARGIRDATSATTTTSLGGLFKSSQNTRQEFLRAVRHHHN

SEQ ID NO: 7610 - protein, 222 aa, Dickeya dadantii
  misc_feature (1)..(222): tr|E0SMS6|E0SMS6_DICD3 GTP cyclohydrolase 1 OS=Dickeya dadantii (strain 3937) OX=198628 GN=folE PE=3 SV=1
MSAVLTKEAALVHEALLARGLETPLRGKMLESETRKRLIAEHMTEIMNLLNLDLADDSLAETPHRIAKMYVEEIFSGLDYANFPKITIIENKMKVDEMVTVRDITLTSTCEHHFVTIDGKATVAYIPKEGVIGLSKINRIVQFFSQRPQVQERLTQQILVALQTLLGTNNVAVSIDAVHYCVKARGIRDATSATTTTSLGGLFKSSQNTRQEFLRAVRHHHN

SEQ ID NO: 7611 - protein, 234 aa, Dickeya dianthicola
  misc_feature (1)..(234): tr|A0A3A4CUP7|A0A3A4CUP7_9GAMM GTP cyclohydrolase 1 OS= Dickeya dianthicola OX=204039 GN=folE PE=3 SV=1
MSAVLTKSAVLTRSAILTKEATQVHEALLARGLETPLRGKMLESETRKRLIAEHMTEIMNLLNLDLADDSLAETPHRIAKMYVEEIFSGLDYANFPKITIIENKMKVDEMVTVRDITLTSTCEHHFVTIDGKATVAYIPKEGVIGLSKINRIVQFFSQRPQVQERLTQQILVALQTLLGTNNVAVSIDAVHYCVKARGIRDATSATTTTSLGGLFKSSQNTRQEFLRAVRHHQN

SEQ ID NO: 7612 - protein, 222 aa, Dickeya fangzhongdai
  misc_feature (1)..(222): tr|A0A2K8QL34|A0A2K8QL34_9GAMM GTP cyclohydrolase 1 OS= Dickeya fangzhongdai OX=1778540 GN=folE PE=3 SV=1
MSAVLTKEAALVHEALLARGLETPLRGKMLESETRKRLIAEHMTEIMNLLNLDLEDDSLAETPHRIAKMYVEEIFSGLDYANFPKITIIENKMKVDEMVTVRDITLTSTCEHHFVTIDGKATVAYIPKEGVIGLSKINRIVQFFSQRPQVQERLTQQILVALQTLLGTNNVAVSIDAVHYCVKARGIRDATSATTTTSLGGLFKSSQNTRQEFLRAVRHHHN

SEQ ID NO: 7613 - protein, 222 aa, Dickeya paradisiaca
  misc_feature (1)..(222): tr|C6C8C4|C6C8C4_DICP7 GTP cyclohydrolase 1 OS=Dickeya paradisiaca (strain Ech703) OX=579405 GN=folE PE=3 SV=1
MSSILSKEAAQVHEALLARGLETPLRGELQDAETRKRLIAQHMTEIMNLLSLDLSDDSLAETPHRIAKMYVDEIFSGLDYANFPKITIIENKMKVDEMVTVRDITLTSTCEHHFVTIDGKATVAYIPKEGVIGLSKINRIVQFFSQRPQVQERLTQQILVALQTLLGTNNVAVSIDAVHYCVKARGIRDATSATTTTSLGGLFKSSQNTRQEFLRAVRHHSY

SEQ ID NO: 7614 - protein, 247 aa, Dickeya solani
  misc_feature (1)..(247): tr|A0A2K8VSY6|A0A2K8VSY6_9GAMM GTP cyclohydrolase 1 OS= Dickeya solani RNS 08.23.3.1.A OX=1240086 GN=folE PE=3 SV=1
MAGVGSGQRQTERHLLEKKMSAVLTKSAVLTKEAALVHEALLARGLETPLRGKMLESETRKRLIAEHMTEIMNLLNLDLADDSLAETPHRIAKMYVEEIFSGLDYANFPKITIIENKMKVDEMVTVRDITLTSTCEHHFVTIDGKATVAYIPKEGVIGLSKINRIVQFFSQRPQVQERLTQQILVALQTLLGTSNVAVSIDAVHYCVKARGIRDATSATTTTSLGGLFKSSQNTRQEFLRAVRHHQN

SEQ ID NO: 7615 - protein, 222 aa, Dickeya sp.
  misc_feature (1)..(222): tr|A0A3N0G3U5|A0A3N0G3U5_9GAMM GTP cyclohydrolase 1 OS= Dickeya sp. FVG1-MFV-O17 OX=2487136 GN=folE PE=3 SV=1
MSVVLTKEAAMVHEALLARGLETPLRGKMLESETRKRLIAEHMTEIMNLLNLDLEDDSLAETPHRIAKMYVEEIFSGLDYANFPKITIIENKMNVDEMVTVRDITLTSTCEHHFVTIDGKATVAYIPKEGVIGLSKINRIVQFFSQRPQVQERLTQQILVALQTLLGTTNVAVSIDAVHYCVKARGIRDATSATTTTSLGGLFKSSQNTRQEFLRAVRHHQH

SEQ ID NO: 7616 - protein, 222 aa, Dickeya sp.; identical to SEQ ID NO: 7615
  misc_feature (1)..(222): tr|A0A454UNP3|A0A454UNP3_9GAMM GTP cyclohydrolase 1 OS= Dickeya sp. FVG10-MFV-A16 OX=2487135 GN=folE PE=3 SV=1

SEQ ID NO: 7617 - protein, 222 aa, Dickeya zeae
  misc_feature (1)..(222): tr|A0A2K9QEA0|A0A2K9QEA0_9GAMM GTP cyclohydrolase 1 OS= Dickeya zeae OX=204042 GN=folE PE=3 SV=1
MSAVLTKEAALVHEALLARGLETPLRGEMLERETCKRLIAEHMTEIMNLLNLDLEDDSLAETPHRIAKMYVEEIFSGLDYANFPKITIIENKMKVDEMVTVRDITLTSTCEHHFVTIDGKATVAYIPKDGVIGLSKINRIVQFFSQRPQVQERLTQQILVALQTLLGTNNVAVSIDAVHYCVKARGIRDATSATTTTSLGGLFKSSQNTRQEFLRAVRHHHN

SEQ ID NO: 7618 - protein, 222 aa, Dickeya zeae
  misc_feature (1)..(222): tr|D2C1P7|D2C1P7_DICZ5 GTP cyclohydrolase 1 OS=Dickeya zeae (strain Ech586) OX=590409 GN=folE PE=3 SV=1
MSAVLTKEAALVHEALLARGLETPLRGEMLERETRKRLIAEHMTEIMNLLNLDLEDDSLAETPHRIAKMYVEEIFSGLDYANFPKITIIENKMKVDEMVTVRDITLTSTCEHHFVTIDGKATVAYIPKDGVIGLSKINRIVQFFSQRPQVQERLTQQILVALQTLLGTNNVAVSIDAVHYCVKARGIRDATSATTTTSLGGLFKSSQNTRQEFLRAVRHHHN

SEQ ID NO: 7619 - protein, 229 aa, Dictyobacter alpinus
  misc_feature (1)..(229): tr|A0A402BID7|A0A402BID7_9CHLR GTP cyclohydrolase 1 OS= Dictyobacter alpinus OX=2014873 GN=folE PE=3 SV=1
MVLHLDRDHSMNNGHAQNNGHRKDVPLLEQEQEQVVVAEKQAATATPKVDYPRLLELGRELLVALGEDPDREGLAGTPRRWADWWREFVEYDPGTTDTTFSSVSTDQIVCVSGMRVFSLCEHHLLPMWCDVAIGYIPGDKVLGLSKFARIAHQFAHQLQIQERLGQQIADEVSRITGTNHVAVIVKGEHLCMSARGIRTPGVMTSSVMRGAFRNDRDLRMEFMQMVQPQ

SEQ ID NO: 7620 - protein, 220 aa, Dictyobacter aurantiacus
  misc_feature (1)..(220): tr|A0A401ZM48|A0A401ZM48_9CHLR GTP cyclohydrolase 1 OS= Dictyobacter aurantiacus OX=1936993 GN=folE_1 PE=3 SV=1
MALEYDIDEEQIQHALHLYPRHVSEEQMQTFERYMAEIFTAFGLDLNTPATRETPRRYIRALFDSTEGYEGDPKLLTVFETECRGGPDCRLSQVIEGPIHFYSLCEHHALPFHGHAYVGYIAHEHIIGISKLTRLVRLFARRFSVQERIGQQIADTLEEMLSPHGVAVYLEAHHLCTEMRGVRAVSPITRTTFWRGNYDTDASLRAEFFVACGLPRGGQT

SEQ ID NO: 7621 - protein, 227 aa, Dictyobacter aurantiacus
  misc_feature (1)..(227): tr|A0A401ZQB4|A0A401ZQB4_9CHLR GTP cyclohydrolase 1 OS= Dictyobacter aurantiacus OX=1936993 GN=folE_2 PE=3 SV=1
MVLHLDRDHSMNNGHAQHNGHKEDTHMLNREQEQVIVAGEQRPAAAQVDYPRLLELGRELLVALGENPDREGLAGTPRRWADWWREFIEYDPGTTETTFSSVSTDQIVCVSGMRVFSLCEHHLLPMWCDVAIGYIPGDKVLGLSKFARIAHQFAHQLQIQERLGQQIADEVSRITGTNHVAVIVKGEHLCMSARGIRTPGVMTSSVMRGSFRTDRDLRAEFMQMIQP

SEQ ID NO: 7622 - protein, 227 aa, Dictyobacter sp.
  misc_feature (1)..(227): tr|A0A5A5T7P8|A0A5A5T7P8_9CHLR GTP cyclohydrolase 1 OS= Dictyobacter sp. Uno17 OX=2014874 GN=folE PE=3 SV=1
MVLHLDQDHARNNGHARSNGHSEETPVLEREHEQAEIAEEQHPAVKTVDYSRLLELGHELLVALGENPDREGLQDTPRRWADWWREFIEYNPGTTETTFSAVSTDQIVCVSGMRVFSLCEHHLLPMWCDVAIGYIPQEKVLGLSKFARIAHQFAHQLQIQERLGQQIADEVCRITGSSHVAVVVKGEHLCMSARGIRTPGVMTSSVMRGTFRTDRDLRMEFMQMIKE

SEQ ID NO: 7623 - protein, 262 aa, Dictyoglomus sp.
  misc_feature (1)..(262): tr|A0A2J6XVE6|A0A2J6XVE6_9BACT GTP cyclohydrolase FolE2 OS=Dictyoglomus sp. NZ13-RE01 OX=2010949 GN=folE2 PE=3 SV=1
MRDVQNDIDLRNIPLERVGIKDLEWPIKVLDKERGHQQTVAKIEIAVDLKHYIRGIHMSRFIEIMNELEELKPKSLEEMLRKIKEKLQAERSYLKMSFPYFIYKSAPISKIESPNKIEAIIDAELFKVFNMIIGVKVPIHTLCPCSKEISDYSAHNQRAIAEIYVKSKSMIWFEDLVEIAEKNASSPIFALLKRPDEKYITEHAYDNPKFVEDVVRDIAIELEKNNSIEWYKIEVTSMESIHNHNAFACLEKGWLDHVIRNQ

SEQ ID NO: 7624 - protein, 257 aa, Dictyoglomus thermophilum
  misc_feature (1)..(257): sp|B5YCT4|GCH4_DICT6 GTP cyclohydrolase FolE2 OS=Dictyo glomus thermophilum (strain ATCC 35947 / DSM 3960 / H-6 -12) OX=309799 GN=folE2 PE=3 SV=1
MRDVQNEKDYRGIYLRKVGIKNIHWPIKIVTKSGDYQSTVASIDISVDLREDLRGTHMSRFVEVLNGIDSLHPENLGKILQEVREKLRADSSHIKISFPYFIFKKAPVSQISSPNMVECVIDAELSKKLDMIIGVKVPIHTLCPCSKEISEYGAHNQRGVAEIYVRSKKLIWFEDLVEISEKSASAPIYSLLKRPDEKYITEMAYNNPKFVEDVVRDIVSELEKEPKISWYRVEVTSFESIHNHNAFACVEKGWVKK

SEQ ID NO: 7625 - protein, 257 aa, Dictyoglomus thermophilum; identical to SEQ ID NO: 7624
  misc_feature (1)..(257): tr|A0A5D4XKD1|A0A5D4XKD1_DICTH GTP cyclohydrolase FolE2 OS=Dictyoglomus thermophilum OX=14 GN=folE2 PE=3 SV=1

SEQ ID NO: 7626 - protein, 257 aa, Dictyoglomus turgidum
  misc_feature (1)..(257): sp|B8DZH0|GCH4_DICTD GTP cyclohydrolase FolE2 OS=Dictyo glomus turgidum (strain Z-1310 / DSM 6724) OX=515635 GN =folE2 PE=3 SV=1
MKDVQNERDYRGIYLRKVGIKNIHWPIKIITKSGEYQSTVANIDISVDLREDLRGTHMSRFVEVLNGIDFLHPENLGKILQEVREKLKADSSHIKITFPYFIFKKTPVSQIASPNMIECVIEAELSKKLYMIIGVKVPIHTLCPCSKEISEYGAHNQRAIAEIYIKSKKLIWFEDLVEIAERSASAPIYSLLKRPDEKYITETAYNNPKFVEDVVRDIVSELEKEPKISWYRVEVTSFESIHNHNAFACVEKGWIKK

SEQ ID NO: 7627 - protein, 207 aa, Dietzia alimentaria
  misc_feature (1)..(207): tr|A0A1E3R419|A0A1E3R419_9ACTN GTP cyclohydrolase 1 OS= Dietzia alimentaria OX=665550 GN=folE PE=3 SV=1
MTTPDHIPAADARSLPTGRVFDAERAEAAVRELLIAVGEDPEREGLQDTPARVARAYREVFSGLYTDPSEVLSRTFDEDHRELVLVRDIPIYSTCEHHLVPFHGVAHIGYIPGQSGAVTGLSKLARLVDLYAKRPQVQERLTSQVADALVDRLAPSGVLVVIECEHLCMSMRGIRKAGAVTTTSAVRGNMRTNASTRAEALGLLRGT

SEQ ID NO: 7628 - protein, 207 aa, Dietzia cinnamea
  misc_feature (1)..(207): tr|A0A4V2W813|A0A4V2W813_9ACTN GTP cyclohydrolase 1 OS= Dietzia cinnamea OX=321318 GN=folE PE=3 SV=1
MTTPDHLPPADARSMPTGEVFDAPRAEAAVRELLIAVGEDPDREGLQDTPARVARAYREVFAGLYTDPSEVLSRTFDEDHRELVLVRDIPVYSTCEHHLVPFHGVAHIGYIPGQSGAVTGLSKLARLVDLYAKRPQVQERLTSQVADALVDKLDPSGVLVVIECEHLCMSMRGIRKAGAVTTTSAVRGIMRSNASTRAEALGLLRGT

SEQ ID NO: 7629 - protein, 207 aa, Dietzia cinnamea
  misc_feature (1)..(207): tr|A0A177L2Z7|A0A177L2Z7_9ACTN GTP cyclohydrolase 1 OS= Dietzia cinnamea OX=321318 GN=folE PE=3 SV=1
MTTPDHIPPADVRSMHTGEVFDAARAEAAVRELLIAVGEDPDREGLQDTPARVARAYREVFAGLYTDPSEVLARTFDEDHRELVLVRDIPIYSTCEHHLVPFHGVAHIGYIPGQSGAVTGLSKLARLVDLYAKRPQVQERLTSQVADALVDKLDPSGVLVVIECEHLCMSMRGIRKAGAVTTTSAVRGIMRSNASTRAEALGLLRGT

SEQ ID NO: 7630 - protein, 207 aa, Dietzia kunjamensis; identical to SEQ ID NO: 7627
  misc_feature (1)..(207): tr|A0A420C8M5|A0A420C8M5_9ACTN GTP cyclohydrolase 1 OS= Dietzia kunjamensis OX=322509 GN=folE PE=3 SV=1

SEQ ID NO: 7631 - protein, 207 aa, Dietzia lutea
  misc_feature (1)..(207): tr|A0A2S1R4S9|A0A2S1R4S9_9ACTN GTP cyclohydrolase 1 OS= Dietzia lutea OX=546160 GN=folE PE=3 SV=1
MTTPDHIPPADARSRHTGEVFDAARAEAAVRDLLIAVGEDPDREGLQDTPARVARAYREVFAGLYTDPSEVLSRTFDEDHRELVLVRDIPIYSTCEHHLVPFHGVAHIGYIPGQSGAVTGLSKLARLVDLYAKRPQVQERLTSQVADALVDKLDPSGVLVVIECEHLCMSMRGIRKAGAVTTTSAVRGIMRSNASTRAEALGLLRGT

SEQ ID NO: 7632 - protein, 207 aa, Dietzia maris
  misc_feature (1)..(207): tr|A0A2U2AWE7|A0A2U2AWE7_9ACTN GTP cyclohydrolase 1 OS= Dietzia maris OX=37915 GN=folE PE=3 SV=1
MTTPDHIPPADARSMPTGEVFDAARAEAAVRELLIAVGEDPDREGLQDTPARVARAYREVFAGLYTDPSEVLSRTFDEDHRELVLVRDIPIYSTCEHHLVPFHGVAHIGYIPGQSGAVTGLSKLARLVDLYAKRPQVQERLTSQVADALVDKLDPSGVLVVIECEHLCMSMRGIRKAGAVTTTSAVRGIMRSNASTRAEALGLLRGT

SEQ ID NO: 7633 - protein, 207 aa, Dietzia maris; identical to SEQ ID NO: 7627
  misc_feature (1)..(207): tr|A0A365P8P8|A0A365P8P8_9ACTN GTP cyclohydrolase 1 OS= Dietzia maris OX=37915 GN=folE PE=3 SV=1

SEQ ID NO: 7634 - protein, 207 aa, Dietzia natronolimnaea
  misc_feature (1)..(207): tr|A0A2A2WQL9|A0A2A2WQL9_9ACTN GTP cyclohydrolase 1 OS= Dietzia natronolimnaea OX=161920 GN=folE PE=3 SV=1
MTTPDHIPAANARSVSAGRVFDAERAEAAVRELLIAVGEDPEREGLQDTPARVARAYREVFAGLYTDPADVLSKTFNEDHRELVLVRDIPIYSTCEHHLVPFHGVAHIGYIPGRSGAVTGLSKLARLVDLYAKRPQVQERLTSQVADALVDKLQPTGVLVVIECEHLCMSMRGIRKPGSVTTTSAVRGSMRSNASTRAEALGLLRGT

SEQ ID NO: 7635 - protein, 207 aa, Dietzia psychralcaliphila
  misc_feature (1)..(207): tr|A0A2T5AHC3|A0A2T5AHC3_9ACTN GTP cyclohydrolase 1 OS= Dietzia psychralcaliphila OX=139021 GN=folE PE=3 SV=1
MTNPDHIPAADARSESTGRVFDAERAESAVRELLIAVGEDPEREGLRDTPARVARAYREVFAGMYTDPADVLSKTFDEDHRELVLVRDIPIYSTCEHHLVPFHGVAHIGYIPGRSGAVTGLSKLARLVDLYAKRPQVQERLTSQVADALVNKLAPSGVLVVIECEHLCMSMRGIRKPGSVTTTSAVRGSMRTNASTRAEALGLLRGT

SEQ ID NO: 7636 - protein, 207 aa, Dietzia schimae
  misc_feature (1)..(207): tr|A0A521C214|A0A521C214_9ACTN GTP cyclohydrolase 1 OS= Dietzia schimae OX=498198 GN=folE PE=3 SV=1
MTTPDHIPAADARSLPTGRVFDAERAEAAVRELLIAVGEDPEREGLQDTPARVARAYREVFSGLYTDPSEVLSRTFDENHRELVLVRDIPIYSTCEHHLVPFHGVAHIGYIPGQSGAVTGLSKLARLVDLYAKRPQVQERLTSQVADALVDRLAPSGVLVVIECEHLCMSMRGIQKAGAVTTTSAVRGSMRTNASTRAEALGLLRGT

SEQ ID NO: 7637 - protein, 207 aa, Dietzia sp.
  misc_feature (1)..(207): tr|A0A199AYE1|A0A199AYE1_9ACTN GTP cyclohydrolase 1 OS= Dietzia sp. 111N12-1 OX=1785156 GN=folE PE=3 SV=1
MTTPDHIPAADARSLPTGRVFDAERAEAAVRELLIAVGEDPEREGLQDTPARVARAYREVFSGLYTDPSEVLSRTFDEDHRELVLVRDIPIYSTCEHHLVPFHGVAHIGYIPGQSGAVTGLSKLARLVDLYAKRPQVQERLTSQVADALVDRLAPSGVLVVIECEHLCMSMRGIQKAGAVTTTSAVRGNMRTNASTRAEALGLLRGT

SEQ ID NO: 7638 - protein, 188 aa, Dietzia sp.
  misc_feature (1)..(188): tr|A0A022LFK1|A0A022LFK1_9ACTN GTP cyclohydrolase 1 OS= Dietzia sp. UCD-THP OX=1292020 GN=folE PE=3 SV=1
MFDAERAEAAVRELLIAVGEDPEREGLQDTPARVARAYREVFAGLYTDPADVLSKTFNEDHRELVLVRDIPIYSTCEHHLVPFHGVAHIGYIPGRSGAVTGLSKLARLVDLYAKRPQVQERLTSQVADALVDKLQPTGVLVVIECEHLCMSMRGIRKPGSVTTTSAVRGSMRSNASTRAEALGLLRGT

SEQ ID NO: 7639 - protein, 204 aa, Dietzia timorensis
  misc_feature (1)..(204): tr|A0A173LHP7|A0A173LHP7_9ACTN GTP cyclohydrolase 1 OS= Dietzia timorensis OX=499555 GN=folE PE=3 SV=1
MGGIDPIAAADPAERPPFDHERAEAAVRELLIAVGEDPDREGLRDTPGRVARAYSETFAGLYVDPSEVLGRTFNEEHRELVLVRDIPIYSTCEHHLVPFHGVAHIGYIPGESGTVTGLSKLARLVDLYAKRPQVQERLTSQVADALRDKLQPTGVIVVIECEHLCMAMRGIRKPGAITTTSAVRGSFRANASTRAEAMRLIRGS

SEQ ID NO: 7640 - protein, 198 aa, Dinghuibacter silviterrae
  misc_feature (1)..(198): tr|A0A4R8DDY6|A0A4R8DDY6_9BACT GTP cyclohydrolase 1 OS= Dinghuibacter silviterrae OX=1539049 GN=folE PE=3 SV=1
MAYKKIEQYDEAVTEGLKENYKECLHMLGEDPDREGLLKTPERLAKAMQFLTQGYEQDAHQILESAKFRESISEMVVVKDIELYSLCEHHILPFFGKAHIAYIPNGYITGLSKIARVVDVYARRLQVQERLTTQILDAIKETLNPLGVAVVIEAQHLCMMMRGVQKQNSVTTTSAFWGEFERAETRSEFTKLITADLI

SEQ ID NO: 7641 - protein, 367 aa, Dinoroseobacter shibae
  misc_feature (1)..(367): sp|A8LS52|GCH4_DINSH GTP cyclohydrolase FolE2 OS=Dinoro seobacter shibae (strain DSM 16493 / NCIMB 14021 / DFL 12) OX=398580 GN=folE2 PE=3 SV=1
MNVYTPDIDKLPNRDEAATALATLRAWAQTASAAEIETLDPSVARLLPGDPSDYPSLARAYPEEFSVDAAYKDSLPDLQNGPSSLIRGAKAQIQHVGISNFRLPIRFHTRDNGDVTLETSVTGSVSLEAEKKGINMSRIMRTFYGHADETFSFEVIERTLDAYKSDLESFDARIQMRFSFPMKVESLRSGLSGYQYYDIALEVVDVNGQRRKFMHLDYVYSSTCPCSLELSEHARQFRGQLATPHSQRSVARVSVELTCGADDCLWFEDLVELCREAIPTETQVMVKREDEQAFAELNAANPIFVEDAARSFCLALQRDDRIGDFRVVASHQESLHSHDAVSVLTEGPTFASDSLDPRLFQTLFHVG

SEQ ID NO: 7642 - protein, 265 aa, Dissulfuribacter thermophilus
  misc_feature (1)..(265): tr|A0A1B9F3K6|A0A1B9F3K6_9DELT GTP cyclohydrolase FolE2 OS=Dissulfuribacter thermophilus OX=1156395 GN=folE2 P E=3 SV=1
MEDKFLELKDVQSLPDFRNIPLNRVGIKNIRYPITVLDKQKGRQQTVANINMYVNLPHQFKGTHMSRFVEILNEYRGNISVKTFHKILNEMKRRLSSDEAHLEVEFPYFIEKRAPVTGTPGLMEYWCGLHGTLTEHLDMVLVAKVPVTTVCPCSKEISEFGAHNQRGEVRVWVRFNEFLWLEDLIQCVEKSASCQVFSILKRPDEKYVTEYAYTNPMFVEDVVRNVYIGLKELNGVSWFHIEAENFESIHNHSAYACTTYSSTED

SEQ ID NO: 7643 - protein, 314 aa, Dokdonella fugitiva
  misc_feature (1)..(314): tr|A0A4R2ICF5|A0A4R2ICF5_9GAMM GTP cyclohydrolase FolE2 OS=Dokdonella fugitiva OX=328517 GN=folE2 PE=3 SV=1
MSAPTSPQRLLPDIASEAQAGHAGALDGVGMQRIEMPVLLLGADGHAQRVSARVDAFVNLAREDARGIHMSRLYLHLDRHLSAEPLTPASLRRLLRDFLDSHAALADRAWVRVRYDHLARRAALASAHSGWRAYPVELRASLHGGEFMLELGLEVQYSSTCPASAALARQLIQDRFAADFDGHGPLQRDAVLAWLGRADGIVATPHSQRSAATLRLRLAPGFELPVEDLIDRVERALQTPVQTAVKREDEQAFALANGQNLMFCEDAARRIRGVLAADERIADFWLRAEHYESLHPHDAVAIATKGVPGGYAAS

SEQ ID NO: 7644 - protein, 204 aa, Dokdonella fugitiva
  misc_feature (1)..(204): tr|A0A4R2IEN6|A0A4R2IEN6_9GAMM GTP cyclohydrolase 1 OS= Dokdonella fugitiva OX=328517 GN=folE PE=3 SV=1
MKKTARTKKTLPPTVTQAQAEEAVRVLLRWAGEDPLREGLVDTPKRVADAYRDWFSGYAIDPAEYLGRTFEEVAGYDEMIVLRDIHFESFCEHHMAPIIGRAHVGYLPTDKVVGISKLARVVDAYARRFQVQEKLTAQIAHCIGMVLKPRGVGVVIDATHQCMTTRGVHKTGVSMITSQMLGTFREDARTRAEFLRFIDIDGHG

SEQ ID NO: 7645 - protein, 203 aa, Dokdonella immobilis
  misc_feature (1)..(203): tr|A0A1I5B6H9|A0A1I5B6H9_9GAMM GTP cyclohydrolase 1 OS= Dokdonella immobilis OX=578942 GN=folE PE=3 SV=1
MPRHGKKITIVPTVSVAQAEEAVRVLLRWAGEDPNREGLLDTPKRVVNAYRDWFSGYAIDPAEYLRRTFEEVAGYDEMIVLRDIEFESYCEHHMAPIIGRAHIGYLPTNKVVGISKLARVVDAYSRRFQVQEKLTAEIARCIEDVLKPRGVGVVVDAVHQCMTTRGVHKRGVSMITSKMLGDFRDDARTRAEFLRFINIQSKS

SEQ ID NO: 7646 - protein, 291 aa, Dokdonella immobilis
  misc_feature (1)..(291): tr|A0A1I4ZVL3|A0A1I4ZVL3_9GAMM GTP cyclohydrolase FolE2 OS=Dokdonella immobilis OX=578942 GN=folE2 PE=3 SV=1
MNVFTPTQLLPDVQAQADFREQGIDAVGIKGVRYPVVVQSGPRAVHTIASLSMTVALPAEVKGTHMSRFIELLEARAGHLDQATFRTMVLEMLERLGARSGRIAMRFPWFVSKAAPISGVSSLLDHDVEWIGSVAQDGRYSFRMRVQVAATSLCPCSKQISEYGAHNQRSHINIEAALCGAMPMEELIAIAEASASCEVYGLLKRADEKFVTERAYDNPKFVEDLVRDVAHALDQDPRITSYVVEAENFESIHNHSAFARIERDKPAGDAVRAARRLLAATDRTCRARGVS

SEQ ID NO: 7647 - protein, 197 aa, Dokdonella koreensis
  misc_feature (1)..(197): tr|A0A161HRQ0|A0A161HRQ0_9GAMM GTP cyclohydrolase 1 OS= Dokdonella koreensis DS-123 OX=1300342 GN=folE PE=3 SV= 1
MTPSDPAVTRSAAEEAVRTLLRWAGEDPSREGLADTPKRVVDAYADWFSGYAVDPAAYLRRTFEEVAGYDEMIVLRDIEFESYCEHHMAPIIGRAHIGYLPTSKVVGISKLARVVDGFARRFQVQEKLTAQIAHCIEDVLRPRGVGVVVDAIHQCMTTRGVHKRGVSMVTSQMLGDFREDARTRAEFLRFIDGNGRR

SEQ ID NO: 7648 - protein, 316 aa, Dokdonella koreensis
  misc_feature (1)..(316): tr|A0A160DTP6|A0A160DTP6_9GAMM GTP cyclohydrolase FolE2 OS=Dokdonella koreensis DS-123 OX=1300342 GN=folE2 PE= 3 SV=1
MTVNESSALRAMPDIATEPQAATAGVLDWVGMDDIAAPVRLATADGGIVQSPARVAAFVNLKRQDARGIHMSRLYLHVDRHLSSEPLTPCSLRRLLRDFLDSHADLSDRAQVRIRFDHMVRRPALRSDNSGWKSYPITVTATMDEGQFALELGCDIAYSSTCPCSAALARQLIQQQFAADFAADQPLAREAVLAWLGREQGIVATPHSQRSSAQVRVRLAPGFDFPILDIIDRVEDALQTPVQTAVKREDEQAFALLNGQNLMFCEDAARRIRHALDGDERISDFWVRASHFESLHPHDAVAVATKGVRNGYGPDA

SEQ ID NO: 7649 - protein, 206 aa, Dokdonella sp.
  misc_feature (1)..(206): tr|A0A5C7ZTB3|A0A5C7ZTB3_9GAMM GTP cyclohydrolase 1 OS= Dokdonella sp. OX=2291710 GN=folE PE=3 SV=1
MATSRKPSPRNNKTPRVSRSQAEDAVRVLLRWAGEDPAREGLLDTPKRVVEAYADWFSGYAIDPSEYLRRTFEEVAGYDEMIVLRDIEFESYCEHHMAPIIGRAHIGYLPTDKVVGISKLARVVDAYSRRFQVQEKLTAQIAHCIENVLKPRGVGVVIDAVHQCMTTRGVHKRGVSMITSQMLGEFREDARTRSEFLRFINIHANA

SEQ ID NO: 7650 - protein, 317 aa, Dokdonella sp.
  misc_feature (1)..(317): tr|A0A5C7ZQ07|A0A5C7ZQ07_9GAMM GTP cyclohydrolase FolE2 OS=Dokdonella sp. OX=2291710 GN=folE2 PE=3 SV=1
MPSLPSNARLMPDIAAATALEAAGRLDWVGMDEIAVPVCLPGEDGGNVQVPARVTAQVNLKDASARGIHMSRLYLHLDRHLPSEALSPCTLRRLLRDFLDSHAELSDRARIDIRFEQMIRRPALASDNSGWRSYPVRITATLHESAFAFELETEALYSSTCPCSAALARQLIQEQFAADFVPGQALERDKVLAWLGSEQGIRATPHSQRSSARVRVRLAAGFEFPIVELIDLIEGALRTSVQTAVKREDEQAFALLNGQNLMFCEDAARRLKQTLEGDERIVDFWLRAAHLESLHAHDAVAIATKGIEGGFVPNSFR

SEQ ID NO: 7651 - protein, 216 aa, Dokdonia donghaensis
  misc_feature (1)..(216): tr|A0A0A2GXI1|A0A0A2GXI1_9FLAO GTP cyclohydrolase 1 OS= Dokdonia donghaensis DSW-1 OX=1300343 GN=folE PE=3 SV=1
MEAIGDDHIGTSAVTPLRADAFEMSNADKLVSIQKDVAHIMETLGLDMTDDSLKGTPKRVAKMFVNEIFSGLHPDNKPNVSVFDNNYKYGEMLVEKNITVYSTCEHHLLPIVGRAHVAYISNGTVVGLSKMNRIVDYYAKRPQVQERLTMQIVQELQRAMGTEDVACVIDAKHLCVNSRGIRDIESSTVTSEFGGKFKEEATRREFLDYIKLDTDF

SEQ ID NO: 7652 - protein, 198 aa, Dokdonia donghaensis
  misc_feature (1)..(198): tr|A0A0A2GTF3|A0A0A2GTF3_9FLAO GTP cyclohydrolase 1 OS= Dokdonia donghaensis DSW-1 OX=1300343 GN=folE PE=3 SV=1
MPYRKFEEYNIEVTEDVKSNFTSIIKSLGEDTSREGIVKTPERAAKAMQYLTSGYEMDAAAILKGAMFKEDYDDMVIVKNIELYSLCEHHMLPFFGKAHIAYIPNGHIVGLSKLPRIVDVFSRRLQVQERLTHDILECINTTLQPKGVAVVIEASHMCMMMRGVQKQNSTTTTSGFRGQFERQETRNEFLKLISSNLD

SEQ ID NO: 7653 - protein, 198 aa, Dokdonia pacifica
  misc_feature (1)..(198): tr|A0A239CKC1|A0A239CKC1_9FLAO GTP cyclohydrolase 1 OS= Dokdonia pacifica OX=1627892 GN=folE PE=3 SV=1
MPYKKFEEYNIEVTESIKKNFESIIDDLGEDTAREGIVKTPERAAKAMQFLTSGYEMDAAEILKGAMFKEDYDDMVIVKDIELYSLCEHHILPFFGKAHIAYIPNGHIVGLSKLPRIVDVFSRRLQVQERLTHDILECINDTLKPKGVAVVIEASHMCMMMRGVQKQNSTTTTSGFRGQFEKIETRTEFLKLISSDLS

SEQ ID NO: 7654 - protein, 231 aa, Dokdonia pacifica
  misc_feature (1)..(231): tr|A0A238ZM61|A0A238ZM61_9FLAO GTP cyclohydrolase 1 OS= Dokdonia pacifica OX=1627892 GN=folE PE=3 SV=1
MKTEIEKNTDRYQEQIEAMGNDHIGSSAITPLRDDAFELSDIEKIASIKKDVAHIMETLGLDMTDDSLKGTPTRVAKMFVNEIFGGLHPDRKPKASTFDNNYKYGEMLVEKNIVVYSTCEHHLLPIVGRAHVAYISNGTVVGLSKMNRIVDYYAKRPQVQERLTMQIVQELQEALGTKDVACVIDAKHLCVNSRGIRDIESSTVTSEFGGKFKEIATRREFLDYIKLDTDF

SEQ ID NO: 7655 - protein, 198 aa, Dokdonia sp.
  misc_feature (1)..(198): tr|A0A559RMX5|A0A559RMX5_9FLAO GTP cyclohydrolase 1 OS= Dokdonia sp. Hel1_53 OX=1566287 GN=folE PE=3 SV=1
MPYRTFEEYNIEVTDEVKSNFSSIIESLGEDTSRDGILKTPERAAKAMQFLTSGYDMDPAAILKGAMFKEDYDDMVIVKNIELYSLCEHHMLPFFGKAHIAYIPNGHIVGLSKLPRIVDVYARRLQVQERLTHDILECINTTLMPKGVAVVIEASHMCMMMRGVQKQNSTTTTSGFRGQFEKIETRNEFLKLISSSLD

SEQ ID NO: 7656 - protein, 198 aa, Dokdonia sp.
  misc_feature (1)..(198): tr|A0A2S1QFE3|A0A2S1QFE3_9FLAO GTP cyclohydrolase 1 OS= Dokdonia sp. Dokd-P16 OX=2173169 GN=folE PE=3 SV=1
MPYRSFEEYNIEVTDEIKDNFTSIIKNLGEDTGREGIVKTPERAAKAMQFLTSGYDMDPAAILKGAMFKEDYDDMVIVKNIELYSLCEHHMLPFFGKAHIAYIPNGHIVGLSKLPRIVDVFSRRLQVQERLTHDILECINSTLNPKGVAVVIEASHMCMMMRGVQKQNSTTTTSGFRGQFEKQETRNEFLKLISSSLD

SEQ ID NO: 7657 - protein, 215 aa, Dolichospermum compactum
  misc_feature (1)..(215): tr|A0A1Z4UYK3|A0A1Z4UYK3_9CYAN GTP cyclohydrolase 1 OS= Dolichospermum compactum NIES-806 OX=1973481 GN=folE PE =3 SV=1
MTLSIRPELTAADVISSLSHQQQPTVTEADMMQAVRTLLIGLGENPDREGLKDTPKRVVKALKFLTNGYDQSVDELLNGAVFTEDANEMVLVRDIDIFSSCEHHILPIIGRAHVAYIPNGKVIGLSKIARICEMYARRLQVQERLTLQIANALQGLLKPQGVAVVIEATHMCMVMRGVQKPGSWTVTSTMRGVFSEDERTREEFMNLIRHNANFK

SEQ ID NO: 7658 - protein, 235 aa, Dolichospermum compactum
  misc_feature (1)..(235): tr|A0A1Z4V893|A0A1Z4V893_9CYAN GTP cyclohydrolase 1 OS= Dolichospermum compactum NIES-806 OX=1973481 GN=folE PE =3 SV=1
MTIVGSNGANTSQSPLIPDLAEAINVRPDRNTHNGREPEIHPPSEETMDEMMQAVRTMLVGLGEDPEREGLLKTPKRVAKAMKFLTSGYNESLEDLINGAIFDEGHDEMVLVRDINFFSLCEHHMLPFMGRAHVAYIPNQKVVGLSKLARIVEMYSRRLQVQERLTRQIAEALQAVLEPKGVAVVMEATHMCMVMRGVQKPGSWTVTSSMVGIFRDEHKTREEFFNLIRHQASLF

SEQ ID NO: 7659 - protein, 215 aa, Dolichospermum planctonicum
  misc_feature (1)..(215): tr|A0A480ACZ5|A0A480ACZ5_9CYAN GTP cyclohydrolase 1 OS= Dolichospermum planctonicum OX=136072 GN=folE PE=3 SV=1
MTLSIRPELNSTADISSLYRQELPTVTEADMRQAVRTLLIGLGENPDREGLKDTPKRVVKALKFLTNGYHESLDELLNGAVFTEDANEMVLVRDIDLFSSCEHHILPIIGRAHVAYIPNGKVIGLSKIARICEMYARRLQVQERLTLQIADAVQGLLKPKGVAVVIEATHMCMVMRGVQKPGSWTVTSAMRGVFSEDASTREEFMNLIRHNPNFY

SEQ ID NO: 7660 - protein, 235 aa, Dolichospermum planctonicum
  misc_feature (1)..(235): tr|A0A480A9H1|A0A480A9H1_9CYAN GTP cyclohydrolase 1 OS= Dolichospermum planctonicum OX=136072 GN=folE PE=3 SV=1
MTIAGSNGSNRFQSPLIPDLAETINVRPDRNTHGGKAAEIHPPSEETMDEMMAAVRTMLVGVGEDPEREGLLKTPKRVAKAMKFLTSGYNESLEDLINGAIFDEGHDEMVLVRDINFFSLCEHHMLPFMGRAHVAYIPNQKVVGLSKLARIVEMYSRRLQVQERLTRQIAEALQTVLEPKGVAVVMEASHMCMVMRGVQKPGSWTVTSSMVGVFQEEQKTREEFFNLIRHQASFF

SEQ ID NO: 7661 - protein, 216 aa, Dolichospermum sp.
  misc_feature (1)..(216): tr|A0A5C0DRG1|A0A5C0DRG1_9CYAN GTP cyclohydrolase 1 OS= Dolichospermum sp. UHCC 0315A OX=1914871 GN=folE_1 PE=3 SV=1
MTLSIRPELTSAADIISSLSNQQQPTVTEADMMQAVRTLLIGLGENPDREGLKDTPKRVVKALKFLTSGYDQSIDELLNGAVFTEDANEMVLVRDIDLFSSCEHHILPIIGRAHIAYIPNGKVIGLSKIARICEMYARRLQVQERLTLQIADALQGLLKPQGVAVVIEATHMCMVMRGVQKPGSWTVTSAMRGVFSEDARTREEFMNLIRHSANFK

SEQ ID NO: 7662 - protein, 235 aa, Dolichospermum sp.
  misc_feature (1)..(235): tr|A0A5C0DUG6|A0A5C0DUG6_9CYAN GTP cyclohydrolase 1 OS= Dolichospermum sp. UHCC 0315A OX=1914871 GN=folE_2 PE=3 SV=1
MTIASSNGSNRTQSPLIPDLAEAITVRPDRNTHDGKEPQIHPPSEEIMDEMMAAVRTMIVGVGEDPEREGLLKTPKRVAKAMKFLTSGYNQSLEDLINGAIFDEGHDEMVLVRDINFFSLCEHHMLPFMGRAHVAYIPNQKVVGLSKLARIVEMYSRRLQVQERLTRQIAEALQTVLEPKGVAVVMEASHMCMVMRGVQKPGSWTVTSSMVGVFQEEQKTREEFFSLIRHQPSFF

SEQ ID NO: 7663 - protein, 357 aa, Dolosicoccus paucivorans
  misc_feature (1)..(357): tr|A0A2N6SM10|A0A2N6SM10_9LACT GTP cyclohydrolase 1 OS= Dolosicoccus paucivorans OX=84521 GN=folE PE=3 SV=1
MYQVYLSIGSNLGDRKKHLEKALNSLNELPTIELLDVSSLYETAPYGPVEQDNFYNAAVRLNTSLDPEELLTVLQAQEIAAKRTKEVKWGPRTLDLDIIWFDGQTIETDRLTIPHKEAKKRRFVIEPLLDIWQEDHLFDSKQPDYQLEEGLQEVTDQELTLVESNWYPAKGLLPAQLHQIEEATRMILTAIGEDVHRPGLKDTPKRVARMYAEVFSGLINAPFDDYKMFDTKNKEGMVLVKDIQFYSMCEHHLLPFFGKAHIAYIPKENQVLGLSKLARLVEDAAARPSVQEDLTIMIAERLFENAPVAGVAVAISAEHMCMTMRGVKTPHSYTKTYAFEGIFKEKDYQQLFLDDVQ

SEQ ID NO: 7664 - protein, 187 aa, Dolosigranulum pigrum
  misc_feature (1)..(187): tr|H3NCY3|H3NCY3_9LACT GTP cyclohydrolase 1 OS=Dolosigr anulum pigrum ATCC 51524 OX=883103 GN=folE PE=3 SV=1
MVDKQRIEKAVKEILIAVGEDPNREGLQETPARVARMYEERFAGLERDPSVHTKKYFHESSSELVLVKDIDFNSTCEHHLLPIYGKGHIAYIPRDGKVIGLSKLARILEDISQRPQMQERITNHVADVLSDNLNPEGVFVILEAEHMCMSIRGIKKFGAKTITKAMRGTFADSRELRQEVLDMIKFN

SEQ ID NO: 7665 - protein, 187 aa, Dolosigranulum pigrum
  misc_feature (1)..(187): tr|A0A1S8KPR4|A0A1S8KPR4_9LACT GTP cyclohydrolase 1 OS= Dolosigranulum pigrum OX=29394 GN=folE PE=3 SV=1
MVDKQRIEKAVKEILIAVGEDPNREGLQETPARVARMYEERFAGLERDPSVHTKKYFHESSSELVLVKDIDFNSTCEHHLLPIYGKGHIAYIPRDGKVIGLSKLARILEDISQRPQMQERITNHVADVLSDNLNPEGVFVILEAEHMCMSIRGIKKFGAKTITKAMRGTFADSRELRQEVLDMIRFN

SEQ ID NO: 7666 - protein, 189 aa, Domibacillus aminovorans
  misc_feature (1)..(189): tr|A0A177KRB5|A0A177KRB5_9BACI GTP cyclohydrolase 1 OS= Domibacillus aminovorans OX=29332 GN=folE PE=3 SV=1
MDRVDHAKIQEAVRLILEAVGENPDREGLQDTPKRVAKMYEEAFSGLHTDPKEYFETVFEEQYEELVLVKDIPFYSMCEHHLVPFFGHAHVAYLPKGGKVTGLSKLARAVETVARRPQLQERITNEVANAIMEMLEPHGAMVIVEAEHMCMAMRGVKKPGAKTVTTAARGRYENDSQLRTELLALIRSS

SEQ ID NO: 7667 - protein, 309 aa, Domibacillus aminovorans
  misc_feature (1)..(309): tr|A0A177L1I8|A0A177L1I8_9BACI GTP cyclohydrolase FolE2 OS=Domibacillus aminovorans OX=29332 GN=folE2 PE=3 SV= 1
MNLKGVYYMENFKIPPKNERLKLFGSIEPGIKTKPSEKEKMPDLQNVREDFLFEIDAVGITNVKMPVSITSALNPLTQTTIASFTLTSTIPRDVKGTNMSRFTEQLELYRRQGFTLDFSQLSDFVKELAERLGQRDASLEVKFPWFYEQTAPASSLAGLNHADAKMSVSYQHGKIAERMVELTCAVTTLCPCSKEISEYSAHNQRGYIKMTALLLDEYKESIDWKAVLLDAAQSNASALIYPILKRPDEKIVTEKAYENPRFVEDMVRLVAADLYEIPFIQSFTVECRNEESIHLHDAYASVTFNKRHK

SEQ ID NO: 7668 - protein, 189 aa, Domibacillus antri
  misc_feature (1)..(189): tr|A0A1Q8Q7H9|A0A1Q8Q7H9_9BACI GTP cyclohydrolase 1 OS= Domibacillus antri OX=1714264 GN=folE PE=3 SV=1
MAGVDHAKIEEAVRLILEAVGENPDREGLRETPKRVAKMYEEAFSGLHTDPKDYFKTVFEEQYEELVLVKDIPFYSMCEHHLVPFFGRAHVAYMPKSGKVTGLSKLARAVETVARRPQLQERITNEVADAIMDMLEPHGAMVIVEAEHMCMAMRGVKKPGAKTVTTAARGRYENDAQLRTELLSLIRSS

SEQ ID NO: 7669 - protein, 190 aa, Domibacillus antri
  misc_feature (1)..(190): tr|A0A1Q8Q5J9|A0A1Q8Q5J9_9BACI GTP cyclohydrolase 1 OS= Domibacillus antri OX=1714264 GN=folE PE=3 SV=1
MTIELEKGLLEGHIRSILELIGEDPNREGLKETPKRVMKMLEEVFSGVGIAPEQALTTTFEEQYEGMVVVKDITYYTFCEHHLVPFFGKAHIAYIPNGRVVGLSKFARLVELTSKRPQVQERMTQQIANAVMNVLQPDGVMVTVEGQHLCMCARGVKKPGSSTVTTIKKGVFKEDISLVREFEQALLRGE

SEQ ID NO: 7670 - protein, 301 aa, Domibacillus enclensis
  misc_feature (1)..(301): tr|A0A1N6V868|A0A1N6V868_9BACI GTP cyclohydrolase FolE2 OS=Domibacillus enclensis OX=1017273 GN=folE2 PE=3 SV= 1
MNNLKLPSKRERLKLFGSSEPGIKLKPSEKEKIPDLQNKKENFLFEIDAVGITNVKMPVSITSVLNPYTQTTIASFTLTSAISHEVKGTNMSRFTEQLELYRRQGFTLSFSQLSDFLKELAGRLEQKDASLEVTFPWFYEQAAPVSSLAGLNHADARISVSYRQGKIVERRVELSCAVTTLCPCSKEISEYSAHNQRGYIRMMASLSVEYQESTDWKAVLLEAAQSNASAWIYPILKRPDEKAVTEKAYENPRFVEDMVRLVAADLYEVPFIESFTVECRNEESIHLHDAYASLTIQKNGN

SEQ ID NO: 7671 - protein, 189 aa, Domibacillus enclensis
  misc_feature (1)..(189): tr|A0A1N6P948|A0A1N6P948_9BACI GTP cyclohydrolase 1 OS= Domibacillus enclensis OX=1017273 GN=folE PE=3 SV=1
MSEVDHAKIQQAVRLILEAVGENPDREGLVDTPKRVAKMYEEAFSGLHVDPKHYFATVFEEQYEELVLVKDIPFYSMCEHHLVPFFGHAHVAYLPKGGKVTGLSKLARAVESVARRPQLQERITSDVANAIMEMLEPHGAMVIVEAEHMCMAMRGVKKPGAKTVTTAARGLYENDAQLRTELLSLIRSS

SEQ ID NO: 7672 - protein, 189 aa, Domibacillus epiphyticus
  misc_feature (1)..(189): tr|A0A1V2A4E2|A0A1V2A4E2_9BACI GTP cyclohydrolase 1 OS= Domibacillus epiphyticus OX=1714355 GN=folE PE=3 SV=1
MAGIDHAKIQEAVRLILEAVGENPDREGLQDTPKRVAKMYEEAFSGLHTDPKDYFETVFEEQYEELVLVKDIPFYSMCEHHLVPFFGRAHVAYMPKGGKVTGLSKLARAVETVSRRPQLQERITSEVAEAIMEMLQPHGAMVIVEAEHMCMAMRGVKKPGAKTVTTAARGCYENDAQLRTELLSLIRSS

SEQ ID NO: 7673 - protein, 189 aa, Domibacillus epiphyticus
  misc_feature (1)..(189): tr|A0A1V2A9H3|A0A1V2A9H3_9BACI GTP cyclohydrolase 1 OS= Domibacillus epiphyticus OX=1714355 GN=folE PE=3 SV=1
MSIELKKGLDYHIESILELIGEDPAREGLKETPKRVKKMLEEVFSGVGIAPEQALTTTFEEQYEGMVVVKDITYYTFCEHHLVPFFGKAHIAYIPNGRVVGLSKFARLVELTSKRPQVQERMTQQIADAITNVLQPDGVMVTVEGQHLCMCARGVKKPGSSTVTTIKKGAFKEDISLVREFEQALLRGE

SEQ ID NO: 7674 - protein, 189 aa, Domibacillus iocasae
  misc_feature (1)..(189): tr|A0A1E7DN29|A0A1E7DN29_9BACI GTP cyclohydrolase 1 OS= Domibacillus iocasae OX=1714016 GN=folE PE=3 SV=1
MAGVDHAKIQQAVRLILEAVGENPDREGLQDTPKRVAKMYEEAFSGLHIDPRHYFETVFEEQYEELVLVKDIPFYSMCEHHLVPFFGRAHVAYLPKGGKVTGLSKLARAVESVARRPQLQERITSEVADSIMEMLQPHGVMVIVEAEHMCMAMRGVKKPGAKTVTTAARGMYENDSQLRTELLSLIRSS

SEQ ID NO: 7675 - protein, 309 aa, Domibacillus mangrovi
  misc_feature (1)..(309): tr|A0A1Q5P3C9|A0A1Q5P3C9_9BACI GTP cyclohydrolase FolE2 OS=Domibacillus mangrovi OX=1714354 GN=folE2 PE=3 SV=1
MNLKGVYYMENFKLPPKKERLMLFGSIEPGIKTKPSEKEKMPDLQNVREDFLFEIDAVGITNVKMPVSITSVLHPLTQTTIASFTLTSTIPRDVKGTNMSRFTEQLELYRRQGFTLDFSQLSDFVKELAERLGQRDASLEVTFPWFYEQTAPASSLAGLNHADAKISVSYQHGKIAERMVELTCAVTTLCPCSKEISEYSAHNQRGYIKMTALLLDEYKESSDWKALLLHAAESNASALIYPILKRPDEKTVTEQAYENPRFVEDMVRLVAADLYEIPFIQSFTVECRNEESIHLHDAYASVTFNKRHK

SEQ ID NO: 7676 - protein, 189 aa, Domibacillus mangrovi
  misc_feature (1)..(189): tr|A0A1Q5P702|A0A1Q5P702_9BACI GTP cyclohydrolase 1 OS= Domibacillus mangrovi OX=1714354 GN=folE PE=3 SV=1
MAGVDHAKIQEAVRLILEAVGENPDREGLQETPKRVAKMYEEVFSGLHTDPKEYFKTVFEEQYEELVLVKDIPFYSMCEHHLVPFFGHAHVAYLPKGGKVTGLSKLARAVETVARRPQLQERITNEVANAIMEMLEPHGAMVIVEAEHMCMAMRGVKKPGAKTVTTAARGRYENDSQLRTELLALIRSS

SEQ ID NO: 7677 - protein, 367 aa, Donghicola sp.
  misc_feature (1)..(367): tr|A0A1M4N2I8|A0A1M4N2I8_9RHOB GTP cyclohydrolase FolE2 OS=Donghicola sp. KarMa OX=1779855 GN=folE2 PE=3 SV=1
MNIHTPELDQQPTERQAEEALAVLRRWAVHASDTEIAALDPELRALLPEARPVDYPVLSRVYPQDFAVDAEYRADLPDLQNGPSSLIRGARKQIQHVGISNFRLPIRYHTRDNGDLMLETSVTGTVSLDAEKKGINMSRIMRSFYKHADETFSFEVIEAALDDYKSDLQSFDARIQMRLSYPVKVESLRSGLSGYQYYDIALELIEQNGVRRKIVHLDYVYSSTCPCSLELSEHARMMRGQLATPHSQRSVARVSVVLEPGQECLWFEDLIGLCRNAVPTETQVMVKREDEQAFAELNAANPIFVEDAARLFCEQMQNDPRIGDFRVIASHQESLHSHDAVSVLTEGETFASASIDPKMFASLFHVG

SEQ ID NO: 7678 - protein, 366 aa, Donghicola sp.
  misc_feature (1)..(366): tr|A0A1B7Z0E6|A0A1B7Z0E6_9RHOB GTP cyclohydrolase FolE2 OS=Donghicola sp. JL3646 OX=1836468 GN=folE2 PE=3 SV=1
MNIHSSDMDREPSREEAEAALALLRRWAGDATPEEVATLDPLVSRLIPGQEVSNYPALARAYPEDFVVDEDYKASMPDLQNGPSSLIKGAKQQIQHVGISNFRLPIRFHTRDNGDVTLETSVTGTVSLEAEKKGINMSRIMRSFYKHSEQTFSFEVMENALDAYMADLESFDARIQMRFRFPMKVRSLRSGLEGFQYYDIALELVERAGVRKKIIHLDYVYSSTCPCSLELSEHARQFRGQLATPHSQRSVARMSAVMEDGPMLWFEDLIDMARVAVPTETQVMVKREDEQAFAELNAANPIFVEDAARLFCEQLQQDPRVGDFRVVASHQESLHSHDAVSVLVEGETFDSDSIDPRLFTTLFHVG

SEQ ID NO: 7679 - protein, 365 aa, Donghicola tyrosinivorans
  misc_feature (1)..(365): tr|A0A2T0WX85|A0A2T0WX85_9RHOB GTP cyclohydrolase FolE2 OS=Donghicola tyrosinivorans OX=1652492 GN=folE2 PE=3 SV=1
MNVHISDLEQQPTEAEAAEALELLRRFMRGASSEDAAGLVPELKEIAGAEAGYPVLSREYPEGLKVDAAYKAALPDLQNGPSSLIRGAHEQIQHVGISNFRLPIRYHTRDNGDLTLETSVTGTVSLDADKKGINMSRIMRSFYKHAEKTFSFEVIEAALDDYKADLESFDARIQMRLSYPVKVPSLRSGLSGYQYYDIALELVEKGGVRRKVVHLDFVYSSTCPCSLELSEHARMTRGQLATPHSQRSVARVSVELRPEQECLWFEDLIELCRAAVPTETQVMVKREDEQAFAELNAANPIFVEDAARLFCEQLQKDWRVGDFRVIASHQESLHSHDAVSILTQGPLFEQDSLDPRLFSTLFHVG

SEQ ID NO: 7680 - protein, 210 aa, Dongia mobilis
  misc_feature (1)..(210): tr|A0A4R6WJN3|A0A4R6WJN3_9PROT GTP cyclohydrolase 1 OS= Dongia mobilis OX=578943 GN=folE PE=3 SV=1
MNMHRHLTLAENLTAERSQAAARRPSKAAAEAAIRTLIAYAGDDPDREGLKGTPERVARSFDEFYGGYFEDPVAILQRTFEEIEGYDELVLLKDIPFVSHCEHHLAPIIGRAHVGYLPRSRVVGISKLARVVEVYARRMQIQEKMTAQIANTIQQVLDPLGVGVVIEAEHHCMTTRGVNKPGVAMTTSTLLGSFRDNPETRREFQRLIGR

SEQ ID NO: 7681 - protein, 214 aa, Dongia mobilis
  misc_feature (1)..(214): tr|A0A4R6WSH1|A0A4R6WSH1_9PROT GTP cyclohydrolase 1 OS= Dongia mobilis OX=578943 GN=folE PE=3 SV=1
MAKSTSKPRRAPTRSRSARPSQAEAEEAVRTLLRWAGDNPAREGLLDTPRRVVKAYREYFSGYDLDPSQILKRTFEETDGYDEMIVLKDIRFESHCEHHMAPIIGRAHIAYLPRKRVVGISKLARLLECYAKRLQIQEKMTAQIANTLNDELQPRGVAVVIDASHHCMTTRGIHKPGSSMITSRMLGAFRTDASTRREFLAFIGLPPSSIGTGS

SEQ ID NO: 7682 - protein, 185 aa, Dorea formicigenerans
  misc_feature (1)..(185): tr|B0G6Q7|B0G6Q7_9FIRM GTP cyclohydrolase 1 OS=Dorea fo rmicigenerans ATCC 27755 OX=411461 GN=folE PE=3 SV=1
MIDHEKVEQAVRLLLEGIGEDVNREGLIDTPDRIARMYEEIYGGMEEDAATHLSKTFTVDSSEMVVEKDITFYSTCEHHLLPFYGKVHIGYIPDGKVVGLSKLARTVEVFARRLQLQEQLTGQIADALMEHMQAKGAIVMIEAEHMCMTMRGIKKPGSQTVTLARRGVFETDPALEERFFRMLER

SEQ ID NO: 7683 - protein, 185 aa, Dorea formicigenerans
  misc_feature (1)..(185): tr|A0A414AQ90|A0A414AQ90_9FIRM GTP cyclohydrolase 1 OS= Dorea formicigenerans OX=39486 GN=folE PE=3 SV=1
MIDHEKVEQAVRLLLEGIGEDVNREGLIDTPDRIARMYEEIYGGMEEDAATHLSRTFTVDSSEMVVEKDITFYSTCEHHLLPFYGKVHIGYIPDGKVVGLSKLARTVEVFARRLQLQEQLTGQIADALMEHMQAKGAIVMIEAEHMCMTMRGIKKPGSQTVTLARRGVFETAPALEERFFRMLER

SEQ ID NO: 7684 - protein, 185 aa, Dorea longicatena
  misc_feature (1)..(185): tr|A6BJ36|A6BJ36_9FIRM GTP cyclohydrolase 1 OS=Dorea lo ngicatena DSM 13814 OX=411462 GN=folE PE=3 SV=1
MIDHEKIEQAVRLLLEGMGEDVNREGLIDTPDRIARMYEEIYGGMDEDAGKHLSKTFTVDSHEMVIEKDITFYSTCEHHLLPFYGKAHIAYIPDGKVVGLSKLARTVEVFARRLQLQEQLTGQIADALMEHMQPEGAIVMIEAEHMCMTMRGIKKPGSQTVTIARRGVFETDPVLEERFFRMLGR

SEQ ID NO: 7685 - protein, 196 aa, Dorea longicatena
  misc_feature (1)..(196): tr|A0A174H6J0|A0A174H6J0_9FIRM GTP cyclohydrolase 1 OS= Dorea longicatena OX=88431 GN=folE PE=3 SV=1
MRTESAEKGKNMIDHEKIEQAVRLLLEGMGEDVNREGLIDTPDRIARMYEEIYGGMDEDAGKHLSKTFTVDSHEMVIEKDITFYSTCEHHLLPFYGKAHIAYIPDGKVVGLSKLARTVEVFARRLQLQEQLTGQIADALMEHMQPKGAIVMIEAEHMCMTMRGIKKPGSQTVTIARRGVFETDPVLEERFFRMLGR

SEQ ID NO: 7686 - protein, 189 aa, Dorea sp.
  misc_feature (1)..(189): tr|A0A374X452|A0A374X452_9FIRM GTP cyclohydrolase 1 OS= Dorea sp. OM02-2LB OX=2292347 GN=folE PE=3 SV=1
MRIKKKMDQEKIKQGVRLILEGVGEDLNREGLVETPDRVARMYEELLAGLTMDGSEHLQKTFSVENNEMVLEKDITFYSLCEHHLLPFYGKVHIAYVPDGKVAGLSKLARTVEIFARRLQLQEQMTGQIADALMDYLKPKGVMVMVEAEHMCMTMRGIKKPGSKTVTVVKRGIFQEEKERSELFFQMLR

SEQ ID NO: 7687 - protein, 185 aa, Dorea sp.
  misc_feature (1)..(185): tr|A0A1Q6Q6M6|A0A1Q6Q6M6_9FIRM GTP cyclohydrolase 1 OS= Dorea sp. 42_8 OX=1896999 GN=folE PE=3 SV=1
MIDHEKIEQAVRLLLEGMGEDVNREGLIDTPDRIARMYEEIYGGMDEDAGKHLSKTFTVDSHEMVIEKDITFYSTCEHHLLPFYGKAHIAYIPDGKVVGLSKLARTVEVFARRLQLQEQLTGQIADALMEYMQPKGAIVMIEAEHMCMTMRGIKKPGSQTVTIARRGVFETDLVLEERFFRMLGR

SEQ ID NO: 7688 - protein, 237 aa, Draconibacterium orientale
  misc_feature (1)..(237): tr|X5E247|X5E247_9BACT GTP cyclohydrolase 1 OS=Draconib acterium orientale OX=1168034 GN=folE PE=3 SV=1
MSYREEIIFTNTGTGKNGKTNGHNKHETIGDNHIATSIDTPMRDDAFELSDEQKMEIIEDKFRDIMETMGLDLNDDSLSGTPHRVAKMFVKEIFSGLNPANKPKVSVFDNKFKYGEMLVEKNINMNSTCEHHFLPIVGKAHVAYISSGEVIGLSKINRIVDYFARRPQVQERLTVQIANELKSILKTDDVAVVIDAKHMCVSSRGIQDESSSTVTAEYSGKFKDKSVREEFLKYVEL

SEQ ID NO: 7689 - protein, 207 aa, Draconibacterium orientale
  misc_feature (1)..(207): tr|X5DU17|X5DU17_9BACT GTP cyclohydrolase 1 OS=Draconib acterium orientale OX=1168034 GN=folE PE=3 SV=1
MCSLKNNNSNGYLRTDLYNEEATEQLSGHYKEILQIIGEDPSREGLDKTPERVAKAMQFLLQGYQMDPVEILTSAMFKEDYRQMVIVKDIEIYSMCEHHMLPFIGKAHVAYIPNGTITGLSKIARVVDVFARRLQVQERLTTQIKDCIQDTLKPLGVAVVIEAQHLCMQMRGVQKQHSITTTSDFTGAFEKVATREEFIKLISTKLS

SEQ ID NO: 7690 - protein, 207 aa, Draconibacterium sediminis
  misc_feature (1)..(207): tr|A0A0D8JEY3|A0A0D8JEY3_9BACT GTP cyclohydrolase 1 OS= Draconibacterium sediminis OX=1544798 GN=folE PE=3 SV=1
MCSLKNNNSNGYQRTDLYNEEATEQLSEHYKEILQIVGEDPSREGLDKTPDRVAKAMQFLLQGYQIDPVEILQSAMFKEDYRQMVIVKDIEIYSMCEHHMLPFIGKAHVAYIPNGTITGLSKIARVVDVFARRLQVQERLTTQIKDCIQDTLKPLGVAVVIEAQHLCMQMRGVQKQHSITTTSDFTGAFEKVATREEFIKLISTKLS

SEQ ID NO: 7691 - protein, 209 aa, Draconibacterium sediminis
  misc_feature (1)..(209): tr|A0A0D8J4D6|A0A0D8J4D6_9BACT GTP cyclohydrolase 1 OS= Draconibacterium sediminis OX=1544798 GN=folE PE=3 SV=1
MGDNHIATSIDTPMRDDAFELSDERKMEIIEEKFRDIMETMGLDLNDDSLSGTPHRVAKMFVKEIFNGLNPANKPKISVFENKFKYGEMLVEKNINMNSTCEHHFLPIVGKAHVAYISSGEVIGLSKINRIVDYFARRPQVQERLTVQIANELKTILKTDDVAVVIDAKHMCVSSRGIQDESSSTVTVEYSGKFKDKNVREEFLKYVEL

SEQ ID NO: 7692 - protein, 207 aa, Draconibacterium sp.
  misc_feature (1)..(207): tr|A0A2G6RBE3|A0A2G6RBE3_9BACT GTP cyclohydrolase 1 OS= Draconibacterium sp. OX=1965318 GN=folE PE=3 SV=1
MSSPKIITTGSYEKLEIYDDKATAELSGNYSEILRILGEDPQREGLGKTPERVARAMQFLLQGYKTDPVKILESAIFKEEYRQMVIVKDIEIYSMCEHHLLPFFGKAHVAYIPNGVITGLSKIARIVDVFARRLQVQERLTTQIKECIQNTLNPLGVAVVIEAQHLCMQMRGIQKQHSITTTSDFTGAFQKTATRDEFIKLISTKLN

SEQ ID NO: 7693 - protein, 235 aa, Duganella phyllosphaerae
  misc_feature (1)..(235): tr|A0A1E7WRK6|A0A1E7WRK6_9BURK GTP cyclohydrolase 1 OS= Duganella phyllosphaerae OX=762836 GN=folE PE=4 SV=1
MTTEPQPAYLPVTTTASERIRARLVASNTRFHANDNIAAYIEPGELDQLLDEVSGHMQKVLESLVIDTVSDHNTQDTARRVAKMYMTEVFGGRYVDMPPVTEFPNAANLNELMIIGPITVRSACSHHLCPVIGKVWIGVMPNQHSNLIGLSKYARLASWIMSRPQIQEEAVVQLADLLQEKMQPDGLAVIMEADHFCMQWRGVKDMDARMINSVMHGSFLKDPALRREFLSLIKR

SEQ ID NO: 7694 - protein, 187 aa, Duganella sacchari
  misc_feature (1)..(187): tr|A0A1M7N3X6|A0A1M7N3X6_9BURK GTP cyclohydrolase 1 OS= Duganella sacchari OX=551987 GN=folE PE=3 SV=1
MSQEEFSENDWRRLLASFGEDPDRPGLQETPARVAKAWKHWTSGYEQDPVKLLKAFEDGAEQYNEFIIVRNIPVYSHCEHHLAPFFGKATVGYIPNGKIVGLSKLTRLVDCFSKRLQVQERMTMQIANALMDVLEPKAVGVIIKCRHLCMESRGIRTPGEETVTSAMLGELQPNLAMRTEFLALAKD

SEQ ID NO: 7695 - protein, 188 aa, Duganella sp.
  misc_feature (1)..(188): tr|A0A3E1S2E0|A0A3E1S2E0_9BURK GTP cyclohydrolase 1 OS= Duganella sp. BJB480 OX=1871181 GN=folE PE=3 SV=1
MSQKEFSEGDWRRLIASFGEDPDRPGLLETPARVSKAWKHWTSGYAQDPVELLKAFEDGAEQYNELIVVRGIPVYSHCEHHLAPFFGKATVGYVPNGKIVGLSKLTRLVDCFAKRLQVQERMTMQIANALMEVLEPKAVGVVVKCRHLCMESRGIRTPGEETVTSAMLGELQPNLAMRTEFLALARES

SEQ ID NO: 7696 - protein, 188 aa, Duganella sp.
  misc_feature (1)..(188): tr|A0A0Q7WAQ5|A0A0Q7WAQ5_9BURK GTP cyclohydrolase 1 OS= Duganella sp. Root1480D1 OX=1736471 GN=folE PE=3 SV=1
MTKEVFTEDDWRRLLEHLGEDPNRPGLIETPHRVHKAWKHWVSGYGQDPAEVLKAFEDGAEQYNELIVVKNIPVYSHCEHHLAPFFGKATVGYVPNGKIVGLSKLTRLVDVFSKRLQVQERMTMQIAEALMTVLEPKAVGVVVKCRHLCMESRGIRTAGEETVTSAMLGELQPNLAMRTEFLALARES

SEQ ID NO: 7697 - protein, 192 aa, Duncaniella muris
  misc_feature (1)..(192): tr|A0A2V1INH7|A0A2V1INH7_9BACT GTP cyclohydrolase 1 OS= Duncaniella muris OX=2094150 GN=folE PE=3 SV=1
MAAEISDETIREIASHYEAILKLLGEDTTREGLVKTPMRAAKAMVYATRGYRQDPDVIINDAVFSYEGSRMVIVKDIEFYSLCEHHILPFFGKVSVGYIPDGKTIGLSKLARLVDFYARRLQVQERMTAQICNIIMEKLNAKGVIVVCSGEHLCMKMRGVEKQDSTTTTIETAGVFSDSSTLRDDFFHALSH

SEQ ID NO: 7698 - protein, 196 aa, Duncaniella sp.
  misc_feature (1)..(196): tr|A0A4Z0V0W7|A0A4Z0V0W7_9BACT GTP cyclohydrolase 1 OS= Duncaniella sp. TLL-A3 OX=2530391 GN=folE PE=3 SV=1
MSSTTGLSEETIEEIARHYAAIISLLGEDITREGLVRTPMRAAKAMAFATRGYRQDPDVIINDAIFTHEGSNMVIVRDIEFYSLCEHHILPFFGKVSIGYIPDGRTIGLSKLARLVDFYARRLQVQERLTAQICDIVMKKLGAKGVIVACTADHLCMKMRGVEKQLPATTTVETAGAFTESTTLREEFFNAIASGK

SEQ ID NO: 7699 - protein, 192 aa, Duncaniella sp.; identical to SEQ ID NO: 7697
  misc_feature (1)..(192): tr|A0A4P7VWU7|A0A4P7VWU7_9BACT GTP cyclohydrolase 1 OS= Duncaniella sp. C9 OX=2530392 GN=folE PE=3 SV=1

SEQ ID NO: 7700 - protein, 214 aa, Dyadobacter fermentans
  misc_feature (1)..(214): tr|C6VZC5|C6VZC5_DYAFD GTP cyclohydrolase 1 OS=Dyadobac ter fermentans (strain ATCC 700827 / DSM 18053 / NS114) OX=471854 GN=folE PE=3 SV=1
MDVEEIGDDHLFSGIETPLRPDAFAMEDELKMELIEKHFRHIMEIMGLDMTDDSLKGTPKRVAKMYIKEVFSGLDPKNKPAVALFDNKYKYNQMLVEKDISVFSNCEHHFVPIYGKAHVAYISSGKVIGLSKLNRIVEYFSKRPQVQERLTVQIANELKQALQTEDVAVVIDAQHMCVQSRGIRDSGSSTVTAFYGGKFEEEATKKEFLAYLGM

SEQ ID NO: 7701 - protein, 228 aa, Dyadobacter jejuensis
  misc_feature (1)..(228): tr|A0A316AP32|A0A316AP32_9BACT GTP cyclohydrolase 1 OS= Dyadobacter jejuensis OX=1082580 GN=folE PE=3 SV=1
MKQNGTLLNILPTDEMIEHMGEDHSMSSLETPLRKDAFAMEDSEKIDLIEKHFRHIMEIMGLDLTDDSLNGTPRRVAKMYIEEVFSGLNPINKPSVTLFENRYKYNQMLVEKDITVFSNCEHHFVPIYGKAHVAYISSGKVIGLSKLNRIVDFYSKRPQVQERLTMQIANELKQALSTEDVAVVIDAQHMCVHSRGIKDTGSSTITSAYSGKFENEDTRNEFLRYLNL

SEQ ID NO: 7702 - protein, 229 aa, Dyadobacter jiangsuensis
  misc_feature (1)..(229): tr|A0A2P8G950|A0A2P8G950_9BACT GTP cyclohydrolase 1 OS= Dyadobacter jiangsuensis OX=1591085 GN=folE PE=3 SV=1
MKQNGILSSIQSSEALDIEEVGDDHLFSGIDTPLRADAFAMEDELKMELIEKHFRHIMEIMGLDLTDDSLKGTPKRVAKMYIKEVFSGLDPKNKPAIALFDNKYKYNQMLVEKDISVFSNCEHHFVPIYGKAHVAYISSGKVIGLSKLNRIVEYYSKRPQVQERLTVQIANELKEALQTEDVAVVIDAQHMCVQSRGIRDSGSSTVTAFYGGKFEDEATKKEFLAYLGM

SEQ ID NO: 7703 - protein, 226 aa, Dyadobacter koreensis
  misc_feature (1)..(226): tr|A0A1H6Q1X1|A0A1H6Q1X1_9BACT GTP cyclohydrolase 1 OS= Dyadobacter koreensis OX=408657 GN=folE PE=3 SV=1
MLNNKIIFEPKIDKNVLEYEKGHHRWSYDTPLRADAFELDDNAKIELIAEHFAGIMQVLGLDLEDDSLQDTPKRVAKMYVKEIFSGLNPANKPEPTLFKNAYHYNQMLVERNISVFSNCEHHFVPIVGKAHVAYISNGQVIGLSKLNRIVQYCSQRPQVQERLTVQIANLMKEALGTEDVAVVIDAYHHCVSSRGVKDSGSTTLTAEYCGQFLNAETKNEFLKYIG

SEQ ID NO: 7704 - protein, 229 aa, Dyadobacter koreensis
  misc_feature (1)..(229): tr|A0A1H6XZN6|A0A1H6XZN6_9BACT GTP cyclohydrolase 1 OS= Dyadobacter koreensis OX=408657 GN=folE PE=3 SV=1
MKQNGTLLNTQSIENFDIEEIGDEHLFSSIETPMRPDAFALEDEVKIELIEKHFRHIMEIMGLDLTDDSLKGTPKRVAKMYIKEVFSGLDPKNKPSVALFENKYKYNQMLVEKDISVFSNCEHHFVPIYGKAHIAYISSGKVIGLSKLNRIVEYFSKRPQVQERLTVQIANELKQALQTDDIAVVVDAKHMCVQSRGVRDAGSSTVTAYYGGKFEEEATKKEFLTYLGM

SEQ ID NO: 7705 - protein, 229 aa, Dyadobacter psychrophilus
  misc_feature (1)..(229): tr|A0A1T5GFF2|A0A1T5GFF2_9BACT GTP cyclohydrolase 1 OS= Dyadobacter psychrophilus OX=651661 GN=folE PE=3 SV=1
MKQNGTSSNIQSTEMVEVEEIGNDHVFSSIETPMRKDAFAMEDDLKMELIEKHFRHIMEIMGLDLTDDSLKGTPKRVAKMFITEVFSGLDPKNKPAVTLFENKYKYDQMLVEKDISVFSNCEHHFVPIYGKAHVAYISSGKVIGLSKLNRIVEYFAKRPQVQERLTVQIANELKEALQTEDVAVVIDAQHMCVQSRGIRDSGSSTVTAFYGGKFQEEITKKEFLSYLGM

SEQ ID NO: 7706 - protein, 229 aa, Dyadobacter soli
  misc_feature (1)..(229): tr|A0A1G8A841|A0A1G8A841_9BACT GTP cyclohydrolase 1 OS= Dyadobacter soli OX=659014 GN=folE PE=3 SV=1
MKQNGILSSIQSSEALDIEEVGDDHLFSGIETPLRKDAFAMEDELKMELIEKHFRHIMEIMGLDLTDDSLKGTPKRVAKMYIKEVFSGLDPKNKPAIALFDNKYKYNQMLVEKDISVFSNCEHHFVPIYGKAHVAYISSGKVIGLSKLNRIVEYYSKRPQVQERLTVQIANELKEALQTEDVAVVIDAQHMCVQSRGIRDSGSSTVTAFYGGKFEEEGTKKEFLSYLGM

SEQ ID NO: 7707 - protein, 229 aa, Dyadobacter sp.
  misc_feature (1)..(229): tr|A0A1H6XGI0|A0A1H6XGI0_9BACT GTP cyclohydrolase 1 OS= Dyadobacter sp. SG02 OX=1855291 GN=folE PE=3 SV=1
MKQNGILSSIQSSEALDIEEVGDDHLFSGIETPLRKDAFAMEDELKMELIEKHFRHIMEIMGLDMTDDSLKGTPKRVAKMYIKEVFSGLDPKNKPAIALFDNKYKYNQMLVEKDISVFSNCEHHFVPIYGKAHVAYISSGKVIGLSKLNRIVEYYSKRPQVQERLTVQIANELKQALQTEDVAVVIDAQHMCVQSRGIRDSGSSTVTAYYGGKFEEEMTKKEFLSYLGM

SEQ ID NO: 7708 - protein, 231 aa, Dyadobacter sp.
  misc_feature (1)..(231): tr|A0A3D8Y9T5|A0A3D8Y9T5_9BACT GTP cyclohydrolase 1 OS= Dyadobacter sp. RS19 OX=2259619 GN=folE PE=3 SV=1
MKQNGTLSNIPSIDMLEAEEVGDNHLLTSIETPMRPDAFALDDDTKIELIEKHFRHIMEIMGLDLTDDSLKGTPKRVAKMYIKEVFSGLDPKNKPAVALFENRYKYDQMLVEKDITVFSNCEHHFVPIYGKAHVAYISSGKVIGLSKLNRIVEYYSKRPQVQERLTVQIANELKEALNTEDIAVVIDARHMCVQSRGVRDSGSSTVTAYYGGKFEEETTKKEFLSYLTLGS

SEQ ID NO: 7709 - protein, 299 aa, Dyella japonica
  misc_feature (1)..(299): tr|A0A075JZL1|A0A075JZL1_9GAMM GTP cyclohydrolase FolE2 OS=Dyella japonica A8 OX=1217721 GN=folE2 PE=3 SV=1
MPDVAVDPALGGQLAWVGMERIATPVRIDAGGSTTLQVIASVDAFVNLVRTDRRGIHMSRLYRLIDEHLGAEPISTVMLERLLRAFLQSQHGLADRARLRLRFEQPVRRMALRSGQDGWRVYPVTIEATMEHGDMDVSLAIEVTYSSTCPASAALARQVITEHFARRFPSPDPVPRDAALAWLDSEQGIAATPHAQRSMAYVWTRLAHGSAWDAPALIDRVEASLGTPVQAMVKREDEQAFALANGSNLMFCEDAARRIQQALETDDGIADFHIRVEHQESLHAHNAVAQARKALTPRA

SEQ ID NO: 7710 - protein, 200 aa, Dyella japonica
  misc_feature (1)..(200): tr|A0A075JVB3|A0A075JVB3_9GAMM GTP cyclohydrolase 1 OS= Dyella japonica A8 OX=1217721 GN=folE PE=3 SV=1
MSERQDPTEVTREQAEEAVRTLLRWSGEDPSREGLLDTPKRVVKAYKDWFSGYDIDPGDYLRRTFEEVAGYDEMVVLRDIEFESHCEHHMAPIIGRAHVGYLPTNRVVGISKLARVVDAYARRFQVQEKLTAQIAQCIQENLQPAGVAVVIDASHECMTTRGVHKRGVSMITSQMLGAFRDDARTRSEFLQFIGIHGAGR

SEQ ID NO: 7711 - protein, 317 aa, Dyella jiangningensis
  misc_feature (1)..(317): tr|A0A328P3S6|A0A328P3S6_9GAMM GTP cyclohydrolase FolE2 OS=Dyella jiangningensis OX=1379159 GN=folE2 PE=3 SV=1
MYTEENTARLMPDVAVHAQPHLAGELDWVGMDGIEVPVRFDAGDGDVQRASARVGAFVNLRRPDKRGIHMSRLYLQVEQALSTQTLSASSLRELLQGFLDSHKDLSDRACLSIRFEHLVRRPALRSGNSGWRAYPVSIEASLVGDQFLLELGTEVVYSSTCPASAALSRQLIQEQFSKDFDAAEPVDHAAVLAWLGSEKGIVATPHAQRSVARLRVRPTEGAKFDLISLIDRTEHALGTPVQTAVKREDEQAFALANGGNLMFCEDAARRIQKALDVDATLSDFHIRVEHQESLHPHDAVAYASKGVEGGYAGKGCA

SEQ ID NO: 7712 - protein, 317 aa, Dyella jiangningensis
  misc_feature (1)..(317): tr|A0A023NNZ6|A0A023NNZ6_9GAMM GTP cyclohydrolase FolE2 OS=Dyella jiangningensis OX=1379159 GN=folE2 PE=3 SV=1
MYTEENTARLMPDVAVHAQPHLAGELDWVGMDGIEVPVRFDAGDGDVQRASARVGAFVNLRRPDKRGIHMSRLYLQVEQALSTQTLSAASLQELLRGFLDSHKDLSDRACLSVRFEHLVRRPALRSGNSGWRAYPVSIEASIVGDQFLLELGTEVVYSSTCPASAALSRQLIQEQFTKDFDATQPIDHAAVVAWLGSEKGIVATPHAQRSVARLRVRPAEGAKFDLINLIDRTEHALGTPVQTAVKREDEQAFALANGGNLMFCEDAARRIQKALDADSTLSDFHIRVEHQESLHPHDAVAYASKGVDGGYAGKGCV

SEQ ID NO: 7713 - protein, 317 aa, Dyella marensis
  misc_feature (1)..(317): tr|A0A1I2DH98|A0A1I2DH98_9GAMM GTP cyclohydrolase FolE2 OS=Dyella marensis OX=500610 GN=folE2 PE=3 SV=1
MYTQEQTARLLPDVAHHAQPHLAGALDWVGMDGIEVPVRFDAGDGEPQRASARVGAFVNLHRPDKRGIHMSRLYLLVEHALSAGQLTAGALRDLLHAFLESHKDLSDRACLSIRFEQLVRRPALRSGNSGWRAYPVCIEASMVGEDFLLEYGTEVVYSSTCPASAALSRQLIQDQFARDFDVSHPLEHAAVLAWLGSERGIVATPHAQRSVARLRVRVAAGGAFHLIKLIDRVEQALGTPVQTAVKREDEQAFALANGSNLMFCEDAARRIQKALDADANLADFHIRVEHQESLHPHDAVAYASKGVAGGLGGAARA

SEQ ID NO: 7714 - protein, 199 aa, Dyella marensis
  misc_feature (1)..(199): tr|A0A1I2HUU3|A0A1I2HUU3_9GAMM GTP cyclohydrolase 1 OS= Dyella marensis OX=500610 GN=folE PE=3 SV=1
MSDQHPTDVTPEQAEEAVRVLLRWAGEDPSREGLLDTPKRVVKAYRDWFSGYLTDPGEYLRRTFEEVAGYDEMVVLRDIEFESHCEHHMAPIVGRAHVGYLPTNRVVGISKLARVVEAYARRFQVQEKLTAQIAQCIQENLHPAGVAVVIDASHECMTTRGVHKRGVSMVTSQMLGSFRDDARTRAEFLQFIGIRGGVR

SEQ ID NO: 7715 - protein, 200 aa, Dyella soli
  misc_feature (1)..(200): tr|A0A4R0YK01|A0A4R0YK01_9GAMM GTP cyclohydrolase 1 OS= Dyella soli OX=522319 GN=folE PE=3 SV=1
MSDRHEPTDVTREQAEEAVRVLLRWSGEDPSREGLLDTPKRVVKAYRDWFSGYEIDPGEYLRRTFKEVHGYDEMVVLRDIEFESHCEHHMAPIIGRAHVGYLPTNRVVGISKLARVVDAYARRFQVQEKLTAQIAQCIQENLQPAGVAVVIDASHECMTTRGVHKRGVSMITSQMLGAFRDDARTRSEFLQFIGIHGAGR

SEQ ID NO: 7716 - protein, 316 aa, Dyella soli
  misc_feature (1)..(316): tr|A0A4R0YYN2|A0A4R0YYN2_9GAMM GTP cyclohydrolase FolE2 OS=Dyella soli OX=522319 GN=folE2 PE=3 SV=1
MYTQENTARLLPDVAVHAQPHLAGALDWVGMDGIEVPVRFDGGDGEVVRASARVGAFVNLNRPDKRGIHMSRLYLQVEEALSSQTLSAQSLHDLLRGFLGSHKDLSDRACLSIRFEHLVRRPALRSANSGWRAYPVCIEASLTGDEFLLEFGTEVIYSSTCPASAALSRQLIQDQFGKDFAPGEPLDHAAVLAWLGSERGIVATPHAQRSVARLRVRMNTGAPFNLIHLIDSVEHALGTPVQTAVKREDEQAFALANGGNLMFCEDAARRIQKALDADAALADFHVRVEHQESLHPHDAVAYASKGVEGGFGSEKR

SEQ ID NO: 7717 - protein, 300 aa, Dyella sp.
  misc_feature (1)..(300): tr|A0A370X0X3|A0A370X0X3_9GAMM GTP cyclohydrolase FolE2 OS=Dyella sp. 4MSK11 OX=1927960 GN=folE2 PE=3 SV=1
MPDVAIQSQLHVAGALDWVGMDGIEVPVRFDAGDGDVQRASAQVGAFVNLTRPDRRGIHMSRLYLLVDQYLSTRTVDGAMLESLLRAFLESHKDLADRARISIRFDQLVRRAALRSDNSGWRAYPVSIEASLCADGFRMELGTEVVYSSTCPASAALSRQLIQEQFAKDFDAGKPVDHAAVLAWLGSEKGIVATPHAQRSVARLLVRFVDGAPLNLIGLLDRVEHALGTPVQTAVKREDEQAFALANGSNLMFCEDAARRIQRALDADSGIADFHVRLEHQESLHPHDAVAYTSKGDSAR

SEQ ID NO: 7718 - protein, 198 aa, Dyella sp.
  misc_feature (1)..(198): tr|A0A1G7VTZ2|A0A1G7VTZ2_9GAMM GTP cyclohydrolase 1 OS= Dyella sp. 333MFSha OX=1798240 GN=folE PE=3 SV=1
MSDDAKSRPVSREQAEEAVRTLLLWAGEDPNREGLLDTPKRVVKAYGDWFKGYDEDPAEYLRRTFEEVAGYDEMIVLRDIEFESHCEHHMAPIIGRAHVGYVPTDRVVGISKLARVVDGFARRFQVQEKLTAQIAHCIEDTLRPRGVGVVIDASHECMTTRGVHKRGVSMITSQMLGSFREDPRTRGEFLRFVGVDRR

SEQ ID NO: 7719 - protein, 317 aa, Dyella thiooxydans
  misc_feature (1)..(317): tr|A0A160N0W0|A0A160N0W0_9GAMM GTP cyclohydrolase FolE2 OS=Dyella thiooxydans OX=445710 GN=folE2 PE=3 SV=1
MHSHENTARLMPDVAHQAQPHLAGALDWVGMDGIEVPVRFDVGDGEVQRASAQVGAFVNLTRPDQRGIHMSRLYLLVDRHLGGSEPLSAKGLEGLLQAFLESHKDLSDRARLSIRFDALVRRAALRSGNSGWRSYPVSVEASLGPDGFALELGTEVVYSSTCPASAALSRQLIQERFTQDFAADQPIDHAAVVAWLGSEQGIVATPHAQRSVARLLVRLNDGVSFDLLDTLDRVEGALGTPVQTAVKREDEQAFALANGGNLMFCEDAARRIQRALETDDRLADFHVRVEHQESLHPHDAVAYASKGVPGGFGSGPR

SEQ ID NO: 7720 - protein, 199 aa, Dyella thiooxydans
  misc_feature (1)..(199): tr|A0A160N572|A0A160N572_9GAMM GTP cyclohydrolase 1 OS= Dyella thiooxydans OX=445710 GN=folE PE=3 SV=1
MSDQSTRHDVTREQAEEAVRTLLRWAGDDPSREGLLDTPKRVVKAYGDWFSGYVEDPADYLKRTFEEVEGYDEMVVLRDIEFESHCEHHMAPIIGRAHVGYLPTNRVVGISKLARVVDGYARRFQVQEKMTAQIAQCINETLQPRGVAVVIEASHECMTTRGVHKRGVSMVTSQMLGVFREDPRTRAEILQFLGIQRTC

SEQ ID NO: 7721 - protein, 192 aa, Dysgonamonadaceae bacterium
  misc_feature (1)..(192): tr|A0A2N4SB00|A0A2N4SB00_9BACT GTP cyclohydrolase 1 OS= Dysgonamonadaceae bacterium OX=2065189 GN=folE PE=3 SV= 1
MSLEETAEKRKEAISHFISEIIPMIGEDVNREGLIKTPDRVAKALLYLTKGYHQNPEEILRSALFKENYRQMVIVKDIDLFSLCEHHMLPFFGKAHVAYIPNGYVTGLSKIARVVDVFARRLQVQERLTTQIKECIQNTLNPLGVMVVIEAQHMCMQMRGVEKQNSITTTSDFTGVFKEQKTREEFIALIRK

SEQ ID NO: 7722 - protein, 191 aa, Dysgonomonas alginatilytica
  misc_feature (1)..(191): tr|A0A2V3PPC8|A0A2V3PPC8_9BACT GTP cyclohydrolase 1 OS= Dysgonomonas alginatilytica OX=1605892 GN=folE PE=3 SV= 1
MSSINNEENNITSLANHYKAVIDLLGEDAGREGLLDTPKRVAKAMTFLTKGYNENPEEILRKALFKEDYSQMVIVKDIDFYSLCEHHMLPFWGKAHVAYIPNGYITGLSKIPRVVEVFARRLQVQERLTTQIKDCIQKTLNPMGVMVVIEAQHMCMQMRGVEKQNSTTTTSDFTGVFNTAKTREEFINLIR

SEQ ID NO: 7723 - protein, 191 aa, Dysgonomonas capnocytophagoides
  misc_feature (1)..(191): tr|A0A4Y8L6B5|A0A4Y8L6B5_9BACT GTP cyclohydrolase 1 OS= Dysgonomonas capnocytophagoides OX=45254 GN=folE PE=3 S V=1
MPSTDSKDQKTSILAENYKGIISLLGEDVSREGLLDTPERVAKAMQFLTSGYTEDPQEVLRKALFKEDYKQMVIVKDIDFYSLCEHHMLPFWGKAHVAYIPNGYITGLSKIPRIVDIFSRRLQVQERLTTQIKDCLQETLNPLGVMVVIEAQHMCMQMRGVQKQNSTTTTSDFTGAFNQAKTREEFINLIK

SEQ ID NO: 7724 - protein, 187 aa, Dysgonomonas gadei
  misc_feature (1)..(187): tr|F5J429|F5J429_9BACT GTP cyclohydrolase 1 OS=Dysgonom onas gadei ATCC BAA-286 OX=742766 GN=folE PE=3 SV=1
MQEEQNIELLAKHYKEIISLLGENADREGLLSTPVRVAKAMQFLTKGYHEDPEEILRKAFFKEDYRQMVIVKDIDFYSMCEHHMLPFWGKAHVAYIPNGYITGLSKIARVVDVFARRLQVQERMTLQIKECIQKTLNPLGVMVVIEAQHMCMQMRGVEKQNSTTTTSDFTGVFNQAKTREEFINLIR

SEQ ID NO: 7725 - protein, 195 aa, Dysgonomonas macrotermitis
  misc_feature (1)..(195): tr|A0A1M5CBK7|A0A1M5CBK7_9BACT GTP cyclohydrolase 1 OS= Dysgonomonas macrotermitis OX=1346286 GN=folE PE=3 SV=1
MPSTDSTIANQTTSILADNYKNIIRLLGEDTDREGLLDTPERVAKAMQFLTSGYSQNPEEILQKALFKEDYKQMVIVKDIDFYSLCEHHMLPFWGKAHVAYIPNGYITGLSKIPRIVDVFSRRLQVQERLTTQIKDCLQNTLNPLGVMVVIEAQHMCMQMRGVQKQNSTTTTSDFTGAFNQAKTREEFINLIRQR

SEQ ID NO: 7726 - protein, 187 aa, Dysgonomonas mossii
  misc_feature (1)..(187): tr|F8WWV8|F8WWV8_9BACT GTP cyclohydrolase 1 OS=Dysgonom onas mossii DSM 22836 OX=742767 GN=folE PE=3 SV=1
MQEENKMNLLEEHYKNVISLLGEDPEREGLLMTPHRVAKAMRFLTKGYSESPEAILNKALFKEDYRQMVIVKDIDFYSLCEHHMLPFWGKAHVAYIPNGYITGLSKIARVVDVFARRLQVQERMTLQIKECIQQTLNPLGVMVVIEAQHMCMQMRGVEKQNSTTTTSDFTGVFNQAKTREEFINLIR

SEQ ID NO: 7727 - protein, 187 aa, Dysgonomonas mossii
  misc_feature (1)..(187): tr|A0A4Y9IJ89|A0A4Y9IJ89_9BACT GTP cyclohydrolase 1 OS= Dysgonomonas mossii OX=163665 GN=folE PE=3 SV=1
MQEENKMNLLEEHYKNIISLLGEDPEREGLLMTPHRVAKAMRFLTKGYSESPEAILNKALFKEDYRQMVIVKDIDFYSLCEHHMLPFWGKAHVAYIPNGYITGLSKIARVVDVFARRLQVQERMTLQIKECIQQTLNPLGVMVVIEAQHMCMQMRGVEKQNSTTTTSDFTGVFNQAKTREEFINLIR

SEQ ID NO: 7728 - protein, 187 aa, Dysgonomonas sp.; identical to SEQ ID NO: 7727
  misc_feature (1)..(187): tr|A0A1M3L066|A0A1M3L066_9BACT GTP cyclohydrolase 1 OS= Dysgonomonas sp. 37-18 OX=1895907 GN=folE PE=3 SV=1

SEQ ID NO: 7729 - protein, 192 aa, Dysgonomonas sp.
  misc_feature (1)..(192): tr|A0A3D3TEP3|A0A3D3TEP3_9BACT GTP cyclohydrolase 1 OS= Dysgonomonas sp. OX=1891233 GN=folE PE=3 SV=1
MSSIQNEEKKLPQLITHYKEIIELLGEDSGREGLLDTPMRVAKAMQFLTKGYNEDPEEILRKALFKEDYRQMVIVKDIDFYSLCEHHMLPFWGKAHVAYIPNGYITGLSKIPRVVDVFARRLQVQERMTTEIKKCIQKTLNPLGVMVVLEAQHMCMQMRGVQKQNSVTTTSDFTGVFNQAKTREEFISLIQK

SEQ ID NO: 7730 - protein, 232 aa, Echinicola sp.
  misc_feature (1)..(232): tr|A0A514CHU3|A0A514CHU3_9BACT GTP cyclohydrolase 1 OS= Echinicola sp. LN3S3 OX=2591634 GN=folE PE=3 SV=1
MKQKGIMLNTTGIDIDRSIDEIGDEHIGTSHETPLREDAFEMDDELKMELIEKHFKDIMHVLGLDLTDDSLKGTPRRVAKMFVQEVFSGLDPKNKPEVKLFENKYKYSEMLVEKDITFFSHCEHHFVPIYGKAHVAYISNGNVIGLSKINRIVQYFAKRPQVQERLTVQIGNELKEILGTEDVAVVIDAHHMCVSSRGVKDVNSKTVTSFYSGKFDKEKATRKEFMQYVTMK

SEQ ID NO: 7731 - protein, 232 aa, Echinicola strongylocentroti
  misc_feature (1)..(232): tr|A0A2Z4ILH2|A0A2Z4ILH2_9BACT GTP cyclohydrolase 1 OS= Echinicola strongylocentroti OX=1795355 GN=folE PE=3 SV =1
MKQKGIMLNTTGIKIDSSIDEMGDEHIGTSHETPLREDAFEMDDELKMELIEKHFKDIMHVLGLDLTDDSLSGTPRRVAKMFVQEVFSGLDPKNKPEVKLFENKYKYSEMLVEKDITFFSHCEHHFVPIYGKAHVAYISNGNVIGLSKINRIVQYFAKRPQVQERLTMQIGNELKEILGTEDVAVVIDAHHMCVSSRGVQDVNSKTVTSFYSGKFDKDDTTRKEFMQYIALK

SEQ ID NO: 7732 - protein, 232 aa, Echinicola vietnamensis
  misc_feature (1)..(232): tr|L0FYL1|L0FYL1_ECHVK GTP cyclohydrolase 1 OS=Echinico la vietnamensis (strain DSM 17526 / LMG 23754 / KMM 622 1) OX=926556 GN=folE PE=3 SV=1
MKQKGIMLNTTGIDIDRSIDEIGDEHIGTSHETPLREDAFEMDDELKMELIEKHFKDIMHVLGLDLTDDSLKGTPRRVAKMFVQEVFSGLDPKNKPEIKLFENKYKYSEMLVEKDITFFSHCEHHFVPIYGKAHVAYISNGNVIGLSKINRIVQYFAKRPQVQERLTMQIGNELKEILGTDDVAVVIDAHHMCVSSRGVKDVNSKTVTSFYSGKFDKDDSTRKEFMQYVTMQ

SEQ ID NO: 7733 - protein, 270 aa, Ectothiorhodosinus mongolicus
  misc_feature (1)..(270): tr|A0A1R3W077|A0A1R3W077_9GAMM GTP cyclohydrolase FolE2 OS=Ectothiorhodosinus mongolicus OX=233100 GN=folE2 PE =3 SV=1
MNSTAATVVTNMPDVQSSADTRQIPINKVGIKDILHPVRVKDRSGGEQHTVARFSMYVNLPQDFKGTHMSRFVDILNSHEREITVETFKLMLQEVAERLEAESGHIEMCFPYFINKAAPVSGVCSLLDYEVSFIGEVKDGEAVMRIKVLVPVTTLCPCSKGISQYGAHNQRSHVTVDARIADFIWVEEIIDMVEAEASCELYGLLKRPDEKFVTERAYDNPKFVEDLVRDVALRLNNEERIRAYTVTSENFESIHNHSAYALIETDKDLA

SEQ ID NO: 7734 - protein, 207 aa, Ectothiorhodospira haloalkaliphila
  misc_feature (1)..(207): tr|W8L4M8|W8L4M8_9GAMM GTP cyclohydrolase 1 OS=Ectothio rhodospira haloalkaliphila OX=421628 GN=folE PE=3 SV=1
MTKTVTKIAGGKEPVEAHEPMSADELAEHYRLMLEGLGEDPGREGLQGTPLRAAKAMQYLTSGYHQSLEELVNGALFASDSDEMVLVKDIELYSLCEHHLLPIIGKCHVAYIPDGKVIGLSKIARIVDMFARRLQIQESLTREIAQAVMDVTGARGVGVVAEARHMCMMMRGVEKQNSAMLTSVMLGNFRDDARTRSEFLELIRRSH

SEQ ID NO: 7735 - protein, 278 aa, Ectothiorhodospira haloalkaliphila
  misc_feature (1)..(278): tr|W8KMV7|W8KMV7_9GAMM GTP cyclohydrolase FolE2 OS=Ecto thiorhodospira haloalkaliphila OX=421628 GN=folE2 PE=3 SV=1
MSTIVPKLITPAIPDVQASADTREIPINKVGIKDIRHPVRVTDRTGADQHTVAHFSMYVNLPHDFKGTHMSRFVDILNAHEREITVETFKLMLHEMAERLEAAAGHIEMNFPYFVNKPAPVTGVCSLMDYDVTFIGVIQDGKPQMNIQVLVPVTSLCPCSKGISEYGAHNQRSHVTVNVRIKDFMWVEELIDLVEKEASCELYGLLKRPDEKYVTERAYDNPKFVEDLVRDIAVRLNRDERVSAYSVSSENFESIHNHSAYALIERDKELEALALAKV

SEQ ID NO: 7736 - protein, 205 aa, Ectothiorhodospira magna
  misc_feature (1)..(205): tr|A0A1H8Z1H0|A0A1H8Z1H0_9GAMM GTP cyclohydrolase 1 OS= Ectothiorhodospira magna OX=867345 GN=folE PE=3 SV=1
MKPLGQITRDGAANASPRLMSVEALAEHYRAMLTGLGENPEREGLKGTPLRAAKAMQYLTQGYHQSLDELVNGALFASSSDEMVLVKDIELYSLCEHHLLPIIGKCHVAYLPNGKVLGLSKVARIVDMFARRLQIQESMTREIAQAIMDVTQARGVAVVAEARHMCMMMRGVEKQNSSMVTSVMLGAFREDARTRSEFMELIRRG

SEQ ID NO: 7737 - protein, 272 aa, Ectothiorhodospira magna
  misc_feature (1)..(272): tr|A0A1H9FFD1|A0A1H9FFD1_9GAMM GTP cyclohydrolase FolE2 OS=Ectothiorhodospira magna OX=867345 GN=folE2 PE=3 SV =1
MSTTVSPARTLAIPDVQSSADTRRIPINKVGIKDIRHPVRVRDRTGKDQHTVASFNMYVNLPQDFKGTHMSRFVEILNTHEYEITVDSFKTMLHEMAERLEAATGHIEMRFPFFVNKAAPVSGVQSLMDYEVTFIGKISDGRPSMNIQVVVPVTSLCPCSKGISEYGAHNQRSHVTVNAQVEQFVWVEELIDLVESQASCELYGLLKRPDEKYVTERAYDNPKFVEDLVRDIAICLNDDARISAYSVSSENFESIHNHSAYALIERDKTAER

SEQ ID NO: 7738 - protein, 278 aa, Ectothiorhodospira marina
  misc_feature (1)..(278): tr|A0A1H7NLH2|A0A1H7NLH2_9GAMM GTP cyclohydrolase FolE2 OS=Ectothiorhodospira marina OX=1396821 GN=folE2 PE=3 SV=1
MSTIVPKLITPAIPDVQASADTREIPINKVGIKDIRHPVRVTDRTGNDQHTVARFSMYVNLPHNFKGTHMSRFVDILNAHEREITVETFKLMLHEMAERLEAAAGHLEMNFPYFVNKPAPVTGVCSLMDYDVSFIGVIQDGKPQMNIQVLVPVTSLCPCSKGISEYGAHNQRSHVTVNVRIKDFMWVEELIDLVEKEASCELYGLLKRPDEKYVTERAYDNPKFVEDLVRDIAVRLNQDERISAYSVSSENFESIHNHSAYALIERDKELEALALAGA

SEQ ID NO: 7739 - protein, 207 aa, Ectothiorhodospira marina
  misc_feature (1)..(207): tr|A0A1H7F3Y6|A0A1H7F3Y6_9GAMM GTP cyclohydrolase 1 OS= Ectothiorhodospira marina OX=1396821 GN=folE PE=3 SV=1
MTKTVAKIAGGEDPVEADASLSADELAEHYRLILAGLGEDPGREGLKGTPLRAAKAMQYLTSGYHQSLDELVNGALFTSDSDEMVLVKDIELYSICEHHLLPIIGKCHVAYIPDGKVIGLSKIARIVDMFARRLQIQESLTREIAQAVMDVTGARGVGVVAEARHMCMMMRGVEKQNSAMLTSVMLGNFRDDARTRAEFLDLIRRDR

SEQ ID NO: 7740 - protein, 275 aa, Ectothiorhodospira mobilis
  misc_feature (1)..(275): tr|A0A1I4SKY7|A0A1I4SKY7_ECTMO GTP cyclohydrolase FolE2 OS=Ectothiorhodospira mobilis OX=195064 GN=folE2 PE=3 SV=1
MSTLVPKVIQSAIPDVQSSADTRRIPINKVGIKDIRHPVRVRDRSGGEQHTVARFAMYVNLPHDFKGTHMSRFVEILNAHEREITVETFKLMLHEVARRLEAQAGHIEMSFPYFVNKPAPVSGVCSLMDYDVTFIGEIRDGQPQLIIRVLVPVTSLCPCSKGISDYGAHNQRSHVTVEARVRDFVWVEELIDLVEEEASCELWGLLKRPDEKYVTEHAYDNPKFVEDLVRDIAVRLNADDRIAAYSVASENFESIHNHSAYALIERDKESDPPAA

SEQ ID NO: 7741 - protein, 206 aa, Ectothiorhodospira mobilis
  misc_feature (1)..(206): tr|A0A1I4Q4N0|A0A1I4Q4N0_ECTMO GTP cyclohydrolase 1 OS= Ectothiorhodospira mobilis OX=195064 GN=folE PE=3 SV=1
MINSAARIAGDEDAAAGDGALMPTEELAGLYRRVLEGLGEDPQREGLQGTPLRAARAMQFLTGGYHQSLETLVNGALFTTDSDEMVLVKDIELYSLCEHHLLPIIGKCHVAYIPDGRVLGLSKIARIVDMFARRLQIQESLTRQIAEAVMQVTGARGVGVVAEARHMCMMMRGVEKQGSAMITSVMLGNFREDARTRAEFMDLVRG

SEQ ID NO: 7742 - protein, 278 aa, Ectothiorhodospira sp.
  misc_feature (1)..(278): tr|A0A161HF76|A0A161HF76_9GAMM GTP cyclohydrolase FolE2 OS=Ectothiorhodospira sp. BSL-9 OX=1442136 GN=folE2 PE =3 SV=1
MSTIVPKLITPAIPDVQASADTREIPINKVGIKDIRHPVRVTDRTGADQHTVARFSMYVNLPHDFKGTHMSRFVDILNAHEREITVETFKLMLHEMAERLEAAAGHIEMNFPYFVNKPAPVTGVCSLMDYDVTFIGVIQDGKPQMNIQVLVPVTSLCPCSKGISEYGAHNQRSHVTVNVRIKDFMWVEELIDLVEKEASCELYGLLKRPDEKYVTERAYDNPKFVEDLVRDIAVRLNRDERVSAYSVSSENFESIHNHSAYALIERDKELEALALAKV

SEQ ID NO: 7743 - protein, 187 aa, Ectothiorhodospira sp.
  misc_feature (1)..(187): tr|A0A167BJM9|A0A167BJM9_9GAMM GTP cyclohydrolase 1 OS= Ectothiorhodospira sp. BSL-9 OX=1442136 GN=folE PE=3 SV =1
MSADELAEHYRLMLEGLGEDPGREGLQGTPLRAAKAMQYLTSGYHQSLEELVNGALFASDSDEMVLVKDIELYSLCEHHLLPIIGKCHVAYIPDGKVIGLSKIARIVDMFARRLQIQESLTREIAQAVMDVTGARGVGVVAEARHMCMMMRGVEKQNSAMLTSVMLGNFRDDARTRSEFLELIRRSH

SEQ ID NO: 7744 - protein, 269 aa, Ectothiorhodospiraceae bacterium
  misc_feature (1)..(269): tr|A0A2A4X473|A0A2A4X473_9GAMM GTP cyclohydrolase FolE2 OS=Ectothiorhodospiraceae bacterium OX=2026737 GN=folE 2 PE=3 SV=1
MTTTTNTTTNDIADVQNTEDTRKIAINKVGIKDIRHPVRVRDRTGGDQHTIANFNMYVNLPHNFKGTHMSRFVEILNQHEREISVQSFKDMLVEMTDRLEAESGHVEMSFPYFVNKAAPVSGVKSLLDYDVTFIGAIEKGNHETILKVVVPVTSLCPCSKKISERGAHNQRSHVTLTVKTQEFVWIEDLIDIVENIASCELYGLLKRPDEKYVTERAYDNPKFVEDMVRDIATALNDDQRISAYIVESENFESIHNHSAYALIEKNMGT

SEQ ID NO: 7745 - protein, 208 aa, Ectothiorhodospiraceae bacterium
  misc_feature (1)..(208): tr|A0A2E0UIX4|A0A2E0UIX4_9GAMM GTP cyclohydrolase 1 OS= Ectothiorhodospiraceae bacterium OX=2026737 GN=folE PE= 3 SV=1
MSRIAEDFELLERMKNNGQAERMEAYVRGILEEVGEDPERSGLLRTPKRVAAAYAFLTQGYHTDLEKVINDAIFDEDYNEMVIVKDIDFYSLCEHHMLPFFGRCHVAYIPNGKIIGLSKLPRVVDVFARRLQVQERMTQQIAETLMEYLSPLGVAVVCEGHHMCMMMRGVEKQNSITTTSAMLGEFSTNPNSRDEFLRLINTSYTSRG

SEQ ID NO: 7746 - protein, 189 aa, Edaphobacillus lindanitolerans
  misc_feature (1)..(189): tr|A0A1U7PL29|A0A1U7PL29_9BACI GTP cyclohydrolase 1 OS= Edaphobacillus lindanitolerans OX=550447 GN=folE PE=3 S V=1
MANVDHAKIREAVTMILEAIGEDPSREGLIDTPKRVANMYGEVFSGIDQDPREYFKTVFNEEHDELVIVKDIHFQSMCEHHLLPFYGKAHVAYIPRDGAIAGLSKLARAVESVSRRPQLQERITATVADALVDMLNPVGVYVVVEAEHMCMTMRGIRKPGSKTVTSVARGIFEDDAAKRAEIISLVKMS

SEQ ID NO: 7747 - protein, 201 aa, Edaphobacter aggregans
  misc_feature (1)..(201): tr|A0A428ME91|A0A428ME91_9BACT GTP cyclohydrolase 1 OS= Edaphobacter aggregans OX=570835 GN=folE PE=3 SV=1
MASTQATIETSLEAVSTQDLYREMLTRIGEDPTRDGLLRTPERMEKSMAFLTRGYTMNVTDVLHDALFDVDYDEMVIVKDIEFFSMCEHHLLPFFGKAHIAYVPNGKVIGLSKIPRLVDVFARRLQVQERLTTQVGEAITEAINPQGVAVILEAQHLCMMMRGVEKQHSSTVTSAMLGVFKTQLQTRNEFLSLVRRQGSSF

SEQ ID NO: 7748 - protein, 202 aa, Edaphobacter dinghuensis
  misc_feature (1)..(202): tr|A0A495BQ13|A0A495BQ13_9BACT GTP cyclohydrolase 1 OS= Edaphobacter dinghuensis OX=1560005 GN=folE PE=3 SV=1
MASTSATLDPASLETVSTQELYRELLRRTGEDPERDGLLKTPERMEKSMAFLTKGYTMDITEVLHDALFDVDYDEMVIVKDIEFFSQCEHHLLPFFGKAHIAYVPNGKVIGLSKIPRLVDVFARRLQVQERLTKQVSEAIQEAINPQGVAVILEAQHLCMMMRGVEKQHSSTVTSAMLGVFKTQLQTRNEFLSLVRRQGSGF

SEQ ID NO: 7749 - protein, 202 aa, Edaphobacter modestus
  misc_feature (1)..(202): tr|A0A4Q7YRJ5|A0A4Q7YRJ5_9BACT GTP cyclohydrolase 1 OS= Edaphobacter modestus OX=388466 GN=folE PE=3 SV=1
MARTNNVLETTSLSEFSTQDLYREILTRIGEDPNRDGLLRTPERMEKAMAFLTRGYKMDITEVLHAALFDVDYDEMVIVKDVEFFSMCEHHLLPFFGKAHVAYVPNGKVIGLSKIPRLVDVFARRLQVQERLTRQIGEAITDAIDPQGVAVILEAQHLCMMMRGVEKQHSLTVTSAMLGVFKTQLQTRNEFLSLVRRNGGSF

SEQ ID NO: 7750 - protein, 220 aa, Edwardsiella anguillarum
  misc_feature (1)..(220): tr|A0A076LVJ4|A0A076LVJ4_9GAMM GTP cyclohydrolase 1 OS= Edwardsiella anguillarum ET080813 OX=667120 GN=folE PE= 3 SV=1
MSSLSKEAALVHEALLAHGLETPLRGEPLARDTRKAQIEAHMTEVMRLLNLDLSDDSLTETPSRIAKMYVDEIFSGLDYANFPKITIIENKMHVDEMVTVRDITLTSTCEHHFVTIDGKATVAYIPKEGVIGLSKINRIVRFFAQRPQVQERLTQQILVALQTLLGTKNVAVSIDAVHYCVKARGVRDATSATTTTSLGGLFKTSQNSRQEFLRAVRHHV

SEQ ID NO: 7751 - protein, 220 aa, Edwardsiella hoshinae
  misc_feature (1)..(220): tr|A0A376DI32|A0A376DI32_9GAMM GTP cyclohydrolase 1 OS= Edwardsiella hoshinae OX=93378 GN=folE PE=3 SV=1
MSSLSKEAALVHEALVARGLETPLRGELLARDTRKTQIEAHMTEVMKLLNLDLSDDSLAETPQRIAKMYVDEIFSGLDYANFPKITIIENKMHVDEMVTVRDITLTSTCEHHFVTIDGKATVAYIPKDGVIGLSKINRIVRFFAQRPQVQERLTQQILVALQTLLGTKNVAVSIDAVHYCVKARGVRDATSATTTTSLGGLFKTSQNTRQEFLRAVRHHA

SEQ ID NO: 7752 - protein, 220 aa, Edwardsiella ictaluri
  misc_feature (1)..(220): sp|C5BCL9|GCH1_EDWI9 GTP cyclohydrolase 1 OS=Edwardsiel la ictaluri (strain 93-146) OX=634503 GN=folE PE=3 SV=1
MSSLSKEAALVHEALLARGLETPLRGEPLARDTRKAQIEAHMTEVMRLLNLDLSDDSLVETPSRIAKMYVDEIFSGLDYANFPKITIIENKMDVDEMVTVRDITLTSTCEHHFVTIDGKATVAYIPKERVIGLSKINRIVRFFAQRPQVQERLTQQILVALQTLLGTKNVAVSIDAVHYCVKARGVRDATSATTTTSLGGLFKTSQNTRQEFLRAVRHHV

SEQ ID NO: 7753 - protein, 220 aa, Edwardsiella piscicida
  misc_feature (1)..(220): tr|A0A411GZ97|A0A411GZ97_9GAMM GTP cyclohydrolase 1 OS= Edwardsiella piscicida OX=1263550 GN=folE PE=3 SV=1
MSSLSKEAALVHEALLARGLETPLRGEPLARDTRKAQIEAHMTEVMRLLNLDLSDDSLAETPSRIAKMYVDEIFSGLDYANFPKITIIENKMHVDEMVTVRDITLTSTCEHHFVTIDGKATVAYIPKEGVIGLSKINRIVRFFAQRPQVQERLTQQILVALQTLLGTKNVAVSIDAVHYCVKARGVRDATSATTTTSLGGLFKTSQNTRQEFLRAVRHHV

SEQ ID NO: 7754 - protein, 220 aa, Edwardsiella piscicida
  misc_feature (1)..(220): tr|A0A034T1S3|A0A034T1S3_9GAMM GTP cyclohydrolase 1 OS= Edwardsiella piscicida OX=1263550 GN=folE PE=3 SV=1
MSSLSKEAALVHEALLAHGLETPLRGEPLARDTRKAQIEAHMTEVMRLLNLDLSDDSLTETPSRIAKMYVDEIFSGLDYANFPKITIIENKMHVDEMVTVRDITLTSTCEHHFVTIDGKATVAYIPKEGVIGLSKINRIVRFFAQRPQVQERLTQQILVALQTLLGTKNVAVSIDAVHYCVKARGVRDATSATTTTSLGGLFKTSQNTRQEFLRAVRHHV

SEQ ID NO: 7755 - protein, 220 aa, Edwardsiella tarda
  misc_feature (1)..(220): tr|D4F3H6|D4F3H6_EDWTA GTP cyclohydrolase 1 OS=Edwardsi ella tarda ATCC 23685 OX=500638 GN=folE PE=3 SV=1
MSSLSKEAALVHEALVARGLETPLRGELLARDTRKTQIEAHMTEVMKLLNLDLSDDSLAETPQRIAKMYVDEIFSGLDYANFPKITIIENKMHVDEMVTVRDITLTSTCEHHFVTIDGKATVAYIPKEGVIGLSKINRIVRFFAQRPQVQERLTQQILVALQTLLGTKNVAVSIDAVHYCVKARGVRDATSATTTTSLGGLFKTSQNTRQEFLRAVRHHA

SEQ ID NO: 7756 - protein, 220 aa, Edwardsiella tarda; identical to SEQ ID NO: 7753
  misc_feature (1)..(220): tr|D0ZFG8|D0ZFG8_EDWTE GTP cyclohydrolase 1 OS=Edwardsi ella tarda (strain EIB202) OX=498217 GN=folE PE=3 SV=1

SEQ ID NO: 7757 - protein, 189 aa, Effusibacillus lacus
  misc_feature (1)..(189): tr|A0A292YNW2|A0A292YNW2_9BACL GTP cyclohydrolase 1 OS= Effusibacillus lacus OX=1348429 GN=folE PE=3 SV=1
MSFDREKLEEAVRMILVAIGEDPDREGLLDTPKRVARMYEEVFSGLHKNPEDELSAIFNELHEEVVLVRDIPFYSMCEHHLVPFFGKAHVAYLPKNGRVTGLSKLARLVETVARRPQLQERITSTVADTLINQLDAHGVIVMIEAEHMCMSMRGVNKPGSRTITTAVRGIYQKDKDAREEVFSLIRQCQ

SEQ ID NO: 7758 - protein, 189 aa, Eggerthella lenta
  misc_feature (1)..(189): tr|C8WJB3|C8WJB3_EGGLE GTP cyclohydrolase 1 OS=Eggerthe lla lenta (strain ATCC 25559 / DSM 2243 / JCM 9979 / NC TC 11813 / VPI 0255) OX=479437 GN=folE PE=3 SV=1
MDRAKIEEGVRLILEGVGEDPGREGLVKTPERVAKMYEEVFAGLTEDPAQHFETTFDEHHEEMVLVRDIPFYSMCEHHLAPFFGVAHVAYIPASDGRICGLSKLARLVDAFAKRPQVQERLTSQIADTLIEQLHPQGVIVVLEAEHMCMSMRGVKKPGTTTTTSAVRGAFEKSQATRAEALSLIFARRN

SEQ ID NO: 7759 - protein, 189 aa, Eggerthella lenta; identical to SEQ ID NO: 7758
  misc_feature (1)..(189): tr|A0A369MZ25|A0A369MZ25_EGGLN GTP cyclohydrolase 1 OS= Eggerthella lenta OX=84112 GN=folE PE=3 SV=1

SEQ ID NO: 7760 - protein, 189 aa, Eggerthella sinensis
  misc_feature (1)..(189): tr|A0A3N0IWS7|A0A3N0IWS7_9ACTN GTP cyclohydrolase 1 OS= Eggerthella sinensis OX=242230 GN=folE PE=3 SV=1
MDRAKIEQGVRLILEGVGEDPEREGLVKTPERVAKMYEEVFAGLTENPAEHFETTFDEHHEEMVLVRDIPFYSMCEHHLVPFFGVAHIAYIPAANGRICGLSKLARLVDAFAKRPQVQERLTSQIADTLIEQLHPQGVIVVLEAEHMCMSMRGVKKPGTTTTTSAVRGAFEKSQATRAEALSLIFARRK

SEQ ID NO: 7761 - protein, 188 aa, Eggerthella sp.
  misc_feature (1)..(188): tr|R7B1H0|R7B1H0_9ACTN GTP cyclohydrolase 1 OS=Eggerthe lla sp. CAG:298 OX=1262876 GN=folE PE=3 SV=1
MAMDMDKIEEGVKLILEGIGEDPQREGLQKTPERVARMYAECFAGLEEDPAVHFETTFDEHSQELILLRDIPFFSMCEHHLAPFYGTANIAYIPAADGRICGLSKLARLVEVFARRPQVQERLTSQIADTLMRELAPQGVVVVIKAEHMCMNMRGVKKPGSKTVTRAVRGLFEQDATARADALALMGE

SEQ ID NO: 7762 - protein, 201 aa, Eggerthella sp.
  misc_feature (1)..(201): tr|R5FN03|R5FN03_9ACTN GTP cyclohydrolase 1 OS=Eggerthe lla sp. CAG:1427 OX=1262874 GN=folE PE=3 SV=1
MSEHISEPLQGSMDLEKIEAGVRMILEGIGEDPDREGLQKTPSRVARMYEEVFAGLYEDPAVHFETTFDEHHEELVIVHDIPFYSMCEHHLVPFFGKAHVAYIPAKSGRICGISKLARLVDAYARRPQVQERLTSQVADTLMEQLNPQGVIVIMEAEHLCMSMRGVKKPGSKTTTSAVRGIFKSSASAATRAEALSLLMGR

SEQ ID NO: 7763 - protein, 193 aa, Eggerthellaceae bacterium
  misc_feature (1)..(193): tr|A0A3C1DDQ5|A0A3C1DDQ5_9ACTN GTP cyclohydrolase 1 OS= Eggerthellaceae bacterium OX=1972561 GN=folE PE=3 SV=1
MSESGYGKLDKARAEAAIREFLIAIGEDPEREGLLETPARVARACEEIFAGLQEDPAKHLRKQFHEAEHEEMVIVRDIPFTSMCEHHLLPFTGRAHVAYIPRKGRITGLSKLARCVEGYARRPQVQERMTSQIADAIMTALEPLGAFVVVEAEHMCMTARGIRKPGSVTVTSALRGSFQDDEKTRAEALSLFR

SEQ ID NO: 7764 - protein, 231 aa, Egibacter rhizosphaerae
  misc_feature (1)..(231): tr|A0A411YDQ4|A0A411YDQ4_9ACTN GTP cyclohydrolase 1 OS= Egibacter rhizosphaerae OX=1670831 GN=folE PE=3 SV=1
MSDVTTGGAPEGNGAGADGPGSSHEPVRTLTGVPPGRPFDHERIARGVREIFAGLGLDDDDPRLAETPERVARMYDEIFAGLLVEPAEVLDVVFEEGHDELVLIKDIPFASTCEHHLVPFVGRAHVGYIPNERGQVTGLSKLGRLVDLVAKRPSLQERITTTVADTLDRVLEPRGVLVIVEAEHLCMSMRGIRKPGAMTVTSAVRGIIREDAATRAEAMSLALGSNNRSMH

SEQ ID NO: 7765 - protein, 190 aa, Ehrlichia canis
  misc_feature (1)..(190): tr|Q3YS73|Q3YS73_EHRCJ GTP cyclohydrolase 1 OS=Ehrlichi a canis (strain Jake) OX=269484 GN=folE PE=3 SV=1
MENGKPSDSQAEEAINLLIRWIGDDPDRVGLTGTAKRVLNIYKKFFSGYQVDMLSMQDSVLLGENYDGMIIVKNTEFTSYCEHHIVPIKGKIDIGYIPDKLIFGLGKVIKLINCFTKRLQLQERLTMEIANALDYYLSPKGVIVSIEAVHDCVACCEEIDKNNLDLQTTCVIGIFKDNIDLRKEFFTNIG

SEQ ID NO: 7766 - protein, 190 aa, Ehrlichia cf.
  misc_feature (1)..(190): tr|A0A0F3ND41|A0A0F3ND41_9RICK GTP cyclohydrolase 1 OS= Ehrlichia cf. muris str. EmCRT OX=1359167 GN=folE PE=3 SV=1
MKSNKPSDSEAEEAINLLIRWIGDDPNREGLVDTAKRVLNVYKGFFSGYKVDMLSIRGSVLFNEGYNDMVILKDTEFTSYCEHHILPMKGKISIGYIPDKLIFGVGKIVKLINCFTKRLQLQERLTMEIARAFNDYLLPKGAIVNVEAVHDCVACCKEKDKNNLKLQTMYAIGVFQDNMELRREFFANID

SEQ ID NO: 7767 - protein, 190 aa, Ehrlichia chaffeensis
  misc_feature (1)..(190): tr|Q2GGH3|Q2GGH3_EHRCR GTP cyclohydrolase 1 OS=Ehrlichi a chaffeensis (strain ATCC CRL-10679 / Arkansas) OX=205 920 GN=folE PE=3 SV=1
MRNGKPSDSEAEEAVNLLIRWIGDDPNREGLVNTAKRVLDVYKRFFSGYQVDIYSMQDLVLLNENYNDMVIFKNTEFTSYCEHHIVPMRGKISIGYVPDKLVFGVGKIVKLINCFTKRLQLQEKLTVEIANALDHCLAPKGIIVAVEAVHDCIVCCEEEDKHNLELQTTCAIGVFQDNMELRREFFSSIG

SEQ ID NO: 7768 - protein, 190 aa, Ehrlichia minasensis
  misc_feature (1)..(190): tr|A0A4Q6I6R2|A0A4Q6I6R2_9RICK GTP cyclohydrolase I Fol E OS=Ehrlichia minasensis OX=1242993 GN=DRF75_00710 PE= 4 SV=1
MKNGKPSDSQAEEAINLLIRWIGDDPTRMELTGTAKRVLNIYKKFFSGYQVDVLSMQDTVLLAENYNGMIIVKNTEFTSYCEHHIVPIRGKIDIGYIPDKLIFGLGKVIKLINCFTKRLQLQERLTMEIANALDCYLSPKGVIVSIEAVHDCIACCEEIDKNNLDLQTTCVIGVFKDNMDLRKEFFTNIG

SEQ ID NO: 7769 - protein, 190 aa, Ehrlichia muris
  misc_feature (1)..(190): tr|V9R8N5|V9R8N5_9RICK GTP cyclohydrolase 1 OS=Ehrlichi a muris AS145 OX=1423892 GN=folE PE=3 SV=1
MRSNKPSDSEAEEAINLLIRWIGDDPNRAGLVDTAKRVLNVYKGFFSGYKVDMLSIRGSVLFNEGYNDMVILKDTEFTSYCEHHIVPMKGKISIGYIPDKLIFGVGKIVKLINCFTKRLQLQERLTMEIAKALNDYLLPKGTIVNIEAVHDCVACYNEQDKNNLKLQTIYAIGVFQDNMELRREFFANID

SEQ ID NO: 7770 - protein, 94 aa, Ehrlichia ruminantium
  misc_feature (1)..(94): tr|A0A170STY5|A0A170STY5_EHRRU GTP cyclohydrolase 1 (Fr agment) OS=Ehrlichia ruminantium OX=779 GN=folE PE=3 SV =1
YVPDKVMFTIGQIIRLVNYFSKRLQVQERLTVNIAESINSYLVSKGVIVVINATHECVLCYEENSSDLLLQTSCALGIFQNNAELRREFFSSIN

SEQ ID NO: 7771 - protein, 190 aa, Ehrlichia ruminantium
  misc_feature (1)..(190): tr|Q5FH33|Q5FH33_EHRRG GTP cyclohydrolase 1 OS=Ehrlichi a ruminantium (strain Gardel) OX=302409 GN=folE PE=3 SV =1
MKNNRKPSENEVEDAISLLIRWIGDDVDRPGLVGTPRRMLNAYKKFFIGYQDISLVIGGSVLPNEGYDSMITFKDIGFVSYCEHHIIPMRGKVNIGYVPDKVIFTIGQVIRLVNYFSKRLQVQERLTVDIAESINSYLVSKGVIVVINATHECVLCYEENNSDLLLQTSCALGIFQNNVELRREFFNSIN

SEQ ID NO: 7772 - protein, 190 aa, Ehrlichia sp.
  misc_feature (1)..(190): tr|X5GJ16|X5GJ16_9RICK GTP cyclohydrolase 1 OS=Ehrlichi a sp. HF OX=391036 GN=folE PE=3 SV=1
MGSSKPSDSEAEEAVNLLIRWIGDDPNREGLVNTAKRVLDVYKGFFSGYKVDTLSIRDSVLLNEGYNDMVILKNTEFTSYCEHHIVPMKGKISIGYIPDKLIFGIGKIIKLINCFTKRLQLQERLTMEIAKALNDYLLPKGAIVTIEAVHDCVACCEEKDKNNLKLQTIYAIGIFQDNVELRREFFANIS

SEQ ID NO: 7773 - protein, 260 aa, Eikenella corrodens
  misc_feature (1)..(260): tr|A0A1A9RNX3|A0A1A9RNX3_EIKCO GTP cyclohydrolase FolE2 OS=Eikenella corrodens OX=539 GN=folE2 PE=3 SV=1
MNAIADVQSSPDQRNMPINQVGIKDLHFPLQIQSAEGVQHTIARIGMTVALPASQKGTHMSRFVALMEERQHLVLDFTSLHQLTLDMLERLDAQAGRIHISFPFFRKKAAPVSGITSFLDYAVTWQGEVSASGEYSHQIKVLAPVTSLCPCSKEISQYGAHNQRSHVAVTLTCHKQEVSIEEIIDLVENKASCQLYGLLKRPDEKYVTEHAYENPKFVEDMVRDIAVALKNDPRIDRFSVESENFESIHNHSAYALIEYP

SEQ ID NO: 7774 - protein, 260 aa, Eikenella corrodens
  misc_feature (1)..(260): tr|A0A1A9RCR5|A0A1A9RCR5_EIKCO GTP cyclohydrolase FolE2 OS=Eikenella corrodens OX=539 GN=folE2 PE=3 SV=1
MNAIADVQSSPDQRNMPINQVGIKDLHFPLQIQSAEGVQHTIARIGMTVALPASQKGTHMSRFVALMEERQHLVLDFTSLHQLTLDMLERLDAQAGRIHISFPFFRKKAAPVSGITSFLDYAVTWQGEVPASGEYSHQIKVLAPVTSLCPCSKEISQYGAHNQRSHVTVTLTCHKQEVSIEEIIDLVENKASCQLYGLLKRPDEKYVTEHAYENPKFVEDMVRDIAVALKNDPRIDRFSVESENFESIHNHSAYALIEYP

SEQ ID NO: 7775 - protein, 260 aa, Eikenella exigua
  misc_feature (1)..(260): tr|A0A5B9BVL9|A0A5B9BVL9_9NEIS GTP cyclohydrolase FolE2 OS=Eikenella exigua OX=2528037 GN=folE2 PE=3 SV=1
MNAIADVQSSPDQRNMPINQVGIKDLHFPLQIQGAEGVQHTIARIGMTVALPASQKGTHMSRFVALMEERQHLVLDFTSLYQLTLDMLERLDAQAGRINISFPFFRKKAAPVSGITSFLDYAVTWQGEVSASREYSHQIKVLAPVTSLCPCSKEISQYGAHNQRSHVTVTLTCHKQEVSIEEIIDLVENKASCQLYGLLKRPDEKYVTEHAYENPKFVEDMVRDIAVALKNDPRIDRFSVESENFESIHNHSAYALIEYP

SEQ ID NO: 7776 - protein, 260 aa, Eikenella sp.
  misc_feature (1)..(260): tr|A0A1A9S6J2|A0A1A9S6J2_9NEIS GTP cyclohydrolase FolE2 OS=Eikenella sp. NML03-A-027 OX=1795828 GN=folE2 PE=3 SV=1
MNAIADVQSSPDQRNMPINQVGIKDLHFPLQIQGAEGVQHTIARIGMTVALPASQKGTHMSRFVALMEERQHLVLDFTSLHQLTLDMLERLDAQAGRINISFPFFRKKAAPVSGITSFLDYAVTWQGEVSASGEYSHRIKVLAPVTSLCPCSKEISQYGAHNQRSHVTVTLTCHKQEVSIEEIIDLVENKASCQLYGLLKRPDEKYVTEHAYENPKFVEDMVRDIAVALKNDPRIDRFSVESENFESIHNHSAYALIEYP

SEQ ID NO: 7777 - protein, 260 aa, Eikenella sp.
  misc_feature (1)..(260): tr|A0A1F0F8Y3|A0A1F0F8Y3_9NEIS GTP cyclohydrolase FolE2 OS=Eikenella sp. HMSC073A11 OX=1739535 GN=folE2 PE=3 S V=1
MNAIADVQSSPDQRNMPINQVGIKDLHFPLQIQSAEGVQHTIARIGMTVALPASQKGTHMSRFVALMEERQHLVLDFTSLHQLTLDMLERLDAQAGRINISFPFFRKKAAPVSGITSFLDYAVTWQGEVSASGEYSHQIKVLAPVTSLCPCSKEISQYGAHNQRSHVTVTLTCHKQEVSIEEIIDLVENKASCQLYGLLKRPDEKYVTEHAYENPKFVEDMVRDIAVALKNDPRIDRFSVESENFESIHNHSAYALIEYP

SEQ ID NO: 7778 - protein, 210 aa, Eilatimonas milleporae
  misc_feature (1)..(210): tr|A0A3M0C6B9|A0A3M0C6B9_9PROT GTP cyclohydrolase 1 OS= Eilatimonas milleporae OX=911205 GN=folE PE=3 SV=1
MDAVLEKVHDNDLELKVSRQNADDRPSRAEAEAAVRTLIRWAGDNPSREGLLDTPKRVAKAYEEFFAGYGQDPAEILAKTFEDVNGYDDMVVMRGIQVQSHCEHHMVPISGLAHVAYMPKDRVVGISKLARITETYAKRLQTQETMTAQIADAIETYLKPKGVAVVIDATHACMGCRGVRHPDVYTITRQFRGVFKDTTVEQKFWTLVRG

SEQ ID NO: 7779 - protein, 185 aa, Eisenbergiella massiliensis
  misc_feature (1)..(185): tr|A0A3E3IKA8|A0A3E3IKA8_9FIRM GTP cyclohydrolase 1 OS= Eisenbergiella massiliensis OX=1720294 GN=folE PE=3 SV= 1
MVDKAKIEEAVKLLLEGIGEDVNREGLVETPQRIARMYEEIFGGMDEDPAVPLSKQFQVEGAGIVLEKDITFYSTCEHHLMPFFGKAHVAYLPDGKVVGLSKLARTVEIFARRPQLQEKLTAQVADALMDYLKPKGVMILIEAEHMCMTMRGVKKPGSKTVTVATRGAFEENAALQETFYHMLER

SEQ ID NO: 7780 - protein, 185 aa, Eisenbergiella massiliensis
  misc_feature (1)..(185): tr|A0A3E3HYE5|A0A3E3HYE5_9FIRM GTP cyclohydrolase 1 OS= Eisenbergiella massiliensis OX=1720294 GN=folE PE=3 SV= 1
MVDKAKIEEAVKLLLEGIGEDVNREGLVETPQRIARMYEEIFGGMDEDPAVPLSKQFQAEGAGIVLEKDITFYSTCEHHLMPFFGKAHVAYLPDGKVVGLSKLARTVEIFARRPQLQEKLTAQVADALMDYLKPKGVMILIEAEHMCMTMRGVKKPGSKTVTVATRGAFEENAALQETFYHMLEC

SEQ ID NO: 7781 - protein, 193 aa, Eisenbergiella sp.
  misc_feature (1)..(193): tr|A0A416HX61|A0A416HX61_9FIRM GTP cyclohydrolase 1 OS= Eisenbergiella sp. OF01-20 OX=2292348 GN=folE PE=3 SV=1
MVQSGETRMVDKSKIEEGVRLLLEGIGENADREGLRETPRRIARMYEEIFGGMDEDPMVPLSKQFQAEGAGIVLEKDITFYSTCEHHLMPFFGKAHVAYLPDGKVVGLSKLARTVEIFARRPQLQEKLTAQVADAMMDYLRPKGVMVMLEAEHMCMTMRGVKKPGSKTVTVAVRGAFEENSGLQDTFYHMLGR

SEQ ID NO: 7782 - protein, 185 aa, Eisenbergiella tayi
  misc_feature (1)..(185): tr|A0A1E3A605|A0A1E3A605_9FIRM GTP cyclohydrolase 1 OS= Eisenbergiella tayi OX=1432052 GN=folE PE=3 SV=1
MVDKSKIEEAVKLLLEGIGEDVDRDGLRETPVRIARMYEEIFGGMDEDPAVPLSKQFQAENAGIVLEKDITFYSTCEHHLMPFFGKAHVAYLPAGKVVGLSKLARTVEIFARRPQLQEKLTAQVADAMMDYLQPRGVMIMLEAEHMCMTMRGVKKPGSKTVTVAVRGAFEENSGLQETFYHMLGR

SEQ ID NO: 7783 - protein, 185 aa, Eisenbergiella tayi
  misc_feature (1)..(185): tr|A0A1E3AMZ2|A0A1E3AMZ2_9FIRM GTP cyclohydrolase 1 OS= Eisenbergiella tayi OX=1432052 GN=folE PE=3 SV=1
MVDKSKIEEAVKLLLEGIGEDVDREGLRETPVRIARMYEEIFGGMDEDPAVPLSKQFQAENAGIVLEKDITFYSTCEHHLMPFFGKAHVAYLPAGKVVGLSKLARTVEIFARRPQLQEKLTAQVADAMMDYLQPRGVMIMLEAEHMCMTMRGVKKPGSKTVTVAVRGAFEENSGLQETFYHMLGR

SEQ ID NO: 7784 - protein, 230 aa, Ekhidna lutea
  misc_feature (1)..(230): tr|A0A239L7L9|A0A239L7L9_9BACT GTP cyclohydrolase 1 OS= Ekhidna lutea OX=447679 GN=folE PE=3 SV=1
MKQKETSLNTQVEVDEFGDDHVGTSYDTPLRPDAFEQDDDLKIELISKHFKEIMQILGLDLEDDSLAGTPKRVAKMYVEEVFSGLNPKNKPKIRLFDNKYNYDQMLVEKDITFYSHCEHHFVPIYGKAHVAYFSSGKVIGLSKINRIVQYFAKRPQVQERLTVQIGKELKAILKTEDVAVVMDASHMCVSSRGVNDTNSRTGTAFFDGKFKDQNIKNEFLNYINTDSSDL

SEQ ID NO: 7785 - protein, 215 aa, Elioraea sp.
  misc_feature (1)..(215): tr|A0A541BVL7|A0A541BVL7_9PROT GTP cyclohydrolase 1 OS= Elioraea sp. Yellowstone OX=2592070 GN=folE PE=3 SV=1
MNVKSPASPSAPQLTRQRPTRDEAEAAVRTLLLWAGDDPDREGLIDTPARVVRSFREFFCGYETDPEELLARTFEETDGYDEMVLLRDIRLESYCEHHMVPIIGRAHVAYLPHKRVVGISKLARVVEAYAKRLQIQEKLTAQIANTIDTVLQPKGVAVVIEAAHQCMTTRGVHKPGVSMVTSRMLGAFRDDPTTRREFLAMISMGGTSARIGDEA

SEQ ID NO: 7786 - protein, 221 aa, Elizabethkingia anophelis
  misc_feature (1)..(221): tr|A0A290MZF4|A0A290MZF4_9FLAO GTP cyclohydrolase 1 OS= Elizabethkingia anophelis R26 OX=1246994 GN=folE PE=3 S V=1
MNDFFDNDDDIYDGNQHTPLRKDAFKLSADEKVQKIEGLFSEIMETLGLDMTDDSLKDSPKRVAKMYVNEIFGGLLPENKPGISTFKNQYKYRQMLVEKDITVYSFCEHHFLPIIGRAHVAYISNGKVIGLSKINRIVDYYAKRPQVQERLTMQIVEAMKEALGTKDVACIIDARHLCVNCRGIKDTASSTITAELSGIFRTNPITRQEFLHYVGSHAKLD

SEQ ID NO: 7787 - protein, 221 aa, Elizabethkingia anophelis; identical to SEQ ID NO: 7786
  misc_feature (1)..(221): tr|X5KLB1|X5KLB1_9FLAO GTP cyclohydrolase 1 OS=Elizabet hkingia anophelis OX=1117645 GN=folE PE=3 SV=1

SEQ ID NO: 7788 - protein, 221 aa, Elizabethkingia bruuniana
  misc_feature (1)..(221): tr|A0A5E8D2N2|A0A5E8D2N2_9FLAO GTP cyclohydrolase 1 OS= Elizabethkingia bruuniana OX=1756149 GN=folE PE=3 SV=1
MNDFFDNDDDIYDGNQHTPLRKDAFKLSTDEKVQKIEGLFSEIMETLGLDMTDDSLKDSPKRVAKMYVNEIFGGLLPENKPGISTFKNQYKYRQMLVEKDITVYSFCEHHFLPIIGKAHVAYISNGKVIGLSKINRIVDYYAKRPQVQERLTMQIVGAMKEALGTKDVACIIDARHLCVNCRGIKDTASSTITAELSGIFRTNPITRQEFLHYVGSHAKLD

SEQ ID NO: 7789 - protein, 221 aa, Elizabethkingia meningoseptica
  misc_feature (1)..(221): tr|A0A1V3U457|A0A1V3U457_ELIME GTP cyclohydrolase 1 OS= Elizabethkingia meningoseptica OX=238 GN=folE PE=3 SV=1
MNDFFDNDDDIYDGNQHTPLRKDAFKLSPEEKVQKIEHLFSEIMETLGLDMTDDSLKDSPKRVAKMYVNEVFGGLLPENKPGISTFKNQYKYRQMLVEKDITVYSFCEHHFLPIIGRAHVAYISNGKVIGLSKINRIVDYYAKRPQVQERLTMQIVEAMKEALGTKDVACIIDARHLCVNCRGIKDTASSTITAELSGIFRTNPITRQEFLHYVGSHAKLD

SEQ ID NO: 7790 - protein, 221 aa, Elizabethkingia meningoseptica; identical to SEQ ID NO: 7786
  misc_feature (1)..(221): tr|A0A2X1JLJ7|A0A2X1JLJ7_ELIME GTP cyclohydrolase 1 OS= Elizabethkingia meningoseptica OX=238 GN=folE PE=3 SV=1

SEQ ID NO: 7791 - protein, 221 aa, Elizabethkingia miricola; identical to SEQ ID NO: 7786
  misc_feature (1)..(221): tr|A0A0W8ENC2|A0A0W8ENC2_ELIMR GTP cyclohydrolase 1 OS= Elizabethkingia miricola OX=172045 GN=folE PE=3 SV=1

SEQ ID NO: 7792 - protein, 221 aa, Elizabethkingia miricola; identical to SEQ ID NO: 7788
  misc_feature (1)..(221): tr|A0A0A2H6A8|A0A0A2H6A8_ELIMR GTP cyclohydrolase 1 OS= Elizabethkingia miricola OX=172045 GN=folE PE=3 SV=1

SEQ ID NO: 7793 - protein, 221 aa, Elizabethkingia occulta
  misc_feature (1)..(221): tr|A0A1T3MLL6|A0A1T3MLL6_9FLAO GTP cyclohydrolase 1 OS= Elizabethkingia occulta OX=1867263 GN=folE PE=3 SV=1
MNDFFDNDDDIYDGNQHTPLRKDAFKLSADEKVQKIEGLFSEIMETLGLDMTDDSLKDSPKRVAKMYVNEIFGGLLPENKPGISTFKNQYKYRQMLVEKDITVYSFCEHHFLPIIGRAHVAYISNGKVIGLSKINRIVDYYAKRPQVQERLTMQIVGAMKEALGTKDVACIIDARHLCVNCRGIKDTASSTITAELSGIFRTNPITRQEFLHYVGSHAKLD

SEQ ID NO: 7794 - protein, 221 aa, Elizabethkingia sp.
  misc_feature (1)..(221): tr|A0A2T5RW59|A0A2T5RW59_9FLAO GTP cyclohydrolase 1 OS= Elizabethkingia sp. YR191 OX=2135666 GN=folE PE=3 SV=1
MNDFFDNDDDIYDGNQHTPLRKDAFRLSADEKVQKIEGLFSEIMETLGLDMTDDSLKDSPKRVAKMYVNEIFGGLLPENKPGISTFKNQYKYRQMLVEKDITVYSFCEHHFLPIIGRAHVAYISNGKVIGLSKINRIVDYYAKRPQVQERLTMQIVEAMKEALGTKDVACIIDARHLCVNCRGIKDTASSTITAELSGIFRTNPITRQEFLHYVGSHAKLD

SEQ ID NO: 7795 - protein, 221 aa, Elizabethkingia sp.
  misc_feature (1)..(221): tr|A0A5B7UG44|A0A5B7UG44_9FLAO GTP cyclohydrolase 1 OS= Elizabethkingia sp. JS20170427COW OX=2583851 GN=folE PE =3 SV=1
MNDFFDNDDDIYDGNQQTPLKKDAFSLTPTQKVEKIEGLFKEIMDTLGLDLTDDSLKDSPKRVAKMYVNEIFGGLLPENKPGISTFKNQYKYRQMLVEKDITVYSFCEHHFLPIIGKAHVAYISNGQVIGLSKINRIVDYYAKRPQVQERLTMQIVEAMKEALGTKDVACIIDARHLCVNCRGIKDTASSTITAELSGLFRTNPITRQEFLHYVGSHAKID

SEQ ID NO: 7796 - protein, 221 aa, Elizabethkingia ursingii; identical to SEQ ID NO: 7794
  misc_feature (1)..(221): tr|A0A1T3F993|A0A1T3F993_9FLAO GTP cyclohydrolase 1 OS= Elizabethkingia ursingii OX=1756150 GN=folE PE=3 SV=1

SEQ ID NO: 7797 - protein, 229 aa, Elstera cyanobacteriorum
  misc_feature (1)..(229): tr|A0A255XSM2|A0A255XSM2_9PROT GTP cyclohydrolase 1 OS= Elstera cyanobacteriorum OX=2022747 GN=folE PE=3 SV=1
MGFRPARRTKGLIVNAFITPKTDLVSSEAVTEAPRPSREEAEAAVRTLLRWAGDDPSREGLVDTPARVVRAYEEWFAGYAVDPKDMLQRTFEETDGYDEMVLLRDIRFESYCEHHVAPIIGKAHIAYLPKNRVVGISKLARVVEVFAKRLQIQEKMTAQIANVLDEVLQPLGVAVVIEAQHQCMTTRGVHKPGVAMVTSRMLGAFRSNIETRREFLALISQPGLSSSAV

SEQ ID NO: 7798 - protein, 208 aa, Elstera litoralis
  misc_feature (1)..(208): tr|A0A0F3IVQ8|A0A0F3IVQ8_9PROT GTP cyclohydrolase 1 OS= Elstera litoralis OX=552518 GN=folE PE=3 SV=1
MAATSATAPAATPRPSREDAEAAVRTLLQWAGDDPTREGLIDTPARVTRAFEEWFAGYGIDPREMLQRTFEETDGYDEMVLLRDIRFESYCEHHMAPIIGKAHIAYLPKSRVVGISKLARVVEVFAKRLQIQEKMTAQIANVLDEVLQPLGVAVVIEAQHQCMTTRGVHKTGVAMVTSRMLGAFRSNVETRREFLALIGQPGLGSSAV

SEQ ID NO: 7799 - protein, 194 aa, Elusimicrobia bacterium
  misc_feature (1)..(194): tr|A0A2M7S2E7|A0A2M7S2E7_9BACT GTP cyclohydrolase 1 OS= Elusimicrobia bacterium CG_4_10_14_0_8_um_filter_37_32 OX=2014301 GN=folE PE=3 SV=1
MKPQIDKKRIQKAVREILVAVGENPEREGLKDTPRRVSDFYAEALSGQFIEPEDILTVYYEEEKYNEMVIVRDIPFYSLCEHHLLPFYGKVHIAYMPNKKRLLGISKLARIVDAYTKRLQLQERITKHIVDAIMKIVKPMGGLVIVEAEHLCMNMRGVKKTGTKVITSAVRGLFLKDARTRAEALALINKKPTD

SEQ ID NO: 7800 - protein, 197 aa, Elusimicrobia bacterium
  misc_feature (1)..(197): tr|A0A5C7MJR0|A0A5C7MJR0_9BACT GTP cyclohydrolase 1 OS= Elusimicrobia bacterium OX=2030800 GN=folE PE=3 SV=1
MNPSAPIINPDVRAKNIAGLTEELLLQVGEDPKREGLLRTPERVAKAWQELTAGYRVDVDKLINGALFDEPYSEMVVVRDIQFFSLCEHHLLPFFGVCHVAYLPQGKILGLSKIPKLVKAFARRLQVQERLTNEIAETLMAKVNPLGAGVVMEARHMCMEMRGAESCNSPTVTSAMVGLFRSNARTRDEFLSLIRRR

SEQ ID NO: 7801 - protein, 172 aa, Elusimicrobium minutum
  misc_feature (1)..(172): tr|B2KC62|B2KC62_ELUMP GTP cyclohydrolase 1 OS=Elusimic robium minutum (strain Pei191) OX=445932 GN=folE PE=3 S V=1
MLAYIGDNPNREGLQETPHRIVKSWEKIFGGYKQKPESVLKTFVEGSCDEMVILKDIEFYSTCEHHFQPFFGTISIGYLPNKRVLGVSKLARLVEVFSRRLQIQEKLSADIADSLMQHLNPLGVMVVCKARHMCVCSRGVEKHNAVMITSAIRGVFKKPEVRGEFLDFIQAN

SEQ ID NO: 7802 - protein, 206 aa, Elusimicrobium sp.
  misc_feature (1)..(206): tr|A0A1Y4DM67|A0A1Y4DM67_9BACT GTP cyclohydrolase 1 OS= Elusimicrobium sp. An273 OX=1965617 GN=folE PE=3 SV=1
MRKTAKKSSLRTAKPANAQAGKHPLSEEKILNNLREILAYIGDDPTREGLLETPARIVRSWKKLFGGYQMKPQDVLKTFTEGSCEEMVVLKDIEFYSTCEHHLQPFFGTISIGYLPKGRVLGISKLARLVEVFARRLQIQEKLVAQIADSLMDTLQPHGVMVVCKAKHMCISSRGIEKHNAVMVTSAIRGAFKKMEVRNEFLEMIK

SEQ ID NO: 7803 - protein, 204 aa, Emcibacter congregatus
  misc_feature (1)..(204): tr|A0A2G4YUD8|A0A2G4YUD8_9PROT GTP cyclohydrolase 1 OS= Emcibacter congregatus OX=2043170 GN=folE PE=3 SV=1
MKDNVKHQGIIKPTQKEAEDAVRTLLRWAGDDPEREGLLDTPKRVAKSYKEFFRGYEEDPRQTLSRTFEEVCGYDEMIVLRDIPFESHCEHHMAPIIGRAHVGYLPDQRVVGISKLARVVETYAKRLQVQEKMTAQIADCIQEVLEPLGVGVIIQATHECMSTRGVHTHGVSMVTSRMVGAFRKDDKTRREFLAVVGTFDSHKG

SEQ ID NO: 7804 - protein, 203 aa, Emcibacter nanhaiensis
  misc_feature (1)..(203): tr|A0A501PAJ4|A0A501PAJ4_9PROT GTP cyclohydrolase 1 OS= Emcibacter nanhaiensis OX=1505037 GN=folE PE=3 SV=1
MSSDKSKETDKPSRKDAEEAVRTLLRWAGDDPTREGLLDTPKRVVKAYQEFFQGYDQDPHEILSRTFEEVAGYDEMVVLRDIPFESHCEHHMAAIIGRAHVGYLPKNKVVGISKLARVVETYAKRLQVQEKMTAQIADCIQDVLEPHGVGVIIQATHQCMTTRGVHKHGVSMVTSRMVGSFRKDEKTRKEFLSVVGNFEPYRA

SEQ ID NO: 7805 - protein, 186 aa, Emergencia timonensis
  misc_feature (1)..(186): tr|A0A415E523|A0A415E523_9FIRM GTP cyclohydrolase 1 OS= Emergencia timonensis OX=1776384 GN=folE PE=3 SV=1
MDKDKIKEGVRLILEGIGEDINREGLLETPDRIAKMYDELAAGYHDSAAAHLAKRFHVEDSDMIIEKDITFYSFCEHHMLPFYGHAAVAYIPDGEVVGLSKIARTVEVFAKRFQLQERLAAQVADAFMEELRPKGVMVLIEAEHMCMTMRGIKKPGAKTVTVVTRGAFEDDEKLQNRFFQMLGQRT

SEQ ID NO: 7806 - protein, 225 aa, Empedobacter brevis; identical to SEQ ID NO: 4277
  misc_feature (1)..(225): tr|A0A3P6MSJ0|A0A3P6MSJ0_9FLAO GTP cyclohydrolase 1 OS= Empedobacter brevis OX=247 GN=folE PE=3 SV=1

SEQ ID NO: 7807 - protein, 225 aa, Empedobacter brevis
  misc_feature (1)..(225): tr|A0A511NF92|A0A511NF92_9FLAO GTP cyclohydrolase 1 OS= Empedobacter brevis NBRC 14943 = ATCC 43319 OX=1218108 GN=folE2 PE=3 SV=1
MCDKHLHDEIGDDHMSANLETPLRGDAFELSAEEKVEKIEADFRNIMETLGLDLTDDSLKGTPKRVAKMFVKEIFGGLLPERKPGMSTFDNKYNYNQMLVEKDIVVYSTCEHHFLPIVGRAHVGYISKGRVIGLSKMNRIVEYYAKRPQVQERLTMQIVKAMQEALGTDDVACIIDAKHLCVNSRGIKDIESSTVTAEFGGAFKENEQLRKEFISYIGMKTPFNV

SEQ ID NO: 7808 - protein, 225 aa, Empedobacter falsenii
  misc_feature (1)..(225): tr|A0A376G072|A0A376G072_9FLAO GTP cyclohydrolase 1 OS= Empedobacter falsenii OX=343874 GN=folE PE=3 SV=1
MCDKHLHDEMGDDHISANLETPLRADAFELSAEEKVEKIEADFRNIMETLGLDLTDDSLKGTPKRVAKMFVKEIFGGLLPERKPGMSTFENKYNYNQMLVEKDIVVYSTCEHHFLPIVGRAHVGYISKGKVIGLSKMNRIVEYYAKRPQVQERLTMQIVKAMQEALGTDDVACIIDAKHLCVNSRGIKDIESSTVTAEYGGAFKDNEQLRKEFISYIGMKTTFNV

SEQ ID NO: 7809 - protein, 225 aa, Empedobacter falsenii
  misc_feature (1)..(225): tr|A0A427BHK9|A0A427BHK9_9FLAO GTP cyclohydrolase 1 OS= Empedobacter falsenii OX=343874 GN=folE PE=3 SV=1
MCDKHLHDEMGDDHISANLETPLRADAFELSAEEKVEKIEADFRNIMETLGLDLTDDSLKGTPKRVAKMFVKEIFGGLLPERKPGMSTFENKYNYNQMLVEKDIVVYSTCEHHFLPIVGRAHVGYISKGKVIGLSKMNRIVEYYAKRPQVQERLTMQIVKAMQEALGTDDVACIIDAKHLCVNSRGIKDIESSTVTAEFGGAFKESEQLRKEFISYIGMKTPFNV

SEQ ID NO: 7810 - protein, 187 aa, Empedobacter haloabium
  misc_feature (1)..(187): tr|A0A5C7BN59|A0A5C7BN59_9FLAO GTP cyclohydrolase 1 OS= Empedobacter haloabium OX=592317 GN=folE PE=3 SV=1
MSKEAFSENDWRRLLSTLGEDPDRPGLAETPHRVAKAWKHWTSGYDQDPVELLKAFEDGAEAYNELIVVRNIPVYSHCEHHLAPFFGMATVGYLPNGKIVGLSKLTRLVDCFAKRLQVQERLTVQIANTLMEVLEPKAVGVVIKCRHMCMESRGIRTPGEETITSSMLGELQSNLGLRTEFLSLARD

SEQ ID NO: 7811 - protein, 225 aa, Empedobacter sp.; identical to SEQ ID NO: 7808
  misc_feature (1)..(225): tr|A0A4Z1C1B1|A0A4Z1C1B1_9FLAO GTP cyclohydrolase 1 OS= Empedobacter sp. MRS2 OX=2491114 GN=folE PE=3 SV=1

SEQ ID NO: 7812 - protein, 233 aa, Emticicia sp.
  misc_feature (1)..(233): tr|A0A4Q5LZZ5|A0A4Q5LZZ5_9BACT GTP cyclohydrolase 1 OS= Emticicia sp. 17J42-9 OX=2492393 GN=folE PE=3 SV=1
MKPNETLLNTLLFEDDTKIALTDEEIGDDHLNTSVDTPMRADAFEMKDEEKIAQIEYYFRQIMDTLGLDLTDDSLKGTPKRVAKMYVKEIFSGLNPENKPSVTLFDNKYQYNEMLVEKDISFYSNCEHHFVPIFGKAHVAYIANGKVIGLSKLNRIVQYFAKRPQVQERLTMQIAKELQKVLGTEDVAVVMDAKHLCVASRGVQDDTSTTITSFYGGKFQQEATKAEFLKYIA

SEQ ID NO: 7813 - protein, 233 aa, Emticicia sp.
  misc_feature (1)..(233): tr|A0A2N4XGZ2|A0A2N4XGZ2_9BACT GTP cyclohydrolase 1 OS= Emticicia sp. TH156 OX=2067454 GN=folE PE=3 SV=1
MKPNETLLNTLLFEQDTNATLMEDELGDDHRGTAEDTPLRADAFDLSDEEKIARIEFYFRQIMDTLGLDLTDDSLNGTPKRVAKMYVKELFQGLNPENKPSVTLFDNKYQYNEMLVEKDISFYSNCEHHFVPIFGKAHVAYIANGKVIGLSKLNRIVQYFSKRPQVQERLTVQIAKELQRILNTEDVAVVMDAKHLCVASRGVQDDTSSTVTSFYGGKFQQEATKAEFLKYII

SEQ ID NO: 7814 - protein, 190 aa, Endomicrobium proavitum
  misc_feature (1)..(190): tr|A0A0G3WHU5|A0A0G3WHU5_9BACT GTP cyclohydrolase 1 OS= Endomicrobium proavitum OX=1408281 GN=folE PE=3 SV=1
MKKFNFDEKKAAKAVKLLLESFGEDLNREGVKRTPERVAEFYKEALSGNAVDPLKVAGVHYSTENHEEIILVKDISFYSLCEHHLLPFFGTAHIAYIPKKDKIIGVSKLIRLVEVFANRLQLQERLTKQIADTVMKSISPRGVMVVLEAEHLCMTMRGVKKPGSKMVTSAMRGIFLKDARTRTEAMSLLK

SEQ ID NO: 7815 - protein, 265 aa, Bathymodiolus septemdierum
  misc_feature (1)..(265): tr|A0A0P0UST4|A0A0P0UST4_9GAMM GTP cyclohydrolase FolE2 OS=endosymbiont of Bathymodiolus septemdierum str. Myo jin knoll OX=1303921 GN=folE2 PE=3 SV=1
MTTTCNLPDTQNNADTRQIVIDKVGIKDISHPIIYIDRDGNKNPTVGNFTMTVTLPKQVKGTHMSRFIEILNAGPCEFNVGNFGRIIDKVHAKLDTDRVHVAVDFPFFRNKKAPSSGVESLMDYQVTLYGVLSEGKTEVMVKVVVPVTSLCPCSKSISKYGAHNQRSHITIKARIAEGKSLHIEDLIDLAEEKASCELYAILKREDEKVVTERAYDNPAFVEDLVRDIAVGLNVNDNIDYYRLESENFESIHNHSAYAVIENEKC

SEQ ID NO: 7816 - protein, 194 aa, Acanthamoeba sp.
  misc_feature (1)..(194): tr|A0A075MK81|A0A075MK81_9PROT GTP cyclohydrolase 1 OS= endosymbiont of Acanthamoeba sp. UWC8 OX=86106 GN=folE PE=3 SV=1
MSKILKKDRAINQKAINAIRSLIECIGDDPGRPELKKSPYKILEVLQSSLSGYVVNPDEILAETIEEVEGYDDIIMLKDINFTSYCEHHFLPFSGKCHIGYIPNKKIAGIGKFAEVLEAFAGRLQIQERLTVLIAEAIYNNLQPKGVGVVIEAKHNCLSFKHSGCKDAKMRTVKMLGNFYEDSNIRNEFLYALK

SEQ ID NO: 7817 - protein, 212 aa, Endozoicomonadaceae bacterium
  misc_feature (1)..(212): tr|A0A444H140|A0A444H140_9GAMM GTP cyclohydrolase 1 OS= Endozoicomonadaceae bacterium GTF-13 OX=2506149 GN=folE PE=3 SV=1
MISAEATRVREMLIEKGLETPLLETGLSREQKYERIKGLMTEVVSTLGLDLSDDSLQETPHRIARMYLDDLFVGLDYQHFPSISVIDNKMGVDEMVKVSEIRMTSTCEHHFITIDGAAKVAYLPDQKIIGLSKLNRIVRFFAQRPQVQERLTQQILVALQTLLETDDVAVSINATHYCVKARGIMDANSFTETTALGGSFKSNPQTRAEFLR

SEQ ID NO: 7818 - protein, 180 aa, Endozoicomonadaceae bacterium
  misc_feature (1)..(180): tr|A0A3S3RHR3|A0A3S3RHR3_9GAMM GTP cyclohydrolase 1 OS= Endozoicomonadaceae bacterium GTF-13 OX=2506149 GN=folE PE=3 SV=1
MEKSFANIISSIGEDLSRPGLVDTPARAAKAFAFLNRGYQQSLDEVVNDALFPSDNDEMVIVKDIELYSLCEHHLLPFIGRCHVAYLPSGKVLGLSKVARIVDMFARRLQIQENLTKQIADTIQQVTGASGVGVIIEAQHMCMMMRGVEKQNSSMKTSVMLGHFRSKAHTRAEFLSLIRD

SEQ ID NO: 7819 - protein, 183 aa, Endozoicomonas elysicola
  misc_feature (1)..(183): tr|A0A081KFT9|A0A081KFT9_9GAMM GTP cyclohydrolase 1 OS= Endozoicomonas elysicola OX=305900 GN=folE PE=3 SV=1
MSQRISEHYKAIIESVGEDIHREGLRDTPLRAAKAMQYLTKGYTQTLDEIVNGAVFESDISEMVVIKDIELYSMCEHHMLPFIGKCHIGYVPRGKVLGLSKFARIVDMYARRLQIQENMTKQIADAIMEVTDAKGVAVVIEAQHMCMMMRGVEKQNSSMTSSVMRGLMKDNQPTREEFLRFIR

SEQ ID NO: 7820 - protein, 183 aa, Endozoicomonas montiporae
  misc_feature (1)..(183): tr|A0A081N2S9|A0A081N2S9_9GAMM GTP cyclohydrolase 1 OS= Endozoicomonas montiporae OX=1027273 GN=folE PE=3 SV=1
MTDNLSEHYKAIIESLGEDIHRNGLVDTPARAAKAMQYLTRGYQQSLEDIVNGAIFDSDISEMVVIKDIELYSLCEHHMLPFIGKCHIGYIPNGKVLGLSKFARIVDMFARRLQIQENMTKQIADAIVEATGAKGVGVVIEAQHMCMMMRGVEKQNSSMTSSVMLGLMRDNLPSREEFLQFIR

SEQ ID NO: 7821 - protein, 274 aa, Endozoicomonas montiporae
  misc_feature (1)..(274): tr|A0A142BGZ3|A0A142BGZ3_9GAMM GTP cyclohydrolase 1 OS= Endozoicomonas montiporae CL-33 OX=570277 GN=gch1 PE=3 SV=1
MVSMRLSPNSCLEDGIGITQDFTLSIKCTAGKLSCDFTETQCNQKYAATITQQLLRHAYSRAPRIKSKKAPNAIVCVKIQLFAYSLSDSYEMTDNLSEHYKAIIESLGEDIHRNGLVDTPARAAKAMQYLTRGYQQSLEDIVNGAIFDSDISEMVVIKDIELYSLCEHHMLPFIGKCHIGYIPNGKVLGLSKFARIVDMFARRLQIQENMTKQIADAIVEATGAKGVGVVIEAQHMCMMMRGVEKQNSSMTSSVMLGLMRDNLPSREEFLQFIR

SEQ ID NO: 7822 - protein, 185 aa, Endozoicomonas numazuensis
  misc_feature (1)..(185): tr|A0A081NKP1|A0A081NKP1_9GAMM GTP cyclohydrolase 1 OS= Endozoicomonas numazuensis OX=1137799 GN=folE PE=3 SV=1
MTEQLSEHYKAILESLGEDIHRDGLRDTPKRAAKAMQFLTRGYEQSLEDIVNNAVFESDISEMVVIKDIELYSMCEHHMLPFIGKCHIGYIPDGKVLGLSKFARIVDMFARRLQIQENMTKQIADAIVEATGAKGVGVVIEAQHMCMMMRGVQKQNSSMTSSVMLGLMRENQPTREEFLQFIRHR

SEQ ID NO: 7823 - protein, 184 aa, Endozoicomonas sp.
  misc_feature (1)..(184): tr|A0A1D2XDA0|A0A1D2XDA0_9GAMM GTP cyclohydrolase 1 OS= Endozoicomonas sp. (ex Bugula neritina AB1) OX=1868284 GN=folE PE=3 SV=1
MSQILSEHYKAIIESVGEDIHRDGLAGTPDRAAKAMQYLTRGYTQDLKDIVNGAVFKSDISEMVVIKDIELYSLCEHHMLPFIGKCHIGYLPDGKVLGLSKFARIVDMFARRLQIQENMTKQIADAVMEVTGAKGVAVVIEAKHMCMMMRGVEKQNSSMTSSVMRGLMRDRQSTREEFLQFIRG

SEQ ID NO: 7824 - protein, 180 aa, Endozoicomonas sp.; identical to SEQ ID NO: 7818
  misc_feature (1)..(180): tr|A0A3P3VQD1|A0A3P3VQD1_9GAMM GTP cyclohydrolase 1 OS= Endozoicomonas sp. GTF13 OX=2528527 GN=folE PE=3 SV=1

SEQ ID NO: 7825 - protein, 208 aa, Enhydrobacter aerosaccus
  misc_feature (1)..(208): tr|A0A1T4SWC0|A0A1T4SWC0_9PROT GTP cyclohydrolase 1 OS= Enhydrobacter aerosaccus OX=225324 GN=folE PE=3 SV=1
MNRILKKSAMVSMATGVSRPSREEAEAAVRTLILWAGDDPDREGLVGTPDRVVRSYEEFFAGYDEDPREMLQRTFEEVEGYDEVVMLRDIRLESHCEHHMVPIIGKVHIGYLPDRRVVGISKLARVVDAYARRLQIQEKLTAQIANTLQDVLQPRGVAVVIEAAHQCMTTRGVHKSDVAMVTSRMLGAFRNNGETRREFLTMIGRSSL

SEQ ID NO: 7826 - protein, 192 aa, Enhydrobacter sp.
  misc_feature (1)..(192): tr|A0A1V2GNF5|A0A1V2GNF5_9PROT GTP cyclohydrolase 1 OS= Enhydrobacter sp. H5 OX=1907940 GN=folE PE=3 SV=1
MPANFDEIIQQNSDAYRTLIASTGEDLTREGLLNTPERAAKAFSFLTQGYHQDLVEITNNAIFPTDNNELVMVKNIEFYSMCEHHMLPFYGVAHVAYLPDGKVIGLSKMARIVDMYARRLQIQENLTRQIAQAVMDMTGAKGAAVVMDAAHMCMMMRGVMKQKSDTRSMSLLGEFKHNTEARQALLMAIPSA

SEQ ID NO: 7827 - protein, 214 aa, Enhydrobacter sp.
  misc_feature (1)..(214): tr|A0A5C8PJX1|A0A5C8PJX1_9PROT GTP cyclohydrolase 1 OS= Enhydrobacter sp. CC-CFT640 OX=2586908 GN=folE PE=3 SV= 1
MNKVLKRPSLGSVAAASSQVKPTRAEAEEAVRTLIRWAGDDPDREGLVGTPDRVVRSYEEFFAGYAEDPREILARTFEETDGYDEMVVLRDIRLESYCEHHIVPIIGKAHVGYLPAHRVVGISKLARIVEAYAKRLQIQEKMTAQIANCIQEVLEPRGVAVVIEAAHQCMTTRGIRKPGVAMVTSRMLGAFRDDPSTRREFLAMIGKNGAGGYA

SEQ ID NO: 7828 - protein, 191 aa, Enhygromyxa salina
  misc_feature (1)..(191): tr|A0A2S9XFD7|A0A2S9XFD7_9DELT GTP cyclohydrolase 1 OS= Enhygromyxa salina OX=215803 GN=folE PE=3 SV=1
MTDSSSVSPREQALAAAVQALLRACDLDLEHSDLIGTPKRVARLWDTLVLSGYDADPAAILGDLVLGEGDTELVVVRDIPCHGMCPHHLMPWVGQATVGYLPADKLVGFGRLSDLVHCFTRRLTLQERVCNDIADALMQHLSARGAACVITGQHNCLNVPDDKHGARVVTASYRGELKTRPDLQAQLISRG

SEQ ID NO: 7829 - protein, 267 aa, Enhygromyxa salina
  misc_feature (1)..(267): tr|A0A2S9XUG5|A0A2S9XUG5_9DELT GTP cyclohydrolase FolE2 OS=Enhygromyxa salina OX=215803 GN=folE2 PE=3 SV=1
MQDVQGLPDDREIALDRVGVAGLCHPIVVLDRRSEKQRTVGTFEMSVSLPREQKGTHMSRFVEVLNEHHGEVTMRTVPKILRDLQTRLDASSARVEVEFPYFLERTAPVSGATALMDYSCAFIGELSEDEDDFVLRVRVPVTSLCPCSKAISERGAHNQRGYITISVRTQTDLDGDPQLVWIEELIEVAEQSASAPVYPLLKRPDEAHVTVQAYDNPVFVEDMVRNVARRLQDEPRVHWFEVHAENHESIHNHSAFAQVTWSRSEPQ

SEQ ID NO: 7830 - protein, 188 aa, Enorma massiliensis
  misc_feature (1)..(188): tr|A0A1Y3U8U3|A0A1Y3U8U3_9ACTN GTP cyclohydrolase 1 OS= Enorma massiliensis OX=1472761 GN=folE PE=3 SV=1
MAVDKARAEAAIREFLIAVGEDPDRPGLLETPDRVARAAQEVLGGYDEDPSLHLRKQFHENDNEEMVIVRDIPFSSLCEHHILPFTGKAHVAYIPHEGRITGLSKIARCVNGYARRLQLQERLTAQIADAMMAELRPRGVLVVLEAEHMCMTMRGVRAAGALTTTSAVRGTFRSDIRTREEALRLLGL

SEQ ID NO: 7831 - protein, 205 aa, Ensifer adhaerens
  misc_feature (1)..(205): tr|A0A0L8C629|A0A0L8C629_ENSAD GTP cyclohydrolase 1 OS= Ensifer adhaerens OX=106592 GN=folE PE=3 SV=1
MDAIVKNFPVLDNASDRPTQKEAEDAVRVLLRWAGDDPSREGLADTPARVAKAYRELFSGYDLAAEDVLGRTFEEVAGYDDMVLVKDIPFYSHCEHHMVPIIGKAHVAYLPNGRVLGLSKIARVVDIYGRRLQTQESMTAQIARAIDESLAPRGVAVMIEAEHMCMAMRGVQKQGSTTLTTTFTGTFQTEPAEQARFMTMLRGFK

SEQ ID NO: 7832 - protein, 205 aa, Ensifer adhaerens
  misc_feature (1)..(205): tr|A0A2V4XZR9|A0A2V4XZR9_ENSAD GTP cyclohydrolase 1 OS= Ensifer adhaerens OX=106592 GN=folE PE=3 SV=1
MDAIVKNFPVLDDASGRPTQKEAEEAVRVLLRWAGEDPQREGLLDTPARVAKSYRELFSGYDLAAEDVLGRTFEEVAGYDDMVLVKDIPFYSHCEHHMVPIIGKAHVAYLPNGRVLGLSKIARVVDIYGRRLQTQESMTAQIARAIDESLAPRGVAVMIEAEHMCMAMRGVQKQGSTTLTTTFTGTFQTEPAEQARFMTMIRGFK

SEQ ID NO: 7833 - protein, 205 aa, Ensifer alkalisoli
  misc_feature (1)..(205): tr|A0A1E3VEB2|A0A1E3VEB2_9RHIZ GTP cyclohydrolase 1 OS= Ensifer alkalisoli OX=1752398 GN=folE PE=3 SV=1
MDAIVKNFPVLDDTSGRPSQKEAEEAVRVLLRWAGEDPTREGLRDTPQRVVKSYREIFGGYDLVAEDVLGRTFEEVSGYDDIVLEKDIPFYSHCEHHMVPIIGKAHVAYLPNGRVLGLSKIARAVDIYARRLQTQEAMTAQIARAIDETLAPRGVAVMVEAEHLCMAMRGVKKHGATTLTTTFTGAFKTDPAEQARFMTLLRGFK

SEQ ID NO: 7834 - protein, 205 aa, Ensifer glycinis
  misc_feature (1)..(205): tr|A0A178XGN9|A0A178XGN9_9RHIZ GTP cyclohydrolase 1 OS= Ensifer glycinis OX=1472378 GN=folE PE=3 SV=1
MDAIVKNFPVLDDTSGRPTQKEAEEAVRVLLRWAGEDPTREGLKDTPARVVKSYREIFGGYDLIAEDVLGRTFEEVSGYDDIVLEKDIPFYSHCEHHMVPIIGKAHVAYLPNGRVLGLSKIARVVDIYARRLQTQESMTAQIARAIDETLAPRGVAVMIEAEHLCMAMRGVKKQGSTTLTTTLTGAFKTDPAEQARFMTMLRGFK

SEQ ID NO: 7835 - protein, 205 aa, Ensifer sojae
  misc_feature (1)..(205): tr|A0A249PA32|A0A249PA32_9RHIZ GTP cyclohydrolase 1 OS= Ensifer sojae CCBAU 05684 OX=716928 GN=folE PE=3 SV=1
MDAIVKNFPVLDDTSDRPTQKEAEEAVRVLLRWAGEDPTREGLRDTPQRVVKSYREIFGGYDLVAEDVLGRTFEEVSGYDDIVLEKDIPFYSHCEHHMVPIIGKAHVAYLPNGRVLGLSKIARAVDIYARRLQTQEAMTAQIARAIDETLAPRGVAVMIEAEHLCMAMRGVKKHGATTLTTTFTGAFKTEPAEQARFMTLLRGFK

SEQ ID NO: 7836 - protein, 205 aa, Ensifer sp.
  misc_feature (1)..(205): tr|A0A0Q9D9V7|A0A0Q9D9V7_9RHIZ GTP cyclohydrolase 1 OS= Ensifer sp. Root278 OX=1736509 GN=folE PE=3 SV=1
MDAIVKNFPVLDDASGRPTQKEAEEAVRVLLRWAGEDPEREGLLDTPARVAKSYRELFSGYDLAAEDVLGRTFEEVAGYDDMVLVKDIPFYSHCEHHMVPIIGKAHVAYLPNGRVLGLSKIARVVDIYGRRLQTQESMTAQIAKAIDETLAPRGVAVMIEAEHMCMAMRGVQKQGSTTLTTTFTGTFQTEPAEQARFMTMLRGFK

SEQ ID NO: 7837 - protein, 205 aa, Ensifer sp.; identical to SEQ ID NO: 7831
  misc_feature (1)..(205): tr|A0A1C0T3D4|A0A1C0T3D4_9RHIZ GTP cyclohydrolase 1 OS= Ensifer sp. LC54 OX=1873715 GN=folE PE=3 SV=1

SEQ ID NO: 7838 - protein, 190 aa, Enteractinococcus coprophilus
  misc_feature (1)..(190): tr|A0A543APK5|A0A543APK5_9MICC GTP cyclohydrolase 1 OS= Enteractinococcus coprophilus OX=1027633 GN=folE PE=3 S V=1
MMDQPRIEAAVREILLAVGEDPDRDGLVDTPARVARAYGEFFAGLHRDPAEILGTTFDISHDEMVLVKDIEFYSMCEHHLVPFHGHAHIGYIPSAEGKVTGLSKLARLVDLYARRPQVQERLTTQIVEALVEHLNPQGAIVVLSAEHMCMSMRGVQKPHAKTVTSAVRGQLRESSTRNEAMSLIMNSGVH

SEQ ID NO: 7839 - protein, 190 aa, Enteractinococcus helveticum
  misc_feature (1)..(190): tr|A0A1B7LZ01|A0A1B7LZ01_9MICC GTP cyclohydrolase 1 OS= Enteractinococcus helveticum OX=1837282 GN=folE PE=3 SV =1
MMDQPRIEAAVREILLAVGEDPDREGLVETPARVARAYGEFFAGLHRDPAEILGTTFDISHDEMVLVKDIEFYSMCEHHLVPFHGHAHIGYIPSVEGKVTGLSKLARLVDLYARRPQVQERLTTQIVEALVEHLNPQGAIVVLSAEHMCMSMRGVQKPHAKTVTSAVRGQLREPSTRNEAMSLIMNAGVH

SEQ ID NO: 7840 - protein, 220 aa, Enterobacillus tribolii
  misc_feature (1)..(220): tr|A0A370QRN0|A0A370QRN0_9ENTR GTP cyclohydrolase 1 OS= Enterobacillus tribolii OX=1487935 GN=folE PE=3 SV=1
MSTLSKEAAMVHAALEARGLETPLRGVMLDRETRKQRIEGHMTEIMQLLNLDLSDDSLAETPHRIAKMYVDEIFSGLDYANFPKITLIENKMKVDEMVTVRDITLTSTCEHHFVTIDGKATVAYIPKDSVIGLSKINRIVQFFAQRPQVQERLTQQILIALQTLLGTNNVAVSIDAVHYCVKARGVRDATSATTTTSLGGLFKSSQNTRHEFLRAVRHQS

SEQ ID NO: 7841 - protein, 221 aa, Enterobacter agglomerans; identical to SEQ ID NO: 7257
  misc_feature (1)..(221): tr|A0A379AEA6|A0A379AEA6_ENTAG GTP cyclohydrolase 1 OS= Enterobacter agglomerans OX=549 GN=folE PE=3 SV=1

SEQ ID NO: 7842 - protein, 221 aa, Enterobacter agglomerans
  misc_feature (1)..(221): tr|A0A2A7VAJ1|A0A2A7VAJ1_ENTAG GTP cyclohydrolase 1 OS= Enterobacter agglomerans OX=549 GN=folE PE=3 SV=1
MSTLSQEAALVHEALLARGLETPLRAPTRDIDNETRKSLIAGHMTEIMQLLNLDLEDDSLMETPHRIAKMYVDEVFSGLDYANFPKITVIENKMKVDEMVTVRDITLTSTCEHHFVIIDGKATVAYIPKEKVIGLSKINRIVQFFAQRPQVQERLTQQVLVALQTLLGTNNVAVSIDAVHYCVKARGVKDATSATTTTSLGGLFKSSQNTRQEFLRAVRHS

SEQ ID NO: 7843 - protein, 222 aa, Enterobacter asburiae
  misc_feature (1)..(222): tr|A0A263VY49|A0A263VY49_ENTAS GTP cyclohydrolase 1 OS= Enterobacter asburiae OX=61645 GN=folE PE=3 SV=1
MSSLSKEAALVHEALVARGLETPLRPPVQDLDNETRKRLIAGHMTEIMELLNLDLSDDSLMETPHRIAKMYVDEIFSGLDYANFPKITVIENKMKVDEMVTVRDITLTSTCEHHFVTIDGKATVAYIPKDTVIGLSKINRIVQFFAQRPQVQERLTQQILTALQTLLGTNNVAVSIDAVHYCVKARGVRDATSATTTTSLGGLFKSSQNTRQEFLRAVRHHN

SEQ ID NO: 7844 - protein, 222 aa, Enterobacter asburiae
  misc_feature (1)..(222): tr|A0A376FMG6|A0A376FMG6_ENTAS GTP cyclohydrolase 1 OS= Enterobacter asburiae OX=61645 GN=folE PE=3 SV=1
MSSLSKEAALVHEALVARGLETPLRPPVQDLDNETRKRLIAGHMTDIMELLNLDLSDDSLMETPHRIAKMYVDEIFSGLDYANFPKITVIENKMKVDEMVTVRDITLTSTCEHHFVTIDGKATVAYIPKDTVIGLSKINRIVQFFAQRPQVQERLTQQILTALQTLLGTNNVAVSIDAVHYCVKARGVRDATSATTTTSLGGLFKSSQNTRQEFLRAVRHHN

SEQ ID NO: 7845 - protein, 222 aa, Enterobacter bugandensis
  misc_feature (1)..(222): tr|A0A2J7SVL6|A0A2J7SVL6_9ENTR GTP cyclohydrolase 1 OS= Enterobacter bugandensis OX=881260 GN=folE PE=3 SV=1
MSSLSKEAALVHEALLARGLETPLRPPVQDMDNETRKSLISGHMTEIMQLLNLDLSDDSLMETPKRIAKMYVDEIFSGLDYANFPKITVIENKMKVDEMVTVRDITLTSTCEHHFVTIDGKATVAYIPKDTVIGLSKINRIVQFFAQRPQVQERLTQQILIALQTLLGTNNVAVSIDAVHYCVKARGVRDATSATTTTSLGGLFKSSQNTRQEFLRAVRHHN

SEQ ID NO: 7846 - protein, 242 aa, Enterobacter cancerogenus
  misc_feature (1)..(242): tr|D2ZEP0|D2ZEP0_9ENTR GTP cyclohydrolase 1 OS=Enteroba cter cancerogenus ATCC 35316 OX=500639 GN=folE PE=3 SV= 1
MSAHFCHNEGRRKPHLQEKKMSSLSKEAALVHEALVARGLETPLRPPVQELDNETRKRLISGHMTEIMQLLNLDLSDDSLMETPHRIAKMYVDEIFSGLDYANFPKITVIENKMKVDEMVTVRDITLTSTCEHHFVTIDGKATVAYIPKDTVIGLSKINRIVQFFSQRPQVQERLTQQILTALQTLLGTNNVAVSIDAVHYCVKARGVRDATSATTTTSLGGLFKSSQNTRQEFLRAVRHHN

SEQ ID NO: 7847 - protein, 222 aa, Enterobacter cancerogenus
  misc_feature (1)..(222): tr|A0A2J7P1F1|A0A2J7P1F1_9ENTR GTP cyclohydrolase 1 OS= Enterobacter cancerogenus OX=69218 GN=folE PE=3 SV=1
MSSLSKEAALVHEALVARGLETPLRPPVQELDNETRKRLISGHMTEIMQLLNLDLSDDSLMETPHRIAKMYVDEIFSGLDYANFPKITVIENKMKVDEMVTVRDITLTSTCEHHFVTIDGKATVAYIPKDTVIGLSKINRIVQFFSQRPQVQERLTQQILTALQTLLGTNNVAVSIDAVHYCVKARGVRDATSATTTTSLGGLFKSSQNTRQEFLRAVRHHN

SEQ ID NO: 7848 - protein, 222 aa, Enterobacter chengduensis
  misc_feature (1)..(222): tr|A0A0F4BG98|A0A0F4BG98_9ENTR GTP cyclohydrolase 1 OS= Enterobacter chengduensis OX=2494701 GN=folE PE=3 SV=1
MSSLSKEAALVHEALVARGLETPLRPPVQDMDNETRKRLIAGHMTDIMELLNLDLSDDSLMETPHRIAKMYVDEIFSGLDYANFPKITVIENKMKVDEMVTVRDITLTSTCEHHFVTIDGKATVAYIPKDTVIGLSKINRIVQFFAQRPQVQERLTQQILTALQTLLGTNNVAVSIDAVHYCVKARGVRDATSATTTTSLGGLFKSSQNTRQEFLRAVRHHN

SEQ ID NO: 7849 - protein, 222 aa, Enterobacter chuandaensis; identical to SEQ ID NO: 7845
  misc_feature (1)..(222): tr|A0A3A3ZEN0|A0A3A3ZEN0_9ENTR GTP cyclohydrolase 1 OS= Enterobacter chuandaensis OX=2497875 GN=folE PE=3 SV=1

SEQ ID NO: 7850 - protein, 222 aa, Enterobacter cloacae; identical to SEQ ID NO: 6754
  misc_feature (1)..(222): tr|A0A155VQY3|A0A155VQY3_ENTCL GTP cyclohydrolase 1 OS= Enterobacter cloacae OX=550 GN=folE PE=3 SV=1

SEQ ID NO: 7851 - protein, 222 aa, Enterobacter cloacae
  misc_feature (1)..(222): tr|A0A145F1T5|A0A145F1T5_ENTCL GTP cyclohydrolase 1 OS= Enterobacter cloacae OX=550 GN=folE PE=3 SV=1
MSSLSKEAALVHEALVARGLETPLRPPVQELDNDTRKSLIAGHMTEIMQLLNLDLSDDSLMETPHRIAKMYVDEIFSGLDYANFPKITVIENKMKVDEMVTVRDITLTSTCEHHFVTIDGKATVAYIPKDTVIGLSKINRIVQFFAQRPQVQERLTQQILTALQTLLGTNNVAVSIDAVHYCVKARGVRDATSATTTTSLGGLFKSSQNTRQEFLRAVRHHN

SEQ ID NO: 7852 - protein, 222 aa, Enterobacter genomosp.; identical to SEQ ID NO: 7843
  misc_feature (1)..(222): tr|A0A0X4ENS8|A0A0X4ENS8_9ENTR GTP cyclohydrolase 1 OS= Enterobacter genomosp. O OX=2364150 GN=folE PE=3 SV=1

SEQ ID NO: 7853 - protein, 222 aa, Enterobacter hormaechei
  misc_feature (1)..(222): tr|A0A3S0PF56|A0A3S0PF56_9ENTR GTP cyclohydrolase 1 OS= Enterobacter hormaechei OX=158836 GN=folE PE=3 SV=1
MSSLSKEAALVHEALVARGLETPLRPPVQELDNVTRKSLIAGHMTEIMQLLNLDLSDDSLMETPHRIAKMYVDEIFSGLDYANFPKITVIENKMKVDEMVTVRDITLTSTCEHHFVTIDGKATVAYIPKDTVIGLSKINRIVQFFAQRPQVQERLTQQILTALQTLLGTNNVAVSIDAVHYCVKARGVRDATSATTTTSLGGLFKSSQNTRQEFLRAVRHHN

SEQ ID NO: 7854 - protein, 222 aa, Enterobacter hormaechei; identical to SEQ ID NO: 7851
  misc_feature (1)..(222): tr|A0A2J0Q5D1|A0A2J0Q5D1_9ENTR GTP cyclohydrolase 1 OS= Enterobacter hormaechei OX=158836 GN=folE PE=3 SV=1

SEQ ID NO: 7855 - protein, 222 aa, Enterobacter huaxiensis
  misc_feature (1)..(222): tr|A0A3R9NB08|A0A3R9NB08_9ENTR GTP cyclohydrolase 1 OS= Enterobacter huaxiensis OX=2494702 GN=folE PE=3 SV=1
MPSLSKEAALVHEALVAHGLETPLRPPVQELDNETRKNLISGHMTEIMQLLNLDLSDDSLMETPHRIAKMYVDEIFSGLDYANFPKITVIENKMKVDEMVTVRDITLTSTCEHHFVTIDGKATVAYIPKDTVIGLSKINRIVRFFSQRPQVQERLTQQILIALQTLLGTNNVAVSIDAVHYCVKARGVRDATSATTTTSLGGLFKSSQNTRQEFLRAVRHHN

SEQ ID NO: 7856 - protein, 222 aa, Enterobacter kobei
  misc_feature (1)..(222): tr|A0A5E1ACV3|A0A5E1ACV3_9ENTR GTP cyclohydrolase 1 OS= Enterobacter kobei OX=208224 GN=folE PE=3 SV=1
MSSLSKEAALVHEALVARGLETPLRPPVQEVDNETRKRLIAGHMTEIMQLLNLDLSDDSLMETPHRIAKMYVDEIFSGLDYANFPKITVIENKMKVDEMVTVRDITLTSTCEHHFVTIDGKATVAYIPKDTVIGLSKINRIVQFFAQRPQVQERLTQQILTALQTLLGTNNVAVSIDAVHYCVKARGVRDATSATTTTSLGGLFKSSQNTRQEFLRAVRHHN

SEQ ID NO: 7857 - protein, 222 aa, Enterobacter kobei
  misc_feature (1)..(222): tr|A0A155A4U2|A0A155A4U2_9ENTR GTP cyclohydrolase 1 OS= Enterobacter kobei OX=208224 GN=folE PE=3 SV=1
MSSLSKEAALVHEALLARGLETPLRPPVEDMDNETRKSLISGHMTEIMQLLNLDLSDDSLMETPKRIAKMYVDEIFSGLDYANFPKITVIENKMKVDEMVTVRDITLTSTCEHHFVTIDGKATVAYIPKDTVIGLSKINRIVQFFAQRPQVQERLTQQILIALQTLLGTNNVAVSIDAVHYCVKARGVRDATSATTTTSLGGLFKSSQNTRQEFLRAVRHHN

SEQ ID NO: 7858 - protein, 222 aa, Enterobacter lignolyticus
  misc_feature (1)..(222): tr|E3GC16|E3GC16_ENTLS GTP cyclohydrolase 1 OS=Enteroba cter lignolyticus (strain SCF1) OX=701347 GN=folE PE=3 SV=1
MSSLSKEAALVHEALVARGLETPLRPSAIEADNETRKRLIAGHMTEIMQLLNLDLSDDSLMETPHRIAKMYVDEIFSGLDYANFPKITVIENKMKVDEMVTVRDITLTSTCEHHFVTIDGKATVAYIPKESVIGLSKINRIVQFFAQRPQVQERLTQQILVALQTLLGTNNVAVSIDAVHYCVKARGIRDATSATTTTSLGGLFKSSQNTRQEFLRAVRHHN

SEQ ID NO: 7859 - protein, 248 aa, Enterobacter ludwigii
  misc_feature (1)..(248): tr|G8LJU7|G8LJU7_9ENTR GTP cyclohydrolase 1 OS=Enteroba cter ludwigii OX=299767 GN=folE PE=3 SV=1
MRRLTHNERTLLPQRGQKTPHLQEKRMPSLSKEAALVHEALVARGLETPLRPPVQELDNETRKHLIAGHMTEIMQLLNLDLSDDSLMETPHRIAKMYVDEIFSGLDYANFPKITVIENKMKVDEMVTVRDITLTSTCEHHFVTIDGKATVAYIPKDTVIGLSKINRIVQFFAQRPQVQERLTQQILTALQTLLGTNNVAVSIDAVHYCVKARGVRDATSATTTTSLGGLFKSSQNTRQEFLRAVRHHN

SEQ ID NO: 7860 - protein, 222 aa, Enterobacter ludwigii
  misc_feature (1)..(222): tr|W0BNG5|W0BNG5_9ENTR GTP cyclohydrolase 1 OS=Enteroba cter ludwigii OX=299767 GN=folE PE=3 SV=1
MPSLSKEAALVHEALVARGLETPLRPPVQELDNETRKHLIAGHMTEIMQLLNLDLSDDSLMETPHRIAKMYVDEIFSGLDYANFPKITVIENKMKVDEMVTVRDITLTSTCEHHFVTIDGKATVAYIPKDTVIGLSKINRIVQFFAQRPQVQERLTQQILTALQTLLGTNNVAVSIDAVHYCVKARGVRDATSATTTTSLGGLFKSSQNTRQEFLRAVRHHN

SEQ ID NO: 7861 - protein, 222 aa, Enterobacter mori
  misc_feature (1)..(222): tr|A0A2J0NJG8|A0A2J0NJG8_9ENTR GTP cyclohydrolase 1 OS= Enterobacter mori OX=539813 GN=folE PE=3 SV=1
MSSLSKEAALVHEALVARGLETPLRPPVQELDNETRKRLISGHMTEIMQLLNLDLSDDSLMETPQRIAKMYVDEIFSGLDYANFPKITVIENKMKVDEMVTVRDITLTSTCEHHFVTIDGKATVAYIPKDTVIGLSKINRIVRFFSQRPQVQERLTQQILTALQTLLGTSNVAVSIDAVHYCVKARGVRDATSATTTTSLGGLFKSSQNTRQEFLRAVRHHN

SEQ ID NO: 7862 - protein, 222 aa, Enterobacter roggenkampii; identical to SEQ ID NO: 7844
  misc_feature (1)..(222): tr|A0A1C7ZN77|A0A1C7ZN77_9ENTR GTP cyclohydrolase 1 OS= Enterobacter roggenkampii OX=1812935 GN=folE PE=3 SV=1

SEQ ID NO: 7863 - protein, 222 aa, Enterobacter sichuanensis; identical to SEQ ID NO: 7848
  misc_feature (1)..(222): tr|A0A0F1B4N5|A0A0F1B4N5_9ENTR GTP cyclohydrolase 1 OS= Enterobacter sichuanensis OX=2071710 GN=folE PE=3 SV=1

SEQ ID NO: 7864 - protein, 222 aa, Enterobacter soli
  misc_feature (1)..(222): tr|A0A198GER2|A0A198GER2_9ENTR GTP cyclohydrolase 1 OS= Enterobacter soli ATCC BAA-2102 OX=1354262 GN=folE PE=3 SV=1
MSSLSKEAALVHEALLARGLETPLRPPVQEMDNETRKRLISGHMTEIMQLLNLDLSDDSLMETPHRIAKMYVDEIFSGLDYANFPKITVIENKMKVDEMVTVRDITLTSTCEHHFVTIDGKATVAYIPKDTVIGLSKINRIVRFFAQRPQVQERLTQQILTALQTLLGTNNVAVSIDAVHYCVKARGVRDATSATTTTSLGGLFKSSQNTRQEFLRAVRHHN

SEQ ID NO: 7865 - protein, 222 aa, Enterobacter sp.
  misc_feature (1)..(222): sp|A4WCI8|GCH1_ENT38 GTP cyclohydrolase 1 OS=Enterobact er sp. (strain 638) OX=399742 GN=folE PE=3 SV=1
MPSLSKEAALVHEALVARGLETPLRPPVNELDNETRKRLIAGHMTEIMQLLNLDLSDDSLMETPQRIAKMYVDEIFSGLDYANFPKITVIENKMNVDEMVTVRDITLTSTCEHHFVTIDGKATVAYIPKDTVIGLSKINRIVQFFAQRPQVQERLTQQILTALQTLLGTNNVAVSIDAVHYCVKARGVRDATSATTTTSLGGLFKSSQNTRQEFLRAVRHHN

SEQ ID NO: 7866 - protein, 222 aa, Enterobacter sp.; identical to SEQ ID NO: 7848
  misc_feature (1)..(222): tr|A0A0J1VMV3|A0A0J1VMV3_9ENTR GTP cyclohydrolase 1 OS= Enterobacter sp. BIDMC92 OX=1594172 GN=folE PE=3 SV=1

SEQ ID NO: 7867 - protein, 221 aa, Enterobacterales bacterium
  misc_feature (1)..(221): tr|A0A389MEQ9|A0A389MEQ9_9GAMM GTP cyclohydrolase 1 OS= Enterobacterales bacterium OX=1993870 GN=folE PE=3 SV=1
MSTLSKEAILVHEALMARGLETPLREPLPIDNETRKQRIQEHMTGIMQLLNLDLADDSLTETPRRIAKMYVDEIFSGLDYANFPKITVIENKMKVDEMVTVRDITLTSTCEHHFVTIDGKATVAYIPKDKVIGLSKINRIVQFFSQRPQVQERLTQQILLALQTLLGTTNVAVSIDAVHYCVKARGIRDATSATTTTSLGGLFKSSQNTRQEFLRTVRHPS

SEQ ID NO: 7868 - protein, 221 aa, Enterobacterales bacterium
  misc_feature (1)..(221): tr|A0A2I0FX86|A0A2I0FX86_9GAMM GTP cyclohydrolase 1 OS= Enterobacterales bacterium CwR94 OX=2025587 GN=folE PE= 3 SV=1
MATLSQEATLVHEALLARGLETPLRTPVREMDDEQRKSLIAGHMTEIMQLLNLDLTDDSLAETPKRIAKMYVNEVFSGLDYANFPKITVIENKMKVDEMVTVRDITLTSTCEHHFVIIDGKATVAYIPKDKVIGLSKINRIVQFFAQRPQVQERLTQQVLVALQTLLGTNNVAVSIDAVHYCVKARGVKDATSATTTTSLGGLFKSSQNTRQEFLRAVRHN

SEQ ID NO: 7869 - protein, 48 aa, Enterobacteriaceae bacterium
  misc_feature (1)..(48): tr|A0A3C2BPB0|A0A3C2BPB0_9ENTR GTP cyclohydrolase I Fol E (Fragment) OS=Enterobacteriaceae bacterium OX=1849603 GN=folE PE=4 SV=1
MSSLSKEAALVHEALVARGLETPLRPPLRELDNETRKRLISEHMSEIM

SEQ ID NO: 7870 - protein, 221 aa, Enterobacteriaceae bacterium
  misc_feature (1)..(221): tr|A0A427BZK9|A0A427BZK9_9ENTR GTP cyclohydrolase 1 OS= Enterobacteriaceae bacterium CCUG 66741 OX=1851514 GN=f olE PE=3 SV=1
MPSLSKEAALVHEALLARGLETPLRPPVDMDNESRKRLIAGHMTEIMQLLNLDLSDDSLMETPHRIAKMYVDEIFSGLDYANFPKITVIENKMKVDEMVTVRDITLTSTCEHHFVTIDGKATVAYIPKESVIGLSKINRIVQFFAQRPQVQERLTQQILTALQTLLGTNNVAVSIDAVHYCVKARGIRDATSATTTTSLGGLFKSSQNTRQEFLRAVRHHN

SEQ ID NO: 7871 - protein, 219 aa, Enterococcus aquimarinus
  misc_feature (1)..(219): tr|A0A1L8QTD9|A0A1L8QTD9_9ENTE GTP cyclohydrolase 1 OS= Enterococcus aquimarinus OX=328396 GN=folE PE=3 SV=1
MAEMIDEKNEIREKQLLMNNFPELASNPALLTPKLEEMMMLEDAMKRLIDFCGDDSDREGVRETPYRFLKAFLEYTQGYREDPKAHLHKIFDVPYQELVLVKEIEFYSMCEHHFAPFFGVVHVGYIPNEKVTGLSKIARMVEGYARRFQVQERLTMQIAEALEEILEPIGTMVVVEAKHTCMCSRGVKNTSAMTTTSAVRGIFAEKAEARAEFLTLIKG

SEQ ID NO: 7872 - protein, 187 aa, Enterococcus asini
  misc_feature (1)..(187): tr|A0A413AK44|A0A413AK44_9ENTE GTP cyclohydrolase 1 OS= Enterococcus asini OX=57732 GN=folE PE=3 SV=1
MEENKQRMIENAIRDILTAVGEDPNRPGLVETPARVARMYAEVFSGLNTTFDDYKLFESASQTEMVVVKDIHFYSMCEHHLLPFFGLVHIAYIPAEDKVIGLSKLPRLVEHCARRPSVQENLTEMIGQELAAHIPLKGVAVVIEAEHLCMAMRGVRSPQSRTKTFYYSGCFQSVRDLKTDFLQAIQG

SEQ ID NO: 7873 - protein, 187 aa, Enterococcus asini
  misc_feature (1)..(187): tr|R2S1P6|R2S1P6_9ENTE GTP cyclohydrolase 1 OS=Enteroco ccus asini ATCC 700915 OX=1158606 GN=folE PE=3 SV=1
MEENKQRMIENAVRDILTAVGEDPNRPGLVETPARVARMYAEVFSGLNTIFDDYKLFESTSQTEMVVVKDIHFYSMCEHHLLPFFGLVHIAYIPAEDKVIGLSKLPRLVEHCARRPSVQENLTEMIGQELAAHIPLKGVAVVIEAEHLCMAMRGVRSPQSRTKTFYYSGCFQSDRDLKTDFLQAIQG

SEQ ID NO: 7874 - protein, 188 aa, Enterococcus caccae
  misc_feature (1)..(188): tr|R3WGL9|R3WGL9_9ENTE GTP cyclohydrolase 1 OS=Enteroco ccus caccae ATCC BAA-1240 OX=1158612 GN=folE PE=3 SV=1
MDEKQLAAIEQAVKQILNAIGEDPDRAGVKDTPKRVAKMYNEVFSSLRAPEFDDYALFDSLNEDDMVLVKDIQFYSMCEHHLLPFYGKAHIAYIPDESKVLGLSKLPRLVEYCAKRPSVQEDLTIMIANKLVEHVPVKGVAVAIEAEHMCMTMRGVRSPHSLTKTFHYQGVFKTNRECKDDFLRAIEA

SEQ ID NO: 7875 - protein, 182 aa, Enterococcus casseliflavus
  misc_feature (1)..(182): tr|A0A377KRR6|A0A377KRR6_ENTCA GTP cyclohydrolase 1 OS= Enterococcus casseliflavus OX=37734 GN=folE PE=3 SV=1
MDKERIKNAVKEILIAVGEDPTREGLVDTPERVAKMYMETCSGMIQDPKEVTKSFESNSQGIVIVKDIAFSSTCEHHLLPFVGKATVAYIPGNNRVLGLSKLARVVDVVSSKLQIQERLCNEVALVIAEAISPKGVAVLLEAEHTCMTIRGVKKEAALTKTIVYKGIFEEDLNRRNELLQLL

SEQ ID NO: 7876 - protein, 219 aa, Enterococcus durans
  misc_feature (1)..(219): tr|A0A5B9A610|A0A5B9A610_9ENTE GTP cyclohydrolase 1 OS= Enterococcus durans OX=53345 GN=folE PE=3 SV=1
MMMNEDYNEDRYSEENLLESNFPNLNKNSSQFQEKLEDVHEIENALKTLMTLCGQDEKNPDLDKTPFRVVKAFLEYTTGYREDPASHLEKTFDITQNDPIIVKDIEFYSMCEHHFAPFFGVAHVAYIPNKKVTGLSKIARVVEGYARRFQVQERLTNQIADAIESVLEPRGVMVAIEAKHLCVSSRGAKKEEAKTFTLVSRGVYRDNPALRSEFMMAIK

SEQ ID NO: 7877 - protein, 186 aa, Enterococcus faecalis
  misc_feature (1)..(186): sp|Q82Z12|GCH1_ENTFA GTP cyclohydrolase 1 OS=Enterococc us faecalis (strain ATCC 700802 / V583) OX=226185 GN=fo lE PE=3 SV=1
MEQEKQAQIEQAVTTILEAVGEDTQRAGLIDTPKRVAKMYAEVFSGLTEPEFDDYKLFDSLNEGEMVLVKDIAFYSMCEHHLLPFYGKVHVAYLPEGGKVLGLSKLPRLVEHCAKRPTVQEDLTVTIARKLQENIPVKGIAVAIEAEHMCMTMRGVKTPQSSTKTFQFTGLFKEQEWKNQFLMEIR

SEQ ID NO: 7878 - protein, 189 aa, Enterococcus faecalis
  misc_feature (1)..(189): tr|J6EGQ6|J6EGQ6_ENTFL GTP cyclohydrolase 1 OS=Enteroco ccus faecalis ERV65 OX=1134794 GN=folE PE=3 SV=1
MVEMEQEKQAQIEQAVTTILEAVGEDTQRAGLIDTPKRVAKMYAEVFSGLTEPEFDDYKLFDSLNEGEMVLVKDIAFYSMCEHHLLPFYGKVHVAYLPEGGKVLGLSKLPRLVEHCAKRPTVQEDLTVTIARKLQENIPVKGIAVAIEAEHMCMTMRGVKTPQSSTKTFQFTGLFKEQEWKNQFLMEIR

SEQ ID NO: 7879 - protein, 79 aa, Enterococcus faecium
  misc_feature (1)..(79): tr|A0A2V2KZF6|A0A2V2KZF6_ENTFC GTP cyclohydrolase 1 (Fr agment) OS=Enterococcus faecium OX=1352 GN=DKX15_21230 PE=3 SV=1
ARAYQEIFSGLYEDPTEVLSKTFSEDHREMVMVRDIQFYSTCEHHLVPFFGTAHIGYIPGKDGKVTGLSKLARLVDGMA

SEQ ID NO: 7880 - protein, 219 aa, Enterococcus faecium; identical to SEQ ID NO: 7876
  misc_feature (1)..(219): tr|A0A3F3NJZ2|A0A3F3NJZ2_ENTFC GTP cyclohydrolase 1 OS= Enterococcus faecium OX=1352 GN=folE PE=3 SV=1

SEQ ID NO: 7881 - protein, 188 aa, Enterococcus haemoperoxidus
  misc_feature (1)..(188): tr|R2SJ12|R2SJ12_9ENTE GTP cyclohydrolase 1 OS=Enteroco ccus haemoperoxidus ATCC BAA-382 OX=1158608 GN=folE PE= 3 SV=1
MNEEQLVTIEQAVKQILTAIGEDPDRAGVQDTPKRVAKMYNEVFSSLREPEFNDYALFDSLNEEDMVLVKDIQFYSMCEHHLLPFYGKVHVAYIPDKRKVLGLSKLPRLVEYCAKRPSVQEDLTIMIANKLVEHVPVKGVAVAIEAEHMCMTMRGVKSPSSLTKTFHYQGIFKTNKECKDDFLRGIKA

SEQ ID NO: 7882 - protein, 219 aa, Enterococcus hirae; identical to SEQ ID NO: 7876
  misc_feature (1)..(219): tr|A0A4S3PAP6|A0A4S3PAP6_ENTHR GTP cyclohydrolase 1 OS= Enterococcus hirae OX=1354 GN=folE PE=3 SV=1

SEQ ID NO: 7883 - protein, 187 aa, Enterococcus pallens
  misc_feature (1)..(187): tr|R2PVR5|R2PVR5_9ENTE GTP cyclohydrolase 1 OS=Enteroco ccus pallens ATCC BAA-351 OX=1158607 GN=folE PE=3 SV=1
MAFQQQKIEAAVKQILEAIGEDPEREGLIDTPKRVAKMYGEVFSSLNEPEFDDYTLFASGNDDDMVVVKDIQFYSMCEHHLLPFFGKVHIAYVPEGDKVLGLSKLPRLVDYCTKRPSVQENLTVLIADQLVKHVPVKGVAVSIEAEHMCMTMRGVKTPHSSTKTFHYTGIFKEDREWKRDFLAAINN

SEQ ID NO: 7884 - protein, 187 aa, Enterococcus pseudoavium
  misc_feature (1)..(187): tr|A0A3D8ZXU5|A0A3D8ZXU5_9ENTE GTP cyclohydrolase 1 OS= Enterococcus pseudoavium OX=44007 GN=folE PE=3 SV=1
MDLQQEKIEAAVTQILEALGEDPKREGLINTPRRVAKMYQEIFSSLNEPEFNDYPLFDSGNDNDMVLVKEIQFYSMCEHHLLPFFGKVHVAYVPEGNKVVGLSKLPRLVEYCAKRPSVQENLTVMIADQLVKHVPVKGVAVAIEAEHMCMTMRGVKTPNSLTKTFHYRGIFKEDREWKKDFLAAINN

SEQ ID NO: 7885 - protein, 188 aa, Enterococcus rivorum
  misc_feature (1)..(188): tr|A0A1E5KYT4|A0A1E5KYT4_9ENTE GTP cyclohydrolase 1 OS= Enterococcus rivorum OX=762845 GN=folE PE=3 SV=1
MEAEKKVIIENAVREILLAIGEDPERSGLIDTPKRVAKMYGEVFSSLNEPEFNDYALFDSSNSEDLVVVKDIQFYSMCEHHLLPFFGKAHIAYIPEGNQVLGLSKLPRLVEYCAKRPSVQEDLTIMIANKLAEHVAVKGVAVALEAEHMCMTMRGVKTPVSKTKTFHYQGVFKTDREWKRDFLSAINS

SEQ ID NO: 7886 - protein, 188 aa, Enterococcus sp.
  misc_feature (1)..(188): tr|A0A242AXG5|A0A242AXG5_9ENTE GTP cyclohydrolase 1 OS= Enterococcus sp. 7F3_DIV0205 OX=1834189 GN=folE PE=3 SV =1
MDEKQLEAIEQAVKQILNAIGEDPDRAGVKDTPRRVSKMYNEVFSSLRAPEFDDYALFDSLNEDDMVLVKDIQFYSMCEHHLLPFYGKVHIAYIPDESKVLGLSKLPRLVEYCAKRPSVQEDLTIMIANKLVEHVPVKGVAVAIEAEHMCMTMRGVKSPHSLTKTFHYQGVFKTNRECKDDFLRAIEA

SEQ ID NO: 7887 - protein, 210 aa, Enterococcus sp.
  misc_feature (1)..(210): tr|A0A242CJB2|A0A242CJB2_9ENTE GTP cyclohydrolase 1 OS= Enterococcus sp. 4G2_DIV0659 OX=1834181 GN=folE PE=3 SV =1
MSGLQVQEIKQKFGSIGKVGKKMDEKQLVVIEEAVKQILEAIGEDPNRAGVKNTPTRVAKMYKEVFASLREPEFNDYALFDSLNEDDMVLVKDIQFYSMCEHHLLPFYGKVHVAYVPDEKKVLGLSKLPRLVEYCAKRPSVQEDLTIMIANKLVEHVPVKGVAVAIEAEHMCMTMRGVKSPNSLTKTFHYQGIFKTDREQKEDFLRAIEA

SEQ ID NO: 7888 - protein, 188 aa, Enterococcus ureilyticus
  misc_feature (1)..(188): tr|A0A1E5HBN8|A0A1E5HBN8_9ENTE GTP cyclohydrolase 1 OS= Enterococcus ureilyticus OX=1131292 GN=folE PE=3 SV=1
MDEKQLAMIEQAVKQILRAIGEDPERAGVKDTPTRVAKMYNEVFSSLRAPEFDDYALFDSLNEEDMVLVKDIQFYSMCEHHLLPFYGKAHVAYIPDERKVLGLSKLPRLVEYCAKRPSVQEDLTIMIANKLVEHVPVKGVAVAIEAEHMCMTMRGVKSPNSLTKTFHYQGVFKTDRECKDDFLRAIEA

SEQ ID NO: 7889 - protein, 186 aa, Enterorhabdus caecimuris
  misc_feature (1)..(186): tr|A0A4S4FYV3|A0A4S4FYV3_9ACTN GTP cyclohydrolase 1 OS= Enterorhabdus caecimuris OX=671266 GN=folE PE=3 SV=1
MDTAKIEAGVRLILEGIGEDPNREGLLETPARVARMYGEVLGGLEEDPSRHFDVTFDEGHSEIVLVGDIPFYSMCEHHLAPFFGRAHVAYIPGEDGRICGISKLARLVDGFAKRPQVQERLTGQIADTLVEALNPAGVIVVIEAEHLCMSMRGVKKPGAKTTTRAVRGCFATDADARSEALALIFR

SEQ ID NO: 7890 - protein, 186 aa, Enterorhabdus caecimuris
  misc_feature (1)..(186): tr|R9KU24|R9KU24_9ACTN GTP cyclohydrolase 1 OS=Enterorh abdus caecimuris B7 OX=1235794 GN=folE PE=3 SV=1
MDTAKIEAGVRLILEGIGEDPNREGLLETPARVARMYEEVLGGLEEDPSRHFDVTFDEGHSEIVLVGDIPFYSMCEHHLAPFFGRAHVAYIPGEDGRICGISKLARLVDGFAKRPQVQERLTGQIADTLVEALNPAGVIVVIEAEHLCMSMRGVKKPGAKTTTRAVRGCFTTDADARSEALALIFR

SEQ ID NO: 7891 - protein, 186 aa, Enterorhabdus sp.
  misc_feature (1)..(186): tr|A0A4S2FWC9|A0A4S2FWC9_9ACTN GTP cyclohydrolase 1 OS= Enterorhabdus sp. NM05_H27 OX=2516956 GN=folE PE=3 SV=1
MDTAKIEAGVRLILEGIGEDPNREGLLETPARVARMYEEVLGGLEEDPSRHFDVTFDEGHSEIVLVGDIPFYSMCEHHLAPFFGRAHVAYIPGEDGRICGISKLARLVDGFAKRPQVQERLTGQIADTLVEALNPAGVIVVIEAEHLCMSMRGVKKPGAKTTTRAVRGCFATDADARSEALALIFR

SEQ ID NO: 7892 - protein, 189 aa, Enteroscipio rubneri
  misc_feature (1)..(189): tr|A0A2K2UAX2|A0A2K2UAX2_9ACTN GTP cyclohydrolase 1 OS= Enteroscipio rubneri OX=2070686 GN=folE PE=3 SV=1
MDREKIEAGVRLILEGVGEDPEREGLRETPARVARMYEEVFAGLKQDPAEHFATTFDEHHEEMVLVRDIPFYSMCEHHLVPFFGMAHVAYIPAADGRICGLSKLARLVDVFAKRPQVQERLTSQIADTLIEQLHPQGVIVVLEAEHLCMSMRGVKKAGAKTTTSAVRGAFERSQATRAEALSLIFARRD

SEQ ID NO: 7893 - protein, 219 aa, Enterovibrio coralii
  misc_feature (1)..(219): tr|A0A135I8H2|A0A135I8H2_9GAMM GTP cyclohydrolase 1 OS= Enterovibrio coralii OX=294935 GN=folE PE=3 SV=1
MTALSDSAKRVRDALIARGIETPMQSGSSMTAEEKKEKIEYHMREILTVIDLDLEDDSLMETPARIAKMYVDEVFSGLDYSNFPKITVIDNKMGCDEMVRVKDITLTSTCEHHLVTIDGSCTVAYLPKDKIIGLSKINRIVRFFAQRPQVQERLTRQILVALQTLLETDNVAVHMNATHYCVKARGVMDATSATTTTALGGVFKKNAATRAEFLHGIGM

SEQ ID NO: 7894 - protein, 217 aa, Enterovibrio nigricans
  misc_feature (1)..(217): tr|A0A1T4VKR0|A0A1T4VKR0_9GAMM GTP cyclohydrolase 1 OS= Enterovibrio nigricans DSM 22720 OX=1121868 GN=folE PE= 3 SV=1
MTALSDSAKRVREALVARGIETPMQSGSSMTAEEKKEKIEYHMREILSVIDLDLKDDSLIETPARIAKMYVDEVFSGLDYSNFPKITVIDNKMGCDEMVRVKNITLTSTCEHHLVTIDGTCTVAYLPKDKIIGLSKINRIVRFFAQRPQVQERLTRQILVALQTLLETDNVAVHMNATHYCVKARGVMDATSATTTTALGGVFKKNAATRAEFLHGI

SEQ ID NO: 7895 - protein, 219 aa, Enterovibrio norvegicus
  misc_feature (1)..(219): tr|A0A2N7LAS3|A0A2N7LAS3_9GAMM GTP cyclohydrolase 1 OS= Enterovibrio norvegicus OX=188144 GN=folE PE=3 SV=1
MTALSDSAIRVREALVARGIETPMTPGSSMTATEKKERIEYHMREILSVIDLDLTDDSLIETPARIAKMYVDEVFSGLDYSNFPKITVIDNKMGCDEMVRVKNITLTSTCEHHLVTIDGACTVAYLPKDKIIGLSKINRIVRFFAQRPQVQERLTRQVLVALQTLLETDNVAVHVNATHYCVKSRGVMDATSETTTTALGGVFKKNAATRAEFLHGIGM

SEQ ID NO: 7896 - protein, 219 aa, Enterovibrio norvegicus
  misc_feature (1)..(219): tr|A0A4U1ZM27|A0A4U1ZM27_9GAMM GTP cyclohydrolase 1 OS= Enterovibrio norvegicus OX=188144 GN=folE PE=3 SV=1
MTALSDSAIRVREALVARGIETPMTPGSSMTATEKKERIEYHMREILSVIDLDLTDDSLTETPARIAKMYVDEVFSGLDYSNFPKITVIDNKMGCDEMVRVKNITLTSTCEHHLVTIDGACTVAYLPKEKIIGLSKINRIVRFFAQRPQVQERLTRQVLVALQTLLETDNVAVHVNATHYCVKSRGVMDATSETTTTALGGVFKKNAATRAEFLHGIGM

SEQ ID NO: 7897 - protein, 217 aa, Enterovibrio pacificus
  misc_feature (1)..(217): tr|A0A1C3EPV0|A0A1C3EPV0_9GAMM GTP cyclohydrolase 1 OS= Enterovibrio pacificus OX=1080227 GN=folE PE=3 SV=1
MTSLSDSAQKVREALIAQGIETPMRNDNNMSSLEKKEKISFHMREILNVLDLDLEDDSLTDTPSRIAKMYVDEVFCGLDYHKFPKITVIDNKMGCDEMVKVKDISVTSTCEHHLVTIDGRCAVAYVPDDKIIGLSKINRIVRFFAQRPQVQERLTKQILVALQALLETDNVAVHMTAVHYCVKSRGVMDSTSDTTTTALGGIFKSNPSTRAEFLHGV

SEQ ID NO: 7898 - protein, 205 aa, Enterovirga rhinocerotis
  misc_feature (1)..(205): tr|A0A4R7C654|A0A4R7C654_9RHIZ GTP cyclohydrolase 1 OS= Enterovirga rhinocerotis OX=1339210 GN=folE PE=3 SV=1
MNEHALPAGRAGNDEGAGRPTREEAEEAVRTLIRWAGDDPRREGLADTPSRVVRAYEDWFAGYRQDPASVLARTFSEIAKYDEMVILKDIPFSSHCEHHMAPIQGKVHVGYLPRKRVVGISKLARLVQAFARRLQIQERLTAEIADALQAELQPLGVAVMIEATHACMTTRGVHAREAVMTTSRMLGIFRENAKTRAEFLAAIGK

SEQ ID NO: 7899 - protein, 267 aa, Eoetvoesia caeni
  misc_feature (1)..(267): tr|A0A366H7H9|A0A366H7H9_9BURK GTP cyclohydrolase FolE2 OS=Eoetvoesia caeni OX=645616 GN=folE2 PE=3 SV=1
MNSLIDSVAVMPDVQSSADTRHMPIQRVGVRGVRHPMLIAAAGGPALPTVATWELTVALPAHEKGTHMSRFVALLEQYRVQAMTPALFCDMAQAMLPLLNAQQGDMSASFPYFVNKAAPVSGVQSLMDYEVKWTARANADATEFELGLLVPVTSLCPCSKAISNYGAHNQRSHVTVNVVFNDVAGIDVDALIGMIEQQASCELWGLLKRPDEKYVTERAYENPKFVEDLVRDVAVRVKAVAGVQRFRVEAENFESIHNHSAYAVVEG

SEQ ID NO: 7900 - protein, 367 aa, Epibacterium mobile
  misc_feature (1)..(367): tr|A0A1B1A090|A0A1B1A090_9RHOB GTP cyclohydrolase FolE2 OS=Epibacterium mobile F1926 OX=1265309 GN=folE2 PE=3 SV=1
MNIHSRDVNDTPDRSDAEEALAVLRRWADEASETEVAQLDPAIARLLPGREVQNYPDLKRQYPEEFDASETYRATLPDLQNGPSSLIRGAKEQIQHVGISNFRLPIRFHTRDNGDLTLETSVTGTVSLDAEKKGINMSRIMRSFYKHAEKVFSFDVMEAALEDYLSDLESGDARLQMRFSFPVKVESLRSGLSGYQYYDVALELVQMGGQRHRIVHLDYVYSSTCPCSLELSEHARQARGQLATPHSQRSVARISVQMEQDSGCLWFEDLIDHCRRAVPTETQVMVKREDEQAFAELNAANPIFVEDAARLFCEALQSDARVGDFRVVASHQESLHSHDAVSVLTQGTMFAAPSLDPQLFSTLIHRG

SEQ ID NO: 7901 - protein, 367 aa, Epibacterium mobile
  misc_feature (1)..(367): tr|A0A1H2VKS1|A0A1H2VKS1_9RHOB GTP cyclohydrolase FolE2 OS=Epibacterium mobile OX=379347 GN=folE2 PE=3 SV=1
MNIHSRDVNDTPDRSDAEEALAVLRRWADEASEAEVAQLDPAIARLLPGREVQNYPDLKRQYPEEFDASETYRATLPDLQNGPSSLIRGAKEQIQHVGISNFRLPIRFHTRDNGDLTLETSVTGTVSLDAEKKGINMSRIMRSFYKHAEKVFSFDVMEAALEDYLSDLESGDARLQMRFSFPVKVESLRSGLSGYQYYDVALELVQMGGQRHRIVHLDYVYSSTCPCSLELSEHARQARGQLATPHSQRSVARISVQMEQDSGCLWFEDLIDHCRRAVPTETQVMVKREDEQAFAELNAANPIFVEDAARLFCEALQSDARVGDFRVVASHQESLHSHDAVSVLTQGVMFAAPSLDPQLFSTLIHRG

SEQ ID NO: 7902 - protein, 367 aa, Epibacterium multivorans
  misc_feature (1)..(367): tr|A0A0P1G8S2|A0A0P1G8S2_9RHOB GTP cyclohydrolase FolE2 OS=Epibacterium multivorans OX=928856 GN=folE2 PE=3 SV =1
MNIYSRNRESAPDRETAAEALEVLRDWAATATETEIAQMDPAIARLLPGREVTNYPELSRHYDEDFKADENYRATLPDLQNGPTSLIRGAQEQIQHVGISNFRLPIRFHTRDAGDLLLETSVTGSVSLQAEKKGINMSRIMRSFYKHAEKTFSFEVMEHALEDYLTDLDSGDARLQMRFSFPAKIESLRSGLSGYQYYDIALELVQTGGERHEIIHLDYVYSSTCPCSLELSEHARQSRGQLATPHSQRSVARISVQVERDQPILWFEDLIDHCRRAVPTETQVMVKREDEQAFAELNAANPIFVEDAARLFCEALQSDGRIADFRIVASHQESLHSHDAVSVLTQGPMFASASLDPQLFSTLIHRG

SEQ ID NO: 7903 - protein, 367 aa, Epibacterium scottomollicae
  misc_feature (1)..(367): tr|A0A2T1AK12|A0A2T1AK12_9RHOB GTP cyclohydrolase FolE2 OS=Epibacterium scottomollicae OX=483013 GN=folE2 PE=3 SV=1
MNVHSGDLRDTPDQSDAAEALAVLRRWASKASATEVAQLDPAIARLLPERQVQNYPDLKRQYPDEFEADAGYRATLPDLQNGPSSLIRGAQEQIQHVGISNFRLPIRFHTRAGGDLTLETSVTGTVSLDAEKKGINMSRIMRSFYRHAEKTFSFEVMEAALEDYLSDLESGDARLQMRFSFPVKVESLRSGLSGYQYYDVALELVQTGGQRHSIVHLDYVYSSTCPCSLELSEHARQSRGQLATPHSQRSVARISVQMEPGTGCLWFEDLIDHCRRAVPTETQVMVKREDEQAFAELNAANPIFVEDAARLFCEALQSDARVGDFRVVASHQESLHSHDAVSVLTQGKTFASQSLDPKLFSTLIHQG

SEQ ID NO: 7904 - protein, 368 aa, Epibacterium ulvae
  misc_feature (1)..(368): tr|A0A1G5PVN8|A0A1G5PVN8_9RHOB GTP cyclohydrolase FolE2 OS=Epibacterium ulvae OX=1156985 GN=folE2 PE=3 SV=1
MNMHSRSSSEESPDRDAATAALETLRAWAHKASATEIAELDPAVARLLPGQDVSNYPDLSRHYPEAFEVTPTYRETLPDLQNGPSSLIKGAKEQIQHVGISNFRLPIRFAGRDGGMQTLETSVTGTVSLDAEKKGINMSRIMRSFYKHAEKTFSFEVMEAAIEDYLTDLESLDARLQMRFSFPMRVESLRSGLSGYQYYDIALELIEREGQRQKIIHLDYVYSSTCPCSLELSEHARQARGQLATPHSQRSVARISIVIDPDADCLWFEDLIDHCRKAVPTETQVMVKREDEQAFAELNAANPIFVEDAARLFCEVLQNDSRIGDFRVMASHQESLHSHDAISLLVQGDTFAAQSVDPWHFGTLIHRG

SEQ ID NO: 7905 - protein, 178 aa, Epsilonproteobacteria bacterium
  misc_feature (1)..(178): tr|A0A496XUX8|A0A496XUX8_9PROT GTP cyclohydrolase 1 OS= Epsilonproteobacteria bacterium OX=2026809 GN=folE PE=3 SV=1
MKKAVEEILKHVGEDISRDGLKDTPQRVQNAWEFLCSGYDIDPKKILNKALFDTTNQQMVVLKNIKFYSMCEHHMLPIIGKASIAYIPNGKVVGLSKIPRIVDIYARRLQIQEQLTKQIADTIYDVIKPKGVAVMIKARHMCMEMRGVQKQSNTITSSLNGLFQTNDKTRAEFFKIIT

SEQ ID NO: 7906 - protein, 192 aa, Epsilonproteobacteria bacterium
  misc_feature (1)..(192): tr|A0A426W1Y1|A0A426W1Y1_9PROT GTP cyclohydrolase 1 OS= Epsilonproteobacteria bacterium (ex Lamellibrachia sats uma) OX=2496635 GN=folE PE=3 SV=1
MNKEEEFEQAVTKILELLGEDPKREGLLKTPSRVAKALKFLTEGYDQNPEEILNQALFSTSNDEMVLVRDIEFYSMCEHHMLPIIGRAHVAYIPDGKVVGLSKIPRIVNVYARRLQIQEQMTEQIADAILGTIKPKGVAVVVHARHMCMEMRGVQKINSTTVSSALRGLFKSDERTRNEFYNLINTPTPSNF

SEQ ID NO: 7907 - protein, 189 aa, Epulopiscium sp.
  misc_feature (1)..(189): tr|A0A1V2YHP8|A0A1V2YHP8_9FIRM GTP cyclohydrolase 1 OS= Epulopiscium sp. Nuni2H_MBin001 OX=1884656 GN=folE PE=3 SV=1
MDKEKIEYHIREIIIALGDDPEREGLKETPKRVAQMYEEVFEGMKYTNDEIANMFDKTFSEPHNGDLVVVRDIPAYSYCEHHMALIYNMNISIIYRPVDKVIGLSKLARIADMVSKRLQLQERIGADIASIVAKITGSDDVGVLIEAEHSCMSSRGINKIGTVTRTTTLRGAFEHDKMLRQEVLLLLMK

SEQ ID NO: 7908 - protein, 195 aa, Epulopiscium sp.
  misc_feature (1)..(195): tr|A0A1S9CTD7|A0A1S9CTD7_9FIRM GTP cyclohydrolase 1 OS= Epulopiscium sp. Nele67-Bin004 OX=1764962 GN=folE PE=3 SV=1
MTLDKEKIAYHIREIIAELGDDPEREGLKDTPMRVAKMYEEVFEGMNYTNEQIATMFDKTFAEEDMLADETGNLVVVRDIPIHSFCEHHLALMYNMKVAVVYKPTNKVIGLSKIARIADMVGKRLQLQERIGHDIAEIMQMITGSEDIGVLIEGEHSCMTARGISKVGTITRTTTFTGSFKHDQALRQEALILMK

SEQ ID NO: 7909 - protein, 221 aa, Erwinia amylovora
  misc_feature (1)..(221): tr|D4HWS7|D4HWS7_ERWAC GTP cyclohydrolase 1 OS=Erwinia amylovora (strain CFBP1430) OX=665029 GN=folE PE=3 SV=1
MATLSQEATLVHQALVARGLETPLRSPGREMDDETRKQLIAGHMTEIMQLLNLDLEDDSLAETPQRIAKMYVNEVFSGLDYANFPKITVIENKMKVDEMVTVRDITLTSTCEHHFVIIDGQATVAYIPKDKVIGLSKINRIVQFFSSRPQVQERLTQQILVALQTLLDTSNVAVSIDAVHYCVKARGIRDATSATTTTSLGGLFKSSQNTRQEFLRSVRHR

SEQ ID NO: 7910 - protein, 221 aa, Erwinia amylovora
  misc_feature (1)..(221): tr|E5B5S6|E5B5S6_ERWAM GTP cyclohydrolase 1 OS=Erwinia amylovora ATCC BAA-2158 OX=889211 GN=folE PE=3 SV=1
MATLSQEATLVHQALVARGLETPLRSPGREMDDDTRKQLIAGHMTEIMQLLNLDLEDDSLAETPQRIAKMYVNEVFSGLDYANFPKITVIENKMKVDEMVTVRDITLTSTCEHHFVIIDGQATVAYIPKDKVIGLSKINRIVQFFSSRPQVQERLTQQILVALQTLLDTSNVAVSIDAVHYCVKARGIRDATSATTTTSLGGLFKSSQNTRQEFLRSVRHR

SEQ ID NO: 7911 - protein, 221 aa, Erwinia aphidicola; identical to SEQ ID NO: 5173
  misc_feature (1)..(221): tr|A0A4R6PAR8|A0A4R6PAR8_ERWAP GTP cyclohydrolase 1 OS= Erwinia aphidicola OX=68334 GN=folE PE=3 SV=1

SEQ ID NO: 7912 - protein, 221 aa, Erwinia billingiae
  misc_feature (1)..(221): tr|D8MUL1|D8MUL1_ERWBE GTP cyclohydrolase 1 OS=Erwinia billingiae (strain Eb661) OX=634500 GN=folE PE=3 SV=1
MAALSQEAALVHQALLARGLETPLRPPAREMDDESRKRLIAGHMTEIMQLLNLDLEDDSLAETPHRIAKMYVDEVFSGLDYGNFPKITVIQNKMKVDEMVTVRDITLTSTCEHHFVIIDGKATVAYIPKDTVIGLSKINRIVQFFSSRPQVQERLTQQILVALQTLLGTNNVAVSIDAVHYCVKARGIRDATSATTTTSLGGLFKSSQNTRQEFLRAVRHS

SEQ ID NO: 7913 - protein, 221 aa, Erwinia billingiae; identical to SEQ ID NO: 7912
  misc_feature (1)..(221): tr|A0A5J6LVY2|A0A5J6LVY2_9GAMM GTP cyclohydrolase I Fol E OS=Erwinia billingiae OX=182337 GN=folE PE=4 SV=1

SEQ ID NO: 7914 - protein, 221 aa, Erwinia citreus
  misc_feature (1)..(221): tr|A0A358L877|A0A358L877_ERWCI GTP cyclohydrolase 1 OS= Erwinia citreus OX=558 GN=folE PE=3 SV=1
MATLSQEATLVHETLLARGLETPLRSPAREMDDETRRRLIAGHMTEVMQLLNLDLEDDSLMETPHRIAKMYVNEVFSGLDYANFPKITLIENKMKVDEMVTVRDITLTSTCEHHFVIIDGKATVAYIPKDKVIGLSKINRIVQFFSSRPQVQERLTQQILVALQTLLGTNNVAVSIDAVHYCVKARGIRDATSATTTTSLGGLFKSSQNTRQEFLRAVRHN

SEQ ID NO: 7915 - protein, 221 aa, Erwinia gerundensis
  misc_feature (1)..(221): tr|A0A0U5L676|A0A0U5L676_9GAMM GTP cyclohydrolase 1 OS= Erwinia gerundensis OX=1619313 GN=folE PE=3 SV=1
MTILSREAALVHETLLARGLETPLRAPARDMHDETRKQLIAGHMTEIMQLLNLDLEDDSLMETPHRIAKMYVDEVFSGLDYANFPKITLIENKMKVDEMVTVRDITLTSTCEHHFVIIDGKATVAYIPKDKVIGLSKINRIVQFFAQRPQVQERLTQQVLIALQTLLGTNNVAVSIDAVHYCVKARGVKDATSATTTTSLGGLFKSSQNTRQEFLRAVRHS

SEQ ID NO: 7916 - protein, 221 aa, Erwinia iniecta
  misc_feature (1)..(221): tr|A0A0L7TA44|A0A0L7TA44_9GAMM GTP cyclohydrolase 1 OS= Erwinia iniecta OX=1560201 GN=folE PE=3 SV=1
MATLSQEAALVHEALLARGLETPLRSPAREMDDETRKNLITGHMTEIMKLLNLDLEDDSLAETPHRIAKMYVDEVFSGLDYANFPKITVIENKMKVDEMVTVRDITLTSTCEHHFVIIDGKATVAYIPKEKVIGLSKINRIVQFFSSRPQVQERLTQQILVALQTLLGTSNVAVSIDAVHYCVKARGIRDATSATTTTSLGGLFKSSQNTRQEFLRAVRHS

SEQ ID NO: 7917 - protein, 221 aa, Erwinia mallotivora
  misc_feature (1)..(221): tr|A0A014N7C3|A0A014N7C3_9GAMM GTP cyclohydrolase 1 OS= Erwinia mallotivora OX=69222 GN=folE PE=3 SV=1
MATLSQEATLVHEALLARGLETPLRSPAREMDDESRRQLIAGHMTEVMQLLNLDLQDDSLAETPHRIAKMYVNEIFSGLDYANFPKITLIENKMKVDEMVTVRDITLTSTCEHHFVMIDGKATVAYIPKDKVIGLSKINRIVQFFSSRPQVQERLTQQILLALQTLLGTNNVAVCIDAVHYCVKARGIRDATSATTTTSLGGLFKSSQNTRQEFLRTIRHG

SEQ ID NO: 7918 - protein, 221 aa, Erwinia persicina
  misc_feature (1)..(221): tr|A0A3S7S154|A0A3S7S154_9GAMM GTP cyclohydrolase 1 OS= Erwinia persicina OX=55211 GN=folE PE=3 SV=1
MATLSQEATQVHEALVARGLETPLRAPAREMDDDTRRQLIAGHMTEIMQLLNLDLEDDSLAETPQRIAKMYVNEVFSGLDYANFPKITLIENKMKVDEMVTVRDITLTSTCEHHFVIIDGRATVAYIPKDKVIGLSKINRIVQFFSSRPQVQERLTQQILLALQTLLGTNNVAVSIDAVHYCVKARGIRDATSATTTTSLGGLFKSSQNTRQEFLRSVRHR

SEQ ID NO: 7919 - protein, 221 aa, Erwinia piriflorinigrans
  misc_feature (1)..(221): tr|V5Z920|V5Z920_9GAMM GTP cyclohydrolase 1 OS=Erwinia piriflorinigrans CFBP 5888 OX=1161919 GN=folE PE=3 SV=1
MATLSQEATLVHQALVARGLETPLRAPVREMDDDTRKQLIAGHMTEIMQLLNLDLEDDSLAETPQRIAKMYVNEVFSGLDYANFPKITVIENKMKVDEMVTVRDITLTSTCEHHFVIIDGQATVAYIPKDKVIGLSKINRIVQFFSSRPQVQERLTQQILVALQTLLGTSNVAVSIDAVHYCVKARGIRDATSATTTTSLGGLFKSSQNTRQEFLRSVRHR

SEQ ID NO: 7920 - protein, 221 aa, Erwinia psidii
  misc_feature (1)..(221): tr|A0A3N6SEF8|A0A3N6SEF8_9GAMM GTP cyclohydrolase 1 OS= Erwinia psidii OX=69224 GN=folE PE=3 SV=1
MATLSQEATLVHDALLARGLETPLRAPVREMDDESRKNLIAGHMTEIMQLLNLDLEDDSLAETPHRIAKMYVNEIFSGLNYANFPKITLIENKMKVDEMVTVRDITLTSTCEHHFVMIDGKATVAYIPKDKVIGLSKINRIVQFFSSRPQVQERLTQQVLVALQTLLGTNNVAVSIDAVHYCVKARGIRDATSATTTTSLGGLFKSSQNTRQEFLRAVRHG

SEQ ID NO: 7921 - protein, 221 aa, Erwinia pyrifoliae
  misc_feature (1)..(221): tr|D2T8C6|D2T8C6_ERWP6 GTP cyclohydrolase 1 OS=Erwinia pyrifoliae (strain DSM 12163 / CIP 106111 / Ep16/96) OX =644651 GN=folE PE=3 SV=1
MATLSQEATLVHQALVARGLETPLRSPAREMDDDTRKRLIAGHMTEIMQLLNLDLEDDSLAETPQRIAKMYVNEVFSGLNYANFPKITVIENKMKVDEMVTVRDITLTSTCEHHFVIIDGQATVAYIPKDKVIGLSKINRIVQFFSSRPQVQERLTQQILVALQTLLGTSNVAVSIDAVHYCVKARGIRDATSATTTTSLGGLFKSSQNTRQEFLRSVRHR

SEQ ID NO: 7922 - protein, 221 aa, Erwinia rhapontici
  misc_feature (1)..(221): tr|A0A4R7GY95|A0A4R7GY95_ERWRD GTP cyclohydrolase 1 OS= Erwinia rhapontici OX=55212 GN=folE PE=3 SV=1
MATLSQEATLVHEALVARGLETPLRSPVREMDDDTRKQLIAGHMTEIMQLLNLDLEDDSLAETPQRIAKMYVNEVFSGLDYANFPKITVIENKMKVDEMVTVRDITLTSTCEHHFVIIDGQATVAYIPKEKVIGLSKINRIVQFFSSRPQVQERLTQQILVALQTLLGTSNVAVSIDAVHYCVKARGIRDATSATTTTSLGGLFKSSQNTRQEFLRSVRHR

SEQ ID NO: 7923 - protein, 221 aa, Erwinia sp.
  misc_feature (1)..(221): tr|A0A3R9AXX0|A0A3R9AXX0_9GAMM GTP cyclohydrolase 1 OS= Erwinia sp. 198 OX=2022746 GN=folE PE=3 SV=1
MATLSQEATLVHEALLARGLETPLRSPARDMDDETRRRLIAGHMTEVMQLLNLDLEDDSLMETPHRIAKMYVNEVFSGLDYANFPKITLIENKMKVDEMVTVRDITLTSTCEHHFVIIDGKATVAYIPKDKVIGLSKINRIVQFFSSRPQVQERLTQQILVALQTLLGTNNVAVSIDAVHYCVKARGIRDATSATTTTSLGGLFKSSQNTRQEFLRAVRHS

SEQ ID NO: 7924 - protein, 221 aa, Erwinia sp.
  misc_feature (1)..(221): tr|A0A3N1W036|A0A3N1W036_9GAMM GTP cyclohydrolase 1 OS= Erwinia sp. JUb26 OX=2485126 GN=folE PE=3 SV=1
MATLSQEAALVHEALLARGLETPLRAPVREMDDDTRRQLIAGHMTEIMQLLNLDLEDDSLRETPQRIAKMYVNEVFSGLDYANFPKITVIENKMKVDEMVTVRDITLTSTCEHHFVIIDGKATVAYIPKDKVIGLSKINRIVQFFSSRPQVQERLTQQILVALQTLLGTNNVAVSIDAVHYCVKARGIRDATSATTTTSLGGLFKSSQNTRQEFLRAVRHS

SEQ ID NO: 7925 - protein, 221 aa, Erwinia tasmaniensis
  misc_feature (1)..(221): sp|B2VII2|GCH1_ERWT9 GTP cyclohydrolase 1 OS=Erwinia ta smaniensis (strain DSM 17950 / CIP 109463 / Et1/99) OX= 465817 GN=folE PE=3 SV=1
MATLSQEATLVHQALVARGLETPLRSPVREMDDDARKQLIAGHMTEIMQLLNLDLEDDSLAETPQRIAKMYVNEVFSGLDYANFPKITVIENKMKVDEMVTVRDITLTSTCEHHFVIIDGQATVAYIPKDKVIGLSKINRIVQFFSSRPQVQERLTQQILVALQTLLGTSNVAVSIDAVHYCVKARGIRDATSATTTTSLGGLFKSSQNTRQEFLRSVRHR

SEQ ID NO: 7926 - protein, 221 aa, Erwinia tracheiphila
  misc_feature (1)..(221): tr|A0A0M2K6Z0|A0A0M2K6Z0_9GAMM GTP cyclohydrolase 1 OS= Erwinia tracheiphila OX=65700 GN=folE PE=3 SV=1
MATLSQEAKLVHNALLARGLETPLRSPSREMDDESRKNLIAGHMNEIMQLLNLDLDDDSLAETPHRVAKMYVNEIFSGLNYANFPKITMIENKMKVDEMVTVRDITLTSTCEHHFVMIDGKATVAYIPKDKVIGLSKINRIVQFFSSRPQVQERLTQQVLVALQTLLGTNNVAVSIDAVHYCVKSRGIRDATSATTTTSLGGLFKSSQNTRQEFLRAVRHG

SEQ ID NO: 7927 - protein, 221 aa, Erwinia tracheiphila
  misc_feature (1)..(221): tr|A0A345CSK5|A0A345CSK5_9GAMM GTP cyclohydrolase 1 OS= Erwinia tracheiphila OX=65700 GN=folE PE=3 SV=1
MATLSQEAKLVHNALLARGLETPLRSPSREMDDESRKNLIAGHMNEIMQLLNLDLDDDSLAETPHRVAKMYVNEIFSGLNYANFPKITLIENKMKVDEMVTVRDITLTSTCEHHFVMIDGKATVAYIPKDKVIGLSKINRIVQFFSSRPQVQERLTQQVLVALQTLLGTNNVAVSIDAVHYCVKARGIRDATSATTTTSLGGLFKSSQNTRQEFLRAVRHG

SEQ ID NO: 7928 - protein, 221 aa, Erwinia typographi
  misc_feature (1)..(221): tr|A0A0A3Z9I7|A0A0A3Z9I7_9GAMM GTP cyclohydrolase 1 OS= Erwinia typographi OX=371042 GN=folE PE=3 SV=1
MAALSQEAALVHEALLARGLETPLRSPVREMDDETRKRLIAGHMTEIMQLLNLDLEDDSLAETPHRIAKMYVNEVFSGLDYANFPKITVIENKMKVDEMVTVRDITLTSTCEHHFVIIDGKATVAYIPKEKVIGLSKINRIVQFFSSRPQVQERLTQQILLALQTLLGTNNVAVSIDAVHYCVKARGIRDATSATTTTSLGGLFKSSQNTRQEFLRAVRHS

SEQ ID NO: 7929 - protein, 196 aa, Erysipelatoclostridium ramosum
  misc_feature (1)..(196): tr|B0N7Y0|B0N7Y0_9FIRM GTP cyclohydrolase 1 OS=Erysipel atoclostridium ramosum DSM 1402 OX=445974 GN=folE PE=3 SV=1
MLIKEVSKMIDTKKIEEHIYGILKALGDDPEREGLKDTPKRVAKMYGEVFAGMNYSNLEIATMFDKTFIDDLDFDNQEVVVIKDIDIFSYCEHHLALMYDMKVTVAYIPCGKVIGLSKIARIADMAARRLQLQERIGTDIAEIISLVTNSKDIAVIIEGKHSCMSSRGIKKVNSTTVTSTLTGRFKTDSKLQIYLH

SEQ ID NO: 7930 - protein, 188 aa, Erysipelatoclostridium ramosum; identical to SEQ ID NO: 6993
  misc_feature (1)..(188): tr|A0A3E3EHA3|A0A3E3EHA3_9FIRM GTP cyclohydrolase 1 OS= Erysipelatoclostridium ramosum OX=1547 GN=folE PE=3 SV= 1

SEQ ID NO: 7931 - protein, 188 aa, Erysipelatoclostridium sp.
  misc_feature (1)..(188): tr|A0A1Y4N1K4|A0A1Y4N1K4_9FIRM GTP cyclohydrolase 1 OS= Erysipelatoclostridium sp. An173 OX=1965571 GN=folE PE= 3 SV=1
MIDLKKIEECIYQIIEALGEDPNREGLKETPKRVAKMYEEVFAGIQYTNQEIAEMFNKTFADDLDFANQEIVVVKDIDIFSYCEHHLALMYDMKVTVAYIPNGKVIGLSKIARIADMVARRLQLQERIGSDIAEIISLITDSKDIAVIINGKHSCMSARGIKKANTSTTTSTLTGRFKNDPSLQIYLQ

SEQ ID NO: 7932 - protein, 188 aa, Erysipelatoclostridium sp.; identical to SEQ ID NO: 7931
  misc_feature (1)..(188): tr|A0A1Y4QQG0|A0A1Y4QQG0_9FIRM GTP cyclohydrolase 1 OS= Erysipelatoclostridium sp. An15 OX=1965566 GN=folE PE=3 SV=1

SEQ ID NO: 7933 - protein, 186 aa, Erysipelotrichaceae bacterium
  misc_feature (1)..(186): tr|A0A3C1MZP8|A0A3C1MZP8_9FIRM GTP cyclohydrolase 1 OS= Erysipelotrichaceae bacterium OX=2049044 GN=folE PE=3 S V=1
MIDTKAIEEHVLGILEALGEDVTREGLVETPKRVAKMYAEVFAGINYSNEEIAQMFDKTFTQQGRDLVFVKDIETFSFCEHHMALMYDMKISVAYYPQGKVIGLSKIARICDLVCRRLQIQERIGSDIAEIMTMITGSEDVAVLIEAHHSCMSARGIKKTQAKTYTHTLRGVFAKHPEQLGGFYHG

SEQ ID NO: 7934 - protein, 188 aa, Erysipelotrichaceae bacterium
  misc_feature (1)..(188): tr|A0A3D4VPA0|A0A3D4VPA0_9FIRM GTP cyclohydrolase 1 OS= Erysipelotrichaceae bacterium OX=2049044 GN=folE PE=3 S V=1
MDKEKIEKAVREIIIAIGEDPDREGLLDTPKRIANMYEEIFSGLNEDPKKHLEIYFQEEKYEELVLVKNIPFYSMCEHHLVPFFGNVHVGYLPKDGKLTGLSKLARVVETISKRPQLQERLTANIADSILEKLEPYGVIVVIEAEHVCMTMRGVKKPGSKTITSVVRGVFAKDLKARAEVMSIINNGR

SEQ ID NO: 7935 - protein, 202 aa, Erythrobacter aquimixticola
  misc_feature (1)..(202): tr|A0A419RS88|A0A419RS88_9SPHN GTP cyclohydrolase 1 OS= Erythrobacter aquimixticola OX=1958945 GN=folE PE=3 SV= 1
MSSLVGPDEDDPRGKPPVPDDVQDAIRTLIRWAGDDPGREGLVDTPARVARAWKEYCLGYEEDPSTHLSRMFEEVGGYDEIVLLKDIPFQSHCEHHMAPIIGKAAIAYLPNDRVVGISKLARVLHGFARRLQIQERLTAEVANCIDKHLQPRGVAVVIEASHACMTARGVRTPGVQMVTSRVMGCFRDDHRSREEVLKLMGY

SEQ ID NO: 7936 - protein, 203 aa, Erythrobacter atlanticus
  misc_feature (1)..(203): tr|A0A0H4VYB8|A0A0H4VYB8_9SPHN GTP cyclohydrolase 1 OS= Erythrobacter atlanticus OX=1648404 GN=folE PE=3 SV=1
MVETTGSLDDDDARGKAHVPEEVEDAVRTILKWAGEDPEREGLLDTPKRVARAWLEYCEGYREDPSVHLSRVFHEVGGYDEIVLLKDIPFHSHCEHHMAPITGKAAIAYLPDKKVVGISKLARVLHGYARRLQIQERLTAEVAQCIWQHLQPQGVAVVIEARHGCMTGRGVRTPGVGMITSRMLGCFLNDDRSRKEVLSLMGY

SEQ ID NO: 7937 - protein, 203 aa, Erythrobacter citreus
  misc_feature (1)..(203): tr|A0A0L1KF44|A0A0L1KF44_9SPHN GTP cyclohydrolase 1 OS= Erythrobacter citreus LAMA 915 OX=1306953 GN=folE PE=3 SV=1
MSSLVGPDEDDPRGKLPVPEHVQDAIRTLIEWTGDDPAREGLLDTPKRVARAWKEYCIGYTEDPAVHLDRVFEEVGGYNEIVLLKDIPFQSHCEHHMAPIIGKAAIAYLPHDRVVGISKLARVLHGFARRLQVQERLTAEVADCIWENLQPQGVAVVIEASHACMTARGVRTPGVGMVTSRMMGTFLDDHRSREEVLKLMGYG

SEQ ID NO: 7938 - protein, 203 aa, Erythrobacter flavus
  misc_feature (1)..(203): tr|A0A222EV90|A0A222EV90_9SPHN GTP cyclohydrolase 1 OS= Erythrobacter flavus OX=192812 GN=folE PE=3 SV=1
MSSLVGPDEDDPRGKPPVPEHVQDAIRTLIEWTGDDPEREGLLDTPKRVARAWKEYCIGYTEDPAVHLDRVFEEVGGYNEIVLLKDIPFQSHCEHHMAPIIGKAAIAYLPNDRVVGISKLARVLHGFARRLQVQERLTAEVADCIWENLQPQGVAVVIEASHSCMTARGVRTPGVGMITSRMMGTFLDDQRSRKEVLSLMGYG

SEQ ID NO: 7939 - protein, 203 aa, Erythrobacter gangjinensis
  misc_feature (1)..(203): tr|A0A0G9MQP0|A0A0G9MQP0_9SPHN GTP cyclohydrolase 1 OS= Erythrobacter gangjinensis OX=502682 GN=folE PE=3 SV=1
MSSLEGPDEDDPRGKPPVPDDVQDAIRTLIRWAGDDPEREGLLDTPARVARAWKEYCIGYEEDPAIHLSRVFEEVGGYDEIVLLKDIPFQSHCEHHMAPIIGKAHIAYLPTNRVVGISKLARVLHGFARRLQIQERLTAEVAQCIEDHLEPRGVAVVIEASHACMTARGVRTPGVSMTTSRVTGCFREDARSRKEVLSLMGFA

SEQ ID NO: 7940 - protein, 203 aa, Erythrobacter litoralis
  misc_feature (1)..(203): tr|Q2NB45|Q2NB45_ERYLH GTP cyclohydrolase 1 OS=Erythrob acter litoralis (strain HTCC2594) OX=314225 GN=folE PE= 3 SV=1
MACEADYVEDPAIKKPDVPEHVQDAIRTLIEWSGDDPAREGLLDTPKRVGRAWLEYCQGYKEDPAIHLSRVFEEVGGYDEIVLLKDIPFQSHCEHHMAPITGKAAIAYLPRDKVVGISKLARVLHGFARRLQIQERLTAEVANCIWDNLEPEGVAVVIEAQHGCMTGRGVRTPGVSMVTSKLCGCFLDDERSRKEVLSLMGYG

SEQ ID NO: 7941 - protein, 206 aa, Erythrobacter litoralis
  misc_feature (1)..(206): tr|A0A074MUS7|A0A074MUS7_9SPHN GTP cyclohydrolase 1 OS= Erythrobacter litoralis OX=39960 GN=folE PE=3 SV=1
MNCLDHDSDDFDPDNPLNKPDVPEDVQDAIRTLIRWAGDDPEREGLLDTPKRVGRAWLEYCRGYGEDPAIHLSRVFEEVGGYDEIVLLKDIPFQSACEHHMAPITGKAHIAYLPDRRVVGISKLARVLHGFASRLQVQERLTAEVAQCIWDNLEPQGVAVVIEAQHGCMTGRGVKTHGVEMVTSRMLGCFLEDPRSRKEVMSLMGY

SEQ ID NO: 7942 - protein, 207 aa, Erythrobacter longus
  misc_feature (1)..(207): tr|A0A074MCM1|A0A074MCM1_ERYLO GTP cyclohydrolase 1 OS= Erythrobacter longus OX=1044 GN=folE PE=3 SV=1
MNNMCSHSHGEFDPDNPLNKPDVPDDVQDAIRTLLRWAGDDPDREGLIDTPKRVGRAWLEYCRGNQEDPAIHLARIFEEVGGYEEIVLLKGIPFQSHCEHHMAPITGKAHIAYLPAKKVVGISKLARVLHGYANRLQVQERLTAEVADCIWNNLEPRGVAVVIEAEHGCMTGRGVKVHEVEMLTSRMMGCFLEDAASRKEVLSLMGF

SEQ ID NO: 7943 - protein, 207 aa, Erythrobacter luteus
  misc_feature (1)..(207): tr|A0A0G9MXS8|A0A0G9MXS8_9SPHN GTP cyclohydrolase 1 OS= Erythrobacter luteus OX=1581420 GN=folE PE=3 SV=1
MSSLVGPDEDDPRRPDGSAKPPVPEHVQDAIRTLIEWAGDDPSREGLLDTPARVARAWKEYCLGYTEDPASHLSRVFEEVGGYDEIVLLKDIPFQSHCEHHMAPIIGKAAIAYLPTDHVVGISKLARVLHGFARRLQIQERLTAEVAQCIWDNLHPRGVAVVIEASHACMTARGVRTPGVGMVTSRVMGTFRSDSKSREEVLRLMGY

SEQ ID NO: 7944 - protein, 202 aa, Erythrobacter lutimaris
  misc_feature (1)..(202): tr|A0A395LTH2|A0A395LTH2_9SPHN GTP cyclohydrolase 1 OS= Erythrobacter lutimaris OX=1538146 GN=folE PE=3 SV=1
MSSLVGPDEDRENGKPAVPEHVQDAIRTLIEWTGDDPAREGLLDTPKRVARAWKEYCQGYGEDPSVHLSRVFEEVGGYDDIVLLKDIPFQSHCEHHMAPIIGVAHIAYLPTDFVVGISKLARVLHGYARRLQVQERLTAEVARCIWDNLKPEGVAVVIEATHACMTARGVRTPGVTMVTSRMMGVFRDDPRSREEVLSLMGH

SEQ ID NO: 7945 - protein, 202 aa, Erythrobacter marinus
  misc_feature (1)..(202): tr|A0A0H0XJP8|A0A0H0XJP8_9SPHN GTP cyclohydrolase 1 OS= Erythrobacter marinus OX=874156 GN=folE PE=3 SV=1
MTNVVDPNSDEARGKSPVPEHVQDAIRTLISWSGDDPEREGLIDTPKRVARAWLEYCQGYQEDPAVHLSRVFNEVGGYDEVVLLKDIPFQSHCEHHMAPITGKAAIAYLPKDKVVGISKLARVLNGYARRLQIQERLTAEVAQCIWDNLQPHGVAVVIEAQHGCMTGRGVRTPGVGMITSRLHGCFLEDHRSRKEVLSLMGY

SEQ ID NO: 7946 - protein, 203 aa, Erythrobacter nanhaisediminis
  misc_feature (1)..(203): tr|A0A1I5MDS3|A0A1I5MDS3_9SPHN GTP cyclohydrolase 1 OS= Erythrobacter nanhaisediminis OX=604088 GN=folE PE=3 SV =1
MSSLVGPDEDDPRAKPPVPEHVQDAIRTLIEWTGDDPTREGLVDTPARVARAWKEYCLGYTEDPSYHLSRVFEEVGGYNEIVLLKDIPFQSHCEHHMAPIIGKAAIAYLPNDRVVGISKLARVLHGFARRLQVQERLTAEVADCIWEHLQPQGVAVVIEASHSCMTARGVRTPGVGMITSRMMGTFLEDQRSRKEVLSLMGYG

SEQ ID NO: 7947 - protein, 207 aa, Erythrobacter sp.
  misc_feature (1)..(207): tr|A0A1E4B410|A0A1E4B410_9SPHN GTP cyclohydrolase 1 OS= Erythrobacter sp. SCN 62-14 OX=1660099 GN=folE PE=3 SV= 1
MNYICTHDHDEFDPENPLGKPEVPEDVQEAIRTLLRWAGDDPAREGLLDTPKRVGRAWLEYCEGYKEDPAIHLSRQFEEVGGYDEIVLLKDIPFQSHCEHHMAPITGKASIAYLPKNKVVGISKLARVLHGYAHRLQIQERLTAEVAQCIWDNLEPHGVAVVVEAQHGCMTGRGVKTHGVEMVTSRMLGCFMDDHRSRKEVLSLMGY

SEQ ID NO: 7948 - protein, 207 aa, Erythrobacter sp.
  misc_feature (1)..(207): tr|A0A2Z4K2K5|A0A2Z4K2K5_9SPHN GTP cyclohydrolase 1 OS= Erythrobacter sp. KY5 OX=2011159 GN=folE PE=3 SV=1
MNYVNVHDHAEFDPENPLNKPDVPEDVQEAIRTLIRWTGDDPTREGLLDTPKRVGRAWLEYCAGNKEDPAVHLSRIFEEVGGYDEIVLLKGIPFQSHCEHHMAPITGKAHIAYLPDKKVVGISKLARVLHGFAHRLQVQERLTAEVAECIWDNLEPRGVAVVIEAEHGCMTGRGVKVHEVEMLTSRMMGCFLEDPRSRKEVLSLMGF

SEQ ID NO: 7949 - protein, 201 aa, Erythrobacter xanthus
  misc_feature (1)..(201): tr|A0A3A1PB66|A0A3A1PB66_9SPHN GTP cyclohydrolase 1 OS= Erythrobacter xanthus OX=1784712 GN=folE PE=3 SV=1
MSCKHEEETVGNGKMPVPEDVQEAIRTLIRWAGDDPTREGLTDTPARVARAWKEYCQGYEEDPRVHLSRVFHEVGGYDEIVLLKDIPFQSHCEHHMAPIIGKAAIAYLPTDKVVGISKLARVLHGYARRLQIQERLTAEVAQCIWEELHPRGVAVVIEASHACMSARGVRTQGVGMVTSRVMGLFRSDHRSREEVLKLMGY

SEQ ID NO: 7950 - protein, 202 aa, Erythrobacter zhengii
  misc_feature (1)..(202): tr|A0A418NNW6|A0A418NNW6_9SPHN GTP cyclohydrolase 1 OS= Erythrobacter zhengii OX=2307003 GN=folE PE=3 SV=1
MSSLVGPDEDDPRGKPPVPEDVQEAIRTLIKWAGDDPTREGLLDTPKRVARAWKEYCVGYAEDPSHHLARVFEEVGGYDEIVLLKDIPFQSHCEHHMAPIIGKAAIAYLPTDRVVGISKLARVLHGFARRLQVQERLTAEVAQCIQDHLNPRGVAVVIEASHACMTARGVRTPGVSMVTSQVMGTFRSDPRSREEVLKLMGY

SEQ ID NO: 7951 - protein, 203 aa, Erythrobacteraceae bacterium
  misc_feature (1)..(203): tr|A0A2D9PD13|A0A2D9PD13_9SPHN GTP cyclohydrolase 1 OS= Erythrobacteraceae bacterium OX=2026738 GN=folE PE=3 SV =1
  misc_feature (30)..(30): Xaa can be any naturally occurring amino acid
  misc_feature (127)..(127): Xaa can be any naturally occurring amino acid
  misc_feature (159)..(159): Xaa can be any naturally occurring amino acid
  misc_feature (163)..(163): Xaa can be any naturally occurring amino acid
  misc_feature (186)..(186): Xaa can be any naturally occurring amino acid
MSSLVGPDEDDPRAKPPVPEHVQDAIRTLXEWTGDDPSREGLLDTPKRVARAWKEYCVGYEEDPAQHLGRVFEEVGGYNEIVLLKDIPFQSHCEHHMAPIIGKAAIAYLPNDRVVGISKLARVLHGXARRLQVQERLTAEVADCIWDNLQPQGVAVVIXAQHXCMTARGVRTPGVGMVTSRMMGTXLDDHRSREEVLKLMGYG

SEQ ID NO: 7952 - protein, 206 aa, Erythrobacteraceae bacterium
  misc_feature (1)..(206): tr|A0A0P7YIC0|A0A0P7YIC0_9SPHN GTP cyclohydrolase 1 OS= Erythrobacteraceae bacterium HL-111 OX=1666908 GN=folE PE=3 SV=1
MNCLDHDSDDFDPDNPLNKPEVPEDVQEAIRTLIRWAGDDPAREGLLDTPKRVGRAWLEYCRGYGEDPAIHLARVFEEVGGYDEIVLLKDIPFQSACEHHMAPITGKAHIAYLPDRRVVGISKLARVLHGFANRLQVQERLTAEVAQCIWDNLEPQGVAVVIEAQHGCMTGRGVRTHGVEMVTSRMLGCFLEDPRSRKEVMSLMGY

SEQ ID NO: 7953 - protein, 222 aa, Escherichia albertii
  misc_feature (1)..(222): tr|A0A1X3JY16|A0A1X3JY16_9ESCH GTP cyclohydrolase 1 OS= Escherichia albertii B156 OX=550693 GN=folE PE=3 SV=1
MPSLSKEAAQVHEALVARGLETPLRPPVHEMDNETRKSLIAGHMTEIMQLLNLDLADDSLMETPHRIAKMYVDEIFSGLDYANFPKITLIENKMKVDEMVTVRDITLTSTCEHHFVTIDGKATVAYIPKDSVIGLSKINRIVQFFAQRPQVQERLTQQILIALQTLLGTNNVAVSIDAVHYCVKARGIRDATSATTTTSLGGLFKSSQNTRHEFLRAVRHHN

SEQ ID NO: 7954 - protein, 222 aa, Escherichia albertii; identical to SEQ ID NO: 7953
  misc_feature (1)..(222): tr|B1EJZ8|B1EJZ8_ESCAT GTP cyclohydrolase 1 OS=Escheric hia albertii (strain TW07627) OX=502347 GN=folE PE=3 SV =1

SEQ ID NO: 7955 - protein, 222 aa, Escherichia fergusonii
  misc_feature (1)..(222): tr|F0JWK0|F0JWK0_ESCFE GTP cyclohydrolase 1 OS=Escheric hia fergusonii ECD227 OX=981367 GN=folE PE=3 SV=1
MPSLSKEAALVHEALVARGLETPLRPPVHEMDNETRKSLIAGHMTEIMQLLNLDLADDSLMETPHRIAKMYVDEIFSGLDYANFPKITLIENKMKVDEMVTVRDITLTSTCEHHFVTIDGKATVAYIPKDSVIGLSKINRIVQFFAQRPQVQERLTQQILIALQTLLGTNNVAVSIDAVHYCVKARGIRDATSATTTTSLGGLFKSSQNTRHEFLRAVRHHN

SEQ ID NO: 7956 - protein, 247 aa, Escherichia fergusonii
  misc_feature (1)..(247): tr|A0A564UWC1|A0A564UWC1_ESCFE GTP cyclohydrolase 1 typ e 2 OS=Escherichia fergusonii OX=564 GN=ybgI PE=4 SV=1
MKNTELEQLINEKLNSAAISDYAPNGLQVEGKETVQKIVTGVTASQALLDEAVRLGADAVIVHHGYFWKGESPVIRGMKRNRLKTLLANDINLYGWHLPLDAHPALGNNAQLAALLGITVMGEIEPLVPWGELTMPVPGLELASWIEARLGRKPLWCGDTGPEVVQRVAWCTGGGQSFIDSAARFGVDAFITGEVSEQTIHSAREQGLHFYAAGHHATERGGIRALSEWLNENTDLDVTFIDIPNPA

SEQ ID NO: 7957 - protein, 247 aa, Escherichia marmotae
  misc_feature (1)..(247): tr|A0A2B7LL59|A0A2B7LL59_9ESCH Putative GTP cyclohydrol ase 1 type 2 OS=Escherichia marmotae OX=1499973 GN=ybgI PE=4 SV=1
MKNTELEQLINEKLNSAAISDYAPNGLQVEGQETVQKIVTGVTASQALLDEAVRLEADAVIVHHGYFWKGESPVIRGMKRNRLKTLLANDINLYGWHLPLDAHPELGNNAQLAALLGITVMGEIEPLVPWGELTMPVPGLELASWIEARLGRKPLWCGDNGPEVVQRVAWCTGGGQSFIDSAARFGVDAFITGEVSEQTIHSAREQGLHFYAAGHHATERGGIRALSEWLNENTDLDVTFIDIPNPA

SEQ ID NO: 7958 - protein, 222 aa, Escherichia marmotae; identical to SEQ ID NO: 7955
  misc_feature (1)..(222): tr|A0A370V8S8|A0A370V8S8_9ESCH GTP cyclohydrolase 1 OS= Escherichia marmotae OX=1499973 GN=folE PE=3 SV=1

SEQ ID NO: 7959 - protein, 222 aa, Escherichia sp.; identical to SEQ ID NO: 7955
  misc_feature (1)..(222): tr|A0A4U6CJN0|A0A4U6CJN0_9ESCH GTP cyclohydrolase 1 OS= Escherichia sp. MR OX=2575922 GN=folE PE=3 SV=1

SEQ ID NO: 7960 - protein, 222 aa, Escherichia sp.; identical to SEQ ID NO: 7955
  misc_feature (1)..(222): tr|A0A4Q9JJF8|A0A4Q9JJF8_9ESCH GTP cyclohydrolase 1 OS= Escherichia sp. E10V4 OX=2478971 GN=folE PE=3 SV=1

SEQ ID NO: 7961 - protein, 224 aa, Estrella lausannensis
  misc_feature (1)..(224): tr|A0A0H5E5S8|A0A0H5E5S8_9BACT GTP cyclohydrolase 1 OS= Estrella lausannensis OX=483423 GN=folE PE=3 SV=1
MDKEKIPTKAIKTRYPTPVSSTKDILSKEEKIAFISDRFREIMECLGLDVENESLARTPYRVAKMYVNEIFSGLDEESFPEVRFVNDDYSHSKNGNAIFIKVNFTSFCEHHFVPMMGVVYVSYIPNKKVVGLSKIPRIIRFFSQRPQMQERLGAQIADSLSAILETEHIAVCIVAKHFCMIVRGIEDAASHTVTHVLLGDFEKNPERRNEFFEAMKRQNVEIGV

SEQ ID NO: 7962 - protein, 189 aa, Ethanoligenens harbinense
  misc_feature (1)..(189): tr|A0A386XHT7|A0A386XHT7_9FIRM GTP cyclohydrolase 1 OS= Ethanoligenens harbinense OX=253239 GN=folE PE=3 SV=1
MVDKERAARAIRELLAAVGENPDRPGLQETPERVARMYEELFAGLERDPLEDVKLFGEGLPDELVVVRDIPFYSMCEHHLLPFYGQAHIAYLPRDGRILGLSKLARIVDTLARKPQLQERLTTEIADAVERAATTRGVAVVVVAEHLCMTMRGIKKPGAKTVTSRSIGELKTDAALRAEAAALLKPYTR

SEQ ID NO: 7963 - protein, 189 aa, Ethanoligenens harbinense; identical to SEQ ID NO: 7962
  misc_feature (1)..(189): tr|E6U3L9|E6U3L9_ETHHY GTP cyclohydrolase 1 OS=Ethanoli genens harbinense (strain DSM 18485 / JCM 12961 / CGMCC 1.5033 / YUAN-3) OX=663278 GN=folE PE=3 SV=1

SEQ ID NO: 7964 - protein, 197 aa, Eubacteriaceae bacterium
  misc_feature (1)..(197): tr|A0A143XZL2|A0A143XZL2_9FIRM GTP cyclohydrolase 1 OS= Eubacteriaceae bacterium CHKCI004 OX=1780380 GN=folE PE =3 SV=1
MAIDKEAIREHIRGILIALGDDPDREGLKETPDRVARMYEEVFEGMNYSNHEIAEMFNKSFQDDLSVEPDRKDIVLVRDIPIFSYCEHHIALMYDMHISVAYIPNGRVLGLSKIARICDMAAKRLQLQERIGSDVAEIMTEAAGTADVAVIIHGTHSCMSARGIKKDAASTVTTTLRGRFETDAVLQNQLYMMLAAK

SEQ ID NO: 7965 - protein, 191 aa, Eubacteriaceae bacterium
  misc_feature (1)..(191): tr|A0A143ZT02|A0A143ZT02_9FIRM GTP cyclohydrolase 1 OS= Eubacteriaceae bacterium CHKCI005 OX=1780381 GN=folE PE =3 SV=1
MDGWRMIDKPRIEAAVREILAAIGEDVDREGLQETPSRVARMYEEIFSGLHDDARRHVKIFTDTNHDEMVLVRDIPLYSVCEHHLLPFVGKAHIAYIPREGRVLGLSKLARIVDCYARRPQLQERLTASVADFIMKELKPWGVAVVIEAEHLCMTMRGARAAGSKTQTSALRGGMRTDARTRAEAMALLTR

SEQ ID NO: 7966 - protein, 185 aa, Eubacterium aggregans
  misc_feature (1)..(185): tr|A0A1H3YCK4|A0A1H3YCK4_9FIRM GTP cyclohydrolase 1 OS= Eubacterium aggregans OX=81409 GN=folE PE=3 SV=1
MMDSVKIKEGVRLMLEGIGEDINREGLLQTPDRIARMCEQIYGGLTEDPAVHLSTQFQATNNNMVIEKDITFYSVCEHHLLPFYGKAHVAYIPDGKVAGLSKLARTVEVFARRPQIQENMTAQIAEALETHLHPKGVMVVLEAEHLCMTMRGVQKPGAQTVTTMVRGVFAEDYSLQQTFLQMVRG

SEQ ID NO: 7967 - protein, 185 aa, Eubacterium barkeri
  misc_feature (1)..(185): tr|A0A1H3DY21|A0A1H3DY21_EUBBA GTP cyclohydrolase 1 OS= Eubacterium barkeri OX=1528 GN=folE PE=3 SV=1
MMDSVKIKEGVRLMLEGIGEDINREGLLQTPDRIARMCEQIYGGLTEDPAVHLNTQFQAINNNMVLEKDITFYSVCEHHLLPFYGKAHVAYIPDGKVAGLSKLARTVEVFARRPQIQENMTAQIAEALETHLHPKGVMVVLEAEHLCMTMRGVQKPGAQTVTTMVRGVFAEDYALQQTFLQIVRG

SEQ ID NO: 7968 - protein, 215 aa, Eubacterium callanderi
  misc_feature (1)..(215): tr|E3GFJ2|E3GFJ2_9FIRM GTP cyclohydrolase 1 OS=Eubacter ium callanderi OX=53442 GN=folE PE=3 SV=1
MRKHCSFYRAVLFVFIFNNLIAFNIGGIQMNKEKIMEAVTMLIEAIGEDPQREGLVDTPDRIARMYEEIFAGIGQTAEEHLSKSFTIESNDLVIERDIPFYSMCEHHFLPFYGKAHIAYVPNGKVAGLSKLVRTVDVYARKPQLQEKLTSEIGSAIMEYLDAQGVMVIIEAEHLCMNMRGVKRPGTKTVTAMSDGILKTDASLKNDVYNLLGIRA

SEQ ID NO: 7969 - protein, 186 aa, Eubacterium callanderi
  misc_feature (1)..(186): tr|A0A1I5PP68|A0A1I5PP68_9FIRM GTP cyclohydrolase 1 OS= Eubacterium callanderi OX=53442 GN=folE PE=3 SV=1
MNKEKIMEAVTMLIEAIGEDPQREGLVDTPDRIARMYEEIFAGIGQTAEEHLSKSFTIESNDLVIERDIPFYSMCEHHFLPFYGKAHIAYVPNGKVAGLSKLVRTVDVYARKPQLQEKLTSEIGSAIMEYLDAQGVMVIIEAEHLCMNMRGVKRPGTKTITAMSDGILKTDASLKNDVYNLLGIRA

SEQ ID NO: 7970 - protein, 226 aa, [Eubacterium] cellulosolvens
  misc_feature (1)..(226): tr|I5AU66|I5AU66_EUBCE GTP cyclohydrolase 1 OS=[Eubacte rium] cellulosolvens 6 OX=633697 GN=folE PE=3 SV=1
MIDQKAIEEHIRGILVALGDDPEREGLKDTPKRVAKMYAEVFAGMNYSNHEIAEMFDKTFEEGIADEEDHVSLTIPEDDSERADLTAVVGKNGPMASASSPEDSKPARVVVMKDIDFFSYCEHHMALMYDMKACVAYVPNGKVIGLSKIARVCDMVGRRLQLQEKIGKDIADIISEITGSKDVAVTIEGHHSCVSARGIKKQNTKTFTAELRGRFRTDAELQFHLR

SEQ ID NO: 7971 - protein, 189 aa, Eubacterium coprostanoligenes
  misc_feature (1)..(189): tr|A0A1T4M724|A0A1T4M724_9FIRM GTP cyclohydrolase 1 OS= Eubacterium coprostanoligenes OX=290054 GN=folE PE=3 SV =1
MITEENKQKIMNAVRDILEAVGEDVNRPGLIETPKRVANMYEEMFAGLDSDAKQHLKLFDERSNDEMVIVRDIPFSSMCEHHLLPFVGKAHIAYIPSDNKIIGLSKFARIVDNFAKRPQVQERLTSDIADFLEENLSPKGVAVIVEAEHTCMNIRGAKASGSSTMTSALRGIMKKDARTRAEVLSLLQR

SEQ ID NO: 7972 - protein, 207 aa, [Eubacterium] eligens
  misc_feature (1)..(207): tr|A0A174YWP8|A0A174YWP8_9FIRM GTP cyclohydrolase 1 OS= [Eubacterium] eligens OX=39485 GN=folE_2 PE=3 SV=1
MEKHKKIDTKAIEYHIAGILKALGDNPEREGLKDTPKRVAKMYEEVFDGMNYTNEEIADMFNKTFALDMDEEESGQIECNGQSGTSNMVVVKDIDIFSYCEHHLALMYDMKVTVAYIPNGRVIGLSKIARIADMVSKRLQLQERIGSDIADIMHMVTGAKDIAVFIEGCHSCMTARGIKKANTKTYTQTLRGRFNNESNGFVQWWNR

SEQ ID NO: 7973 - protein, 189 aa, [Eubacterium] eligens
  misc_feature (1)..(189): tr|A0A174YSF3|A0A174YSF3_9FIRM GTP cyclohydrolase 1 OS= [Eubacterium] eligens OX=39485 GN=folE_1 PE=3 SV=1
MIDTKAIEEHIRGILVALGDDPEREGLKDTPKRVAKMYEEVFLGMNYSNHEIAQMFDKTFEDGIEELDTSKVVVMKDIDLFSYCEHHMALMYDMKATVAYIPNGKVIGLSKIARICDMVGRRLQLQERIGQDIADIMTEITGSEDVAVVLEGYHSCVSARGIKKNNTRTMTVELRGSFKDDAALQMYLR

SEQ ID NO: 7974 - protein, 205 aa, Eubacterium eligens
  misc_feature (1)..(205): tr|C4Z7K5|C4Z7K5_EUBE2 GTP cyclohydrolase 1 OS=Eubacter ium eligens (strain ATCC 27750 / VPI C15-48) OX=515620 GN=folE PE=3 SV=1
MLSAQSLRGEARMEIMMIDTKAIEEHIRGILVALGDDPEREGLKDTPKRVAKMYEEVFLGMNYSNHEIAQMFDKTFEDEIEELDTSKVVVMKDIDLFSYCEHHMALMYDMKATVAYIPNGKVIGLSKIARICDMVGRRLQLQERIGQDIADIMAEITGSEDVAVVLEGYHSCVSARGIKKNNTRTMTVELRGSFKDDAALQMYLR

SEQ ID NO: 7975 - protein, 189 aa, Eubacterium eligens; identical to SEQ ID NO: 7973
  misc_feature (1)..(189): tr|R5ZJL4|R5ZJL4_9FIRM GTP cyclohydrolase 1 OS=Eubacter ium eligens CAG:72 OX=1263077 GN=folE PE=3 SV=1

SEQ ID NO: 7976 - protein, 196 aa, Eubacterium hallii; identical to SEQ ID NO: 4566
  misc_feature (1)..(196): tr|R6FZ93|R6FZ93_9FIRM GTP cyclohydrolase 1 OS=Eubacter ium hallii CAG:12 OX=1263078 GN=folE PE=3 SV=1

SEQ ID NO: 7977 - protein, 186 aa, Eubacterium limosum
  misc_feature (1)..(186): tr|A0A0U3EF01|A0A0U3EF01_EUBLI GTP cyclohydrolase 1 OS= Eubacterium limosum OX=1736 GN=folE PE=3 SV=1
MNKEKIMEAVTMLIEAIGEDPQREGLIDTPDRIARMYEEIFAGIGQTAEEHLSKSFTIESNDLVIERDIPFYSMCEHHFLPFYGKVHIAYVPNGKVAGLSKLVRTVDVYAKKPQLQEKLTSEIGSAIMEYLNAQGVMVIIEAEHLCMNMRGVKRPGTKTVTAMSDGILKTDASLKNDVYNLLGIRA

SEQ ID NO: 7978 - protein, 186 aa, Eubacterium limosum
  misc_feature (1)..(186): tr|A0A317RTP1|A0A317RTP1_EUBLI GTP cyclohydrolase 1 OS= Eubacterium limosum OX=1736 GN=folE PE=3 SV=1
MNKEKIMKAVTMLIEAIGEDPQREGLVDTPDRIARMYEEIFAGIGKTAEEHLSKSFTIESNDLVIERDIPFYSMCEHHFLPFYGKAHIAYVPNGKVAGLSKLVRTVDVYAKKPQLQEKLTSEIGNAIMEYLDAQGVMVIIEAEHLCMNMRGVKRPGTKTVTAMSDGILKTDASLKNDVYNLLGIRA

SEQ ID NO: 7979 - protein, 186 aa, Eubacterium maltosivorans
  misc_feature (1)..(186): tr|A0A4P9C6U5|A0A4P9C6U5_9FIRM GTP cyclohydrolase 1 OS= Eubacterium maltosivorans OX=2041044 GN=folE PE=3 SV=1
MNKEKIMEAVTMLIEAIGEDPQREGLVDTPDRIARMYEEIFAGIGQTAEEHLSKSFTIESNDLVIERDIPFYSMCEHHFLPFYGKVHIAYVPNGKVAGLSKLVRTVDVYAKKPQLQEKLTSEIGSAIMEYLNAQGVMVIIEAEHLCMNMRGVKRPGTKTVTAMSDGILKTDASLKNDVYNLLGIRA

SEQ ID NO: 7980 - protein, 253 aa, Eubacterium minutum
  misc_feature (1)..(253): tr|A0A223B147|A0A223B147_9FIRM GTP cyclohydrolase FolE2 OS=Eubacterium minutum ATCC 700079 OX=888721 GN=folE2 PE=3 SV=1
MKDVQKQIDGRDIYLNQVGIKGFVVPMEFRNKNGDWISTAATVSLFVGLDAKQKGTHMSRFVGIIQENRRMDLNHVKKILQETKEKLEADSAFVMMNFEYFIEKTAPVSGMASFFNVGIEYSASLTGDEFEFDMKVTTPVTTLCPCSKEISEYGAHNQRADVSIKIKMKKFLWIEDLVEIAEDSASAPVYSLLKRPDEKYVTEHAYDNPRFVEDVCREVKLRVSKLKEVENFCIEVESQESIHNHSAYAMVVG

SEQ ID NO: 7981 - protein, 253 aa, Eubacterium nodatum
  misc_feature (1)..(253): tr|W2C1W0|W2C1W0_9FIRM GTP cyclohydrolase FolE2 OS=Euba cterium nodatum ATCC 33099 OX=1161902 GN=folE2 PE=3 SV= 1
MKDVQKQIDGRDVYLNQVGIKDFVVPMEFKTKEGQWISTAATVSLFVGLDARQKGTHMSRFVDIIQHNRRMDLQHVRKILEATKEKLDSEASFVRMNFEYFIEKESPVTGIPSFFNIGVEYRGSLVSDDFEFDMKVTTPVTTLCPCSKEISDYGAHNQRADVSIKVRMKKFLWIEDLVNIAESSASSPVYSLLKRPDEKYVTELAYDNPRFVEDVCREAKLRVDKLEGVEEFCIEVESQESIHNHGAYAMVVG

SEQ ID NO: 7982 - protein, 194 aa, Eubacterium oxidoreducens
  misc_feature (1)..(194): tr|A0A1G6A5C7|A0A1G6A5C7_EUBOX GTP cyclohydrolase 1 OS= Eubacterium oxidoreducens OX=1732 GN=folE PE=3 SV=1
MKEVCNVIDTKAIEEHIKGILIALGEDPNREGLRETPQRVAKMYEEVFAGMNYTNHEIAKMFDKTFEDDFETEDSRVVVMKDIDLFSYCEHHMALMYDMKATVAYIPKGKVIGLSKIARICDMVGRRLQLQERIGRDIADIMTEATGSEDVAVCIEGCHSCVSARGIKKNNAKTFTAELRGAFKNDSSLQLYLK

SEQ ID NO: 7983 - protein, 186 aa, Eubacterium plexicaudatum
  misc_feature (1)..(186): tr|N2A6T2|N2A6T2_9FIRM GTP cyclohydrolase 1 OS=Eubacter ium plexicaudatum ASF492 OX=1235802 GN=folE PE=3 SV=1
MIDENKIMEGVRLLLEGIGEDPSREGLLETPQRIARMYEEIFAGMTQSAGEPLAKTFHAKQTDMVLEKDIMFYSTCEHHLLPFYGKAHVAYIPNGKVAGLSKLARTVEIFARRPQLQEQMTAQIADAVMEYLNPLGAMVMIEAEHMCMTMRGIKKPGSKTMTYAARGVFREQDGLQNRFFQMVKDK

SEQ ID NO: 7984 - protein, 200 aa, Eubacterium pyruvativorans
  misc_feature (1)..(200): tr|A0A1I7FDL6|A0A1I7FDL6_9FIRM GTP cyclohydrolase 1 OS= Eubacterium pyruvativorans OX=155865 GN=folE PE=3 SV=1
MNMERKMDHEKIKQAVRLFLEAVGEDPEREGLRETPSRVARMCEEVLAGEKFTNEEIAKKYGKTFPRETGRDPASDMVLVKDIDVFSYCEHHLALMYDMKVSVAYLPRGRVLGLSKIARIADMAAKRLQLQERLGADIAEIIGMAAGTEDVAVVIHGCHSCMTARGIRKPGSETVTTTFRGRFESDPGLQSRLLMQMQIG

SEQ ID NO: 7985 - protein, 192 aa, Eubacterium ramulus
  misc_feature (1)..(192): tr|A0A2V1JX80|A0A2V1JX80_EUBRA GTP cyclohydrolase 1 OS= Eubacterium ramulus OX=39490 GN=folE PE=3 SV=1
MAIDKDAVREHVRGLLIALGDDPDREGLKDTPDRVARMYEEVFEGMNYTNHEIAQMFDKTFEEDLTFSSENSDFVIVKDIDIFSYCEHHMALMYDMKVTVAYVPNGKVIGLSKIARIADMVSKRLQLQERIGTDIAEIMQEITGSEDVAVLIEGCHSCMTARGIKKTDAKTYTTTLRGRFQTDMLLQMRLNR

SEQ ID NO: 7986 - protein, 192 aa, Eubacterium ramulus
  misc_feature (1)..(192): tr|U2P9Q6|U2P9Q6_EUBRA GTP cyclohydrolase 1 OS=Eubacter ium ramulus ATCC 29099 OX=1256908 GN=folE PE=3 SV=1
MAIDKDAVREHIRGLLIALGDDPDREGLKDTPDRVARMYEEVFEGMNYTNHEIAQMFDKTFEEDLTFSSENSDFVIVKDIDIFSYCEHHMALMYDMKVTVAYVPNGKVIGLSKIARIADMVSKRLQLQERIGTDIAEIMQEITGSDDVAVLIEGCHSCMTARGIKKTAAKTYTTTLRGRFQTDLQLQMRLNR

SEQ ID NO: 7987 - protein, 193 aa, Eubacterium ruminantium
  misc_feature (1)..(193): tr|A0A1T4Q7U3|A0A1T4Q7U3_9FIRM GTP cyclohydrolase 1 OS= Eubacterium ruminantium OX=42322 GN=folE PE=3 SV=1
MAIDKEKIKLHVRGILEALGEDPDREGLSETPDRVARMYEEVFEGIGYTNDEIAEMFSKTFEAPVKRSKNDIVLIKDIEAFSYCEHHMALMYDMKISVAYIPKDRVIGLSKIVRIADMVTKRLQLQERIGSDIADVMMKATGSEDVAVIIEAKHSCLTARGIKNRASSTLTTTYRGLFDTDAETRDRLIAMLK

SEQ ID NO: 7988 - protein, 193 aa, Eubacterium ruminantium
  misc_feature (1)..(193): tr|A0A1H5Y930|A0A1H5Y930_9FIRM GTP cyclohydrolase 1 OS= Eubacterium ruminantium OX=42322 GN=folE PE=3 SV=1
MAVDKEKIKEHIRGILLAIGEDPDREGLRETPDRVARMYEEVFAGISYTNDEIAAMFNKTFEAPKDRNKNDIVLVKDIEAFSYCEHHMAIMYDMNISVAYIPRDRVIGLSKIVRIADMVTRRLQLQERIGADIADVMEKATGSPDIAVIIEAKHSCVTARGIKNRESSTFTTTFKGVFNEEKMQEKLLMMMKK

SEQ ID NO: 7989 - protein, 185 aa, Eubacterium sp.
  misc_feature (1)..(185): tr|A0A416W5N0|A0A416W5N0_9FIRM GTP cyclohydrolase 1 OS= Eubacterium sp. AF15-50 OX=2293103 GN=folE PE=3 SV=1
MFDKKKIEEAVRLFLEGIGEDADREGLKDTPERVARMYEELCTGMGKTPAEHLSRTFSCDNENVVIEKNITFYSTCEHHLMPFYGKVHIAYIPNGKVVGISKLARTVEVYARRLQIQEQMTEQIAEALEEYLEAKGVYVMVEAEHMCMSARGIKKPGSKTVSFALKGKFKEDDALRRDVTLLINK

SEQ ID NO: 7990 - protein, 185 aa, Eubacterium sp.
  misc_feature (1)..(185): tr|R5KWH6|R5KWH6_9FIRM GTP cyclohydrolase 1 OS=Eubacter ium sp. CAG:161 OX=1262881 GN=folE PE=3 SV=1
MFDKKKIEEAVRLFLEGIGEDADREGLKDTPERVARMYEELCAGMGKTPAEHLSRTFSCDNENVVIEKNITFYSTCEHHLMPFYGKVHIAYIPNGKVVGISKLARTVEVYARRLQIQEQMTEQIAEALEEYLEAKGVYVMVEAEHMCMSARGIKKPGSKTVSFALKGKFKEDDALRRDVTLLINK

SEQ ID NO: 7991 - protein, 194 aa, Eubacterium uniforme
  misc_feature (1)..(194): tr|A0A1T4VNY7|A0A1T4VNY7_9FIRM GTP cyclohydrolase 1 OS= Eubacterium uniforme OX=39495 GN=folE PE=3 SV=1
MYVSKNVTTGKIDKEKVEEAIRMLLEAIGENPDREGLKATPSRIARMYEEIYTGSDEMAYDHLSRTFTCENSDMVIEKDITFYSTCEHHMMPFYGKAHIAYIPDGKVVGISKLARTVEEFAKRLQIQENLTSQIADAIMDNLDPKGVMVMLEAEHMCMTMRGVKKPGTKTVTFAYRGLFEEDKELRDDFLAIVK

SEQ ID NO: 7992 - protein, 151 aa, Eubacterium ventriosum
  misc_feature (1)..(151): tr|A5Z385|A5Z385_9FIRM GTP cyclohydrolase 1 OS=Eubacter ium ventriosum ATCC 27560 OX=411463 GN=folE PE=3 SV=1
MYEELCSGMNRSPKEHLSKTFTCDNENVVIEKDITFYSTCEHHLMPFYGKVHIAYIPNGKVVGISKLARTVEVYARRLQIQEQMTNQIAKALEKYLGAKGVLVMAQAEHMCMSARGIKKPGSKTVTFASTGVFEEDRNLRSDVLSIFRDGQ

SEQ ID NO: 7993 - protein, 187 aa, Eubacterium ventriosum
  misc_feature (1)..(187): tr|A0A413RV20|A0A413RV20_9FIRM GTP cyclohydrolase 1 OS= Eubacterium ventriosum OX=39496 GN=folE PE=3 SV=1
MFDKKKIEEGIRLLLEGIGENPDREGLKDTPDRVARMYEELCSGMNRSPKEHLSKTFTCDNENVVIEKDITFYSTCEHHLMPFYGKVHIAYIPNGKVVGISKLARTVEVYARRLQIQEQMTNQIAKALEKYLGAKGVLVMAQAEHMCMSARGIKKPGSKTVTFASTGVFEEDRNLRSDVLSIFRDGQ

SEQ ID NO: 7994 - protein, 226 aa, Euhalothece natronophila
  misc_feature (1)..(226): tr|A0A5B8NP79|A0A5B8NP79_9CHRO GTP cyclohydrolase 1 OS= Euhalothece natronophila Z-M001 OX=522448 GN=folE PE=3 SV=1
MTTASSNSSMSNGSGKVNTQVSLNSASSVEAAVTQDSNTEEMMQAVRSILQGVGEDPDREGLKKTPKRVAEAMQFLTQGYEQSLEELVNGAIFDEGHNEMVLVRDIDVFSLCEHHMLPFMGKAHVAYIPNQKVVGLSKLARIVEMYSRRLQVQERLTRQIAEAIQSILDPQGVAVVMEATHMCMVMRGVQKPSSWTVTSAMLGVFQEEQKTREEFLNLIRHQPSFH

SEQ ID NO: 7995 - protein, 233 aa, Euhalothece sp.
  misc_feature (1)..(233): tr|A0A2K3AFW1|A0A2K3AFW1_9CHRO GTP cyclohydrolase 1 OS= Euhalothece sp. KZN 001 OX=1884791 GN=folE PE=3 SV=1
MTIASSNSSMSNGSAKVTKTVSLDSASSVEAAVSQNGSEEFSRPEIGEMMEAVKTILEGVGEDPEREGLLKTPKRVAEAMQFLTQGYEQSLDDLVNGAIFDEGHNEMVLVRDIDVFSLCEHHMLPFMGKAHVAYIPNQKVVGLSKLARIVEMYSRRLQVQERLTRQVAEAIQTILEPQGVAVVMEASHMCMVMRGVQKPGSWTVTSAMLGVFQEDQKTREEFLNLIRHQPSFH

SEQ ID NO: 7996 - protein, 246 aa, Euzebya sp.
  misc_feature (1)..(246): tr|A0A346Y2T1|A0A346Y2T1_9ACTN GTP cyclohydrolase 1 OS= Euzebya sp. DY32-46 OX=1608957 GN=folE PE=3 SV=1
MSTEPTVDPDGIGGRSRAEVPAEAIEVRTDDVSGQASDDRVRVLTTAEPQRRFDHDKIRAGVRMLFEGIGLDPDSPTIRDTPDRVARMYDEVFAGLLIDPEDVVSTTFDEGHDEIVIVRDIPFASICEHHLVPFVGRAHVGYLPGHDGLITGLSKLARLVDVVAKRPNLQERITAEVADTLERVLKPRGVIVQIEAEHFCMTMRGVRKPGAMTVTSAVRGTIREDARTRAEVMSLIGGPRVSSYGP

SEQ ID NO: 7997 - protein, 438 aa, Euzebya sp.
  misc_feature (1)..(438): tr|A0A346XS57|A0A346XS57_9ACTN GTP cyclohydrolase FolE2 OS=Euzebya sp. DY32-46 OX=1608957 GN=folE2 PE=3 SV=1
MSQDTTTTSVLLDLERSLPTGTTLIAKRFTFDSAHMLPNVPEGHKCGRVHGHTYQVKIFLRGPVDEHAAWIVDFGDLKARWKPIEERLDHHMLNELPGLENPTAERLAAWIAAEIDAGGPLADDVQVAAVEVAETPDSSAIFLPGSARTGNTLSSASRAAAPVAREAVVGAAIEDVQGRPDSRGVRLDEVGVSDVRFPITVLDRERERQATVGTLSMGVDVPAEVKGTHMSRFLEALNAHDGAFTLFTMAHLASDLRRRLGATDVRARVRFPYFVMKAAPVTGAGGIVDHDCEFDIRDHDGDVRFRLTVEAPVTTVCPCSRDISDYGAHNQRGTVRMTIDLAVDLSGQPELVWIEELIELADAKSSSPVYSVIKRPDERHVTMAGYDNPRFVEDLARDVAIAMEEDPRIAGYEVCVVNDESIHSHNAYATVRSEGWQA

SEQ ID NO: 7998 - protein, 226 aa, Euzebyella marina
  misc_feature (1)..(226): tr|A0A3G2L9C8|A0A3G2L9C8_9FLAO GTP cyclohydrolase 1 OS= Euzebyella marina OX=1761453 GN=folE PE=3 SV=1
MKIDSTLEKQFEEMGNDHVSAAEDTPMRKDAFVLSDEEKIERIQANIREVMLTLGLDLDDDSLKGTPNRVAKMYVKEIFGGLHPDRKPKSSTFSNKYKYGEMLVEKNITLYSTCEHHLLPIVGKAHIAYISSGNVVGLSKMNRIVDYFAKRPQVQERLNIQIVRELQKVLETEDVACVIDAKHLCVNSRGIRDIDSSTVTAEYGGKFKDESVRREFLDYINLDTNF

SEQ ID NO: 7999 - protein, 199 aa, Euzebyella marina
  misc_feature (1)..(199): tr|A0A3G2L720|A0A3G2L720_9FLAO GTP cyclohydrolase 1 OS= Euzebyella marina OX=1761453 GN=folE PE=3 SV=1
MAPYRNLEEYNLEVTGEVKDRYSKIISEIGEDISREGLLKTPERAAKAMLFLTQGYKQDAVEILKSAMFQEDYDDMVIIKDIELYSLCEHHMLPFFGKAHVAYIPNGHIVGLSKIPRVVDVFARRLQVQERLTHDILECINNTLKPKGVAVVIEASHMCMMMRGVQKQNSVTTTSGFRGQFEKIETRNEFLKLISSDLS

SEQ ID NO: 8000 - protein, 221 aa, Ewingella americana
  misc_feature (1)..(221): tr|A0A085GJA4|A0A085GJA4_9GAMM GTP cyclohydrolase 1 OS= Ewingella americana ATCC 33852 OX=910964 GN=folE PE=3 S V=1
MSTLSKEAILVHEALLARGLETPLREPLPIDNETRKQRIKEHMTGIMQLLNLDLADDSLAETPHRIAKMYVDEIFSGLDYANFPKITVIENKMKVDEMVTVRDITLTSTCEHHFVTIDGKATVAYIPKDKVIGLSKINRIVQFFSQRPQVQERLTQQVLLALQTLLGTNNVAVSIDAVHYCVKARGIRDATSATTTTSLGGLFKSSQNTRQEFLRTVRHAS

SEQ ID NO: 8001 - protein, 221 aa, Ewingella americana
  misc_feature (1)..(221): tr|A0A2N0N5A6|A0A2N0N5A6_9GAMM GTP cyclohydrolase 1 OS= Ewingella americana OX=41202 GN=folE PE=3 SV=1
MPTLSKEAILVHEALLARGLETPLREALPIDNETRKQRIQEHMTGIMQLLNLDLSDDSLAETPHRIAKMYVDEIFSGLDYANFPKITVIENKMKVDEMVTVRDITLTSTCEHHFVTIDGKATVAYIPKDTVIGLSKINRIVQFFSQRPQVQERLTQQILVALQTLLGTTNVAVSIDAVHYCVKARGVRDATSATTTTSLGGLFKSSQNTRQEFLRTVRHPS

SEQ ID NO: 8002 - protein, 301 aa, Exiguobacterium antarcticum
  misc_feature (1)..(301): tr|K0A9K6|K0A9K6_EXIAB GTP cyclohydrolase FolE2 OS=Exig uobacterium antarcticum (strain B7) OX=1087448 GN=folE2 PE=3 SV=1
MSTYPITLPTKEERHKLFGSVPPIKGTKPTEKEKMIDLQNTPKNFLFALDAVGISNVKHPVVIQDGETTQATIATFELSTSLVQDRKGINMSRLTEQLDQYHHEGWVVTNESLIQFARDLAERMEQAEGQLTIRYPWFFSRKAPATGLSGLMNAEVWQTVSVNTETDEATLSVGLTINVTTLCPCSKEISEYSAHNQRGYVTMEASLRDEAEEFNWKQELLDAAESNASAPLHPVLKRPDEKRVTEMAYENPRFVEDMVRLIAADLYEMDPIASFFVECRNEETIHQHDAIARITFDKDAQ

SEQ ID NO: 8003 - protein, 302 aa, Exiguobacterium aurantiacum
  misc_feature (1)..(302): tr|A0A377FQ95|A0A377FQ95_9BACL GTP cyclohydrolase FolE2 OS=Exiguobacterium aurantiacum OX=33987 GN=folE2 PE=3 SV=1
MSTSHVALPTKAERHKLFGSVPPIKGTKPTEKDKMIDLQNTPKNFLFALDSVGISNVKHPVNIETPDGIQATVATFELTTSLVQDRKGINMSRLTEQLDAYHNQGWTVSNASLIEFAQELAERMEQTEGQLTIRYPWFFSRKAPATGLSGLMNADVMHRVSYNLETGTASVTVGLVINVTTLCPCSKEISEYSAHNQRGYITIEAGLDETSLDGFDWRLALLDAAESNASAPLHPVLKRPDEKRATEIAYENPRFVEDMVRLIAADLYEMKQVVNFFVECRNEESIHQHDAIASITFDKREN

SEQ ID NO: 8004 - protein, 302 aa, Exiguobacterium chiriqhucha
  misc_feature (1)..(302): tr|U1N095|U1N095_9BACL GTP cyclohydrolase FolE2 OS=Exig uobacterium chiriqhucha RW-2 OX=1345023 GN=folE2 PE=3 S V=1
MSTSHVALPTKAERHKLFGSVPPIKGTKPTEKDKMVDLQNTPKNFLFALDSVGISNVKHPVNIETPDGIQATVATFELTTSLVQDRKGINMSRLTEQLDAYHTQGWTLSNRSLIEFAQELAERMEQTEGQLTVRYPWFFSRKAPATGLSGLMNADVMHNVTYNLETGMASVTVGLVINVTTLCPCSKEISEYSAHNQRGYITIEAGLDEASLDGFDWRLALLEAAESNASAPLHPVLKRPDEKRATEIAYENPRFVEDMVRLIAADLYEMKQVVNFFVECRNEESIHQHDAIASITFDKRDN

SEQ ID NO: 8005 - protein, 301 aa, Exiguobacterium enclense
  misc_feature (1)..(301): tr|A0A0V8GEQ6|A0A0V8GEQ6_9BACL GTP cyclohydrolase FolE2 OS=Exiguobacterium enclense OX=1017277 GN=folE2 PE=3 S V=1
MSTYPITLPTKEERHKLFGSVPPIKGTKPTEKDKMVDLQNTPKNFLFALDAVGISNVKHPVVIQDGDNTQATVATFELSTSLVQDRKGINMSRLTEQLDQYHNEGWTVTNESLIQFARDLADRMEQTEGQLTIRYPWFFTRKAPATGLSGLMNAEVWQTVSVNTETDEATLSVGLTINVTTLCPCSKEISEYSAHNQRGYVTMEASLRDEAEDFDWKQSLLDAAESNASAPLHPVLKRPDEKRVTEMAYENPRFVEDMVRLIAADLYEMDPIASFYVECRNEETIHQHDAIARITFDKDAQ

SEQ ID NO: 8006 - protein, 302 aa, Exiguobacterium mexicanum; identical to SEQ ID NO: 8004
  misc_feature (1)..(302): tr|A0A099DKF3|A0A099DKF3_9BACL GTP cyclohydrolase FolE2 OS=Exiguobacterium mexicanum OX=340146 GN=folE2 PE=3 S V=1

SEQ ID NO: 8007 - protein, 301 aa, Exiguobacterium sibiricum
  misc_feature (1)..(301): sp|B1YHT1|GCH4_EXIS2 GTP cyclohydrolase FolE2 OS=Exiguo bacterium sibiricum (strain DSM 17290 / JCM 13490 / 255 -15) OX=262543 GN=folE2 PE=3 SV=1
MSTYPVTLPTKEERHKLFGSVPPIKGTKPTEKDKMIDLQNTPKNFLFALDAVGISNVKHPVVIQDGETTQATIATFELSTSLVQDRKGINMSRLTEQLDQYHNEGWVVTNESLIQFARELAERMEQSEGQLTIRYPWFFTRKAPATGLSGLMNAEVWQTVSVNTETNEATLSVGLTINVTTLCPCSKEISEYSAHNQRGYVTMEASLRDEADDFNWKQELLDAAESNASAPLHPVLKRPDEKRVTEMAYENPRFVEDMVRLIAADLYEMDPIASFFVECRNEETIHQHDAIARITFDKDAQ

SEQ ID NO: 8008 - protein, 303 aa, Exiguobacterium sp.
  misc_feature (1)..(303): sp|C4KZ55|GCH4_EXISA GTP cyclohydrolase FolE2 OS=Exiguo bacterium sp. (strain ATCC BAA-1283 / AT1b) OX=360911 G N=folE2 PE=3 SV=1
MSTSHVALPTKAERHKLFGSVPPIKGTKPTEKEQMVDLQNTPKNFLFALDSVGISNVKHPVNVETPEGVQSTVATFELTTSLVQDRKGINMSRLTEQLDAYHQQGWTVSNRSLIEFAQELAERMEQTEGQLTIRYPWFFTRKAPATGLSGLMNADVMHRVTYNLETGVANVTVGLVINVTTLCPCSKEISEYSAHNQRGYITIEAGLDETSMDGFDWRAALLDAAESNASAPLHPVLKRPDEKRATEIAYENPRFVEDMVRLIAADLYEMKQVVNFFVECRNEESIHQHDAIASITFDKRQDA

SEQ ID NO: 8009 - protein, 301 aa, Exiguobacterium sp.
  misc_feature (1)..(301): tr|A0A177SAX6|A0A177SAX6_9BACL GTP cyclohydrolase FolE2 OS=Exiguobacterium sp. KKBO11 OX=1805000 GN=folE2 PE=3 SV=1
MSTYPITLPTKEERHKLFGSVPPIKGTKPTEKDKMVDLQNTPKNFLFALDAVGISNVKHPVVIQDGDKTQATVATFELSTSLVQDRKGINMSRLTEQLDQYHNEGWTVTNESLIQFARDLADRMEQTEGQLTIRYPWFFTRKAPATGLSGLMNAEVWQTVSVNTETDEATLSVGLTINVTTLCPCSKEISEYSAHNQRGYVTMEASLRDEAEDFDWKQSLLDAAESNASAPLHPVLKRPDEKRVTEMAYENPRFVEDMVRLIAADLYEMDPIASFYVECRNEETIHQHDAIARITFDKDAQ

SEQ ID NO: 8010 - protein, 230 aa, Fabibacter misakiensis
  misc_feature (1)..(230): tr|A0A1E5SY77|A0A1E5SY77_9BACT GTP cyclohydrolase 1 OS= Fabibacter misakiensis OX=1563681 GN=folE PE=3 SV=1
MSDKTNKTSEEVLRELEEMGDAHIMSSIATPLRSDAFDLSDDEKIEQIQGYFEKIMHTLGLDLTDDSLKGTPKRVAKLFVNDLFKGLNEKNKPSMSTFENKYQYAEMLVEKDITLYSNCEHHFLPIVGKAHVAYIPTDKVIGLSKINRIVDYFSRRPQVQERLAIQILNELKTALDTEDVAVYIDAEHMCVSSRGASDQSSSTVTVEYSGKFKEEQTKNEFLAYINNKLK

SEQ ID NO: 8011 - protein, 225 aa, Fabibacter misakiensis
  misc_feature (1)..(225): tr|A0A1E5SYC6|A0A1E5SYC6_9BACT GTP cyclohydrolase 1 OS= Fabibacter misakiensis OX=1563681 GN=folE PE=3 SV=1
MLNTQPNTLTIDEIGDEHIGTSYDTPLKEDAFNIDDDLKMSLIEDKFRDIMDIMGLDLTDDSLKGTPKRVAKMYIKEVFSGLNPENKPKIALFENKYQYNEMLVEKDITFYSNCEHHFVPIIGKAHVAYISSGKVIGLSKINRIVNYYAKRPQVQERLTVQIANELKEILETEDVAVVIDAEHLCVSSRGVEDVNSSTVTAQFSGKFKEEGTKSEFFSYVNNKIK

SEQ ID NO: 8012 - protein, 235 aa, Fabibacter pacificus
  misc_feature (1)..(235): tr|A0A4D7JNF8|A0A4D7JNF8_9BACT GTP cyclohydrolase 1 OS= Fabibacter pacificus OX=1267423 GN=folE PE=3 SV=1
MKHRETSLNTRVDEKIEKRIDDLGDEHVGTSLETPMRADAFDKDDELKIELIEKHFKEIMTILGLDLSDDSLQGTPRRVAKMYVKEIFSGLNPENKPDITLFENKFRYHEMLVEKNITFHSNCEHHFVPIYGHAHVAYISNGNIIGLSKLNRIVQYYAKRPQVQERMTVQIANELKEVLKTEDVAVVIDADHMCISSRGVNDTNSSTVTTHYSGKFLNEDKKKEFLNHIYKDSTR

SEQ ID NO: 8013 - protein, 230 aa, Fabibacter pacificus
  misc_feature (1)..(230): tr|A0A1I0QY15|A0A1I0QY15_9BACT GTP cyclohydrolase 1 OS= Fabibacter pacificus OX=1267423 GN=folE PE=3 SV=1
MEDKSTKISEELLKEVDEIGDNHIMTSIETPMRPDAFEMSNEEKIEKIESYFEKIMHTLGLDLTDDSLKGTPKRVAKLYIKDLFKGLDPANKPSMSTFENKYNYNQMLVEKNITLYSNCEHHFLPIVGKAHVAYIPNGRVIGLSKINRIVDYYARRPQVQERLALQVLNDLKQALNTEDVAVYVDAEHMCISSRGVSDQHSSTVTVEYSGKFKEENTKNEFLTYINAPLK

SEQ ID NO: 8014 - protein, 231 aa, Fabibacter sp.
  misc_feature (1)..(231): tr|A0A1E5SQU9|A0A1E5SQU9_9BACT GTP cyclohydrolase 1 OS= Fabibacter sp. 4D4 OX=1889784 GN=folE PE=3 SV=1
MRQNETMLNTQLNGLTVEEIGDEHIGTSYDTPLKEGAFDMDDNLKMNLIEDKFRDIMEIMGLDLTDDSLSGTPKRVAKMYIQEIFSGLNPANKPKVALFENKYQYNEMLVEKDITFYSNCEHHFVPIIGKAHVAYISSGKVIGLSKINRIVNYYAKRPQVQERLTVQIANELKSILETEDVAVIIDAEHLCVSSRGVQDVNSSTVTAQFDGKFKEDSTKNELLTYIGNKLK

SEQ ID NO: 8015 - protein, 229 aa, Fabibacter sp.
  misc_feature (1)..(229): tr|A0A1E5SMW0|A0A1E5SMW0_9BACT GTP cyclohydrolase 1 OS= Fabibacter sp. 4D4 OX=1889784 GN=folE PE=3 SV=1
MDNKNKTSEELLREIEAMGDAHIMSSIATPLRDDAFDLSDAEKIELIQGYFEKIMHTLGLDLTDDSLQGTPKRVAKLYVNELFKGLNEKNKPSMSTFENKYQYKEMLVEKDITLYSNCEHHFLPIVGKAHVAYIPNGKVIGLSKINRIVDYFARRPQVQERLALQILNELKDALNTEHVAVFIDAEHMCVSSRGASDQSSSTVTVEYSGKFKEEKTRNEFLAYINNKLK

SEQ ID NO: 8016 - protein, 192 aa, Facklamia hominis
  misc_feature (1)..(192): tr|K1MJT1|K1MJT1_9LACT GTP cyclohydrolase 1 OS=Facklami a hominis CCUG 36813 OX=883111 GN=folE PE=3 SV=1
MKEMNLSRVEELVREILIEIGEDPDRDGLIETPKRVAKALAETTASTRLTEFSEGKMFPTEHEDDDQFVSVNNIPFYSMCEHHMLPFFGQVSVAYLPQGGKIIGLSKIPRLVDYVSKKLNVQENITREVANILMEVTNARGVAVIVDARHMCVEMRGVKKMNSITRTCYYVGEFKENIQLRNEFLQSLPKVN

SEQ ID NO: 8017 - protein, 193 aa, Facklamia ignava
  misc_feature (1)..(193): tr|K1LSD2|K1LSD2_9LACT GTP cyclohydrolase 1 OS=Facklami a ignava CCUG 37419 OX=883112 GN=folE PE=3 SV=1
MTEMNLTKIEELVREILIEIGEDPGREGLVETPKRVAKALDFITGSTRLSEFTEGKMFPTEFCEDNEMVSVNNIPFYSMCEHHMLPFFGTVSVAYLPAEGQIIGLSKIPRLVDYVSRKLNVQENITRDVGQILMDITKARGVAVIVDARHMCVEMRGVQKVNSTTRTTFYAGEFKNNAQLRNEFLQSIPRVGQ

SEQ ID NO: 8018 - protein, 193 aa, Facklamia ignava
  misc_feature (1)..(193): tr|A0A2I1K4C5|A0A2I1K4C5_9LACT GTP cyclohydrolase 1 OS= Facklamia ignava OX=137730 GN=folE PE=3 SV=1
MTEMNLTKIEELVREILIEIGEDPDREGLVETPKRVAKALDFITGSTRLSEFTEGKMFPTEFCEDNEMVSVNNIPFYSMCEHHMLPFFGTVSVAYLPAEGQIIGLSKIPRLVDYVSRKLNVQENITRDVGQILMDITKARGVAVIVDARHMCVEMRGVQKVNSTTRTTFYAGEFKNNAQLRNEFLQSIPRVGQ

SEQ ID NO: 8019 - protein, 194 aa, Facklamia languida
  misc_feature (1)..(194): tr|H3NGT5|H3NGT5_9LACT GTP cyclohydrolase 1 OS=Facklami a languida CCUG 37842 OX=883113 GN=folE PE=3 SV=1
MTEINIDRLAELVREILVEIGEDPDRDGLRETPKRVAKALQEMTASTRLASFTEGKMFPTATGSGDQVVSVNHIPFYSMCEHHMLPFFGHVHVGYLPQGGQIIGLSKIPRLVNYVSRKLNVQENITREVAEILMEVTQAKGVAVVVDARHMCVEMRGVQKLNSITRTTFFLGEFSQNDSLRKEFLQSLPKVGQW

SEQ ID NO: 8020 - protein, 195 aa, Facklamia miroungae
  misc_feature (1)..(195): tr|A0A1G7PSK4|A0A1G7PSK4_9LACT GTP cyclohydrolase 1 OS= Facklamia miroungae OX=120956 GN=folE PE=3 SV=1
MMKEINLDRIEELVRQLLIEIGEDPDRDGLVETPRRVAKSLMETTASTRLDEFTEGKMFPTESSLNQQMVSVNNIPFYSMCEHHMLPFFGNVHVGYLPQDGQIIGLSKIPRLVNYASRKLNVQENITREVADILMTITNAKGVAVVVDARHMCVEMRGVQKVNSITRTNYYLGAFNEDVQLRNEFLQSLPKVNSL

SEQ ID NO: 8021 - protein, 258 aa, Faecalibacterium prausnitzii
  misc_feature (1)..(258): tr|A0A564U990|A0A564U990_9FIRM GTP cyclohydrolase 1 typ e 2 OS=Faecalibacterium prausnitzii OX=853 GN=FPSSTS706 3_02800 PE=4 SV=1
MTTVQQIYEEMQRIAPLALAESWDNPGLLVDCGGEVSRVLVTLDITPEVVEEAARKGCGLIVSHHPVIFSPLKKLSGQDVAFQLVKSGISAICMHTNLDAAEGGVNEVLAGIFGMREMEVFAEGCGRVGSIEPVTVPELAKKAQKELAFRCNQPFNGPAVQVKFADTGKTVRRLAVISGAGGSLFEDAIARGADCLLTGEANHHHAIDAKRLGLSLIAAGHYATEFPVTAAVAEKLRTAFPELEVLVSEDARDPYTYL

SEQ ID NO: 8022 - protein, 184 aa, Faecalicatena contorta
  misc_feature (1)..(184): tr|A0A174KH82|A0A174KH82_9FIRM GTP cyclohydrolase 1 OS= Faecalicatena contorta OX=39482 GN=folE PE=3 SV=1
MIDQEKIKQAVKLLLEGIGEDTGREGLKETPERIARMYEEIYGGMDEDAAEHLKKTFHVENNEIVMEKDITFYSTCEHHLLPFYGKAHIAYIPDGKVVGLSKLARTVEAFARRLQIQEQLTGQIADALMEHLKPKGVLVMIEAEHMCMTMRGIKKPGSQTVTVVKRGVFLEDPELTNLFFQMIR

SEQ ID NO: 8023 - protein, 183 aa, Faecalicatena contorta
  misc_feature (1)..(183): tr|A0A316AQ33|A0A316AQ33_9FIRM GTP cyclohydrolase 1 OS= Faecalicatena contorta OX=39482 GN=folE PE=3 SV=1
MMNQEKIMQGIKLLLEGIGEDVNREGLLETPDRIARMYEEICGGMEEDAAKHLGKTFSVSTNEIVVEKDITFYSTCEHHLLPFYGKAHIAYIPDGKVVGLSKLAKTVEVFAKRLQLQEQLTVQIADALVENLNPKGVLVMLEAEHMCMTMRGIKKPGSKTVTVAKRGEFQNNPELVNLFFQMV

SEQ ID NO: 8024 - protein, 184 aa, Faecalicatena orotica
  misc_feature (1)..(184): tr|A0A2Y9C6R0|A0A2Y9C6R0_9FIRM GTP cyclohydrolase 1 OS= Faecalicatena orotica OX=1544 GN=folE PE=3 SV=1
MIDQEKVKQAVKLLLEGIGEDITREGLKDTPDRIARMYEEIYGGMEENAAQHLKKTFHVDDNEMVIEKDITFYSTCEHHLLPFYGKAHIAYIPDGKVVGLSKLARTVEVFAKRLQLQEQLTGQIADALMENLNPKGVLVMIEAEHMCMTMRGIKKPGSQTVTIVKRGEFLENTELTNQFFQMLR

SEQ ID NO: 8025 - protein, 189 aa, Falsibacillus pallidus
  misc_feature (1)..(189): tr|A0A370GIF3|A0A370GIF3_9BACI GTP cyclohydrolase 1 OS= Falsibacillus pallidus OX=493781 GN=folE PE=3 SV=1
MGEVNRAQIEEAVRLILEAIGEDPNREGLLDTPKRVAKMYEEVFSGLNKDPKEYFETVFGEDHEELVLVKDIPFYSMCEHHLVPFYGKAHVAYIPKNGKVTGLSKLARAVETVARRPQLQERITSTVAEAIMEKLEPHGAMVVVEAEHMCMTMRGVQKPGSSTVTTAVRGSFAEDRTARAEVLSLIHKS

SEQ ID NO: 8026 - protein, 188 aa, Falsibacillus sp.
  misc_feature (1)..(188): tr|A0A3L7JWI5|A0A3L7JWI5_9BACI GTP cyclohydrolase 1 OS= Falsibacillus sp. GY 10110 OX=2478915 GN=folE PE=3 SV=1
MAEVNRAQIEEAVRLILDAIGEDPQREGLEDTPKRVAKMYEEVFSGLNQDPKEYFDTIFGEDHEELVLVKDIPFYSMCEHHLVPFYGKAHVAYIPKNGKVTGLSKLARAVEAVAKRPQLQERITATVVEAIMEKLEPHGAMVVVEAEHMCMTMRGVKKPGSKTITTAVRGSFAEDRQARSEVLSLIKQ

SEQ ID NO: 8027 - protein, 205 aa, Falsochrobactrum ovis
  misc_feature (1)..(205): tr|A0A364JTU0|A0A364JTU0_9RHIZ GTP cyclohydrolase 1 OS= Falsochrobactrum ovis OX=1293442 GN=folE PE=3 SV=1
MDARILKPVENSDQPVQSLRPTQAEAEAAVRTLLLWAGEDPAREGLLETPKRVVKSYSELFGGYAESPEDVLGTTFEEVSGYNDLVLVKDIPFFSHCEHHMVPIIGKAHVAYLPDGKVVGLSKIARVVDIFARRLQTQESITAQVGDSIQRILKPLGVAVMIEAEHMCMAMRGIRKQGSSTITTTFTGAFKERVDEQVRFMQLVR

SEQ ID NO: 8028 - protein, 206 aa, Falsochrobactrum sp.
  misc_feature (1)..(206): tr|A0A316J8P7|A0A316J8P7_9RHIZ GTP cyclohydrolase 1 OS= Falsochrobactrum sp. HN4 OX=2201899 GN=folE PE=3 SV=1
MDARILKKDDESNVLVKMHKPTQAEAEAAVRTLLLWAGEDPTREGLLETPKRVVKSYSELFGGYDQSPEDVLGTTFEEVSGYDDTVLVKDISFFSHCEHHMVPIIGKAHVAYLPDGKVLGLSKIARVVDIFARRLQTQESITAQIAGSIQRILKPRGVAVMIDAEHMCMAMRGIRKQGSSTITTTFTGAFKEEVDQQVRFMNLIRQ

SEQ ID NO: 8029 - protein, 192 aa, Fermentimonas caenicola
  misc_feature (1)..(192): tr|A0A098BZA8|A0A098BZA8_9PORP GTP cyclohydrolase 1 OS= Fermentimonas caenicola OX=1562970 GN=folE PE=3 SV=1
MSSEELEKNKSIISDHMREILSLLGEDVSREGLIKTPDRVAKAMQYLTKGYWQSPEEILRSAQFKENYRQMVIVKDIDFFSMCEHHMLPFFGKAHVAYIPNGYVTGLSKIARVVDVFSRRLQVQERLTTQIKDCIQNTLNPMGVMVVIEAKHMCMQMRGVEKQNSITTTSDFTGIFREQKTREEFVNLINRK

SEQ ID NO: 8030 - protein, 176 aa, Ferrimicrobium acidiphilum
  misc_feature (1)..(176): tr|A0A0D8FV45|A0A0D8FV45_9ACTN GTP cyclohydrolase 1 OS= Ferrimicrobium acidiphilum DSM 19497 OX=1121877 GN=folE PE=3 SV=1
MTSRDEAVTAVETLLTYLGERNDTRFGDEVYSRTPDRWITFLEAATQGMSEPEPSAVRFELERSGLVSIDEVAFYSLCEHHLLPFFGVVSVDYQPVDYVVGLSALVHVIERHARRLQLQERMTRDIAADVAAITGAKDVRVCVVAEHMCMSMRGVGKPGAQVTTRVVLSGSDSGNP

SEQ ID NO: 8031 - protein, 315 aa, Ferrimonas balearica
  misc_feature (1)..(315): tr|E1SRA6|E1SRA6_FERBD GTP cyclohydrolase FolE2 OS=Ferr imonas balearica (strain DSM 9799 / CCM 4581 / PAT) OX= 550540 GN=folE2 PE=3 SV=1
MTENLNMPTKMPDVATSAKAQVTGTLDWVGMSNIEMPMTIKADDGQARQISTRIEAFVNLAEPQAKGIHMSRLYLALDKLSLEQELTLQSLKALLDTFISSHDALSDRAHVSFAFDYHLRRPALLSGNHGWRNYPVVLTGRLDKGQLDLELKVDVAYSSTCPCSAALARQLIQDAFEAKFHGQQQIDLDTVHQWLGTTSGIVATPHSQRSIAEVKVKLNDALNELPILALVEAIENALKTPVQAAVKREDEQEFARLNGQNLMFVEDAARRLKHTLDQSESFNDFWLRVNHLESLHAHDAVAVDTKGVEGGYQPY

SEQ ID NO: 8032 - protein, 211 aa, Ferrimonas balearica
  misc_feature (1)..(211): tr|E1SP88|E1SP88_FERBD GTP cyclohydrolase 1 OS=Ferrimon as balearica (strain DSM 9799 / CCM 4581 / PAT) OX=5505 40 GN=folE PE=3 SV=1
MNEEAKLVRDTLIARGLETPLVDSELNNEQKYARIKGLMAEVMGTLGLDLSDDSLRETPHRIAKMYVEEIFAGLDYEQFPKLCVIDNKMGVDEMVKVKEISLVSTCEHHFVTIDGTATVAYIPDKKVIGLSKINRIVQFFARRPQVQERLTQQVLVALQTLLGTNNVAVSIQATHYCVKARGVADASSYTETTALGGVFKTKAATRAEFLR

SEQ ID NO: 8033 - protein, 315 aa, Ferrimonas marina
  misc_feature (1)..(315): tr|A0A1M5ZFJ5|A0A1M5ZFJ5_9GAMM GTP cyclohydrolase FolE2 OS=Ferrimonas marina OX=299255 GN=folE2 PE=3 SV=1
MTENPSMPAHMPDVASSAKAAVSGTLDWVGMSEIEMPLTVVADNDTPRQVSARVEAFVNLPKAHAKGIHMSRLYLALDKLSLEQPLSLQSVKGLLEEFIRSHDDLSDRAHVRFQFDYHLRRPALLSGNEGWRNYPIALTGRLEQGKLELELEVEVAYSSTCPCSAALARQLIQEAFEHHFHGEEQVDSEVVRRWLGTTAGVVATPHSQRSLAQVKVRLSEQLDALPIVSLVDAIEDALKTPVQAAVKREDEQEFARLNGQNLMFVEDAARRLKFALEEQPELLDFWLRVNHLESLHAHDAVAVATKGLEDGYQPR

SEQ ID NO: 8034 - protein, 214 aa, Ferrimonas marina
  misc_feature (1)..(214): tr|A0A1M5NZ68|A0A1M5NZ68_9GAMM GTP cyclohydrolase 1 OS= Ferrimonas marina OX=299255 GN=folE PE=3 SV=1
MLSEHAITVRSALEAAGLETPMVQNGLDRDQKYQRIEALMSEVMDTLGLDREDDSLNRTPHRIAKMYVDEVFAGLDYSQFPKMSVIENKMGVDEMVTVGDIDLTSTCEHHFVTIDGSAKVSYIPKDKVIGLSKINRIVRFFAQRPQVQERLTRQVLVSLQALLGTENVAVSIRATHYCVKARGIMDSNSHTTTTALGGNFRTDPRTRAEFLAMR

SEQ ID NO: 8035 - protein, 308 aa, Ferrimonas sediminum
  misc_feature (1)..(308): tr|A0A1G8M440|A0A1G8M440_9GAMM GTP cyclohydrolase FolE2 OS=Ferrimonas sediminum OX=718193 GN=folE2 PE=3 SV=1
MATTMPDVASSAKAQIGGTLDWVGMSNIELPLTVTADDGKSRAVTAKVEAFVNLPNPQAKGIHMSRLYLALDQLSLNGELNLASMKALLDNFISSHEALSDRAKIKISFDYHLRRPSLLSDNSGWRAYPVTLVGSLNQGKLTLEMNVDVSYSSTCPCSAALARQLIQESFNRDFGDKQSLSAEEIHHWLGTTQGVVATPHSQRSVAEVWVKLDNNLTELPIVQLVDRIESALATPVQAAVKREDEQEFARLNGQNLMFVEDAARRLKMALNDTSDFFDFWLRVNHLESLHAHDAVSVTCKGVENGYQP

SEQ ID NO: 8036 - protein, 308 aa, Ferrimonas sp.
  misc_feature (1)..(308): tr|A0A4U1BJY1|A0A4U1BJY1_9GAMM GTP cyclohydrolase FolE2 OS=Ferrimonas sp. IMCC35001 OX=2569538 GN=folE2 PE=3 S V=1
MATTMPDVASSAKAQVGGTLDWVGMSNIELPLTVKADDGQTRPVSAKVEAFVNLPNPQAKGIHMSRLYLALDQLSLNGELTLASLKSLLDGFISSHEALSDQAKVKISFDYHLRRGSLLSDNSGWRAYPVTLVGSLNQGKLTLEMSVEVAYSSTCPCSAALARQLIQEAFNNQFADRQTMTAEEVHQWLGTTQGVVATPHSQRSLAQVWVKMDDTLEQLPLVNLVDRIEGALATPVQAAVKREDEQEFARLNGQNLMFVEDAARRLKTALNEESRFHDFWLRVNHLESLHAHDAVSVTCKGVENGYQP

SEQ ID NO: 8037 - protein, 308 aa, Ferrimonas sp.
  misc_feature (1)..(308): tr|A0A4U1BMK7|A0A4U1BMK7_9GAMM GTP cyclohydrolase FolE2 OS=Ferrimonas sp. IMCC35002 OX=2569539 GN=folE2 PE=3 S V=1
MATIMPDVASSAKAQIGGTLDWVGMSNIELPLTIRADDGQPRAVSAKVEAFVNLPNPQAKGIHMSRLYLALDQMSLAGELNLNSLKSLLDDFISSHEALSDRARVKISFDYHLRRSSLLSDNSGWRSYPVTLVGSLNQGKLSMEMNVDVSYSSTCPCSAALARQLIQDAFNTQFGQEQSLTPEQVQQWLGTTQGVVATPHSQRSIAEVWVKLDPEMEELPIVSLVDRIESALQTPVQAAVKREDEQEFARLNGQNLMFVEDAARRLKLALNDDTQILDFWLRVNHLESLHAHDAVSVTCKGLADGYQP

SEQ ID NO: 8038 - protein, 266 aa, Ferriphaselus amnicola
  misc_feature (1)..(266): tr|A0A2Z6GD03|A0A2Z6GD03_9PROT GTP cyclohydrolase FolE2 OS=Ferriphaselus amnicola OX=1188319 GN=folE2 PE=3 SV= 1
MNSASTSAIPDVQNSADTRQLAINKVGIKGIRHPVVVRDKSVGVQHTVATFNMYVHLPHNFKGTHMSRFVEILNQHGREISVESFESILREMVEKLEAQSGYIEMSFPYFVNKAAPVSEVQSLLDYDVTFIGEIIEGEYRFTMKVLVPVTSLCPCSKKISERGAHNQRSHVTLTVRTGSPVWIEELVRYAEEQASCELFGLLKRPDEKYVTERAYDNPKFVEDMVRDVAAVLNADDRITAYVVESENFESIHNHSAYALIEKDKRA

SEQ ID NO: 8039 - protein, 191 aa, Ferrithrix thermotolerans
  misc_feature (1)..(191): tr|A0A1M4TI37|A0A1M4TI37_9ACTN GTP cyclohydrolase 1 OS= Ferrithrix thermotolerans DSM 19514 OX=1121881 GN=folE PE=3 SV=1
MEIDREHALIVLTQYLEAIGLDLSDETLRDTPRRVLESHLEMLEGRNEDPQAILAETFPAGHEEMVIVKGVQFSSLCEHHLLPFTGVAHIAYLPNSQGRIVGLSKLARLVEVLSQRLQVQERLTSEIANNVEWALAPKGVLVVIEAEHLCMTVRGVKKPGTSAVTSAVRGVFKKNAATRSEAMDLLLSARA

SEQ ID NO: 8040 - protein, 232 aa, Ferrovibrio sp.
  misc_feature (1)..(232): tr|A0A2M8U399|A0A2M8U399_9PROT GTP cyclohydrolase 1 OS= Ferrovibrio sp. OX=1917215 GN=folE PE=3 SV=1
MTAPNTVSKSGLRYIRPAHQKDFPEEVAVSDANKIQRPSRAEAEEAVRTLIRWAGDDPTREGLRGTPDRVVRSYNEFFAGYEEDPVAMLERTFEEIEGYDEMVVLRDIRMESHCEHHMVPIIGKAHVAYLPGKRVVGISKLARVVEVYAKRLQIQEKLTAQVANTLQEVLQPRGVAVVMEAGHQCMTTRGVHKHGVTMVTSRMLGAFRDDPRTRHEFLTMIASSGGARGLDD

SEQ ID NO: 8041 - protein, 203 aa, Ferrovibrio sp.
  misc_feature (1)..(203): tr|A0A2M8U5D7|A0A2M8U5D7_9PROT GTP cyclohydrolase 1 OS= Ferrovibrio sp. OX=1917215 GN=folE PE=3 SV=1
MMPEMMPDMDTARPTPSEAEAAVRTLIRFAGDDPSREGLADTPARVVRAYAEWFGGYQLDPIALLSRTFGESGGYDEPVELRNIPVHSVCEHHMAPIQGLAHVAYIPTDRVVGISKLARVVDACARRLQIQERLTDDIASAIDKALKPRGVAVVIEADHACMTSRGVSAAGTRMVTRRMLGLFGADAALRREFLSSLTLTSER

SEQ ID NO: 8042 - protein, 273 aa, Ferrovum sp.
  misc_feature (1)..(273): tr|A0A0R0LJP0|A0A0R0LJP0_9PROT GTP cyclohydrolase FolE2 OS=Ferrovum sp. JA12 OX=1356299 GN=folE2 PE=3 SV=1
MNAPDNHLIPDIQSTADTRQIAIDRVGIKGIRHPIRVSDRELGDAQNTIASFNMYVHLPQHFKGTHMSRFVEILNREGREISVTSFGAMLQEMVERLDAQAGHIEMQFPYFVNKTAPVSGVRSLIDYDVTFIGEIHEGQVTFTMKVLVPVTSLCPCSKEISDYGAHNQRSHVTITARLNRFMWIEEVIRVAEESASCELFGLLKRPDEKWVTERAYDNPKFVEDMVRDIAHRLNQEPRIDHYIVESENFESIHNHSAYALIERDKIKHPVTSL

SEQ ID NO: 8043 - protein, 277 aa, Ferrovum sp.
  misc_feature (1)..(277): tr|A0A149W074|A0A149W074_9PROT GTP cyclohydrolase FolE2 OS=Ferrovum sp. Z-31 OX=1789004 GN=folE2 PE=3 SV=1
MNAFDPDLIPDIQSTPDTREIAIDRVGIKGIRHPVKVSDRALGDVQHTIATFNMYVHLPKHFKGTHMSRFVEILNREEREISVESFGKILQDMVQRLEAPAGLIEMSFPYFVSKAAPVSGVKSLIDYEVTFIGELTAGKFSFAMKVVIPVTSLCPCSKEISAYGAHNQRSHVTITAHTQTFVWIEEIIRIAEESASCELFGLLKRADEKWVTERAYDNPKFVEDMVRDVARKLDEDPRIDAYVVESENFESIHNHSAYALIERIKNAPTHPAGSLHD

SEQ ID NO: 8044 - protein, 201 aa, Ferruginibacter sp.
  misc_feature (1)..(201): tr|A0A3M9NRL0|A0A3M9NRL0_9BACT GTP cyclohydrolase 1 OS= Ferruginibacter sp. BO-59 OX=2294116 GN=folE PE=3 SV=1
MAYKRIEHYDEDVTNDLIKNYRETIRLIGEDPDREGLIKTPKRIAKAMQYCTQGYGQDAGAVLNSAKFHEDISEMIVVKNIELYSMCEHHMLPFFGKAHIAYIPNGWITGLSKIARVVDIFSKRLQVQERLTTQILDAIKDALNPLGVGVVIEAEHLCMMMRGVQKQNSVTTTSAFFGEFEKQTTRHEFISLISADLIKRK

SEQ ID NO: 8045 - protein, 229 aa, Ferruginibacter sp.
  misc_feature (1)..(229): tr|A0A3M9N4S6|A0A3M9N4S6_9BACT GTP cyclohydrolase 1 OS= Ferruginibacter sp. BO-59 OX=2294116 GN=folE PE=3 SV=1
MKTEIEIDNEVESEIDSIYLEDIDKDFIKYPGKSSVDNNEKLNDEEKIEIIASHFGAIMKTLGLDLNDDSLKDTPHRVAKMFVKESFSGLNPANEPSVTLFENKYQYNKMLVEKGITLYSYCEHHFVPIIGKAHVAYISKGKVIGLSKINRLVQYYAKRPQVQERLTNQIGEALKKAIGTEDVGVVIEADHLCVASRGIKDTGSSTVTTFYSGKFLNEEMKREFLSLIK

SEQ ID NO: 8046 - protein, 256 aa, Fervidicella metallireducens
  misc_feature (1)..(256): tr|A0A017RXF4|A0A017RXF4_9CLOT GTP cyclohydrolase FolE2 OS=Fervidicella metallireducens AeB OX=1403537 GN=folE 2 PE=3 SV=1
MKDVQNEKDIRNVQLKKVGIKNLKWPIVAKDRTDGVQHTVAELALSVELPHDVRGTHMSRFVEIMSKHNVVSPKDLEVMLDELKEKLEAEVAHCTVVFDYFVKKPSPVTGIVSPYDVKCTFDAEKGEKFKFTMEVAVPVSTLCPCSKEISEFGAHNQRATVYIKVEMNKMIWIEDIVKIAEDSASTPVFSLLKRKDEKWITEQAYLNPRFVEDVAREAAIRLEQNEKISWYSVYVESMESIHNHNAFAYTEKGCML

SEQ ID NO: 8047 - protein, 272 aa, Fervidicola ferrireducens
  misc_feature (1)..(272): tr|A0A140LAE4|A0A140LAE4_9THEO GTP cyclohydrolase FolE2 OS=Fervidicola ferrireducens OX=520764 GN=folE2 PE=3 S V=1
MESSTGVKALKDVQSERDERRVPLKKVGVKNIEWPLKVLDKARGHQYTVAKISLSVDLRHDVRGTHMSRFVEVLNNLEMLSPAALLEILSEIKEKLQAEKSYLKMCFPYFLWKESPVSRLSSPLKIQALVEAESGIKSTITMGVKVPVHTLCPCSKEISENGAHNQRAVVEIYVRSKKMIWFEDLSEIAEKSASCPIYTLLKRPDEKFVTEMAYSNAKFVEDVTRDAALELEKDERIEWYKVQVTSFESIHNHDAFACVEKGWLHGADGDFA

SEQ ID NO: 8048 - protein, 263 aa, Fervidobacterium changbaicum
  misc_feature (1)..(263): tr|A0A1G8FT60|A0A1G8FT60_9BACT GTP cyclohydrolase FolE2 OS=Fervidobacterium changbaicum OX=310769 GN=folE2 PE= 3 SV=1
MVLKDVQNERDARNIYLKRVGVKGVRYPVVVLDRAQGTQATIATINMYVDLPKDYRGTHMSRFIEVLNEFHLEINPKRVKDILNRLKDVLNAKRAVIEVEFPYFVKKQAPVTKSESYLEYTCSFEAEIFDGKFDFLTSVLVPIHTLCPCSKEISERGAHNQRALCKVSFESKEMIWIEDIIEVVEKSASAPIFTLLKRPDEKYVTELAYDNPKFVEDVARDVAIELKKYDKIKWYKVEVESYESIHAHNAYACVTSDELEEQI

SEQ ID NO: 8049 - protein, 260 aa, Fervidobacterium gondwanense
  misc_feature (1)..(260): tr|A0A1M7S7M8|A0A1M7S7M8_FERGO GTP cyclohydrolase FolE2 OS=Fervidobacterium gondwanense DSM 13020 OX=1121883 G N=folE2 PE=3 SV=1
MLKDVQSQHDSRNVYLRRVGVKGVRYPVVVLDKTNGSQSTVATVNMYVDLPKRYRGTHMSRFIEVLNEYHLEINPRRIREILSRLKEVLHAKRSFIEISFPYFLRKQAPVSRSESYLEYECSFEAEMYDESFNFLSSVRVPIHTLCPCSKEISERGAHNQRAFCTVTFESKEMVWFEEIIEIVERNASSPLYTLLKRPDEKYVTEHAYDNPKFVEDVARDVALELKRYDKIRWYKVEVESFESIHLHNAYACVMSDEIHI

SEQ ID NO: 8050 - protein, 263 aa, Fervidobacterium islandicum
  misc_feature (1)..(263): tr|A0A1B0VIZ2|A0A1B0VIZ2_FERIS GTP cyclohydrolase FolE2 OS=Fervidobacterium islandicum OX=2423 GN=folE2 PE=3 S V=1
MVLRDVQNERDARNIYLKRVGVKGVRYPVVVLDRAQGTQATIATINMYVDLPKDYRGTHMSRFIEVLNEFHLEINPKRVKDILNRLKDVLNAKRAVIEVEFPYFVKKQAPVTKSESYLEYICSFEAEIFDGKFDFLISVSVPIHTLCPCSKEISERGAHNQRALCKVSFESKEMIWIEDIIEVVEKSASAPIFTLLKRPDEKYVTELAYDNPKFVEDVARDVAIELKKYDKIKWYKVEVESYESIHAHNAYACVTSDELEEQI

SEQ ID NO: 8051 - protein, 261 aa, Fervidobacterium nodosum
  misc_feature (1)..(261): sp|A7HKP2|GCH4_FERNB GTP cyclohydrolase FolE2 OS=Fervid obacterium nodosum (strain ATCC 35602 / DSM 5306 / Rt17 -B1) OX=381764 GN=folE2 PE=3 SV=1
MLKDVQNERDNRNIYLKRVGVKDLRYPIVVLDRTNVTQNTIATLNMFVDLPKDYRGTHMSRFIEVLNEYHLEINPKRIKEILRSLKKVLNAKRSVIEITFPFFLLKKAPVTGSESYLEYTCSFEAEMNGDHLDFSTTVTAPIHTLCPCSKEISEYGAHNQRAKCSVTFKSKEMVWIEDIIEIIEESASAPIFTLLKRADEKYVTEHAYDNPKFVEDVARDVALRLKKYDKIEWYKVEVESFESIHAHNAYACLTSDEIEKI

SEQ ID NO: 8052 - protein, 261 aa, Fervidobacterium pennivorans
  misc_feature (1)..(261): tr|A0A172T1Z6|A0A172T1Z6_FERPE GTP cyclohydrolase FolE2 OS=Fervidobacterium pennivorans OX=93466 GN=folE2 PE=3 SV=1
MVLRDVQSEYDLRNVYLKRVGVKGVRYPIVVLDKTNGSQSTIATINMYVDLPQNYRGTHMSRFIEVLNEYHLEINPKRVKDILYKLKSVLNAKRAVIEVEFPYFIKKQAPVTKSESYLEYSCTFEAEIFDSRFDFLTSVVVPIHTLCPCSKEISERGAHNQRAICKVSYESKEMIWIEDIVEIVEKSASAPIFTLLKRPDEKYVTELAYDNPKFVEDVARDVALELKKYDKIKWYRVEVESFESIHAHNAYACVTSDELQG

SEQ ID NO: 8053 - protein, 261 aa, Fervidobacterium pennivorans
  misc_feature (1)..(261): tr|H9UBW7|H9UBW7_FERPD GTP cyclohydrolase FolE2 OS=Ferv idobacterium pennivorans (strain DSM 9078 / Ven5) OX=77 1875 GN=folE2 PE=3 SV=1
MVLRDVQSEYDLRNVYLKRVGVKGVRYPIVVLDKTNGVQSTIATINMYVDLPQNYRGTHMSRFIEVLNEYHLEINPKRVRDILHKLKDVLNAKRAVIEVEFPYFIKKQAPVTKSESYLEYICTFEAEIFDSRFDFLTSVVVPIHTLCPCSKEISDRGAHNQRAICKVSYESREMIWIEDIIEIVEKSASAPIFTLLKRPDEKYVTELAYDHPKFVEDVARDVALELKKYDKIKWYRVEVESFESIHAHNAYACVTSDELQG

SEQ ID NO: 8054 - protein, 263 aa, Fervidobacterium sp.
  misc_feature (1)..(263): tr|A0A3D2GE84|A0A3D2GE84_9BACT GTP cyclohydrolase FolE2 OS=Fervidobacterium sp. OX=1871331 GN=folE2 PE=3 SV=1
MEVDALKDVQNQYDYRNVYLHRVGVKGVKYPIVVLDKRNGTQSTIASVNMYVDLPRDYRGTHMSRFIEVLNEFHLEVHPKRIKEILERLKSVLNASRGVIEVDFPYFISKKAPVTGIESYLEYQCAFNAEMYESIFKFEVSVTTPIHILCPCSKEISERSAHNQRALCKVTFHSHEMVWIEDIISIVESSASAPIYTLLKRPDEKFITELAYDNPRFVEDVARDVALKLRNYGKINWYKIEVESFESIHLHNAYTCVLSDEVL

SEQ ID NO: 8055 - protein, 258 aa, Fervidobacterium thailandense
  misc_feature (1)..(258): tr|A0A1E3G575|A0A1E3G575_9BACT GTP cyclohydrolase FolE2 OS=Fervidobacterium thailandense OX=1008305 GN=folE2 P E=3 SV=1
MRDVQSEPDHRNVYLHRVGVKGVSYPIVVLDRTNGVQRTVASVNMYVDLPENFRGTHMSRFIEVLNEYHLEVNPKKIKDMLGRLKEVLNAKRAVLEVSFPYFILKKAPVSQTESFLKYDCAFEAEIFDSQFHFETIVEVPIHTLCPCSKEISERGAHNQRAVCKVTYVSSEMVWIEEIIEIVESSASAPIFTLLKRVDEKFVTEHAYDNPKFVEDVARDVALRLKEHGKIKWYRVEVESFESIHLHNAYACVVSDEVF

SEQ ID NO: 8056 - protein, 255 aa, Fibrella aestuarina
  misc_feature (1)..(255): tr|I0K9X6|I0K9X6_9BACT GTP cyclohydrolase 1 OS=Fibrella aestuarina BUZ 2 OX=1166018 GN=folE PE=3 SV=1
MKPNGTSLNTPSNGAASNGIHLNGHKNGHATHGLSDELVDEMGDNHALANLETPLRPDAFDLDDDLKIDLIEAHFREIMTILGLDLTDDSLKGTPRRVAKMYVNETFKGLNPANKPSTTLFDNKYQYNQMLVERDITVQSYCEHHFVPIIGKAHVAYISSGKVIGLSKLNRIVQYYAKRPQVQERLTMQIADELKRALQTDDVAVIIDAAHLCVSTRGVNDTASSTLTAAYSGKFEDEATKQEFLKYVGMAKPTM

SEQ ID NO: 8057 - protein, 247 aa, Fibrella sp.
  misc_feature (1)..(247): tr|A0A1W6EB81|A0A1W6EB81_9BACT GTP cyclohydrolase 1 OS= Fibrella sp. ES10-3-2-2 OX=1834519 GN=folE PE=3 SV=1
MKPNGTSLNTLSTNGIHLNGNGHKHDLTDELVDDMGDNHASANLDTPLRDDAFDLDDNLKIDLIEEHFREIMTILGLDLTDDSLKGTPRRVAKMYVNETFKGLNPANKPSTTLFENKYQYNQMLVERDITVQSYCEHHFVPIIGKAHVAYISSGKVIGLSKLNRIVQHFAKRPQVQERLTMQIADELKKALQTEDVAVIIDAAHLCVSTRGVNDTASSTLTAAYSGKFDDEATRQEFLKYVGMKPTM

SEQ ID NO: 8058 - protein, 249 aa, Fibrisoma limi
  misc_feature (1)..(249): tr|I2GF47|I2GF47_9BACT GTP cyclohydrolase 1 OS=Fibrisom a limi BUZ 3 OX=1185876 GN=folE PE=3 SV=1
MKLNGTSSNTPSILTESLNGKHHNGSSVDAVLAEEMGDAHAAASLETPLRDDAFDLDDDLKIDLIEEHFREIMQIMGLDLTDDSLKGTPRRVAKMYIKEAFSGLNPANKPSTTLFDNKYQYNQMLVEKDITVHTYCEHHFVPIIGKAHVAYISSGKVIGLSKLNRIVQYFSKRPQVQERLTMQIADELKKALNTEDVAVIIDAKHLCVSTRGVNDTASSTITSAYSGKFEDEATRQELLRYISVSTATI

SEQ ID NO: 8059 - protein, 244 aa, Fibrisoma sp.
  misc_feature (1)..(244): tr|A0A418M6N3|A0A418M6N3_9BACT GTP cyclohydrolase 1 OS= Fibrisoma sp. HYT19 OX=2305895 GN=folE PE=3 SV=1
MKLNGTSSNTPLLNGKHHNGSSVDAVLAEEMGDAHAAASLETPLRDDAFDLDDDLKIDLIEEHFREIMQIMGLDLTDDSLKGTPRRVAKMYIKEAFSGLNPANKPGTTLFDNKYQYNQMLVEKDITVHTYCEHHFVPIIGKAHVAYISSGKVIGLSKLNRIVQYFSKRPQVQERLTMQIADELKKALDTEDVAVIIDAKHLCVSTRGVNDTASSTITSAYSGKFEEEATRQELLRYISVSTATI

SEQ ID NO: 8060 - protein, 184 aa, Fibrobacter intestinalis
  misc_feature (1)..(184): tr|A0A1T4LKX2|A0A1T4LKX2_9BACT GTP cyclohydrolase 1 OS= Fibrobacter intestinalis OX=28122 GN=folE PE=3 SV=1
MENGFRMILEGMGEDPSREGLLDTPKRVAKMYAELMTSLRSESNPSEILKTRFHEKYDEMIVVPNIEFASMCEHHFLPFTGRAFVAYIPGDCVVGLSKIPRVVEYFARMPQIQERMTRQIAELIQKELNPRGVAVLLEASHMCMTMRGVKKPGATMVTTQLLGRFKTDEKTRAEFMTYIHREGC

SEQ ID NO: 8061 - protein, 188 aa, Fibrobacter sp.
  misc_feature (1)..(188): tr|A0A1M6J4R8|A0A1M6J4R8_9BACT GTP cyclohydrolase 1 OS= Fibrobacter sp. UWP2 OX=1896216 GN=folE PE=3 SV=1
MNLKMMEDGFRMILTGMGENPNREGLLDTPKRVAKMYAELMTGLSGEMRAEDILKTRFHEKYDEMIIVPDIEFASMCEHHFLPFTGKAHVAYIPGDCVVGLSKIPRVVEFYARFPQIQERMTRQIAELIQKELNPKGVAVVLEASHMCMTMRGVKKPGATMVTTQLLGRFKTDEKTRAEFMSRIYAPR

SEQ ID NO: 8062 - protein, 187 aa, Fibrobacter sp.
  misc_feature (1)..(187): tr|A0A254SVW4|A0A254SVW4_9BACT GTP cyclohydrolase 1 OS= Fibrobacter sp. UWB1 OX=1964355 GN=B7988_02925 PE=3 SV= 1
MIKTKKIEQLVRQLLEALNDNPDREGLRDTPRRVAKYYAEMFEGQNYTNAQLAKKFGKCFKQDADGQIVSVDDITIFSHCEHHLALMYDMKVSIRYIPHGKVLGLSKFARISEMVGKRLQLQEKIGSDIAEVIMLATGSKDVEVRIEAKHACVTARGAKNCNMVTRTLFSSGAFKTHLTSNVTESIS

SEQ ID NO: 8063 - protein, 189 aa, Fibrobacter succinogenes
  misc_feature (1)..(189): tr|A0A380S790|A0A380S790_FIBSU GTP cyclohydrolase 1 OS= Fibrobacter succinogenes OX=833 GN=folE PE=3 SV=1
MMDFKKMEDGFRMILEGMGEDPNREGLIDTPKRVAKMYAELMTGLSGEMKAEDILKTRFHEKYDEMIIVPDIEFASMCEHHFLPFTGKAHVAYIPGDCVVGLSKIPRVVEFYARFPQIQERMTRQIAELIQKVLQPKGVAVVLEASHMCMTMRGVKKPGATMVTTQLLGRFKTDEKTRAEFMSRIYAPR

SEQ ID NO: 8064 - protein, 188 aa, Fibrobacter succinogenes
  misc_feature (1)..(188): tr|D9SBL8|D9SBL8_FIBSS GTP cyclohydrolase 1 OS=Fibrobac ter succinogenes (strain ATCC 19169 / S85) OX=59374 GN= folE PE=3 SV=1
MDFKKMEDGFRMILEGMGEDPNREGLIDTPKRVAKMYAELMTGLSGEMKAEDILKTRFHEKYDEMIIVPDIEFASMCEHHFLPFTGKAHVAYIPGDCVVGLSKIPRVVEFYARFPQIQERMTRQIAELIQKVLQPKGVAVVLEASHMCMTMRGVKKPGATMVTTQLLGRFKTDEKTRAEFMSRIYAPR

SEQ ID NO: 8065 - protein, 183 aa, Fibrobacteres bacterium
  misc_feature (1)..(183): tr|A0A3C0PG07|A0A3C0PG07_9BACT GTP cyclohydrolase 1 OS= Fibrobacteres bacterium OX=2052160 GN=folE PE=3 SV=1
MEDAIKKILSFIGENPDREGLRDTPMRVAKSMKFLMQGYTMNPDEIIKKAIFTEECNHMIIVRDIELYSMCEHHMLPFFGKCHIGYIADNKVYGVSKLARLVDCFARRLQVQERLTQQIAYSLMEPIKAQGVGVVIEAHHLCMMMRGVSKQNSKMITSAMLGCFRNETATRNEFLKLISLERD

SEQ ID NO: 8066 - protein, 187 aa, Fibrobacteres bacterium
  misc_feature (1)..(187): tr|A0A1J5EXQ7|A0A1J5EXQ7_9BACT GTP cyclohydrolase 1 OS= Fibrobacteres bacterium CG2_30_45_31 OX=1805149 GN=folE PE=3 SV=1
MMDLAKMEDGFRLILEGMGEDIHREGLIDTPRRVAKMYQELLAGLTDGVNEDDLLSTQFTEAYDEMILLKDIPFVSMCEHHFLPFIGKAHVAYIPNDRIVGLSKLARTVDYYAKRPQVQERMTRQIAELIQKQLNPKGVAVVVEATHSCMTVRGVKKQGSVMFTSQLLGLFKRSEKTRAEFMALIHG

SEQ ID NO: 8067 - protein, 188 aa, Fictibacillus aquaticus
  misc_feature (1)..(188): tr|A0A235FB38|A0A235FB38_9BACI GTP cyclohydrolase 1 OS= Fictibacillus aquaticus OX=2021314 GN=folE PE=3 SV=1
MIEFDREKIETAIRMILEAVGEDPDREGLLDTPKRVARMYEEVFQGLNQDPKEHFATVFGEDHEELVLVKDIPFYSMCEHHLVPFFGVAHIGYIPKGGKVTGLSKLARAVEAVTKRPQLQERITSTVADSLVETLEPHGVIVVVEAEHMCMTMRGVKKPGSKTVTSAVRGVFAEDAAARAEVLSFIKS

SEQ ID NO: 8068 - protein, 188 aa, Fictibacillus arsenicus
  misc_feature (1)..(188): tr|A0A1B1Z5I8|A0A1B1Z5I8_9BACI GTP cyclohydrolase 1 OS= Fictibacillus arsenicus OX=255247 GN=folE PE=3 SV=1
MAEVQREKIETAVKMILEAIGEDPEREGLIDTPKRVAKMYEEVFQGLNQDPKEHFATIFGEDHEELVLVKDIPFYSMCEHHLVPFFGKAHIGYIPKGGKVTGLSKLARAVEAVTKRPQLQERITSTIANSLLETLEPHGVIVVIEAEHMCMTMRGVKKPGSMTVTSAVRGVFEKDAAARAEVLSLIKN

SEQ ID NO: 8069 - protein, 188 aa, Fictibacillus enclensis
  misc_feature (1)..(188): tr|A0A0V8JES6|A0A0V8JES6_9BACI GTP cyclohydrolase 1 OS= Fictibacillus enclensis OX=1017270 GN=folE PE=3 SV=1
MKEFDQAKIEQAVTMILEAIGEDPSREGLVDTPKRVAKMYQEVFQGLNQDPKEHFATIFGEDHEELVLVKDIPFYSMCEHHLVPFFGKAHIGYIPKGGKVTGLSKLARAVEAVTRRPQLQERITSTVADSLVETLNPHGVIVVVEAEHMCMTMRGVKKPGSKTVTSAVRGVFVDDAAARAEVLTFIRS

SEQ ID NO: 8070 - protein, 188 aa, Fictibacillus macauensis
  misc_feature (1)..(188): tr|I8ALT0|I8ALT0_9BACI GTP cyclohydrolase 1 OS=Fictibac illus macauensis ZFHKF-1 OX=1196324 GN=folE PE=3 SV=1
MKEFDKDKIQQAVTMILEAIGEDPTREGLLDTPKRVAKMYEEVFQGLNQDPKDHFATIFGEDHEELVLVKDIPFYSMCEHHLVPFFGVAHIGYIPRGGKVTGLSKLARAVEAVTRRPQLQERITSHVANSLVETLDPHGVIVVVEAEHMCMTMRGVKKPGSKTVTSAVRGVFANDAAARSEVLGLIRS

SEQ ID NO: 8071 - protein, 185 aa, Fictibacillus macauensis
  misc_feature (1)..(185): tr|I8AIJ5|I8AIJ5_9BACI GTP cyclohydrolase 1 OS=Fictibac illus macauensis ZFHKF-1 OX=1196324 GN=folE PE=3 SV=1
MIDKQKIEQCIREILIALGEDPDRDGIKDTPRRVAKMYEEVFQGIQYTNDEIADQFGTCFEEDMDFLSKDGIILVKDIECTSYCEHHMALIYDMHITVAYKPKDKVIGLSKIARIADMVCRRLQIQERITSDIFYIIEKVTDSDDIYVKVDGKHGCMTARGIKKHQAVTFTEQKSGIFQQQPPTF

SEQ ID NO: 8072 - protein, 188 aa, Fictibacillus phosphorivorans
  misc_feature (1)..(188): tr|A0A168W379|A0A168W379_9BACI GTP cyclohydrolase 1 OS= Fictibacillus phosphorivorans OX=1221500 GN=folE PE=3 S V=1
MAEVQKEKIELAVKMILEAIGEDPEREGLIDTPKRVAKMYEEVFQGLNQDPKEHFATIFGEDHEELVLVKDIPFYSMCEHHLVPFFGKAHIGYIPKGGKVTGLSKLARAVEAVTKRPQLQERITSTIANSLLETLEPHGVIVVIEAEHMCMTMRGVKKPGSMTVTSAVRGVFEKDPAARAEVLSLIKN

SEQ ID NO: 8073 - protein, 188 aa, Fictibacillus phosphorivorans
  misc_feature (1)..(188): tr|A0A161RR97|A0A161RR97_9BACI GTP cyclohydrolase 1 OS= Fictibacillus phosphorivorans OX=1221500 GN=folE PE=3 S V=1
MAEVQKEKIEAAVKMILEAIGEDPEREGLIDTPKRVAKMYEEVFQGLNQDPKEHFATIFGEDHEELVLVKDIPFYSMCEHHLVPFFGKAHIGYIPKGGKVTGLSKLARAVEAVTKRPQLQERITSTIANSLLETLEPHGVIVVIEAEHMCMTMRGVKKPGSMTVTSAVRGVFEKDPAARAEVLSLIRN

SEQ ID NO: 8074 - protein, 188 aa, Fictibacillus solisalsi
  misc_feature (1)..(188): tr|A0A1G9VZX4|A0A1G9VZX4_9BACI GTP cyclohydrolase 1 OS= Fictibacillus solisalsi OX=459525 GN=folE PE=3 SV=1
MKEFDQAKIEKAVTMILEAIGEDPAREGLVDTPKRVAKMYQEVFQGLNQDPKEHFATIFGEDHEELVLVKDIPFYSMCEHHLVPFFGKAHIGYIPKGGKVTGLSKLARAVEAVTRRPQLQERITSTVADSLVETLNPHGVIVVVEAEHMCMTMRGVKKPGSKTVTSAVRGVFVDDAAARAEVLTFIRS

SEQ ID NO: 8075 - protein, 188 aa, Fictibacillus sp.; identical to SEQ ID NO: 8069
  misc_feature (1)..(188): tr|A0A4Q2HSU0|A0A4Q2HSU0_9BACI GTP cyclohydrolase 1 OS= Fictibacillus sp. S7 OX=2212476 GN=folE PE=3 SV=1

SEQ ID NO: 8076 - protein, 188 aa, Fictibacillus sp.; identical to SEQ ID NO: 8068
  misc_feature (1)..(188): tr|A0A4Q7QQV0|A0A4Q7QQV0_9BACI GTP cyclohydrolase 1 OS= Fictibacillus sp. BK138 OX=2512121 GN=folE PE=3 SV=1

SEQ ID NO: 8077 - protein, 248 aa, Unknown
  misc_feature (1)..(248): tr|A0A2T1CN12|A0A2T1CN12_9CYAN GTP cyclohydrolase 1 OS= filamentous cyanobacterium CCP2 OX=2107700 GN=folE PE=3 SV=1
MTIASSNGLNGSNTTPSNAAMTSNEMLPTEQSQQNRVQSRPDRSTAHGRESQLHPPAESSSEEMMDAVRTMLLGVGEDPEREGLLKTPKRVAEAMRFLTSGYDQSLEELVNGAIFDEGHNEMVLVRDIDVFSLCEHHMLPFMGKAHVAYIPNQKVVGLSKLARIVEMYSRRLQVQERLTRQIAEAIQEILDPQGVAVVIEATHMCMVMRGVQKPGSWTVTSAMIGGFQEDQRTREEFLSLIRHQPSFR

SEQ ID NO: 8078 - protein, 235 aa, Unknown
  misc_feature (1)..(235): tr|A0A2P8W878|A0A2P8W878_9CYAN GTP cyclohydrolase 1 OS= filamentous cyanobacterium CCT1 OX=2107702 GN=folE PE=3 SV=1
MTIASSNSLNDKIAANGGPKIVQPEVRPDRTRSYRDDADQYPIPETSHEDMADAVRTMLLSVGEDPEREGLLKTPKRVAEAMRFLTSGYQQSLEELVNGAIFDEGHNEMVLVRDINLFSLCEHHMLPFMGRAHVAYIPNQRVVGLSKLARIVEMYSRRLQVQERLNRQIAEAVQEILDPKGVAVVVEASHMCMVMRGVQKPGSWTVTSAMLGVFQEDSKTREEFLSLIRHQPAFF

SEQ ID NO: 8079 - protein, 189 aa, Filibacter sp.
  misc_feature (1)..(189): tr|A0A3P5XD34|A0A3P5XD34_9BACL GTP cyclohydrolase 1 OS= Filibacter sp. TB-66 OX=2483811 GN=folE PE=3 SV=1
MEKIDYEKIEKAVTMILEAVGEDPDREGLIETPKRVAKMYAEMFEGIGKDPKDYFKTVFNENHDEVVIVKDIAFHSMCEHHLVPFFGHAHVAYIPRDGVVAGLSKLARAVETTARRPQLQERITSTVADSIMEMLNPLGVYVIIEAEHMCMTMRGIKKPGAKTVTAVARGIYEHDDVKRSEILSLIKMS

SEQ ID NO: 8080 - protein, 236 aa, Filimonas endophytica
  misc_feature (1)..(236): tr|A0A561IPI9|A0A561IPI9_9BACT GTP cyclohydrolase 1 OS= Filimonas endophytica OX=1500311 GN=folE PE=3 SV=1
MKQNGNVAHVLEAVPDAVWDIAECGDQHWTNAAGTPLRADAALLSDAEKIDRISGLFREIMDTLGLDLTDDSLKGTPKRVARMYVEEIFRGLNPEQKPDMTLFENKYRYNQMLVEKNITVHSNCEHHFVPISGFAHVGYISSGKVIGLSKLNRLVDYYARRPQVQERLTVQIGKELQQVLETEDVAVMIDAKHFCVSSRGIKDNSSSTVTAFWGGRFAEERCKNEFLSYMQLPAVR

SEQ ID NO: 8081 - protein, 199 aa, Filimonas endophytica
  misc_feature (1)..(199): tr|A0A561I9K9|A0A561I9K9_9BACT GTP cyclohydrolase 1 OS= Filimonas endophytica OX=1500311 GN=folE PE=3 SV=1
MAYRKTEEYDERVTEGLMKSYKDALQLLGEDAEREGLLKTPERMAKAMQYLTQGYGLSAVEILNSARFKEDVSEMIIVKDIELYSMCEHHMLPFFGKAHIAYIPNGYITGLSKLGRVVDVFARRLQVQERLTTQILDAIKEALNPLGVAVVIEAKHLCMMMRGVQKQNSVTTTSAFDGEFLHNHITRNEFLKLISADLS

SEQ ID NO: 8082 - protein, 199 aa, Filimonas lacunae
  misc_feature (1)..(199): tr|A0A173M9H0|A0A173M9H0_9BACT GTP cyclohydrolase 1 OS= Filimonas lacunae OX=477680 GN=folE PE=3 SV=1
MAYKKTEEYDEQVTEGLMKSYKDALTLLGEDAEREGLLKTPERMAKAMQYLTQGYDLNAIDILNSAKFKEEVSEMVIVKDIELYSMCEHHMLPFFGKAHIAYIPNGYITGLSKLGRVVDVYARRLQVQERLTTQILEAIKEALNPLGVAVVIEAKHLCMMMRGVQKQNSVTTTSAFDGEFLHNHITRNEFLKLISSDLS

SEQ ID NO: 8083 - protein, 199 aa, Filimonas sp.
  misc_feature (1)..(199): tr|A0A2U0ZR07|A0A2U0ZR07_9BACT GTP cyclohydrolase 1 OS= Filimonas sp. YR581 OX=2135469 GN=folE PE=3 SV=1
MAYRKTEEYDERVTEGLMKSYKEALQLLGEDAEREGLLKTPERMAKAMQYLTQGYELNAVDILNSAKFKEDVSEMVIVKDIELYSMCEHHMLPFFGKAHIAYIPNGHITGLSKLGRVVDVYARRLQVQERLTTQILDAIKEALNPLGVAVVIEAKHLCMMMRGVQKQNSVTTTSAFDGEFLHNHITRNEFLKLIASDLS

SEQ ID NO: 8084 - protein, 199 aa, Filimonas sp.
  misc_feature (1)..(199): tr|A0A4Q1D2T3|A0A4Q1D2T3_9BACT GTP cyclohydrolase 1 OS= Filimonas sp. TTM-71 OX=2508721 GN=folE PE=3 SV=1
MAYRKIDQYDEEITSGLMAHYRSALQLLGEDAEREGLQKTPERMAKAMQYLTQGYEMDAKEILLSAKFKEDVSEMVIVKDIELYSMCEHHMLPFFGKAHIAYIPNGYITGLSKLGRVVDVFARRLQVQERLTTQILEAIKEALNPLGVAVVIEAKHLCMMMRGVQKQNSTTTTSAFDGEFLHNHITRNEFLKLIASDLS

SEQ ID NO: 8085 - protein, 306 aa, Filobacillus milosensis
  misc_feature (1)..(306): tr|A0A4Y8INQ1|A0A4Y8INQ1_9BACI GTP cyclohydrolase FolE2 OS=Filobacillus milosensis OX=94137 GN=folE2 PE=3 SV=1
MDNIQSKKKLPNKKERHRLFGSVDPGPRTKPHKKSEMADLQNTKKDFLFELDAVGISNVKHPIVVPSTLKPKEQTTIGKFYFASTISQDSKGTNMSRFTEQLQTYYEDGFKVNIETMKEFAKELQGRLKQKDADLSVEFPWFFERLAPYTDKPGMNHADAWIKVNYHYENGFDIKVGLTAKITTLCPCSKEISEYSAHNQRGNVTIEVTLDSMFDDETHDWKEILLEAAESNASARIHPVLKRPDEKMVTEQAYENPRFVEDMVRLVSSDLYEMDMVKQFHVKCVNEESIHLHDAIASITYDKRNE

SEQ ID NO: 8086 - protein, 206 aa, Filomicrobium sp.
  misc_feature (1)..(206): tr|A0A2D7FII8|A0A2D7FII8_9RHIZ GTP cyclohydrolase 1 OS= Filomicrobium sp. OX=2024831 GN=folE PE=3 SV=1
MSITNHIKDLPRSARAPAKRPTRAEAEAAVRVLLAWTGENPSREGLRQTPARVVEAYEEFFSGYNSDPISWLDDAESDMSGGYDDIILLKGIRVQSFCEHHLTPFEGSAHLAYLPDKKVVGLSRLVRVVETCARRLQTQEALTEQIIQSINTGLAPRGCALIIEAEHQCMSFRGIKQSGIKTVTSKYCGEFDTDAALRQRFAALTS

SEQ ID NO: 8087 - protein, 233 aa, Fimbriiglobus ruber
  misc_feature (1)..(233): tr|A0A225DLX2|A0A225DLX2_9BACT GTP cyclohydrolase 1 OS= Fimbriiglobus ruber OX=1908690 GN=folE PE=3 SV=1
MNTHRDGQPENGYHNLEHHEIAARRAEAFCHCEDDEAPAALAAPTGVVDLGRIERAVREILAAVGEDPNREGLLETPARVARMYAEIFGGLHADPAAFLKKTFTQKHDEMVLVKDIEFASCCEHHLLPFLGKAHIAYLPDGKVVGLSKLARVVEAVARRPQVQERMTEDLADLITTELAPRGVGVILEASHSCMTIRGVRKPGAMTITSAMRGLFKTNPMTRGELMSLVFGAR

SEQ ID NO: 8088 - protein, 265 aa, Fimbriimonas ginsengisoli
  misc_feature (1)..(265): tr|A0A068NNH5|A0A068NNH5_9BACT GTP cyclohydrolase FolE2 OS=Fimbriimonas ginsengisoli Gsoil 348 OX=661478 GN=fo lE2 PE=3 SV=1
MSETIRPLVDVQNTKDVRNIPIDKVGVRKVKYPVFIRERDNGLQQTVGEFSLMVGLPRHFKGTHMSRFLEVLAEHNHDVSAETIPDILEGLRDRLNAVTAHLEVRFIYFREKAAPVTGKVGMMGYECAFLASGGEVNDSVLEVIVPVTTLCPCSKEISSFGAHNQRGYVTARIRTSGLVWIEEIVDLVEAAGSAPLYPVLKRPDEKFVTEQAYENPRFVEDMVREVSVAFDAHPLITSYEIEVENHESIHDHNAYAYVKRDRVTP

SEQ ID NO: 8089 - protein, 184 aa, Finegoldia magna
  misc_feature (1)..(184): sp|B0S1R1|GCH1_FINM2 GTP cyclohydrolase 1 OS=Finegoldia magna (strain ATCC 29328) OX=334413 GN=folE PE=3 SV=1
MDKEKIEQAVSMIIEAIGEDPNREGLLETPQRVARMYEEIFSGLNQDAKTHLSKSFEIVDDNMVIEKDIPFYSMCEHHLLPFWGKVNIAYIPNKRVAGLSKLARTVDVYSKKPQLQERLNIEIADALMEYLNCKGCLVTIEAEHMCMNMRGVKKPGTSTMTSVARGAFEEDLDLKNEAYRLMGL

SEQ ID NO: 8090 - protein, 184 aa, Finegoldia magna; identical to SEQ ID NO: 8089
  misc_feature (1)..(184): tr|A0A010NK48|A0A010NK48_FINMA GTP cyclohydrolase 1 OS= Finegoldia magna ALB8 OX=1459804 GN=folE PE=3 SV=1

SEQ ID NO: 8091 - protein, 192 aa, Firmicutes bacterium
  misc_feature (1)..(192): tr|A0A373PSH6|A0A373PSH6_9FIRM GTP cyclohydrolase 1 OS= Firmicutes bacterium AM55-24TS OX=2292896 GN=folE PE=3 SV=1
MKKEFNHEKIKEAIRTILTELGDDPDREGLKDTPDRVARMYDEIFEGMRYTNDEIAEMFNKCFEVDSNDLVIVKDIEVFSHCEHHLALMYNMHCHVGYIPNGKVIGLSKIARICDMVSKRLQLQERICSDIAEVIQKVCDTEDVIVVVEGEHSCMTARGIKARGAKTRTSAIRGLFDTDHELRNEFYQLIKD

SEQ ID NO: 8092 - protein, 185 aa, Firmicutes bacterium
  misc_feature (1)..(185): tr|R6BMG3|R6BMG3_9FIRM GTP cyclohydrolase 1 OS=Firmicut es bacterium CAG:56 OX=1263031 GN=folE PE=3 SV=1
MVDQEKVREGVRLILEGIGEDINREGLIETPDRIARMYCELAGGMDQNAATHLEKRFHVDNADMVVEKDITFYSMCEHHMLPFFGKAHVAYIPNGEVVGLSKIARTVEVFARRLQLQEQLTAQIADAFMDNLHPQGVMVMIEAEHLCMTMRGIKKPGAQTVTTVTRGVFDNNKELQDTFYQMVRL

SEQ ID NO: 8093 - protein, 235 aa, Fischerella major
  misc_feature (1)..(235): tr|A0A1U7H3A9|A0A1U7H3A9_9CYAN GTP cyclohydrolase 1 OS= Fischerella major NIES-592 OX=210994 GN=folE PE=3 SV=1
MTIVSSNGSNRFQSPLVPDLTEAITTRPDRNTHDGRKPDLHPPQEEQIDEMVEAVRTLLLGIGEDPEREGLLKTPKRVAEALRFLTSGYNQSLEELVNGAIFDEGHSEMVLVRDINVFSLCEHHMLPFMGKAHVAYIPNQKVVGLSKLARIVEMYSRRLQVQERLTRQIAEAVQTILEPQGVAVVIEATHMCMVMRGVQKPGSWTVTSAMVGVFQEEHKTREEFFNLIRHQAAIF

SEQ ID NO: 8094 - protein, 216 aa, Fischerella major
  misc_feature (1)..(216): tr|A0A1U7H4T1|A0A1U7H4T1_9CYAN GTP cyclohydrolase 1 OS= Fischerella major NIES-592 OX=210994 GN=folE PE=3 SV=1
MTLSIRPDLTCADQIVSSLSTQQQPQVTELEMMQAVRTLLIGLGEYPDREGLKDTPKRVVKALQFLTKGYHESLDELLNGAVFKEDADEMVLVRDIDIFSSCEHHILPIIGRAHVAYIPNGKVIGLSKIARICEMYARRLQVQERLTLQIADALQGLLKPQGVAVVVKATHMCMVMRGVQKPGSWTVTSAMRGVFADDARTREEFMNLIQHNAKFQ

SEQ ID NO: 8095 - protein, 235 aa, Fischerella muscicola
  misc_feature (1)..(235): tr|A0A2N6JVY7|A0A2N6JVY7_FISMU GTP cyclohydrolase 1 OS= Fischerella muscicola CCMEE 5323 OX=2019572 GN=folE PE= 3 SV=1
MTIVSSNGSNRFQSPLVPDLTEAITTRPDRNTHDGREPDLHLPQEEQMDEMVEAVRTLLLGIGEDPEREGLLKTPKRVAEAMRFLTSGYNQSLEELVNGAIFDEGHSEMVLVRDINVFSLCEHHMLPFMGKAHVAYIPNQKVVGLSKLARIVEMYSRRLQVQERLTRQIAEAVQTILEPQGVAVVIEATHMCMVMRGVQKPGSWTVTSAMVGVFQEEHKTREEFFNLIRHQAAIF

SEQ ID NO: 8096 - protein, 193 aa, Fischerella sp.
  misc_feature (1)..(193): tr|A0A1Z4TQY6|A0A1Z4TQY6_9CYAN GTP cyclohydrolase 1 OS= Fischerella sp. NIES-4106 OX=2005456 GN=folE PE=3 SV=1
MTLSIRPDLTCADQIVSSLSTQQQPQVTESEMIQAVRTLLIGLGENPDREGLKDTPKRVVKALQFLTKGYHESLDELLNGAVFTEDADEMVLVRDIDIFSSCEHHILPIIGRAHVAYIPNGKVIGLSKIARICEMYTRRLQVQERLTLQIADALQGLLKPQGVAVVVEATHMCMVMRGVQKPGSWTVTKMALS

SEQ ID NO: 8097 - protein, 235 aa, Fischerella sp.; identical to SEQ ID NO: 8093
  misc_feature (1)..(235): tr|A0A0S3TI73|A0A0S3TI73_9CYAN GTP cyclohydrolase 1 OS= Fischerella sp. NIES-3754 OX=1752063 GN=folE PE=3 SV=1

SEQ ID NO: 8098 - protein, 228 aa, Fischerella thermalis
  misc_feature (1)..(228): tr|A0A2N6LCU8|A0A2N6LCU8_9CYAN GTP cyclohydrolase 1 OS= Fischerella thermalis CCMEE 5319 OX=2019665 GN=folE PE= 3 SV=1
MELKPLKDQREDYFGDTHTASSPENPLRPDAFSIPNEVKIQKIQDHFRAIMETLGLDLTDDSLRGTPLRVAEMMVNELFAGLDPANMPTLSTFENKYKYGEMLVEKNIVVYSTCEHHFLPIVGRAHIGYISAGSVIGLSKMNRIVDYYARRPQVQERMTKQIVRTLQHALGTPDVACVIDAKHLCVNSRGIRDIDSSTVTAEYGGRFQQEAVKKEFLDLIGLNTQFGV

SEQ ID NO: 8099 - protein, 235 aa, Fischerella thermalis
  misc_feature (1)..(235): tr|A0A2N6MWC9|A0A2N6MWC9_9CYAN GTP cyclohydrolase 1 OS= Fischerella thermalis CCMEE 5205 OX=2019671 GN=folE PE= 3 SV=1
MTIVSSNGSNRFQSPLVPDLTEAITTRPDRNTHDGRKPDLHPPQEEQMDEMVEAVRTLLLGIGEDPEREGLLKTPKRVAEALRFLTSGYNQSLEELVNGAIFDEGHSEMVLVRDINVFSLCEHHMLPFMGKAHVAYIPNQKVVGLSKLARIVEMYSRRLQVQERLTRQIAEAVQTILEPQGVAVVIEATHMCMVMRGVQKPGSWTVTSAMVGVFQEEHKTREEFFNLIRHQAAIF

SEQ ID NO: 8100 - protein, 199 aa, Flagellimonas aquimarina
  misc_feature (1)..(199): tr|A0A316KYT9|A0A316KYT9_9FLAO GTP cyclohydrolase 1 OS= Flagellimonas aquimarina OX=2201895 GN=folE PE=3 SV=1
MSPYQNLEEYNISITNEVKERFSKIIDEIGEDVEREGLLKTPERAAKAMLFLTQGYKQDAAEILKGAMFKEDYDDMVIIKDIEVYSLCEHHMLPFFGKAHIAYIPNGHIVGLSKIPRIVDVFARRLQVQERLTHDILECLNNTLKPKGVAVVIEASHMCMMMRGVQKQNSVTTTSGFRGQFEKIETRSEFLKLISSDLS

SEQ ID NO: 8101 - protein, 226 aa, Flagellimonas aquimarina
  misc_feature (1)..(226): tr|A0A316L1U2|A0A316L1U2_9FLAO GTP cyclohydrolase 1 OS= Flagellimonas aquimarina OX=2201895 GN=folE PE=3 SV=1
MKLEQALEEQYEERGNDHVGSSTETPIREDAFVLSEDEKIERIQKSVREIMLTLGLDLDDDSLNGTPKRVAKMYVKEIFGGLHPDRKPKSSTFKNKYKYGEMLVEKNIVLYSTCEHHLLPIIGRAHIAYISNGTVVGLSKMNRVVDYYAKRPQVQERLNIQVVKELQKVLGTEDVACVIDAKHLCVNSRGIRDIESSTVTAEYGGKFKDEAVRREFLDYINLDTDF

SEQ ID NO: 8102 - protein, 199 aa, Flagellimonas eckloniae
  misc_feature (1)..(199): tr|A0A0Q0XDJ0|A0A0Q0XDJ0_9FLAO GTP cyclohydrolase 1 OS= Flagellimonas eckloniae OX=346185 GN=folE PE=3 SV=1
MAPYQSMEEYNISITNEVKERFSKIIDEIGEDVEREGLLKTPERAAKAMLFLTQGYKQDAAEILKGAMFKEDYDDMVIIKDIEVYSLCEHHMLPFFGKAHVAYIPNGHIVGLSKIPRIVDVFARRLQVQERLTHDILECLNDTLKPKGVAVVIEASHMCMMMRGVQKQNSVTTTSGFRGQFEKIETRSEFLKLISSDLS

SEQ ID NO: 8103 - protein, 226 aa, Flagellimonas eckloniae
  misc_feature (1)..(226): tr|A0A0Q0X197|A0A0Q0X197_9FLAO GTP cyclohydrolase 1 OS= Flagellimonas eckloniae OX=346185 GN=folE PE=3 SV=1
MKLKQALEEQYEERGDDHVGSSTETPLREDAFVLSDEEKIERIQNSVREIMLTLGLDLDDDSLSGTPHRVAKMYVKEIFGGLHPKRKPKSSTFENKYKYGEMLVEKNIVLYSTCEHHLLPIIGRAHIAYISNGTVVGLSKMNRVVDYFARRPQVQERLNIQIVKELQKVLNTEDVACVIDAKHLCVNSRGIRDIESSTVTAEYGGKFKDETVKREFLDYINLDTDF

SEQ ID NO: 8104 - protein, 223 aa, Flagellimonas flava
  misc_feature (1)..(223): tr|A0A1M5LWN6|A0A1M5LWN6_9FLAO GTP cyclohydrolase 1 OS= Flagellimonas flava OX=570519 GN=folE PE=3 SV=1
MDKTEIEVLGDNHIATSIETPLRADAFQRTDSEKMEHIQHYFSKIMEELGLDLTDESLSGTPYRFAKMYVKELFYGLDPKNRPKVSTFPNTYGYKRMLVEQDITIDSSCEHHFLPIVGKAHIGYIPNDRVVGLSKINRLVDYYSHRPQVQERLCLQILKDLQETLETEDVIVVVHAKHLCVSSRGIKDKESATTTVEYGGAFTDESRRSEFFDLLKNGSDLNR

SEQ ID NO: 8105 - protein, 237 aa, Flagellimonas flava
  misc_feature (1)..(237): tr|A0A1M5NGS2|A0A1M5NGS2_9FLAO GTP cyclohydrolase 1 OS= Flagellimonas flava OX=570519 GN=folE PE=3 SV=1
MYIFAVLKKKQMKLEQALEEQYEERGNDHVGSSTETPIREDAFVLSDDEKIERIQKSVHEIMLTLGLDLDDDSLKGTPKRVAKMYVNEIFGGLHPDRKPKSSTFKNKYKYGEMLVEKNIVVYSTCEHHLLPIIGRAHIAYISNGTVVGLSKMNRIVDYFAKRPQVQERMNIQIVKELQKVLGTDDVACVIDAKHLCVNSRGIRDIESSTVTAEYGGKFKDEAVRREFLDYINLDTDF

SEQ ID NO: 8106 - protein, 199 aa, Flagellimonas maritima
  misc_feature (1)..(199): tr|A0A2Z4LW85|A0A2Z4LW85_9FLAO GTP cyclohydrolase 1 OS= Flagellimonas maritima OX=1383885 GN=folE PE=3 SV=1
MAPYQNMEEYNITITNDIKERFSKIIGEIGEDVSRDGLLKTPERAAKAMLFLTQGYQQDAAEILKGAMFEEEYDDMVIIKNIELYSLCEHHMLPFFGKAHVAYIPNGHIVGLSKIPRIVDVFARRLQVQERLTHDILECLNNTLKPKGVAVVIEASHMCMMMRGVQKQNSVTTTSGFRGQFEKIETRNEFLKLIGSDLS

SEQ ID NO: 8107 - protein, 251 aa, Flagellimonas maritima
  misc_feature (1)..(251): tr|A0A2Z4LP44|A0A2Z4LP44_9FLAO GTP cyclohydrolase 1 OS= Flagellimonas maritima OX=1383885 GN=gch1 PE=3 SV=1
MLSNQMYQMLNKVLMYIFAFLKNSVMKLKQTLEEQYEERGNDHVGSSTETPIREDAFVLSDDEKIERIQESVREIMLTLGLDLDDDSLSGTPKRVAKMFVKEIFGGLHPDRKPNSSTFKNKYKYGEMLVEKNIVLYSTCEHHLLPIVGRAHIAYISNGTVVGLSKMNRVVDYYAKRPQVQERLNIQVVKELQKVLGTEDVACVIDAKHLCVNSRGIRDIESSTVTAEYGGKFKDEAVRREFLDYINLDTDF

SEQ ID NO: 8108 - protein, 237 aa, Flagellimonas pacifica
  misc_feature (1)..(237): tr|A0A285N1F2|A0A285N1F2_9FLAO GTP cyclohydrolase 1 OS= Flagellimonas pacifica OX=1247520 GN=folE PE=3 SV=1
MYIFAFLKKKEMKLEQALEEQYEERGNDHIGSASETPIREDAFILSDEEKIERIQKSVREIMLTLGLDLDDDSLNGTPKRVAKMYVQEVFGGLHPKRKPKSSTFKNKYKYGEMLVEKNIVLYSTCEHHLLPIIGRAHIAYISNGTVVGLSKMNRVVDYFAKRPQVQERLNIQIVKELQNVLGTEDVACVIDAKHLCVNSRGIRDIESSTVTAEYGGKFKDEAIRREFLDYINLDTDF

SEQ ID NO: 8109 - protein, 199 aa, Flagellimonas pacifica
  misc_feature (1)..(199): tr|A0A285MRL0|A0A285MRL0_9FLAO GTP cyclohydrolase 1 OS= Flagellimonas pacifica OX=1247520 GN=folE PE=3 SV=1
MAPYQNLEEYNINVTNEVKDRFSKIIDEIGEDVNREGLQKTPERAAKAMLFLTQGYRQDAEEILKSAMFKEDYDDMVIIKDIEVYSLCEHHMLPFFGKAHIAYIPNGHIVGLSKIPRIVDVFARRLQVQERLTHDILECINDTLKPQGVAVVIEASHMCMMMRGVQKQNSVTTTSGFRGQFEKIETRNEFLKLISSDLS

SEQ ID NO: 8110 - protein, 226 aa, Flagellimonas sp.
  misc_feature (1)..(226): tr|A0A5C8V0Q2|A0A5C8V0Q2_9FLAO GTP cyclohydrolase 1 OS= Flagellimonas sp. 176CP5-101 OX=2603628 GN=folE PE=3 SV =1
MKLEQALEEQHEERGNDHVGSSTETPIREDAFVLSDEDKIERIQKSVREIMLTLGLDLDDDSLNGTPKRVAKMYVKEIFGGLHPKRKPKSSTFKNKYKYGEMLVEKNIVLYSTCEHHLLPIIGRAHIAYISNGTVVGLSKMNRIVDYYAKRPQVQERLNIQIVKELQKVLGTEDVACVIDAKHLCVNSRGIRDIESSTVTAEYGGKFKNEAIRREFLDYINLDTDF

SEQ ID NO: 8111 - protein, 199 aa, Flagellimonas sp.
  misc_feature (1)..(199): tr|A0A5C8V3C7|A0A5C8V3C7_9FLAO GTP cyclohydrolase 1 OS= Flagellimonas sp. 176CP5-101 OX=2603628 GN=folE PE=3 SV =1
MAPYQSMEEYNISVTNEVKDRFSKIIDEIGEDVKRDGLLKTPERAAKAMLFLTQGYKQDAAEILKGAMFKEDYDDMVIIKDIEVYSLCEHHMLPFFGKAHVAYIPNGHIVGLSKIPRIVDVFARRLQVQERLTHDILECLNNTLKPKGVAVVIEASHMCMMMRGVQKQNSVTTTSGFRGQFEKIETRNEFLKLISSDLS

SEQ ID NO: 8112 - protein, 244 aa, Flammeovirga kamogawensis
  misc_feature (1)..(244): tr|A0A553GCW9|A0A553GCW9_9BACT GTP cyclohydrolase 1 OS= Flammeovirga kamogawensis OX=373891 GN=folE PE=3 SV=1
MKQNETSWNTLQSKVVHQSNGVKVHIEEDIDEIGDNHVGTSYDTPMREGAFDLSDDEKVEKISGHFKEIMDILGLDLNDDSLKGTPKRVAKMYVKEIFSGLNPENRPDIKLFDNKYKYDEMLIEKNIHFYSNCEHHFVPIIGMAHVAYISNGQVIGLSKINRIVQHYAKRPQVQERLTVQIAEDLKKTLGTEDVAVLIDAKHLCVSMRGIEDTYSATVTSHFSGKFKEEATRKEFLSLVPKSSD

SEQ ID NO: 8113 - protein, 223 aa, Flammeovirga pacifica
  misc_feature (1)..(223): tr|A0A1S1Z5M9|A0A1S1Z5M9_9BACT GTP cyclohydrolase 1 OS= Flammeovirga pacifica OX=915059 GN=folE PE=3 SV=1
MEVYRDTDIDEIGDNHIGTSYDTPMKEDAFELSDEEKIKKISSHFREIMDTLGLDLKDDSLRGTPDRVAKMYVKEIFSGLNPENRPDIKLFDNKYKYDEMLIEKNIHFFSNCEHHFVPIIGFAHVAYISNGKVIGLSKINRIVQHYAKRPQVQERLTVQIAEDLKKTLGTEDVAVLIDAKHLCVSMRGIEDTYSATVTSHFSGKFKDEATRREFLSLVPKPTE

SEQ ID NO: 8114 - protein, 218 aa, Flammeovirga sp.
  misc_feature (1)..(218): tr|A0A1B1FYG1|A0A1B1FYG1_9BACT GTP cyclohydrolase 1 OS= Flammeovirga sp. MY04 OX=1191459 GN=folE PE=3 SV=1
MKKEEKLRIESEGDNHIMTSVDTPMLPDAFDKSEEEKIEIIQEYFAGIMKTLGLDLSDNSLKGTPYRFAKMYVKELFAGLDPKNKPNLSVFDNKYQYNKMLVEKNITFSSACEHHFLPIVGKAHVGYISSGKVIGISKINRIVEYYGKRPQVQERMTLQVYNELKNALQTDSVIVVVDAEHLCVSSRGVKDKTSSTVTLEYGGEFNDLSLRNEFLKLI

SEQ ID NO: 8115 - protein, 238 aa, Flammeovirga sp.
  misc_feature (1)..(238): tr|A0A150AJF1|A0A150AJF1_9BACT GTP cyclohydrolase 1 OS= Flammeovirga sp. SJP92 OX=1775430 GN=folE PE=3 SV=1
MKQNGISWNTLQPKEVEIHNDTIIDEIGDNHIGTSHDTPMKKDAFELSDEEKMKKISSHFREIMDTLGLDLTDDSLSGTPDRVAKMYVKEIFSGLNPKNRPDIKLFDNKYKYDEMLIEKNIHFYSNCEHHFVPIIGFAHVAYISNGKVIGLSKINRIVQHYAKRPQVQERLTVQIAEDLKKTLGTEDVAVLIDAKHLCVSMRGIEDTYSATVTSHFSGKFKEEATRKEFLELIPKSSE

SEQ ID NO: 8116 - protein, 220 aa, Flammeovirgaceae bacterium
  misc_feature (1)..(220): tr|A0A2E0BBN1|A0A2E0BBN1_9BACT GTP cyclohydrolase 1 OS= Flammeovirgaceae bacterium OX=2026740 GN=folE PE=3 SV=1
MDTKKIELIGDNHEFFSLKTPLRKDAFQKSNDEKIKNIQKHFAKIIDELGLDLNDDSISGTPYRVAKMYVKEIFRGLDPENKPKISLFDNKYNYNKMLIEKNINLNSTCEHHFLPISGKAHISYISTGKVIGLSKLNRIVQYYSHRPQVQERLTKQIYDELKNVLDTDSVMVVVEAKHHCISSRGIKDHSSSTVTEMYGGDFNIYNKRDEFYKLLNSVSI

SEQ ID NO: 8117 - protein, 220 aa, Flammeovirgaceae bacterium
  misc_feature (1)..(220): tr|A0A1Z9SEG6|A0A1Z9SEG6_9BACT GTP cyclohydrolase 1 OS= Flammeovirgaceae bacterium TMED262 OX=1986699 GN=folE P E=3 SV=1
MDTKKIELIGDNHEFFSLNTPLRKDAFDKSDDVKIKNIQKHFRKIVDELGLDLKDDSISGTPYRVAKMFVKEIFSGLNPQNKPKISLFDNKYNYNKMLIEKNINLNSTCEHHFLPITGKAHVSYISSGKVIGLSKLNRIVKYYSQRPQVQERLTTQIYNELKDILDTDSVMVVLEAKHLCVSSRGIKDYSSSTITEMYGGDFNIYNKRDEFYKLLNSVNI

SEQ ID NO: 8118 - protein, 199 aa, Flaviaesturariibacter sp.
  misc_feature (1)..(199): tr|A0A4R4DVP8|A0A4R4DVP8_9BACT GTP cyclohydrolase 1 OS= Flaviaesturariibacter sp. 17J68-15 OX=2545761 GN=folE P E=3 SV=1
MAYHKKEYYDQDVTEGMMDAYRRIIELAGEDTGREGLVKTPERAAKAMQFNTQGYTLDAVAILNSARFREDVSEMVIVKDIELYSMCEHHLHPFYGKAHIAYIPNGYITGLSKLARVVDVFARRLQVQERLTTQVLDALRESLNPLGVAVVIEAKHLCMMMRGVQKQNSVTTTSAFYGEFLDNHVTRNEFLKLIGSSLS

SEQ ID NO: 8119 - protein, 219 aa, Flaviaesturariibacter sp.
  misc_feature (1)..(219): tr|A0A4R1BC48|A0A4R1BC48_9BACT GTP cyclohydrolase 1 OS= Flaviaesturariibacter sp. 17J68-12 OX=2502780 GN=folE P E=3 SV=1
MKSNGEALVLNGVGKSILPERLQAIAGLDEEARIRLIGDHFRQIMLLLGLDLDDDSLRGTPNRVAKMYVRETFSGLNPLNKPAVTLFDNSYQYSEMLVEKNITVYSTCEHHFVPIIGKAHVAYYSGGRVIGLSKINRLVQYYSKRPQVQERLTEQVAAALKEALHTEDVAVLIDAAHLCVAARGVGDVNSSTLTAHYSGRFANEATRKEFLACLNLGGR

SEQ ID NO: 8120 - protein, 188 aa, Flaviflexus salsibiostraticola
  misc_feature (1)..(188): tr|A0A3Q8WTM0|A0A3Q8WTM0_9ACTO GTP cyclohydrolase 1 OS= Flaviflexus salsibiostraticola OX=1282737 GN=folE PE=3 SV=1
MTFNFQGVETAIRDLLVAIGEDPDRDGLRDTPARMARAYREIFSGLHEDPREVLSASFEVDHQEMILVKDISVYSMCEHHLLPFYGVAHVGYIPSEDGTVTGLSKLARLVDGYARRPQIQERLTSSVADALMDPLGARGAIVVVEAEHMCMSLRGARKPGARTVTSAVRGVMRSAATRAEAMSLIMSR

SEQ ID NO: 8121 - protein, 188 aa, Flaviflexus sp.
  misc_feature (1)..(188): tr|A0A3Q9G807|A0A3Q9G807_9ACTO GTP cyclohydrolase 1 OS= Flaviflexus sp. H23T48 OX=2496867 GN=folE PE=3 SV=1
MTFDANGVERAIRDLLIAIGEDPDRDGLKETPARMARAYEEMFSGLHSDPTEVLSASFDLDYQEMILVKDITVYSVCEHHLLPFYGKAHIGYIPGADGKVTGLSKLARLVDGYAKRPQIQERLTSEVADALMDPLGASGAIVVVEAEHMCMSLRGARKPGSHTVTSAVRGTMRNAATRAEAMSLIMSR

SEQ ID NO: 8122 - protein, 198 aa, Flavihumibacter petaseus
  misc_feature (1)..(198): tr|A0A0E9N6K5|A0A0E9N6K5_9BACT GTP cyclohydrolase 1 OS= Flavihumibacter petaseus NBRC 106054 OX=1220578 GN=folE PE=3 SV=1
MAYKKVEQFEDRITSGLIDHYRDALELLGENPAREGLLKTPERMAKAMQYLTQGYQMDARAILDSAKFHEEVSEMIIVKDIELYSMCEHHMLPFFGKAHIAYIPNGYITGLSKIARVVDVFSRRLQVQERLTTQILGAIKESLQPMGVAVVIEASHLCMMMRGVQKQNSVTTTSAFWGEFEKAETRSEFTKLISSKLS

SEQ ID NO: 8123 - protein, 198 aa, Flavihumibacter solisilvae
  misc_feature (1)..(198): tr|A0A0C1IS30|A0A0C1IS30_9BACT GTP cyclohydrolase 1 OS= Flavihumibacter solisilvae OX=1349421 GN=folE PE=3 SV=1
MAYKKVEHYEDRITSGLIENYRESLELLGENPMREGLQKTPERIAKAMQYLTQGYQMDARAILNSAKFHENVSEMIIVKDIELYSMCEHHMLPFFGKAHIAYIPNGYITGLSKVARVVDVYSRRLQVQERLTTQILNAIKDSLDPLGVAVVIEAKHLCMMMRGVQKQNSVTTTSAFWGEFEKAETRSEFTKLISSKLS

SEQ ID NO: 8124 - protein, 198 aa, Flavihumibacter sp.
  misc_feature (1)..(198): tr|A0A0C1I5C1|A0A0C1I5C1_9BACT GTP cyclohydrolase 1 OS= Flavihumibacter sp. ZG627 OX=1463156 GN=folE PE=3 SV=1
MAYHKVEQYEDKITSGLIENYRESLELLGENPDREGLQKTPERVAKAMQYLTQGYQMDAKAILESAKFHEDVSEMIIVKDIELFSMCEHHMLPFFGKAHIAYIPNGYITGLSKIARVVDVYSRRLQVQERLTQQILTAIKESLNPIGVAVVIEAKHLCMMMRGVQKQNSVTTTSAFWGEFEKNETRSEFTKLISSRLS

SEQ ID NO: 8125 - protein, 198 aa, Flavihumibacter sp.
  misc_feature (1)..(198): tr|A0A162P025|A0A162P025_9BACT GTP cyclohydrolase 1 OS= Flavihumibacter sp. CACIAM 22H1 OX=1812911 GN=folE PE=3 SV=1
MAYNKVEQYDENITSGLMENYRNSLTLLGEDPDREGLLKTPERMAKAMQYLTQGYQLDAKAILESAKFHEDVSEMIIVKDIELFSMCEHHMLPFFGKAHIAYIPNGYITGLSKIARVVDVYSRRLQVQERLTSQILHAIKESLNPIGVAVVVEAKHLCMMMRGVQKQNSVTTTSAFWGEFEKSETRSEFTKLISSKLS

SEQ ID NO: 8126 - protein, 367 aa, Flavimaricola marinus
  misc_feature (1)..(367): tr|A0A238LGJ8|A0A238LGJ8_9RHOB GTP cyclohydrolase FolE2 OS=Flavimaricola marinus OX=1819565 GN=folE2 PE=3 SV=1
MNIHSPDMDRDPTRAEAEAALALLRRWAIDVTPEEVATLDPVVSRLIPGQDVSNYPAMARAYPEDFTVDEAYKASMPDLQNGPSSLIKGARQQIQHVGISNFRLPIRFHTRDNGDLTLETSVTGTVSLEAEKKGINMSRIMRSFYKHAEETFSFAVIERALDAYKADLESFDARIQMRFSFPMKVASLRSGLSGFQYYDIALELIERDGVRKKIVHLDYVYSSTCPCSLELSEHARQFRGQLATPHSQRSVARLSMVLDDTAPCLWFEDVIDMARAAVPTETQVMVKREDEQAFAELNAANPIFVEDAARLFCEQLQKDPRIGDFRVLASHQESLHSHDAVSLLTEGPTFAAESLDPRLFNSLYHVG

SEQ ID NO: 8127 - protein, 233 aa, Flavipsychrobacter stenotrophus
  misc_feature (1)..(233): tr|A0A2S7SYN6|A0A2S7SYN6_9BACT GTP cyclohydrolase 1 OS= Flavipsychrobacter stenotrophus OX=2077091 GN=folE PE=3 SV=1
MKQNETLLSIPRKELDEDDEANYDQMGDDHIYTTVATPMRADAFEMSEQEKISTIAYHFREIMHTLGLDLTDDSLKGTPHRVAKMYIKEIFSGLDPANKPAIALFDNKYGYNQMLIEKDITFFSNCEHHFVPIYGQAHVAYFSSGKVVGLSKLNRIVQYFAKRPQVQERLTMQIGMELQEMLGTEDVAVIIDAKHMCVSSRGIKDAASATITSFYGGQFNEEKVRNEFLHHLK

SEQ ID NO: 8128 - protein, 198 aa, Flavipsychrobacter stenotrophus
  misc_feature (1)..(198): tr|A0A2S7SYK3|A0A2S7SYK3_9BACT GTP cyclohydrolase 1 OS= Flavipsychrobacter stenotrophus OX=2077091 GN=folE PE=3 SV=1
MSYKKIEAYDEQATEQLKGSYKGIIQAIGEDPEREGLLKTPERMAKAMQFLTQGYQLDAHEILNSAKFAEDYSEMVIVKNIELYSMCEHHLLPFFGKAHIAYIPNGYITGLSKLARVVDTFARRLQVQERLTHQILDAIQDTLQPLGVGVVIEAQHLCMMMRGVQKQNSNTTTSAFSGQFMKNETRSEFLRLIAADLS

SEQ ID NO: 8129 - protein, 225 aa, Flaviramulus basaltis
  misc_feature (1)..(225): tr|A0A1K2IJ66|A0A1K2IJ66_9FLAO GTP cyclohydrolase 1 OS= Flaviramulus basaltis OX=369401 GN=folE PE=3 SV=1
MKIDNNIEGYDPLGEDHVGTSSNTPLRLDAFKLSNEEKIDIIKDDVRHIMETLGLDLTDDSLNGTPNRVAKMFVKEIFGGLDPNKKPSASTFDNKYKYGEMLVEKNITLYSTCEHHLLPIVGKAHIAYISNGTVVGLSKMNRIVDYFAKRPQVQERLTIQIVKELQEVLNTQDVACVIDAKHLCVNSRGIRDIESSTVTSEFGGKFKDKAVRREFLDYIKLETKF

SEQ ID NO: 8130 - protein, 231 aa, Flaviramulus basaltis
  misc_feature (1)..(231): tr|A0A1K2IG71|A0A1K2IG71_9FLAO GTP cyclohydrolase 1 OS= Flaviramulus basaltis OX=369401 GN=folE PE=3 SV=1
MSIETLKSNKNNHKLNGFSIDDIGDDHLFTGLETPMKKDAFKLNDTEKKERIAILFEEIMDVMGLDLTDDSLKGTPQRVAKMYIDEIFSGLNPQNKPKIALFDNKYQYNQMLVEKNITFYSNCEHHFVPIIGKAHVAYISSGKVIGLSKLNRIVQYYAKRPQVQERLTNQIANELKNILETDDVAIIIDAKHLCVSSRGIKDDTSATVTSYYGGQFNTPEKIRELQNYLNN

SEQ ID NO: 8131 - protein, 199 aa, Flavisolibacter ginsengisoli
  misc_feature (1)..(199): tr|A0A1M5FD01|A0A1M5FD01_9BACT GTP cyclohydrolase 1 OS= Flavisolibacter ginsengisoli DSM 18119 OX=1121884 GN=fo lE PE=3 SV=1
MAFHKTESFDTDITEGLMTNYSSIIELLGEDPQREGLIKTPERMAKAMQYMTQGYSQDAVSILNGARFREEVSEMVIVKDIELFSMCEHHLLPFFGKAHIAYIPNGYITGLSKLARVVDVYSRRLQVQERLTTQILKAIKESLNPLGVAVVIEAKHLCMMMRGVQKQNSVTTTSSFDGEFLNNHITRNEFLKLITADLD

SEQ ID NO: 8132 - protein, 199 aa, Flavisolibacter ginsenosidimutans
  misc_feature (1)..(199): tr|A0A5B8UGS2|A0A5B8UGS2_9BACT GTP cyclohydrolase 1 OS= Flavisolibacter ginsenosidimutans OX=661481 GN=folE PE= 3 SV=1
MAYRKIEQYDDNVTKQLSECYKTIIASTGEDPQREGLLKTPERAAKAFQFATQGYEQDAVAILNSARFKEDISEMVIVKDIELYSMCEHHLHPFYGKAHVAYIPNGYITGLSKIARVVDVYARRLQVQERLTTQILGAIKESLNPLGVAVVIEAKHLCMMVRGVQKQNSVTTTSSFDGEFLNNHITRNEFLKLISANLD

SEQ ID NO: 8133 - protein, 217 aa, Flavisolibacter ginsenosidimutans
  misc_feature (1)..(217): tr|A0A5B8UCT6|A0A5B8UCT6_9BACT GTP cyclohydrolase 1 OS= Flavisolibacter ginsenosidimutans OX=661481 GN=folE PE= 3 SV=1
MQNGKTITLNGNNHRPLLIDELISPATQALNGEEKIKLIENHFRQIMLLLGLDLNDDSLKGTPSRVAKMYVNEMFSGLNPATKPEATLFENNYGYNEMLVEKNITVYSCCEHHFVPIIGKAHVAYYPNGKVIGQSKINRLVHYYCKRPQVQERLTVQIAGALKEALHTEDVAVVVDAAHLCVASRGVGDVGSTTLTSHYSGRFKREEVKKEFLSFLK

SEQ ID NO: 8134 - protein, 199 aa, Flavisolibacter tropicus
  misc_feature (1)..(199): tr|A0A172TTQ7|A0A172TTQ7_9BACT GTP cyclohydrolase 1 OS= Flavisolibacter tropicus OX=1492898 GN=folE PE=3 SV=1
MAYHKSEHYDLEITEELTGKYKDIITLLGENAQREGLLKTPERMAKAMQFMTQGYHQDAVTILNSARFEEHVSEMVIVKDIELYSMCEHHLVPFYGKAHIAYIPNGYITGLSKLARVVDVFARRLQVQERLTTQILEAIKESLNPMGIAVVIEAKHLCMMMRGVQKQNSVTTTSAFDGELLNNSITRSEFLKLISADLS

SEQ ID NO: 8135 - protein, 224 aa, Flavisolibacter tropicus
  misc_feature (1)..(224): tr|A0A172U2J1|A0A172U2J1_9BACT GTP cyclohydrolase 1 OS= Flavisolibacter tropicus OX=1492898 GN=folE PE=3 SV=1
MQNGTLVTVNGKHAAETNGYHLESTSEGGIHKNGHLIDDETKIKMISHHFRQIMQILGLDLNDDSLKDTPDRVAKMYVKEAFSGLNPNNKPDISLFENSYHYNEMLVEKNITLYSYCEHHFVPIIGKAHVAYLSSGRVIGLSKINRIVQYYGRRPQVQERLTEQIATALKKALNTDDVAVVIDAAHLCVASRGICDVNSTTVTSHYSGKFKDVEVKKEFLSYIK

SEQ ID NO: 8136 - protein, 228 aa, Flavivirga eckloniae
  misc_feature (1)..(228): tr|A0A2K9PLN8|A0A2K9PLN8_9FLAO GTP cyclohydrolase 1 OS= Flavivirga eckloniae OX=1803846 GN=folE PE=3 SV=1
MNIETKTNGYKLNGFSTEDIGDDHLYTGLETPMKVDAFKLNDSEKKARIAILFEEIMDVMGLDLTDDSLKGTPQRVAKMYIDEIFSGLNPKNKPKVALFDNKYKYNQMLVEKNMTFYSNCEHHFVPIIGKAHVAYISSGKVIGLSKLNRIVQYYSKRPQVQERLTNQIANELKNILNTEDIAVIIDAKHLCVSSRGIKDDTSATVTAYYGGQFDTPEKIRELQNYLNN

SEQ ID NO: 8137 - protein, 195 aa, Flavivirga eckloniae
  misc_feature (1)..(195): tr|A0A2K9PMK6|A0A2K9PMK6_9FLAO GTP cyclohydrolase 1 OS= Flavivirga eckloniae OX=1803846 GN=folE PE=3 SV=1
MPYKKFEEYNIQVTDDVKDRYKKIIEDLGEDTERDGLLKTPERAAKAMQFLTQGYHQDPVEILKSAMFKESYNEMVIVKDIELYSLCEHHILPFFGKVHIAYIPNGQIVGLSKLPRIVDVFARRLQVQERLTEQILDCINDTLRPQGAAVVVEASHMCMMMRGVQKQNSITTTSGFRGQFEKIETRNEFLKLIGK

SEQ ID NO: 8138 - protein, 195 aa, Flavivirga sp.
  misc_feature (1)..(195): tr|A0A4S1E218|A0A4S1E218_9FLAO GTP cyclohydrolase 1 OS= Flavivirga sp. RZ03 OX=2559571 GN=folE PE=3 SV=1
MPYKKFEEYNMQVTDDVKERYENIIKDLGEDTNRDGLLKTPERAAKAMQFLTQGYHQDPVEILKSAMFKESYNEMVIVKDIELYSLCEHHILPFFGKVHIAYIPNGQIVGLSKLPRIVDVFARRLQVQERLTEQILDCINHTLKPQGVAVVIEASHMCMMMRGVQKQNSITTTSGFRGQFEKIETRNEFLKLIGK

SEQ ID NO: 8139 - protein, 225 aa, Flavivirga sp.
  misc_feature (1)..(225): tr|A0A4V6R491|A0A4V6R491_9FLAO GTP cyclohydrolase 1 OS= Flavivirga sp. RZ03 OX=2559571 GN=folE PE=3 SV=1
MKIENNIEEFESLGDDHIGTSSNTPLRNDAFKLSNEEKIDIIKDDVRHIMETLGLDLTDDSLNGTPNRVAKMFVKEIFGGLNPKKKPNASTFENKYKYGEMLVEKNITVYSTCEHHLLPIVGKAHIAYISNGTVVGLSKMNRIVDYFAKRPQVQERLTIQVVKELQEVLKTQDVACVIDAKHLCVNSRGIRDIESSTVTSEFGGKFKEEATRREFLDYIKLDTKF

SEQ ID NO: 8140 - protein, 249 aa, Flavobacteria bacterium
  misc_feature (1)..(249): tr|A3J0S0|A3J0S0_9FLAO GTP cyclohydrolase 1 OS=Flavobac teria bacterium BAL38 OX=391598 GN=folE PE=3 SV=1
MSNGYCTKIRETKKVLQNKIKIEEKIAMNTTIEKEIFDIIGDNHQMTSVETPLRSDAFVRSDAQKMEVIEHHFEIIMKELGLDLTDDSLQGTPHRVAKMFVQEIFSGLNPANKPKISVFDNSYQYDKMLVEANISFNSTCEHHFLPIVGKAHIGYVSSGKVIGLSKLNRIVDYYARRPQVQERMIMQIFNELKTVLETDNVMVVMEATHLCVSSRGIKDESSYTSTLQYGGVFNQKEFRDDFYKMIHKE

SEQ ID NO: 8141 - protein, 228 aa, Flavobacteria bacterium
  misc_feature (1)..(228): tr|A0A1G0B285|A0A1G0B285_9BACT GTP cyclohydrolase 1 OS= Flavobacteria bacterium RIFCSPLOWO2_12_FULL_31_7 OX=179 8015 GN=folE PE=3 SV=1
MKSENNFQIDTLSNLSVDDIGNDHLFTSLETPMVKDAFTKSDSEKKEIIAFHFSEIMKALDLDLTDDSLKGTPERVAKMYIEEIFSGLNPKNKPKIALFENKYQYNQMLVEKNITFYSNCEHHFVPIFGKAHVAYISSGKVIGLSKLNRIVQYYAKRPQVQERLTMQIAEDLKAALETEDVAVIIDAKHLCVSSRGVQDESSATVTTSFNGAFNTPQKINELLQLIHS

SEQ ID NO: 8142 - protein, 195 aa, Flavobacteriaceae bacterium
  misc_feature (1)..(195): tr|A0A2M8AQ38|A0A2M8AQ38_9FLAO GTP cyclohydrolase 1 OS= Flavobacteriaceae bacterium CG_4_9_14_3_um_filter_33_16 OX=1973993 GN=folE PE=3 SV=1
MSNKAFEEYNIKVTEDIKNRYKNIIIDLGEDISRDGLQKTPERAAKAMQFLTQGYHQDPVKILKSAMFKESYNEMVLVKDIELYSLCEHHMLPFFGKAHIAYIPNGYIVGLSKLPRIVDVFARRLQVQERLTEQILDCINDTLKPQGVAVVIEAAHMCMMMRGVQKQNSITTTSGFRGQFEKSETRNEFLKLIGK

SEQ ID NO: 8143 - protein, 225 aa, Flavobacteriaceae bacterium
  misc_feature (1)..(225): tr|A0A397LI78|A0A397LI78_9FLAO GTP cyclohydrolase 1 OS= Flavobacteriaceae bacterium MAR_2010_72 OX=1250029 GN=f olE PE=3 SV=1
MKIEKDIEDFESLGDNHIGTSTDTPMRSDAFRLTNEEKIDIIKDDVRHIMETLGLDLTDDSLNGTPLRVAKMFVKELFGGLNPNKKPSASTFENKYKYGEMLVEKNITVYSTCEHHFLPIVGKAHVAYISNGTVVGLSKMNRIVDYFAKRPQVQERLTIQIVKELQTVLNTQDVACVIDAKHLCVNSRGIRDIDCSTVTSEFGGKFKEKETRREFLDYIKLETQF

SEQ ID NO: 8144 - protein, 212 aa, Flavobacteriales bacterium
  misc_feature (1)..(212): tr|A0A2H0GCJ6|A0A2H0GCJ6_9FLAO GTP cyclohydrolase 1 OS= Flavobacteriales bacterium CG18_big_fil_WC_8_21_14_2_50 _32_9 OX=1974008 GN=folE PE=3 SV=1
MSKYNDNMSTQNNMDGYERIEQYNEEKINSLSASYKDIIINLGEDVTREGLEKTPERVAKAMQYLTHGYDLNPTEILKSALFAEKHNHMVIVKDIELYSLCEHHMLPFFGKAHVAYIPNGHIVGLSKIPRIVDAFARRLQVQERLTDEIKNCINEGLKPLGVAVVIEAQHMCMQMRGIQKQNSLTTTSSFTGAFEKESTRQEFISLISNKLS

SEQ ID NO: 8145 - protein, 229 aa, Flavobacteriales bacterium
  misc_feature (1)..(229): tr|A0A3D0QPJ1|A0A3D0QPJ1_9FLAO GTP cyclohydrolase 1 OS= Flavobacteriales bacterium OX=2021391 GN=folE PE=3 SV=1
MKLNGTVLNTAENNLLVYEEEGNEHFLTGIETPLRDDAFELSDEEKITAITHHFRAIMETLGLDLRDDSLKGTPHRVAKMYVQEVFSGLNPANKPKIALFENKYRYREMLVEKDITLHSFCEHHFVPIIGKAHVAYKSNGNVIGLSKINRVVQYFAKRPQVQERLTIQIAEELKRVLQTEDVAVIIDARHMCVSIRGIEDTNSSTVTGSYHGAFLDESVRKEFLHHISH

SEQ ID NO: 8146 - protein, 226 aa, Flavobacteriia bacterium
  misc_feature (1)..(226): tr|A0A432IW83|A0A432IW83_9BACT GTP cyclohydrolase 1 OS= Flavobacteriia bacterium OX=2044941 GN=folE PE=3 SV=1
MKLEQALEEQYEERGNDHVGSSSDTPMRKDAFVLSDEEKIERIQKNVREIMLTLGLDLEDDSLKGTPKRVAKMYVKEIFGGLHPDRRPTSSTFDNKYKYGEMLVEKNIVVYSTCEHHLLPIVGRAHIAYISNGTVVGLSKMNRIVDYYAKRPQVQERLNIQIVKEMQRVLGTEDVACVIDAKHLCVNSRGIRDIESSTVTAEYGGKFKDEAVRREFLDYINLDTEF

SEQ ID NO: 8147 - protein, 194 aa, Flavobacteriia bacterium
  misc_feature (1)..(194): tr|A0A1Q3ZNY1|A0A1Q3ZNY1_9BACT GTP cyclohydrolase 1 OS= Flavobacteriia bacterium 40-80 OX=1895763 GN=folE PE=3 SV=1
MSDKHPDKILKIASVYKDVIAELGENPEREGLQKTPERVAKALQFLTHGYDLDPAEILKGALFHEDYSEMVIVKDIEVYSLCEHHMLPFFGKAHIAYIPNGRIVGLSKIPRIVDAFARRLQVQERLTLEIRDCIQDTLAPQGVAVVLECAHMCMQMRGVQKQNSFTTTSAFTGVFLENEPTRKEFINLVNANLH

SEQ ID NO: 8148 - protein, 228 aa, Flavobacterium aciduliphilum
  misc_feature (1)..(228): tr|A0A328YM07|A0A328YM07_9FLAO GTP cyclohydrolase 1 OS= Flavobacterium aciduliphilum OX=1101402 GN=folE PE=3 SV =1
MTKNPTLDTSKLVSFSIDEIGDNHLYTSVQTPMKPDAFMMSDAEKKEKIAHHFKEIMEVLGLDLTDDSLKGTPQRVAKMYVDEIFCGLNPANKPQVALFENKYQYNQMLVEKNITFYSNCEHHFVPIFGKIHVAYISKGKVIGLSKINRIVQYFAQRPQVQERLTMQIALELQEILETEDIAVVVDAKHLCVSSRGIKDDTSATVTNYFGGAFQEAQVVHTLWNHIKN

SEQ ID NO: 8149 - protein, 223 aa, Flavobacterium aciduliphilum
  misc_feature (1)..(223): tr|A0A328Y8B9|A0A328Y8B9_9FLAO GTP cyclohydrolase 1 OS= Flavobacterium aciduliphilum OX=1101402 GN=folE PE=3 SV =1
MTHNNDFNEEVGNNHIAFSDQTPLRKDAFDKSDEEKIEIIKKDIENILITLGMDLSDDSLKGTPNRVAKMFVKEIFGGLNPSKKPSSSTFDNKYKYNEMLVEKNITVYSTCEHHLLPIVGRAHVAYISKGTVVGLSKMNRIVEYYAKRPQVQERLTIQIVKELQNVLNTEDVACIIDAKHLCVNSRGIKDIESSTVTAEFGGKFKDEATRKEFLEYIKLDTNF

SEQ ID NO: 8150 - protein, 223 aa, Flavobacterium akiainvivens
  misc_feature (1)..(223): tr|A0A0M9VGX9|A0A0M9VGX9_9FLAO GTP cyclohydrolase 1 OS= Flavobacterium akiainvivens OX=1202724 GN=folE PE=3 SV= 1
MINSDNSRDEIGDDHIATSAKNPLRDDAFDISDDEKINLIKKDVESILLTLGMDLTDDSLKGTPNRVAKMFVKEIFGGLNPTRKPGSSTFENHYKYGEMLVEKNITIYSTCEHHLLPIVGRAHVAYISNGSVIGLSKMNRIVDYYAKRPQVQERLTMQIVQELQQVLGTQDVACVIDAKHLCVNSRGIRDIESSTVTSEFGGKFKEEAVRREFLDYIKLDTQF

SEQ ID NO: 8151 - protein, 223 aa, Flavobacterium album
  misc_feature (1)..(223): tr|A0A2S1QYB1|A0A2S1QYB1_9FLAO GTP cyclohydrolase 1 OS= Flavobacterium album OX=2175091 GN=folE PE=3 SV=1
MIHNDDSKDEIGDNHIASGAKTPVRPDAFDMTDDEKIASIKKDVENILVTLGMDLTDDSIKGTPNRVAKMFVKEIFGGLNPAKKPGSSTFENKYKYGEMLVEKNITVYSTCEHHLLPIVGRAHVAYISNGTVVGLSKMNRIVDYFAKRPQVQERLTMQIVQELKKVLGTEDVACVIDAKHLCVNSRGIRDIESSTVTSEFGGRFKEESVRREFLDYIKLDTQF

SEQ ID NO: 8152 - protein, 204 aa, Flavobacterium alvei
  misc_feature (1)..(204): tr|A0A2S5A1Q4|A0A2S5A1Q4_9FLAO GTP cyclohydrolase 1 OS= Flavobacterium alvei OX=2080416 GN=folE PE=3 SV=1
MIANKVKSYEKIEEYDTEITAILAENYRSIIENLGEDINREGLLKTPERAAKAMQYLTHGYGLNPLEILKSALFTEDHKQMIVVKDIEVYSMCEHHMLPFFGKAHIAYIPNGKIVGLSKIPRIVDAFARRMQVQERLTDEIKNCIQSALNPLGVAVVIEAQHMCMCMRGIQKQNSVTTTSSFNGAFEKNKTRKEFISLITNKLS

SEQ ID NO: 8153 - protein, 223 aa, Flavobacterium alvei
  misc_feature (1)..(223): tr|A0A2S5AEY0|A0A2S5AEY0_9FLAO GTP cyclohydrolase 1 OS= Flavobacterium alvei OX=2080416 GN=folE PE=3 SV=1
MINNEEFQDEIGNNHIGSSATNPVRKDAFDVSDDEKIERIKKDVENMLLTLGMDMTDDSLKGTPNRVAKMFVKEIFGGLNPSKKPSASTFENSYKYGEMLVEKNITVYSTCEHHLLPIIGRAHVAYISNGRVIGLSKINRIVEFYAKRPQVQERLTMQIVQELQNALGTEDVACIIDAKHLCVNSRGIKDIESSTVTSEFGGKFKNEQTRRELLEYIKLETKF

SEQ ID NO: 8154 - protein, 223 aa, Flavobacterium anhuiense
  misc_feature (1)..(223): tr|A0A444VYB8|A0A444VYB8_9FLAO GTP cyclohydrolase 1 OS= Flavobacterium anhuiense OX=459526 GN=folE PE=3 SV=1
MINNEEFLDEIGDSHFSSNAKNPLRADAFDITDEEKIEKIKKDVENILQTLGMDLTDDSIKGTPNRVAKMFVKEIFGGLNPAKQPKASTFDNNYKYGEMLVEKNITVYSTCEHHLLPIIGRAHVAYISSGRVIGLSKMNRIVEYYAKRPQVQERLTMQIVQELQKALGTEDVACVIDAKHLCVNSRGIKDIESSTVTSEFGGKFKDAQTKREFLDYIKLDTQF

SEQ ID NO: 8155 - protein, 223 aa, Flavobacterium anhuiense
  misc_feature (1)..(223): tr|A0A1G5EH65|A0A1G5EH65_9FLAO GTP cyclohydrolase 1 OS= Flavobacterium anhuiense OX=459526 GN=folE PE=3 SV=1
MINNEEFLDEIGDSHFSSNAKNPLRADAFDITDEEKIEKIKKDVENILQTLGMDLTDDSIKGTPNRVAKMFVKEIFGGLNPAKQPKASTFDNNYKYGEMLVEKNITVYSTCEHHLLPIIGRAHVAYISSGRVIGLSKMNRIVEYYAKRPQVQERLTMQIVQELQKALGTEDVACVIDAKHLCVNSRGIKDIESSTVTSEFGGKFKEPQTKREFLDYIKLDTQF

SEQ ID NO: 8156 - protein, 222 aa, Flavobacterium aquaticum
  misc_feature (1)..(222): tr|A0A327Z3X5|A0A327Z3X5_9FLAO GTP cyclohydrolase 1 OS= Flavobacterium aquaticum OX=1236486 GN=folE PE=3 SV=1
MNTTIEKEIFDIIGDNHQMTSVETPLRPDAFYKSDAEKMEVIEHHFEIIMKELGLDLTDDSLQGTPHRVAKMFVQEIFSGLNPANKPKISVFDNSYQYDKMLVEANISFNSTCEHHFLPIVGKAHIGYVSSGKVIGLSKLNRIVDYYAKRPQVQERMIMQIFNELKSVLETDNVIVVMEATHLCVSSRGIKDESSYTSTLQYGGVFNQKEFRDDFYKMIHKE

SEQ ID NO: 8157 - protein, 223 aa, Flavobacterium aquaticum
  misc_feature (1)..(223): tr|A0A327YPJ8|A0A327YPJ8_9FLAO GTP cyclohydrolase 1 OS= Flavobacterium aquaticum OX=1236486 GN=folE PE=3 SV=1
MIQNEDFQDEIGNDHIATSAQTPLREDAFAISDDEKIELIKKDVEHILNTLGLDLTDDSLKGTPNRVAKMFVKEIFGGLNPNKKPGSSTFDNKYKYGEMLVEKNIVVYSTCEHHLLPIVGRAHVAYISNGTVVGLSKMNRIVDYYAKRPQVQERLTIQIVQELQKVLGTDDVACVIDAKHLCVNSRGIRDIESSTVTAEFGGKFKEDKVRREFLDYIKLDTQF

SEQ ID NO: 8158 - protein, 223 aa, Flavobacterium aquatile
  misc_feature (1)..(223): tr|A0A095U130|A0A095U130_9FLAO GTP cyclohydrolase 1 OS= Flavobacterium aquatile LMG 4008 = ATCC 11947 OX=145349 8 GN=folE PE=3 SV=1
MNTLTEKELQELIGDNHQMTSAETPLRADAFEKTDAEKMQTIEKHFHIIMEEMGLDMTDDSLSGTPHRVAKMFIQEIFSGLNPANKPKMSVFENSYNYDKMLVEANISFNSTCEHHFLPIVGKAHIGYVSSGKVIGLSKLNRIVDYYSRRPQVQERLIMQIFNELKTVLETDNVIVVMEATHLCVSSRGIKDESSYTSTIQYGGVFNEKENRNDFFNLMKQEK

SEQ ID NO: 8159 - protein, 223 aa, Flavobacterium aquatile
  misc_feature (1)..(223): tr|A0A095TXA9|A0A095TXA9_9FLAO GTP cyclohydrolase 1 OS= Flavobacterium aquatile LMG 4008 = ATCC 11947 OX=145349 8 GN=folE PE=3 SV=1
MINNQDLSDEIGNNHIATSSNNPLREDAFDLNDDQKIELIKKDVESILKTLGMDLTDDSLKGTPNRVAKMFVKEIFGGLNPNKKPSSSTFENKYKYNEMLVEKNITVYSTCEHHLLPIVGRAHVAYISNGTVVGLSKMNRIVDYFAKRPQVQERLTMQIVEELQKVLNTKDVACVIDAKHLCVNSRGIRDIESSTVTSEFGGRFKEENVRREFLDYIKLDTSF

SEQ ID NO: 8160 - protein, 223 aa, Flavobacterium aquicola
  misc_feature (1)..(223): tr|A0A3E0EJS2|A0A3E0EJS2_9FLAO GTP cyclohydrolase 1 OS= Flavobacterium aquicola OX=1682742 GN=folE PE=3 SV=1
MINNEEFQDEIGNNHISTNAKNPVRDDAFAITDDEKIEKIKKDVESILLTLGMDLTDDSMKGTPNRVAKMFVKEIFGGLNPDKKPKASTFENNYKYGEMLVEKNITLYSTCEHHLLPIIGRAHVAYISSGRVIGLSKMNRIVEHFAKRPQVQERLTMQIVQELQEALGTEDVACVIDAKHLCVNSRGIKDIESSTVTSEFGGKFKDAQIKREFLDYIKLETKF

SEQ ID NO: 8161 - protein, 223 aa, Flavobacterium aquidurense
  misc_feature (1)..(223): tr|A0A0Q1BBA7|A0A0Q1BBA7_9FLAO GTP cyclohydrolase 1 OS= Flavobacterium aquidurense OX=362413 GN=folE PE=3 SV=1
MINNEDFLDETGDNHFSSNAQNPVRQDAFDLSDDEKIERIKKDVENILQTLGMDLTDDSIKGTPNRVAKMFVKEIFGGLNPSKQPKASTFDNNYKYGEMLVEKNITVYSTCEHHLLPIIGRAHVAYISSGRVIGLSKMNRIVEYYAKRPQVQERLTMQIVQELQKALGTEDVACVIDAKHLCVNSRGIKDIESSTVTSEFGGKFKDPQTKREFLDYIKLDTQF

SEQ ID NO: 8162 - protein, 223 aa, Flavobacterium aquidurense
  misc_feature (1)..(223): tr|A0A1H3IDQ7|A0A1H3IDQ7_9FLAO GTP cyclohydrolase 1 OS= Flavobacterium aquidurense OX=362413 GN=folE PE=3 SV=1
MINNEDFLDEIGDNHFSSNAKNPVRQDAFDLTDDEKIEKIKKDVENILQTLGMDLTDDSIKGTPNRVAKMFVKEIFGGLNPSKQPKASTFDNNYKYGEMLVEKNITVYSTCEHHLLPIIGRAHVAYISSGRVIGLSKMNRIVEYYAKRPQVQERLTMQIVQELQKALGTEDVACVIDAKHLCVNSRGIKDIESSTVTSEFGGKFKDPQTKREFLDYIKLDTQF

SEQ ID NO: 8163 - protein, 223 aa, Flavobacterium araucananum
  misc_feature (1)..(223): tr|A0A227P8I9|A0A227P8I9_9FLAO GTP cyclohydrolase 1 OS= Flavobacterium araucananum OX=946678 GN=folE PE=3 SV=1
MINNEDFLDEIGDNHFSSNAQNPVRQDAFDLSDEEKIEKIKKDVENILQTLGMDLNDDSIKGTPNRVAKMFVKEIFGGLNPTRKPKASTFDNNYKYGEMLVEKNITVYSTCEHHLLPIIGRAHVAYISSGRVIGLSKMNRIVEYYAKRPQVQERLTMQIVQELQKALGTEDVACVIDAKHLCVNSRGIKDIESSTVTSEFGGKFKDPQTKREFLDYIKLDTQF

SEQ ID NO: 8164 - protein, 223 aa, Flavobacterium arcticum
  misc_feature (1)..(223): tr|A0A345HEA9|A0A345HEA9_9FLAO GTP cyclohydrolase 1 OS= Flavobacterium arcticum OX=1784713 GN=folE PE=3 SV=1
MSHTDDIKDGIGENHIATSAETPLRKDAFELSDEQKIEAIKKDVENILQTLGMDLTDDSIKGTPNRVAKMFVKEIFGGLNPEKKPNSSTFENKYKYNEMLVEKNITVYSTCEHHLLPIVGRAHVAYISNGTVVGLSKMNRIVDYFAKRPQVQERLTIQIVQELKKVLNTEDVACVIDAKHLCVNSRGIRDIESSTVTAEFGGTFKEEKVRREFLDYIKLDTQF

SEQ ID NO: 8165 - protein, 217 aa, Flavobacterium aurantiibacter
  misc_feature (1)..(217): tr|A0A255ZRW5|A0A255ZRW5_9FLAO GTP cyclohydrolase 1 OS= Flavobacterium aurantiibacter OX=2023067 GN=folE PE=3 S V=1
MIDEIGENHIATSAQNPVRIDAFEISDEEKIESIKKDVANILHTLGMDLTDDSIKGTPNRVAKMFVKELFGGLNPDKRPSASTFENNYKYGEMLVEKNITVYSTCEHHLLPIIGRAHVAYISNGRVIGLSKMNRIVDFYAKRPQVQERLTMQIVQELQLALGTDDVACVIDAKHLCVNSRGIRDIESSTVTSEFGGRFKEEAMRKEFLNYISLETKF

SEQ ID NO: 8166 - protein, 223 aa, Flavobacterium beibuense
  misc_feature (1)..(223): tr|A0A444W7X3|A0A444W7X3_9FLAO GTP cyclohydrolase 1 OS= Flavobacterium beibuense OX=657326 GN=folE PE=3 SV=1
MIANEDLKDDIGDNHIATSAATPLRPDAFEMSDDQKIEAIKKDVESILNTLGMDLTDDSLKGTPNRVAKMFVKEIFGGLNPTRKPGSSTFENKYKYGEMLVEKNITIYSTCEHHLLPIVGRAHVAYISNGTVVGLSKMNRIVDYFAKRPQVQERLTIQIVEELKKVLKTEDVACVIDAKHLCVNSRGIRDIESSTVTSEFGGRFKEEHVRREFLDYIKLDTQF

SEQ ID NO: 8167 - protein, 223 aa, Flavobacterium beibuense
  misc_feature (1)..(223): tr|A0A0A2LRW5|A0A0A2LRW5_9FLAO GTP cyclohydrolase 1 OS= Flavobacterium beibuense F44-8 OX=1406840 GN=folE PE=3 SV=1
MIANEDLKDDIGENHIATSAETPLRADAFEMSDDQKIEAIKKDVENILHTLGMDLTDDSLKGTPNRVAKMFVKEVFGGLNPSKKPGSSTFENKYKYGEMLVEKNITIYSTCEHHLLPIVGRAHVAYISNGTVVGLSKMNRIVDYFAKRPQVQERLTIQIVEELKKVLNTEDVACVIDAKHLCVNSRGIRDIESSTVTSEFGGKFKEENVRREFLDYIKLDTQF

SEQ ID NO: 8168 - protein, 223 aa, Flavobacterium branchiophilum
  misc_feature (1)..(223): tr|A0A2H3KSM6|A0A2H3KSM6_9FLAO GTP cyclohydrolase 1 OS= Flavobacterium branchiophilum OX=55197 GN=folE PE=3 SV= 1
MKNAENFNDEIGNNHIATNAQNPIRPDAFVLSDEEKIESIKKDVTNILQTLGMDLTDDSLKGTPNRVAKMFVNEIFGGLNPNKKPSASTFENNYKYGEMLVEKNIVVYSTCEHHLLPIIGRAHVAYISNGTVVGLSKMNRIVEYYAKRPQVQERLTMQIVQELQKVLNTDDVACVIDAKHLCVNSRGIKDIESSTVTSEFGGKFKNEQTKREFLDYIKFDTKF

SEQ ID NO: 8169 - protein, 223 aa, Flavobacterium branchiophilum; identical to SEQ ID NO: 8168
  misc_feature (1)..(223): tr|G2Z1C9|G2Z1C9_FLABF GTP cyclohydrolase 1 OS=Flavobac terium branchiophilum (strain FL-15) OX=1034807 GN=folE 2 PE=3 SV=1

SEQ ID NO: 8170 - protein, 223 aa, Flavobacterium caeni
  misc_feature (1)..(223): tr|A0A1G5CL11|A0A1G5CL11_9FLAO GTP cyclohydrolase 1 OS= Flavobacterium caeni OX=490189 GN=folE PE=3 SV=1
MMNSDAFQDDFGDDHFSSNASNPLRADAFDLPDDKKIELIKKDVESILTTLGMDLTDDSLKGTPNRVAKMFVKELFGGLHPNKRPNPSTFENHYQYGEMLVEKNITVYSTCEHHLLPIIGRAHVGYISNGRVIGLSKMNRIVDYYAKRPQVQERLTMQIVQELQRALGTEDVACVIDAKHLCVNSRGIRDIESSTVTSEFGGKFKEEQVRKEFLQYIRLETKF

SEQ ID NO: 8171 - protein, 223 aa, Flavobacterium cauense
  misc_feature (1)..(223): tr|V6S2L0|V6S2L0_9FLAO GTP cyclohydrolase 1 OS=Flavobac terium cauense R2A-7 OX=1341154 GN=folE PE=3 SV=1
MIHNDDLNDPLGENHIGTNAQTPLRSDAFNITDDEKINLIKKDVENILNTLGLDLTDDSLKGTPNRVAKMFVKEIFGGLHPHKKPSSSTFENKYKYGEMLVEKNITVYSTCEHHLLPIVGRAHVAYISNGTVVGLSKMNRIVDYFAKRPQVQERLTIQIVQELQKVLNTDDVACVIDAKHLCVNSRGIRDIESSTVTAEFGGKFKDDKVRREFLDYIKLDTSF

SEQ ID NO: 8172 - protein, 223 aa, Flavobacterium cauense
  misc_feature (1)..(223): tr|V6RWW3|V6RWW3_9FLAO GTP cyclohydrolase 1 OS=Flavobac terium cauense R2A-7 OX=1341154 GN=folE PE=3 SV=1
MENVTEKELFEIIGDDHQMTSIETPLRPDAFLKSDEEKMVVIEQHFKAIMEELGLDLTDDSLKGTPHRVAKMYVQEIFSGLHPDNRPKISVFENSYNYDKMLVEANINFNSTCEHHFLPIIGKAHIAYVSGGKVIGLSKLNRIVDYFARRPQVQERMTVQIYNELCDVLNTEDVIVVLEATHLCVSSRGIKDASSYTTTLQYGGVFEEKEMRNDFFNLLKKEQ

SEQ ID NO: 8173 - protein, 222 aa, Flavobacterium cheniae
  misc_feature (1)..(222): tr|A0A562KEQ6|A0A562KEQ6_9FLAO GTP cyclohydrolase 1 OS= Flavobacterium cheniae OX=295428 GN=folE PE=3 SV=1
MNTTIEKEIFDIIGDNHQMTSVETPLRPDAFVRSDAQKMEVIEHHFEIIMKELGLDLTDDSLQGTPHRVAKMFVQEIFSGLNPANKPKISVFDNSYQYDKMLVEANISFNSTCEHHFLPIVGKAHIGYVSSGKVIGLSKLNRIVDYYAKRPQVQERMIMQIFNELKTVLETDNVIVVMEATHLCVSSRGIKDESSFTSTLQYGGVFNQKEFRDDFYKMIHKE

SEQ ID NO: 8174 - protein, 223 aa, Flavobacterium cheniae
  misc_feature (1)..(223): tr|A0A562KNP6|A0A562KNP6_9FLAO GTP cyclohydrolase 1 OS= Flavobacterium cheniae OX=295428 GN=folE PE=3 SV=1
MTQNEDFQDEIGNDHIATSAQTPMRDDAFVISDEEKIELIKKDVEHILNTLGLDLTDDSLKGTPNRVAKMFVKEIFGGLNPNKKPGSSTFDNKYKYGEMLVEKNIVVYSTCEHHLLPIVGRAHVAYISNGTVVGLSKMNRIVDYYAKRPQVQERLTIQVVQELQKVLGTDDVACVIDAKHLCVNSRGIRDIESSTVTAEFGGKFKEDKVRREFLDYIKLDTQF

SEQ ID NO: 8175 - protein, 223 aa, Flavobacterium chilense
  misc_feature (1)..(223): tr|A0A1M6Y181|A0A1M6Y181_9FLAO GTP cyclohydrolase 1 OS= Flavobacterium chilense OX=946677 GN=folE PE=3 SV=1
MINNEDFLDEIGDNHFSSNAKNPVRQDAFDLSDDEKIEKIKKDVENILQTLGMDLTDDSIKGTPNRVAKMFVKEIFGGLNPSKQPKASTFDNNYKYGEMLVEKNITVYSTCEHHLLPIIGRAHVAYISSGRVIGLSKMNRIVEYYAKRPQVQERLTMQIVQELQKALGTEDVACVIDAKHLCVNSRGIKDIESSTVTSEFGGKFKDPQTKREFLDYIKLDTQF

SEQ ID NO: 8176 - protein, 223 aa, Flavobacterium circumlabens
  misc_feature (1)..(223): tr|A0A4Y7UD48|A0A4Y7UD48_9FLAO GTP cyclohydrolase 1 OS= Flavobacterium circumlabens OX=2133765 GN=folE PE=3 SV= 1
MINNEDFLDEIGDNHFSSNAQNPVRQDAFDLTDDEKIEKIKKDVENILQTLGMDLTDDSLKGTPNRVAKMFVKEIFGGLNPSKKPKASTFDNNYKYGEMLVEKNITLYSTCEHHLLPIIGRAHVAYISSGRVIGLSKMNRIVEYYAKRPQVQERLTMQIVQELQKALGTEDVACVIDAKHLCVNSRGIKDIESSTVTSEFGGKFKDPQTRREFLDYIKLETQF

SEQ ID NO: 8177 - protein, 223 aa, Flavobacterium columnare
  misc_feature (1)..(223): tr|A0A2N9PDT9|A0A2N9PDT9_9FLAO GTP cyclohydrolase 1 OS= Flavobacterium columnare OX=996 GN=folE PE=3 SV=1
MAHNEEFNEELGHSHIATSATTPLRSDAFDLSDEEKIASIRKDVESILNTLGMDLTDDSLSGTPNRVAKMFVKDIFGGLNPDKKPGSSTFQNHYKYNEMLVEKNIVVYSTCEHHLLPIIGRAHVAYISDGTVIGLSKMNRIVDYYSKRPQVQERLTMQIVQELQNVLGTDDVACVIDAKHLCVNSRGIKDIESSTVTAEFGGKFKNEATRKEFLDYIKLETKF

SEQ ID NO: 8178 - protein, 223 aa, Flavobacterium columnare
  misc_feature (1)..(223): tr|A0A437U8X2|A0A437U8X2_9FLAO GTP cyclohydrolase 1 OS= Flavobacterium columnare OX=996 GN=folE PE=3 SV=1
MAHNEEFNEELGHSHIATSATTPLRSDAFDLSDEEKIASIRKDVESILNTLGMDLTDDSLSGTPNRVAKMFVKDIFGGLNPDKKPGSSTFQNHYKYNEMLVEKNIVVYSTCEHHLLPIIGRAHVAYISDGTVIGLSKMNRIVDYYAKRPQVQERLTMQIVQELQNVLGTDDVACVIDAKHLCVNSRGIKDIESSTVTAEFGGKFKNEATRKEFLDYIKLETKF

SEQ ID NO: 8179 - protein, 199 aa, Flavobacterium commune
  misc_feature (1)..(199): tr|A0A1D9PE32|A0A1D9PE32_9FLAO GTP cyclohydrolase 1 OS= Flavobacterium commune OX=1306519 GN=folE PE=3 SV=1
MKSYEKIEQYDTEITESLADNYRIIIDNLGEDVTREGLEKTPERVAKAMQYLTHGYGLDPLEILKSALFTEEHQQMIVVKDIEVYSMCEHHMLPFFGKAHVAYIPNGKIVGLSKIPRVVDAYARRMQVQERLTDQIKNCIQEALNPLGVAVVIEAQHMCMQMRGIQKQNSVTTTSSFTGAFEKDKTRKEFISLVSNKLS

SEQ ID NO: 8180 - protein, 223 aa, Flavobacterium commune
  misc_feature (1)..(223): tr|A0A1D9P7E0|A0A1D9P7E0_9FLAO GTP cyclohydrolase 1 OS= Flavobacterium commune OX=1306519 GN=folE PE=3 SV=1
MIQNEELHDEIGDNHISSSAKNPMREDAFAISDDEKIDKIKKDVENILLTLGMDLNDDSLKGTPNRVAKMFVKEIFGGLNPNKKPKASTFDNNYKYGEMLVEKNIIVYSTCEHHLLPIIGRAHVAYISNGRVIGLSKMNRIVEYYSKRPQVQERLTMQIVQELQKALGTEDVACVIDAKHLCVNSRGISDIESSTVTSEFGGKFKEVQCKREFLDYIKLETRF

SEQ ID NO: 8181 - protein, 223 aa, Flavobacterium crassostreae
  misc_feature (1)..(223): tr|A0A1B9E8W7|A0A1B9E8W7_9FLAO GTP cyclohydrolase 1 OS= Flavobacterium crassostreae OX=1763534 GN=folE PE=3 SV= 1
MINKDEIHDEIGDNHIASCAKNPVRDDAFDITDEEKIEKIKKDVENILLTLGMDLTDDSMQGTPNRVAKMFVKEIFGGLNPAKKPKASTFDNNYKYGEMLVEKNITLYSTCEHHLLPIIGRAHVAYISNGRVIGLSKMNRIVEYYAKRPQVQERLTMQIVQELQEALGTQDVACVIDAKHLCVNSRGINDIESSTVTSEFGGKFKDPQARREFLDYIKMETKF

SEQ ID NO: 8182 - protein, 199 aa, Flavobacterium crassostreae
  misc_feature (1)..(199): tr|A0A1B9E7G3|A0A1B9E7G3_9FLAO GTP cyclohydrolase 1 OS= Flavobacterium crassostreae OX=1763534 GN=folE PE=3 SV= 1
MKNYERKEIYSTEKTTDLAQNYKTIIAGLGEDVTREGLEKTPERAAKAMQFLTHGYAIDPLEILKSALFTEDHSQMIVVKNIEVYSMCEHHMLPFFGKAHIAYIPNGKIVGLSKIPRIVDAYARRMQVQERLTDQIKDCIQEALEPLGVAVVIEAQHMCMQMRGIEKQNSFTTTSSFTGAFEKNKTRKEFISLISNKLS

SEQ ID NO: 8183 - protein, 223 aa, Flavobacterium croceum
  misc_feature (1)..(223): tr|A0A2S4NB27|A0A2S4NB27_9FLAO GTP cyclohydrolase 1 OS= Flavobacterium croceum DSM 17960 OX=1121886 GN=folE PE= 3 SV=1
MINNDDFNDEIGNNHIATNEETPLRGDAFEKSDEEKIELIKKDVENILNTLGLDLTDDSLKGTPNRVAKMFVKDIFGGLNPEKKPSSSTFDNKYKYNEMLVEKNITVYSTCEHHLLPIIGRAHVAYISNGTVVGLSKMNRIVDYYAKRPQVQERLTIQIVRELQRVLNTNDVACIIDAKHLCVNSRGIKDIESSTVTAEFGGKFKDENVRKEFLQYVQLETSF

SEQ ID NO: 8184 - protein, 228 aa, Flavobacterium croceum
  misc_feature (1)..(228): tr|A0A2S4NAS4|A0A2S4NAS4_9FLAO GTP cyclohydrolase 1 OS= Flavobacterium croceum DSM 17960 OX=1121886 GN=folE PE= 3 SV=1
MTKNPTVDTSNLVSFSIDEIGDNHLFTSVETPMKADAFLLSDEDKKEKIAFHFKEIMEVLGLDLTDDSLKGTPQRVAKMYIDEIFCGLNPANKPQIALFENKYQYNQMLVEKNITFYSNCEHHFVPIFGKIHVAYISKGKVIGLSKINRIVQYFAQRPQVQERLTMQIGLELQQILETEDIAVIVDAKHLCVSSRGVKDESSATVTSYYGGVFKNEQKVIELHNYIKS

SEQ ID NO: 8185 - protein, 223 aa, Flavobacterium crocinum
  misc_feature (1)..(223): tr|A0A2S1YLN5|A0A2S1YLN5_9FLAO GTP cyclohydrolase 1 OS= Flavobacterium crocinum OX=2183896 GN=folE PE=3 SV=1
MINNEDFLDEIGDSHFSSNAKNPLRADAFDITDEEKIEKIKKDVENILQTLGMDLTDDSIKGTPNRVAKMFVKEIFGGLNPAKQPKASTFDNNYKYGEMLVEKNITVYSTCEHHLLPIIGRAHVAYISSGRVIGLSKMNRIVEYYAKRPQVQERLTMQIVQELQKALGTEDVACVIDAKHLCVNSRGIKDIESSTVTSEFGGKFKDPQTKREFLDYIKLDTQF

SEQ ID NO: 8186 - protein, 223 aa, Flavobacterium cucumis
  misc_feature (1)..(223): tr|A0A1M7ZXZ3|A0A1M7ZXZ3_9FLAO GTP cyclohydrolase 1 OS= Flavobacterium cucumis OX=416016 GN=folE PE=3 SV=1
MIQNEDFQDEIGNDHIATSAQTPLREDAFSISDDEKIELIKKDVEHILNTLGLDLTDDSLKGTPNRVAKMFVKEIFGGLNPSKKPSSSTFDNKYKYGEMLVEKNIVVYSTCEHHLLPIVGRAHVAYISNGTVVGLSKMNRIVDYYAKRPQVQERLTIQIVQELQKVLGTADVACVIDAKHLCVNSRGIRDIESSTVTAEFGGKFKEDKVRREFLDYIKLDTQF

SEQ ID NO: 8187 - protein, 222 aa, Flavobacterium cucumis
  misc_feature (1)..(222): tr|A0A1M7ZXY2|A0A1M7ZXY2_9FLAO GTP cyclohydrolase 1 OS= Flavobacterium cucumis OX=416016 GN=folE PE=3 SV=1
MNTTIEKEIFDIIGDNHQMTSVETPLRSDAFDRSDAQKMEVIEHHFEIIMKELGLDLTDDSLQGTPHRVAKMFVQEIFSGLNPANKPKISVFDNSYQYDKMLVEANISFNSTCEHHFLPIVGKAHIGYVSSGKVIGLSKLNRIVDYYAKRPQVQERMIMQIFMELKTVLETDNVIVVMEATHLCVSSRGIKDESSYTSTLQYGGVFNQKEFRDDFYKMIHKE

SEQ ID NO: 8188 - protein, 223 aa, Flavobacterium cupreum
  misc_feature (1)..(223): tr|A0A434ABE9|A0A434ABE9_9FLAO GTP cyclohydrolase 1 OS= Flavobacterium cupreum OX=2133766 GN=folE PE=3 SV=1
MINNEDFLDETGDNHFSSNAQNPLRQDAFDLSDDEKIEQIKKDVENILQTLGMDLTDDSIKGTPNRVAKMFVKEIFGGLNPSKKPKASTFDNNYKYGEMLVEKNITLYSTCEHHLLPIIGRAHVAYISSGRVIGLSKMNRIVEYYAKRPQVQERLTMQIVQELQKALGTEDVACVIDAKHLCVNSRGIKDIESSTVTSEFGGKFKDPQTRREFLDYIKLETQF

SEQ ID NO: 8189 - protein, 223 aa, Flavobacterium cutihirudinis
  misc_feature (1)..(223): tr|A0A3D9FZG5|A0A3D9FZG5_9FLAO GTP cyclohydrolase 1 OS= Flavobacterium cutihirudinis OX=1265740 GN=folE PE=3 SV =1
MINNEDFLDEIGDSHFSSNAKNPLRADAFDLTDDEKIEKIKKDVENILQTLGMDLTDDSIKGTPNRVAKMFVKEIFGGLNPSKQPKASTFDNNYKYGEMLVEKNITVYSTCEHHLLPIIGRAHVAYISSGRVIGLSKMNRIVEYYAKRPQVQERLTMQIVQELQKALGTEDVACVIDAKHLCVNSRGIKDIESSTVTSEFGGKFKDPQTKREFLDYIKLETQF

SEQ ID NO: 8190 - protein, 223 aa, Flavobacterium cyanobacteriorum
  misc_feature (1)..(223): tr|A0A255ZTP1|A0A255ZTP1_9FLAO GTP cyclohydrolase 1 OS= Flavobacterium cyanobacteriorum OX=2022802 GN=folE PE=3 SV=1
MAFNEDYKDDIGDNHISASAKTPLREDAFAINDEEKIELIKKDVENILRVLGLDLTDDSLKGTPNRVAKMFVKEIFGGLNPAKKPGSSTFQNHYKYGEMLVEKNITVYSTCEHHLLPIVGRAHVAYISNGTVVGLSKMNRIVDYYAKRPQVQERLTMQIVQELKKVLNTEDVACVIDAKHLCVNSRGIRDIESSTVTSEFGGRFKEEGVRREFLDYIKLDTQF

SEQ ID NO: 8191 - protein, 225 aa, Flavobacterium cyanobacteriorum
  misc_feature (1)..(225): tr|A0A255ZQ50|A0A255ZQ50_9FLAO GTP cyclohydrolase 1 OS= Flavobacterium cyanobacteriorum OX=2022802 GN=folE PE=3 SV=1
MINTFTGSLPILTDTEIGDEHICTGLDTPLKNDAFIMPDEEKKERITLLFAEIMDVLGLDLTDDSLKGTPGRVAKMYVDEIFSGLNPANKPKIALFDNKYKYNQMLVEKNITFYSNCEHHFVPIIGKAHVAYISSGKVIGLSKLNRIVQYYAKRPQVQERLTNQIGEELKSVLDTEDIAVIIDAKHLCVSSRGIKDDTSSTVTSFFSGAFTDAAKIAELQNYLAV

SEQ ID NO: 8192 - protein, 223 aa, Flavobacterium daejeonense
  misc_feature (1)..(223): tr|A0A0Q0WAP1|A0A0Q0WAP1_9FLAO GTP cyclohydrolase 1 OS= Flavobacterium daejeonense OX=350893 GN=folE PE=3 SV=1
MIHNEEMHDEIGDNHISTSAKNPMREDAFAISDDEKIEKIKKDVENILVTLGMDLTDDSLKGTPNRVAKMFVKEIFGGLNPSRKPKASTFNNNYKYGEMLVEKNIIVYSTCEHHLLPIIGRAHVAYISNGTVIGLSKMNRIVEYFSKRPQVQERLTMQIVQELQRALGTEDVACVIDAKHLCVNSRGVSDIESSTVTSEFGGKFKEAQCRREFLDYIKLETKF

SEQ ID NO: 8193 - protein, 223 aa, Flavobacterium dankookense
  misc_feature (1)..(223): tr|A0A4R6QFY6|A0A4R6QFY6_9FLAO GTP cyclohydrolase 1 OS= Flavobacterium dankookense OX=706186 GN=folE PE=3 SV=1
MINHNDSQDEIGENHIATSANNPVRKDAFDITDDKKIELIKKDVENILLTLGMDLSDDSLKGTPNRVAKMFVKEIFGGLNPNKKPSSSTFANNYKYGEMLVEKNITLYSTCEHHLLPIVGRAHVAYISNGTVVGLSKMNRIVDYFAKRPQVQERLTMQIVQELQKVLNTEDVACVIDAKHLCVNSRGIRDIESSTVTSEFGGKFKDEQTRREFLDYIKLDTSF

SEQ ID NO: 8194 - protein, 222 aa, Flavobacterium dankookense
  misc_feature (1)..(222): tr|A0A4R6QDY1|A0A4R6QDY1_9FLAO GTP cyclohydrolase 1 OS= Flavobacterium dankookense OX=706186 GN=folE PE=3 SV=1
MNTTIEKELFELIGDNHQMTSAETPMRPDAFIKSDEQKMIAIEKHFHAIMDEMGMDMSDDSLQGTPHRVAKMFIQEIFSGLNPANKPKISVFENSYNYDKMLVEANISFNSTCEHHFLPIIGKAHIGYVSSGKVIGLSKLNRIVDYYSRRPQVQERLIMQIFNELKTVLETDNVIVVMEAKHLCVSSRGIKDESSYTSTIQYGGIFNEKENRNDFFNLINQE

SEQ ID NO: 8195 - protein, 223 aa, Flavobacterium defluvii
  misc_feature (1)..(223): tr|A0A1M5R249|A0A1M5R249_9FLAO GTP cyclohydrolase 1 OS= Flavobacterium defluvii OX=370979 GN=folE PE=3 SV=1
MINNEDFLDEIGDSHFSSNAKNPLRADAFDITDEEKIEKIKKDVENILQTLGMDLTDDSIKGTPNRVAKMFVKEIFGGLNPAKQPKASTFDNNYKYGEMLVEKNITVYSTCEHHLLPIIGRAHVAYISSGRVIGLSKMNRIVEYYAKRPQVQERLTMQIVQELQKALGTEDVACVIDAKHLCVNSRGIKDIESSTVTSEFGGKFKEPQTKREFLDYIKLDTHF

SEQ ID NO: 8196 - protein, 223 aa, Flavobacterium degerlachei
  misc_feature (1)..(223): tr|A0A1H2XCU8|A0A1H2XCU8_9FLAO GTP cyclohydrolase 1 OS= Flavobacterium degerlachei OX=229203 GN=folE PE=3 SV=1
MKHNEEIHDEIGENHIGSCATNPVRDDAFAISDDEKIEKIKKDVENILLTLGMDLTDDSMKGTPNRVAKMFVKEIFGGLNPARKPKASTFDNNYKYGEMLVEKNIIVYSTCEHHLLPIIGRAHVAYISNGRVIGLSKMNRIVEYYSKRPQVQERLTMQIVQELQEALGTEDVACVIDAKHLCVNSRGISDIESSTVTSEFGGKFKDPQARREFLDYIKLETKF

SEQ ID NO: 8197 - protein, 204 aa, Flavobacterium degerlachei
  misc_feature (1)..(204): tr|A0A1H3C7L4|A0A1H3C7L4_9FLAO GTP cyclohydrolase 1 OS= Flavobacterium degerlachei OX=229203 GN=folE PE=3 SV=1
MIVKEIKSYEKVERYDTEITDAIAENYKSIIDNLGEDVNREGIVSTPVRAAKAMQYLTHGYGLDPLEILKSALFTEDHRQMIVVKDIEVYSMCEHHMLPFFGKAHVAYIPNGKIVGLSKIPRIVDAFARRMQVQERLTDQIKDCIQEALNPLGVAVVIEAQHMCMQMRGIQKQNSVTTTSSFTGAFEKDKTRKEFISLISNKFS

SEQ ID NO: 8198 - protein, 223 aa, Flavobacterium endophyticum
  misc_feature (1)..(223): tr|A0A495LWE9|A0A495LWE9_9FLAO GTP cyclohydrolase 1 OS= Flavobacterium endophyticum OX=1540163 GN=folE PE=3 SV= 1
MTNNEDFLDEIGDNHIATNAKNPLRSDAFDISDDQKIELIKKDVESILKTLGMDLTDDSLKGTPNRVAKMFVKEIFGGLNPAKKPSASTFENNYKYGEMLVEKNITLYSTCEHHLLPIIGRAHVAYISNGKVVGLSKMNRIVEYFAKRPQVQERLTMQIVQELQKVLNTEDVACVIDAKHLCVNSRGIKDIESSTITSEFGGKFKNEATRREFLDYIKFDTQF

SEQ ID NO: 8199 - protein, 223 aa, Flavobacterium enshiense
  misc_feature (1)..(223): tr|V6S876|V6S876_9FLAO GTP cyclohydrolase 1 OS=Flavobac terium enshiense DK69 OX=1107311 GN=folE PE=3 SV=1
MIHNDDLNDPLGENHVGTSAQNPLRSDAFDKTDEEKIALIKKDVESILVTLGMDLTDDSLKGTPNRVAKMFVKEIFGGLHPNKKPNSSTFENHYKYGEMLVEKNITIYSTCEHHLLPIVGRAHVAYISSGTVVGLSKMNRLVDYFAKRPQVQERLTMQIVQELQKVLKTEDVACVIDAKHLCVNSRGIRDIESSTVTAEFGGKFKEEKTRREFLDYIKLDTTF

SEQ ID NO: 8200 - protein, 214 aa, Flavobacterium enshiense
  misc_feature (1)..(214): tr|V6SF46|V6SF46_9FLAO GTP cyclohydrolase 1 OS=Flavobac terium enshiense DK69 OX=1107311 GN=folE PE=3 SV=1
MNIIDIIGEEHIGTSLETPLREDAFVMSDETKIEHIQHHFKEIMHILGLDLTDDSLRGTPHRVAKMYVKEVFNGLNPANKPDVKLFENKYQYNEMLIEKDITLYSYCEHHFVPIIGKVHVAYISNGQVVGLSKINRLVNYYAKRPQVQERLTNQIANGLKEVLQSDDVAVVIDAVHLCVASRGIKDTNSSTITASYSGKFKEEKTKMEFINLIK

SEQ ID NO: 8201 - protein, 218 aa, Flavobacterium faecale
  misc_feature (1)..(218): tr|A0A2S1LAE4|A0A2S1LAE4_9FLAO GTP cyclohydrolase 1 OS= Flavobacterium faecale OX=1355330 GN=folE PE=3 SV=1
MEDLNKLHQEQIGDHHIGTSAETPLRADAFLMPDNQKIEAIAEHYHKIMEILGLDLTDDSLSGTPYRVGKMYVKELFSGLDPKNKPKISVFDNKYEYNKMLVESQITFNSSCEHHFLPIVGVAHIGYISSGKVIGLSKMNRIVDYYGRRPQVQERMTIQIFNELKAALQTDDVIVVVEAEHLCVSSRGVNDKSSKTTTLEYGGKFEDDQIRNDFFKMI

SEQ ID NO: 8202 - protein, 223 aa, Flavobacterium faecale
  misc_feature (1)..(223): tr|A0A2S1LEA9|A0A2S1LEA9_9FLAO GTP cyclohydrolase 1 OS= Flavobacterium faecale OX=1355330 GN=folE PE=3 SV=1
MIQNNELQDEIGENHIATSAQNPVRDDAFDVSDDDKIELIKKDVENILRTLGMDLTDDSIKGTPNRVAKMFVKEIFGGLNPNKKPKASTFDNNYKYGEMLVEKNITLYSTCEHHLLPIIGRAHVAYISKGSVIGLSKMNRIVEHYAKRPQVQERLTMQIVQELQIALGTEDVACVIDAKHLCVNSRGIQDIESSTVTSEFGGKFKEESTRREFLDYIKMETKF

SEQ ID NO: 8203 - protein, 223 aa, Flavobacterium flevense
  misc_feature (1)..(223): tr|A0A4Y4AZI4|A0A4Y4AZI4_9FLAO GTP cyclohydrolase 1 OS= Flavobacterium flevense OX=983 GN=folE2 PE=3 SV=1
MIQNEEMHDPIGDNHIGSSAQNPMREDAFAISDDEKIEKIKKDVENILLTLGMDLTDDSLKGTPNRVAKMFVKEIFGGLNPARKPKASTFDNNYKYGEMLVEKNIIVYSTCEHHLLPIIGRAHVAYISNGTVIGLSKMNRIVEYYSKRPQVQERLTMQIVQELQQALGTEDVACVIDAKHLCVNSRGISDIESSTVTSEFGGKFKEAQCRREFLDYIKLETKF

SEQ ID NO: 8204 - protein, 223 aa, Flavobacterium fluvii
  misc_feature (1)..(223): tr|A0A1M5J7D4|A0A1M5J7D4_9FLAO GTP cyclohydrolase 1 OS= Flavobacterium fluvii OX=468056 GN=folE PE=3 SV=1
MINNEEFHDEIGDNHISSSAKNPVRKDAFDITDDQKIEKIKKDVENILLTLGMDLTDDSLKGTPNRVAKMFVKEIFGGLNPSKKPNASTFENGYKYGEMLVEKNITVYSTCEHHLLPIIGRAHVAYISKGRVIGLSKINRIVEFYAKRPQVQERLTMQIVQELQIALGTEDVACIIDAKHLCVNSRGIKDIESSTVTSEFGGQFKNEQTRRELLDYIKLETKF

SEQ ID NO: 8205 - protein, 223 aa, Flavobacterium fontis
  misc_feature (1)..(223): tr|A0A1M5C8G8|A0A1M5C8G8_9FLAO GTP cyclohydrolase 1 OS= Flavobacterium fontis OX=1124188 GN=folE PE=3 SV=1
MISEDQLHDDIGNNHIATNASTPLRTDAFELTEDQKIELIKKDVQNILHTLGMDLSDDSLKGTPNRVAKMFVKEIFGGLNPQKKPSSSTFENKYKYNEMLVEKNITVYSTCEHHLLPIVGRAHVAYISNGKVVGLSKMNRIVDYYAKRPQVQERLTIQIVHELQQVLNTEDVACIIDAKHLCVNSRGIRDIESSTVTAEFGGKFKEEAVRREFLEYIKLDTQF

SEQ ID NO: 8206 - protein, 224 aa, Flavobacterium fontis
  misc_feature (1)..(224): tr|A0A1M5C0M4|A0A1M5C0M4_9FLAO GTP cyclohydrolase 1 OS= Flavobacterium fontis OX=1124188 GN=folE PE=3 SV=1
MNTVTEKELYEILGDDHQMTAADTPLRPDAFVKTDAEKMTVIEHHFEQIMEALGLDLTDDSLRGTPHRVAKMYVQEIFSGLHPDNKPKISVFDNSYHYDKMLVEANINFNSTCEHHFLPIIGKAHIGYVSNGKVIGLSKLNRIVDYFARRPQVQERMVMQVFNELKTVLDTEDVMVVMEAKHLCVSSRGIKDETSFTSTLQYGGIFEKKEYRDDFFRLLGEKNS

SEQ ID NO: 8207 - protein, 223 aa, Flavobacterium frigidimaris
  misc_feature (1)..(223): tr|A0A1M5IQF6|A0A1M5IQF6_FLAFR GTP cyclohydrolase 1 OS= Flavobacterium frigidimaris OX=262320 GN=folE PE=3 SV=1
MINNEDFLDEIGDNHFSSNAQNPVRQDAFDLSDEEKIEKIKKDVENILQTLGMDLTDDSIKGTPNRVAKMFVKEIFGGLNPTKKPKASTFDNNYKYGEMLVEKNITVYSTCEHHLLPIIGRAHVAYISSGRVIGLSKMNRIVEYYAKRPQVQERLTMQIVQELQIALGTEDVACVIDAKHLCVNSRGIKDIESSTVTSEFGGKFKDPQTKREFLDYIKLDTQF

SEQ ID NO: 8208 - protein, 223 aa, Flavobacterium frigoris
  misc_feature (1)..(223): tr|H7FRL6|H7FRL6_FLAFP GTP cyclohydrolase 1 OS=Flavobac terium frigoris (strain PS1) OX=1086011 GN=folE PE=3 SV =1
MKHNEEIHDEIGENHIGSCAKNPVRDDAFAISDDEKIEKIKKDVENILLTLGMDLTDDSMKGTPNRVAKMFVKEIFGGLNPEKKPKASTFDNNYKYGEMLVEKNIIVYSTCEHHLLPIIGRAHVAYISNGRVIGLSKMNRIVEYYAKRPQVQERLTMQIVQELQEALGTEDVACVIDAKHLCVNSRGISDIESSTVTSEFGGKFKDPQARREFLDYIKLETKF

SEQ ID NO: 8209 - protein, 223 aa, Flavobacterium frigoris
  misc_feature (1)..(223): tr|A0A1H9JBW0|A0A1H9JBW0_FLAFI GTP cyclohydrolase 1 OS= Flavobacterium frigoris OX=229204 GN=folE PE=3 SV=1
MKHNEEIHDEIGDNHIGSCATNPLREDAFDITDDEKIESIKKDVESILRTLGMDLTDDSIKGTPNRVAKMFVKEIFGGLNPARKPKASTFDNNYKYGEMLVEKNIIVYSTCEHHLLPIIGRAHVAYISNGRVIGLSKMNRIVEYYSKRPQVQERLTMQIVQELQNALGTKDVACVIDAKHLCVNSRGISDIESSTVTSEFGGKFKDPQARREFLDYIKLETKF

SEQ ID NO: 8210 - protein, 223 aa, Flavobacterium fryxellicola
  misc_feature (1)..(223): tr|A0A167ULP7|A0A167ULP7_9FLAO GTP cyclohydrolase 1 OS= Flavobacterium fryxellicola OX=249352 GN=folE PE=3 SV=1
MINKEEFQDEIGDNHISLSAKNPIRDDAFSISDDDKIEKIKKDVENILLTLGMDLTDDSLKGTPNRVAKMFVKEIFGGLNPAKKPKASTFDNNYKYGEMLVEKNIIVYSTCEHHLLPIIGRAHVGYISNGRVIGLSKMNRIVAYYAKRPQVQERLTMQIVQELQIALGTEDVACVIDAKHLCVNSRGISDIESSTVTSEFGGKFKDSVTRREFLDYIKLETKF

SEQ ID NO: 8211 - protein, 203 aa, Flavobacterium fryxellicola
  misc_feature (1)..(203): tr|A0A162P655|A0A162P655_9FLAO GTP cyclohydrolase 1 OS= Flavobacterium fryxellicola OX=249352 GN=folE PE=3 SV=1
MIKELKSYEKIEQYDTEVTASLADNYKTIIDNLGEDVTREGLEKTPERVAKAMQYLTHGYGLDPLEILQSAMFTEDHKQMIVVKDIEVYSMCEHHMLPFFGKAHVAYIPNGKIVGLSKIPRIVDAFARRMQVQERLTDQIKDCIQEALNPLGVAVVIEAQHMCMQMRGIQKQNSVTTTSSFTGAFEKDKTRKEFISLISNKFS

SEQ ID NO: 8212 - protein, 223 aa, Flavobacterium gillisiae
  misc_feature (1)..(223): tr|A0A1H3XV47|A0A1H3XV47_9FLAO GTP cyclohydrolase 1 OS= Flavobacterium gillisiae OX=150146 GN=folE PE=3 SV=1
MKHNEEIHDEIGDNHIGSCATNPLREDAFDITDDEKIESIKKDVESILLTLGMDLTDDSIKGTPNRVAKMFVKEIFGGLNPARKPKASTFDNNYKYGEMLVEKNIIVYSTCEHHLLPIIGRAHVAYISNGTVIGLSKMNRIVEYYSKRPQVQERLTMQIVQELQNALGTKDVACVIDAKHLCVNSRGISDIESSTVTSEFGGKFKEPQARREFLDYIKLETKF

SEQ ID NO: 8213 - protein, 204 aa, Flavobacterium gillisiae
  misc_feature (1)..(204): tr|A0A1H4FFD6|A0A1H4FFD6_9FLAO GTP cyclohydrolase 1 OS= Flavobacterium gillisiae OX=150146 GN=folE PE=3 SV=1
MIAKEMKSYEKVERYDTEMTDAIAENYKEIINNLGEDVNREGIVSTPVRAAKAMQYLTHGYGLDPLQILKSALFTEDHRQMIVVKDIEVYSMCEHHMLPFFGKAHVAYIPNGQIVGLSKIPRIVDAFARRMQVQERLTDQIKDCIQEALNPLGVAVVIEAQHMCMQMRGIQKQNSVTTTSSFTGAFEKDKTRKEFISLISNKFS

SEQ ID NO: 8214 - protein, 223 aa, Flavobacterium gilvum
  misc_feature (1)..(223): tr|A0A085EGX4|A0A085EGX4_9FLAO GTP cyclohydrolase 1 OS= Flavobacterium gilvum OX=1492737 GN=folE PE=3 SV=1
MINNEEFQDEIGNNHISTNAKNPLRNDAFAITDEEKIDKIKKDVENILLTLGMDLTDDSLKGTPNRVAKMFVKEIFGGLNPEKKPKASTFENNYKYGEMLVEKNITVYSTCEHHLLPIIGRAHVAYISSGRVIGLSKMNRIVEHYAKRPQVQERLTMQIVQELQQALETEDVACVIDAKHLCVNSRGIKDIESSTVTSEFGGKFKDPQIKREFLDYIKLDTNF

SEQ ID NO: 8215 - protein, 223 aa, Flavobacterium glaciei
  misc_feature (1)..(223): tr|A0A562PRB0|A0A562PRB0_9FLAO GTP cyclohydrolase 1 OS= Flavobacterium glaciei OX=386300 GN=folE PE=3 SV=1
MIKNEEFQDEIGDNHVSLSANNPVRHDAFNLTDEEKVEKIKKDVENILQTLGMDLTDDSLKGTPNRVAKMFVKEIFGGLNPSRKPKASTFDNNYKYGEMLVEKNIIVYSTCEHHLLPIIGRAHVAYISNGRVIGLSKMNRIVEYYAKRPQVQERLTMQIVQELQIALGTEDVACVIDAKHLCVNSRGISDIESSTVTSEFGGKFKDAVTRREFLDYIKLETKF

SEQ ID NO: 8216 - protein, 199 aa, Flavobacterium glaciei
  misc_feature (1)..(199): tr|A0A562Q5C1|A0A562Q5C1_9FLAO GTP cyclohydrolase 1 OS= Flavobacterium glaciei OX=386300 GN=folE PE=3 SV=1
MKSYEKIEQYDTEITEILADNYKVIIENLGEDVTREGLEKTPERVAKAMQYLTHGYGLDPLEILKSAMFTEDHQQMIVVKDIEVYSMCEHHMLPFFGKAHVAYIPNGKIVGLSKIPRVVDAFARRMQVQERLTDQIKNCIQDALNPLGVAVVIEAQHMCMQMRGIQKQNSVTTTSSFTGAFEKDKTRKEFISLVSNKLS

SEQ ID NO: 8217 - protein, 223 aa, Flavobacterium glycines
  misc_feature (1)..(223): tr|A0A1B9DH41|A0A1B9DH41_9FLAO GTP cyclohydrolase 1 OS= Flavobacterium glycines OX=551990 GN=folE2 PE=3 SV=1
MIQNEEMHDEIGDNHIGSSAKNPLRSDAFAITDDEKIEKIKKDVHNILETLGMDLTDDSLKGTPNRVAKMFVKEIFGGLNPSRKPKASTFENNYKYGEMLVEKNIIVYSTCEHHLLPIIGRAHVAYISNGTVIGLSKMNRIVEYYAKRPQVQERLTMQIVQELQQALGTEDVACVIDAKHLCVNSRGVSDIESSTVTSEFGGKFKEEQCRREFLDYIKLDTKF

SEQ ID NO: 8218 - protein, 203 aa, Flavobacterium glycines
  misc_feature (1)..(203): tr|A0A1B9DX04|A0A1B9DX04_9FLAO GTP cyclohydrolase 1 OS= Flavobacterium glycines OX=551990 GN=folE PE=3 SV=1
MIKEMKSYEKIEQYDTEITESLADNYRIIIDNLGEDVTREGLEKTPERIAKAIQYLTHGYGLDPLQILKSALFTEDHQQMIVVKDIEVYSMCEHHMLPFFGKAHVAYIPNGKIVGLSKIPRVVDAYARRMQVQERLTDQIKNCIQEALNPLGVAVVIEAQHMCMQMRGIQKQNSVTTTSSFTGAFEKDKTRKEFISLVANKLS

SEQ ID NO: 8219 - protein, 223 aa, Flavobacterium granuli
  misc_feature (1)..(223): tr|A0A1M5IID9|A0A1M5IID9_9FLAO GTP cyclohydrolase 1 OS= Flavobacterium granuli OX=280093 GN=folE PE=3 SV=1
MINREESHDEIGDNHIGSCAQNPLRKDAFDLSDDEKIESIKKDVKNILLTLGMDLTDDSMKGTPNRVAKMFVKEIFGGLNPDRKPKASTFDNNYKYGEMLVEKNIIVYSTCEHHLLPIIGRAHVAYISNGTVIGLSKMNRIVEYYSKRPQVQERLTMQIVQELQNALGTQDVACVIDAKHLCVNSRGISDIESSTVTSEFGGKFKEAQARREFLDYIKLETKF

SEQ ID NO: 8220 - protein, 204 aa, Flavobacterium granuli
  misc_feature (1)..(204): tr|A0A1M5J155|A0A1M5J155_9FLAO GTP cyclohydrolase 1 OS= Flavobacterium granuli OX=280093 GN=folE PE=3 SV=1
MILNKTKNYEKTEQYDSETTDILAANYRNIIENLGEDVNREGLEKTPERVAKAMQFLTHGYDLDPLEILKSALFTENHSQMIVVKDIEIYSMCEHHMLPFFGKAHVAYIPNGKIVGLSKIPRIVDAYARRMQVQERLTDQIKNCIQEALEPLGVAVVIEAQHMCMQMRGIQKQNSFTTTSSFTGAFEKNKTRKEFISLISNKLS

SEQ ID NO: 8221 - protein, 223 aa, Flavobacterium haoranii
  misc_feature (1)..(223): tr|A0A1M6JQL1|A0A1M6JQL1_9FLAO GTP cyclohydrolase 1 OS= Flavobacterium haoranii OX=683124 GN=folE PE=3 SV=1
MNHNEELNEELGHNHIATSAETPLRKDAFDKTDEEKIESIKKDVENILITLGMDLTDDSLKGTPNRVAKMFVKDIFGGLNPTKKPSSSTFENKYKYGEMLVEKNIVVYSTCEHHLLPIVGRAHVAYISNGTVVGLSKMNRIVDYYAKRPQVQERLTIQIVQELQKVLGTDDVACVIDAKHLCVNSRGIRDIESSTVTAEFGGKFKEDKVRREFLDYIKLETKF

SEQ ID NO: 8222 - protein, 228 aa, Flavobacterium haoranii
  misc_feature (1)..(228): tr|A0A1M6DE90|A0A1M6DE90_9FLAO GTP cyclohydrolase 1 OS= Flavobacterium haoranii OX=683124 GN=folE PE=3 SV=1
MTKNPNTKNLNLVQFSSDEIGDNHMFTTIETPLKKDAFLMSDDEKKEKISFHFKEIMEILGLDLTDDSLKGTPDRVAKMYVEEIFSGLKPENKPKVALFENKYQYNQMLVEKDITFYSNCEHHFVPIYGKVHVAYISNGTVIGLSKINRIVQYFAKRPQVQERLTMQIANELKSILNTEDIAVIIDAKHLCVSSRGIQDDTSATVTNYFGGAFEEQHKVDTLLKFIKN

SEQ ID NO: 8223 - protein, 223 aa, Flavobacterium hercynium
  misc_feature (1)..(223): tr|A0A226HQ75|A0A226HQ75_9FLAO GTP cyclohydrolase 1 OS= Flavobacterium hercynium OX=387094 GN=folE PE=3 SV=1
MINNEDFLDEIGDNHFSSNAKNPVREDAFDLSDEEKIEKIKKDVESILQTLGMDLTDDSIKGTPNRVAKMFVKEIFGGLNPAKQPKASTFDNNYKYGEMLVEKNITVYSTCEHHLLPIIGRAHVAYISSGRVIGLSKMNRIVEYYAKRPQVQERLTMQIVQELQKALGTEDVACVIDAKHLCVNSRGIKDIESSTVTSEFGGKFKDPQTKREFLDYIKLETQF

SEQ ID NO: 8224 - protein, 223 aa, Flavobacterium hibernum
  misc_feature (1)..(223): tr|A0A0D0ESJ3|A0A0D0ESJ3_9FLAO GTP cyclohydrolase 1 OS= Flavobacterium hibernum OX=37752 GN=folE PE=3 SV=1
MINNEDFLDEIGDSHFSNNAQNPVREDAFVLSDEEKIEKIKKDVENILQTLGMDLTDDSLKGTPNRVAKMFVKEIFGGLNPTKKPKASTFDNNYKYGEMLVEKNITLYSTCEHHLLPIIGRAHVAYISSGRVIGLSKMNRIVEYYAKRPQVQERLTMQIVQELQKALGTEDVACVIDAKHLCVNSRGIKDIESSTVTSEFGGKFKDPQTRREFLDYIKLETQF

SEQ ID NO: 8225 - protein, 223 aa, Flavobacterium hydatis
  misc_feature (1)..(223): tr|A0A086AQY4|A0A086AQY4_FLAHY GTP cyclohydrolase 1 OS= Flavobacterium hydatis OX=991 GN=folE PE=3 SV=1
MINNEEFLDEIGDNHIGSSAQNPIREDAFAITDDEKIEKIKKDVENILLTLGMDLTDDSLKGTPNRVAKMFVKEIFGGLNPVRKPKASTFDNNYKYGEMLVEKNITLYSTCEHHLLPIIGRAHVAYISNGRVIGLSKMNRIVEYYSKRPQVQERLTMQIVQELQKALGTEDVACVIDAKHLCVNSRGIKDIESSTVTSEFGGKFKDPQTRREFLDYIKLETQF

SEQ ID NO: 8226 - protein, 223 aa, Flavobacterium indicum
  misc_feature (1)..(223): tr|H8XTI1|H8XTI1_FLAIG GTP cyclohydrolase 1 OS=Flavobac terium indicum (strain DSM 17447 / CIP 109464 / GPTSA10 0-9) OX=1094466 GN=folE PE=3 SV=1
MSINNEILDEMGDNHIATNAETPLRADAFNISDEEKIESIKKDVENILTTLGMDLTDDSLKGTPNRVAKMFVKEIFGGLNPNKKPSSSTFDNKYKYGEMLVEKNIVVYSTCEHHLLPIVGRAHVAYISNGSVVGLSKMNRIVDYYAKRPQVQERLTIQIVKELQSVLNTEDVACVIDAKHLCVNSRGIRDIESSTVTSEFGGKFKDEKVRREFLDYIKLDTQF

SEQ ID NO: 8227 - protein, 228 aa, Flavobacterium indicum
  misc_feature (1)..(228): tr|H8XSB0|H8XSB0_FLAIG GTP cyclohydrolase 1 OS=Flavobac terium indicum (strain DSM 17447 / CIP 109464 / GPTSA10 0-9) OX=1094466 GN=folE PE=3 SV=1
MTKYPTVDTSKLVSFSIDEIGDNHLFTSVETPMKADAFLLSDDEKKDKIAFHFKEIMEVLGLDLTDDSLKGTPQRVAKMYIDEIFCGLNPANKPHVALFENKYQYNQMLVEKNITFYSNCEHHFVPIFGKIHVAYISKGKVIGLSKINRIVQYFAQRPQVQERLTIQIGIELQQILETEDIAVIVDAKHLCVSSRGIKDESSATVTSYYGGIFQNEQKMMELHNYLKM

SEQ ID NO: 8228 - protein, 223 aa, Flavobacterium johnsoniae
  misc_feature (1)..(223): sp|A5FHM7|GCH1_FLAJ1 GTP cyclohydrolase 1 OS=Flavobacte rium johnsoniae (strain ATCC 17061 / DSM 2064 / UW101) OX=376686 GN=folE PE=3 SV=1
MINNEDFLDEIGDSHFSSNAKNPLREDAFDITDEEKIEKIKKDVENILQTLGMDLTDDSIKGTPNRVAKMFVKEIFGGLNPAKQPKASTFDNNYKYGEMLVEKNITVYSTCEHHLLPIIGRAHVAYISSGRVIGLSKMNRIVEYYAKRPQVQERLTMQIVQELQKALGTEDVACVIDAKHLCVNSRGIKDIESSTVTSEFGGKFKDPQTKREFLDYIKLDTQF

SEQ ID NO: 8229 - protein, 223 aa, Flavobacterium johnsoniae
  misc_feature (1)..(223): tr|A0A4R1IRF0|A0A4R1IRF0_FLAJO GTP cyclohydrolase 1 OS= Flavobacterium johnsoniae OX=986 GN=folE PE=3 SV=1
MINNEDFLDEIGDSHFSSNAKNPLRADAFDITDEEKIEKIKKDVESILQTLGMDLTDDSIKGTPNRVAKMFVKEIFGGLNPAKQPKASTFDNNYKYGEMLVEKNITVYSTCEHHLLPIIGRAHVAYISSGRVIGLSKMNRIVEYYAKRPQVQERLTMQIVQELQKALGTEDVACVIDAKHLCVNSRGIKDIESSTVTSEFGGKFKDPQTKREFLDYIKLDTQF

SEQ ID NO: 8230 - protein, 223 aa, Flavobacterium kingsejongi
  misc_feature (1)..(223): tr|A0A2S1LT17|A0A2S1LT17_9FLAO GTP cyclohydrolase 1 OS= Flavobacterium kingsejongi OX=1678728 GN=folE PE=3 SV=1
MIHNEDFSDEIGDNHIATNAVNPLRKDAFDISDDQKIERIKKDVENILNTLGMDLTDDSMKGTPNRVAKMFVKEIFGGLNPAKKPSASTFDNNYKYGEMLVEKNITLYSTCEHHLLPIIGRAHIGYISNGTVVGLSKMNRIVDYFAKRPQVQERLTMQIVQELQKVLGTDSVACVIDAKHLCVNSRGIRDIESSTVTSEFGGKFKEEQTRREFLNYIQLDTKF

SEQ ID NO: 8231 - protein, 223 aa, Flavobacterium lacus
  misc_feature (1)..(223): tr|A0A328WJC4|A0A328WJC4_9FLAO GTP cyclohydrolase 1 OS= Flavobacterium lacus OX=1353778 GN=folE PE=3 SV=1
MNNNDTFSDDLGDNHIGTSVENPVRKDAFELTDDQKIELIKKDVTNILTTLGMDLTDDSMKGTPNRVAKMFVKEIFGGLNPSKKPSSSTFENGYKYGEMLVEKNITLYSTCEHHLLPIVGRAHVAYISSGKVIGLSKMNRIVDYFAKRPQVQERLTMQIVQELQKALNTEDVACVIDAKHLCVNSRGIRDIESSTVTSEFGGKFKEDKVRREFLDYIKLETKF

SEQ ID NO: 8232 - protein, 223 aa, Flavobacterium lacus
  misc_feature (1)..(223): tr|A0A328WQ95|A0A328WQ95_9FLAO GTP cyclohydrolase 1 OS= Flavobacterium lacus OX=1353778 GN=folE PE=3 SV=1
MNNQIEKELFELLGDEHQMTSAETPLRPDAFDKSDKDKMATIEKHFHIIMEEMGLDMTDDSLRGTPHRVAKMFIQEIFSGLNPANKPKISVFENSYHYDKMLVEANISFNSTCEHHFLPIIGKAHIAYVSNGKVIGLSKLNRIVDYYARRPQVQERMIMQIFNELKTVLNTEDVIVVVEAEHLCVSSRGIKDSSSYTSTIQYGGIFKEKENRNDFFNLLKKEK

SEQ ID NO: 8233 - protein, 223 aa, Flavobacterium limicola
  misc_feature (1)..(223): tr|A0A495S6W4|A0A495S6W4_9FLAO GTP cyclohydrolase 1 OS= Flavobacterium limicola OX=180441 GN=folE PE=3 SV=1
MIKNEEFQDEIGDNHVSLSAKNPVRDDAFDISDDDKIEKIKKDVESILITLGMDLTDDSLKGTPNRVAKMFVKEIFGGLNPAKKPKASTFDNNYKYGEMLVEKNIIVYSTCEHHLLPIIGRAHVAYISNGTVIGLSKMNRIVEYYAKRPQVQERLTMQIVQELQIALGTEDVACVIDAKHLCVNSRGISDIESSTVTSEFGGKFKDAVTRREFLDYIKLETKF

SEQ ID NO: 8234 - protein, 199 aa, Flavobacterium limicola
  misc_feature (1)..(199): tr|A0A495RS18|A0A495RS18_9FLAO GTP cyclohydrolase 1 OS= Flavobacterium limicola OX=180441 GN=folE PE=3 SV=1
MKSYEKIEQYDTEITEALADNYKVIIENLGEDVTREGLEKTPERVAKAMQYLTHGYGLDPLEILKSAMFTEDHQQMIVVKDIEVYSMCEHHMLPFFGKAHVAYIPNGKIVGLSKIPRVVDAFARRMQVQERLTDQIKNCIQDALNPLGVAVVIEAQHMCMQMRGIQKQNSVTTTSSFTGAFEKDKTRKEFISLVSNKLS

SEQ ID NO: 8235 - protein, 223 aa, Flavobacterium limnosediminis
  misc_feature (1)..(223): tr|V6SHC5|V6SHC5_9FLAO GTP cyclohydrolase 1 OS=Flavobac terium limnosediminis JC2902 OX=1341181 GN=folE PE=3 SV =1
MIHNDDLNDQLGENHIGTSARTPLRSDAFDKSDDEKIALIKKDVESILTTLGLDLTDDSLKGTPNRVAKMFVKEIFGGLHPHKKPSSSTFDNKYKYGEMLVEKNITIYSTCEHHLLPIVGRAHVAYISNGTVVGLSKMNRIVDYFAKRPQVQERLTIQIVQELQKVLNTDDVACVIDAKHLCVNSRGIRDIESSTVTAEFGGKFKEDKVRREFLDYIKLDTTF

SEQ ID NO: 8236 - protein, 223 aa, Flavobacterium lindanitolerans
  misc_feature (1)..(223): tr|A0A497TVC9|A0A497TVC9_9FLAO GTP cyclohydrolase 1 OS= Flavobacterium lindanitolerans OX=428988 GN=folE PE=3 S V=1
MTNNEDFLDEIGDNHIATNAKNPLRSDAFDITDDQKIELIKKDVENILLTLGMDLTDDSLKGTPNRVAKMFVKEIFGGLNPAKKPNASTFINNYKYGEMLVEKNITVYSTCEHHLLPIIGRAHVAYISNGKVVGLSKMNRIVEYFAKRPQVQERLTMQIVQELQKVLNTEDVACVIDAKHLCVNSRGIKDIESSTVTSEFGGKFKNEATRREFLDYIKFDTQF

SEQ ID NO: 8237 - protein, 223 aa, Flavobacterium macacae
  misc_feature (1)..(223): tr|A0A3P3W4H4|A0A3P3W4H4_9FLAO GTP cyclohydrolase 1 OS= Flavobacterium macacae OX=2488993 GN=folE PE=3 SV=1
MVNKEEFLDEIGDNHIATTAQNPVRSDAFEIGDDEKIELIKKDVENILLTLGMDLTDDSMKGTPNRVAKMFVKELFGGLNPGKKPNASTFENNYKYGEMLVEKNITLYSTCEHHLLPIIGRAHVAYISNGRVVGLSKMNRIVEYFAKRPQVQERLTMQIVQELQQVLNTQDVACVIDAKHLCVNSRGIKDIESSTVTSEFGGKFKEEATRREFLDYIKFDTKF

SEQ ID NO: 8238 - protein, 223 aa, Flavobacterium magnum
  misc_feature (1)..(223): tr|A0A2S0RH01|A0A2S0RH01_9FLAO GTP cyclohydrolase 1 OS= Flavobacterium magnum OX=2162713 GN=folE PE=3 SV=1
MSKTDDSHDEIGNNHIATSAVNPIRTDAFDLSDDQKIESIKKDVERILTTLGMDLTDDSLKGTPNRVAKMFVKEIFGGLNPVKKPGASTFKNHYKYGEMLVEKNITLYSTCEHHLLPIIGRAHIAYISNGTVVGLSKMNRIVDYYAKRPQVQERLTMQIVQELQKVLNTEDVACVIDAKHLCVNSRGIRDIESSTITSEFCGKFKEAHVRREFLDYIKLDTKF

SEQ ID NO: 8239 - protein, 199 aa, Flavobacterium magnum
  misc_feature (1)..(199): tr|A0A2S0RI64|A0A2S0RI64_9FLAO GTP cyclohydrolase 1 OS= Flavobacterium magnum OX=2162713 GN=folE PE=3 SV=1
MSNYRKIEQYDEEKTVQLAVHLKGVLSILGEDVTREGLEKTPERAGKAYQFLTQGYEIDPLEILKAALFAEDHKQMVVVKNIEVYSMCEHHLLPFFGKVHVAYIPNGKIVGLSKIPRVVEAFARRLQVQERLTDQIKDCIQAALDPLGVAVVMECQHMCMQMRGIQKQNSVTTTSSFNGAFEKDKTRKEFISLISNRLH

SEQ ID NO: 8240 - protein, 223 aa, Flavobacterium marinum
  misc_feature (1)..(223): tr|A0A1H6MG72|A0A1H6MG72_9FLAO GTP cyclohydrolase 1 OS= Flavobacterium marinum OX=1159016 GN=folE PE=3 SV=1
MCKSDALHDEIGNNHIGTSDYTPLKANAFDISDDEKIELIKKDVENILNTLGMDLTDDSLKGTPNRVAKMFVKEIFGGLNPAKKPSSSTFDNKYKYGEMLVEKNIVVYSTCEHHLLPIVGRAHVAYISNGKVVGLSKMNRIVDYYAKRPQVQERLTIQIVEELKRVLNTQDVACVIDAKHLCVNSRGIRDIESSTVTAEYSGAFKNENTRKEFLNYIQLETKF

SEQ ID NO: 8241 - protein, 223 aa, Flavobacterium micromati
  misc_feature (1)..(223): tr|A0A1M5P6L8|A0A1M5P6L8_9FLAO GTP cyclohydrolase 1 OS= Flavobacterium micromati OX=229205 GN=folE PE=3 SV=1
MIKKEEFQDEIGDNHFSLSAKNPIRDDAFAISDDEKIEKIKKDVENILLTLGMDLTDDSLKGTPNRVAKMFVKEIFGGLNPNKKPKASTFDNNYKYGEMLVEKNIIVYSTCEHHLLPIIGRAHVAYISNGRVIGLSKMNRIVEYYAKRPQVQERLTMQIVQELQIALGTEDVACVIDAKHLCVNSRGISDIESSTVTSEFGGKFKDPQSRREFLDYIKMETKF

SEQ ID NO: 8242 - protein, 217 aa, Flavobacterium micromati
  misc_feature (1)..(217): tr|A0A1M5KQF5|A0A1M5KQF5_9FLAO GTP cyclohydrolase 1 OS= Flavobacterium micromati OX=229205 GN=folE PE=3 SV=1
MNNINEKYDAVGDNHIGTSAETPLRADAFDKSDDQKIEEISFHFKKIMEVLGLDLTDDSLSGTPHRVGKMYVKEIFSGLDPKNKAKMSIFDNKYEYSKMLIESDITFNSSCEHHFLPIVGKAHIAYISSGKVIGLSKLNRIVQYYGRRPQVQERMTMQIFNELKNALQTDDVIVVVEAEHLCVSSRGVNDKSSKTTTIEYGGKFTDKDTQNNFFKML

SEQ ID NO: 8243 - protein, 223 aa, Flavobacterium nitrogenifigens
  misc_feature (1)..(223): tr|A0A521AKL6|A0A521AKL6_9FLAO GTP cyclohydrolase 1 OS= Flavobacterium nitrogenifigens OX=1617283 GN=folE PE=3 SV=1
MINNEEFLDEIGDNHFSSNAKNPLRADAFDITDEEKIEKIKKDVENILQTLGMDLTDDSIKGTPNRVAKMFVKEIFGGLNPAKQPKASTFDNNYKYGEMLVEKNITVYSTCEHHLLPIIGRAHVAYISSGRVIGLSKMNRIVEYYAKRPQVQERLTMQIVQELQKALGTEDVACVIDAKHLCVNSRGIKDIESSTVTSEFGGKFKDAQTKREFLDYIKLDTQF

SEQ ID NO: 8244 - protein, 223 aa, Flavobacterium noncentrifugens
  misc_feature (1)..(223): tr|A0A1G9BN69|A0A1G9BN69_9FLAO GTP cyclohydrolase 1 OS= Flavobacterium noncentrifugens OX=1128970 GN=folE PE=3 SV=1
MTTNEDFHDEIGDDHISSNATNPLRDDAFDIPDDQKIELIKKDVESILRTLGMDLTDDSIKGTPNRVAKMFVKEIFGGLNPAKKPSSSTFDNNYKYGEMLVEKNIVVYSTCEHHLLPIIGRAHVGYISNGKVIGLSKMNRVVDYFSKRPQVQERLTMQIVQELQRALGTQDVACVIDAKHLCVNSRGIRDIESSTVTSEFGGKFKDEKTRREFLDYIKLETKF

SEQ ID NO: 8245 - protein, 203 aa, Flavobacterium omnivorum
  misc_feature (1)..(203): tr|A0A1G7X687|A0A1G7X687_9FLAO GTP cyclohydrolase 1 OS= Flavobacterium omnivorum OX=178355 GN=folE PE=3 SV=1
MIKELKSYEKIEQYDAEITASLADNYKTIIYNLGEDVTREGLEKTPERVAKAMQYLTHGYGLDPLEILQSAMFTEDHKQMIVVKDIEVYSMCEHHMLPFFGKAHVAYIPNGKIVGLSKIPRIVDAFARRMQVQERLTDQIKDCIQEALNPLGVAVVIEAQHMCMQMRGIQKQNSVTTTSSFTGAFEKDKTRKEFISLISNKFS

SEQ ID NO: 8246 - protein, 223 aa, Flavobacterium omnivorum
  misc_feature (1)..(223): tr|A0A1G8BMA8|A0A1G8BMA8_9FLAO GTP cyclohydrolase 1 OS= Flavobacterium omnivorum OX=178355 GN=folE PE=3 SV=1
MINKEEFQDEIGDNHISLSAKNPIRDDAFTISDDDKIEKIKKDVENILLTLGMDLTDDSLKGTPNRVAKMFVKEIFGGLNPAKKPKASTFDNNYKYGEMLVEKNIIVYSTCEHHLLPIIGRAHVGYISNGRVIGLSKMNRIVEYYAKRPQVQERLTMQIVQELQIALGTEDVACVIDAKHLCVNSRGISDIESSTVTSEFGGKFKDSVTRREFLDYIKLETKF

SEQ ID NO: 8247 - protein, 223 aa, Flavobacterium oncorhynchi
  misc_feature (1)..(223): tr|A0A226HWT9|A0A226HWT9_9FLAO GTP cyclohydrolase 1 OS= Flavobacterium oncorhynchi OX=728056 GN=folE PE=3 SV=1
MINNEDFLDEIGDSHFSSNAKNPLREDAFDLSDDEKIEKIKKDVENILQTLGMDLTDDSIKGTPNRVAKMFVKEIFGGLNPSKQPKASTFDNNYKYGEMLVEKNITVYSTCEHHLLPIIGRAHVAYISNGRVIGLSKMNRIVEYYAKRPQVQERLTMQIVQELQKALGTEDVACVIDAKHLCVNSRGIKDIESSTVTSEFGGKFKDPQTKREFLDYIKLETQF

SEQ ID NO: 8248 - protein, 223 aa, Flavobacterium pallidum
  misc_feature (1)..(223): tr|A0A2S1SKT8|A0A2S1SKT8_9FLAO GTP cyclohydrolase 1 OS= Flavobacterium pallidum OX=2172098 GN=folE PE=3 SV=1
MSRTEDSHDEIGNNHIATSATNPVRKDAFDLTDDQKIEAIKKDVESILLTLGIDLTDDSLKGTPNRVAKMFVKEVFGGLNPNKKPGASTFQNHYKYGEMLVEKNITLYSTCEHHLLPIIGRAHIAYISKGTVVGLSKMNRIVDYFAKRPQVQERLTMQIVQELQKVLNTEDVACVIDAKHLCVNSRGIRDIESSTVTSEFGGKFKEAQARREFLDYIKLDTKF

SEQ ID NO: 8249 - protein, 199 aa, Flavobacterium pallidum
  misc_feature (1)..(199): tr|A0A2S1SK62|A0A2S1SK62_9FLAO GTP cyclohydrolase 1 OS= Flavobacterium pallidum OX=2172098 GN=folE PE=3 SV=1
MSGYKKVDQYDEKATEELAGNVKSVLEILGEDINREGLQKTPERAAKAYQFLTQGYDVNPLEILKAALFEEDHKQMVVVKNIEVYSMCEHHLLPFFGKVHVAYIPNGKIVGLSKIPRIVEAFARRFQVQERLTDQIKECIQTALEPHGVAVVMECQHMCMQMRGIQKQNSVTTTSSFNGAFEEDRTRKEFISLISNKLN

SEQ ID NO: 8250 - protein, 223 aa, Flavobacterium pectinovorum
  misc_feature (1)..(223): tr|A0A1M6ZJB7|A0A1M6ZJB7_9FLAO GTP cyclohydrolase 1 OS= Flavobacterium pectinovorum OX=29533 GN=folE PE=3 SV=1
MTNNEDFLDEIGDNHFSSNAKNPVRQDAFDLTDDEKIEKIKKDVENILQTLGMDLTDDSIKGTPNRVAKMFVKEIFGGLNPAKQPKASTFDNNYKYGEMLVEKNITVYSTCEHHLLPIIGRAHVAYISSGRVIGLSKMNRIVEYYAKRPQVQERLTMQIVQELQKALGTEDVACVIDAKHLCVNSRGIKDIESSTVTSEFGGKFKDPQTKREFLDYIKLETQF

SEQ ID NO: 8251 - protein, 223 aa, Flavobacterium pectinovorum
  misc_feature (1)..(223): tr|A0A502EVU4|A0A502EVU4_9FLAO GTP cyclohydrolase 1 OS= Flavobacterium pectinovorum OX=29533 GN=folE PE=3 SV=1
MINNEDFLDEIGDNHFSSNAKNPVRPDAFDLSDDEKIERIKKDVENILQTLGMDLTDDSIKGTPNRVAKMFVKEIFGGLNPSKQPKASTFDNNYKYGEMLVEKNITVYSTCEHHLLPIIGRAHVAYISSGRVIGLSKMNRIVEYYAKRPQVQERLTMQIVQELQKALGTEDVACIIDAKHLCVNSRGIKDIESSTVTSEFGGKFKDPQTKRELLDYIKLDTQF

SEQ ID NO: 8252 - protein, 223 aa, Flavobacterium phragmitis; identical to SEQ ID NO: 8185
  misc_feature (1)..(223): tr|A0A1I1TWA7|A0A1I1TWA7_9FLAO GTP cyclohydrolase 1 OS= Flavobacterium phragmitis OX=739143 GN=folE PE=3 SV=1

SEQ ID NO: 8253 - protein, 223 aa, Flavobacterium psychrolimnae
  misc_feature (1)..(223): tr|A0A366B488|A0A366B488_9FLAO GTP cyclohydrolase 1 OS= Flavobacterium psychrolimnae OX=249351 GN=folE PE=3 SV= 1
MIKNEEFQDEIGDNHISLSAKNPVRDDAFDISDDEKIEKIKKDVESILITLGMDLTDDSLKGTPNRVAKMFVKEIFGGLNPAKKPKASTFDNNYKYGEMLVEKNIIVYSTCEHHLLPIIGRAHVAYISNGTVIGLSKMNRIVEYYAKRPQVQERLTMQIVQELQIALGTEDVACVIDAKHLCVNSRGISDIESSTVTSEFGGKFRDAVTRREFLDYIKLETKF

SEQ ID NO: 8254 - protein, 199 aa, Flavobacterium psychrolimnae
  misc_feature (1)..(199): tr|A0A366B768|A0A366B768_9FLAO GTP cyclohydrolase 1 OS= Flavobacterium psychrolimnae OX=249351 GN=folE PE=3 SV= 1
MKSYEKIEQYDTEITDALADNYKVIIENLGEDVTREGLEKTPERVAKAMQYLTHGYGLDPLEILKSAMFTEDHQQMIVVKDIEVYSMCEHHMLPFFGKAHVAYIPNGKIVGLSKIPRVVDAFARRMQVQERLTDQIKNCIQDALNPLGVAVVIEAQHMCMQMRGIQKQNSVTTTSSFTGAFEKDKTRKEFISLVSNKLS

SEQ ID NO: 8255 - protein, 223 aa, Flavobacterium psychrophilum
  misc_feature (1)..(223): tr|A0A076P3C2|A0A076P3C2_FLAPS GTP cyclohydrolase 1 OS= Flavobacterium psychrophilum OX=96345 GN=folE PE=3 SV=1
MSILTDKEITEILGDNHQMTSANSPIRSDAFVKTDDQKMQNIEKHFYDIMQELGLDMTDDSLQGTPHRVAKMFIQEIFSGLDPKNKPTISTFDNEYHYDKMLVEANISFNSTCEHHFLPIFGKAHIGYISSGKVIGLSKLNRIVDYFSRRPQVQERLIMQIFNDLKIALNTENVIVVMEAKHLCVSSRGIKHESSFTSTIQYGGIFNEKENRNDFFNMINSEK

SEQ ID NO: 8256 - protein, 223 aa, Flavobacterium psychrophilum
  misc_feature (1)..(223): tr|A6GX79|A6GX79_FLAPJ GTP cyclohydrolase 1 OS=Flavobac terium psychrophilum (strain JIP02/86 / ATCC 49511) OX= 402612 GN=folE2 PE=3 SV=1
MAHNDDFQDEIGNNHIATNAKNPVREDAFLLTDDQKIDSIKKDVENILQTLGMDLTDDSLSGTPNRVAKMFVKEIFGGLNPERKPKPSTFDNNYKYGEMLVEKNIVVYSTCEHHLLPIIGRAHVAYISKGTVIGLSKMNRIVEYYSKRPQVQERLTMQIVQELQIALGTDDVACVIDAKHLCVNSRGIKDIESSTVTSEFGGKFKNLDTKREFLDYIKLETKF

SEQ ID NO: 8257 - protein, 223 aa, Flavobacterium reichenbachii
  misc_feature (1)..(223): tr|A0A085ZNY5|A0A085ZNY5_9FLAO GTP cyclohydrolase 1 OS= Flavobacterium reichenbachii OX=362418 GN=folE PE=3 SV= 1
MINNEEFLDEIGDNHFSSNAQNPVRQDAFDLSDDEKIERIKKDVENILQTLGMDLTDDSIKGTPNRVAKMFVKEIFGGLNPSKQPKASTFDNNYKYGEMLVEKNITVYSTCEHHLLPIIGRAHVAYISSGRVIGLSKMNRIVEYYAKRPQVQERLTMQIVQELQKALGTEDVACVIDAKHLCVNSRGIKDIESSTVTSEFGGKFKDPQTKREFLDYIKLDTQF

SEQ ID NO: 8258 - protein, 223 aa, Flavobacterium resistens
  misc_feature (1)..(223): tr|A0A521BJC3|A0A521BJC3_9FLAO GTP cyclohydrolase 1 OS= Flavobacterium resistens OX=443612 GN=folE PE=3 SV=1
MINNEDFLDEIGDSHFSSNAKNPLRADAFDITDEEKIEKIKKDVENILQTLGMDLTDDSIKGTPNRVAKMFVKEIFGGLNPSKQPKASTFDNNYKYGEMLVEKNITVYSTCEHHLLPIIGRAHVAYISSGRVIGLSKMNRIVEYYAKRPQVQERLTMQIVQELQKALGTEDVACVIDAKHLCVNSRGIKDIESSTVTSEFGGKFKDAQTKREFLDYIKLDTQF

SEQ ID NO: 8259 - protein, 223 aa, Flavobacterium rivuli
  misc_feature (1)..(223): tr|A0A0A2M010|A0A0A2M010_9FLAO GTP cyclohydrolase 1 OS= Flavobacterium rivuli WB 3.3-2 = DSM 21788 OX=1121895 G N=folE PE=3 SV=1
MIHNDDSLDEIGESHIGTSAQTPLRSDAFAIDDDQKIALIKKDVENILLTLGMDLTDDSLKGTPNRVAKMFVKEIFGGLNPAKKPSSSTFDNKYKYGEMLVEKNITVYSTCEHHLLPIVGRAHVAYISNGTVVGLSKMNRIVDYFSKRPQVQERLTIQIVDELKKVLGTDDVACVIDAKHLCVNSRGIRDIESSTVTSEFGGKFKNETVRREFLDYIKLDTQF

SEQ ID NO: 8260 - protein, 223 aa, Flavobacterium saccharophilum; identical to SEQ ID NO: 8162
  misc_feature (1)..(223): tr|A0A1M7M2E5|A0A1M7M2E5_9FLAO GTP cyclohydrolase 1 OS= Flavobacterium saccharophilum OX=29534 GN=folE PE=3 SV= 1

SEQ ID NO: 8261 - protein, 223 aa, Flavobacterium saliperosum
  misc_feature (1)..(223): tr|A0A1G4W0M7|A0A1G4W0M7_9FLAO GTP cyclohydrolase 1 OS= Flavobacterium saliperosum OX=329186 GN=folE PE=3 SV=1
MENQTEKELFEIIGDDHQMTSIETPLRPDAFLKSDEEKMVVIEQHFKAIMEALGLDLTDDSLMGTPHRVAKMYVQEIFSGLHPDNRPKMSVFDNSYNYDKMLVEANIHFNSTCEHHFLPIIGKAHIAYVSGGKVIGLSKLNRIVDYFARRPQVQERMTIQIYNELCEVLHTEDVIVVLEASHLCVSSRGIKDISSYTTTLQYGGVFEEKEMRNDFFNLLKKEQ

SEQ ID NO: 8262 - protein, 223 aa, Flavobacterium saliperosum
  misc_feature (1)..(223): tr|A0A1G4VUE2|A0A1G4VUE2_9FLAO GTP cyclohydrolase 1 OS= Flavobacterium saliperosum OX=329186 GN=folE PE=3 SV=1
MIHNDDLNDPLGENHVGTNAQTPLRSNAFDITDDEKISLIKKDVENILNTLGLDLTDDSLKGTPNRVAKMFVKEIFGGLHPNKKPSSSTFENKYKYGEMLVEKNITVYSTCEHHLLPIVGRAHVAYISNGTVVGLSKMNRIVDYFAKRPQVQERLTIQIVQELQRVLNTDDVACVIDAKHLCVNSRGIRDIESSTVTAEFGGKFKEDKVRREFLDYIKLDTTF

SEQ ID NO: 8263 - protein, 224 aa, Flavobacterium sediminis
  misc_feature (1)..(224): tr|A0A2U8QRY6|A0A2U8QRY6_9FLAO GTP cyclohydrolase 1 OS= Flavobacterium sediminis OX=2201181 GN=folE PE=3 SV=1
MIQNEDLQDEIGNNHIATSAQTPLREDAFDLSDDQKIELIKKDVENILHTLGMDLTDDSLKGTPNRVAKMFVREIFSGLNPNKKPSSSTFENKYKYGEMLVEKNIVVYSTCEHHLLPIVGRAHVAYISNGTVVGLSKMNRIVDYFAKRPQVQERLTIQIVQELQKVLNTEDVACVIDAKHLCVNSRGIRDIESSTVTAEFGGQFKDKNVRKEFLDYIKLETKFH

SEQ ID NO: 8264 - protein, 203 aa, Flavobacterium segetis
  misc_feature (1)..(203): tr|A0A1M5EFC3|A0A1M5EFC3_9FLAO GTP cyclohydrolase 1 OS= Flavobacterium segetis OX=271157 GN=folE PE=3 SV=1
MIKEMKSYEKIEQYDPEITEALAGNYKIIIDGLGEDVTREGLEKTPERVAKAMQYLTHGYGLDPLEILKSAMFTEDHRQMIVVKDIEVYSMCEHHMLPFFGKAHVAYIPNGKIVGLSKIPRVVDAFARRMQVQERLTDQIKDCIQEALNPLGVAVVIEAQHMCMQMRGIQKQNSVTTTSSFTGAFEKNKTRKEFISLLSNKLS

SEQ ID NO: 8265 - protein, 223 aa, Flavobacterium segetis
  misc_feature (1)..(223): tr|A0A1M5GNY6|A0A1M5GNY6_9FLAO GTP cyclohydrolase 1 OS= Flavobacterium segetis OX=271157 GN=folE PE=3 SV=1
MINKEEFQDEIGDNHVSLSAKNPLRDDAFDISDEEKIEKIKKDFESILQTLGMDLTDDSLKGTPNRVAKMFVKEIFAGLNPKNKPKASTFENNYKYGEMLVEKNIIVYSTCEHHLLPIIGRAHVAYISNGRVIGLSKMNRIVQYYSKRPQVQERLTMQIVQELQIALGTDDVACVIDAKHLCVNSRGISDIESSTVTSEFGGKFKDPQARLEFLDYIKMDTKF

SEQ ID NO: 8266 - protein, 223 aa, Flavobacterium seoulense
  misc_feature (1)..(223): tr|A0A066WZB1|A0A066WZB1_9FLAO GTP cyclohydrolase 1 OS= Flavobacterium seoulense OX=1492738 GN=folE PE=3 SV=1
MIHNEDLHDEIGDNHIGSSAKNPLRDDAFAISDDEKIEKIKKDVENILLTLGMDLTDDSLKGTPNRVAKMFVKEIFGGLNPVKKPKASTFDNNYKYGEMLVEKNIIVYSTCEHHLLPIIGRAHVAYISNGTVIGLSKMNRIVEYYSKRPQVQERLTMQIVQELQKALGTEDVACVIDAKHLCVNSRGISDIESSTVTSEFGGKFKEDKVRREFLDYIKLETKF

SEQ ID NO: 8267 - protein, 223 aa, Flavobacterium sinopsychrotolerans
  misc_feature (1)..(223): tr|A0A1H8HJV3|A0A1H8HJV3_9FLAO GTP cyclohydrolase 1 OS= Flavobacterium sinopsychrotolerans OX=604089 GN=folE PE =3 SV=1
MIKNEEFQDEIGDNHISLSAKNPVRDDAFDISEDEKIEKIKKDVESILITLGMDLTDDSLKGTPNRVAKMFVKEIFGGLNPAKKPKASTFDNNYKYGEMLVEKNIIVYSTCEHHLLPIIGRAHVAYISSGTVIGLSKMNRIVEYYAKRPQVQERLTMQIVQELQIALGTEDVACVIDAKHLCVNSRGISDIESSTVTSEFGGKFKDSVTRREFLDYIKLETKF

SEQ ID NO: 8268 - protein, 203 aa, Flavobacterium sinopsychrotolerans
  misc_feature (1)..(203): tr|A0A1H8NMZ1|A0A1H8NMZ1_9FLAO GTP cyclohydrolase 1 OS= Flavobacterium sinopsychrotolerans OX=604089 GN=folE PE =3 SV=1
MIKEMKSYEKIEQYDTEITEALADNYKVIIENLGEDVTREGLEKTPERVAKAMQYLTHGYGLDPLEILKSAMFTEDHQQMIVVKDIEVYSMCEHHMLPFFGKAHVAYIPNGKIVGLSKIPRVVDAFARRMQVQERLTDQIKNCIQDALNPLGVAVVIEAQHMCMQMRGIQKQNSVTTTSSFTGAFEKDKTRKEFISLVSNKLS

SEQ ID NO: 8269 - protein, 223 aa, Flavobacterium sp.
  misc_feature (1)..(223): tr|A0A344LSY0|A0A344LSY0_9FLAO GTP cyclohydrolase 1 OS= Flavobacterium sp. HYN0086 OX=2249356 GN=folE PE=3 SV=1
MINNEDFLDEIGDSHFSSNAKNPLREDAFDLTDDEKIEKIKKDVENILQTLGMDLTDDSIKGTPNRVAKMFVKEIFGGLNPAKQPKASTFDNNYKYGEMLVEKNITVYSTCEHHLLPIIGRAHVAYISSGRVIGLSKMNRIVEYYAKRPQVQERLTMQIVQELQKALGTEDVACVIDAKHLCVNSRGIKDIESSTVTSEFGGKFKDPQTKREFLDYIKLETQF

SEQ ID NO: 8270 - protein, 223 aa, Flavobacterium sp.
  misc_feature (1)..(223): tr|A0A244D3I7|A0A244D3I7_9FLAO GTP cyclohydrolase 1 OS= Flavobacterium sp. AJR OX=1979369 GN=folE PE=3 SV=1
MINNEDFLDEIGDNHIGSSAQNPIREDAFAITDDEKIEKIKKDVENILLTLGMDLTDDSLKGTPNRVAKMFVKEIFGGLNPIRKPKASTFDNNYKYGEMLVEKNITLYSTCEHHLLPIIGRAHVAYISNGRVIGLSKMNRIVEYYSKRPQVQERLTMQIVQELQKALGTEDVACVIDAKHLCVNSRGIKDIESSTVTSEFGGKFKDPQTRREFLDYIKLETQF

SEQ ID NO: 8271 - protein, 223 aa, Flavobacterium spartansii
  misc_feature (1)..(223): tr|A0A1S1J968|A0A1S1J968_9FLAO GTP cyclohydrolase 1 OS= Flavobacterium spartansii OX=1278819 GN=folE PE=3 SV=1
MINNEDFLDEIGDNHFSSNAKNPLRPDAFDLSDDEKIEKIKKDVENILQTLGMDLTDDSIKGTPNRVAKMFVKEIFGGLNPSKQPKASTFDNNYKYGEMLVEKNITVYSTCEHHLLPIIGRAHVAYISNGRVIGLSKMNRIVEYYAKRPQVQERLTMQIVQELQKALGTEDVACVIDAKHLCVNSRGIKDIESSTVTSEFGGRFKDPQIKRELLDYIKLDTQF

SEQ ID NO: 8272 - protein, 223 aa, Flavobacterium subsaxonicum
  misc_feature (1)..(223): tr|A0A0A2MWK2|A0A0A2MWK2_9FLAO GTP cyclohydrolase 1 OS= Flavobacterium subsaxonicum WB 4.1-42 = DSM 21790 OX=11 21898 GN=folE PE=3 SV=1
MIHSDDNRDEIGENHIATSAKTPLREDAFEKSDDDKIASIKKDVENILLTLGMDLTDDSLKGTPNRVAKMFVKEIFGGLNPAKKPSSSTFDNKYKYGEMLVEKNITVYSTCEHHLLPIVGRAHVAYISNGTVVGLSKMNRIVDYFAKRPQVQERLTIQIVQELKNVLGTEDVACVIDAKHLCVNSRGIRDIESSTVTSEFGGKFKNENVRREFLDYIKLDTQF

SEQ ID NO: 8273 - protein, 222 aa, Flavobacterium succinicans
  misc_feature (1)..(222): tr|A0A1I4UDD0|A0A1I4UDD0_9FLAO GTP cyclohydrolase 1 OS= Flavobacterium succinicans OX=29536 GN=folE PE=3 SV=1
MNTVLDRELIEILGDNHQATSADTPLRADAFVKSDAQKMERIEHHFHAIMEEMGLDMTDDSLSGTPFRVAKMYIQEIFSGLDPKNKPKISVFENTYHYDKMLVEANINFNSTCEHHFLPIVGKAHIGYVSSGKVIGLSKLNRIVDYYSRRPQVQERLIMQIFNELKTVLETDNVIIVMEAKHLCVSSRGIKDETSFTSTIQYGGIFNEKENRNDFFNMIKQE

SEQ ID NO: 8274 - protein, 223 aa, Flavobacterium succinicans
  misc_feature (1)..(223): tr|A0A1I4TI56|A0A1I4TI56_9FLAO GTP cyclohydrolase 1 OS= Flavobacterium succinicans OX=29536 GN=folE PE=3 SV=1
MINNEEFHDEIGNNHISTSAKNPVRDDAFSISDEEKIERIKKDVENMLLTLGMDLTDDSLKGTPNRVAKMFVKEIFGGLNPNKKPKASTFDNNYKYGEMLVEKNITLYSTCEHHLLPIIGRAHVAYISNGTVIGLSKMNRIVEYYAKRPQVQERLTMQIVQELQNALGTEDVACVIDAKHLCVNSRGIKDIESSTVTSEFGGKFKEAQTRREFLDYIKLETKF

SEQ ID NO: 8275 - protein, 223 aa, Flavobacterium suncheonense
  misc_feature (1)..(223): tr|A0A0A2MEM4|A0A0A2MEM4_9FLAO GTP cyclohydrolase 1 OS= Flavobacterium suncheonense GH29-5 = DSM 17707 OX=11218 99 GN=folE PE=3 SV=1
MIHNDDLNDQLGDDHIATSAETPLRSDAFEMSDEEKINSIKKDVENILNTLGLDLTDDSLKGTPNRVAKMFVKEIFGGLHPHKKPGSSTFENKYKYGEMLVEKNITVYSTCEHHLLPIVGRAHVAYISNGTVVGLSKMNRIVDYYAKRPQVQERLTIQIVQELQRVLNTEDVACVIDAKHLCVNSRGIRDIESSTVTAEFGGKFKEDKVRREFLDYIKLDTTF

SEQ ID NO: 8276 - protein, 223 aa, Flavobacterium swingsii
  misc_feature (1)..(223): tr|A0A1I0WAR5|A0A1I0WAR5_9FLAO GTP cyclohydrolase 1 OS= Flavobacterium swingsii OX=498292 GN=folE PE=3 SV=1
MAHNDDFQDEIGNNHIATSAKNPVRKDAFVLTDDQKIESIKKDVENILQTLGMDLTDDSLSGTPNRVAKMFVKEIFGGLNPNKKPKPSTFDNNYKYGEMLVEKNIVVYSTCEHHLLPIIGRAHVAYISNGTVIGLSKMNRIVEYYSKRPQVQERLTMQIVQELQIALGTDDVACVIDAKHLCVNSRGIKDIESSTVTSEFGGKFKNLETRREFLDYIKLDTKF

SEQ ID NO: 8277 - protein, 223 aa, Flavobacterium terrae
  misc_feature (1)..(223): tr|A0A1M6H4M0|A0A1M6H4M0_9FLAO GTP cyclohydrolase 1 OS= Flavobacterium terrae OX=415425 GN=folE PE=3 SV=1
MTQNDEFQEEIGNNHIATSATNPLRKDAFELTDDEKIASIKKDVENILNTLGMDLTDDSLSGTPNRVAKMFVKEIFGGLHPNKKPGSSTFANNYKYGEMLVEKNITVYSTCEHHLLPIIGRAHVAYISNGKVIGLSKMNRIVDYYAKRPQVQERLTMQIVQELQAALGTQDVACVIDAKHLCVNSRGIKDIESSTVTAEFGGKFKEDKTRREFLDYIKLDTKF

SEQ ID NO: 8278 - protein, 228 aa, Flavobacterium terrae
  misc_feature (1)..(228): tr|A0A1M6BQS5|A0A1M6BQS5_9FLAO GTP cyclohydrolase 1 OS= Flavobacterium terrae OX=415425 GN=folE PE=3 SV=1
MTKNPEIDKSKLVSFSIDEIGDNHLFTSVETPIKPDAFVMADEEKKEKIAFHFREIMEVLGLDLNDDSLKGTPQRVAKMYVDEIFCGLNPANKPQVALFENKYQYNQMLLEKNITFYSNCEHHFVPIYGKIHVAYVSKGKVIGLSKINRIVQYFAQRPQVQERLTMQIGLELQKILETEDIAVIVDAKHLCVSSRGIKDESSATVTSYYGGEFQNEQKVIELHNYLKI

SEQ ID NO: 8279 - protein, 223 aa, Flavobacterium terrigena
  misc_feature (1)..(223): tr|A0A1H6RVW4|A0A1H6RVW4_9FLAO GTP cyclohydrolase 1 OS= Flavobacterium terrigena OX=402734 GN=folE PE=3 SV=1
MINNEEHNDEIGNNHIATNTHNPIREDAFDISDEEKITRIKKDVENILLTLGMDLTDDSLKGTPNRVAKMFVKEIFGGLHPNKKPSASTFDNKYKYGEMLVEKNIVVYSTCEHHLLPIYGRAHIAYISNGTVVGLSKMNRIVEYYAKRPQVQERLTIQIVKELQSVLNTEDVACVIDAKHMCVNSRGIKDIESSTVTSEFGGKFKDEKTKREFLDYIKLDTRF

SEQ ID NO: 8280 - protein, 188 aa, [Flavobacterium] thermophilum
  misc_feature (1)..(188): tr|A0A377G2X6|A0A377G2X6_9BACL GTP cyclohydrolase 1 OS= [Flavobacterium] thermophilum OX=1414643 GN=folE PE=3 S V=1
MPEINFAQIEYAVRLILEAIGEDPNREGLVDTPKRVAKMYAEVFSGLHKDPREYFQTVFSEEHEELVLVKDIPFYSMCEHHLVPFFGVAHVAYIPREGKVTGLSKLARAVEAVARRPQLQERITATVADSIVEALEPHGVMVVVEAEHMCMTMRGVKKPGAKTVTTAVRGVFETDVAARSEVLSLIKA

SEQ ID NO: 8281 - protein, 203 aa, Flavobacterium tiangeerense
  misc_feature (1)..(203): tr|A0A562L605|A0A562L605_9FLAO GTP cyclohydrolase 1 OS= Flavobacterium tiangeerense OX=459471 GN=folE PE=3 SV=1
MIKEMKSYEKIEQYDTEITNALADNYKVIIDNLGEDVTREGLEKTPERVAKAMQYLTHGYGLDPLEILKSAMFTEDHQQMIVVKDIEVYSMCEHHMLPFFGKAHVAYIPNGKIVGLSKIPRVVDAFARRMQVQERLTDQIKNCIQEALNPLGVAVVIEAQHMCMQMRGIQKQNSVTTTSSFTGAFEKDKTRKEFISLVSNKLS

SEQ ID NO: 8282 - protein, 223 aa, Flavobacterium tibetense
  misc_feature (1)..(223): tr|A0A365P0G6|A0A365P0G6_9FLAO GTP cyclohydrolase 1 OS= Flavobacterium tibetense OX=2233533 GN=folE PE=3 SV=1
MNTNEDLHDEIGNNHVATSAETPLRKDAFQLTDDQKIELIKKDVESILNTLGMDLTDDSLKGTPNRVAKMFVKEIFGGLNPNKKPGSSTFDNKYKYNEMLVEKNIVVYSTCEHHLLPIVGRAHVAYISNGTVVGLSKMNRIVDYYAKRPQVQERLNIQIVQELQKVLGTEDVACVIDAKHLCVNSRGIRDIESSTVTAEFGGRFKEEKVRREFLDYIKLDTQF

SEQ ID NO: 8283 - protein, 222 aa, Flavobacterium tibetense
  misc_feature (1)..(222): tr|A0A365P2V0|A0A365P2V0_9FLAO GTP cyclohydrolase 1 OS= Flavobacterium tibetense OX=2233533 GN=folE PE=3 SV=1
MNTTIEKEIFDIIGDNHQMTSAETPLRADAFDRTDNQKMEVIEHHFEIIMKELGLDLTDDSLKGTPHRVAKMFVKEIFSGLNPANKPKVSVFDNSYHYDKMLVEANISFNSTCEHHFLPIVGKAHVGYVSSGKVIGLSKLNRIVDYYARRPQVQERMVMQIFNELKTVLETENVMIVMEAEHLCVSSRGIKDESSFTSTLQYGGVFNQKEFRDDFYKLIQRT

SEQ ID NO: 8284 - protein, 223 aa, Flavobacterium ummariense
  misc_feature (1)..(223): tr|A0A1I4W0T9|A0A1I4W0T9_9FLAO GTP cyclohydrolase 1 OS= Flavobacterium ummariense OX=913024 GN=folE PE=3 SV=1
MCKSDALHEDIGDNHIGTSDYTPLKADAFSISDDEKIELIKKDVENILNTLGMDLTDDSLKGTPNRVAKMFVKEIFGGLNPAKKPSSSTFDNKYKYNEMLVEKNIVVYSTCEHHLLPIVGRAHVAYISNGKVVGLSKMNRIVDYYAKRPQVQERLTIQIVEELKRVLGTEDVACVVDAKHLCVNSRGIRDIESSTVTAEFSGAFKNDVTRREFLDYIKLDTQF

SEQ ID NO: 8285 - protein, 236 aa, Flavobacterium urocaniciphilum
  misc_feature (1)..(236): tr|A0A1H9B8E8|A0A1H9B8E8_9FLAO GTP cyclohydrolase 1 OS= Flavobacterium urocaniciphilum OX=1299341 GN=folE PE=3 SV=1
MYIFAVICKSHFIMIHNEENTDEIGNNHIATSANTPLRNDAFDITDDEKINLIKKDVEHILTTLGMDLTDDSLKGTPNRVAKMFVKEIFGGLHPNKKPSASTFENKYKYGEMLVEKNIVVYSTCEHHLLPIYGRAHIAYISNGTVVGLSKMNRIVEYYAKRPQVQERLTIQIVKELQSVLNTEDVACIIDAKHMCVNSRGIKDIDSSTVTAEYGGKFQDENVKREFLEFIKLDTRF

SEQ ID NO: 8286 - protein, 203 aa, Flavobacterium urumqiense
  misc_feature (1)..(203): tr|A0A1H5V2H4|A0A1H5V2H4_9FLAO GTP cyclohydrolase 1 OS= Flavobacterium urumqiense OX=935224 GN=folE PE=3 SV=1
MIKEIKSYEKIEQYDTEITEALADNYKVIIENLGEDVTREGLQKTPERAAKAMQYLTHGYGLDPLEILKSAMFTEDHKQMIVVKDIEVYSMCEHHMLPFFGKAHVAYIPNGKIVGLSKIPRVVDAFARRMQVQERLTDQIKNCIQEALNPFGVAVVIEAQHMCMQMRGIQKQNSVTTTSSFTGAFEKDKTRKEFISLVSNKLS

SEQ ID NO: 8287 - protein, 223 aa, Flavobacterium urumqiense
  misc_feature (1)..(223): tr|A0A1H6AQI5|A0A1H6AQI5_9FLAO GTP cyclohydrolase 1 OS= Flavobacterium urumqiense OX=935224 GN=folE PE=3 SV=1
MINNEEFQDEIGDNHIGLSAKNPVRKDAFAISDEEKIEKIKKDVENILLTLGMDLTDDSMKGTPNRVAKMFVKEIFGGLNPARKPAASTFDNNYKYGEMLVEKNIIVYSTCEHHLLPIIGRAHVAYISNGRVIGLSKMNRIVEYYAKRPQVQERLTMQIVQELQSALGTEDVACIIDAKHLCVNSRGISDIESSTVTSEFGGKFKNDQTRREFLDYIKLETKF

SEQ ID NO: 8288 - protein, 199 aa, Flavobacterium weaverense
  misc_feature (1)..(199): tr|A0A3L9ZX84|A0A3L9ZX84_9FLAO GTP cyclohydrolase 1 OS= Flavobacterium weaverense OX=271156 GN=folE PE=3 SV=1
MKSYEKIEQYDTEVTAALAGNYKTIIGTLGEDVDREGLEKTPERVAKAMQYLTHGYGLDPLEILKSAMFTEDHRQMIVVKDIEVYSMCEHHMLPFFGKAHVAYIPNGKIVGLSKIPRVVDAFARRMQVQERLTDQIKDCIQEALQPLGVAVVIEAQHMCMQMRGIQKQNSVTTTSSFTGAFEKNKTRKEFISLVSNKLS

SEQ ID NO: 8289 - protein, 223 aa, Flavobacterium weaverense
  misc_feature (1)..(223): tr|A0A3M0A147|A0A3M0A147_9FLAO GTP cyclohydrolase 1 OS= Flavobacterium weaverense OX=271156 GN=folE PE=3 SV=1
MINKEEFQDEIGDNHVSLSAKNPVRDDAFAISDDEKIEKIKKDVESILLTLGMDLTDDSLKGTPNRVAKMFVKEIFGGLNPEKKPKASTFDNNYKYGEMLVEKNIIVYSTCEHHLLPIIGRAHVAYISNGRVIGLSKMNRIVEYYAKRPQVQERLTMQIVQELQLALGTEDVACVIDAKHLCVNSRGISDIESSTVTSEFGGKFKDSVTRREFLDYIKLETKF

SEQ ID NO: 8290 - protein, 203 aa, Flavobacterium xanthum
  misc_feature (1)..(203): tr|A0A1M6X4W5|A0A1M6X4W5_9FLAO GTP cyclohydrolase 1 OS= Flavobacterium xanthum OX=69322 GN=folE PE=3 SV=1
MIKELKSYEKIEQYDAEITASLADNYKTIIDNLGEDVTREGLEKTPERVAKAMQYLTHGYGLDPLEILQSAMFTEDHKQMIVVKDIEVYSMCEHHMLPFFGKAHVAYIPNGKIVGLSKIPRIVDAFARRMQVQERLTDQIKDCIQEALNPLGVAVVIEAQHMCMQMRGIQKQNSVTTTSSFTGAFEKDKTRKEFISLISNKFS

SEQ ID NO: 8291 - protein, 223 aa, Flavobacterium xanthum; identical to SEQ ID NO: 8246
  misc_feature (1)..(223): tr|A0A1M7G6D2|A0A1M7G6D2_9FLAO GTP cyclohydrolase 1 OS= Flavobacterium xanthum OX=69322 GN=folE PE=3 SV=1

SEQ ID NO: 8292 - protein, 204 aa, Flavobacterium xinjiangense
  misc_feature (1)..(204): tr|A0A1M7PCY4|A0A1M7PCY4_9FLAO GTP cyclohydrolase 1 OS= Flavobacterium xinjiangense OX=178356 GN=folE PE=3 SV=1
MILSKMKSYEKIEQYDTELTESLAENYKTIIENLGEDVNREGLEKTPERVAKAMQYLTHGYELNPLEILKSALFTEDHQQMIVVKDIEVYSMCEHHMLPFFGKAHVAYIPNGKIVGLSKIPRIVDAFARRMQVQERLTDQIKNCIQEALNPLGVAVVIEAQHMCMQMRGIQKQNSVTTTSSFTGAFEKDKTRKEFISLVSNKLS

SEQ ID NO: 8293 - protein, 223 aa, Flavobacterium xinjiangense
  misc_feature (1)..(223): tr|A0A1M7P0Z0|A0A1M7P0Z0_9FLAO GTP cyclohydrolase 1 OS= Flavobacterium xinjiangense OX=178356 GN=folE PE=3 SV=1
MINNEEFQDEIGDNHIGLSAKNPVREDAFAISDEEKIEKIKKDVENILLTLGMDLTDDSLKGTPNRVAKMFVKEIFGGLNPSKKPKASTFDNNYKYGEMLVEKNIIVYSTCEHHLLPIIGRAHVAYISNGRVIGLSKMNRIVEYYAKRPQVQERLTMQIVQELQIALGTEDVACVIDAKHLCVNSRGISDIESSTVTSEFGGKFKNDQTRREFLDYIKLETKF

SEQ ID NO: 8294 - protein, 199 aa, Flavobacterium xueshanense
  misc_feature (1)..(199): tr|A0A1I2HC84|A0A1I2HC84_9FLAO GTP cyclohydrolase 1 OS= Flavobacterium xueshanense OX=935223 GN=folE PE=3 SV=1
MKSYEKIEQYDTEITQALADNYKVIIENLGEDVTREGLEKTPERVAKAMQYLTHGYGLDPLEILKSAMFTEDHKQMIVVKDIEVYSMCEHHMLPFFGKAHVAYIPNGKIVGLSKIPRVVDAFARRMQVQERLTDQIKNCIQDALNPLGVAVVIEAQHMCMQMRGIQKQNSVTTTSSFTGAFEKDKTRKEFISLLSNKLS

SEQ ID NO: 8295 - protein, 223 aa, Flavobacterium xueshanense
  misc_feature (1)..(223): tr|A0A1I2DIA2|A0A1I2DIA2_9FLAO GTP cyclohydrolase 1 OS= Flavobacterium xueshanense OX=935223 GN=folE PE=3 SV=1
MIKNEEFQDELGDNHVSLSANNPVRDDAFDITDDEKIEKIKKDVESILITLGMDLTDDSLKGTPNRVAKMFVTEIFGGLNPAKKPKASTFDNNYKYGEMLVEKNIIVYSTCEHHLLPIIGRAHVAYISNGRVIGLSKMNRIVEYYSKRPQVQERLTMQIVQELQIALGTENVACVIDAKHLCVNSRGISDIESSTVTSEFGGKFKDSVTRREFLDYIKLETKF

SEQ ID NO: 8296 - protein, 233 aa, Flectobacillus sp.
  misc_feature (1)..(233): tr|A0A267T6C3|A0A267T6C3_9BACT GTP cyclohydrolase 1 OS= Flectobacillus sp. BAB-3569 OX=1509483 GN=folE PE=3 SV= 1
MRQNETLLNTLLDNNGKLLLTDEEIGDDHISTSVDTPMRADAFELSDDEKIAQIEYHFRQIMETLGLDLTDDSLKGTPKRVAKMYVKEIFSGLDPKNKPSIALFENKYQYNEMLVEKNISFYSNCEHHFVPIFGKAHVAYIAEGKVVGLSKLNRIVQHYAKRPQVQERLTVQIAKDLQEILGTENVAVMIDAKHLCVASRGVKDDTSSTVTSYYGGKFQEESVRQEFLKYIGI

SEQ ID NO: 8297 - protein, 231 aa, Flexibacter flexilis
  misc_feature (1)..(231): tr|A0A1I1NK05|A0A1I1NK05_9BACT GTP cyclohydrolase 1 OS= Flexibacter flexilis DSM 6793 OX=927664 GN=folE PE=3 SV =1
MSNIPPIKDITDLSQFSIDEIGDEHLFSSYETPLRSDAFALDDETKIQLIEERFRDIMDILGLDLTDDSLKGTPHRVAKMYVKEIFSGLNPANKPKVALFENKYRYDQMLVEKDITLFSNCEHHFVPIIGKAHVAYISNGQVIGLSKINRVVQYFAKRPQVQERLTVQIAKELQTMLKTEDVAVLIDAKHLCVSSRGVEDNSSATVTAHYSGKFRDEKTRAEFLAYVYNGK

SEQ ID NO: 8298 - protein, 223 aa, [Flexibacter] sp.; identical to SEQ ID NO: 8161
  misc_feature (1)..(223): tr|A0A1V2C4I9|A0A1V2C4I9_9FLAO GTP cyclohydrolase 1 OS= [Flexibacter] sp. ATCC 35103 OX=1937528 GN=folE PE=3 SV =1

SEQ ID NO: 8299 - protein, 197 aa, [Flexibacter] sp.
  misc_feature (1)..(197): tr|A0A1V2B280|A0A1V2B280_9BACT GTP cyclohydrolase 1 OS= [Flexibacter] sp. ATCC 35208 OX=1936242 GN=folE PE=3 SV =1
MAYKKVESYDEKVTSDLIEHYKNSISLLGEDVEREGLQKTPERVAKAMQYLTTGYQLDAREILNSAKFTESYSEMVIVKDIELYSLCEHHMLPFFGKAHIAYIPNGYITGLSKLARVVDVYARRLQVQERMTHQILDAIQDTLQPLGVAVVIEAQHLCMMMRGVQKQNSVTTTSAFSGQFEDGRTRSEFMRLLGHSI

SEQ ID NO: 8300 - protein, 195 aa, Flexilinea flocculi
  misc_feature (1)..(195): tr|A0A0S7BLY6|A0A0S7BLY6_9CHLR GTP cyclohydrolase 1 OS= Flexilinea flocculi OX=1678840 GN=folE PE=3 SV=1
MIQNTTDKNNTIRDAVGIILAAIGEDSTREGLIGTPDRVEKMFQEICSGYQADLVKIVNGAVFHEAAEGMILIRDIEFYSLCEHHLMPFFGKVHVAYIPDGKIIGLSKIPRIVDMYARRLQVQERMTHQIMEAIQSVLAPKGIAVVVEASHLCARMRGVKKEQAKLVTSLFTGVFDSNNTLRNEFFERLKMDVLL

SEQ ID NO: 8301 - protein, 260 aa, Flexistipes sinusarabici
  misc_feature (1)..(260): tr|A0A5D0ML68|A0A5D0ML68_FLESI GTP cyclohydrolase FolE2 OS=Flexistipes sinusarabici OX=2352 GN=folE2 PE=3 SV=1
MLKDVQSLNDDRNLSIDKVGIKDILYPIVVKDKNKGKQHTVARIDMFVRLPHSFKGTHMSRFVEILNNYKADIDIRSFGDILDDMMGVLDSEVAGVEVRFPYFIEKKAPVSNLPSLMDYECEYTGYATKSEKDFVTTVKVPVVSVCPCSREISSAGAHNQRSYVKIKVRYNKMVWIEDLVNIAESSASAPIYSLLKREDEKYITETSYANPVFVEDIVRNIAEKLLKDDRITWFEVSSDNMESIHNHSAYALISRDKRKN

SEQ ID NO: 8302 - protein, 260 aa, Flexistipes sinusarabici
  misc_feature (1)..(260): tr|A0A5D0MLK7|A0A5D0MLK7_FLESI GTP cyclohydrolase FolE2 OS=Flexistipes sinusarabici OX=2352 GN=folE2 PE=3 SV=1
MLKDVQSLNDDRNLSIDKVGIKDILYPIVVKDKNKGKQHTVARIDMFVKLPHSFKGTHMSRFVEILNNYKADIDIRSFGNILDDMMGVLDSEVAGVEVRFPYFIEKKAPASGLPSLMDYECEYTGYATKNEKDFVTTVKVPVVSVCPCSKEISSAGAHNQRSYVKIKVRYNKMVWIEDLVNIAESSASAPIYSLLKREDEKYITETSYANPVFVEDIVRNIAEKLLKDDRITWFEVSSDNMESIHNHSAYALISRDKRKN

SEQ ID NO: 8303 - protein, 195 aa, Flexivirga sp.
  misc_feature (1)..(195): tr|A0A3M9M940|A0A3M9M940_9MICO GTP cyclohydrolase 1 OS= Flexivirga sp. BO-16 OX=2294115 GN=folE PE=3 SV=1
MSTRPTVDLERAATAVRELLLALGEDPDREGLRDTPARVARAYAETFAGMWQTPEDALSRTFDVDHSELVIVRDIEVYSTCEHHLVPFHGVAHVGYIPAPDGRVTGLSKIARLVDVFAKRPQVQERLTTQIADALVDHLHARGVLVVVECEHLCMSMRGVRKPGALTITSAVRGQLTNAATRAEAMSLINAQSRR

SEQ ID NO: 8304 - protein, 181 aa, Fluoribacter bozemanae
  misc_feature (1)..(181): tr|A0A0W0RUA0|A0A0W0RUA0_FLUBO GTP cyclohydrolase 1 OS= Fluoribacter bozemanae OX=447 GN=folE PE=3 SV=1
MEKLYKELLIQLGEDVTREGLVDTPLRAANAMRYLTKGYNESLEEIINGALFDSDMSEMVIVKDIEMYSMCEHHLLPFLGKCHVGYIPNGKVIGLSKVARIVDYFARRLQIQERLTSEIASCLESITGARGVAVVIEAKHLCMMMRGVEKQNSIMTTSVMLGDMRNNPTSRAEFLTLTHNN

SEQ ID NO: 8305 - protein, 181 aa, Fluoribacter dumoffii
  misc_feature (1)..(181): tr|A0A377G5W2|A0A377G5W2_9GAMM GTP cyclohydrolase 1 OS= Fluoribacter dumoffii OX=463 GN=folE PE=3 SV=1
MEKLYKELLTQLGEDVTREGLIDTPARAANALRYLTKGYNENLEDIINDALFDSDMSEMVIVKDIEMYSMCEHHLLPFLGKCHVGYIPNGKVIGLSKIARVVDYFARRLQIQERLTTEIANCLESITGARGVAVVIEAKHLCMMMRGVEKQNSVMTTSVMLGDMRNNPTSRAEFLTLTQGK

SEQ ID NO: 8306 - protein, 181 aa, Fluoribacter gormanii
  misc_feature (1)..(181): tr|A0A377GFX0|A0A377GFX0_9GAMM GTP cyclohydrolase 1 OS= Fluoribacter gormanii OX=464 GN=folE PE=3 SV=1
MEKLYKELLIQLGEDISRQGLIDTPARAANAMRYLTKGYNESLDDIINGALFDSDMNEMVIVKDIEMYSMCEHHLLPFLGKCHVGYIPNGKVIGLSKVARIVDYFARRLQIQERLTSEIANCLESITGARGVAVVIEAKHLCMMMRGVEKQNSVMTTSVMLGDMRNSSTSRAEFLTLTQNK

SEQ ID NO: 8307 - protein, 368 aa, Fluviibacterium aquatile
  misc_feature (1)..(368): tr|A0A4R6B1Z3|A0A4R6B1Z3_9RHOB GTP cyclohydrolase FolE2 OS=Fluviibacterium aquatile OX=2552766 GN=folE2 PE=3 S V=1
MNIHSPVLDRDPTPQDAAEALLLLKKWVGQASEAELDGLDPALRKLTVGRAADAAYPDLSRQYPEDFLVTPQYKDALPDLQNGPASLIKGARQQIQHVGISNFRLPIRFQTRDNGDLTLETSVTGTVSLEAEKKGINMSRIMRTFYGHAEKTFSFGVIEAALDDYKTDLESFDARIQMRFSFPVKIDSLRSGLSGYQYYDIALEVVEHGGVRRRMVHLDYVYSSTCPCSLELSEHARRTRGQLATPHSQRSVARVSVELAADAATLWFEDLIDMCRSAVPTETQVMVKREDEQAFAELNAANPIFVEDAARLFCAELLKDPRVGDFRVMASHQESLHSHDAVSILTEGDTFAADSLDPRTFSTLFHVG

SEQ ID NO: 8308 - protein, 180 aa, Fluviicoccus keumensis
  misc_feature (1)..(180): tr|A0A4Q7Z987|A0A4Q7Z987_9GAMM GTP cyclohydrolase 1 OS= Fluviicoccus keumensis OX=1435465 GN=folE PE=3 SV=1
MEKAYASIISAIGEDLTRPGLADTPKRAAKAFQYLCKGYDEDLDTLVNNAIFPSDNDEMVIVKDIELYSLCEHHLLPFIGKCHVAYLPDGKVLGLSKFARIVDMFARRLQIQENLTKQIADAVLQVTGAKGVAVTIEAKHMCMMMRGVEKQNSVMKSSVMLGRFRENPQTRNEYLSLIAG

SEQ ID NO: 8309 - protein, 198 aa, Fluviicola sp.
  misc_feature (1)..(198): tr|A0A1G0C623|A0A1G0C623_9FLAO GTP cyclohydrolase 1 OS= Fluviicola sp. RIFCSPHIGHO2_12_FULL_43_24 OX=1798019 GN =folE PE=3 SV=1
MSHSHDIYNDEITERLAGVYKTVLSDIGEDPEREGLLKTPERVAKALQFLTHGYDIFPEDILKSALFHEEYSEMVIVKDIEVYSMCEHHMLPFFGKAHVAYIPNGTIVGLSKIPRVVDAYSRRLQVQERLTIEIRDCIQKTLNPKGVAVVLECAHMCMQMRGVQKQNAYTTSSAFTGLFLSNDSTRKEFINLVQAKLH

SEQ ID NO: 8310 - protein, 196 aa, Fluviicola sp.
  misc_feature (1)..(196): tr|A0A556MP50|A0A556MP50_9FLAO GTP cyclohydrolase 1 OS= Fluviicola sp. MAH-3 OX=2597671 GN=folE PE=3 SV=1
MSEFHYNDDTTEQISNIYRTVLSQIGENPDREGLIKTPERVAKALQFLTQGYDIKPEDILKSALFSEEYSEMVIVKDIEVYSMCEHHMLPFFGKAHIAYIPNGTIVGLSKLPRVVDAFSRRLQVQERLTIEIRDCIQETLKPKGVAVVLECQHMCMQMRGVQKQNSVTTSSAFTGLFLSNDSTRKEFINLVQAKLH

SEQ ID NO: 8311 - protein, 196 aa, Fluviicola taffensis
  misc_feature (1)..(196): tr|F2I9N6|F2I9N6_FLUTR GTP cyclohydrolase 1 OS=Fluviico la taffensis (strain DSM 16823 / NCIMB 13979 / RW262) O X=755732 GN=folE PE=3 SV=1
MSDFHYNDDTTENISTIYKSILSQIGENPEREGLLKTPERVAKALQFLTQGYDIKPADILKSALFHEEYSEMVIVKDIEVYSMCEHHMLPFFGKAHIAYIPNGTIVGLSKIPRVVDAFSRRLQVQERLTIEIRDCIQETLKPKGVAVVLECQHMCMQMRGVQKQNSVTTSSAFTGLFLSNDSTRKEFINLVQAKLH

SEQ ID NO: 8312 - protein, 197 aa, Fontibacillus panacisegetis
  misc_feature (1)..(197): tr|A0A1G7QN90|A0A1G7QN90_9BACL GTP cyclohydrolase 1 OS= Fontibacillus panacisegetis OX=670482 GN=folE PE=3 SV=1
MSGVKDYVNKQVGDNRERIEHHVREILKLIGEDVEREGLIETPARVTRMYEEIFAGYEVDPHDVLGVTFEENHEELVIVKDIVYYSQCEHHMAPFFGKVHIGYIPSGRIAGLSKLARLVEAVTRRLQVQERITSQIADIMDEVLKPQGVMVVVEGEHLCMCARGVKKPGSKTITSAVRGNFRTDAASRAEFMSLIKG

SEQ ID NO: 8313 - protein, 197 aa, Fontibacillus phaseoli
  misc_feature (1)..(197): tr|A0A369B970|A0A369B970_9BACL GTP cyclohydrolase 1 OS= Fontibacillus phaseoli OX=1416533 GN=folE PE=3 SV=1
MAGVKDYVNTRVGDNREQIEHHVREILKLIGEDVEREGLLDTPARVTRMYEEIFGGYEVDPRDVLGVTFEENHEELVIVKDIVYYSQCEHHMAPFFGKVHIGYIPSGRIAGLSKLARLVEAVTRRLQVQERITSQIADIMDEVLKPQGVMVVVEGEHLCMCARGVKKPGSKTVTSAVRGTFRKDAASRAEFLSLIKE

SEQ ID NO: 8314 - protein, 256 aa, Fonticella tunisiensis
  misc_feature (1)..(256): tr|A0A4R7KD17|A0A4R7KD17_9CLOT GTP cyclohydrolase FolE2 OS=Fonticella tunisiensis OX=1096341 GN=folE2 PE=3 SV= 1
MRDLQSEKDLRNIPLKKVGIKNLKWPVTVMNKYDEVQHTVAEMELSVDLPHDVRGVHMSRFVEAVKEMKGLSLGDIETMLENLRQRLEAKVAHCRIDFDYFIKRKAPVTEIPSLYDVRCSFDCEKGEDFKFVMGIVVPVSTLCPCSKEISDYGAHNQRATIHINVEVDRDIWIEDIVRIAEESASTPIFSLLKRPDEKWITERAYMNPKFVEDAARDVAIRLENYQGVKWYSVHVESQESIHNHNAFAYTEKKVEI

SEQ ID NO: 8315 - protein, 182 aa, Fontimonas thermophila
  misc_feature (1)..(182): tr|A0A1I2JTB1|A0A1I2JTB1_9GAMM GTP cyclohydrolase 1 OS= Fontimonas thermophila OX=1076937 GN=folE PE=3 SV=1
MEEHFRAIIEAIGENPDREGLLRTPYRAARALEFLTQGYEQDLDEIVNGAVFESSNDEMVIVKDIELYSLCEHHLLPFIGKAHVAYLPAGRVIGLSKIPRIVDMYARRLQIQENLTQQIGQSIQRVTGAHGVGVVIEAQHLCAMMRGVQKQGSSMITSMMLGRFRDDPRTRQEFLDLIRTGR

SEQ ID NO: 8316 - protein, 269 aa, Formivibrio citricus
  misc_feature (1)..(269): tr|A0A1I5AT48|A0A1I5AT48_9NEIS GTP cyclohydrolase FolE2 OS=Formivibrio citricus OX=83765 GN=folE2 PE=3 SV=1
MSAAIADVQNSPDNRNIAINKVGIKSIRHPVRVSDRADGEQYTVAVFDMYVFLPQHFKGTHMSRFVEILNSHEKAISVDSFETILRQMCERLEAESGYLEMRFPFFINKRAPVSEVQSLMDYEVTLVGEIKKGQFEMRLKVQVPVTSLCPCSKKISEYGAHNQRSHVTVTATLAEHVWIEEIVELVEKEASCELFGLLKRPDEKYVTERAYDNPKFVEDMVRDVASRLNADSRIAAYVVESENFESIHNHSAYALIEQDKRVNNCCEGA

SEQ ID NO: 8317 - protein, 198 aa, Formosa agariphila
  misc_feature (1)..(198): tr|T2KKY6|T2KKY6_FORAG GTP cyclohydrolase 1 OS=Formosa agariphila (strain DSM 15362 / KCTC 12365 / LMG 23005 / KMM 3901) OX=1347342 GN=folE PE=3 SV=1
MPYKHYEEYNLEITDEIKSQYQNIITNIGEDVSRDGLQKTPERASKAMQFLTQGYELDAAEILKSAMFKESYNEMVIVKNIELYSLCEHHLLPFFGKAHIAYIPNGHIVGLSKIPRIVDVFARRLQVQERLTKQILDCINDTLKPQGVAVVIEASHMCMMMRGVQKQNSVTTTSGFRGQFEKIETRNEFLKLISEDLS

SEQ ID NO: 8318 - protein, 225 aa, Formosa agariphila
  misc_feature (1)..(225): tr|T2KPS0|T2KPS0_FORAG GTP cyclohydrolase 1 OS=Formosa agariphila (strain DSM 15362 / KCTC 12365 / LMG 23005 / KMM 3901) OX=1347342 GN=folE PE=3 SV=1
MKFDNNLEEFDAYGDDHIGSATDTPMRADAFKLSNEEKVELIKDDVRHIMETLGLDLTDDSLKGTPNRVAKMFVKEIFSGLDPSKKPNASTFENKYKYGEMLVEKNITVYSTCEHHLLPIVGRAHVAYISKGNVVGLSKMNRIVDYYAKRPQVQERLTIQIVKELQSVLGTEDVACIIDAKHLCVNSRGIRDIESSTVTAEFGGKFKDNETRRELLDYIKLETQF

SEQ ID NO: 8319 - protein, 198 aa, Formosa algae
  misc_feature (1)..(198): tr|A0A2K2ZB19|A0A2K2ZB19_9FLAO GTP cyclohydrolase 1 OS= Formosa algae OX=225843 GN=folE PE=3 SV=1
MSYKHYEEYNIEITDEIKSQYKHIIDNIGEDVTREGLQKTPERASKAMQFLTQGYDLDAAEILKGAMFEESYNEMVIVKNIELYSLCEHHMLPFFGKAHIAYIPNGHIVGLSKLPRIVDVFARRLQVQERLTKQILDCINDTLKPQGVAVVIEASHMCMMMRGVQKQNSVTTTSGFRGQFEKIETRNEFLKLISQDLS

SEQ ID NO: 8320 - protein, 225 aa, Formosa algae
  misc_feature (1)..(225): tr|A0A2K2Z884|A0A2K2Z884_9FLAO GTP cyclohydrolase 1 OS= Formosa algae OX=225843 GN=folE PE=3 SV=1
MKFDNNMEELDAIGDNHVGTSTDTPMRADAFDISDDQKIETIKADVRHIMETLGLDLTDDSLKGTPNRVAKMFVKEIFGGLNPNKKPTASTFDNKYKYGEMLVEKNITVYSTCEHHLLPIVGRAHVAYISKGNVVGLSKMNRIVDFYAKRPQVQERLTIQIVKELQAVLGTEDVACIIDAKHLCVNSRGIRDIESSTVTAEFGGKFKEKDTRREFIEYIKLETQF

SEQ ID NO: 8321 - protein, 228 aa, Formosa sp.
  misc_feature (1)..(228): tr|A0A2D4WX84|A0A2D4WX84_9FLAO GTP cyclohydrolase 1 OS= Formosa sp. OX=2018467 GN=folE PE=3 SV=1
MSTNITKQKTRRINGFNHHEIGDDHLYTGLNTPLKKDAFAISDAEKKNKISMLFEEIMDVIGLDLTDDSLKGTPDRVAKMYIDEIFSGLNPKNKPKVALFDNKYHYNQMLVEKNITFYSNCEHHFVPIIGKAHVAYISSGKVIGLSKLNRIVQYYAKRPQVQERLTNQIGEDLKAILKTDDVAVIIDAKHLCVSSRGIKDESSATVTSFYSGAFNSPAKVNEFNNYLK

SEQ ID NO: 8322 - protein, 225 aa, Formosa sp.
  misc_feature (1)..(225): tr|A0A1D7XZU7|A0A1D7XZU7_9FLAO GTP cyclohydrolase 1 OS= Formosa sp. Hel1_33_131 OX=1336794 GN=folE PE=3 SV=1
MGLKNNTEKFDTIGDNHIGTSTETPMRSDAFKLSSDEKIDIIKDDVQHIMETLGLDLSDDSLKGTPNRVAKMFVNEIFGGLDPTKKPKASTFDNKYQYGEMLVEKNITLYSTCEHHFLPIVGRAHVAYISNGTVVGLSKMNRIVDHFSKRPQVQERLTIQIVEELQKVLNTKDVACVIDAKHLCVNSRGIRDIESSTVTSEFGGKFKEKDTKREFLDYIQLETKF

SEQ ID NO: 8323 - protein, 225 aa, Formosa spongicola
  misc_feature (1)..(225): tr|A0A316DNL6|A0A316DNL6_9FLAO GTP cyclohydrolase 1 OS= Formosa spongicola OX=570520 GN=folE PE=3 SV=1
MKFDEKLEEFESLGDNHVGTSSNTPMRQDAFKLTNEEKIDIIKDDVQHIMETLGLDLTDDSLKGTPNRVAKMFVKELFGGLNPEKKPNASTFENKYQYGEMLVEKNITVYSTCEHHLLPIVGKAHVAYISNGTVVGLSKMNRIVDYFAKRPQVQERLTIQIVKELQEVLNTQDVACVIDAKHLCVNSRGIRDTESSTITSEFGGKFKEKETKREFLDYIKLDTSF

SEQ ID NO: 8324 - protein, 218 aa, Francisella adeliensis
  misc_feature (1)..(218): tr|A0A2Z4XWE6|A0A2Z4XWE6_9GAMM GTP cyclohydrolase 1 OS= Francisella adeliensis OX=2007306 GN=folE PE=3 SV=1
MDSDKELGLRVRELLISKKLETPLREGFELNNSNKIEIEKNFESILYNLGLDLENDSLKKSPKRIADMYINELFKGLDYNNFPKCSAIENNVEYNDIVIEKDITTSSTCEHHFVMIDGFTHIGYIPNKKIIGLSKFNRITDFFATRPQVQERLTRQIFETLKYILETEDVAVVMEAKHNCVRARGIKDYNSTTITSAMGGAFMDDSACRKEFMDLVRK

SEQ ID NO: 8325 - protein, 204 aa, Francisella endosymbiont
  misc_feature (1)..(204): tr|A0A1E7UBA0|A0A1E7UBA0_9GAMM GTP cyclohydrolase 1 OS= Francisella endosymbiont of Amblyomma maculatum OX=2559 19 GN=AS144_04260 PE=3 SV=1
MKDRYCSKLGKNVQQHLIKLGLEQPREFNLDNDSKIATIAKAYRQILDALGLHTHEFEKTPFRVARMFSQEIFNGLDYANFPVCVLYENKFNYTGVLTQKNITIMSFCEHHFVPFEGTAEVSFIPKDNNIIGLCRINSICDFFARRPQIQERMTTQIFETLKFILATDNVSVKIKAKHTCVSFRGVNNQDSQTYTQMIGGVFAK

SEQ ID NO: 8326 - protein, 204 aa, Francisella endosymbiont
  misc_feature (1)..(204): tr|A0A1X1BEU9|A0A1X1BEU9_9GAMM GTP cyclohydrolase 1 OS= Francisella endosymbiont of Ornithodoros moubata OX=198 1171 GN=A2G94_04420 PE=3 SV=1
MKGRYCSKLGKNVQQHLIKLGLEQPREFNLDNDSKIATIAKAYRQILDALGLHTHEFEKTPFRVARMFSQEIFNGLDYANFPACALYENEFNYTGVLTQKNITIMSFCEHHFVPFEGTAEVSFIPKDNNIIGLCHINSICDFFARRPQIQERMTTQIFETLKFILATDNVSVKIEAKHTCVSFRGVNNQDSQTYTQMVGGVFAK

SEQ ID NO: 8327 - protein, 204 aa, Francisella halioticida
  misc_feature (1)..(204): tr|A0A2Z2L1V3|A0A2Z2L1V3_9GAMM GTP cyclohydrolase 1 OS= Francisella halioticida OX=549298 GN=CDV26_08005 PE=3 S V=1
MSNKYCSELGKNVRDHLIKLGLEQPRDFKFDNDIKIQKISKAYREILDTLGLETHEFDKTPFRIARMFSQEIFNGLDYNNFPACALYENEFKYDGVLTQKNITIMSFCEHHFVPFEGVAEVSFIPKDNNIIGLCRINSICDFFARRPQIQERMTAQIFESLKFILGTEDVSIKITAKHTCVSFRGCNNRDSKTYTQMFGGFFAK

SEQ ID NO: 8328 - protein, 204 aa, Francisella hispaniensis
  misc_feature (1)..(204): tr|F4BFL4|F4BFL4_9GAMM GTP cyclohydrolase 1 OS=Francise lla hispaniensis OX=622488 GN=FN3523_0955 PE=3 SV=1
MKDKYCSKLGKSVQQHLIKLGLEQPREFNSDSDNKIAIIAKAYRQILDALGLHTHEFEKTPFRVARMFSQEIFNGLDYANFPACALYENEFNYTGILTQKDITIMSFCEHHFVPFEGTAEVSFIPNNNNIIGLCRINSICDFFSRRPQIQERMTAQIFETLKFILATEDVSVKIKAKHTCVSFRGVNNQSSETYTEMLGGSFAK

SEQ ID NO: 8329 - protein, 204 aa, Francisella hispaniensis
  misc_feature (1)..(204): tr|A0A153JB17|A0A153JB17_9GAMM GTP cyclohydrolase 1 OS= Francisella hispaniensis FSC454 OX=1088883 GN=AUF42_073 60 PE=3 SV=1
MKDKYCSKLGKSVQQHLIKLGLEQPREFNSDSDNKIAIIAKAYRQILDALGLHTHEFEKTPFRVARMFSQEIFNGLDYANFPACALYENEFNYTGILTQKDITIMSFCEHHFVPFEGTAEVSFIPNNNNIIGLCRINSICNFFARRPQIQERMTAQIFETLKFILATEDVSVKIKAKHTCVSFRGVNNQSSETYTEMLGGSFAK

SEQ ID NO: 8330 - protein, 206 aa, Francisella marina
  misc_feature (1)..(206): tr|A0A5C2BY71|A0A5C2BY71_9GAMM GTP cyclohydrolase 1 OS= Francisella marina OX=2249302 GN=folE PE=3 SV=1
MNDKYCSKLGRDVQQHLIKLGLEQARNFELDNDAKIAKISKAYREILDALGLQTHEFEKTPFRIARMFTQEIFNGLDYANFPACALYENEFKYEGILTQKNITIMSFCEHHFVPFEGIAEVSFIPKNNNIIGLCRINSICNFFARRPQIQERMTAQIFETLKFILSTDDVSVKIKAKHTCVSFRGTNNQNSETYTEMLGGLFAKKE

SEQ ID NO: 8331 - protein, 206 aa, Francisella noatunensis
  misc_feature (1)..(206): tr|I2B0F5|I2B0F5_FRANT GTP cyclohydrolase 1 OS=Francise lla noatunensis subsp. orientalis (strain Toba 04) OX=1 163389 GN=OOM_1510 PE=3 SV=1
MNDKYYSKLGKDVQQHLIKLGLEQARNFELDNDAKIAKILKAYREILDTLGLQTHEFEKTPYRIARMFTQEIFNGLDYANFPACALYENEFRYEGVLTQKNITIMSFCEHHFMPFEGVAEVSFIPKNNNIIGLCRINSICNFFARRPQIQERMTAQIFETLKFILSTDNVSVKIKAKHTCVSFRGTNNQNSETYTEMLGGVFAKKE

SEQ ID NO: 8332 - protein, 206 aa, Francisella noatunensis; identical to SEQ ID NO: 8331
  misc_feature (1)..(206): tr|A0A5C1SR19|A0A5C1SR19_9GAMM GTP cyclohydrolase 1 OS= Francisella noatunensis subsp. orientalis OX=299583 GN= FNO111_0940 PE=3 SV=1

SEQ ID NO: 8333 - protein, 206 aa, Francisella novicida
  misc_feature (1)..(206): tr|A0A2L1CIZ7|A0A2L1CIZ7_FRANO GTP cyclohydrolase 1 OS= Francisella novicida OX=264 GN=B4919_06145 PE=3 SV=1
MMMKDKYCSKLGKSVQEHLIKLGLEQPREFNLDNDNKIAIITKAYRQILDALGLYTDEFEKTPFRVARMFTQEIFNGLDYANFPACALYENEFNYTGVLTQKNITIMSFCEHHFVPFEGTAEVSFIPKNNNIIGLCRINSICDFFSRRPQIQERMTAQIFETLKFILSTEDVSVKIKAKHACVSLRGVNNQNSQTYTQMVGGVFAK

SEQ ID NO: 8334 - protein, 204 aa, Francisella persica
  misc_feature (1)..(204): tr|A0A0K2JR90|A0A0K2JR90_9GAMM GTP cyclohydrolase 1 OS= Francisella persica ATCC VR-331 OX=1086726 GN=FSC845_06 105 PE=3 SV=1
MKDKYCSKLGKNVQQHLIKLGLEQPREFNLDNDSKIAIIAKAYRQILDALGLHTHEFEKTPFRVARMFSQEIFNGLDYANFPACALYENEFNYTGVLTQKNITIMSFCEHHFVPFEGIAEVSFIPKDNNIIGLCRINSICDFFARRPQIQERMTTQIFETLKFILATDDVSVEIKAKHACVSLRGVNNQDSQTYTQMVGGAFAK

SEQ ID NO: 8335 - protein, 205 aa, Francisella philomiragia
  misc_feature (1)..(205): tr|A0A0E2ZKA4|A0A0E2ZKA4_9GAMM GTP cyclohydrolase 1 OS= Francisella philomiragia OX=28110 GN=folE PE=3 SV=1
MNDKYCSKLGRDVQQHLIKLGLEQARNFELDNDAKIAKISKAYREILDALGLQTHEFEKTPFRVARMFTQEIFNGLDYANFPACALYENEFKYEGILTQKNITIMSFCEHHFVPFEGIAEVSFIPKNNNIIGLCRINSICNFFSRRPQIQERMTAQIFETLKFILSTDDVSVKIKAKHTCVSFRGTNNQDSETYTEMLGGVFAKK

SEQ ID NO: 8336 - protein, 206 aa, Francisella philomiragia
  misc_feature (1)..(206): tr|B0U0Q8|B0U0Q8_FRAP2 GTP cyclohydrolase 1 OS=Francise lla philomiragia subsp. philomiragia (strain ATCC 25017 ) OX=484022 GN=Fphi_1784 PE=3 SV=1
MNDKYCSKLGRDVQQHLIKLGLEQARNFELDNNAKIAKISKAYREILDALGLQTHEFEKTPFRVARMFTQEIFNGLEYANFPACALYENEFKYEGILTQKNITIMSFCEHHFVPFEGIAEVSFIPKNNNIIGLCRINSICNFFSRRPQIQERMTAQIFETLKFILSTDDVSVKIKAKHTCVSFRGTNNQNSETYTEMLGGVFAKKE

SEQ ID NO: 8337 - protein, 204 aa, Francisella sp.
  misc_feature (1)..(204): tr|A0A1L4BSC0|A0A1L4BSC0_9GAMM GTP cyclohydrolase 1 OS= Francisella sp. TX077310 OX=573570 GN=F7310_04850 PE=3 SV=1
MSNTYCSELGKNVRDHLIKLGLEQPRQFNIDNDTKIQKISKAYREILDTLGLETHEFDKTPFRIARMFSQEIFNGLDYNNFPACALYENEFKYNGVLTQKNITIMSFCEHHFVPFEGTAEVSFIPKNNNIIGLCRINSICDFFSRRPQIQERMTAQIFESLKFILGTQDVSVKITAKHTCVSFRGCNNKDTETYTQMLGGFFAK

SEQ ID NO: 8338 - protein, 204 aa, Francisella sp.
  misc_feature (1)..(204): tr|A0A097EMD6|A0A097EMD6_9GAMM GTP cyclohydrolase 1 OS= Francisella sp. FSC1006 OX=1547445 GN=LO80_01235 PE=3 S V=1
MSNTNCPTIGKKVRDHLIKLGLEQPREFNLDNDVKIEKISKAYGEILDALGLQSHEFEKTPFRVARMFSQEIFNGLNYDNFPACALYENEFKYDGILTQKNIPIMSICEHHFVPFEGTAEVSFIPKNNNIIGLSRINDICDFFSRRPQIQERMTAQIFESLKFILGTTDVSIKITAKHTCVSFRGCNNKDSETYTQMIGGFFAK

SEQ ID NO: 8339 - protein, 206 aa, Francisella tularensis
  misc_feature (1)..(206): tr|Q5NGA1|Q5NGA1_FRATT GTP cyclohydrolase 1 OS=Francise lla tularensis subsp. tularensis (strain SCHU S4 / Schu 4) OX=177416 GN=folE PE=3 SV=1
MMMKDKYCSKLGKSVQEHLIKLGLEQPREFNLDNDNKITIITKAYRQILDALGLYTDEFEKTPFRVARMFTQEIFNGLDYANFPACALYENEFNYTGVLTQKNITIMSFCEHHFVPFEGTAEVSFIPKNNNIIGLCRINSICDFFSRRPQIQERMTAQIFEALKFILSTEDVSVKIKAKHACVSLRGVNNQNSQTYTQMVGGVFAK

SEQ ID NO: 8340 - protein, 206 aa, Francisella tularensis; identical to SEQ ID NO: 8339
  misc_feature (1)..(206): tr|A0A3N4AJL4|A0A3N4AJL4_FRATU GTP cyclohydrolase 1 OS= Francisella tularensis OX=263 GN=folE PE=3 SV=1

SEQ ID NO: 8341 - protein, 222 aa, Franconibacter pulveris
  misc_feature (1)..(222): tr|A0A0J8VLL7|A0A0J8VLL7_9ENTR GTP cyclohydrolase 1 OS= Franconibacter pulveris OX=435910 GN=folE PE=3 SV=1
MSLLSKEAALVHEALVARGLETPLRPPLHELDNETRKRLIAGHMTEIMQLLNLDLSDDSLMETPHRIAKMYVDEIFSGLDYANFPKITVIENKMKVDEMVTVRDITLTSTCEHHFVTIDGKATVAYIPKDSVIGLSKINRIVQFFAQRPQVQERLTQQILVALQTLLGTSNVAVSIDAVHYCVKARGIRDATSATTTTSLGGLFKSSQNTRQEFLRAVRHPS

SEQ ID NO: 8342 - protein, 188 aa, Frankia alni
  misc_feature (1)..(188): tr|Q0RM61|Q0RM61_FRAAA Putative GTP cyclohydrolase I (M ycobacteriophage protein Gp6) OS=Frankia alni (strain A CN14a) OX=326424 GN=FRAAL2747 PE=4 SV=1
MDTTRAVAAVEELLAALEVNEADHTADTPRRVVRAWQETLAGYQADPRRHLARTFTAPDDPGLVVVAGLHLVTTCAHHLLPIVGRATVAYRPAPGAPVVGLSKLSRVVADYAARLQVQERLGWQIASAVQDCLAPVGAGCVITAVHGCMTVRGVRQPTAVTTTAVWTGTWTPEHPDVEMVVAEHRAAG

SEQ ID NO: 8343 - protein, 183 aa, Frankia alni
  misc_feature (1)..(183): tr|Q0RBH4|Q0RBH4_FRAAA GTP cyclohydrolase 1 OS=Frankia alni (strain ACN14a) OX=326424 GN=folE2 PE=3 SV=1
MARAVRELLIGIGEDPDREGLRKTPDRVARAYREAVEGLGREPSEVLTTVFDEGHDEMVLVRDIDFSSLCEHHLVVFSGRAHVAYIPNNRGQITGLSKLARLVDLYARRPQVQERLTSQIADALVDVLEPRGVMVVVEAEHLCMSMRGVRKPGATTVTSAVRGQFLSTATRSEGMSLILGSRR

SEQ ID NO: 8344 - protein, 239 aa, Frankia asymbiotica
  misc_feature (1)..(239): tr|A0A1V2I678|A0A1V2I678_9ACTN GTP cyclohydrolase 1 OS= Frankia asymbiotica OX=1834516 GN=folE PE=3 SV=1
MTSETDQAVLSAHLDASAELADEVDGSETETRSGSGAAVAAFRTGNGRVRPFDHDRVAAAVRELLIGIGEDPDREGLRKTPDRVARAYAEAVEGLGRDPADVLTTVFDEGHDEMVLVRDIDFSSLCEHHLVVFSGKAHVAYIPNENGQITGLSKLARLVDLYARRPQVQERLTSQVADALVDVLKPRGVMVIIEAEHLCMSMRGVRKPGASTVTSAVRGQFLSPATRSEGMSLILGHRR

SEQ ID NO: 8345 - protein, 246 aa, Frankia canadensis
  misc_feature (1)..(246): tr|A0A2I2KMN6|A0A2I2KMN6_9ACTN GTP cyclohydrolase 1 OS= Frankia canadensis OX=1836972 GN=folE PE=3 SV=1
MTSDSQIGFTSTEEGVREVGATGSNGFDVPSPLAGNGTGTSTAVPARDRGRPSQVRPFDHDRVARAVRELLIGIGEDPDREGLRKTPDRVARAYREAVEGLGREPSEVLTTVFDEGHDEMVLVRDIDFSSLCEHHLVVFSGQAHVAYIPNNKGQITGLSKLARLVDLYARRPQVQERLTSQIADALVDVLDPRGVMVVVEAEHLCMSMRGVRKPGATTVTSAVRGQFLSTATRNEGMSLILRGGRH

SEQ ID NO: 8346 - protein, 192 aa, Frankia casuarinae
  misc_feature (1)..(192): tr|Q2JC68|Q2JC68_FRACC GTP cyclohydrolase 1 OS=Frankia casuarinae (strain DSM 45818 / CECT 9043 / CcI3) OX=106 370 GN=Francci3_1748 PE=3 SV=1
MSLTYPDGRAGLADEVADGTDPLEGLARQLLVEIGEDPGRDGLRETPARYARWWREFVGFDPGNTETAFEQVNHGQLVQVNDIRVWSLCEHHLLPFWCDISIAYLAKDKLLGLSKFARIAHHHAHRLQVQERLTGAIADAIEALCGVPDVAVRAKGEHLCMTMRGIRSPATMSTLVLRGVFKDDPHMRNLLS

SEQ ID NO: 8347 - protein, 244 aa, Frankia casuarinae
  misc_feature (1)..(244): tr|A0A1X1PX26|A0A1X1PX26_FRACC GTP cyclohydrolase 1 OS= Frankia casuarinae (strain DSM 45818 / CECT 9043 / CcI3 ) OX=106370 GN=folE PE=3 SV=1
MTSYSDEASTAAGERRSESSPAAEAPGMDGFGIPDPDGDGPAASTLAPGNGRPRQVRPFDHDRVARAVRELLIGIGEDPDREGLRKTPDRVARAYREAVEGLGRDPSEVLTTVFDEGHDEMVLVRDIDFSSLCEHHLVVFSGKAHVAYIPNSKGQITGLSKLARLVDLYSRRPQVQERLTSQIADALVEVLDPRGVMVVIEAEHLCMSMRGVRKPGATTVTSAVRGQFLSTATRNEGMSLILHR

SEQ ID NO: 8348 - protein, 234 aa, Frankia inefficax
  misc_feature (1)..(234): tr|E3J7B8|E3J7B8_FRAIE GTP cyclohydrolase 1 OS=Frankia inefficax (strain DSM 45817 / CECT 9037 / EuI1c) OX=298 654 GN=folE PE=3 SV=1
MTSETDLLSADLDHLDDEGGSAAETGSGSGAAVAEFRPGNGRIRPFDHDRVAAAVRELLIGIGEDPDREGLRKTPDRVARAYAEAVEGLGRDPADVLTTVFDEGHDEMVLVRDIDFSSLCEHHLVVFSGKAHVAYIPNENGQITGLSKLARLVDLYARRPQVQERLTSQVADALVDVLQPRGVMVVVEAEHLCMSMRGVRKPGACTVTSAVRGQFLSPATRNEGMSLILSSHRR

SEQ ID NO: 8349 - protein, 252 aa, Frankia irregularis
  misc_feature (1)..(252): tr|A0A0S4QRY3|A0A0S4QRY3_9ACTN GTP cyclohydrolase 1 OS= Frankia irregularis OX=795642 GN=folE PE=3 SV=1
MTADSEQARTVSQQASDPASGLVGVDQRTALSEGTDANNGGGNGSSASSASTERKRPKRPDMVRPFDHDRVARAVRELLIGIGEDPDREGLRKTPDRVARAYQEAVEGLGRDPAEVLTTVFDEGHDEMVLVRDIDFSSLCEHHLVVFAGKAHVAYIPNEKGQITGLSKLARLVDLYARRPQVQERLTSQVADALVDVLDPRGVMVVVEAEHLCMSMRGVRKPGATTVTSAVRGQFLSPATRSEGMSLIMRGR

SEQ ID NO: 8350 - protein, 251 aa, Frankia sp.
  misc_feature (1)..(251): tr|I8QS57|I8QS57_9ACTN GTP cyclohydrolase 1 OS=Frankia sp. QA3 OX=710111 GN=folE PE=3 SV=1
MTSDSHEAFTDERVHSAAVSEMDATGSNGLGGPGPGTDGNGSAAAASPVSLVRDRGKPQQVRPFDHDRVARAVRELLIGIGEDPDREGLRKTPDRVARAYREAVEGLGRNPSDVLTTVFDEGHDEMVLVRDIDFSSLCEHHLVVFSGRAHVAYIPNNRGQITGLSKLARLVDLYARRPQVQERLTSQIADALVDVLEPRGVMVVVEAEHLCMSMRGVRKPGATTVTSAVRGQFLSTATRSEGMSLILGSRR

SEQ ID NO: 8351 - protein, 217 aa, Frankia sp.
  misc_feature (1)..(217): tr|A0A062WXH3|A0A062WXH3_9ACTN GTP cyclohydrolase 1 OS= Frankia sp. BMG5.23 OX=683305 GN=folE PE=3 SV=1
MDGFGIPDPDGDGPAASTLAPGNGRPRQVRPFDHDRVARAVRELLIGIGEDPDREGLRKTPDRVARAYREAVEGLGRDPSEVLTTVFDEGHDEMVLVRDIDFSSLCEHHLVVFSGKAHVAYIPNSKGQITGLSKLARLVDLYSRRPQVQERLTSQIADALVEVLDPRGVMVVIEAEHLCMSMRGVRKPGATTVTSAVRGQFLSTATRNEGMSLILHR

SEQ ID NO: 8352 - protein, 224 aa, Frankia symbiont
  misc_feature (1)..(224): tr|F8AVA6|F8AVA6_FRADG GTP cyclohydrolase 1 OS=Frankia symbiont subsp. Datisca glomerata OX=656024 GN=folE PE= 3 SV=1
MDTVDAATQNVNAGTVPASDVARQRRGPDLGPQAVRPFDHERVARAVRELLIGIGEDPDREGLRKTPERVARAYREAVEGLGRDPSEVLTTVFDEGHEEMVLVRDIDFTSLCEHHLVAFAGKAHVAYIPNESGQITGLSKLARLVDLYSRRPQVQERLTTQIADALEQALSPRGVMVVVEAEHLCMSMRGVRKPGARTMTSAVRGQFLSTATRNEGMSLILSHR

SEQ ID NO: 8353 - protein, 253 aa, Frankia torreyi
  misc_feature (1)..(253): tr|A0A0D8BJL6|A0A0D8BJL6_9ACTN GTP cyclohydrolase 1 OS= Frankia torreyi OX=1856 GN=folE PE=3 SV=1
MTSDSPEVFTDERVGSGASPEVNGTASDGFGVPDPSALGISTTTATAAPPASPIRDRRRPQQVRPFDHDRVARAVRELLIGIGEDPDREGLRKTPDRVARAYREAVEGLGREPSEVLTTVFDEGHDEMVLVRDIDFSSLCEHHLVVFSGRAHVAYIPNDRGQITGLSKLARLVDLYARRPQVQERLTSQVADALVDVLEPRGVMVVVEAEHLCMSMRGVRKPGATTVTSAVRGQFLSTATRSEGMSLILGSRR

SEQ ID NO: 8354 - protein, 204 aa, Frankiales bacterium
  misc_feature (1)..(204): tr|A0A3A3ZK20|A0A3A3ZK20_9ACTN GTP cyclohydrolase 1 OS= Frankiales bacterium YIM 75000 OX=2339232 GN=folE PE=3 SV=1
MVDPVTLPPAEGTPAPRPFDAARVERAVREILLGIGEDPDRDGLRDTPARVARAYREVFAGLAMEPESVLATTFDLGHDEMVLVKDIELYSTCEHHLVPFHGVAHVGYVPSADGRITGLSKLARLVDLYARRPQVQERLTTQVADAMVRVLQPRGVIVVLECEHLCMSMRGIRKPGSRTVTSAVRGGLRDPATRAEAMSLIMGR

SEQ ID NO: 8355 - protein, 191 aa, Frankiales bacterium
  misc_feature (1)..(191): tr|A0A522B9F2|A0A522B9F2_9ACTN GTP cyclohydrolase 1 OS= Frankiales bacterium OX=1909291 GN=folE PE=3 SV=1
MPTPYDAARVEAAVRELLAAVGDDPDREGLVDTPARVARMYAEVFAGLHMAPEDLALPLFDERHDELIIVKDIPLSSFCEHHLIPWTGTAAVGYLPGKDGRITGLSKLARLVDLYAKRPSVQERVTSQVADALMERLEPRGAIVVVEAEHLCMSMRGVQKPGARTVTSAVRGVLKSSAVTRAEAMSLILGR

SEQ ID NO: 8356 - protein, 217 aa, Frankineae bacterium
  misc_feature (1)..(217): tr|A0A1G8PSK8|A0A1G8PSK8_9ACTN GTP cyclohydrolase 1 OS= Frankineae bacterium MT45 OX=1882833 GN=folE PE=3 SV=1
MTAQQGNAGGSPDGASKPSTGASKPSPGGGIDVPRAEAAVREILIAIGEDPDRPGLERTPERVARSFSELFGGLHLNPDDVLETQFDEHHDELVLVKDIPLYSTCEHHLVPWHGTAAVGYIPGSSGRITGLSKLARVVDLYAKRPQVQERLTSQVADAVMSRLQPRGVIVVIEAEHLCMAMRGVRKPGAKTLTSAVRGGFQSDPRTRAEAMSLILGR

SEQ ID NO: 8357 - protein, 194 aa, Fraserbacteria sp.
  misc_feature (1)..(194): tr|A0A1F5UYD2|A0A1F5UYD2_FRAXR GTP cyclohydrolase 1 OS= Fraserbacteria sp. (strain RBG_16_55_9) OX=1817864 GN=f olE PE=3 SV=1
MGKHPNGKKDIKELVRELLLGLGEDPKREGLRETPRRVAELYNELTQGYREDPQGIVGDAVFTVDYDSMVVLKDIEFYSLCEHHLIPFFGHVHVGYIPKGQVIGASKIPRVVDSFAKRLQLQERMTEEIACFLEEAIQPLGLGVVVEGMHLCMAMRGVEKRDAWMVTSAMKGSFRKDAKTRAEFLQFIAPRLER

SEQ ID NO: 8358 - protein, 313 aa, Frateuria aurantia
  misc_feature (1)..(313): tr|H8KYU3|H8KYU3_FRAAD GTP cyclohydrolase FolE2 OS=Frat euria aurantia (strain ATCC 33424 / DSM 6220 / NBRC 324 5 / NCIMB 13370) OX=767434 GN=folE2 PE=3 SV=1
MDMQTASTRALPDVALNPHPHRSGPLDWVGMGRIQMPVRFDAGDGQVREGVARVDAFVNLTRNDKRGIHMSRLYLLVEQALSRDVITPVRLQALLQAFLASHEDLSDHARIRIEFEQLIRRPALRSANSGWRAYPVVIEAELKGEHFSYELATEVVYSSTCPASAALARQLIQDRFEQDFGSGQPLDRTALLAWLGSEQGIVATPHAQRSVAELKVRPVAGAAVSLLSLLDRCEHALATPVQTAVKREDEQAFAAANGGNLMFCEDAARRLRAALNEDGALADFRIRIEHQESLHPHDAVAYAFKGIVGGYDR

SEQ ID NO: 8359 - protein, 200 aa, Frateuria aurantia
  misc_feature (1)..(200): tr|H8L2U7|H8L2U7_FRAAD GTP cyclohydrolase 1 OS=Frateuri a aurantia (strain ATCC 33424 / DSM 6220 / NBRC 3245 / NCIMB 13370) OX=767434 GN=folE PE=3 SV=1
MSDEANRPDVSREQAEEAIRTLLLWAGEDPAREGLIDTPKRVVKAYSDWFAGYASDPADYLLRTFEEVGGYDEMVVLRDIEFESHCEHHMAAIIGKAHIAYLPDNRVVGISKLARVVDGFARRLQVQEKMTAQIAQCIQETLQPKGVAVVIEAAHECMTTRGVHKRGVSMVTSQMLGVFREDARTRSEFLSYIGIARGVR

SEQ ID NO: 8360 - protein, 200 aa, Frateuria sp.
  misc_feature (1)..(200): tr|A0A0Q9Q8B0|A0A0Q9Q8B0_9GAMM GTP cyclohydrolase 1 OS= Frateuria sp. Soil773 OX=1736407 GN=folE PE=3 SV=1
MSDPRNPNDVSQEQAEEAVRTLLRWSGEDPSREGLLDTPRRVVKAYRDWFSGYLEDPGEYLRRTFKEVAGYDEMVVLRDIEFESHCEHHMAPIVGRAHVGYLPTNRVVGISKLARVVEGYARRFQVQEKLTAQIAQCIQDNLQPAGVAVVVDASHECMTTRGVHKRGVSMVTSQMLGAFRDDARTRAEFLQFIGIHGGVR

SEQ ID NO: 8361 - protein, 315 aa, Frateuria sp.
  misc_feature (1)..(315): tr|A0A0Q9PNE3|A0A0Q9PNE3_9GAMM GTP cyclohydrolase FolE2 OS=Frateuria sp. Soil773 OX=1736407 GN=folE2 PE=3 SV=1
MHSHENTARLMPDVATQAQPHLAGALDWVGMDGIEVPVRFDAGDGEAQRASAQVGAFVNLGRSDKRGIHMSRLYLLVDRYLSAQTLGADMLRALLGEFLSSHEGLADRARISIRFEHLVRRAALRSANSGWRAYPVSIEASLGADGFRLELGTEVVYSSTCPASAALSRQLIQEQFAKDFSADGPVDHAAVLAWLGSEQGIVATPHAQRSVARLLVRLADGAAFDLIGTLDRVEQALGTPVQTAVKREDEQAFALANGGNLMFCEDAARRIQKALDADPRIADFHVRLEHQESLHPHDAVAYASKGVPGGYGVPV

SEQ ID NO: 8362 - protein, 199 aa, Frateuria terrea
  misc_feature (1)..(199): tr|A0A1H6WPR0|A0A1H6WPR0_9GAMM GTP cyclohydrolase 1 OS= Frateuria terrea OX=529704 GN=folE PE=3 SV=1
MSDPSTPNDVTQAQAEEAVRTLLRWAGDDPSREGLLDTPRRVAKAYRDWFSGYADDPSEFLKRTFKEVEGYDEMVVLRDIEFESHCEHHMAPIIGRAHVGYLPTNRVVGISKLARVVEGYARRFQVQEKLTAQIAHCIQEHLRPAGVAVVIDASHECMTTRGVHKRGVSMVTSQMLGAFRDDARTRAEFLQFIGIHGAR

SEQ ID NO: 8363 - protein, 315 aa, Frateuria terrea
  misc_feature (1)..(315): tr|A0A1H6QJJ2|A0A1H6QJJ2_9GAMM GTP cyclohydrolase FolE2 OS=Frateuria terrea OX=529704 GN=folE2 PE=3 SV=1
MHSHENTARLLPDVAVQAQPHLAGALDWVGMDGIEVPVRFDAGDGSIERASAQVGAFVNLTRPDKRGIHMSRLYLLVDRHLSANPLDAATIEALLRAFLESHHDLSDRARLSIRFDHLVRRSALRSANSGWRAYPVSIEASLGADGFQLELGTEVVYSSTCPASAALSRQLIQEQFARDFDAGKPVDHAAVMAWLGSEQGIVATPHAQRSVARLLVRLADGVGFNLISTLDRVEGALGTPVQTAVKREDEQAFALANGGNLMFCEDAARRIQKALDADPRIADFHVRLEHQESLHPHDAVAYASKGVPGGYGSAG

SEQ ID NO: 8364 - protein, 218 aa, Frederiksenia canicola
  misc_feature (1)..(218): tr|A0A3N4WSM8|A0A3N4WSM8_9PAST GTP cyclohydrolase 1 OS= Frederiksenia canicola OX=123824 GN=folE PE=3 SV=1
MSNISPEAQSVRAALLEKGIETPTVAHTKDKAVRRSEIQQHMRSVLELLGLDLRDDSLEETPHRLAKMYVDEIFSGLDYETFPKITKIKNQMKVSEMVLVDDITLTSTCEHHFVTIDGKVAVAYYPKDWVIGLSKINRVVQFFAQRPQVQERFTEQILTAFQTILETEDVAVYVKATHFCVKCRGVKDTNSQTLTSAFGGVFLQDRETRKEFLSLLSK

SEQ ID NO: 8365 - protein, 211 aa, Fremyella diplosiphon
  misc_feature (1)..(211): tr|A0A1Z4MAB5|A0A1Z4MAB5_MICDP GTP cyclohydrolase 1 OS= Fremyella diplosiphon NIES-3275 OX=1973485 GN=folE PE=3 SV=1
MTLSIPPQLISATALPNQQLPHVTESDMIQAVRTLLIGLGENPDREGLKDTPKRVVKALQFITKGYDESLDELLNGAVFTEDTNEMVLVRDIDIFSSCEHHILPIIGRAHVAYIPNGKVIGLSKIARICEMYARRLQVQERLTIQIADALQGLLKPRGVAVVLEATHMCMVMRGVQKPGSWTVTSAMRGVFAEDVRTRQEFMNLIRHNASF

SEQ ID NO: 8366 - protein, 235 aa, Fremyella diplosiphon
  misc_feature (1)..(235): tr|A0A1Z4ML08|A0A1Z4ML08_MICDP GTP cyclohydrolase 1 OS= Fremyella diplosiphon NIES-3275 OX=1973485 GN=folE PE=3 SV=1
MTIASPNGSNRSQSPLIPDLAEAITLRPDRNTHDGHEPNLHSPQEEEMEQMTAAVRQILLGVGEDPEREGLLKTPKRVAEAMRFLTSGYNQSLEELVNGAIFNEGHNEMVLVRDINFFSLCEHHMLPFMGKAHIAYIPNQKVVGLSKLARIVEMYSRRLQVQERLTRQIAEAVQTILNPQGVAVVMEATHMCMVMRGVQKPGSWTVTSAMLGVFQDEQKTREEFLNLIRHQASFF

SEQ ID NO: 8367 - protein, 269 aa, Fretibacterium fastidiosum
  misc_feature (1)..(269): tr|D4MAK4|D4MAK4_9BACT GTP cyclohydrolase FolE2 OS=Fret ibacterium fastidiosum OX=651822 GN=folE2 PE=3 SV=1
MKDVQMEADLREIQIDRVGVSNVSYPIVVMSRQDKTQDTVASVSMSVLLPHQYRGTHMSRFIEALEDCCGRISPVTLEAVTKRLCDRLDAPEASIRFEFPYFIRRRAPVSGIESFMRYEANLEGIFSVGKFDMVTGVGVHVQTLCPCSRAISKYGAHNQRAFVAIKVRCTHFMWFEELIAMAEEAASSPLYTLLKREDEKHVTERAYENPRFVEDVVRDLAVALNREPRVSWYSVSITSAESIHNHDAFAEVTRDKGKPAPPDGERGQR

SEQ ID NO: 8368 - protein, 228 aa, Friedmanniella flava
  misc_feature (1)..(228): tr|A0A1H8Z9K7|A0A1H8Z9K7_9ACTN GTP cyclohydrolase 1 OS= Friedmanniella flava OX=1036181 GN=folE PE=3 SV=1
MWRPEGDGNILTRLGQDVVVSSLDTPDLDQEVDETPPDERPGVDEPRIAAAVREILAAIGEDPDRDGLQKTPERVARAYTEMFAGLRQDPQDVLATTFDLGHDELVLVKDIEVWSCCEHHLVPFTGKAHVGYLPNPDGRITGLSKLARLVDVYAKRPQVQERMTTQIADALERYLKPRGVIVVLECEHLCMTMRGVRKPGSKTITSAVRGHLRTSATTRAEAMNLIRG

SEQ ID NO: 8369 - protein, 217 aa, Friedmanniella luteola
  misc_feature (1)..(217): tr|A0A1H1LRS7|A0A1H1LRS7_9ACTN GTP cyclohydrolase 1 OS= Friedmanniella luteola OX=546871 GN=folE PE=3 SV=1
MSADRIVDVDGVGQRGVSPAEAPATVPQSIAPFDHARVSAAVREILIGIGEDPDRDGLRETPDRVARAYAEMFAGLHQAPDEVLAKRFDLGFDELVLVKDIEVWSCCEHHLVPFTGVAHIGYIPSKDGTITGLSKLARLVDLYAKRPQVQERLTTQVADALERILQPRGVIVVFECEHLCMTMRGVRKPGSKTVTSAVRGHLRNSATRAEAMGLIRS

SEQ ID NO: 8370 - protein, 209 aa, Friedmanniella sagamiharensis
  misc_feature (1)..(209): tr|A0A1H2NGM9|A0A1H2NGM9_9ACTN GTP cyclohydrolase 1 OS= Friedmanniella sagamiharensis OX=546874 GN=folE PE=3 SV =1
MSSLDTPEFDREVDETPPDERPGVDEPRVAAAVREILAAIGEDPERDGLLKTPERVARAYAEMFAGLRQDPQDVLATTFDLGHDELVLVKDIEVWSCCEHHLVPFTGVAHIGYLPNLDGRITGLSKLARLVDVYAKRPQVQERMTTQIADALERYLKPRGVIVVVECEHLCMTMRGVRKPGSKTVTSAVRGHLRTSATTRAEAMHLIRS

SEQ ID NO: 8371 - protein, 195 aa, Frigoribacterium faeni
  misc_feature (1)..(195): tr|A0A511A7U1|A0A511A7U1_9MICO GTP cyclohydrolase 1 OS= Frigoribacterium faeni OX=145483 GN=folE PE=3 SV=1
MTQQPIDLPRIEAAVLELLAAIGEDPIRPGLVDTPRRVADAYGEFFSGLRVDAVALVRGSAVPAEAAELGELVIVRDIAFRSVCEHHLLPFLGVAHIAYVPGRTILGLGSLPRVVDAVASRPQLQERLGEEIAEALDVGASPDGVLVVLDAAHGCVTARGPRQTESTTVTLASRGVLSETAARAEAIALIGASRG

SEQ ID NO: 8372 - protein, 195 aa, Frigoribacterium sp.
  misc_feature (1)..(195): tr|A0A3N2I5U1|A0A3N2I5U1_9MICO GTP cyclohydrolase 1 OS= Frigoribacterium sp. PhB118 OX=2485175 GN=folE PE=3 SV= 1
MTPPPIDGPRIEAAVLELLAAIGEDVDRPGLESTPRRVADAYAEFFSGLTVDAAELVRQATVPAEAHQLGEVVIVRDISFRSVCEHHLLPFVGVAHVAYVPGETIVGLGALPRVVDAVASRPQLQERLGEEIAEAVETGARPDGVLVVLDASHGCVTTRGPRQTGSTTVTLASRGVLSTPSARAEAVALIGTSRG

SEQ ID NO: 8373 - protein, 195 aa, Frigoribacterium sp.
  misc_feature (1)..(195): tr|A0A1S2IKA2|A0A1S2IKA2_9MICO GTP cyclohydrolase 1 OS= Frigoribacterium sp. MCBA15_019 OX=1898745 GN=folE PE=3 SV=1
MTPPPIDRPRIEAAVLELLAAIGEDVDRPGLESTPRRVADAYAEFFSGLSVDASDLVRQATVPAEAHQLGEVVIVRDISFRSVCEHHLLPFVGVAHVAYVPGETIVGLGALPRVVDAVASRPQLQERLGEEIAEAVQAGARPDGVLVVLDASHGCVTTRGPRQTGSTTVTLASRGVLSEPSARAEAVALIGAPRV

SEQ ID NO: 8374 - protein, 219 aa, Frischella perrara
  misc_feature (1)..(219): tr|A0A0A7S5E0|A0A0A7S5E0_FRIPE GTP cyclohydrolase 1 OS= Frischella perrara OX=1267021 GN=folE PE=3 SV=1
MNELSVEAQKVKAALEERNLETPMCSNMMDNHERKVKIEAHFREIMQLMALDLSDDSLIETPRRVAKMYVDEIFSGLDYRNFPKITLIENKMQVDEMITVRDITLTSVCEHHFVTIDGKATVSYIPKSSVIGLSKINRIVQFFSQRPQVQERLTQQILVALQTLLGTVNVAVSIDATHYCVKARGIKDATSTTTTTSLGGGFKTNSSTRQEFLRALKHD

SEQ ID NO: 8375 - protein, 219 aa, Frischella perrara
  misc_feature (1)..(219): tr|A0A318MYN7|A0A318MYN7_FRIPE GTP cyclohydrolase 1 OS= Frischella perrara OX=1267021 GN=folE PE=3 SV=1
MNELSVEAQKVKAALEERNLETPMCSNMMDNHERKVKIEAHFREIMQLMALDLSDDSLIETPRRVAKMYVDEIFSGLDYRNFPKITLIENKMQVDEMITVRDITLTSVCEHHFVTIDGKATVSYIPKSSVIGLSKINRIVQFFSQRPQVQERLTQQILVALQTLLGTVNVAVSIDATHYCVKARGIKDATSTTTTTSLGGGFKTNPSTRQEFLRALKHD

SEQ ID NO: 8376 - protein, 185 aa, Frisingicoccus caecimuris
  misc_feature (1)..(185): tr|A0A4V2SDF4|A0A4V2SDF4_9FIRM GTP cyclohydrolase 1 OS= Frisingicoccus caecimuris OX=1796636 GN=folE PE=3 SV=1
MIDEKKIEAGIRLLLEGIGEDLERPGLKDTPHRIANMYKEIYGGLGADASVHLGKTFPAINNELVLEKDITFYSTCEHHLLPFYGKAHIAYIPDDKVVGLSKLARTVDVFARRPQIQEQMTAQIGDAIMEHLKPKGVMVILQAEHMCMTMRGIKKPGSQTMTYICRGAFENNPELQQMVFQMVKS

SEQ ID NO: 8377 - protein, 217 aa, Frondihabitans australicus
  misc_feature (1)..(217): tr|A0A495IJN3|A0A495IJN3_9MICO GTP cyclohydrolase 1 OS= Frondihabitans australicus OX=386892 GN=folE PE=3 SV=1
MATDFDRPRLEAAVLEILKAIGDDPSRAGLADTPRRVADAYEEFFAGLRVDVPALLGGSVVAASEGELGELVIVRDIEFRSVCEHHLLPFLGVAHVAYVPGTQIVGLGKIPGLVDALASRPQLQERLGEEIADALSSGVGAAGVLVVLDAVHGCVTSRGARQTHSSTVTIASRGVLADAAGRAEAIALIGSGQTPSTYASAVATADVAGAVAGAGRS

SEQ ID NO: 8378 - protein, 194 aa, Frondihabitans sp.
  misc_feature (1)..(194): tr|A0A0Q5CGQ5|A0A0Q5CGQ5_9MICO GTP cyclohydrolase 1 OS= Frondihabitans sp. Leaf304 OX=1736329 GN=folE PE=3 SV=1
MTTRFDRPRIEAAVAEILAAIGDDPARPGLVDTPRRVADAYEEFFSGLDVDVSALMGTSVVPAESGELGELVIVRDIEFRSVCEHHLLPFVGVAHVAYVPGAQIVGLGRIPGLVDALASRPLLQERLGEDIVRALDDAVAPAGVLVVLDAVHGCVTTRGARQTHSSTVTVASRGTLSDPAGRAEAIALIGGPAA

SEQ ID NO: 8379 - protein, 218 aa, Frondihabitans sp.
  misc_feature (1)..(218): tr|A0A2R2WC32|A0A2R2WC32_9MICO GTP cyclohydrolase 1 OS= Frondihabitans sp. 762G35 OX=1446794 GN=folE PE=3 SV=1
MSDPVEKPAAFDRPRVEAAVAEILRAIGDDPSRSGLVDTPRRVADAYAEFFGGLATDPLDLLRGAVVPAEPGELGELVIVRDVEFRSVCEHHLLPFLGVAHVAYVPGEKIVGLGRIPGLVDALASRPQLQERLGEEIADALQQGVEPRGVLVVLDAAHGCVTSRGSRQSHSTTVTVASRGSLAEPAGRAEAIALIGAGRGAASRGGDAARAETGAERG

SEQ ID NO: 8380 - protein, 262 aa, Fructobacillus sp.
  misc_feature (1)..(262): tr|A0A0J5PE62|A0A0J5PE62_9LACT Putative GTP cyclohydrol ase 1 type 2 OS=Fructobacillus sp. EFB-N1 OX=1658766 GN =FEFB_02600 PE=4 SV=1
MVKASELIEQIEGFAPKSLAEPGDPTGLQIGQPEQKIHRVLTTLDVRPEVVQEAIDLGADFIWAHHEAMFRPAKNLDLSNPQNAMYALAIKNNIVIYASHTNLDAATGGLNDWLCQAFGIENQIPLLPGEGDQPGMGRIGELKVAMTMADFAKQVKAVCQVDAVRLIANDANKVVKRVAVLGGDGGKFWKKAQEAGADLYLTADLYYHVGHDILAADFAVLDPDHHMEALAKEPMAKKVQEWFAWQLPVTASQKNTDPYTYF

SEQ ID NO: 8381 - protein, 188 aa, Fructobacillus sp.
  misc_feature (1)..(188): tr|A0A0J5S796|A0A0J5S796_9LACT GTP cyclohydrolase 1 OS= Fructobacillus sp. EFB-N1 OX=1658766 GN=folE PE=3 SV=1
MDSKNQKIIEDAVRTILTAVGEDVNREGLLETPERVAKMYAEVFGAVNTDFTNFTVFDSTEDDVDQEVITVKKIPFYSMCEHHLLPFFGEVSLAYIPNDGKIVGLSKVPRLIGHVAKKPNVQERLTSEVAQKLDELIHPKGIAIVVRARHMCMEMRGVRSVGNITETTYYMGEFKGDLAKQSLFLQQA

SEQ ID NO: 8382 - protein, 192 aa, Fructobacillus tropaeoli
  misc_feature (1)..(192): tr|A0A3F3GZW0|A0A3F3GZW0_9LACT GTP cyclohydrolase 1 OS= Fructobacillus tropaeoli OX=709323 GN=folE PE=3 SV=1
MEKTMDSKNQKIIEDAVRTILTAVGEDVNREGLLETPERVAKMYAEVFGAVNTDFTNFTVFDSTEDDVDQEVITVKKIPFYSMCEHHLLPFFGEVSLAYIPNDGKIVGLSKVPRLIGHVAKKPNVQERLTSEVAQKLDELIHPKGIAIVVRARHMCMEMRGVRSVGNITETTYYMGEFKGDLAKQSLFLQQA

SEQ ID NO: 8383 - protein, 205 aa, Fuerstia marisgermanicae
  misc_feature (1)..(205): tr|A0A1P8WMQ5|A0A1P8WMQ5_9PLAN GTP cyclohydrolase 1 OS= Fuerstia marisgermanicae OX=1891926 GN=folE PE=3 SV=1
MTDPKDTLASGATPPEARHIDKPRIEAAVREILMAVGEDPDRDGLQETPARVARMYAEMFGGLHMDPGRHLHKVFEEQYDEMVLVRDISFHSMCEHHLLPFIGTAHVGYIPRGKVTGLSKLARVVDEVSRRPQVQERMTHMVADLVESELDAKGVIVVLEAEHTCMTIRGVKKPGAITITSAVRGLLKKDASSRAEAMSLINKHS

SEQ ID NO: 8384 - protein, 206 aa, Fulvimarina manganoxydans
  misc_feature (1)..(206): tr|A0A1W1ZXF2|A0A1W1ZXF2_9RHIZ GTP cyclohydrolase 1 OS= Fulvimarina manganoxydans OX=937218 GN=folE PE=3 SV=1
MEAVVKKFPEPASTDQERPSREEAEEAVRTLLRWMGEDPHREGLLETPARVVKAYSELFGGYKMEAGDVLGRTFEDVSGYEDMVLVKDIDFHSHCEHHMVPIIGKAHVAYVPNGRVLGLSKIARLVDIYARRLQTQESMTAQIATAMESLLKPKGVAVMIDASHLCMSMRGIRSKDATTITSAFHGQFRDDKDLAQRFMRLVGQAS

SEQ ID NO: 8385 - protein, 245 aa, Fulvimarina pelagi
  misc_feature (1)..(245): tr|Q0G2H2|Q0G2H2_9RHIZ GTP cyclohydrolase 1 OS=Fulvimar ina pelagi HTCC2506 OX=314231 GN=folE PE=3 SV=1
MTKDTETNLPVPTRSHEAPDVHSVWVAARIPHFREKAAMEAVVKQFPDRSKIENADRPDRVEAEEAVRTLLRWMGEDPSREGLLETPARVVKAYEELFGGYKQDAADILGRTFEDVSGYEDMVLVKDIDFHSHCEHHMVPIIGKAHVAYVPNGRVLGLSKIARLVDIYGRRLQTQESMTAQIADAMQRLLQPSGVAVMIDAEHLCMSMRGIRSKDATTITTAFNGEFKSDKELSRRFMKLVGQTA

SEQ ID NO: 8386 - protein, 207 aa, Fulvimarina sp.
  misc_feature (1)..(207): tr|A0A2E1H877|A0A2E1H877_9RHIZ GTP cyclohydrolase 1 OS= Fulvimarina sp. OX=1969479 GN=folE PE=3 SV=1
MDAVVKKFPEKPEDGEFQRPSRAEAEAAVATLLRWIGENPKREGLKETPKRVVKAYEELFGGYGHEPSEVLGRVFEEVAGYNDIVLVKDISFHTHCEHHMVPVLGKAHIAYLPDGKVLGLSKIARLVDMFGRRLQTQEAMTAQIADALDRTLKPRGVAVILEAEHLCMSMRGIRSHGSSTYTGTYRGVFADDQAQQDRILRLIGLSA

SEQ ID NO: 8387 - protein, 207 aa, Fulvimarina sp.
  misc_feature (1)..(207): tr|A0A371WYF0|A0A371WYF0_9RHIZ GTP cyclohydrolase 1 OS= Fulvimarina sp. 85 OX=2293836 GN=folE PE=3 SV=1
MEAVVKPFPASAGTEAAGRPDRAEAEEAVRTLLRWMGEDPTREGLLETPARVVKAYGELFGGYKQEAGDVLGRTFEDVSGYEDMVLVKDIDFHSHCEHHMVPIIGKAHVAYVPHGRVLGLSKIARLVDIYGRRLQTQESMTAQIADAMQRLLQPAGVAVMIEAEHLCMSMRGIRSRGATTITTAFNGAFKTDAELTRRFMKLSGQST

SEQ ID NO: 8388 - protein, 313 aa, Fulvimonas soli
  misc_feature (1)..(313): tr|A0A316I4Q3|A0A316I4Q3_9GAMM GTP cyclohydrolase FolE2 OS=Fulvimonas soli OX=155197 GN=folE2 PE=3 SV=1
MHSHENTARLLPDVAVQAQPHLAGALDWVGMDGIEAPVSFDAGDGQVQRASAQVGAFVNLVRPDRRGIHMSRLYLLVDEYLSKRALDATTLEALLRAFLESHKDLADRARISIRFEHLVRRAALRSANSGWRAYPVSIEACLGAEGFRLELGTEVVYSSTCPASAALSRQLIQEQFARDFEAGRPLDREAVLAWLGSDKGIVATPHAQRSVARLLVRFVPGAKLDLIGLLDRVEAALGTPVQTAVKREDEQAFALANGGNLMFCEDAARRIQRALDADAAIADFHVRLEHQESLHPHDAVAYASKGVAGGYGG

SEQ ID NO: 8389 - protein, 200 aa, Fulvimonas soli
  misc_feature (1)..(200): tr|A0A316I8H3|A0A316I8H3_9GAMM GTP cyclohydrolase 1 OS= Fulvimonas soli OX=155197 GN=folE PE=3 SV=1
MSEPANPPSVTREQAEEAVRTLLRWAGEDPSREGLLDTPKRVVKAYRDWFSGYAEDPAEFLKRTFKEVEGYDEMVVLRDIEFESHCEHHMAPIIGRAHVGYLPTHRVVGISKLARVVEGYARRFQVQEKLTAQIANCISETLMPRGVAVVIDASHECMTTRGVHKRGVSMITSQMLGVFRDDARTRAEFLQFIGIDRGHR

SEQ ID NO: 8390 - protein, 229 aa, Fulvivirga imtechensis
  misc_feature (1)..(229): tr|L8JM64|L8JM64_9BACT GTP cyclohydrolase 1 OS=Fulvivir ga imtechensis AK7 OX=1237149 GN=folE PE=3 SV=1
MKPKEILLNTRHEDDITDDLGDDHVASSYDTPLRPDAFAMSDEEKMKKIEGHFREIMNIMGLDLKDDSLSGTPKRVAKMFVKEIFSGLNPANKPHARLFENKYKYDQMLVEKDITFYSHCEHHFVPIFGKVHVAYISSGKVIGLSKINRIVQYYAKRPQVQERLTVQISKDLQKALKTEDVGVVVDATHLCVASRGVGDTNSKTGTAYFSGKFKENQTKNEFLNYINSK

SEQ ID NO: 8391 - protein, 229 aa, Fulvivirga sp.
  misc_feature (1)..(229): tr|A0A553FUB3|A0A553FUB3_9BACT GTP cyclohydrolase 1 OS= Fulvivirga sp. M361 OX=2594266 GN=folE PE=3 SV=1
MKPNEILLNTPFKRDYGDDIGDDHVASSYNTPLRPDAFDLSESEKIEKIEQHFEEIMNILGLDLSDDSLKGTPRRVAKMYVQEVFSGLDPENQPEMTLFENKYKYNQMLVEKDITFYSHCEHHFVPIYGKAHVAYISSGKVIGLSKINRIVQYFSKRPQVQERLTVQIGNELKKALQTEDVAVVVDATHLCVASRGVGDTNSKTGTAFFSGKFEETQIKNEFLNYINSH

SEQ ID NO: 8392 - protein, 193 aa, Fusibacter sp.
  misc_feature (1)..(193): tr|A0A1B6BAF4|A0A1B6BAF4_9FIRM GTP cyclohydrolase 1 OS= Fusibacter sp. 3D3 OX=1048380 GN=folE PE=3 SV=1
MIDQKRLESAFKEILEALGENPDREGLVDTPERFAKMCMENFAGIAYSNAEIAKLYDVTFEDETYYEAGTDDFVLMKDIEIFSYCEHHFALMYNMKVAVAYMPKQKVIGLSKITRVADLVGKRLQLQERIGKDIAEIIQLISESEDVAVIIEGEHSCMTTRGIRKPGAKTITKTFRGRFKSEPYLANQIIGLL

SEQ ID NO: 8393 - protein, 189 aa, Fusibacter sp.
  misc_feature (1)..(189): tr|A0A4Q2A3D7|A0A4Q2A3D7_9FIRM GTP cyclohydrolase 1 OS= Fusibacter sp. A1 OX=2283630 GN=folE PE=3 SV=1
MDKPRIERAVREILEAMGEDPDREGLVDTPKRIAKMYEEIFAGLNEDPGKHLEVFFQEEQHSELVLVKDIPFYSTCEHHFAPFFGKAHVGYIPKDGRLTGLSKLARVVETVARRPQLQERLTSTIADTLVDKLDPYGVIVVVEAEHMCMTMRGVKKAGSQTITSAVRGTLEKDAKSRAEAMSLIQFRSR

SEQ ID NO: 8394 - protein, 185 aa, Fusicatenibacter saccharivorans
  misc_feature (1)..(185): tr|A0A174SH39|A0A174SH39_9FIRM GTP cyclohydrolase 1 OS= Fusicatenibacter saccharivorans OX=1150298 GN=folE PE=3 SV=1
MNKEKIQEGVKLILEGIGEDINREGLLETPDRIARMYEELAAGYTDCAAEHLRKRFHVDNNDMVMEKEIPFYSFCEHHMLPFYGTAAIAYIPDGEVVGLSKMARTLEVFAKRLQLQERLTAQIADVFMEELKPHGVMVLIEAEHMCMTMRGIKKPGTKTVTVVTRGVFDGDEKLQNQFYRMLERR

SEQ ID NO: 8395 - protein, 185 aa, Fusicatenibacter sp.; identical to SEQ ID NO: 7783
  misc_feature (1)..(185): tr|A0A174XSY5|A0A174XSY5_9FIRM GTP cyclohydrolase 1 OS= Fusicatenibacter sp. 2789STDY5834925 OX=1806509 GN=folE PE=3 SV=1

SEQ ID NO: 8396 - protein, 186 aa, Fusobacteria bacterium
  misc_feature (1)..(186): tr|A0A432I830|A0A432I830_9BACT GTP cyclohydrolase 1 OS= Fusobacteria bacterium OX=2060921 GN=folE PE=3 SV=1
MDKKMIMDGVKLILQGMGEDISREGLVGTPDRVARMFEEICGGLHKDPAEEISVFFHVNNNDMVIVKDIQFYSLCEHHLLPFYGKVHIAYIPEEGKVTGLSKLARVVDVASKKPQLQERLNNEIVVALMNKLKAKGVLVVIEAEHMCMTMRGIQKPGSKTITSGIRGIFKENLATREEALSLIKHM

SEQ ID NO: 8397 - protein, 115 aa, Fusobacteriia bacterium
  misc_feature (1)..(115): tr|A0A1W9VX68|A0A1W9VX68_9BACT GTP cyclohydrolase 1 OS= Fusobacteriia bacterium 4572_74 OX=1972457 GN=B6227_060 60 PE=3 SV=1
MDKNKIMDGVKLILEGMGEDINREGLIGTPDRVARMFGEICGGLHKDPADEISIFFHVDHNDMVIVKDIQFYSLCEHHLLPFYGKVHIAYIPENGKVTGLSKLIKDNYIWGKRNI

SEQ ID NO: 8398 - protein, 186 aa, Fusobacteriia bacterium
  misc_feature (1)..(186): tr|A0A1W9TF36|A0A1W9TF36_9BACT GTP cyclohydrolase 1 OS= Fusobacteriia bacterium 4572_132 OX=1971640 GN=folE PE= 3 SV=1
MDIAKLEKATRMILEAIGEDPDREGLVDTPKRVARMYEEIFAGIKKDPSDEVSVFFTEEHNEMILVKDIPLYSMCEHHLIPFIGKAHVAYLPGESGKVTGLSKIARVVDVVSKRPQLQERLTTVVAETLMEKLAAKGVLVVVEAEHLCMAMRGVKKPGTKTITSAVRGIFKEDLATRQEAFTLIKY

SEQ ID NO: 8399 - protein, 183 aa, Fusobacterium canifelinum
  misc_feature (1)..(183): tr|A0A3P1UQT8|A0A3P1UQT8_9FUSO GTP cyclohydrolase 1 OS= Fusobacterium canifelinum OX=285729 GN=folE PE=3 SV=1
MDSKRIENAFVEVVEALGDVEYKEELKDTPKRIADSYKEIFYGIGVDPKEVLTRTFEINNNELIIEKNIDFYSMCEHHFLPFFGTICIAYIPNKKIFGFGDILKLIEILSRRPQLQERLTEEIAKYIYELLDCQGVYVVVEAKHLCMTMRGQKKENTKILTTSAKGVFETDINKKLEVLTLLK

SEQ ID NO: 8400 - protein, 191 aa, Fusobacterium equinum
  misc_feature (1)..(191): tr|A0A133N8C2|A0A133N8C2_9FUSO GTP cyclohydrolase 1 OS= Fusobacterium equinum OX=134605 GN=folE PE=3 SV=1
MIDKKVIQEHVKGLLLALGEDPNREGLLETPKRVANMYEEIFEGIQYSNQELATMFGKTFEGDSETNSDDMVIIRDIEIFSVCEHHLALMYDMKVTVAYIPNKKLLGLSKVARICDMVGKRLQLQERIGRDIAEIMQKVTDSEDIAVLIQGKHSCMTMRGIKKQQSITETSCFLGKFKENLVLQNRLYQRL

SEQ ID NO: 8401 - protein, 184 aa, Fusobacterium equinum
  misc_feature (1)..(184): tr|A0A133NK74|A0A133NK74_9FUSO GTP cyclohydrolase 1 OS= Fusobacterium equinum OX=134605 GN=folE PE=3 SV=1
MDEKRIAKAFEEILEAIGENRNREGLEETPIRVAKSYQELFSGIGQDPRKVLQRTFNVKKNDYIIEKQIDFYSMCEHHFLPFFGKIDIAYIPNGKILGFGDLLKLVDILSKRPQIQERLTEEIATYLYEELRCQGVFVRVKAKHLCMTMRGEKKENTEIITVSSNGVFEMDSQKRFEVLQLLNS

SEQ ID NO: 8402 - protein, 184 aa, Fusobacterium gonidiaformans; identical to SEQ ID NO: 8401
  misc_feature (1)..(184): tr|E5BGN7|E5BGN7_9FUSO GTP cyclohydrolase 1 OS=Fusobact erium gonidiaformans 3-1-5R OX=469605 GN=folE PE=3 SV=1

SEQ ID NO: 8403 - protein, 191 aa, Fusobacterium gonidiaformans
  misc_feature (1)..(191): tr|E5BED6|E5BED6_9FUSO GTP cyclohydrolase 1 OS=Fusobact erium gonidiaformans 3-1-5R OX=469605 GN=folE PE=3 SV=1
MIDKKAIQEHVKGLLLALGEDPNREGLLETPKRVANMYEEIFEGIQYSNQELATMFGKTFEGDSETNSDDMVIIRDIEIFSVCEHHLALMYDMKVTVAYIPNKKLLGLSKVARICDMVGKRLQLQERIGRDIAEIMQKVTDSEDIAVLIQGKHSCMTMRGIKKQQSITETSCFLGKFKENLVLQNRLYQRL

SEQ ID NO: 8404 - protein, 183 aa, Fusobacterium hwasookii
  misc_feature (1)..(183): tr|A0A0S2ZIW6|A0A0S2ZIW6_9FUSO GTP cyclohydrolase 1 OS= Fusobacterium hwasookii ChDC F300 OX=1307444 GN=folE PE =3 SV=1
MDSKRIENAFIEVVEALGDVEYKEELKDTPKRIADSYKEIFYGIGIEPKEVLTRTFDINNNELIIEKNIDFYSMCEHHFLPFFGTICIAYIPNKKIFGFGDILKLIEILSRRPQLQERLTEEIAKYIYDLLDCQGVYVVVEAKHLCMTMRGQKKENTKILTTSAKGVFETDINKKLEVLTLLK

SEQ ID NO: 8405 - protein, 183 aa, Fusobacterium hwasookii
  misc_feature (1)..(183): tr|J8VJH2|J8VJH2_9FUSO GTP cyclohydrolase 1 OS=Fusobact erium hwasookii ChDC F128 OX=1216362 GN=folE PE=3 SV=1
MDSKRIENAFIEVVEALGDVEYKEELKDTPKRIADSYKEIFYGIGIDPKEVLTRTFDINNNELIIEKSIDFYSMCEHHFLPFFGTICIAYIPNKKIFGFGDILKLIEILSRRPQLQERLTEEIAKYIYDLLDCQGVYVVVEAKHLCMTMRGQKKENTKILTTSAKGVFETDINKKLEVLTLLK

SEQ ID NO: 8406 - protein, 183 aa, Fusobacterium mortiferum
  misc_feature (1)..(183): tr|A0A414PXG6|A0A414PXG6_FUSMR GTP cyclohydrolase 1 OS= Fusobacterium mortiferum OX=850 GN=folE PE=3 SV=1
MELKKIEKAFEQILEGIGEDRNREGLIDTPKRVAQSYEELFSGIDKNPEEPLLRYFSVDSNDLVMEKNIDFYSMCEHHFLPFFGTIDVAYIPNGKVVGFGDIIKSIEILAKRPQIQERLGSELADVIYKTLDCQGVMVIIKAKHLCMTMRGAKKENSQIITTACRGIFEKDSNRRVEVLTLLK

SEQ ID NO: 8407 - protein, 183 aa, Fusobacterium mortiferum
  misc_feature (1)..(183): tr|C3WF72|C3WF72_FUSMR GTP cyclohydrolase 1 OS=Fusobact erium mortiferum ATCC 9817 OX=469616 GN=folE PE=3 SV=1
MELKKIEKAFEQILEGIGEDRNRESLMDTPKRVAQSYEELFSGIDKNPEEPLLRYFSVDSNDLVMEKNIDFYSMCEHHFLPFFGTIDVAYIPNGKVVGFGDIIKSIEILAKRPQIQERLGSELADVIYKTLDCQGVMVIIKAKHLCMTMRGAKKENSQIITTACRGIFEKDSNRRVEVLTLLK

SEQ ID NO: 8408 - protein, 183 aa, Fusobacterium necrogenes
  misc_feature (1)..(183): tr|A0A377GYL9|A0A377GYL9_9FUSO GTP cyclohydrolase 1 OS= Fusobacterium necrogenes OX=858 GN=folE_2 PE=3 SV=1
MELKKIEKAFEMILDGIGEDKNREGLVDTPKRVAQSYEEFFSGVNKDPIEPLLKYFSVENNDLVMERNIDFYSMCEHHFLPFFGTIDIAYIPNGKIVGFGDIIKSIEILTKRPQIQERLGSELADVIYRTLNCQGVMVAIRAKHLCMTMRGVKKENSQIITTAYRGVFEDDAARRIEILTLLK

SEQ ID NO: 8409 - protein, 191 aa, Fusobacterium necrogenes
  misc_feature (1)..(191): tr|A0A377GWL6|A0A377GWL6_9FUSO GTP cyclohydrolase 1 OS= Fusobacterium necrogenes OX=858 GN=folE_1 PE=3 SV=1
MIDKEAIEKHIRGILIALGDNPDREGLIETPKRVANMYEEIFQGMNYTNDEIVEMYNKSFEVLNNLESNDMVIVKDIEIFSCCEHHLALMYDMSVTVAYIPKDKVIGLSKIARICDMIGKRLQLQERIGRDIAYIVSKIINSEDIAVLIKGKHSCMTARGINKTNSFTETSIFMGEFKENYVLQNRLFNRL

SEQ ID NO: 8410 - protein, 184 aa, Fusobacterium necrophorum
  misc_feature (1)..(184): tr|J5W2M9|J5W2M9_9FUSO GTP cyclohydrolase 1 OS=Fusobact erium necrophorum subsp. funduliforme Fnf 1007 OX=11614 24 GN=folE_2 PE=3 SV=1
MDEKKIVKAFEEILEAIGENKHREGLEETPTRIAKSYRELFSGIGQDPRNVLQRTFAVKKNDYIIEKNIDFYSMCEHHFLPFFGKIDIAYIPDGKILGFGDLLKLVDVLSKRPQIQERLTEEIARYLYECLRCQGVFVRVKAKHLCMTMRGEKKENTEIITVSSNGLFQVDSQKRLEVLQLLHS

SEQ ID NO: 8411 - protein, 191 aa, Fusobacterium necrophorum
  misc_feature (1)..(191): tr|A0A017H4K8|A0A017H4K8_9FUSO GTP cyclohydrolase 1 OS= Fusobacterium necrophorum subsp. funduliforme B35 OX=12 26633 GN=folE PE=3 SV=1
MVDKKAIQEHIRGLLIALGEDPEREGLLETPERVANMYEEIFEGIQYSNADLAKMFGKTFEGDHPTESDDMVIVRDIEIFSVCEHHLALMYDMKVTVAYLPNKKLLGLSKVARICDMVGKRLQLQERMGRDIAEIMQKVTDSQDVAVFIQGKHSCMTMRGIKKQQSITETSCFLGKFKENLLLQNRVYSRS

SEQ ID NO: 8412 - protein, 187 aa, Fusobacterium nucleatum
  misc_feature (1)..(187): sp|Q8RH43|GCH1_FUSNN GTP cyclohydrolase 1 OS=Fusobacter ium nucleatum subsp. nucleatum (strain ATCC 25586 / CIP 101130 / JCM 8532 / LMG 13131) OX=190304 GN=folE PE=3 SV=1
MEEKMDSKRIENAFFEVIEALGDVEYKEELKDTPKRIADSYKEIFYGIDIDPKEVLTKTFEVNSNELIMEKNMDFYSMCEHHFLPFFGTVCIAYVPNKKIFGFGDILKLIEILSRRPQLQERLTEEIAKYIYEILNCQGVYVVVEAKHLCVTMRGQKKENTKILTTSAKGVFETDSNKKLEVLTLLK

SEQ ID NO: 8413 - protein, 183 aa, Fusobacterium nucleatum
  misc_feature (1)..(183): tr|Q7P4X3|Q7P4X3_FUSNV GTP cyclohydrolase 1 OS=Fusobact erium nucleatum subsp. vincentii ATCC 49256 OX=209882 G N=folE PE=3 SV=1
MNSKKIENAFVEVIEALGDVEYKEELKDTPKRIADSYKEIFYGINIDPKEVLTRTFEVNSNELIIEKNIDFYSMCEHHFLPFFGTICIAYIPNKKIFGFGDILKLIEILSRRPQLQERLTEEIAKYIYEILNCQGVYVVVEAKHLCMTMRGQKKENTKILTTSAKGIFETDINKKLEVLTLLK

SEQ ID NO: 8414 - protein, 183 aa, Fusobacterium periodonticum
  misc_feature (1)..(183): tr|K1GJV8|K1GJV8_9FUSO GTP cyclohydrolase 1 OS=Fusobact erium periodonticum D10 OX=620833 GN=folE PE=3 SV=1
MDSKRIENAFLEVVEALGDVEYKAELKDTPKRIADSYKEIFYGIGIDPKEVLTRTFDINNNELIMEKNIDFYSMCEHHFLPFFGTICIAYVPNKKIFGFGDILKLIEILSRRPQLQERLTEEIARYIYELLDCQGVYVVVEAKHLCMTMRGQKKENTKILTTSAKGIFETDINKKLEVLALLK

SEQ ID NO: 8415 - protein, 187 aa, Fusobacterium periodonticum
  misc_feature (1)..(187): tr|A0A2D3LVP5|A0A2D3LVP5_9FUSO GTP cyclohydrolase 1 OS= Fusobacterium periodonticum OX=860 GN=folE PE=3 SV=1
MGYINTVTQTDENTIKAEKGIVDLLIALGEDPEREGLKDTPKRVVKAFKEMTSGYGVNVNEILSKTFTSDNNNEVEINDIQFNSLCEHHMLPFIGTVKVKYTPKNGKVVGLSKIPRVVEAFAKRLQIQEKMTKEIAEAIQTNLDCAGVYVEVEARHMCMELRGIKARGSKTKTVYKTGCYLRGDNNC

SEQ ID NO: 8416 - protein, 183 aa, Fusobacterium sp.
  misc_feature (1)..(183): tr|X8HDH2|X8HDH2_9FUSO GTP cyclohydrolase 1 OS=Fusobact erium sp. CM22 OX=936563 GN=folE PE=3 SV=1
MDSKRIENAFIEVVEALGDVEYKEELKDTPKRIADSYKEIFYGIGVDPKEVLTRTFEINNNELIIEKNIDFYSMCEHHFLPFFGTICIAYIPNKKIFGFGDILKLIEILSRRPQLQERLTEEIAKYIYDLLDCQGVYVVVEAKHLCMTMRGQKKENTKILTTSAKGVFETDINKKLEVLTLLK

SEQ ID NO: 8417 - protein, 183 aa, Fusobacterium sp.
  misc_feature (1)..(183): tr|R5X116|R5X116_9FUSO GTP cyclohydrolase 1 OS=Fusobact erium sp. CAG:649 OX=1262900 GN=folE PE=3 SV=1
MDSKKIENAFVEVIEALGEAQYKEELKDTPKRIADSYKEIFYGIGINPKEVLKRTFEVNSDELIIEKNIDFYSMCEHHFLPFFGTICIAYIPNKKIFGFGDILKLIEILSRRPQLQERLTEEIAKYIYEILNCQGVYVVVEAKHLCMTMRGQKKENTKILTTSAKGIFETDINKKLEVLTLLK

SEQ ID NO: 8418 - protein, 186 aa, Fusobacterium ulcerans
  misc_feature (1)..(186): tr|A0A2P1S4G4|A0A2P1S4G4_9FUSO GTP cyclohydrolase 1 OS= Fusobacterium ulcerans OX=861 GN=folE PE=3 SV=1
MKKIDVDKIENAFRDILDALGENVKREGLEDTPKRVAQSYGELFSGLFQNPEDVLKRTFEVEKNDLIVEKNIDFYSMCEHHFLPIFGKIDIAYIPNGKIVGFGDIIKVIDILSKRPQIQERLGAQIADAIYETLNCQGVMIIIKAKHMCMTMRGEKKVNSEIITTSYRGVFEDDAVRRMEILSLLK

SEQ ID NO: 8419 - protein, 186 aa, Fusobacterium ulcerans
  misc_feature (1)..(186): tr|H1PV36|H1PV36_9FUSO GTP cyclohydrolase 1 OS=Fusobact erium ulcerans 12-1B OX=457404 GN=folE PE=3 SV=1
MKKIDVDKIENAFRDILDALGENVKREGLEDTPKRVAQSYGELFSGLFQNPEDVLKRTFEVEKNDLIVEKNIDFYSMCEHHFLPIFGKIDIAYIPNGKIVGFGDIIKVIDILSKRPQIQERLGAQIADAIYETLNCQGVMIIIKAKHMCMTMRGEKRVNSEIITTSYRGVFEDDAVRRMEILSLLK

SEQ ID NO: 8420 - protein, 186 aa, Fusobacterium varium
  misc_feature (1)..(186): tr|A0A414TX85|A0A414TX85_FUSVA GTP cyclohydrolase 1 OS= Fusobacterium varium OX=856 GN=folE PE=3 SV=1
MKKIDENKIENAFRDIIDALGENINREGLKDTPKRMAQSYGELFSGLLQNPEDVLKRTFEVEKNDLIVEKNIDFHSMCEHHFLPIFGKIDIAYIPNGKIVGFGDIIKVIDILSKRPQIQERLGAQIADAIYETLNCQGVMIIIKAKHMCMTMRGEKRVNSEIITTSYRGIFENDAVRRMEIFSLLK

SEQ ID NO: 8421 - protein, 186 aa, Fusobacterium varium
  misc_feature (1)..(186): tr|C6JJY4|C6JJY4_FUSVA GTP cyclohydrolase 1 OS=Fusobact erium varium ATCC 27725 OX=469618 GN=folE PE=3 SV=1
MKKIDENKIENAFRDIIDALGENINREGLKDTPKRMAQSYGELFSGLLQNPEDVLKRTFEVEKNDLIVEKDIDFHSMCEHHFLPIFGKIDIAYIPNGKIVGFGDIIKVIDILSKRPQIQERLGAQIADAIYETLNCQGVMIIIKAKHMCMTMRGEKRVNSEIITTSYRGIFENDAVRRMEIFSLLK

SEQ ID NO: 8422 - protein, 225 aa, Gaetbulibacter sp.
  misc_feature (1)..(225): tr|A0A2G5GGB3|A0A2G5GGB3_9FLAO GTP cyclohydrolase 1 OS= Gaetbulibacter sp. 4G1 OX=1891971 GN=folE PE=3 SV=1
MKIENKIEDFESLGDDHIGTSSNTPLRNDAFKLSNEEKIDIIKDDVRHIMETLGLDLSDDSLSGTPNRVAKMFVKEIFGGLNPKKKPSASTFDNKYKYGEMLVEKNITVYSTCEHHLLPIVGKAHIAYISNGTVVGLSKMNRIVDYFAKRPQVQERLTIQVVKELQEVLDTKDVACVIDAKHLCVNSRGIRDIESSTVTSEFGGKFKEEATRREFLDYIKLDTKF

SEQ ID NO: 8423 - protein, 231 aa, Gaetbulibacter sp.
  misc_feature (1)..(231): tr|A0A2G5KUY1|A0A2G5KUY1_9FLAO GTP cyclohydrolase 1 OS= Gaetbulibacter sp. 5U11 OX=1889780 GN=folE PE=3 SV=1
MIKQNAMPTLNHQDLNGIDYQDIGDDHMYTGLETPMKSDAFKFSDEIKKEKIAILFEEIMDVMGLDLTDDSLKGTPKRVAKMYIDEIFSGLNPQNKPKIALFDNKYKYNQMLVEKNITFYSNCEHHFVPIIGKAHVAYISSGKVIGLSKLNRIVQYFAKRPQVQERLTNQIAEELKAALQTDDVAVIIDAKHLCVSSRGIKDETSATVTTFYGGRFNTPEKIAELQNYLKE

SEQ ID NO: 8424 - protein, 189 aa, Gaiellales bacterium
  misc_feature (1)..(189): tr|A0A419GM38|A0A419GM38_9ACTN GTP cyclohydrolase 1 OS= Gaiellales bacterium OX=2093372 GN=folE PE=3 SV=1
MDPEKIKSGVRLILEGIGEDPGRDGLSSTPERVAAMYEDIFSGLAVEPTSVISTMPGDRHQEMILLKDISYFSMCEHHLLPFFGKAHLAYIPSKGGLITGLSKLTHLVQVVARRPQLQERMTSMIADSLEEALEPRGVLVLVEAEHLCMAMRGIRSPAQTVTSAVRGIFRTNAATRAEALSLINAGSGQ

SEQ ID NO: 8425 - protein, 226 aa, Galbibacter marinus
  misc_feature (1)..(226): tr|K2PRT7|K2PRT7_9FLAO GTP cyclohydrolase 1 OS=Galbibac ter marinus OX=555500 GN=folE PE=3 SV=1
MKIDKALEDHYEDLGNDHVSSAAETPMRADAFELSDDQKIEQIESQMYTILETLGLDLTDDSLRGTPRRVAKMFVKEIFAGLHPDRRPKASTFSNKYKYGEMLVEKNITVYSTCEHHLLPIVGRAHIAYISNGSVVGLSKMNRIVDYFAKRPQVQERMTMQIVQELQRALNTKDVACVIDAKHLCVNSRGIRDIESSTVTAEFGGKFKDNAVRREFLDYIKLDTEF

SEQ ID NO: 8426 - protein, 198 aa, Galbibacter marinus
  misc_feature (1)..(198): tr|K2PXA9|K2PXA9_9FLAO GTP cyclohydrolase 1 OS=Galbibac ter marinus OX=555500 GN=folE PE=3 SV=1
MGYKTFDEYAIQTTDELKNNYSNIIKELGEDPKREGLFKTPERAAKAMQFLTQGYDQDATQIIKSAMFKEDYNEMVIVKDIELYSLCEHHLLPFFGKAHIAYIPNGYIVGLSKLPRIVDVFSRRLQVQERLTHDILECINNTLNPQGVAVVIEASHMCMMMRGVQKQNSTTTTSGFRGQFEKIETRNEFLKLISTDLS

SEQ ID NO: 8427 - protein, 296 aa, Gallaecimonas pentaromativorans
  misc_feature (1)..(296): tr|A0A3N1P4A6|A0A3N1P4A6_9GAMM GTP cyclohydrolase FolE2 OS=Gallaecimonas pentaromativorans OX=584787 GN=folE2 PE=3 SV=1
MTHALPDVSLSESPLNASALEWVGMEGIDLPITLAEPGYRRQLHAKVDMQVDLPEPGIKGIHMSRLYRLLEPLANGRALLPGRLRQLLRAMVASHGDCHSSHARLRLHFSLLVRRAALKSDGLSGWKAYPMVIDASLVGGQVALTSQVTVAYSSTCPCSAALTRQLQEQGFLAAFAGQGLLAPETVAAWLRQHGTLATPHSQRSLAEVSVSHSSGAGHFGLLGLIDTIEQALATPVQTAVKRADEQAFAALNGQNLMFVEDAARRLQGALAHYPEAKIKVRHMESLHPHDAIAMAG

SEQ ID NO: 8428 - protein, 183 aa, Gallaecimonas pentaromativorans
  misc_feature (1)..(183): tr|A0A3N1PHV4|A0A3N1PHV4_9GAMM GTP cyclohydrolase 1 OS= Gallaecimonas pentaromativorans OX=584787 GN=folE PE=3 SV=1
MTEQLAKHYEAIIRGLGEDPSREGLLKTPERAAKAMQYLTQGYQQSLEELVNGAVFSSDNDELVIVKDIELYSLCEHHLLPFVGKCHIGYLPNGKVLGLSKFARIVDMFARRLQIQENLTRQIALAVEEVTGAQGVAVVIEAKHMCMMMRGVEKQNSSMKSSVMLGSFRESTDTRREFLSLIR

SEQ ID NO: 8429 - protein, 183 aa, Gallaecimonas xiamenensis
  misc_feature (1)..(183): tr|K2K1I0|K2K1I0_9GAMM GTP cyclohydrolase 1 OS=Gallaeci monas xiamenensis 3-C-1 OX=745411 GN=folE PE=3 SV=1
MTEQLAKHYEAIIRGLGEDPSREGLLKTPERAAKAMQYLTKGYHQSLEELVNGAVFSSDNDELVIIKDIELYSLCEHHLLPFVGRCHIGYLPSGKVLGLSKFARIVDMFARRLQIQENLTREIALAVQEVTGAKGVGVVIEAKHMCMQMRGVEKQNSVMKSSVMLGALRESSDTRKEFLSLLR

SEQ ID NO: 8430 - protein, 294 aa, Gallaecimonas xiamenensis
  misc_feature (1)..(294): tr|K2IHN0|K2IHN0_9GAMM GTP cyclohydrolase FolE2 OS=Gall aecimonas xiamenensis 3-C-1 OX=745411 GN=folE2 PE=3 SV= 1
MPSSLPDVARQQDPCYRPLDQVGMSGLALPLHLDGALVLAKADVSVNLGQAGTKGIHMSRLHLALEALSEQLLYGVKPLHHCLDQCVNSQQGSADSARLRLAFDYPLRRPSLVSGHRGWKAYPIALEAELAKGRFRAWLQLTLPYSSTCPCSAALARQLVAADFAQQFPGSLDKEAVLAWLQSPEGVAATPHSQRSEAQITVSLGDNLPIAPLIDLLESALKTPVQTLVKREDEQAFARLNGRHPLFVEDAARTLAQTLEQSPFGGDFRVRVVHKESLHAHDAVAEISQGLPDG

SEQ ID NO: 8431 - protein, 218 aa, Gallibacterium anatis
  misc_feature (1)..(218): tr|A0A0A2XVM9|A0A0A2XVM9_9PAST GTP cyclohydrolase 1 OS= Gallibacterium anatis OX=750 GN=folE PE=3 SV=1
MNTISLEAQQVRAALSAKGLETPMVPRVGTQDERRQKIEQHMKEVMTILGLDLSDDSLEETPKRLAKMYLDEIFSGLDYHNFPKITRIENRMNVSEMVLVNDINLTSTCEHHFVTFSGKVSVAYYPKKWVIGLSKINRVVDFFAQRPQVQERLTEQILTAFQTILETDDVAVYVRATHFCVKCRGVRDANSFTVTSAYGGIFSQDRATKQEFLSLISK

SEQ ID NO: 8432 - protein, 218 aa, Gallibacterium anatis; identical to SEQ ID NO: 8431
  misc_feature (1)..(218): tr|F4HFC4|F4HFC4_GALAU GTP cyclohydrolase 1 OS=Gallibac terium anatis (strain UMN179) OX=1005058 GN=folE PE=3 S V=1

SEQ ID NO: 8433 - protein, 218 aa, Gallibacterium genomosp.
  misc_feature (1)..(218): tr|A0A1A7PDX9|A0A1A7PDX9_9PAST GTP cyclohydrolase 1 OS= Gallibacterium genomosp. 1 OX=155515 GN=folE PE=3 SV=1
MNTISLEAQQVRAALLSKGLETPMMPRVGTQDERRQKIEQHMKEVMTILGLDLRDDSLEETPKRLAKMYLDEIFSGLDYHNFPKITRIENRMNVSEMVLVNDINLTSTCEHHFVTFSGKVAVAYYPKKWVIGLSKINRVVDFFAQRPQVQERLTEQILTAFQTILETDDVAVYVRATHFCVKCRGVRDANSFTVTSAYGGIFSQDRATKQEFLSLISK

SEQ ID NO: 8434 - protein, 218 aa, Gallibacterium genomosp.
  misc_feature (1)..(218): tr|A0A1A7NQA4|A0A1A7NQA4_9PAST GTP cyclohydrolase 1 OS= Gallibacterium genomosp. 3 OX=505345 GN=folE PE=3 SV=1
MNTISLEAQQVRAALSAKGIETPMVARVGTQDERRQKIEQHMREVMNILGLDLRDDSLEETPKRLAKMYLDEIFSGLDYHNFPKITRIENRMNVSEMVLVNDINLTSTCEHHFVTFAGKVSVAYYPKDWVIGLSKINRVVDFLAQRPQVQERLTEQILVAFQTLLETEDVAVYVRATHFCVKCRGVRDANSFTVTSAYGGVFQQDRERKQEFLALISK

SEQ ID NO: 8435 - protein, 218 aa, Gallibacterium salpingitidis
  misc_feature (1)..(218): tr|A0A1A7Q195|A0A1A7Q195_9PAST GTP cyclohydrolase 1 OS= Gallibacterium salpingitidis OX=505341 GN=folE PE=3 SV= 1
MNTISQEAQQVRAALAAKGLETPMVARVGTQDERRQKIEQHMREVMNILGLDLRDDSLEETPKRLAKMYLDEIFSGLDYHNFPKITRIENRMKVSEMVLVNDINLTSTCEHHFVTFAGKVSVAYYPKDWVIGLSKINRVVDFFAQRPQVQERLTEQILTAFQTLLQTEDVAVYVRATHFCVKCRGVRDANSFTVTSAYGGVFLQDRATRQEFLSLISK

SEQ ID NO: 8436 - protein, 218 aa, Gallibacterium salpingitidis
  misc_feature (1)..(218): tr|A0A1A7NZE2|A0A1A7NZE2_9PAST GTP cyclohydrolase 1 OS= Gallibacterium salpingitidis OX=505341 GN=folE PE=3 SV= 1
MNTISQEAQQVRAALATKGLETPMVARVGTQDERRQKIEQHMREVMNILGLDLRDDSLEETPKRLAKMYLDEIFSGLDYHNFPKITRIENRMKVSEMVLVNDINLTSTCEHHFVTFAGKVSVAYYPKDWVIGLSKINRVVDFFAQRPQVQERLTEQILTAFQTLLQTEDVAVYVRATHFCVKCRGVRDANSFTVTSAYGGVFLQDRATRQEFLSLISK

SEQ ID NO: 8437 - protein, 265 aa, Gallionella capsiferriformans
  misc_feature (1)..(265): tr|D9SJ84|D9SJ84_GALCS GTP cyclohydrolase FolE2 OS=Gall ionella capsiferriformans (strain ES-2) OX=395494 GN=fo lE2 PE=3 SV=1
MNNTAPIPDVQSSADLRHIAINRVGIKGIRHPVKVQDKSVGVQHTIATFNMYVHLPHNFKGTHMSRFVEILNRHEREISVESYESILREMVVLLEAESGYIEMSFPYFVNKTAPVSGVQSLLDYDVTLIGEMKDGKASVTMKVLVPVTSLCPCSKKISDRGAHNQRSHVTITLRTNSFVWIEDVVRIAEEQASCELYGLLKRPDEKYVTERAYDNPKFVEDMVRDVAAVLNADARIDAYVVESENFESIHNHSAYALIERDKTNG

SEQ ID NO: 8438 - protein, 267 aa, Gallionella sp.
  misc_feature (1)..(267): tr|A0A3D2NMZ7|A0A3D2NMZ7_9PROT GTP cyclohydrolase FolE2 OS=Gallionella sp. OX=2052161 GN=folE2 PE=3 SV=1
MNSPKLEPIADVQSTADLRQIAINRVGIKGIRHPVVVKDKSVGVQHTIATFNMYVHLPHNFKGTHMSRFVEILNQHEREISVESFEHILREMVERLEAQSGYIEMSFPYFVNKTAPVSGVQSLLDYDVTLIGEIKEGRAQVTMKVLVPVTSLCPCSKKISERGAHNQRSHVTITISANRFVWIEDVVHIAEQQASCELYGLLKRPDEKYVTERAYDNPKFVEDMVRDVAAVLNADERIDAYIVESENFESIHNHSAYALIERDKTKD

SEQ ID NO: 8439 - protein, 270 aa, Gallionella sp.
  misc_feature (1)..(270): tr|A0A522X268|A0A522X268_9PROT GTP cyclohydrolase FolE2 OS=Gallionella sp. OX=2052161 GN=folE2 PE=3 SV=1
MNTVARNHIPDVQNSADTRQLAINRVGIKGIRHPVRVKDKSIGVQHTIATFNMYVHLPHNFKGTHMSRFVEILNEHEREISVESFESILHEMVTRLEARSGYIEMSFPYFVNKAAPVSGVQSLLDYDVTLIGEVIDGKTRTTMKVIVPVTSLCPCSKKISERGAHNQRSHVTLTLRTNSFVWIEDVVRIAEEQASCELFGLLKRPDEKFVTERAYDNPKFVEDMVRDVAAVLNADERIDAYVVESENFESIHNHSAYALIERDKTVKGEG

SEQ ID NO: 8440 - protein, 265 aa, Gallionellaceae bacterium
  misc_feature (1)..(265): tr|A0A3B9NZN8|A0A3B9NZN8_9PROT GTP cyclohydrolase FolE2 OS=Gallionellaceae bacterium OX=2052162 GN=folE2 PE=3 SV=1
MTSAKPIADVQNSADTRQLAINKVGIKSIRHPIQVKDKSLGVQHTIATFNMYVHLPHNFKGTHMSRFVQILNQHGREISVESFESILREMVEKLEAKSGYIEMSFPYFVNKIAPVSGVQSMLDYDVTFIGEVVDGAYRFTMKVLIPVTSLCPCSKEISDRGAHNQRSHVTLTVRTRSSVWIEEVVRFAEDHASSELYGLLKRPDEKFVTERAYDNPKFVEDMVRDVAAVLNADDRIEAYTVESENFESIHNHSAYALIERDKTQG

SEQ ID NO: 8441 - protein, 265 aa, Gallionellaceae bacterium
  misc_feature (1)..(265): tr|A0A2H0NLD4|A0A2H0NLD4_9PROT GTP cyclohydrolase FolE2 OS=Gallionellaceae bacterium CG11_big_fil_rev_8_21_14_ 0_20_60_62 OX=1974012 GN=folE2 PE=3 SV=1
MNSIAPIPDVQSGPDTRHIAIDRVGIKSIRHPVVVSDKSEGVQHTIATFNMYVHLPHNFKGTHMSRFVEILNRHGREISVESFEEILREMVDKLEAQSGYIEMAFPYFVNKTAPVSGVQSLLDYDVTFIGEIIEGKYRFSMKVLVPVTSLCPCSKKISERGAHNQRSHVTLTVRTNGVVWIEELVRMAEEQASSELYGLLKRPDEKYVTEYAYDHPKFVEDMVRDIAAALNADERIDTYVVESENFESIHNHSAYALIERDKIRD

SEQ ID NO: 8442 - protein, 270 aa, Gallionellales bacterium
  misc_feature (1)..(270): tr|A0A1G0DNP9|A0A1G0DNP9_9PROT GTP cyclohydrolase FolE2 OS=Gallionellales bacterium RIFCSPLOWO2_02_58_13 OX=17 98252 GN=folE2 PE=3 SV=1
MSPPKPKPIADVQSSADIRHLAINRVGIKGIRHPVKVKDKSIGVQHTVATFNMYVHLPHNFKGTHMSRFVEILNEHEREISVESFGSILREMVLRLEAESGFIEMNFPYFVNKTAPVSGVKSLLDYDVTFIGECDGGNPRFTMKVIVPVTSLCPCSKKISDRGAHNQRSHVTLTLRTNSFVWVEDVIRIAEEQASCELFGLLKRPDEKFVTERAYDNPKFVEDMVRDVAAVLNADERIDAYIVESENFESIHNHSAYALIERDKTVKGEG

SEQ ID NO: 8443 - protein, 267 aa, Gallionellales bacterium
  misc_feature (1)..(267): tr|A0A2M8DZT3|A0A2M8DZT3_9PROT GTP cyclohydrolase FolE2 OS=Gallionellales bacterium CG_4_9_14_0_8_um_filter_55 _61 OX=1974015 GN=folE2 PE=3 SV=1
MNSPKLEPIADVQSTADLRQIAINRVGIKGIRHPVVVKDKSVGVQHTIATFNMYVHLPHNFKGTHMSRFVEILNRHEREISVESFEHILREMVERLEAQSGYIEMSFPYFVNKTAPVSGVQSLLDYDVTLIGEIKEGRAQVTMKVLVPVTSLCPCSKKISERGAHNQRSHVTITISANRFVWIEDVVHIAEQQASCELYGLLKRPDEKYVTERAYDNPKFVEDMVRDVAAVLNADERIDAYIVESENFESIHNHSAYALIERDKTKD

SEQ ID NO: 8444 - protein, 305 aa, Unknown
  misc_feature (1)..(305): tr|E1VNW4|E1VNW4_9GAMM GTP cyclohydrolase FolE2 OS=gamm a proteobacterium HdN1 OX=83406 GN=folE2 PE=3 SV=1
MPDVAIHSQPKAFGLLDWVGMSGIDTPVSLLTRKGVATHAVAKAQAYVNLKNPKAKGIHMSRLYLLLDESSNQPMTPASLSELLSRFLESHQGLSDRAYIDFRFDLLLRRPALKSEFSGWKAYPVHVVARHLQGEFSAEFSVDIPYSSTCPCSAALARQLIQQQFQHDFGQQASVSVEDVQAWLGSERGIVATPHSQRSIAQVKVRVADSAQQFPIEDLIDLVEGSLKTPVQTAVKREDEQEFARLNGQNLMFCEDAARRVQAALNEKPAYVDYWVRVNHLESLHAHDAVSVITKGVEGGYSPMP

SEQ ID NO: 8445 - protein, 272 aa, Unknown
  misc_feature (1)..(272): tr|A0A2T6MYK7|A0A2T6MYK7_9GAMM GTP cyclohydrolase FolE2 OS=gamma proteobacterium symbiont of Ctena orbiculata OX=1968598 GN=folE2 PE=3 SV=1
MLDKTPLSGSQIADVQNSADMRQIAINKVGIKDIRHPMRIRDRSEGEQHTIANFNMYVNLPHNFKGTHMSRFVEILNSHETEVTVESFKDMLAEMTERLEAESGHIEMNFPFFINKTAPVSGVKSLLDYDVTLIGEIHGGKPVIDIKVVVPVTSLCPCSKKISDRGAHNQRSHVTVQARTRDFIWIEEIIDLVEEQASCELFGLLKRPDEKFVTEHAYDNPKFVEDMVRDIAVQLNREARISAYIVESENFESIHNHSAYALIERDKTKDPV

SEQ ID NO: 8446 - protein, 183 aa, Gammaproteobacteria bacterium
  misc_feature (1)..(183): tr|A0A1G0G8X5|A0A1G0G8X5_9GAMM GTP cyclohydrolase 1 OS= Gammaproteobacteria bacterium RIFCSPHIGHO2_02_FULL_39_1 3 OX=1798270 GN=folE PE=3 SV=1
MNETIESQFENLIRTLGDDPTREGMIGTPQRAHKAMEFLTQGYHEDLTKIINGAIFTSTMDEMIIVKDIELYSLCEHHLLPFFGKCHIAYLPNEKILGLSKFARIVDHFAKRFQVQENLTVQIAECIEKITGAKGVGVIIEAQHLCMMMRGVEKQNSNMITSMMLGRFRSDDRTRSEFLSLVR

SEQ ID NO: 8447 - protein, 296 aa, Gammaproteobacteria bacterium
  misc_feature (1)..(296): tr|A0A2N1YSF9|A0A2N1YSF9_9GAMM GTP cyclohydrolase FolE2 OS=Gammaproteobacteria bacterium HGW-Gammaproteobacter ia-13 OX=2013795 GN=folE2 PE=3 SV=1
MNALTLPDIAAQIPAHVQALDWVGMQGIALPINLAGQRVHAHADVGVSLDDGNARGIHMSRLYLALHALEHQALSPATLQQLLSAFLDSHQDLSQQASITLRGEVLLSRPALVSPLAGWKAYPFEVRARQDSWGFHVELQVEVAYSSTCPCSAALARQLIQQRFIEDFAGRPLDHAQLLAWLGSPQGIVATPHSQRSTATLQVRLQADSTQLPLVELINAAEQALGTAVQTAVKRADEQAFALANGQNLMFCEDAARRLHSALREQAAFSAFHLRVVHAESLHAHDAVAASTWNWR

SEQ ID NO: 8448 - protein, 82 aa, Gandjariella thermophila
  misc_feature (1)..(82): tr|A0A4D4J7E6|A0A4D4J7E6_9PSEU GTP cyclohydrolase 1 OS= Gandjariella thermophila OX=1931992 GN=GTS_27450 PE=3 S V=1
MVEHFACRPQVQERLTKQIAGWLDTQLRPKGVGVVIQAEHTCMTLRGVQAVGSDTVTSTLLGVLREDPRSRQEFFALTGIHP

SEQ ID NO: 8449 - protein, 132 aa, Gandjariella thermophila
  misc_feature (1)..(132): tr|A0A4D4JFY9|A0A4D4JFY9_9PSEU GTP cyclohydrolase 1 OS= Gandjariella thermophila OX=1931992 GN=GTS_55530 PE=3 S V=1
MAGDPTPISQPITGQPEQRPHAALRIVHEPAGVDLAAAERAAGEFLRALGMSTDAEGLRRTPRRMAQAYAELFSPRPFDLTTFPNDEGYDELVLARGIPLRSVCEHHLLPFVGVAHVGYLPGERILGPMRFR

SEQ ID NO: 8450 - protein, 188 aa, Garciella nitratireducens
  misc_feature (1)..(188): tr|A0A1T4MIS5|A0A1T4MIS5_9FIRM GTP cyclohydrolase 1 OS= Garciella nitratireducens DSM 15102 OX=1121911 GN=folE PE=3 SV=1
MDKQKIENAVRQILEAIGENPDREGLKGTPNRIARMYEEIFCGLNQDPGKHLEIYFQEEKHEELVLVKDIPFYSMCEHHLVPFFGKAHVGYLPRGGKLTGLSKIARVVDTVAKRPQLQERLTSTIADIFMEKLNPYGVIVVVQAEHMCMTMRGIKKPGSKTVTSAVRGVFHKDAKVRAEAMSLINFEK

SEQ ID NO: 8451 - protein, 166 aa, Gardnerella vaginalis
  misc_feature (1)..(166): tr|D6SY52|D6SY52_GARVA 7, 8-dihydro-6-hydroxymethylpter in-pyrophosphokinase OS=Gardnerella vaginalis AMD OX=68 2147 GN=GVAMD_0211 PE=4 SV=1
MISSAYISVGSNIGDRLLNLRQAVSLLKQNLHISNIIVSSVYETEPVGDVVQDSFYNIALRLDTDLTAFELLDFIHDIEQRLHRKRIVRWGPRTIDLDIIDFGGQTIKSENLTIPHKERDNRRFVLVPLLEISADDANYHELIQDKLNKTSDTNWINIIESSEVFN

SEQ ID NO: 8452 - protein, 223 aa, Geitlerinema sp.
  misc_feature (1)..(223): tr|K9S8G6|K9S8G6_9CYAN GTP cyclohydrolase 1 OS=Geitleri nema sp. PCC 7407 OX=1173025 GN=folE PE=3 SV=1
MTIAQNGSNGSASTSQIPQAQALSANGNGSAEVGHDEMMEAVRTMLLGVGEDPEREGLLKTPKRVAEAMRFLTSGYSQSLDQLVNGAIFDEGHNEMVLVRDIDVFSLCEHHMLPFIGKAHVAYIPNQKVVGLSKLARIVEMYSRRLQVQERLTRQVAEAIQEILEPQGVAVVMEATHMCMVMRGVQKPGSWTVTSAMVGVFEEEFKTREEFLNLIRHRPSILM

SEQ ID NO: 8453 - protein, 225 aa, Gelidibacter algens
  misc_feature (1)..(225): tr|A0A1A7QSE5|A0A1A7QSE5_9FLAO GTP cyclohydrolase 1 OS= Gelidibacter algens OX=49280 GN=folE PE=3 SV=1
MKTDKNTQDIDALGDDHVGTSAYTPMRSDAFKLSSDEKIDIIKDDVRHIMETLGLDLTDDSLKGTPLRVAKMFVKEIFGGLDPARKPNASTFKNNYKYGEMLVEKNITLYSTCEHHLLPIVGKAHVAYISKGTVVGLSKMNRIVDYYAKRPQVQERLTMQIVQDLQKVLGTDDVACVIDAKHLCVNSRGIRDIESSTVTSEFGGAFKNQDTRREFLDYIKLDTHF

SEQ ID NO: 8454 - protein, 232 aa, Gelidibacter algens
  misc_feature (1)..(232): tr|A0A1A7QWH1|A0A1A7QWH1_9FLAO GTP cyclohydrolase 1 OS= Gelidibacter algens OX=49280 GN=folE PE=3 SV=1
MITEKELQPHKNKYHLNGFSIEDIGDDHLFTGLETPLKPDAFKMSDTDKKQRIAVLFEEIMDVMGLDLTDDSLKGTPDRVAKMYIDEIFSGLNPANKPKIALFDNKYQYNQMLVEKNITLYSNCEHHFVPIFGKAHVAYISSGKVIGLSKLNRIVQYYAKRPQVQERLTNQIAEELKHILGTEDVAVIIDAKHLCVSSRGIKDESSATVTSYYGGKFGTPEKIAELQNYLKD

SEQ ID NO: 8455 - protein, 225 aa, Gelidibacter gilvus
  misc_feature (1)..(225): tr|A0A4Q0XDU9|A0A4Q0XDU9_9FLAO GTP cyclohydrolase 1 OS= Gelidibacter gilvus OX=59602 GN=folE PE=3 SV=1
MKTDKNIQDIDAFGDDHVGSSADTPLRSDAFKLSPDEKIDIIKDDVRHILETLGLDLNDDSLKGTPLRVAKMFVKEIFGGLSPDKKPNASTFDNKYKYGEMLVEKNITVYSTCEHHLLPIVGKAHVAYISNGTVIGLSKMNRIVDYYAKRPQVQERLTIQIVKELQEALGTEDVACVMDAKHLCVNSRGIRDVASSTVTSEFGGQFKNPETRREFLDYIKLDTDF

SEQ ID NO: 8456 - protein, 232 aa, Gelidibacter gilvus
  misc_feature (1)..(232): tr|A0A4Q0XH98|A0A4Q0XH98_9FLAO GTP cyclohydrolase 1 OS= Gelidibacter gilvus OX=59602 GN=folE PE=3 SV=1
MIPEKDLKIFKVNELINGFNANDIGDDHLFSGLETPMKKDAFKLSDKEKKQRIAHLFEEIMDVLGLDLTDDSLKGTPNRVAKMYVDEIFSGLNPANKPKITLFDNKYQYNQMLVEKNISFNSNCEHHFVPIFGKAHVAYISSGKVIGLSKLNRIVQHYAKRPQVQERLTNQIAEDLKHILGTEDVAVILDAKHLCVSSRGIKDESSTTITSYYGGKFGAPEKIAELQNYLKD

SEQ ID NO: 8457 - protein, 225 aa, Gelidibacter salicanalis
  misc_feature (1)..(225): tr|A0A5C7AJ11|A0A5C7AJ11_9FLAO GTP cyclohydrolase 1 OS= Gelidibacter salicanalis OX=291193 GN=folE PE=3 SV=1
MNTDNNIQNIDALGEDHVGTSADTPMRSDAFVLSPEEKIDLIKDDVRHIMETLGLDLTDDSLKGTPMRVAKMFVKEIFGGLSPDRKPNASTFENKYKYGEMLVEKNITLYSTCEHHLLPIVGKAHVAYISKGTVVGLSKMNRIVDYYAKRPQVQERLTMQIVQELQRVLGTDDVACVIDAKHLCVNSRGIRDVESSTVTSEFGGAFKNQDTRREFLDYIKLDTHF

SEQ ID NO: 8458 - protein, 232 aa, Gelidibacter salicanalis
  misc_feature (1)..(232): tr|A0A5C7AQV6|A0A5C7AQV6_9FLAO GTP cyclohydrolase 1 OS= Gelidibacter salicanalis OX=291193 GN=folE PE=3 SV=1
MITEKKVPSPQIQQQLNGICLEDIGDDHLYTGLETPLRPDAFQLSDDEKKKRIAVLFEEIMNVMGLDLTDDSLKGTPKRVAKMYVDEIFSGLNPANKPKITLFDNKYQYNQMLVEKNITLYSSCEHHFVPIFGKAHVAYISSGKVIGLSKLNRIVQYYAQRPQVQERLTNQIAEELKHILGTEDVAVIIDAKHLCVSSRGIKDESSTTISSYYGGKFGTPEKIAELQNYLKD

SEQ ID NO: 8459 - protein, 225 aa, Gelidibacter sediminis
  misc_feature (1)..(225): tr|A0A4R7PJP0|A0A4R7PJP0_9FLAO GTP cyclohydrolase 1 OS= Gelidibacter sediminis OX=1608710 GN=folE PE=3 SV=1
MNTDKNIQDIDALGENHVGTSADTPMRSDAFKLSSDEKIDIIKDDVRHIMETLGLDLTDDSLKGTPLRVAKMFVKEIFGGLSPDKKPNASTFENKYKYGEMLVEKNITLYSTCEHHLLPIVGKAHVAYISKGTVVGLSKMNRIVDYFAKRPQVQERLTIQIVQELQKVLGTDDVACVIDAKHLCVNSRGIRDIESSTVTSEFGGAFKNQDTRREFLDYIKLDTHF

SEQ ID NO: 8460 - protein, 198 aa, Gelidibacter sediminis
  misc_feature (1)..(198): tr|A0A4R7PZT0|A0A4R7PZT0_9FLAO GTP cyclohydrolase 1 OS= Gelidibacter sediminis OX=1608710 GN=folE PE=3 SV=1
MAYKHFEEYDPRITEDIRERYEQIITDLGEDVTRNGLLKTPERASKAIQFLTQGYHQDAAKILKSAMFDESYNEMVIVKDIEVYSLCEHHMLPFFGKAHIAYIPNGQIVGLSKLPRIVDVFARRLQVQERLTEQILDCINDTLKPQGVAVVIEAAHMCKMMRGVQKQNSMTTTSGFRGQFEKIETRNEFLKLISTKFT

SEQ ID NO: 8461 - protein, 186 aa, Gemella asaccharolytica
  misc_feature (1)..(186): tr|A0A133ZTC3|A0A133ZTC3_9BACL GTP cyclohydrolase 1 OS= Gemella asaccharolytica OX=502393 GN=folE PE=3 SV=1
MNNKEDFKNLIQKLLINIGEDVTRKGLLKTPERCANMYSELLCKTGEDPKEEIDTFFESETDEPILIKDIEFYSLCEHHMLPFYGLCHVAYIPNKNKITGLSKIVRVVENASKRLQIQENMTNMISKAIDEKLNPKGTYVIIEAEHMCIAMRGIKKTGSKTITTKKTGIFETNSDLVRNIDLKIKG

SEQ ID NO: 8462 - protein, 179 aa, Gemella bergeri
  misc_feature (1)..(179): tr|U2QUH8|U2QUH8_9BACL GTP cyclohydrolase 1 OS=Gemella bergeri ATCC 700627 OX=1321820 GN=folE PE=3 SV=1
MELIKTLLENFGEDPTRKGLIDTPKRCVKMYEELLSKTNVDPKEEINTFFESDNDEPILVKDIQFYSLCEHHMLPFYGVCHIAYVPKNKKITGLSKLARLVESASRRLQIQEDMTLMIVNAMEEQLQPKGVYVVIEAEHMCMAMRGIKKIGSKTVTSKKTGVFLKDNNLVKDIQYKIKL

SEQ ID NO: 8463 - protein, 186 aa, Gemella haemolysans
  misc_feature (1)..(186): tr|A0A133ZWC2|A0A133ZWC2_9BACL GTP cyclohydrolase 1 OS= Gemella haemolysans OX=1379 GN=folE PE=3 SV=1
MKNKEQSQELIKTLLENIGEDTSRAGLLDTPKRCVKMYEELLSKTNVDPKEEINTFFESDNDEPILVKDIQFYSLCEHHMLPFYGVCHIAYVPNNKKITGLSKLARLVESASRRLQIQEDMTLMLVNAIEEQLQPKGVYVIIEAEHMCMAMRGIKKIGSKTVTSKKTGIFLEDTELVKDIQYKIKL

SEQ ID NO: 8464 - protein, 186 aa, Gemella haemolysans
  misc_feature (1)..(186): tr|F3A257|F3A257_9BACL GTP cyclohydrolase 1 OS=Gemella haemolysans M341 OX=562981 GN=folE PE=3 SV=1
MKNKEQSQELIKTLLENIGEDTSRPGLLDTPKRCVKMYEELLSKTNVDPKEEINTFFESDNDEPILVKDIQFYSLCEHHMLPFYGVCHIAYVPNNKKITGLSKLARLVESASRRLQIQEDMTLMLVNAIEEQLQPKGVYVIIEAEHMCMAMRGIKKIGSKTVTSKKTGIFLEDTELVKDIQYKIKL

SEQ ID NO: 8465 - protein, 186 aa, Gemella morbillorum
  misc_feature (1)..(186): tr|A0A2X4N581|A0A2X4N581_9BACL GTP cyclohydrolase 1 OS= Gemella morbillorum OX=29391 GN=folE PE=3 SV=1
MKNKEQSQQLIKTLLENIGEDTSRAGLIDTPKRCVNMYEELLSKTNMDPKEEINTFFESENDEPILVKDIQFYSLCEHHMLPFYGVCHIAYVPNNKKITGLSKLARLVESASRRLQIQEDMTLMLVNAIEEQLQPKGVYVIIEAEHMCMAMRGIKKIGSKTVTSKKTGVFLEDTELVKDIQYKIKL

SEQ ID NO: 8466 - protein, 186 aa, Gemella morbillorum
  misc_feature (1)..(186): tr|E5V551|E5V551_9BACL GTP cyclohydrolase 1 OS=Gemella morbillorum M424 OX=562982 GN=folE PE=3 SV=1
MKNKEQSQQLIKTLLENIGEDTSRAGLIDTPKRCVNMYEELLSKTNVDPKEEINTFFESENDEPILVKDIQFYSLCEHHMLPFYGVCHIAYVPNNKKITGLSKLARLVESASRRLQIQEDMTLMLVNAIEEQLQPKGVYVIIEAEHMCMAMRGIKKIGSKTVTSKKTGVFLEDTELVKDIQYKIKL

SEQ ID NO: 8467 - protein, 186 aa, Gemella sanguinis
  misc_feature (1)..(186): tr|A0A2N6SDI6|A0A2N6SDI6_9BACL GTP cyclohydrolase 1 OS= Gemella sanguinis OX=84135 GN=folE PE=3 SV=1
MKNKEQSQQLIKTLLENIGEDTSRAGLLDTPKRCVNMYEELLSKTNVDPKEEINTFFESDNDEPILVKDIQFYSLCEHHMLPFYGVCHIAYVPNNRKITGLSKLARLVESASRRLQIQEDMTLMLVNAIEEQLQPKGVYVIIEAEHMCMAMRGIKKIGSKTVTSKKTGIFLEDSELVKDIQYKIKL

SEQ ID NO: 8468 - protein, 186 aa, Gemella sp.; identical to SEQ ID NO: 8463
  misc_feature (1)..(186): tr|A0A533HZ86|A0A533HZ86_9BACL GTP cyclohydrolase 1 OS= Gemella sp. OX=1966354 GN=folE PE=3 SV=1

SEQ ID NO: 8469 - protein, 186 aa, Gemella sp.
  misc_feature (1)..(186): tr|A0A4Y9HGY4|A0A4Y9HGY4_9BACL GTP cyclohydrolase 1 OS= Gemella sp. WT2a OX=2558281 GN=folE PE=3 SV=1
MKNIEESKKLIKELLENLGEDTSRAGLIDTPKRCVKMYEELLSKTGVDPKEEINTFFESDNDEAILVKDIEFYSLCEHHMLPFYGKCHIAYLPNNRKITGLSKLARLVESASRRLQIQEDMTLMIAKAMEEQLQPKGVYVIIEAEHMCMAMRGIKKQGSKTVTSKKTGIFREDFNLIRDIEYKIKL

SEQ ID NO: 8470 - protein, 222 aa, Geminicoccus sp.
  misc_feature (1)..(222): tr|A0A2E3IPH3|A0A2E3IPH3_9PROT GTP cyclohydrolase 1 OS= Geminicoccus sp. OX=2024832 GN=folE PE=3 SV=1
MAPHDSAALFDADRDHVEETIEVVSTDNVVPIKVSEQPNRTEAEAAVKTLIAYTGEDAERPGVQETPKRVVKAFDEWFGGYEIDAETLLSKTFDEVEGYHDMVLLRDIPFHSHCEHHMAPIVGKAHVAYMPRGRVVGISKLARVVDAFARRFQIQERMTEEVAQTIERVLEPAGVAVVIEAEHHCMTTRGIHTHDTVMHTKHLSGVFREDANLRREFFDALR

SEQ ID NO: 8471 - protein, 222 aa, Geminicoccus sp.
  misc_feature (1)..(222): tr|A0A2E1V5M0|A0A2E1V5M0_9PROT GTP cyclohydrolase 1 OS= Geminicoccus sp. OX=2024832 GN=folE PE=3 SV=1
MAPHESAALYDHDLELSDEGIDATDVHNIVPIKGTGQPNRSEAEAAVKTLISYTGENADRSGVLETPKRVVKAFDEWFGGYKIDADGLLSKTFDEVEGYQDMVLLRDIPFHSHCEHHMAPIVGKAHVAYMPKGRVVGISKLARVVDAFARRFQIQERMTEEVAQTIERVLEPAGVAVVIEAEHHCMTTRGIHTHDTVMHTKHLSGVFREDTNLRREFFDALR

SEQ ID NO: 8472 - protein, 240 aa, Geminocystis sp.
  misc_feature (1)..(240): tr|A0A0D6AMA6|A0A0D6AMA6_9CHRO GTP cyclohydrolase 1 OS= Geminocystis sp. NIES-3709 OX=1617448 GN=folE PE=3 SV=1
MTEFSNGSNSPKISPDASLSISTEVYNNVATRPDRNTHNGQVAQINLSHEENKQQMMDSVRIILESVGEDPEREGLLKTPKRVAEAMQFLTQGYSQSLEKLVNGAIFDEGHNEMVLVRDIDFFSLCEHHMLPFMGRAHVAYIPNQKVVGLSKLARIVEMYSRRLQVQERLTRQIAEAIQTILDPQGVAVVMEATHMCMVMRGVQKPGSWTVTSAMLGVFQEENKTREEFLNLIRHKPSFL

SEQ ID NO: 8473 - protein, 219 aa, Geminocystis sp.
  misc_feature (1)..(219): tr|A0A0D6AI80|A0A0D6AI80_9CHRO GTP cyclohydrolase 1 OS= Geminocystis sp. NIES-3708 OX=1615909 GN=folE PE=3 SV=1
MTYTGSSIIKSANHNNSFPNLITESQPPVTEADMVQAVRTLLLGLGENPDREGLKDTPKRVVKALKFLTSGYNKSLDELLNGAVFHENANEMVLVRDIDLFSSCEHHILPILGRAHVAYIPNGKVIGLSKIARICEMYARRLQVQKRLTSQIADALQGLLQPQGVAVVIEASHMCMVMRGVQKPGPWTSTSALRGVFNDDAKTRQEFMNLIQHRPTFNS

SEQ ID NO: 8474 - protein, 214 aa, Gemmata obscuriglobus
  misc_feature (1)..(214): tr|A0A2Z3H8W2|A0A2Z3H8W2_9BACT GTP cyclohydrolase 1 OS= Gemmata obscuriglobus OX=114 GN=folE PE=3 SV=1
MSKISRHTPSPDDADEAPRTSNAITPLKIDHARLRSAVREILLAVGEDPDREGLLETPDRVARMYAEVFAGLQTDPAVYLQKTFTQKHDEMVLVKDIEFASCCEHHLLPFFGKAHIAYLPNGQIVGLSKLARVVDAVARRPQVQERMTENIADLVMTHLKARGVGVVIEASHSCMTIRGVRKPGAMTITSSMRGGFLDSPATRAEMMSLVFGGK

SEQ ID NO: 8475 - protein, 212 aa, Gemmata sp.
  misc_feature (1)..(212): tr|A0A142XTC8|A0A142XTC8_9BACT GTP cyclohydrolase 1 OS= Gemmata sp. SH-PL17 OX=1630693 GN=folE PE=3 SV=1
MSKTTHSAVPCEADEAPRPPNHMPALTVDHERLRHAVREILIAVGENPDREGLLETPDRVARMYAEIFSGLRTDPAIYLQKTFTQKHDEMVLVKDIEFSSCCEHHLLPFLGKAHIAYLPNGQIVGLSKLARVVEAVAKRPQVQERMTEEIADLIMTHLKARGVGVVIEASHSCMTIRGVRKPGAMTITSSMRGGFLDNPATRAEMMALVFGR

SEQ ID NO: 8476 - protein, 208 aa, Gemmataceae bacterium
  misc_feature (1)..(208): tr|A0A5C1A9I8|A0A5C1A9I8_9BACT GTP cyclohydrolase 1 OS= Gemmataceae bacterium PX52 OX=2598579 GN=folE PE=3 SV=1
MAKSEEMTLSKLAALHASEYQPVDVERIKHAVREILLAVGEDPDREGLLETPDRVARMYAEVFSGLHTNPAIHLQKLFTQKHDEMVIVKDIEFASCCEHHLLPFTGKAHIGYLPDGKVVGLSKLARVVDVVAKRPQVQERMTETIADLIMSEVQPRGVGVIIEASHSCMTIRGVRKPGAMTITSAVRGLVKSNPMTRNELMTLVYNKS

SEQ ID NO: 8477 - protein, 188 aa, Gemmataceae bacterium
  misc_feature (1)..(188): tr|A0A4V0I6S8|A0A4V0I6S8_9BACT GTP cyclohydrolase 1 OS= Gemmataceae bacterium OX=2052164 GN=folE PE=3 SV=1
MDVDHERIRRAVREILVAVGENPDREGLLDTPDRVARMYAEVFSGLRTDPAVHLQTMFTQKHDEMVLVKDIEFASCCEHHLLPFIGKAHIAYLPNGKIVGLSKLARVVDAVARRPQVQERMTEHVADLIMAHLKPRGVGVIVEASHSCMTIRGVRKPGAMTITSSMRGGFLTDPATRSELMSLVFGGK

SEQ ID NO: 8478 - protein, 199 aa, Gemmatimonadaceae bacterium
  misc_feature (1)..(199): tr|A0A2E0DQQ0|A0A2E0DQQ0_9BACT GTP cyclohydrolase 1 OS= Gemmatimonadaceae bacterium OX=2026741 GN=folE PE=3 SV= 1
MEDSGAIDLSGVEFEDLVAEMIRRCGDSPDREGMAKTPERVVKAMSFLTKGYGETPEEVVGGAIFPEAHESMVLVKDIELYSMCEHHLLPFFGKAHVAYIPNGSVMGLSKVARLVEVFARRFQVQERLTEQIAQAVLEVSEARGVAVVVEAHHLCMMMRGVQKQNSKTLTSAMRGDFVEDRSLRDEFMWMVSSTHRALG

SEQ ID NO: 8479 - protein, 202 aa, Gemmatimonadales bacterium
  misc_feature (1)..(202): tr|A0A524R1Q1|A0A524R1Q1_9BACT GTP cyclohydrolase 1 OS= Gemmatimonadales bacterium OX=2448054 GN=folE PE=3 SV=1
MSGDAKHVGTDLSQVSFEALVREMIVRLDPDPDRDGMDRTPERVAKSMEFLTRGYHITPEEAIGDGIFEERHHNMVLVKDIELYSMCEHHLLPFFGKAHVAYIPDGKIMGLSKAARLVEVYSRRFQVQERLTEQVAQAVWDTIHPMGVGVVVEAYHLCMMMRGVEKQNSKTITSAMRGVFLSDMKTRDEFLRLSMAGHVLLS

SEQ ID NO: 8480 - protein, 196 aa, Gemmatimonadales bacterium
  misc_feature (1)..(196): tr|A0A524H418|A0A524H418_9BACT GTP cyclohydrolase 1 OS= Gemmatimonadales bacterium OX=2448054 GN=folE PE=3 SV=1
MSNTPVVDTPLAPLVRSLLAGLGEDPDRPGLAKTPERVEASLRWLTSGYALTVEDAVGDALFEEEHESMILVRDIEFYSLCEHHLLPFFGVAHVAYIPDRRILGLSKLPRIVDVFARRLQVQERLTDQVANAIMEVVAPRGVGVVLEASHLCMMMRGVEKQHSRTVTSALRGIFTSDSKTRAEFLLLAHGTGAESE

SEQ ID NO: 8481 - protein, 187 aa, Gemmatimonadetes bacterium
  misc_feature (1)..(187): tr|A0A1Q7E2Z4|A0A1Q7E2Z4_9BACT GTP cyclohydrolase 1 OS= Gemmatimonadetes bacterium 13_1_40CM_66_11 OX=1805195 G N=folE PE=3 SV=1
MPFQTLVHEMLEQLGEDPKREGLRQTPARVEASLKWLTRGYGMNVDEVIGDALFEETHESMICVRDIEIYSMCEHHMLPFFGRAHVAYLPNGRIVGLSKIPRVVEVFARRLQVQERLTDQVAEALCRVLTPLGVGVVIEAYHLCMMMRGVEKQNSKTVTSALRGAFRDDAKTRDEFLRLVHGGNFSL

SEQ ID NO: 8482 - protein, 174 aa, Gemmatimonadetes bacterium
  misc_feature (1)..(174): tr|A0A1Q6ZWT8|A0A1Q6ZWT8_9BACT GTP cyclohydrolase 1 OS= Gemmatimonadetes bacterium 13_2_20CM_2_69_23 OX=1805204 GN=folE PE=3 SV=1
MLAQLGEDPTREGLRQTPARVEASLKWLTRGYHMSVPDVIGDALYRERHENLVCVRDIEIYSLCEHHLLPFFGKAHVAYLPNGRLVGLSKIPRVIEVFARRLQVQERLTDQVADALMDVLEPRGVGVVIEAYHLCMMMRGVEKQNSRTVTSALRGALLQDAKTRDEFLRLVHAG

SEQ ID NO: 8483 - protein, 192 aa, Gemmatimonas aurantiaca
  misc_feature (1)..(192): tr|A0A3D4V629|A0A3D4V629_9BACT GTP cyclohydrolase 1 OS= Gemmatimonas aurantiaca OX=173480 GN=folE PE=3 SV=1
MAGERSSEYETMVRRQLELIGEDPTRDGLLKTPGRVARSMAWLTRGYDLDPRSVIGDALFAEDHENMVMVRDIEMYSMCEHHMLPFFGKVHIAYIPNGKIVGLSKLPRVVEVFARRLQVQERLGEQIANAIVDVLQPKGVGVVIEAVHLCMMMRGVEKQNSRTITSSLRGLFRDDAKTRSEFLRLAYATPGF

SEQ ID NO: 8484 - protein, 222 aa, Gemmatimonas aurantiaca
  misc_feature (1)..(222): tr|C1A6G2|C1A6G2_GEMAT GTP cyclohydrolase 1 OS=Gemmatim onas aurantiaca (strain T-27 / DSM 14586 / JCM 11422 / NBRC 100505) OX=379066 GN=folE PE=3 SV=1
MSTTRENEHVMRRELNVGGGAHGADPDELPMAGERSSEYETMVRRQLELIGEDPTRDGLLKTPGRVARSMAWLTRGYDLDPRSVIGDALFAEDHENMVMVRDIEMYSMCEHHMLPFFGKVHIAYIPNGKIVGLSKLPRVVEVFARRLQVQERLGEQIANAIVDVLQPKGVGVVIEAVHLCMMMRGVEKQNSRTITSSLRGLFRDDAKTRSEFLRLAYATPGF

SEQ ID NO: 8485 - protein, 181 aa, Gemmatimonas phototrophica
  misc_feature (1)..(181): tr|A0A143BQ08|A0A143BQ08_9BACT GTP cyclohydrolase 1 OS= Gemmatimonas phototrophica OX=1379270 GN=folE PE=3 SV=1
MVRRQLELMGEDPERDGLLKTPSRVAKAMMWLTRGYDQTAAEVIGDALFEENHENMVMVRDIEMYSMCEHHMLPFFGKVHIAYIPNGKIVGLSKLPRVVEVFARRLQVQERLGEQIANALEETLQPKGVGVVIEAVHLCMMMRGVEKQSSRTITSSMRGLFRDDSKTRSEFLRLAHSPTSY

SEQ ID NO: 8486 - protein, 193 aa, Gemmatimonas sp.
  misc_feature (1)..(193): tr|A0A0S8H274|A0A0S8H274_9BACT GTP cyclohydrolase 1 OS= Gemmatimonas sp. SM23_52 OX=1703359 GN=folE PE=3 SV=1
MLDTGALSLREVVRAQLRLLGEDPGRPGLLRTPERVEESLRWLTRGYEMDLEQVIGDGVFEAEHDEMVIVKDIELYSLCEHHLLPFFGKAHIAYIPDGRIVGFSKLPRIVEVFARRLQVQERLTDQIARAIQEMVKPKGVGVVVEAAHLCMMMRGVEKQNSRTITSSVQGVFRTDQRTRDEFLKLVASHWFSA

SEQ ID NO: 8487 - protein, 199 aa, Gemmatimonas sp.
  misc_feature (1)..(199): tr|A0A0S7Z9L7|A0A0S7Z9L7_9BACT GTP cyclohydrolase 1 OS= Gemmatimonas sp. SG8_23 OX=1703356 GN=folE PE=3 SV=1
MSKSVDRADLSSVAFEDLVAEMIRRLGDDPERDGMARTPERVAKAMAFLTKGYGETPEAVLGEALFEESHQSMVLVKDVELYSLCEHHMLPFFGKAHVAYIPNGRIMGLSKVARLVEVYARRFQVQERLTEQIAQAVWDTTQPEGVAVVIEAYHLCMMMRGVEKQNSKTLTSAMRGVFLEDHRTRDEFMRFVTSVHPPL

SEQ ID NO: 8488 - protein, 211 aa, Gemmatirosa kalamazoonesis
  misc_feature (1)..(211): tr|W0RHK2|W0RHK2_9BACT GTP cyclohydrolase 1 OS=Gemmatir osa kalamazoonesis OX=861299 GN=folE PE=3 SV=1
MSSTKDGSIALFASDTVAAGEACANMAAVVRRQLELLGEDPERDGLLKTPERVAKSLTWLTRGYSLNVHDAIGDALFEVDSESMVMVRDIELYSLCEHHMLPFFGKAHIAYLPNGKVVGLSKLARVVEVFSRRLQVQERLTEEIADALEDVLRPAGVGVVIEAVHLCMMMRGVEKQNSQTITSALRGAFRDDGRTRDEFLRLAHNGGSYHR

SEQ ID NO: 8489 - protein, 216 aa, Gemmatirosa kalamazoonesis
  misc_feature (1)..(216): tr|W0RUH3|W0RUH3_9BACT GTP cyclohydrolase 1 OS=Gemmatir osa kalamazoonesis OX=861299 GN=folE PE=3 SV=1
MGSSGSTLRQRFDAVRALGAHADATSFDGAIDDELAATIERQLELLGEDPGRDGLRKTPSRVAAALRFLTRGYDMSADEVVGDAVFSESYRSMVMVRDIEFYSLCEHHMLPFFGKVHIAYLPNGRVVGLSKLPRIVDVYARRLQVQERLTEEIADAIERVLHPAGVGVVVEAAHLCMMMRGVEKQNSSTVTSAVRGAVRDCPMTRDEFLRLAHGRR

SEQ ID NO: 8490 - protein, 362 aa, Gemmobacter aquatilis
  misc_feature (1)..(362): tr|A0A1H8CN35|A0A1H8CN35_9RHOB GTP cyclohydrolase FolE2 OS=Gemmobacter aquatilis OX=933059 GN=folE2 PE=3 SV=1
MNIHTPEIDRKPSREEAEAALRLLRQWAGKATDREIAEVDPSARALLGDGYPDLVRDYPAEFRVDAAYKDTLPDLQNGPASLIRGAKTQIQHVGISNFRLPIRYRTRDAGEVLLETSVTGTVSLEAEKKGINMSRIMRSFYAHAERDFSFDVIEHALEDYKRDLESFDARIQMRFSFPVKVPSLRSGLSGWQYYDIALELVDRAGERLKIMHLDYVYSSTCPCSLELSEHARRTRGQLATPHSQRSVARISVVLQPGRCLWFEDLIALCRAAVPTETQVMVKREDEQAFAELNAANPIFVEDAARLFCAQLQADPRVGDFRVVASHQESLHSHDAVSLLTSGPTFAQASLDPRLFGTLFHIG

SEQ ID NO: 8491 - protein, 362 aa, Gemmobacter caeni
  misc_feature (1)..(362): tr|A0A2T6BBM6|A0A2T6BBM6_9RHOB GTP cyclohydrolase FolE2 OS=Gemmobacter caeni OX=589035 GN=folE2 PE=3 SV=1
MNIRTPELDRKPGPEEVEAALALIRQWASKASDTEMLALDPAARALIGDGYPDLSTIYPAEFRADAAYKATLPDLQNGPASLIRGAKTQIQHVGISNFRLPIRYRTRDAGEVLLETSVTGTVSLEAEKKGINMSRIMRSFYTHAERDFSFDVIEHALSDYKRDLESFDARIQMRFSFPVKVPSLRSGLSGWQYYDIALELVDRAGERLKIMHLDYVYSSTCPCSLELSEHARRTRGQLATPHSQRSVARISVVANPGPALWFEDLIELCRRAVPTETQVMVKREDEQAFAELNAANPIFVEDAARLFCAQLQADPRVGDFRIVASHQESLHSHDAVSVLTEGPTFAQASLDPRLFGTLFHVG

SEQ ID NO: 8492 - protein, 362 aa, Gemmobacter intermedius
  misc_feature (1)..(362): tr|A0A3S3UEL6|A0A3S3UEL6_9RHOB GTP cyclohydrolase FolE2 OS=Gemmobacter intermedius OX=1553448 GN=folE2 PE=3 SV =1
MDSRAPQSPAQPDKAQAEAALATLRVWMAGATDQDLLRLGPGIAAMLGHNSPALSRDYPDEFRPDAAYKASMPDLQNGPSSLIVGAKATIQHVGISNFRLPIRYRTRSGGEITLETSVTGTVSLEAGKKGINMSRIMRSFYAHSERQFSFGVAEAALEDYKRDLDSFDARIQLKLSWPQKVESLRSGLSGWQYYDLSLELLDQGGLRRRVMHLDYVYSSTCPCSLELSEHAREVRGQLATPHSQRSVARISAEVLDGERLWFEDLIDLARRAVVTETQVMVKREDEQAFAELNAANPIFVEDAARSFCEALRQDPRIGDFRVIASHQESLHSHDAVSLLTEGPLFAAQSLDPTLFASLIHRG

SEQ ID NO: 8493 - protein, 362 aa, Gemmobacter lutimaris
  misc_feature (1)..(362): tr|A0A398BSS8|A0A398BSS8_9RHOB GTP cyclohydrolase FolE2 OS=Gemmobacter lutimaris OX=2306023 GN=folE2 PE=3 SV=1
MNIRTPELDRKPGHEEVEAALALLRQWASKASDAEMLALDPAARALIGDGYPELSTSYPAEFRADAAYKATLPDLQNGPASLIRGAKTQIQHVGISNFRLPIRYRTRDAGEVLLETSVTGTVSLEAEKKGINMSRIMRSFYTHAERDFSFDVIEHALSDYKRDLESFDARIQMRFSFPLKVPSLRSGLSGWQYYDIALELVDRAGERLKIMHLDYVYSSTCPCSLELSEHARRTRGQLATPHSQRSVARISVVANPGPALWFEDLIELCRRAVPTETQVMVKREDEQAFAELNAANPIFVEDAARLFCAQLQADPRVGDFRIVASHQESLHSHDAVSVLTEGPTFAQPSLDPRLFGTLFHVG

SEQ ID NO: 8494 - protein, 360 aa, Gemmobacter megaterium
  misc_feature (1)..(360): tr|A0A1N7LNF2|A0A1N7LNF2_9RHOB GTP cyclohydrolase FolE2 OS=Gemmobacter megaterium OX=1086013 GN=folE2 PE=3 SV= 1
MTIHTPAIDRDPARSEAEAALALLRRWAEQTPADEVATLDPALGVVLAGGALRRDYPAGFRPDAAYKATLPDLQNGPSSLIRGARATIQHVGISNFRLPLHYRTRDGGPVMLETSVTGTVSLEAEKKGINMSRIMRSFYTHAERQFSFGVIEAVLDDYRRDLDSFDARIQMRLSWPMRMESLRSGLSGWQYYDIALELVDQGGVRKRLVHLDYVYSSTCPCSLELSEHARATRGQLATPHAQRSVARLSVEVAGDATLWFEDLIDLARRAIPTETQVMVKREDEQAFAELNAANPIFVEDAARSFCAALREDGRIGDFRVVASHQESLHSHDAVSVLTEGPTFASSSLDPHLFASLIHRG

SEQ ID NO: 8495 - protein, 362 aa, Gemmobacter sp.
  misc_feature (1)..(362): tr|A0A4S3MK27|A0A4S3MK27_9RHOB GTP cyclohydrolase FolE2 OS=Gemmobacter sp. CC-PW-75 OX=1445661 GN=folE2 PE=3 S V=1
MNIHTPEMDRKPAAEDVEAALALIRRWAGKATDAEMLALDPAARALIGDGYPDLSTVYPADFRADAAYKDTLPDLQNGPASLIRGAKTQIQHVGISNFRLPIRYHTRDNGDLTLETSVTGTVSLEAEKKGINMSRIMRSFYAHAERDFSFEVIEHALEDYKRDLDSFDARIQMRFSFPVKVSSLRSGLSGWQYYDIALELVDVAGVRKRIMHLDYVYSSTCPCSLELSEHARRTRGQLATPHSQRSVARISVVAEDGPCLWFEDLIDIARRAVPTETQVMVKREDEQAFAELNAANPIFVEDAARSFAEQLLADPRVGDFRVVASHQESLHSHDAVSVLTEGATFASESLDPRLFATLFHVG

SEQ ID NO: 8496 - protein, 363 aa, Gemmobacter sp.
  misc_feature (1)..(363): tr|A0A2S0UMJ8|A0A2S0UMJ8_9RHOB GTP cyclohydrolase FolE2 OS=Gemmobacter sp. HYN0069 OX=2169400 GN=folE2 PE=3 SV =1
MNIFTPEIDRQPSREEAEAALAVLRRWAGKASDSEISRLDAAVAYLVPGEGYPALSRDYPADFVVTEGYKASLPDLQNGPSSLIKGEKQLIQHVGISNFRLPIRYRTRDNGDLTLETSVTGTVSLEAEKKGINMSRIMRSFYAHAERDFSFGVIEHALEDYKRDLESFDARIQMRFSFPVKVQSLRSGLSGWQYYDIALELVDVAGVRKKIMHLDFVYSSTCPCSLELSEHARRTRGQLATPHSQRSVARISVVVNAGERLWFEDLVELARAAVPTETQVMVKREDEQAFAELNAANPIFVEDAARSFCQALKEDARVGDFRIIASHQESLHSHDAVSVLTEGETFAQESLDPRLFTTLFHVG

SEQ ID NO: 8497 - protein, 258 aa, Geoalkalibacter ferrihydriticus
  misc_feature (1)..(258): tr|A0A1G9MCI4|A0A1G9MCI4_9DELT GTP cyclohydrolase FolE2 OS=Geoalkalibacter ferrihydriticus OX=392333 GN=folE2 PE=3 SV=1
MRDVQKTPDTRNIAIDKVGVKNIRYPIVVMDKSKARQHTVARVNMYVDLPHHFKGTHMSRFIEVLNLYHGEISIESLDTMLREMKQRLEASRAHLELDFPYFIEKSAPVSGARSLMEYQCRMIGILGEEQDFVLGVSVPVTSLCPCSRDISARGAHNQRSLLSVQIRYQGHVWIEDLVSWLEQCASAPVYALLKREDEKAVTEQAYDNPMFVEDIVRAVTQKLSAVPEITWFQVECENFESIHNHSAYALVESHARPL

SEQ ID NO: 8498 - protein, 258 aa, Geoalkalibacter ferrihydriticus; identical to SEQ ID NO: 8497
  misc_feature (1)..(258): tr|A0A0C2HY47|A0A0C2HY47_9DELT GTP cyclohydrolase FolE2 OS=Geoalkalibacter ferrihydriticus DSM 17813 OX=112191 5 GN=folE2 PE=3 SV=1

SEQ ID NO: 8499 - protein, 260 aa, Geoalkalibacter subterraneus
  misc_feature (1)..(260): tr|A0A0B5FAW0|A0A0B5FAW0_9DELT GTP cyclohydrolase FolE2 OS=Geoalkalibacter subterraneus OX=483547 GN=folE2 PE= 3 SV=1
MAEMPDLQQSPDTRNVAIDKVGVKNIRYPIVVSDKSKVRQHTVARVNMYVDLPHHFKGTHMSRFIEVLNLYHGEISIESLDTILHEMKKRLEASRAYLELDFPYFIEKTAPVSGAVGLMEYQCRMLGILGEKQDFVLGVTVPVTSLCPCSREISARGAHNQRSLISVQIRYRDHVWIEDLVGWLEECASAPVYSLLKREDEKAVTEQAYDNPMFVEDIVRAVTVRLSSIARITWFQVECENFESIHNHSAYALVEHREQR

SEQ ID NO: 8500 - protein, 188 aa, Geobacillus galactosidasius
  misc_feature (1)..(188): tr|A0A226QKU3|A0A226QKU3_9BACI GTP cyclohydrolase 1 OS= Geobacillus galactosidasius OX=883812 GN=folE PE=3 SV=1
MPHVNYEQIEYAVRLILEAIGEDPNREGLVDTPKRVAKMYAEVFAGLHEDPKQHFQTVFSEDHEELVLVKDIPFYSMCEHHLVPFFGVAHVAYIPRGGKVTGLSKLARAVETVARRPQLQERITATVADSIMETLDPYGVMVVVEAEHMCMTMRGVKKPGAKTVTTAVRGVFETDQVARAEVLSLIKG

SEQ ID NO: 8501 - protein, 188 aa, Geobacillus kaustophilus
  misc_feature (1)..(188): sp|Q5KXT7|GCH1_GEOKA GTP cyclohydrolase 1 OS=Geobacillu s kaustophilus (strain HTA426) OX=235909 GN=folE PE=3 S V=1
MPEINFAQIEYAVRLILEAIGEDPNREGLVDTPKRVAKMYAEVFAGLQEDPKQHFQTVFSEEHEELVLVKDIPFYSMCEHHLVPFFGAAHVAYIPREGKVTGLSKLARAVEAVARRPQLQERITATIADSIVEALEPHGVMVVVEAEHMCMTMRGVKKPGSKTVTTAVRGVFETDANARAEVLSLIKA

SEQ ID NO: 8502 - protein, 188 aa, Geobacillus kaustophilus; identical to SEQ ID NO: 4631
  misc_feature (1)..(188): tr|A0A0D8BS07|A0A0D8BS07_GEOKU GTP cyclohydrolase 1 OS= Geobacillus kaustophilus OX=1462 GN=folE PE=3 SV=1

SEQ ID NO: 8503 - protein, 188 aa, Geobacillus lituanicus
  misc_feature (1)..(188): tr|A0A223DTR6|A0A223DTR6_9BACI GTP cyclohydrolase 1 OS= Geobacillus lituanicus OX=169283 GN=folE PE=3 SV=1
MPEINFAQIEYAVRLILEAIGEDPNREGLVDTPKRVAKMYAEVFAGLHEDPKEHFQTVFSEEHEELVLVKDIPFYSMCEHHLVPFFGVAHVAYIPREGKVTGLSKLARAVEAVARRPQLQERITATVADSIVEALEPHGVMVVVEAEHMCMTMRGVKKPGAKTVTTAVRGVFETDVAARSEVLSLIKA

SEQ ID NO: 8504 - protein, 188 aa, Geobacillus proteiniphilus
  misc_feature (1)..(188): tr|A0A1Q5T4J4|A0A1Q5T4J4_9BACI GTP cyclohydrolase 1 OS= Geobacillus proteiniphilus OX=860353 GN=folE PE=3 SV=1
MPEINFAQIEYAVRLILEAIGEDPNREGLVDTPKRVAKMYAEVFAGLQEDPKQHFQTVFSEEHEELVLVKDIPFYSMCEHHLVPFFGAAHVAYIPREGKVTGLSKLARAVEAVARRPQLQERITATIADSIVEALEPHGVMVVVEAEHMCMTMRGVKKPGAKTVTMAVRGVFETDANARAEVLSLIKA

SEQ ID NO: 8505 - protein, 188 aa, Geobacillus sp.; identical to SEQ ID NO: 8500
  misc_feature (1)..(188): sp|C5D3E8|GCH1_GEOSW GTP cyclohydrolase 1 OS=Geobacillu s sp. (strain WCH70) OX=471223 GN=folE PE=3 SV=1

SEQ ID NO: 8506 - protein, 188 aa, Geobacillus sp.
  misc_feature (1)..(188): tr|A0A0F6BL46|A0A0F6BL46_GEOS0 GTP cyclohydrolase 1 OS= Geobacillus sp. (strain Y4.1MC1) OX=581103 GN=folE PE=3 SV=1
MSHVNYEQIEYAVRLILEAIGEDPNREGLVDTPKRVAKMYAELFSGLHEDPKQYFQTVFNEDHEELVLVKDIPFYSMCEHHLVPFFGVAHVAYIPRDGKVTGLSKLARAVEAVARRPQLQERITATVADSIMETLDPYGVMVVVEAEHMCMTMRGVKKPGAKTVTTAVRGVFETDQTARAEVLSLIKG

SEQ ID NO: 8507 - protein, 188 aa, Geobacillus stearothermophilus; identical to SEQ ID NO: 4631
  misc_feature (1)..(188): tr|A0A0K2HBW1|A0A0K2HBW1_GEOSE GTP cyclohydrolase 1 OS= Geobacillus stearothermophilus 10 OX=272567 GN=folE PE= 3 SV=1

SEQ ID NO: 8508 - protein, 195 aa, Geobacillus stearothermophilus
  misc_feature (1)..(195): tr|A0A150MK86|A0A150MK86_GEOSE GTP cyclohydrolase 1 OS= Geobacillus stearothermophilus OX=1422 GN=folE PE=3 SV= 1
MQEDVVCMPEINFAQIEYAVRLILEAIGEDPNREGLVDTPKRVAKMYAEVFAGLHEDPKEHFQTVFSEEHEELVLVKDIPFYSMCEHHLVPFFGVAHVAYIPREGKVTGLSKLARAVEAVARRPQLQERITATVADSIVEALEPHGVMVVVEAEHMCMTMRGVKKPGAKTVTTAVRGVFETDVAARSEVLSLIKA

SEQ ID NO: 8509 - protein, 188 aa, Geobacillus subterraneus
  misc_feature (1)..(188): tr|A0A146D1G0|A0A146D1G0_9BACI GTP cyclohydrolase 1 OS= Geobacillus subterraneus OX=129338 GN=folE PE=3 SV=1
MPEINVEQIEYAVRLILEAIGEDPNREGLIDTPKRVAKMYAEVFAGLKEDPKQHFQTVFSEEHEELVLVKDIPFYSMCEHHLVPFFGVAHVAYIPREGKVTGLSKLARAVEAVARRPQLQERITATVADSIVEALEPHGVMVVVEAEHMCMTMRGVKKPGAKTVTTAVRGVFETDANARSEVFSLIKA

SEQ ID NO: 8510 - protein, 188 aa, Geobacillus thermocatenulatus
  misc_feature (1)..(188): tr|A0A226QEA1|A0A226QEA1_9BACI GTP cyclohydrolase 1 OS= Geobacillus thermocatenulatus OX=33938 GN=folE PE=3 SV= 1
MPEINFAQIEYAVRLILEAIGEDPNREGLIDTPKRVAKMYAEVFAGLQEDPKKHFQTVFSEEHEELVLVKDIPFYSMCEHHLVPFFGAAHVAYIPREGKVTGLSKLARAVEAVARRPQLQERITATIADSIVEALEPHGVMVVVEAEHMCMTMRGVKKPGAKTVTTAVRGVFETDANARAEVLSLIKA

SEQ ID NO: 8511 - protein, 196 aa, Geobacillus thermodenitrificans
  misc_feature (1)..(196): tr|A4IQ96|A4IQ96_GEOTN GTP cyclohydrolase 1 OS=Geobacil lus thermodenitrificans (strain NG80-2) OX=420246 GN=fo lE PE=3 SV=1
MTQEDVVCMSEINYEQIEYAVRLILEAIGEDPNREGLIDTPKRVAKMYAEVFAGLREDPKQHFQTVFSEEHEELVLVKDIPFYSMCEHHLVPFFGVAHVAYIPREGKVTGLSKLARAVEAVARRPQLQERITATVADSIVEALEPHGVMVVVEAEHMCMTMRGVKKPGAKTVTTAVRGVFETDANARSEVLSLIKA

SEQ ID NO: 8512 - protein, 219 aa, Geobacillus thermodenitrificans
  misc_feature (1)..(219): tr|A0A1W6VT84|A0A1W6VT84_GEOTD GTP cyclohydrolase 1 OS= Geobacillus thermodenitrificans OX=33940 GN=folE PE=3 S V=1
MINCPSFLFFFAPYARIGLHAAFMTQEDVVCMSEINYEQIEYAVRLILEAIGEDPNREGLIDTPKRVAKMYAEVFAGLREDPKQHFQTVFSEEHEELVLVKDIPFYSMCEHHLVPFFGVAHVAYIPREGKVTGLSKLARAVEAVARRPQLQERITATVADSIVEALEPHGVMVVVEAEHMCMTMRGVKKPGAKTVTTAVRGVFETDANARSEVLSLIKA

SEQ ID NO: 8513 - protein, 196 aa, Geobacillus thermoleovorans
  misc_feature (1)..(196): tr|G8MZN4|G8MZN4_GEOTH GTP cyclohydrolase 1 OS=Geobacil lus thermoleovorans CCB_US3_UF5 OX=1111068 GN=folE PE=3 SV=1
MMQEDVVCMPEINFAQIEYAVRLILEAIGEDPNREGLVDTPKRVAKMYAEVFAGLQEDPKQHFQTVFSEEHEELVLVKDIPFYSMCEHHLVPFFGAAHVAYIPREGKVTGLSKLARAVEAVARRPQLQERITATIADSIVEALEPHGVMVVVEAEHMCMTMRGVKKPGSKTVTTAVRGVFETDANARAEVLSLIKA

SEQ ID NO: 8514 - protein, 188 aa, Geobacillus thermoleovorans; identical to SEQ ID NO: 8501
  misc_feature (1)..(188): tr|A0A098L3Q7|A0A098L3Q7_GEOTH GTP cyclohydrolase 1 OS= Geobacillus thermoleovorans B23 OX=1406857 GN=folE PE=3 SV=1

SEQ ID NO: 8515 - protein, 188 aa, Geobacillus zalihae; identical to SEQ ID NO: 8501
  misc_feature (1)..(188): tr|A0A1V9CU73|A0A1V9CU73_9BACI GTP cyclohydrolase 1 OS= Geobacillus zalihae OX=213419 GN=folE PE=3 SV=1

SEQ ID NO: 8516 - protein, 283 aa, Geobacter argillaceus
  misc_feature (1)..(283): tr|A0A562WUZ6|A0A562WUZ6_9DELT GTP cyclohydrolase FolE2 OS=Geobacter argillaceus OX=345631 GN=folE2 PE=3 SV=1
MNQKKGSDSQSPVPDTQSRQPLHDVQQLHDPRNIPINKVGVKDISYPVVVMDKNRKFQQTVARINMYVDLPHHFKGTHMSRFVELLNAHREEIALDKLETILGEMKKKLGASSAHLEMEFPYFIEKRAPVSKAKGLMEYTCEFNASLAESFDFVLGIRIPVTSLCPCSKELSQYGAHNQRSIITIRVRYREFVWIEDLVAQVEECGSSPVYSLLKRVDEKFVTERAYENPKFVEDIVREVTQRLLAMDNITWFSVEAENFESIHKHSAYAAIERDKRRSEVRG

SEQ ID NO: 8517 - protein, 267 aa, Geobacter bemidjiensis
  misc_feature (1)..(267): sp|B5EDQ6|GCH4_GEOBB GTP cyclohydrolase FolE2 OS=Geobac ter bemidjiensis (strain Bem / ATCC BAA-1014 / DSM 1662 2) OX=404380 GN=folE2 PE=3 SV=1
MIKEYLKKPSLSDVQLTRDTRNIPIGKVGVKDISYPIVVMDKNKSFQNTIARINMYVDLPHHFKGTHMSRFVEILNEYREEIALDKLELILSTMKEKLGASNAHLEMEFPYFVEKTAPVSRAKSLMEYTCTFSASLSDRFDFVLGIKVPVTSLCPCSKELSSYGAHNQRSIMTVQVRYSEFIWIEDLIEIIEQCGSSPVYSLLKREDEKFVTERAYENPRFVEDMVREATVRLLSMQNVTWFSVEAENFESIHKHSAYAAIERSRES

SEQ ID NO: 8518 - protein, 276 aa, Geobacter daltonii
  misc_feature (1)..(276): tr|B9M0M8|B9M0M8_GEODF GTP cyclohydrolase FolE2 OS=Geob acter daltonii (strain DSM 22248 / JCM 15807 / FRC-32) OX=316067 GN=folE2 PE=3 SV=1
MKAKQMTTSPLTPHPSPDVMPDMQKSRDNRNIPISKVGVKDISYPIVVMDKNKSIQHTVARINMYVDLPHHFKGTHMSRFIEILNVYREEIALDKMEAMLQKMKEKLGASTAHLEIEFPYFIEKKAPASGAKSLMEYTCEFSASLASDFDFVLGVRVPVTSLCPCSKELSRYGAHNQRSIMTVKVRYREFIWIEDLIEIVEGCGSSPVYSLLKREDEKLVTERAYENPKFVEDMVREATEKLLSMDKITWFSVEAENFESIHKHSAYAAIERDKMG

SEQ ID NO: 8519 - protein, 266 aa, Geobacter lovleyi
  misc_feature (1)..(266): tr|B3E2D2|B3E2D2_GEOLS GTP cyclohydrolase FolE2 OS=Geob acter lovleyi (strain ATCC BAA-1151 / DSM 17278 / SZ) O X=398767 GN=folE2 PE=3 SV=1
MTRTMPDLQQSRDHRKIPIRKVGVKNISYPIVVQDKHRSLQHTVATVDMYVDLPHQFKGTHMSRFVEILNRHREQIALDRLEEILQEMRQKLGAETAHLRVEFPYFIDKAAPVSRARSLMEYTCEFDACLNGDQLDFVLGVKVPVTSLCPCSKELSQFGAHNQRSIMTVKVRYREFIWIEDLVELIEQCGSSPLYALLKRADEKHVTEQAYLNPRFVEDMVREAYLRLAASENITWFSVEAENFESIHNHSAYAEVELDRRDLRQP

SEQ ID NO: 8520 - protein, 261 aa, Geobacter metallireducens
  misc_feature (1)..(261): sp|Q39R36|GCH4_GEOMG GTP cyclohydrolase FolE2 OS=Geobac ter metallireducens (strain GS-15 / ATCC 53774 / DSM 72 10) OX=269799 GN=folE2 PE=3 SV=1
MTTMPDMQKTSDTRKIPINKVGVKDISYPIVVMDKNKKFQQTVARINMYVDLPHHFKGTHMSRFVEILNAYREDIALDKMEPILQKMKEKLGASSAHLEIEFPYFIEKRAPVSGARSLMEYTCTFCGSLGEEFDFVLGVQIPVTSLCPCSKELSRYGAHNQRSHITVRLRYTDFIWIEDLVAMIEECGSSPVWSLLKRVDEQYVTERAYENPKFVEDIVREVTQKLLAHDAITWFSVEAENFESIHKHSAYAAIERDKKMT

SEQ ID NO: 8521 - protein, 267 aa, Geobacter pelophilus
  misc_feature (1)..(267): tr|A0A1W7QXL3|A0A1W7QXL3_9DELT GTP cyclohydrolase FolE2 OS=Geobacter pelophilus OX=60036 GN=folE2 PE=3 SV=1
MIKEYLKKPALSDVQLTRDTRNIPIGKVGVKDISYPIVVMDKNKSFQNTIARINMYVDLPHHFKGTHMSRFVEILNEYREEIALDKLELILSTMKEKLGASNAHLEMEFPYFVEKTAPVSRAKSLMEYTCTFSASLSDRFDFVLGIKVPVTSLCPCSKELSSYGAHNQRSIMTVQVRYSEFIWIEDLIDVIEECGSSPVYSLLKREDEKFVTERAYENPRFVEDMVREATVRLLSMQNVTWFSVEAENFESIHKHSAYAAIERSKES

SEQ ID NO: 8522 - protein, 259 aa, Geobacter pickeringii
  misc_feature (1)..(259): tr|A0A0B5BC82|A0A0B5BC82_9DELT GTP cyclohydrolase FolE2 OS=Geobacter pickeringii OX=345632 GN=folE2 PE=3 SV=1
MPDMQKTPDTRKIPISKVGVKDISYPIVVMDKNRKFQQTVARVNMYVDLPHHFKGTHMSRFIEILNAYREEIALDKMEPILQKMKEKLGASSAHLEIEFPYFIEKRAPVSGARSLMEYTCSFVGTLGEEFDFVLGVTVPVTSLCPCSKELSRYGAHNQRSAITVRVRYRDFIWIEDLVAMIEECGSSPVWSLLKREDEKFVTERAYENPKFVEDIVRETTQKLLAEEAITWFSVEAENYESIHKHSAYAAIERDKRNKQ

SEQ ID NO: 8523 - protein, 258 aa, Geobacter soli
  misc_feature (1)..(258): tr|A0A0C1TTJ2|A0A0C1TTJ2_9DELT GTP cyclohydrolase FolE2 OS=Geobacter soli OX=1510391 GN=folE2 PE=3 SV=1
MPDMQTSRDTRKIPISKVGVKDISYPIVVMDKNRKFQQTVARVNMYVDLPHHFKGTHMSRFIEILNVYREDIGLDKMEPILQEMKKKLGASSAHLEIEFPYFIEKRAPVSGARSLMEYTCTFTGTLGETFDFVLGVQVPVTSLCPCSKELSRYGAHNQRSHITVRVRYAGFVWIEDLVDLIEGCGSSPVWSLLKRADEKFVTERAYENPKFVEDIVREATLVLAAHEAIAWFSVEAENFESIHKHSAYAAIERDKRKA

SEQ ID NO: 8524 - protein, 267 aa, Geobacter sp.
  misc_feature (1)..(267): sp|C6E7E6|GCH4_GEOSM GTP cyclohydrolase FolE2 OS=Geobac ter sp. (strain M21) OX=443144 GN=folE2 PE=3 SV=1
MIKEYLKKPSLSDVQLTRDTRNIPIGKVGVKDISYPIVVMDKNKSFQNTIARINMYVDLPHHFKGTHMSRFVEILNEYREEIALDKLELILSTMKEKLGASNAHLEMEFPYFVEKTAPVSRAKSLMEYTCTFSASLSDRFDFVLGIKVPVTSLCPCSKELSSYGAHNQRSIMTVQVRYSEFIWIEDLIDIIEECGSSPVYSLLKREDEKFVTERAYENPRFVEDMVREATVRLLNMQNISWFSVEAENFESIHKHSAYAAIERSRES

SEQ ID NO: 8525 - protein, 268 aa, Geobacter sp.
  misc_feature (1)..(268): tr|A0A351WQQ5|A0A351WQQ5_9DELT GTP cyclohydrolase FolE2 OS=Geobacter sp. OX=46610 GN=folE2 PE=3 SV=1
MTDKKLKKEGNSLSDVQLTRDTRNIPIGKVGVKDISYPIVVMDKNKSFQNTIARINMYVDLPHHFKGTHMSRFVEILNSYREEIALDKMEIILATMKQKLGASNAHLEMEFPYFVEKLAPVSRAKSLMEYTCTFSASLSDRFDFVLGIKVPVTSLCPCSKELSAYGAHNQRSIMTVQVRYSEFIWIEDLIEIIEECGSSPVYSLLKREDEKFVTERAYENPRFVEDMVREATVRLLSMENITWFSVEAENFESIHKHSAYAAIERNKS

SEQ ID NO: 8526 - protein, 258 aa, Geobacter sulfurreducens
  misc_feature (1)..(258): sp|Q74FW8|GCH4_GEOSL GTP cyclohydrolase FolE2 OS=Geobac ter sulfurreducens (strain ATCC 51573 / DSM 12127 / PCA ) OX=243231 GN=folE2 PE=3 SV=1
MPDMQTSRDTRKIPISKVGVKDISYPIVVMDKNRKFQQTVARVNMYVDLPHHFKGTHMSRFIEILNAYREDIALDKMEPILQEMKKKLGASSAHLEIEFPYFIEKRAPVSGARSLMEYTCTFTGTLAETFDFVLGVQVPVTSLCPCSKELSRYGAHNQRSHITVRVRYAGFVWIEELVELIEGCGSSPVWSLLKRADEKFVTERAYENPKFVEDIVREATLALAAHEAITWFSVEAENFESIHKHSAYAAIEQDKRKA

SEQ ID NO: 8527 - protein, 258 aa, Geobacter sulfurreducens; identical to SEQ ID NO: 8526
  misc_feature (1)..(258): tr|A0A0D5NCX7|A0A0D5NCX7_GEOSN GTP cyclohydrolase FolE2 OS=Geobacter sulfurreducens OX=35554 GN=folE2 PE=3 SV= 1

SEQ ID NO: 8528 - protein, 266 aa, Geobacter thiogenes
  misc_feature (1)..(266): tr|A0A1T4RG03|A0A1T4RG03_9DELT GTP cyclohydrolase FolE2 OS=Geobacter thiogenes OX=115783 GN=folE2 PE=3 SV=1
MTKTMPDLQQSRDHRKIPIRKVGVKNISYPIVVQDKHRSLQHTVATVDMYVDLPHQFKGTHMSRFVEILNRHREQIALDRLEEILQEMRQKLGAETAHLRVEFPYFIDKAAPVSRARSLMEYTCEFDACLNGDQLDFVLGVKVPVTSLCPCSKELSQFGAHNQRSIMTVKVRYKEFIWIEDLVELIEQCGSSPLYALLKRADEKHVTEQAYQNPRFVEDMVREAYLRLAASENITWFSVEAENFESIHNHSAYAEVELDRRDTQHP

SEQ ID NO: 8529 - protein, 271 aa, Geobacter uraniireducens
  misc_feature (1)..(271): sp|A5G8S1|GCH4_GEOUR GTP cyclohydrolase FolE2 OS=Geobac ter uraniireducens (strain Rf4) OX=351605 GN=folE2 PE=3 SV=2
MSDVQKSRDTRNIPISKVGVKDISYPIVIMDKNKSIQHTVARINMYVDLPHHFKGTHMSRFIEILNVYREKIALDNMEAMLQRMKEKLGAGSAHVEIEFPYFIEKKAPASGAKSLMEYTCEFSASLSSEFDFILGIKVPVTSLCPCSKELSHYGAHNQRSIMTVRVRYREFVWIEDLIEIVEGCGSSPVYSLLKREDEKFVTEKAYENPKFVEDMVREATQKLLAMEKITWFSVEAENFESIHNHSAYAAIERDKREKGVDNPVDKPGNCG

SEQ ID NO: 8530 - protein, 257 aa, Geobacteraceae bacterium
  misc_feature (1)..(257): tr|A0A1G0LAX8|A0A1G0LAX8_9DELT GTP cyclohydrolase FolE2 OS=Geobacteraceae bacterium GWB2_52_12 OX=1798314 GN=f olE2 PE=3 SV=1
MPDMQKRLDTRRIPISKVGVKDIMYPVVVMDKNRSLQHTVARVNMYVDLPHHFKGTHMSRFVEILNQYREQIALDKLETILSEMKSKLESDSAHLEIQFPYFIDKKAPVSGATSLMEYTCEFNASMTDTLDFVLGAKVPLTSLCPCSKELSRFGAHNQRSVMTVRVRYRDFIWIEDLVELIEECGSSPLYALLKREDEKFVTEQAYENPRFVEDMVREAYSRLAALENITWFTVETENFESIHNHSAYASVGLDRRG

SEQ ID NO: 8531 - protein, 256 aa, Geobacteraceae bacterium
  misc_feature (1)..(256): tr|A0A1G0M9K0|A0A1G0M9K0_9DELT GTP cyclohydrolase FolE2 OS=Geobacteraceae bacterium GWC2_55_20 OX=1798317 GN=f olE2 PE=3 SV=1
MPDMQKRPDHRRIPISKVGVKDITYPIVVMDKNRTLQHTVARVNMYVDLPHHFKGTHMSRFVEILNKYREQIALDKLETILEEMKSRLGSASAHLEIQFPYFIDKAAPVSGAKSLMEYTCEFSASMTDSLDFVLGVRVPLTSLCPCSKELSRFGAHNQRSIMTVRVRYRDFIWIEDLVELIEQCGSSPLYSLLKREDEKYVTEHAYENPRFVEDMVREAYSRLAALDNITWFSVETENFESIHNHSAFAAVELDRR

SEQ ID NO: 8532 - protein, 206 aa, Geodermatophilus africanus
  misc_feature (1)..(206): tr|A0A1H3GHZ9|A0A1H3GHZ9_9ACTN GTP cyclohydrolase 1 OS= Geodermatophilus africanus OX=1137993 GN=folE PE=3 SV=1
MSEVPAEPDDLLLERARAGVDHARAAAAVRELLIAVGEDPDRPGLQDTPARVARAYAETFAGLWQDPAEVLSTTFDEDHDEMVLVKDIPMYSTCEHHLVPFHGVAHIGYIPGEDGRVTGLSKLARLVEVYARRPQVQERMTSQIADALADVLKPRGVLVVIEAEHLCMAMRGVRKPGSSTVTSAVRGIFRENGATRSEAMSLVLGR

SEQ ID NO: 8533 - protein, 202 aa, Geodermatophilus amargosae
  misc_feature (1)..(202): tr|A0A1I6XEP3|A0A1I6XEP3_9ACTN GTP cyclohydrolase 1 OS= Geodermatophilus amargosae OX=1296565 GN=folE PE=3 SV=1
MSLVPEDEVRADPSHVDTARAAAAVRELLLAVGEDPDRPGLRDTPTRVARAYAETFAGLWQDPAEVLATVFDEDHDELVLVKDIPMYSTCEHHLVPFHGAAHVGYIPAEDGRVTGLSKLARLVDVYARRPQVQERMTRQIADALDENLKPRGVIVVVEAEHLCMGMRGIRKPGSTTVTSAVRGIFRDNAATRAEAMSLVLGR

SEQ ID NO: 8534 - protein, 214 aa, Geodermatophilus aquaeductus
  misc_feature (1)..(214): tr|A0A521DQT4|A0A521DQT4_9ACTN GTP cyclohydrolase 1 OS= Geodermatophilus aquaeductus OX=1564161 GN=folE PE=3 SV =1
MTLADSSTLRPGAGTTEQRPAPLRVVREGGTIDVPAAERAVADLLSALGRDPASPHLAGTPRRVVDSFAEMLTGPSFDLTTFPNDEGYDELVLATALPVRSLCEHHLLPFAGVAHVGYLPGDRILGLSKLARVLDLLARDLQVQERLTQQVADWLQEHLAPRGVGVVIEAEHLCMSLRGVRAAGARTTTSALRGVLRDDARSRGEFLSLARTAA

SEQ ID NO: 8535 - protein, 205 aa, Geodermatophilus aquaeductus
  misc_feature (1)..(205): tr|A0A521CW13|A0A521CW13_9ACTN GTP cyclohydrolase 1 OS= Geodermatophilus aquaeductus OX=1564161 GN=folE PE=3 SV =1
MSVIPEEPEDEVRADPANIDTARAAAAVRELLLAVGEDPDRPGLRDTPARVARAYAETFAGLWQDPAEVLATVFDEDHDEMVLVKDIPMYSTCEHHLVPFHGAAHVGYIPGADGRVTGLSKLARLVDVYARRPQVQERMTRQIADALDQHLKPRGVIVVVEAEHLCMGMRGIRKPGSTTVTSAVRGMFRDSAATRAEAMSLVLGR

SEQ ID NO: 8536 - protein, 205 aa, Geodermatophilus dictyosporus
  misc_feature (1)..(205): tr|A0A1I5N9W7|A0A1I5N9W7_9ACTN GTP cyclohydrolase 1 OS= Geodermatophilus dictyosporus OX=1523247 GN=folE PE=3 S V=1
MNELLEEPEGEVRADFSRVDTARAEAAVRELLLAVGEDPDRPGLRNTPGRVARAYAETFAGLWQDPGEILATVFDEDHDELVLVKDIPMYSTCEHHLVPFHGAAHVGYIPGEDGRVTGLSKIARLVDVYARRPQVQERMTRQIADALAEHLQPRGVLVVIEAEHLCMGMRGIRKPGSTTVTSAVRGIFRDNAATRAEAMGLVLGR

SEQ ID NO: 8537 - protein, 205 aa, Geodermatophilus nigrescens
  misc_feature (1)..(205): tr|A0A1M5DMV2|A0A1M5DMV2_9ACTN GTP cyclohydrolase 1 OS= Geodermatophilus nigrescens OX=1070870 GN=folE PE=3 SV= 1
MSELPEEPGDEVRADPSRIDAARAEAAVRELLIAVGEDPDRPGLRDTPARVARAYAETFAGLWQDPAEVLATTFDEDHDELVLVKDIPMYSTCEHHLVPFHGAAHVGYIPGEDGKVTGLSKIARLVDVYARRPQVQERMTRQIADALADVLKPRGVIVVIEAEHLCMGMRGIRKPGSTTVTSAVRGMFRDNAATRAEAMSLVLGR

SEQ ID NO: 8538 - protein, 205 aa, Geodermatophilus normandii
  misc_feature (1)..(205): tr|A0A317QFM3|A0A317QFM3_9ACTN GTP cyclohydrolase 1 OS= Geodermatophilus normandii OX=1137989 GN=folE PE=3 SV=1
MTDLAHEPEDEVRADPAHVDTARAAAAVRELLLAVGEDPDRPGLRDTPARVARAYAETFAGLWQDPAEVLATVFDEDHDEMVLVRDIPMYSTCEHHLVPFHGAAHVGYIPGDDGRVTGLSKLARLVDVYARRPQVQERMTRQIADALDQHLKPRGVIVVIEAEHLCMGMRGIRKPGSTTVTSAVRGMFRDNPATRAEAMSLVLGR

SEQ ID NO: 8539 - protein, 212 aa, Geodermatophilus obscurus
  misc_feature (1)..(212): tr|A0A1M7V106|A0A1M7V106_9ACTN GTP cyclohydrolase 1 OS= Geodermatophilus obscurus OX=1861 GN=folE PE=3 SV=1
MTEIPAGAGGDEDSAALLLSPPRAGVDHVRAAAAVRELLLAVGEDPDRPGLQDTPDRVARAYAETFAGLWQDPAEVLATTFDEDHDEMILVKDIPMYSTCEHHLVPFHGVAHIGYIPGEDGRVTGLSKLARLVEVYARRPQVQERMTSQIADALADVLKPRGVLVVIEAEHLCMAMRGVRKPGSSTVTSAVRGIFRENAATRSEAMSLVRGR

SEQ ID NO: 8540 - protein, 205 aa, Geodermatophilus obscurus
  misc_feature (1)..(205): tr|A0A1I5ENU5|A0A1I5ENU5_9ACTN GTP cyclohydrolase 1 OS= Geodermatophilus obscurus OX=1861 GN=folE PE=3 SV=1
MSVLPEESEDEVRADPARIDSARAEAAVRELLLAVGEDPDRPGLRDTPARVARAYAETFAGIWQDPAEILATVFDEDHDELVLVKDIPMYSTCEHHLVPFHGMAHVGYIPGEDGRVTGLSKLGRLVDVYARRPQVQERMTRQIADALDEHLKPRGVIVVIEAEHLCMGMRGIRKPGSTTVTSAVRGMFRDNPATRAEAMSLVIGR

SEQ ID NO: 8541 - protein, 212 aa, Geodermatophilus poikilotrophus
  misc_feature (1)..(212): tr|A0A1I0EXR7|A0A1I0EXR7_9ACTN GTP cyclohydrolase 1 OS= Geodermatophilus poikilotrophus OX=1333667 GN=folE PE=3 SV=1
MSEVPARAGGDEDGAALLLSPPRTGVDHARAAAAVRELLLAVGEDPDRPGLQGTPDRVARAYAETFAGLWQDPAAVLATTFDEDHDEMVLVKDIPMYSTCEHHLVPFHGVAHIGYIPGEDGRVTGLSKLARLVEVYARRPQVQERMTSQIADALADVLKPRGVLVVIEAEHLCMAMRGVRKPGSSTVTSAVRGIFRDNAATRSEAMSLVLGR

SEQ ID NO: 8542 - protein, 210 aa, Geodermatophilus pulveris
  misc_feature (1)..(210): tr|A0A239GFM3|A0A239GFM3_9ACTN GTP cyclohydrolase 1 OS= Geodermatophilus pulveris OX=1564159 GN=folE PE=3 SV=1
MSALPDGEGGAGPARGPDRPRTGVDHARAAAAVRELLIAVGEDPDRPGLQDTPDRVARAYAETFAGLWEDPADVLSTTFDEDHDELVLVKDIPMYSTCEHHLVPFHGMAHIGYVPGQDGKVTGLSKLARLVEVYARRPQVQERMTSQIADALADVLKPRGVLVVIEAEHLCMAMRGVRKPGSRTVTSAVRGVFKDSIATRNEAMSLVVRR

SEQ ID NO: 8543 - protein, 207 aa, Geodermatophilus ruber
  misc_feature (1)..(207): tr|A0A1I4D7L9|A0A1I4D7L9_9ACTN GTP cyclohydrolase 1 OS= Geodermatophilus ruber OX=504800 GN=folE PE=3 SV=1
MTEVPAEPDEEQPASRPRPGVDEERAAAAVRELLLAVGEDPDRPGLQDTPARVARAYAESFAGLWQDPAEVLATTFDEDHDEMVLVKDIPMYSTCEHHLVPFHGVAHVGYIPGEDGRVTGLSKLARLVEVYARRPQVQERMTSQIADALADVLKPRGVLVVIEAEHLCMAMRGIRKPGSTTVTSAVRGIFRDSQATRAEAMSLVLGR

SEQ ID NO: 8544 - protein, 207 aa, Geodermatophilus sabuli
  misc_feature (1)..(207): tr|A0A285ECY8|A0A285ECY8_9ACTN GTP cyclohydrolase 1 OS= Geodermatophilus sabuli OX=1564158 GN=folE PE=3 SV=1
MSEVPAEPDDLLLQRPPGAGVDQERAAAAVRELLLAVGEDPDRPGLKETPGRVARAYAETFAGLWQDPADVLATTFDEDHDEMVLVKDIPMYSTCEHHLVPFHGVAHIGYIPGEDGRVTGLSKLARLVEVYARRPQVQERMTSQIADALSEVLKPRGVLVVIEAEHLCMAMRGIRKPGSTTVTSAVRGIFRDNPATRAEAMSLVLGR

SEQ ID NO: 8545 - protein, 208 aa, Geodermatophilus sabuli
  misc_feature (1)..(208): tr|A0A285EA29|A0A285EA29_9ACTN GTP cyclohydrolase 1 OS= Geodermatophilus sabuli OX=1564158 GN=folE PE=3 SV=1
MTTPEVAVGPARRSGHLHAVRPAAAVDLLAAERAVGDLLRALGRDPASPHLADTPRRVAESYAELLTGRPFELTTFTNDEGYDELVIARDIPVQSLCEHHLLPFSGVAHIGYLPGGRILGLSKLARVLELFARDLQVQERLIQQVADWLQEHLAPRGVGVVVEAEHLCMSLRGVRATGSRTVTSALHGVLRNDARSRAEFFALTGTTA

SEQ ID NO: 8546 - protein, 205 aa, Geodermatophilus saharensis
  misc_feature (1)..(205): tr|A0A239GU55|A0A239GU55_9ACTN GTP cyclohydrolase 1 OS= Geodermatophilus saharensis OX=1137994 GN=folE PE=3 SV= 1
MSVLPEEPEDEVGPDLARIDSARAEAAVRELLLAVGEDPDRPGLRDTPARVARAYAETFAGIWQDPGEILATVFDEDHDELVLVKDIPMYSTCEHHLVPFHGAAHVGYIPGEDGRVTGLSKLARLVDVYARRPQVQERMTRQIADALAEHLKPRGVIVVVEAEHLCMGMRGIRKPGSTTVTSAVRGIFRDNAATRAEAMSLVLGR

SEQ ID NO: 8547 - protein, 214 aa, Geodermatophilus saharensis
  misc_feature (1)..(214): tr|A0A239BN04|A0A239BN04_9ACTN GTP cyclohydrolase 1 OS= Geodermatophilus saharensis OX=1137994 GN=folE PE=3 SV= 1
MTTQSTRCATDPGPSPAGRPRALRFVREAGAVDRPATERAVAELLRALGRDPADPHLAETPRRVADALTELLTGRPFELTTFPNDEGYDELVIATGIPVQSLCEHHLLPFTGVASIGYLPGERILGLSKLARVLESFARDLQVQERLTQQVADWLWDHLAPRGVGVVIEAEHQCMSLRGVRAAGSRTITSALHGLLREDARSRQEFFALTGTAA

SEQ ID NO: 8548 - protein, 209 aa, Geodermatophilus siccatus
  misc_feature (1)..(209): tr|A0A1G9UV73|A0A1G9UV73_9ACTN GTP cyclohydrolase 1 OS= Geodermatophilus siccatus OX=1137991 GN=folE PE=3 SV=1
MTAAGPLAAVTTEDPLPALRVVRETGTVDLPAAEAAVTALLRALGRDPASPHLAETPRRVARSYAELLTGRQFELTTFPNDEGYDELVIARDIPLQSLCEHHLLPFSGVAHIGYLPGARILGLSKLARVLELFARDLQVQERLTQQVADWLQEHLAPRGVGVVVEAEHLCMSLRGVRAPGARTVTSALHGVLRSDARSRAEFFALTGTT

SEQ ID NO: 8549 - protein, 212 aa, Geodermatophilus siccatus
  misc_feature (1)..(212): tr|A0A1G9TPC9|A0A1G9TPC9_9ACTN GTP cyclohydrolase 1 OS= Geodermatophilus siccatus OX=1137991 GN=folE PE=3 SV=1
MSQIPAGVGGDEDRADLLLERPRTGVDHARAVAAVRELLLAVGEDPDRPGLQATPDRVARAYAETFAGLWQDPAEVLATTFDEDHDEMVLVKDIPMYSTCEHHLVPFHGVAHVGYIPGEDGRVTGLSKLARLVEVYARRPQVQERMTSQIADALADVLKPRGVLVVIEAEHLCMAMRGIRKPGSSTVTSAVRGIFRESAATRSEAMSLVLGR

SEQ ID NO: 8550 - protein, 203 aa, Geodermatophilus sp.
  misc_feature (1)..(203): tr|A0A4Y9NBY8|A0A4Y9NBY8_9ACTN GTP cyclohydrolase 1 OS= Geodermatophilus sp. DF01_2 OX=2559610 GN=folE PE=3 SV= 1
MPAGADDQLLSRPRREVDQARAAAAVRELLLAIGEDPDRPGLQDTPERVARAYAETFAGLWQDPSDILATTFDEDHDEMVLVKDIPMYSTCEHHLVPFHGVAHVGYIPGEDGKVTGLSKLARLVEVYARRPQVQERMTSQIADALADVLKPRGVLVVIEAEHLCMAMRGIRKPGSTTVTSAVRGIFRDNPATRSEAMSLVLRR

SEQ ID NO: 8551 - protein, 206 aa, Geodermatophilus sp.
  misc_feature (1)..(206): tr|A0A372J4W4|A0A372J4W4_9ACTN GTP cyclohydrolase 1 OS= Geodermatophilus sp. LHW52908 OX=2303986 GN=folE PE=3 S V=1
MSEVAAEPDDLLPAPPRPGVDHERAAAAVRELLLAVGEDPDRPGLRDTPGRVARAYAETFAGLWQDPQDVLATTFDEDHDEMVLVKDIPMYSTCEHHLVPFHGVAHIGYIPGDDGRVTGLSKLARLVEVYARRPQVQERMTSQIADALAEVLKPRGVLVVIQAEHLCMAMRGIRKPGSSTVTSAVRGIFRDSAATRAEAMGLVLGR

SEQ ID NO: 8552 - protein, 206 aa, Geodermatophilus telluris
  misc_feature (1)..(206): tr|A0A1G6SG04|A0A1G6SG04_9ACTN GTP cyclohydrolase 1 OS= Geodermatophilus telluris OX=1190417 GN=folE PE=3 SV=1
MTGGPAAREEHAGHLRVVRDDAGVDLPAAERAVAALLRALGRDPAAPHLADTPRRVAEAYAEFLTGRPFALTTFPNDGGYDEMVVATGIPVTSLCEHHLLPFTGVAAIGYVPGERILGLSKLARVLDHLARDLQVQERLTRQVADWLRDHLAPRGVGVVIAAEHQCVSLRGIRAAGSRTVTSALHGLLREDPRSRQEFLALTGTAA

SEQ ID NO: 8553 - protein, 205 aa, Geodermatophilus telluris
  misc_feature (1)..(205): tr|A0A1G6LLY7|A0A1G6LLY7_9ACTN GTP cyclohydrolase 1 OS= Geodermatophilus telluris OX=1190417 GN=folE PE=3 SV=1
MSELPEEAEDEVRVDLSRVDTARAEAAVRELLLAVGEDPDRPGLRDTPGRVARAYAETFAGLWQDPAEILATVFDEDHDELVLVKDIPMYSTCEHHLVPFHGTAHVGYIPGEDGRVTGLSKIARLVDVYARRPQVQERMTRQIADAVDENLKPRGVLVVIEAEHLCMGMRGIRKPGSTTVTSAVRGIFRDNAATRAEAMGLVLGR

SEQ ID NO: 8554 - protein, 204 aa, Geodermatophilus tzadiensis
  misc_feature (1)..(204): tr|A0A2T0TPK2|A0A2T0TPK2_9ACTN GTP cyclohydrolase 1 OS= Geodermatophilus tzadiensis OX=1137988 GN=folE PE=3 SV= 1
MTGGPATGLAGPLRVVRDGSGVDVPAAERAVAALLRALGRDPAAPHLAETPRRVAEAYAELLTGRPFALTTFPNDGGYDEMVVATGIPVASLCEHHLLPFTGVASVGHLPGERILGLSKLARVLDHFARDLQVQERLTQQVADWLRDHLAPRGVGVVIAAEHQCTSLRGIRAAASRTVTSALHGLLREDVRSRQEFLALTGTAA

SEQ ID NO: 8555 - protein, 205 aa, Geodermatophilus tzadiensis
  misc_feature (1)..(205): tr|A0A2T0TC08|A0A2T0TC08_9ACTN GTP cyclohydrolase 1 OS= Geodermatophilus tzadiensis OX=1137988 GN=folE PE=3 SV= 1
MSELPEEPEDEVRVDLSRVDTARAEAAVRELLLAVGEDPDRPGLRDTPGRVARAYAETFAGLWQDPGEILATVFDEDHDELVLVKDIPMYSTCEHHLVPFHGAAHVGYIPGEDGRVTGLSKIARLVDVYARRPQVQERMTRQIADAVDEHLKPRGVLVVIEAEHLCMGMRGIRKPGSITVTSAVRGIIRDNAATRAEAMGLVLGR

SEQ ID NO: 8556 - protein, 207 aa, Geofilum rubicundum
  misc_feature (1)..(207): tr|A0A0E9LRA7|A0A0E9LRA7_9BACT GTP cyclohydrolase 1 OS= Geofilum rubicundum JCM 15548 OX=1236989 GN=folE PE=3 S V=1
MEFSLNNGKGYVKVESYDDETTHQLARVYEQSLRLLGEDPTREGLEKTPIRVAKAMQFLTQGYNMKPDEIIRSAMFREDYQQMVVVKDIELYSMCEHHMLPFFGKAHVAYIPRHHITGLSKIARVVEAFARRLQVQERLTTQIKDCIQTTLNPLGVAVVIEAQHMCMQMRGVQKQHSVTTTSDFTGAFLKNLATRDEFFNIIGSRLH

SEQ ID NO: 8557 - protein, 188 aa, Geomicrobium sp.
  misc_feature (1)..(188): tr|A0A061N8A1|A0A061N8A1_9BACL GTP cyclohydrolase 1 OS= Geomicrobium sp. JCM 19055 OX=1460649 GN=folE PE=3 SV=1
MTKFDKDKIETAVRHILEAIGDNPDREGIKDTPARVARMYEEVFSGIDEDPTTHLQTVFGEEHEELVLVKDITFYSMCEHHLLPFFGKVHVGYIPKNGTVTGLSKLARVVETVTRRPQLQERITSTVLDAMLETLEPHGVMVIVEAEHMCMTMRGIQKPGSSTVTSAVRGVFANDESSRQEVLSLIKG

SEQ ID NO: 8558 - protein, 188 aa, Geomicrobium sp.
  misc_feature (1)..(188): tr|A0A061NIC5|A0A061NIC5_9BACL GTP cyclohydrolase 1 OS= Geomicrobium sp. JCM 19037 OX=1460634 GN=folE PE=3 SV=1
MTKFDKEKIESAVRQILEAIGDDPGREGIIDTPARVARMYEEVFGGIGEDPAEHLKTVFGEEHEELVLVKDITFYSMCEHHLLPFFGKVHVGYIPKNGTVTGLSKLARVVETVTRRPQLQERITSTVADALVETLDPHGVMVVVEAEHMCMTMRGIQKPGSSTVTSAVRGVFEEEESSRQEVLSLIKY

SEQ ID NO: 8559 - protein, 269 aa, Geomonas terrae
  misc_feature (1)..(269): tr|A0A4S1CME9|A0A4S1CME9_9DELT GTP cyclohydrolase FolE2 OS=Geomonas terrae OX=2562681 GN=folE2 PE=3 SV=1
MSKVTDQNKEAQPLTDVQLTRDTRNIPISKVGVKDVSYPIVVMDKNKKFQNTIARINMYVDLPHHFKGTHMSRFVEILNKYREEIALDKLELILATMKEKLGASNAHLEMEFPYFVEKKAPVSKAKSLMEYTCTFSASLSDTFDFVLGIKVPVTSLCPCSKELSSYGAHNQRSIMTVQVRYSEFIWIEDLIEVIEECGSSPVYSLLKREDEKFVTERAYENPRFVEDMVREATVRLLSMENITWFSIEAENFESIHKHSAYAAIERDKR

SEQ ID NO: 8560 - protein, 222 aa, Georgenia muralis
  misc_feature (1)..(222): tr|A0A3N4Z849|A0A3N4Z849_9MICO GTP cyclohydrolase 1 OS= Georgenia muralis OX=154117 GN=folE PE=3 SV=1
MTRAIPQSPDEPGGVADRASDAAPLLDGGTAVRPYDPEGVRRAVRDLLVAVGEDPDREGLAGTPDRMARAYAEMFAGLAEDPADHLDAVFDIGHEEMVLVRDIPLYSMCEHHLLPFHGVAHVGYIPAVDGRVTGLSKLARLVEGYARRPQVQERLTSQVADALVARLEPRGAIVVVEAEHLCMSMRGVRKPGARTMTSAVRGRMRNAATRSEAMSLILAGTR

SEQ ID NO: 8561 - protein, 200 aa, Georgenia satyanarayanai
  misc_feature (1)..(200): tr|A0A2Y9BYC3|A0A2Y9BYC3_9MICO GTP cyclohydrolase 1 OS= Georgenia satyanarayanai OX=860221 GN=folE PE=3 SV=1
MGEEQAAPAELRPYDAEGVRAAVRDLLVAVGEDPDREGLRDTPARVSRALQEIFAGMRTDPAEILATTFDLGHEEMILVRDIEVYSTCEHHLLPFHGVAHVGYIPGHQGRVTGLSKIARLVETFARRPQVQERLTSQIADALVTHLDPQGVIVVIECEHLCMSMRGVRKPGARTITSAVRGQMRQAATRAEAMSLIAPRR

SEQ ID NO: 8562 - protein, 230 aa, Georgenia soli
  misc_feature (1)..(230): tr|A0A2A9ENY2|A0A2A9ENY2_9MICO GTP cyclohydrolase 1 OS= Georgenia soli OX=638953 GN=folE PE=3 SV=1
MVAQDPTGTGSATWDAGIAGSPPEADGMASDSSPIRYRHTPRPYDADGVRRAVRDLLAAVGEDPDREGLLGTPDRLARSFAEIFAGLAEDPADHLDAVFDIGHEEMVLVRDIPLYSMCEHHLLPFHGVAHVGYIPAENGRVTGLSKLARLVEGYARRPQVQERLTSQVADALVDRLEPRGVIVVVEAEHLCMSMRGVRKPGSRTITSAVRGQMRRAATRAEAMSLLVNRA

SEQ ID NO: 8563 - protein, 249 aa, Georgenia soli
  misc_feature (1)..(249): tr|A0A2A9ERK0|A0A2A9ERK0_9MICO GTP cyclohydrolase 1 OS= Georgenia soli OX=638953 GN=folE PE=3 SV=1
MAVVTLADERLALDAEPTLDTTLPHAPTVDPRPVPAESRAALVEQRPAPVDDAAGSAGRIDLARARSAVADLLGALGRDTRSEHLADTPRRVADALAEMLTPRPFEMTTFPNDEGYDELVLVRDVPFHSLCEHHLLPFHGVAHLAYLPGERIVGLSKLARVLEHFSRDLQVQERLTQQVADLLQERLRPRGVGVVLEAEHLCMSLRGVAVTGSRTVTSALRGTLREDPRSRAEFLALVGAGPAPRSYAG

SEQ ID NO: 8564 - protein, 241 aa, Georgenia sp.
  misc_feature (1)..(241): tr|A0A5B8C153|A0A5B8C153_9MICO GTP cyclohydrolase 1 OS= Georgenia sp. Z443 OX=2589797 GN=folE PE=3 SV=1
MTTITTGPLTERPPALDPRPSTRDARPSTRDARPPAPNAPLDTPVARAPLPQAHPDARGIDHAAATRAVTDLLAALGHDARGPHLAETPRRVADALAELLTPRPFTLTTFPNDEGYDQLVLVRDVPFHSLCEHHLLPFHGVAHIAYLPGERIVGLSKLARVLHHFARDLQVQERLTQQVADLLQDRLAPRGVGVVLQAEHMCMALRGVQVSGSRTVTSALHGALREDARTREEFFALAGLQ

SEQ ID NO: 8565 - protein, 246 aa, Georgenia sp.
  misc_feature (1)..(246): tr|A0A552WM94|A0A552WM94_9MICO GTP cyclohydrolase 1 OS= Georgenia sp. Z446 OX=2594180 GN=folE PE=3 SV=1
MTTITTVPRAERPPSLDPRPSPPDARPASRDDRPPAPNALLDAPALDAPAARAPLPQAHPDARGIDHAAATRAVTDLLAALGHDARGPHLAETPRRVADALAELLTPRPFTLTTFPNDEGYDQLVLVRDVPFHSLCEHHLLPFHGVAHIAYLPGERIVGLSKLARVLHHFARDLQVQERLTQQVADLLQDRLAPRGVGVVLQAEHLCMALRGVQVSGSRTVTSALHGALREDARTREEFFALAGLQ

SEQ ID NO: 8566 - protein, 209 aa, Georhizobium profundi
  misc_feature (1)..(209): tr|A0A3Q8XP99|A0A3Q8XP99_9RHIZ GTP cyclohydrolase 1 OS= Georhizobium profundi OX=2341112 GN=folE PE=3 SV=1
MDAIVKSFPGKDQDEKDARPSQSEVEAAVRTLLLWVGDDPDREGLVDTPKRVAKAYKDLFGGYDEDPEDVLGRTFEEVAGYDDMVLVRDIPFFSHCEHHMVPIIGKAHVAYLPDGKVLGLSKIARVIDIYARRLQTQESMTAQVSKAIDETLRPLGVAVMIEAEHMCMAMRGIRKQGSTTLTTTFTGQFKTDPHQQARFMTMLRSHNGH

SEQ ID NO: 8567 - protein, 188 aa, Geosporobacter ferrireducens
  misc_feature (1)..(188): tr|A0A1D8GNZ5|A0A1D8GNZ5_9CLOT GTP cyclohydrolase 1 OS= Geosporobacter ferrireducens OX=1424294 GN=folE PE=3 SV =1
MDKAKIERAVRDILEAIGENPDREGLRDTPKRIARMYEEIFAGLKADPKDHLEIYFEEEKHEELVLVKDIPFFSVCEHHLVPFYGKAHIGYIPKGGKLTGLSKLARVLDTVSKRPQLQERLTATIADTIVEKLHPHGVIVVVEAEHMCMTMRGIKKPGSKTLTSAVRGIFQDDAKARAEAMALINFGS

SEQ ID NO: 8568 - protein, 188 aa, Geosporobacter subterraneus
  misc_feature (1)..(188): tr|A0A1M6H6B8|A0A1M6H6B8_9CLOT GTP cyclohydrolase 1 OS= Geosporobacter subterraneus DSM 17957 OX=1121919 GN=fol E PE=3 SV=1
MDKTKIERAVRDILEAIGEDPDREGLRDTPKRIARMYGEIFAGLKADPKDHLEIYFEEEKHEELVLVKDIPFYSVCEHHLVPFYGKAHIGYIPKGGKLTGLSKLARVLETVSKRPQLQERLTATIADTIMEKLNPYGVIVVVEAEHMCMTMRGVKKPGSKTLTSAVRGIFQDDAKSRAEAMALINFGK

SEQ ID NO: 8569 - protein, 261 aa, Geothermobacter ehrlichii
  misc_feature (1)..(261): tr|A0A5D3WJI3|A0A5D3WJI3_9DELT GTP cyclohydrolase FolE2 OS=Geothermobacter ehrlichii OX=213224 GN=folE2 PE=3 S V=1
MTMPDMQQSPDSRNIPIDKVGVKGIRYPIVVQDKTRQWQHTVARVNMYVDLPEHFKGTHMSRFIEILNRYHGAVSVDNLEEILAEMKRRLESSCAHLELDFPYFIEKAAPVSGARGLMEYQCRMVGSLGEQFDFVLEAAVPVTSLCPCSREISEAGAHNQRSTVRVRIRYRKHVWLEDLIALVESCASAPVYSLLKREDEKAVTEQAYANPMFVEDIVREVTRRLRQEEKITWFAVECENFESIHNHSAYALVEDVRPAPG

SEQ ID NO: 8570 - protein, 257 aa, Geothermobacter sp.
  misc_feature (1)..(257): tr|A0A1X0XZP0|A0A1X0XZP0_9DELT GTP cyclohydrolase FolE2 OS=Geothermobacter sp. EPR-M OX=1969733 GN=folE2 PE=3 SV=1
MPDLQKSRDTRNISIDKVGVKDIRYPIVLLDKYREQQHTVARINMYVDLPEQFKGTHMSRFIEILNRYHGEISVDNLEEILGEMQQRLDAGRAHLELSFPYFIEKRAPVSGARGLMEYQCRMIGTLSDHFDFVIEAEVPVTSLCPCSREISEVGAHNQRSLVRVQIRYREHVWLEDLIATVEGCASAPVYSLLKREDEKAVTEQAYHNPMFVEDMVREVTRKLKENSEISWFRVECENFESIHNHSAYAQIEMTTGD

SEQ ID NO: 8571 - protein, 257 aa, Geothermobacter sp.
  misc_feature (1)..(257): tr|A0A2K2HB01|A0A2K2HB01_9DELT GTP cyclohydrolase FolE2 OS=Geothermobacter sp. HR-1 OX=654845 GN=folE2 PE=3 SV =1
MPDLQKSRDTRNIPIDKVGVKDIRYPIVLLDKYREQQHTVARINMYVDLPEQFKGTHMSRFIEILNRYHGEISVDNLEEILGEMQQRLDAGRAHLELCFPYFIEKRAPVSGARGLMEYQCRMIGTLSDHFDFVIEAEVPVTSLCPCSREISEVGAHNQRSLVRVQIRYREHVWLEDLIATVESCASAPVYSLLKREDEKAVTEQAYHNPMFVEDMVREVTRKLKENGEISWFRVECENFESIHNHSAYAQVEMTVGD

SEQ ID NO: 8572 - protein, 259 aa, Geovibrio thiophilus
  misc_feature (1)..(259): tr|A0A3R5UTB7|A0A3R5UTB7_9BACT GTP cyclohydrolase FolE2 OS=Geovibrio thiophilus OX=139438 GN=folE2 PE=3 SV=1
MRDIQNEKDARNISIDKVGIKGIVYPVILDDKKKGRQHTNASINMYVQLPQDFKGTHMSRFVEILNDHRENMGISTVWIILEEMKKRLGSSESHIELFFKYFIEKEAPVSGLTSMMDYTCEYYATLTDTERDFVLCVRVPVMTLCPCSKEISEYGAHNQRSIITIKVRFKKMLWIEELVDIAESSASSPVYPLLKREDEKYVTEHSYMNPAFVEDVVRNAAEKLMAESRVTWFEVSSENYESIHNHSAYAVIVRDKRTL

SEQ ID NO: 8573 - protein, 220 aa, Gibbsiella quercinecans
  misc_feature (1)..(220): tr|A0A250AXW4|A0A250AXW4_9ENTR GTP cyclohydrolase 1 OS= Gibbsiella quercinecans OX=929813 GN=folE PE=3 SV=1
MTTLSNEAVQVHAALEARGLETPLRGEMLDGETRKRRIKEHMTEIMQLLNLDLSDDSLAETPHRIAKMYVDEIFSGLDYANFPKITVIENKMKVDEMVTVRDITLTSTCEHHFVTIDGKATVAYIPKDAVIGLSKINRIVQFFAQRPQVQERLTQQILVALQTLLGTNNVAVSIDAVHYCVKARGIRDANSATTTTSLGGLFKSSQNTRQEFLRAVRHHG

SEQ ID NO: 8574 - protein, 219 aa, Gilliamella apicola
  misc_feature (1)..(219): tr|A0A1B9JUK9|A0A1B9JUK9_9GAMM GTP cyclohydrolase 1 OS= Gilliamella apicola OX=1196095 GN=folE PE=3 SV=1
MTELSLAAQKVKAALAAKNLETPSCRLTMDNSERKIKIESHFREIMKLMELDLSDDSLSETPHRVAKMYVDEIFSGLYYENFPKITLIENKMQVDEMITVRNISLTSICEHHFVTIDGKATVSYIPKDSVIGLSKINRIVKFFSQRPQVQERLTQQILVALQTLLGTVNVAVSIDATHYCVKARGVKDSSSITTTTALGGGFKTNPSTRQEFLRALTHY

SEQ ID NO: 8575 - protein, 219 aa, Gilliamella apicola
  misc_feature (1)..(219): tr|X2H0Q2|X2H0Q2_9GAMM GTP cyclohydrolase 1 OS=Gilliame lla apicola OX=1196095 GN=folE PE=3 SV=1
MTELSLAAQKVKEALAAKNLETPSSRLDMDSSERKAKIEAHFREIMKLMELDLSDDSLAETPHRVAKMYVDEIFSGLNYHNFPKITLIENKMQVDEMITVRDITLTSVCEHHFVTIDGKATVSYIPKDKVIGLSKINRIVEFFSQRPQVQERLTQQILVALQTLLGTVNVAVSIDATHYCVKARGIKDSNSLTTTTALGGGFKTNPSTRQEFLRALKHY

SEQ ID NO: 8576 - protein, 219 aa, Gilliamella apis
  misc_feature (1)..(219): tr|A0A242NRS7|A0A242NRS7_9GAMM GTP cyclohydrolase 1 OS= Gilliamella apis OX=1970738 GN=folE PE=3 SV=1
MTELSPAAQKVKEALAAKNLETPSCRLAMENSERKAKIEAHFREIMKLMELDLHDDSLSETPHRVAKMYVDEIFSGLNYHNFPKITLIENKMQVDEMITVRDITLTSVCEHHFVTIDGKATVSYIPKDKVIGLSKINRIVQFFSQRPQVQERLTQQILVALQTLLGTVNVAVSIDATHFCVKARGIKDSNSLTTTTALGGGFKTNPSTRQEFLRALKHY

SEQ ID NO: 8577 - protein, 219 aa, Gilliamella apis
  misc_feature (1)..(219): tr|A0A242P4L5|A0A242P4L5_9GAMM GTP cyclohydrolase 1 OS= Gilliamella apis OX=1970738 GN=folE PE=3 SV=1
MTELSPAAQKVKEALAAKNLETPSCRLAMENSERKAKIEAHFREIMKLMELDLHDDSLSETPHRVAKMYVDEIFSGLNYHNFPKITLIENKMQVDEMITVRDITLTSVCEHHFVTIDGKATVSYIPKDKVIGLSKINRIVEFFSQRPQVQERLTQQILVALQTLLGTVNVAVSIDATHYCVKARGIKDSNSLTTTTALGGGFKTNPSTRQEFLRALKHY

SEQ ID NO: 8578 - protein, 219 aa, Gilliamella bombicola
  misc_feature (1)..(219): tr|A0A1C4CEB6|A0A1C4CEB6_9GAMM GTP cyclohydrolase 1 OS= Gilliamella bombicola OX=1798182 GN=folE PE=3 SV=1
MTELSLAAQKVKAALAAKNLETPSCRLAMDNGERKEKIEAHFREIMKLMELDLTDDSLAETPHRVSKMYVDEIFSGLYYENFPKITLIENKMQVDEMITVRDITLTSVCEHHFVTIDGKATVSYIPKDKVIGLSKINRIVEFFSQRPQVQERLTQQILVALQTLLGTVNVAVSIDATHYCVKARGIKDSSSMTTTTALGGGFKTNPSTRQEFLRTLNHY

SEQ ID NO: 8579 - protein, 219 aa, Gilliamella intestini
  misc_feature (1)..(219): tr|A0A1C4C1N6|A0A1C4C1N6_9GAMM GTP cyclohydrolase 1 OS= Gilliamella intestini OX=1798183 GN=folE PE=3 SV=1
MTELSLAAQKVKEALAAKNLETPSCRLTMDNCERKNKIEAHFREIMKLMELDLTDDSLAETPHRVSKMYVDEIFSGLYYENFPKITLIENKMQVDEMITVRDITLTSVCEHHFVTIDGKATVSYIPKDKVIGLSKINRIVEFFSQRPQVQERLTQQILVALQTLLGTVNVAVSIDATHYCVKARGIKDSSSMTTTTALGGGFKTNPSTRQEFLRALNHY

SEQ ID NO: 8580 - protein, 219 aa, Gilliamella sp.
  misc_feature (1)..(219): tr|A0A242PB69|A0A242PB69_9GAMM GTP cyclohydrolase 1 OS= Gilliamella sp. N-G2 OX=1970471 GN=folE PE=3 SV=1
MTELSLAAQKVKEELAAKNLETPSCRLAMENSERKAKIEAHFREIMKLMELDLHDDSLAETPHRVAKMYVDEIFSGLNYHNFPKITLIENKMQVDEMITVRDITLTSVCEHHFVTIDGKATVSYIPKDKVIGLSKINRIVQFFSQRPQVQERLTQQILVALQTLLGTVNVAVSIDATHFCVKARGIKDSNSLTTTTALGGGFKTNPSTRQEFLRALKHY

SEQ ID NO: 8581 - protein, 219 aa, Gilliamella sp.
  misc_feature (1)..(219): tr|A0A242P2T1|A0A242P2T1_9GAMM GTP cyclohydrolase 1 OS= Gilliamella sp. A7 OX=1970465 GN=folE PE=3 SV=1
MTELSLAAQKVKEALAAKNLETPSCRLAMENSERKAKIEAHFREIMKLMELDLHDDSLAETPHRVAKMYVDEIFSGLNYHNFPKITLIENKMQVDEMITVRDITLTSVCEHHFVTIDGKATVSYIPKDKVIGLSKINRIVQFFSQRPQVQERLTQQILVALQTLLGTVNVAVSIDATHFCVKARGIKDSNSLTTTTALGGGFKTNPSTRQEFLRALKHY

SEQ ID NO: 8582 - protein, 197 aa, Gillisia hiemivivida
  misc_feature (1)..(197): tr|A0A5C6ZWS7|A0A5C6ZWS7_9FLAO GTP cyclohydrolase 1 OS= Gillisia hiemivivida OX=291190 GN=folE PE=3 SV=1
MYRFFEEYNEEVTEGLTDNFKQIIHGLGEDTSREGILKTPERAAKAMQFLTQGYDADPVKILNDAMFNESYDEMVVVKDIELYSLCEHHMLPFFGKAHIAYIPNGKIVGLSKIPRVVDVFARRLQVQERLTHDILECINNTLQPQGVAVVIEAQHMCMMMRGVQKQNSVTTTSGFRGQFKKIETRNEFLKLISSDLK

SEQ ID NO: 8583 - protein, 223 aa, Gillisia hiemivivida
  misc_feature (1)..(223): tr|A0A5C6ZNV4|A0A5C6ZNV4_9FLAO GTP cyclohydrolase 1 OS= Gillisia hiemivivida OX=291190 GN=folE PE=3 SV=1
MDHMENKIDEMGDAHVSTSANNPLREDAFDLSNEEKIVLINKDVKSILQTLGMDLTDDSIKGTPQRVAKMFVNEIFGGLDPKRKPKASTFENKYKYGEMLVEKNITIYSTCEHHLLPIVGRAHVAYISKGSVIGLSKMNRIVDYFAKRPQVQERMTMQIVQELQNALGTQDVACIIDAKHLCVNSRGIRDIESSTVTSEFGGAFKENSVKREFLDYIKLDTSF

SEQ ID NO: 8584 - protein, 197 aa, Gillisia limnaea
  misc_feature (1)..(197): tr|H2BWY6|H2BWY6_9FLAO GTP cyclohydrolase 1 OS=Gillisia limnaea DSM 15749 OX=865937 GN=folE PE=3 SV=1
MYNYFEEYDEKVTGELQENFKNIIEHLGENVSREGIVKTPERAAKAMQFLMQGYSADPKKILEKAMFKESYDEMVVVKNIELYSLCEHHMLPFFGKAHIAYIPNGQIVGLSKLPRIVDVFARRMQVQERLTHDILECINTVVKPKGVAVVIEAQHMCMMMRGVQKQNSVTTTSGFRGQFKEIETRNEFLKLITSDLK

SEQ ID NO: 8585 - protein, 226 aa, Gillisia limnaea
  misc_feature (1)..(226): tr|H2BY84|H2BY84_9FLAO GTP cyclohydrolase 1 OS=Gillisia limnaea DSM 15749 OX=865937 GN=folE PE=3 SV=1
MKIDKIDEPLDDIGDAFISANTNTPMRKDAFEKSDAEKIELIHEDVKNILTTLGLDLTDDSLKGTPNRVAKMFVKEIFGGLNPKLKPKASTFENKYKYGEMLVEKNITLYSTCEHHLLPIVGKAHVGYISNGTVIGLSKMNRIVDFYAKRPQVQERLTMQIVKELQEALGTEDVACVIDAKHLCVNSRGIRDVDSSTVTSEYGGKFKDAETRRDFLDYINLETNFN

SEQ ID NO: 8586 - protein, 225 aa, Gillisia mitskevichiae
  misc_feature (1)..(225): tr|A0A495P724|A0A495P724_9FLAO GTP cyclohydrolase 1 OS= Gillisia mitskevichiae OX=270921 GN=folE PE=3 SV=1
MKIDHMENKIDEMGDAHVSTSANNPLRDDAFDLSNEEKIARINEDVKSILQTLGMDLTDDSIKGTPQRVAKMFVNEIFGGLDPKRKPKASTFENKYKYGEMLVEKNITIYSTCEHHLLPIVGRAHVAYISKGSVIGLSKMNRIVDYFAKRPQVQERLTMQIVQELQNALGTQDVACVIDAKHLCVNSRGIRDIESSTVTSEFGGAFKETSVRREFLDYIKLETSF

SEQ ID NO: 8587 - protein, 197 aa, Gillisia mitskevichiae
  misc_feature (1)..(197): tr|A0A495PU37|A0A495PU37_9FLAO GTP cyclohydrolase 1 OS= Gillisia mitskevichiae OX=270921 GN=folE PE=3 SV=1
MYQFFEEYNEEVTEDLTNNFKQIIHGLGEDTSREGILKTPERAAKAMQFLTQGYDADPVKILNDAMFSESYDEMVVVKDIEVYSLCEHHMLPFFGKAHIAYIPNGKIVGLSKLPRVVDVFARRLQVQERLTHDILECINNTLQPQGVAVVIEAQHMCMMMRGVQKQNSVTTTSGFRGQFKQIETRNEFLKLISSDLK

SEQ ID NO: 8588 - protein, 197 aa, Gillisia sp.
  misc_feature (1)..(197): tr|A0A559PSM3|A0A559PSM3_9FLAO GTP cyclohydrolase 1 OS= Gillisia sp. Hel_I_86 OX=1249981 GN=folE PE=3 SV=1
MYRFFEEYSEEVTEDLTNNFKQIINGLGEDTSREGILKTPERAAKAMQFLTQGYDADPVKILNDAMFNESYDEMVVVKDIEVYSLCEHHMLPFFGKAHIAYIPNGKIVGLSKLPRLVDVFARRLQVQERLTHDILECINNTLQPQGVAVVIEAQHMCMMMRGVQKQNSVTTTSGFRGQFKQIETRNEFLKLISSDLK

SEQ ID NO: 8589 - protein, 197 aa, Gillisia sp.
  misc_feature (1)..(197): tr|A0A1H1SSC3|A0A1H1SSC3_9FLAO GTP cyclohydrolase 1 OS= Gillisia sp. Hel1_33_143 OX=1336796 GN=folE PE=3 SV=1
MYKYFEEYDLEVSEALKDNFKNIIEKIGEDPKREGIVKTPERAAKAMQFLMQGYDANPKEILRSAMFKETYNEMVLVKDIELYSLCEHHMLPFFGKAHIAYIPNGHIVGLSKLPRIVDIFSRRMQVQERLTHDILECINSTLKPQGVAVVIEAQHMCMMMRGVQKQNSVTTTSGFRGQFEKIETRNEFMNLISSHLR

SEQ ID NO: 8590 - protein, 198 aa, Gilvibacter sp.
  misc_feature (1)..(198): tr|A0A1Y0MS29|A0A1Y0MS29_9FLAO GTP cyclohydrolase 1 OS= Gilvibacter sp. SZ-19 OX=754429 GN=folE PE=3 SV=1
MAYRHFEEYSQTTTEDMKEKYRDIITKLGEDVSREGIVKTPERAAKAMQFLTQGYDQNAEQILRSAMFKEDYDEMVIVKDIEVYSLCEHHILPFFGKAHIAYIPNGYIVGLSKLPRVVDVFARRLQVQERLTHDILECINKTLKPRGVAVVIEASHMCMMMRGVQKQNSVTTTSGFRGQFEKNETRSEFLRLISNELS

SEQ ID NO: 8591 - protein, 225 aa, Gilvibacter sp.
  misc_feature (1)..(225): tr|A0A1Y0MQM4|A0A1Y0MQM4_9FLAO GTP cyclohydrolase 1 OS= Gilvibacter sp. SZ-19 OX=754429 GN=folE PE=3 SV=1
MDLEKQLKEIEAMGDEHVGSSTDTPLRPDAFELSDIEKIDRIKGQVKEIMETLGLDLEDDSLKGTPTRVAKMFVNEIFGGLHPDRKPSASTFENKYKYGEILVEKNITLYSTCEHHLLPIVGKAHVAYISKGTVVGLSKMNRIVDYYAKRPQVQERLTMQIVKELQAVLGTQDVACVIDAKHLCVNSRGIRDIDSSTVTSEFGGKFKDPAVRREFLDYINLDTEF

SEQ ID NO: 8592 - protein, 336 aa, Gimesia maris
  misc_feature (1)..(336): tr|A0A3D3RG41|A0A3D3RG41_9PLAN GTP cyclohydrolase FolE2 OS=Gimesia maris OX=122 GN=folE2 PE=3 SV=1
MFEFVSDALNLKQMGSIDPGAQSVLSTDSRVASSKSLMPDVANESLPLTGGTLERVGMSGVELVLRLRDASGEIFRTPARADAAVSLDDENVKGIHMSRLFLSLNNRLADTELSLPVVNEILQDFIHTHQDMSSSSYLTLTYEHSLKRPALLSDHAGWRAYPVKIQSACQQGVFRHQLQVRLTYSSACPCSAALSRQLIQQAFENRFSDRSELTHDEIMQWLGTPEAILAVPHSQRSHADVCVELESDIEEFPIESLIDYLERVIATPVQTAVKREDEQEFARLNGANLMFCEDAARKLKGALEGHEGVKDFRVEINHLESLHPHDASAVAIKNRS

SEQ ID NO: 8593 - protein, 336 aa, Gimesia maris
  misc_feature (1)..(336): tr|A6BZI1|A6BZI1_9PLAN GTP cyclohydrolase FolE2 OS=Gime sia maris DSM 8797 OX=344747 GN=folE2 PE=3 SV=1
MFEFVSDALNLKQMGSIDPGAQSVLSTDSRVASSKSLMPDVANESLPLTGGTLERVGMSGVELVLRLRDASGEIFRTPARADAAVSLDDENVKGIHMSRLFLSLNNRLADTELSLPVVNEILKDFIHTHQDMSSSSYLTLTYEHSLKRPALLSDHAGWRAYPVKIQSACQQGVFRHQVQVRLTYSSACPCSAALSRQLIQQAFENRFSDRSELTHDEIMQWLGTPEAILAVPHSQRSHADVCVELESEIEEFPIESLIDYLERVIATPVQTAVKREDEQEFARLNGANLMFCEDAARKLKGALEGYEGVKDFRVEINHLESLHPHDASAVAIKNRS

SEQ ID NO: 8594 - protein, 336 aa, Gimesia sp.; identical to SEQ ID NO: 8592
  misc_feature (1)..(336): tr|A0A2D5GQT7|A0A2D5GQT7_9PLAN GTP cyclohydrolase FolE2 OS=Gimesia sp. OX=2024833 GN=folE2 PE=3 SV=1

SEQ ID NO: 8595 - protein, 336 aa, Gimesia sp.
  misc_feature (1)..(336): tr|A0A2E2C5V2|A0A2E2C5V2_9PLAN GTP cyclohydrolase FolE2 OS=Gimesia sp. OX=2024833 GN=folE2 PE=3 SV=1
MFEFVSDALNLKQMGAADQGTQSVMSTDSRAVSTASLLPDVANELLPTAGGTLERVGMSGVELVLRLRDASGEIFRTPARADAAVSLDDENVKGIHMSRLFLSLNNRLADTELTLPVVNDILKDFIRTHQDMSSSSYLTLTYEHSLKRPALLSDHAGWRAYPVKIQSACQQGVFRHQLQIRLTYSSTCPCSAALSRQLIQQAFENRFGDRSELTHDEIVQWLGTPEAILAVPHSQRSHADVCVELESDVDDFPIAALIDYLERVIATPVQTAVKRQDEQEFARLNGANLMFCEDAARKLKGALEHYAGIKDFRVEINHLESLHPHDASAVAIKNRS

SEQ ID NO: 8596 - protein, 229 aa, Glaciecola nitratireducens
  misc_feature (1)..(229): tr|G4QIL2|G4QIL2_GLANF GTP cyclohydrolase 1 OS=Glacieco la nitratireducens (strain JCM 12485 / KCTC 12276 / FR1 064) OX=1085623 GN=folE PE=3 SV=1
MLAHEAIKIRGAAEPSISAEATIVRRALEAKGLETPMVENALSNEEKRIKIQAAMREVMETLGLDLTDDSLQDTPNRIAKMYVNEIFAGLDYRAFPKITQIENKMSIDQPVQVTDISLTSTCEHHFVTIDGTATVSYIPKDTVLGLSKINRLVGFFAQRPQVQERLTQQVMVAIQALTGTDDVAVSINATHYCVKARGVKDSQSFTRTSSLGGAFSTNPDLRREFYQLK

SEQ ID NO: 8597 - protein, 233 aa, Glaciecola pallidula
  misc_feature (1)..(233): tr|K6YCT4|K6YCT4_9ALTE GTP cyclohydrolase 1 OS=Glacieco la pallidula DSM 14239 = ACAM 615 OX=1121922 GN=folE PE =3 SV=1
MLANEAIKIRGAAVPSISAEATIVRRALEAKGLETPMAENGLSNEEKRIRIQGAMRVVMETLGLDLNDDSLQDTPNRIAKMYVNEIFSGLDYHAFPKITQIENKMSIDQPVQVTDISLTSTCEHHFVTIDGTATVSYIPKDTVLGLSKINRLVGFFAQRPQVQERLTQQVMVAIQALTGTDDVAVSINATHYCVKARGIRDSQSYTKTSSLGGAFSSNPDLRREFYNSTQSKG

SEQ ID NO: 8598 - protein, 229 aa, Glaciecola punicea
  misc_feature (1)..(229): tr|H5T864|H5T864_9ALTE GTP cyclohydrolase 1 OS=Glacieco la punicea ACAM 611 OX=1121923 GN=folE PE=3 SV=1
MLANDKIVMHGANHNIALSEQAELVRDALLVAGLETPMVDNGLTAEEKRLKIKQSMTAIMQALGLDLNDDSLQDTPNRIAKMYVNEIFSGLDYKNFPKITQIENKMSIDQPVQVTDISLTSTCEHHFVTIDGTATVSYIPNKTVIGLSKINRLVSFFAQRPQVQERLTQQVMVALQALTGTKDVAVSINATHYCVKARGVRDTNSYTKTSSLGGSFNTDRDLRREFFQI

SEQ ID NO: 8599 - protein, 228 aa, Glaciecola sp.
  misc_feature (1)..(228): tr|A0A3D1S1Z7|A0A3D1S1Z7_9ALTE GTP cyclohydrolase 1 OS= Glaciecola sp. OX=1905676 GN=folE PE=3 SV=1
MLAKEAVIVRTALEPAITKEAALVRTALIEQGLETPMKDNGLTDDEKRSKIQRAMNDVMDALGLDLEDDSLCDTPRRIAKMYVDEIFSGLDYRKFPKITQIENKMKIEQPVQVSDVSLTSTCEHHFVTIDGTASVSYIPKQTVIGLSKINRLVAFFAQRPQVQERLTQQIMVALQALTGTEDVAVSINATHYCVKARGIRDSKSYTKTSSLGGVFSRDADMRKEFFAG

SEQ ID NO: 8600 - protein, 220 aa, Glaciecola sp.
  misc_feature (1)..(220): tr|A0A2Z6UIA5|A0A2Z6UIA5_GLASK GTP cyclohydrolase 1 OS= Glaciecola sp. (strain KUL10) OX=2161813 GN=folE PE=3 S V=1
MREAAEPAISAEALLVRRALEAKGLETPMIDNGLSNEEKRKRIKAAMTEVMQTLGLDLSDDSLQDTPNRIAKMYVNEIFSGLDYRSFPKITQIENKMQIDQPVQVSDISLTSTCEHHFVTIDGTASVSYIPKGTVIGLSKLNRLVAFFAQRPQVQERLTQQVMVAIQALTGTDDVAVSINATHYCVKARGVMDSSSYTKTSSLGGQFNTNADLRREFFSL

SEQ ID NO: 8601 - protein, 198 aa, Glaciibacter sp.
  misc_feature (1)..(198): tr|A0A4S4FKC0|A0A4S4FKC0_9MICO GTP cyclohydrolase 1 OS= Glaciibacter sp. YIM 131861 OX=2565934 GN=folE PE=3 SV= 1
MTGVDRARIEAAVTELLLAIGEDPGRPGLVKTPRRVAESYDEFFGGLHRDPVEHLKDAVPLGSSDDGLPQTGDAVMVRGIEFRSICEHHLLPFVGVVHVAYQPGERVVGLGKLSDVVETLSARPQLQERLTEEIADALQEGLEARGVLVVMDAVHRCVVARGSRQTGSSTVTVASRGRLTDPVQRAELMTLIGSSTRG

SEQ ID NO: 8602 - protein, 197 aa, Glaciihabitans sp.
  misc_feature (1)..(197): tr|A0A4Q9GTC6|A0A4Q9GTC6_9MICO GTP cyclohydrolase 1 OS= Glaciihabitans sp. RP-3-7 OX=2528207 GN=folE PE=3 SV=1
MPIDTARIEAAVAEILSAIGEDVARPGLATTPQRVAQAYGDFFAGLGVDPLIHLEETLELESDQRGELVLLRDIEFRSICEHHLLPFIGMAHVAYVPAKKVVGLGRLPKVVETLASRPQLQERLTEEIADALETGLAPQGVLVVLDAVHGCVSARGARQARSSTVTMASRGTLADPVARSGVLALIGGMPQDGGAGV

SEQ ID NO: 8603 - protein, 191 aa, Glaciihabitans sp.
  misc_feature (1)..(191): tr|A0A5C8UQJ7|A0A5C8UQJ7_9MICO GTP cyclohydrolase 1 OS= Glaciihabitans sp. CHu50b-6-2 OX=2603793 GN=folE PE=3 S V=1
MDTARIEAAVLEILAAIGEDPGRPGLRSTPQRVAQSYLEFFGGLRVDPQVHLADSDEFSAVSGDQGELVLLRDIEFRSICEHHLLPFSGVAHVAYLPRTRIIGLGRIPRVVETLAARPQLQERLTEEIADALQAGLDPRGVLVVLTANHGCVSDRGVRQAKSSTVTMATRGMLKEPLERAEIMAMIGAQRE

SEQ ID NO: 8604 - protein, 193 aa, Glaciihabitans tibetensis
  misc_feature (1)..(193): tr|A0A2T0VB51|A0A2T0VB51_9MICO GTP cyclohydrolase 1 OS= Glaciihabitans tibetensis OX=1266600 GN=folE PE=3 SV=1
MAPIDTGRIEAAVAEILAAIGDDASRPGLATTPQRVAQAYTEFFSGVGVDPTVHLAETADLRADADELSELVVLRGIEFRSMCEHHLLPFTGVVHIAYAPRTRIVGLGKLPRVVETVASRPQVQERLTEEIADALVAGLDPLGVLVVVDATHSCVSTRGTRQANSTTLTLASRGTLADPVLRAETIALIGSRP

SEQ ID NO: 8605 - protein, 218 aa, Glaesserella parasuis
  misc_feature (1)..(218): tr|U4SLP6|U4SLP6_HAEPR GTP cyclohydrolase 1 OS=Glaesser ella parasuis D74 OX=1275971 GN=folE PE=3 SV=1
MSNISPEAQSVRDALLAKGIETPTVCHQKDKDSRRNEIQQHMRAVLELLGLDLRDDSLEETPHRLAKMYMDEIFSGLDYETFPKITKIKNQMKVSEMVLVDDITLTSTCEHHFVTIDGKVAVAYYPKDWVIGLSKINRVVQFFAQRPQVQERFTEQILTAFQTILETEDVAVYVKATHFCVKCRGVKDTHSQTMTSAFGGVFLQDRDTRKEFLSLINK

SEQ ID NO: 8606 - protein, 218 aa, Glaesserella parasuis
  misc_feature (1)..(218): tr|U4S0W9|U4S0W9_HAEPR GTP cyclohydrolase 1 OS=Glaesser ella parasuis str. Nagasaki OX=1117322 GN=folE PE=3 SV= 1
MSNISPEAQSVRDALLAKGIETPTVCHQKDKDSRRNEIQQHMRAVLELLGLDLRDDSLEETPHRLAKMYVDEIFSGLDYETFPKITKIKNQMKVSEMVLVDDITLTSTCEHHFVTIDGKVAVAYYPKDWVIGLSKINRVVQFFAQRPQVQERFTEQILTAFQTILETEDVAVYVKATHFCVKCRGVKDTHSQTMTSAFGGVFLQDRDTRKEFLSLINK

SEQ ID NO: 8607 - protein, 218 aa, Glaesserella sp.
  misc_feature (1)..(218): tr|A0A328BWW5|A0A328BWW5_9PAST GTP cyclohydrolase 1 OS= Glaesserella sp. HHC-2018 OX=2094024 GN=folE PE=3 SV=1
MSNISPEAQSVREALLAKGIETPTVDHQKDKDTRRSEIQQHMRSVLELLGLDLRDDSLEETPHRLAKMYVDEIFSGLDYETFPKITKIKNQMKVSEMVLVDDITLTSTCEHHFVTIDGKVAVAYYPKDWVIGLSKINRVVQFFAQRPQVQERFTEQILTAFQTILETEDVAVYVKATHFCVKCRGVKDTHSQTMTSAFGGVFLQDRDTRKEFLSLISK

SEQ ID NO: 8608 - protein, 210 aa, Gloeobacter kilaueensis
  misc_feature (1)..(210): tr|U5QFL7|U5QFL7_9CYAN GTP cyclohydrolase 1 OS=Gloeobac ter kilaueensis JS1 OX=1183438 GN=folE PE=3 SV=1
MTIAHKDLLPSDWHGSDLESQNGQDPMREAVRTLLVGVGEDPERDGLERTPKRVAEALKFLTQGYSQSLEELLNGAIFDVGHDELVLVRDIDLFSMCEHHMLPFIGRAHVGYIPNQKVVGLSKIARIVEMYARRLQVQERLTRQVAEAIQAVLQPRGVAVVIEASHMCMVMRGVQKPNSWTVTSSMVGVFKESQSTRQEFLDLIHHKASF

SEQ ID NO: 8609 - protein, 214 aa, Gloeobacter violaceus
  misc_feature (1)..(214): sp|Q7NK98|GCH1_GLOVI GTP cyclohydrolase 1 OS=Gloeobacte r violaceus (strain ATCC 29082 / PCC 7421) OX=251221 GN =folE PE=3 SV=1
MTIAHKDFLPSDWHEDDSASEAASRNGLDPMMDAVRTLLVGVGEDPERNGLERTPKRVAEALKFLTKGYGQSLEELLNGAIFDLGHDELVLVRDIDLFSMCEHHMLPFIGRAHVGYIPDQKVVGLSKLARIVEMYARRLQVQERLTRQIAEALQEVLQPRGVAVVIEASHMCMVMRGVQKPNSWTVTSSMVGVFKESQSTRQEFLDLIHHKATF

SEQ ID NO: 8610 - protein, 239 aa, Gloeocapsa sp.
  misc_feature (1)..(239): tr|K9X8G7|K9X8G7_9CHRO GTP cyclohydrolase 1 OS=Gloeocap sa sp. PCC 7428 OX=1173026 GN=folE PE=3 SV=1
MTIGFPNGSPRSNSPLMPDSLEDTINRIATRPDRNTQNGKEAQLQPPSEELNEAMVEAVRTMLLGVGEDPEREGLLKTPKRVVEAMRFLTSGYNQSLEDLVNNAIFDEGHNEMVLVRDINFFSLCEHHMLPFMGRAHVAYIPNEKVVGLSKLARIVEMYSRRLQVQERLTRQIAEAVQTILEPQGVAVVMEATHMCMVMRGVQKPGSWTVTSAMVGVFHDEQKTREEFLNLIRHQPAFF

SEQ ID NO: 8611 - protein, 229 aa, Gloeocapsa sp.
  misc_feature (1)..(229): tr|L8LP61|L8LP61_9CHRO GTP cyclohydrolase 1 OS=Gloeocap sa sp. PCC 73106 OX=102232 GN=folE PE=3 SV=1
MTTASSNGSNYSGKTLNSRPDRTSHQGGTPALRPQLSPAEAQAQLADAVEKILEGLGEDTQREGLLKTPKRVAESMQFLTQGYNQSLETIVNGAIFDEGHNEMVLVRDIDFFSLCEHHMLPFMGRAHVAYIPNQKVVGLSKLARVVEMYSRRLQVQERLTRQVAEAIQTVLEPQGVAVVMEATHMCMVMRGVQKPGSWTVTSAMIGAFQEDQRTREEFLNLIRHQPNFM

SEQ ID NO: 8612 - protein, 274 aa, Gloeomargarita lithophora
  misc_feature (1)..(274): tr|A0A1J0AFM3|A0A1J0AFM3_9CYAN GTP cyclohydrolase 1 OS= Gloeomargarita lithophora Alchichica-D10 OX=1188229 GN= folE PE=3 SV=1
MTLIPRFVNPAANGHLSKLGNGVVPADGEMPLLLGESPSPDRYGDDEPVTRSRKTDPELGQRVAAFLLAKGVATPQVATGLDENQKRTLIARNFAEIMVALGLDLGDDSLADTPRRVAQMYVDEIFYGLDWRHFPKCTTVENKMGYSSMVMERNINVQSNCEHHFVIIDGRAHVAYIPKQKVLGLSKINRIVEYFAKRPQIQERLTEQIFYALSYILETEDIAVVIQAKHYCVKSRGVADVNSDTVTSKLGGLFLHSTATRSEFMRVVNSVIAP

SEQ ID NO: 8613 - protein, 247 aa, Gloeothece citriformis
  misc_feature (1)..(247): tr|B7KE49|B7KE49_GLOC7 GTP cyclohydrolase 1 OS=Gloeothe ce citriformis (strain PCC 7424) OX=65393 GN=folE PE=3 SV=1
MTVAPSNGYNRSNSVNSSSLTPANSNGLNPDLVERVVSRPDRNTHNGQPAHIHTTTEENKEKMMQAVEMILESVGEDPGREGLLKTPKRVAEAMQFLTQGYNQSLEELVNDAIFDEGHNEMVLVRDIDFFSLCEHHMLPFMGKAHVAYIPNQKVVGLSKLARIVEMYARRLQVQERLTRQIAEAIQEILNPQGVAVVMEATHMCMVMRGVQKPGSWTVTSAMLGAFQDDQKTREEFLNLIRHRPNFM

SEQ ID NO: 8614 - protein, 218 aa, Gloeothece citriformis
  misc_feature (1)..(218): tr|B7KJE3|B7KJE3_GLOC7 GTP cyclohydrolase 1 OS=Gloeothe ce citriformis (strain PCC 7424) OX=65393 GN=folE PE=3 SV=1
MTLSKSERSIINSSQHSLPPLTTEHHSPVSEADMIQAVRTLLLGLGEDPDREGLRDTPKRVVKALKFLTSGYHQSLDELLNGAVFGEDTNEMVLVRDIDLFSSCEHHILPILGRAHVAYIPNGKVIGLSKIARICEMYARRLQVQERLTAQIADALQGLLKPQGVAVVIEATHMCMVMRGVQKPGSWTSTSAVRGVFAEDAKTRQEFMSLIRHNPAFH

SEQ ID NO: 8615 - protein, 247 aa, Gloeothece verrucosa
  misc_feature (1)..(247): tr|E0UBA4|E0UBA4_GLOV7 GTP cyclohydrolase 1 OS=Gloeothe ce verrucosa (strain PCC 7822) OX=497965 GN=folE PE=3 S V=1
MTVAPSNGYNRANSSNSSNVTAANSNILNPNLVDRVSTRPDRNTHNGQPAQIHLASVDSKAQMSDAVRMILEAVGEDPDREGLLKTPKRVAEAMQFLTQGYNQSLEEIVNGAIFDEGHNEMVLVRDIDFFSLCEHHMLPFMGRAHVAYIPNQKVVGLSKLARIVEMYSRRLQVQERLTRQIAEAIKEILEPQGVAVVMEATHMCMVMRGVQKPGSWTVTSAMLGVFQEEQKTREEFLNLIHHRPNFM

SEQ ID NO: 8616 - protein, 205 aa, Gluconacetobacter diazotrophicus
  misc_feature (1)..(205): tr|A9HAP7|A9HAP7_GLUDA GTP cyclohydrolase 1 OS=Gluconac etobacter diazotrophicus (strain ATCC 49037 / DSM 5601 / PAl5) OX=272568 GN=folE PE=3 SV=1
MTPTDTVPLPRPSREEAEDAIRTLLRWAGEDPAREGLLDTPGRVVRSYEEFFQGYAEDPSEILSRTFSEVDDYDEIVLLRDIRFESHCEHHMVPIIGVAHVAYLPGKRVVGISKLARVVEAFSRRLQIQERLTAQIANTINDVLQPHGVAVILEAGHQCMTTRGVHRPGVSMVTSRMLGVFRTNSDTRRELMAMLNRPSAATTHI

SEQ ID NO: 8617 - protein, 204 aa, Gluconacetobacter entanii
  misc_feature (1)..(204): tr|A0A318PS55|A0A318PS55_9PROT GTP cyclohydrolase 1 OS= Gluconacetobacter entanii OX=108528 GN=folE PE=3 SV=1
MTPTDSAPPPRPTREEAEDAVRTLLRWAGEDPRREGLHDTPARVVRSYEEFFCGYAEDPVDLLTRTFSEVEDYDEMVLLRDIRFESHCEHHMVPIIGVAHVAYLPRKRVVGISKLARVVDAYARRFQIQERMTAQIANTINEVLQPRGVGVVIEASHQCMTTRGVHRPGVSMVTSRMLGTFRSNSDTRREFLSILNRPGVTGGV

SEQ ID NO: 8618 - protein, 202 aa, Gluconacetobacter liquefaciens
  misc_feature (1)..(202): tr|A0A370G7E4|A0A370G7E4_GLULI GTP cyclohydrolase 1 OS= Gluconacetobacter liquefaciens OX=89584 GN=folE PE=3 SV =1
MSQAPLLRPSREEAEDAIRTLLRWAGEDPSREGLLDTPGRVVRSYEEFFEGYGEDPSAILSRTFSEVDDYDEIVLLRDIRFESHCEHHMVPIIGVAHVAYLPSKRVVGISKLARVVDAFARRLQIQERLTAQIANTINDVLQPHGVAVILEAGHQCMTTRGVHRPGVSMVTSRMLGVFRSNSDTRRELMSMLNRPSVATAHL

SEQ ID NO: 8619 - protein, 201 aa, Gluconacetobacter sp.
  misc_feature (1)..(201): tr|F3S6T4|F3S6T4_9PROT GTP cyclohydrolase 1 OS=Gluconac etobacter sp. SXCC-1 OX=1004836 GN=folE PE=3 SV=1
MTPIDTRPTRAEAEDAVRTLLRWAGEDPGREGLLDTPARVVKSYDEFFCGYAEDPAEMLRRTFSEVADYDEMVLLRDIRLESHCEHHMVPIIGVAHVAYLPRRRVVGISKLARVVDAYARRFQIQERLTAQIANTINEELQPYGVGVVIEAAHQCMTTRGVHRPGVSMVTSRMLGTFRTNSDTRREFLSILNRPAMNSTGL

SEQ ID NO: 8620 - protein, 203 aa, Gluconobacter albidus
  misc_feature (1)..(203): tr|A0A1U9L2W3|A0A1U9L2W3_9PROT GTP cyclohydrolase 1 OS= Gluconobacter albidus OX=318683 GN=folE PE=3 SV=1
MDTLMDVPRQVRTRPTRAQAEEAVRTLLAWTGDDPDREGLAGTPDRVVRAYEEFFEGYHDDPVALLERTFEESGNYNEMVVLRDIRLESHCEHHIIPLIGKAHVAYLPDKRVVGISKLARLVDVFAHRLQIQEKLTAQIADTIQGVLQPRGVAVVIDAAHQCMTTRGVHKPGVSMVTSRLLGEFETSESLRRQFFTMAGMGGV

SEQ ID NO: 8621 - protein, 194 aa, Gluconobacter albidus
  misc_feature (1)..(194): tr|A0A149THD0|A0A149THD0_9PROT GTP cyclohydrolase 1 OS= Gluconobacter albidus OX=318683 GN=folE PE=3 SV=1
MGALPLPADAEVRIAGAVRQILEALGENPDREGLLDTPQRVAKMYLEVFSGLHQDPRDHLKTQFSADRHHGAVIVKDIRFHSMCEHHLLPVYGKAHVAYLPAGGRLTGLSKIARLVEGFARRPQLQERLTDQIAQGMEDVLAPEAVLVVIEAEHMCMSMRGVRSPGSTTVTSIARGSWLRDSAARMEIMSLLRS

SEQ ID NO: 8622 - protein, 212 aa, Gluconobacter cerinus
  misc_feature (1)..(212): tr|A0A1B6VLM0|A0A1B6VLM0_9PROT GTP cyclohydrolase 1 OS= Gluconobacter cerinus OX=38307 GN=folE PE=3 SV=1
MTDRNATAAKASNEDLRPLEGLSRPVDAQERIAGAVRTILEAIGENPEREGLHDTPQRVAKMYLEVFEGLYEDPRDHLKTQFSADQHHGAVIVKDIHFHSMCEHHLLPVHGKAHVAYLPAGGRLTGLSKLARVVEGFARRPQLQERLTDQVAQAMEDVLAPEAVLVVIEAEHMCMSMRGVRSPGSTTVTMIARGTWKHDHAARMEILSLLRS

SEQ ID NO: 8623 - protein, 199 aa, Gluconobacter cerinus
  misc_feature (1)..(199): tr|A0A1B6VGT6|A0A1B6VGT6_9PROT GTP cyclohydrolase 1 OS= Gluconobacter cerinus OX=38307 GN=folE PE=3 SV=1
MDIPRQVRTRPTRAQAEEAVRTLLAWTGDDPDREGLVGTPDRVVRAYEEFFEGYQDDPVALLERTFEESGNYNEMVVLRDIRLESHCEHHIIPLIGKAHVAYLPDRRVVGISKLARLVDVFAHRLQIQEKLTAQIADTIQSVLQPRGVAVVIDAAHQCMTTRGVHKPGVSMVTSRLLGEFETSEPLRRQFFAMAGMGGM

SEQ ID NO: 8624 - protein, 212 aa, Gluconobacter frateurii
  misc_feature (1)..(212): tr|A0A0D6PM87|A0A0D6PM87_9PROT GTP cyclohydrolase 1 OS= Gluconobacter frateurii M-2 OX=1231354 GN=folE PE=3 SV= 1
MTDLNATAMTARKDDQRPLGALSRPVDAEERLASAIRTILEAVGENPEREGLQDTPQRVAKMYLEVFGGLYEDPREHLKTQFSADQHHGAVIVKDIRFHSMCEHHLLPVHGKAHVAYLPAGGRLTGLSKLARVVEGFARRPQLQERMTDQVAQAMEDVLVPEAVLVVIEAEHMCMSMRGVRSPGSTTVTTVARGTWKHDHAARMEILSLLRG

SEQ ID NO: 8625 - protein, 212 aa, Gluconobacter frateurii
  misc_feature (1)..(212): tr|A0A0K8N5M1|A0A0K8N5M1_9PROT GTP cyclohydrolase 1 OS= Gluconobacter frateurii NBRC 101659 OX=1104996 GN=folE PE=3 SV=1
MTDLNATAMTACKDDQRPLGALSRPADAEERLANAVRTILEAVGENPEREGLQDTPQRVAKMYLEVFGGLYEDPREHLKTQFSADQHHAAVIVKDIRFHSMCEHHLLPVHGKAHVAYLPAGGRLTGLSKLARVVEGFARRPQLQERMTDQVAQAMEDVLAPEAVLVVIEAEHMCMSMRGVRSPGSTTVTTVARGTWKHDHAARMEILSLLRG

SEQ ID NO: 8626 - protein, 204 aa, Gluconobacter japonicus
  misc_feature (1)..(204): tr|A0A149S4J6|A0A149S4J6_GLUJA GTP cyclohydrolase 1 OS= Gluconobacter japonicus OX=376620 GN=folE PE=3 SV=1
MTACKDDQRPLGALSRPADAEERLANAVRTILEAVGENPEREGLQDTPQRVAKMYLEVFGGLYEDPREHLKTQFSADQHHAAVIVKDIRFHSMCEHHLLPVHGKAHVAYLPAGGRLTGLSKLARVVEGFARRPQLQERMTDQVAQAMEDILAPEAVLVVIEAEHMCMSMRGVRSPGSTTVTTVARGTWKHDHAARMEILSLLRG

SEQ ID NO: 8627 - protein, 173 aa, Gluconobacter japonicus
  misc_feature (1)..(173): tr|A0A149T5V3|A0A149T5V3_GLUJA GTP cyclohydrolase 1 (Fr agment) OS=Gluconobacter japonicus OX=376620 GN=AD936_1 1780 PE=3 SV=1
MIACKDDQRPLGALSRPADAEERLANAVRTILEAVGENPEREGLQDTPQRVAKMYLEVFGGLYEDPREHLKTQFSADQHHAAVIVKDIRFHSMCEHHLLPVHGKAHVAYLPAGGRLTGLSKLARVVEGLARRPQLQERMTDQVAQAMEDVLAPEAVLVVIEAEHMCMSMRGVR

SEQ ID NO: 8628 - protein, 223 aa, Gluconobacter kanchanaburiensis
  misc_feature (1)..(223): tr|A0A511B8X0|A0A511B8X0_9PROT GTP cyclohydrolase 1 OS= Gluconobacter kanchanaburiensis NBRC 103587 OX=1307948 GN=folE PE=3 SV=1
MNNLNATILTATARQSDSQDSLSSEELRPMEALPLPEDAEVRIAGAVREILEALGENPEREGLLDTPQRVAKMYLEVFSGLHQDPRDHLKTQFSADRHHGAVIVKDIRFHSMCEHHLLPVYGKAHVAYLPAGGRLTGLSKIARLVEGFARRPQLQERLTDQIAQGMEDILAPEAVLVVIEAEHMCMSMRGVRSPGSTTVTSIARGTWLRDSTARMEIMALLRG

SEQ ID NO: 8629 - protein, 215 aa, Gluconobacter morbifer
  misc_feature (1)..(215): tr|G6XFJ4|G6XFJ4_9PROT GTP cyclohydrolase 1 OS=Gluconob acter morbifer G707 OX=1088869 GN=folE PE=3 SV=1
MTKLNAATVTTMPQGTEDLRPLGALPLPADAEERIAKAVREILAAVGENPDREGLLDTPQRVARMYLEVFGGLHQDPRDHLRTQFSADRHHGAIIVKDIQFHSMCEHHLLPVRGKAHVAYLPAGGRLTGLSKIARLVEGFARRPQLQERLTDQIAQGMEDILAPEAVLVVVEAEHMCMSMRGVRSPGSTTVTTIARGAWLRDHAARMEIMSLLRG

SEQ ID NO: 8630 - protein, 212 aa, Gluconobacter oxydans
  misc_feature (1)..(212): tr|K7SG12|K7SG12_GLUOY GTP cyclohydrolase 1 OS=Gluconob acter oxydans H24 OX=1224746 GN=folE PE=3 SV=1
MTDLNATAMTACKDDQRPLGALSRPVDSEERLASAIRTILEAVGENPDREGLQDTPQRVAKMYLEVFGGLYEDPREHLKTQFSADQHHGAVIVKDIRFHSMCEHHLLPVHGKAHVAYLPAGGRLTGLSKLARVVEGFARRPQLQERMTDQVAQAMEDVLAPEAVLVVIEAEHMCMSMRGVRSPGSTTVTTVARGTWKHDHAARMEILSLLRG

SEQ ID NO: 8631 - protein, 224 aa, Gluconobacter oxydans
  misc_feature (1)..(224): tr|A0A067Z4Z2|A0A067Z4Z2_GLUOY GTP cyclohydrolase 1 OS= Gluconobacter oxydans DSM 3504 OX=1288313 GN=folE PE=3 SV=1
MTNLNATIMTAASARLSDSQDSLSSEELRPMGALPLPADAEVRIAGAVREILEALGENPEREGLLDTPQRVAKMYLEVFSGLHQDPRDHLKTQFSADRHHGAVIVKDIRFHSMCEHHLLPVYGKAHVAYLPAGGRLTGLSKIARLVEGFARRPQLQERLTDQIAQGMEDVLAPEAVLVVIEAEHMCMSMRGVRSPGSTTVTSIARGTWLRDSAARMEIMSLLRG

SEQ ID NO: 8632 - protein, 224 aa, Gluconobacter roseus; identical to SEQ ID NO: 8631
  misc_feature (1)..(224): tr|A0A4Y3M076|A0A4Y3M076_9PROT GTP cyclohydrolase 1 OS= Gluconobacter roseus NBRC 3990 OX=1307950 GN=folE PE=3 SV=1

SEQ ID NO: 8633 - protein, 191 aa, Gluconobacter sp.
  misc_feature (1)..(191): tr|A0A252BMX0|A0A252BMX0_9PROT GTP cyclohydrolase 1 OS= Gluconobacter sp. DsW_058 OX=1511210 GN=folE PE=3 SV=1
MSRPADAQERIAGAVRTILEAIGENPEREGLHDTPQRVAKMYLEVFEGLYEDPRDHLKTQFSADQHHGAVIVKDIHFHSMCEHHLLPVHGKAHVAYLPAGGRLTGLSKLARVVEGFARRPQLQERLTDQVAQAMEDVLAPEAVLVVIEAEHMCMSMRGVRSPGSTTVTMIARGTWKHDHAARMEILSLLRS

SEQ ID NO: 8634 - protein, 224 aa, Gluconobacter sphaericus
  misc_feature (1)..(224): tr|A0A4Y3Q9Q7|A0A4Y3Q9Q7_9PROT GTP cyclohydrolase 1 OS= Gluconobacter sphaericus NBRC 12467 OX=1307951 GN=folE_ 1 PE=3 SV=1
MTNLNATIMTAASARLSDSQDSLSSEELRPMGALPLPADAEVRIAGAVREILEALGENPEREGLLDTPRRVAKMYLEVFSGLHQDPRDHLKTQFSADQHHGAVIVKDIRFHSMCEHHLLPVYGKAHVAYLPAGGRLTGLSKIARLVEGFARRPQLQERLTDQIAQGMEDVLAPEAVLVVIEAEHMCMSMRGVRSPGSTTVTSIARGTWLRDSAARMEIMSLLRG

SEQ ID NO: 8635 - protein, 203 aa, Gluconobacter sphaericus
  misc_feature (1)..(203): tr|A0A4Y3QFE9|A0A4Y3QFE9_9PROT GTP cyclohydrolase 1 OS= Gluconobacter sphaericus NBRC 12467 OX=1307951 GN=folE_ 2 PE=3 SV=1
MDTLMDIPRQVRTRPTRAQAEEAVRTLLAWTGDDPDREGLVGTPDRVVRAYEEFFEGYQDDPVALLERTFEESGNYNEMVVLRDICLESHCEHHIIPLIGKAHVAYLPDRRVVGISKLARLVDVFAHRLQIQEKLTAQIADTIQSVLQPRGVAVVIDAAHQCMTTRGVHKPGVSMVTSRLLGEFETSEPLRRQFFAMAGMGGM

SEQ ID NO: 8636 - protein, 212 aa, Gluconobacter thailandicus
  misc_feature (1)..(212): tr|A0A5C0A3U3|A0A5C0A3U3_GLUTH GTP cyclohydrolase I Fol E OS=Gluconobacter thailandicus OX=257438 GN=folE PE=4 SV=1
MTDLNATAMTACKDDQRPLGALSRPVDAEERLASAIRTILEAVGENPEREGLQDTPQRVAKMYLEVFGGLYEDPREHLKTQFSADQHHGAVIVKDIRFHSMCEHHLLPVHGKAHVAYLPAGGRLTGLSKLARVVEGFARRPQLQERMTDQVAQAMEDVLAPEAVLVVIEAEHMCMSMRGVRSPGSTTVTTVARGTWKHDHAARMEILSLLRG

SEQ ID NO: 8637 - protein, 204 aa, Gluconobacter thailandicus
  misc_feature (1)..(204): tr|A0A149SMQ3|A0A149SMQ3_GLUTH GTP cyclohydrolase 1 OS= Gluconobacter thailandicus OX=257438 GN=folE PE=3 SV=1
MTACKDDQRPLGALSRPVDAEERLASAIRTILEAVGENPEREGLQDTPQRVAKMYLEVFGGLYEDPREHLKTQFSADQHHGAVIVKDIRFHSMCEHHLLPVHGKAHVAYLPAGGRLTGLSKLARVVEGFARRPQLQERMTDQVAQAMEDVLAPEAVLVVIEAEHMCMSMRGVRSPGSTTVTTVARGTWKHDHAARMEILSLLRG

SEQ ID NO: 8638 - protein, 215 aa, Gluconobacter wancherniae
  misc_feature (1)..(215): tr|A0A511B8J4|A0A511B8J4_9PROT GTP cyclohydrolase 1 OS= Gluconobacter wancherniae NBRC 103581 OX=656744 GN=folE PE=3 SV=1
MSNLNAATASIPVAQAEGPRPLGALTRPVDAEDRIAAAVREILTALGENPEREGLRDTPDRVARMYLEVLGGLHQDPRDHLKTQFSADHHHGAVIVKDILFHSMCEHHLLPVHGRAHVAYLPAGGRLTGLSKIARLVEGFARRPQLQERLTDQIAQGMEDILAPEAILVVVEGEHMCMSMRGVRSPGSTTVTTVARGIWASNSAARMEIMALLKG

SEQ ID NO: 8639 - protein, 192 aa, Glutamicibacter arilaitensis
  misc_feature (1)..(192): tr|E1VRS1|E1VRS1_GLUAR GTP cyclohydrolase 1 OS=Glutamic ibacter arilaitensis (strain DSM 16368 / CIP 108037 / I AM 15318 / JCM 13566 / Re117) OX=861360 GN=folE PE=3 SV =1
MSELQEIDQPRIAAAVREILEAIGEDPDRDGLVDTPKRVAKAYAEFFAGLHQDAADHLATTFDIEHDEMVLVKDIPFYSTCEHHLVPFYGSAHIGYIPGKGGKVTGLSKLARLVEVYARRPQVQERLTTQIVDALVEHLSPSGAIVVVECEHMCMSMRGVRKPGAKTVTSAVRGQLRETATRAEAMSLILGK

SEQ ID NO: 8640 - protein, 192 aa, Glutamicibacter arilaitensis; identical to SEQ ID NO: 8639
  misc_feature (1)..(192): tr|A0A2N7S0P7|A0A2N7S0P7_9MICC GTP cyclohydrolase 1 OS= Glutamicibacter arilaitensis OX=256701 GN=folE PE=3 SV= 1

SEQ ID NO: 8641 - protein, 218 aa, Glutamicibacter creatinolyticus
  misc_feature (1)..(218): tr|A0A5B7WPD2|A0A5B7WPD2_9MICC GTP cyclohydrolase 1 OS= Glutamicibacter creatinolyticus OX=162496 GN=folE PE=3 SV=1
MSSSKTIDSSKSQDSVPGPEGAQSSNGVPAKEVDQPRIAAAVREILLAIGEDPDRDGLVDTPKRVAKAYAEFFAGLSQDPAEHLDTTFDIEHDELVLVKDIPFYSTCEHHLVPFHGSAHIGYIPGKAGKVTGLSKLARLVEVFARRPQVQERLTTQIVDALVEHLHPQGAIVVVECEHMCMSMRGVQKPGAKTVTSAVRGQLRETATRAEAMSLILGK

SEQ ID NO: 8642 - protein, 192 aa, Glutamicibacter halophytocola
  misc_feature (1)..(192): tr|A0A5B8I2L8|A0A5B8I2L8_9MICC GTP cyclohydrolase 1 OS= Glutamicibacter halophytocola OX=1933880 GN=folE PE=3 S V=1
MSELEQIDQPRIAAAVREILEAIGEDPDRDGLAETPKRVAKAYAEFFAGLHQNAAEHLSTTFDIEHDEMVLVKDIPFYSTCEHHLVPFYGSAHIGYIPGKGGKVTGLSKLARLVEVYARRPQVQERLTTQIVDSLVEHLNPAGAIVVVECEHMCMSMRGVQKPGAKTVTSAVRGQLRETATRAEAMSLILGK

SEQ ID NO: 8643 - protein, 192 aa, Glutamicibacter mysorens
  misc_feature (1)..(192): tr|A0A2M9AIP4|A0A2M9AIP4_9MICC GTP cyclohydrolase 1 OS= Glutamicibacter mysorens OX=257984 GN=folE PE=3 SV=1
MSELKEIDQPRIAAAVREILEAIGEDPDRDGLVDTPKRVAKAYAEFFAGLHQQPADHLSTTFDIEHDEMVLVKDIPFYSTCEHHLVPFYGSAHIGYIPGKGGKVTGLSKLARLVEVYARRPQVQERLTTQIVDALVEHLSPAGAIVVVECEHMCMSMRGVQKPGAKTVTSAVRGQLRETATRAEAMSLILGK

SEQ ID NO: 8644 - protein, 192 aa, Glutamicibacter nicotianae
  misc_feature (1)..(192): tr|A0A4Y3W393|A0A4Y3W393_GLUNI GTP cyclohydrolase 1 OS= Glutamicibacter nicotianae OX=37929 GN=folE PE=3 SV=1
MSELKEIDQPRIAAAVREILEAIGEDPDRDGLVDTPKRVAKAYAEFFAGLHQQPADHLSTTFDIEHDEMVLVKDIPFYSTCEHHLVPFYGSAHIGYIPGKGGKVTGLSKLARLVEVYARRPQVQERLTTQIVDALVEHLNPAGAIVVVECEHMCMSMRGVQKPGAKTVTSAVRGQLRETATRAEAMSLILGK

SEQ ID NO: 8645 - protein, 192 aa, Glutamicibacter soli
  misc_feature (1)..(192): tr|A0A365Y7T7|A0A365Y7T7_9MICC GTP cyclohydrolase 1 OS= Glutamicibacter soli OX=453836 GN=folE PE=3 SV=1
MTEENLIDQPRIAAAVREILLAIGEDPDRDGLQDTPKRVAKAYAEFFAGLHQRPEEHLSTTFDIEHDEMVLVKDIAFYSTCEHHLVPFYGRAHIGYIPGKGGKVTGLSKLARLVEVFARRPQVQERLTTQIVDALVEHLNPSGAIVVVECEHMCMSMRGVQKPGAKTVTSAVRGQLRETATRAEAMSLILGR

SEQ ID NO: 8646 - protein, 220 aa, Glutamicibacter soli
  misc_feature (1)..(220): tr|A0A365Y7K5|A0A365Y7K5_9MICC GTP cyclohydrolase 1 OS= Glutamicibacter soli OX=453836 GN=folE PE=3 SV=1
MNPLDQLGEALAEVEELGGQAPGLPARVLSPQQAGEMDLAGAEHAAGEFLRALGMDLGAVHLQRTPARMAQAWAQMLTPRDFTFTTFPNEEHYDELVVLRDNPVRPVCGHHLLPFTGRAGVGYLPGERSVGLSKLARIVEHFACRPRTQERLTQQFADWLRKVLSPRAVGVVISAEHSCMSLRGANIPGTSTVTSALLGHLRDNAGARQEFLSFSGLMNN

SEQ ID NO: 8647 - protein, 186 aa, Glutamicibacter sp.
  misc_feature (1)..(186): tr|A0A2A3Y3Z6|A0A2A3Y3Z6_9MICC GTP cyclohydrolase 1 OS= Glutamicibacter sp. BW80 OX=2024404 GN=folE PE=3 SV=1
MDQPRIAAAVREILEAIGEDPDRDGLLDTPKRVAKAYAEFFAGLHQDAAEHLSTTFDIEHDELVLVKDIPFYSTCEHHLVPFYGTAHIGYIPGRGGKVTGLSKLARLVEVFARRPQVQERLTTQIVDALVEHLEPTGAIVVIECEHMCMSMRGVRKPGAKTVTSAVRGQLRETATRAEAMSLILGR

SEQ ID NO: 8648 - protein, 192 aa, Glutamicibacter sp.
  misc_feature (1)..(192): tr|A0A2A3YB45|A0A2A3YB45_9MICC GTP cyclohydrolase 1 OS= Glutamicibacter sp. BW77 OX=2024402 GN=folE PE=3 SV=1
MIEETKIDQPRIAAAVREILEAIGEDPDRDGLLDTPKRVAKAYAEFFAGLHQDAAEHLSTTFDIEHDEMVLVKDIAFYSTCEHHLVPFYGTAHIGYIPGKGGKVTGLSKLARLVEVFARRPQVQERLTTQIVDALVEHLEPSGAIVVIECEHMCMSMRGVRKPGAKTVTSAVRGQLRETATRAEAMSLILGR

SEQ ID NO: 8649 - protein, 192 aa, Glutamicibacter uratoxydans
  misc_feature (1)..(192): tr|A0A4Y4DR52|A0A4Y4DR52_9MICC GTP cyclohydrolase 1 OS= Glutamicibacter uratoxydans OX=43667 GN=folE_2 PE=3 SV= 1
MSEENLIDQPRIAAAVREILLAIGEDPDRDGLLDTPKRVAKAYAEFFGGLHQDAAEHLSTTFDIEHDEMVLVKDIPFYSTCEHHLVPFHGTAHIGYIPGKGGKVTGLSKLARLVEVFARRPQVQERLTTQIVDALMEHLNPSGAIVVIECEHMCMSMRGVRKPGAKTVTSAVRGQLRETATRAEATSLILGR

SEQ ID NO: 8650 - protein, 219 aa, Glutamicibacter uratoxydans
  misc_feature (1)..(219): tr|A0A4Y4DT20|A0A4Y4DT20_9MICC GTP cyclohydrolase 1 OS= Glutamicibacter uratoxydans OX=43667 GN=folE_1 PE=3 SV= 1
MSHFTQLDEGIELEGELDPAGLGLPVRVPAGGGQHRMDLDAAERAAADFLAALGMDLNAVHLQRSPARMAQAWAQMLTPREFNLTTFPNEEKYDQLVMVRDIPVRSLCEHHLLPFTGKACVGYLPGERIVGLSKLARIVEHFSCRPQTQERLTQQIATWLQDELNPRAVGVVIAAEHSCMTLRGVNTPGTSTVTSALLGHLRHSTSARQEFLSFSGLMN

SEQ ID NO: 8651 - protein, 211 aa, Glycocaulis alkaliphilus
  misc_feature (1)..(211): tr|A0A3T0E6M3|A0A3T0E6M3_9RHOB GTP cyclohydrolase 1 OS= Glycocaulis alkaliphilus OX=1434191 GN=folE PE=3 SV=1
MDAILKKTDLGSAAEILEPVQRPSREEAEEAVRTLLRWAGDDPRREGLIETPKRVVKAYEEWFRGYHEDPAKILGKRFEDVQGYDDMVMLTHIDVESHCEHHMAPILGTACVAYLPDRAVVGISKIAKVVEAFSKRLQTQETMTAQIADAINDAMAPRGVAIFVDAKHQCMTTRGVHHPHVSTITTTFTGEFKANPELRERFMRLCEQSKR

SEQ ID NO: 8652 - protein, 209 aa, Glycocaulis sp.
  misc_feature (1)..(209): tr|A0A550KB52|A0A550KB52_9RHOB GTP cyclohydrolase 1 OS= Glycocaulis sp. ZYF765 OX=2518983 GN=folE PE=3 SV=1
MDALTSKTALATAGQTDIDRPTREQAEEAVRTLIAWAGDDPRREGLIDTPKRVAKAYQEWFRGYALDPAKELGRVFEDVQGYDDMVMLTDIDVESHCEHHLAPILGKACVAYLPDKAVVGISKIAKVVEIFSKRLQTQETMTAQIADAINDAMRPRGVAVFVDAKHQCMTTRGVHHPNVSTITTTFTGEFRANPELRDRFMRLCEKSRA

SEQ ID NO: 8653 - protein, 200 aa, Glycomyces artemisiae
  misc_feature (1)..(200): tr|A0A2T0UL69|A0A2T0UL69_9ACTN GTP cyclohydrolase 1 OS= Glycomyces artemisiae OX=1076443 GN=folE PE=3 SV=1
MSTTAAPRPEFRDREGAVEPDLVAAEAAAAAFLKALGMDHDSEHLRATPGRMARAWAEMLTPRPFNLTTFPNEEGYDELVLARGIPFRSICEHHLLPFTGHACVGYLPGERVLGLSKLARVVEHFACRPQTQERLTKQTADWLQAQLGAKAVGVVLKAEHSCMTLRGALATGSSTVTSTLLGTLRTDPSSRQEFLALAGF

SEQ ID NO: 8654 - protein, 212 aa, Glycomyces artemisiae
  misc_feature (1)..(212): tr|A0A2T0UM63|A0A2T0UM63_9ACTN GTP cyclohydrolase 1 OS= Glycomyces artemisiae OX=1076443 GN=folE PE=3 SV=1
MAELDNLAARLIDGRINGSPVENVVDLERIEGAVREILAAIGEDPDRPGLKETPRRVARAYAELFAGLRVDPAEVLKTSFDENHNELVLVRDIDVQSFCEHHLLPFTGVAHVGYIPGVSGQIVGLSKLARLVEVYSRRPQVQERLTSQIADQLYESLEATGVIVVVECEHTCMSMRGIRKQGSKTITSAVRGSLQSDARTRAEAMSLLRGGA

SEQ ID NO: 8655 - protein, 183 aa, Glycomyces fuscus
  misc_feature (1)..(183): tr|A0A2A6F047|A0A2A6F047_9ACTN GTP cyclohydrolase 1 OS= Glycomyces fuscus OX=1407559 GN=folE PE=3 SV=1
MAAEDAARAFLGCLGVSLEPEAMQKTPGRMARAYSDLLNPRPFTLTTFPNEHGHRDFVIARNIPMHSVCEHHFLPFSGVAHVGYLPGARIVGLSKLARTVEYFSRRPQVQERLTHQIASWLAEQLDADAVGAVVEAEHLCMSIRGVQAAGSTTTTSVMLGSLGKDAELRREFLTLVGLAGPGR

SEQ ID NO: 8656 - protein, 199 aa, Glycomyces fuscus
  misc_feature (1)..(199): tr|A0A2A6EV51|A0A2A6EV51_9ACTN GTP cyclohydrolase 1 OS= Glycomyces fuscus OX=1407559 GN=folE PE=3 SV=1
MSAAEELPPRSVDRLRIERAVREILLAIGEDPDRDGLAKTPERVARAYEEQFAGLGQKPGDVLTTVFEAAHEEMVLVKDIELYSTCEHHLVPFYGVAHVGYIPGADGRITGLSKLARLVDVYARRPQVQERLTGQVSDAIMEYLQPRGVIVVVEAEHLCMTMRGVRKPGAKTVTSAVRGIFRSSDRTRSEAMSLILSQR

SEQ ID NO: 8657 - protein, 213 aa, Glycomyces harbinensis
  misc_feature (1)..(213): tr|A0A1G7CLV3|A0A1G7CLV3_9ACTN GTP cyclohydrolase 1 OS= Glycomyces harbinensis OX=58114 GN=folE PE=3 SV=1
MAELDNLAARLIDGRINGSPVEDAVDLGRIEAAVREILAAIGEDPDRPGLKETPRRVARAYAELFAGLRVDPAAVLKTSFDENHNELVLVRDIDVQSFCEHHLLPFTGVAHVGYIPGANGQIVGLSKLARLVEVYSRRPQVQERLTSQIADQLYKSLEASGVIVVVECEHTCMSMRGIRKQGSKTITSAVRGSMQSDARTRAEAMSLLRGTAG

SEQ ID NO: 8658 - protein, 213 aa, Glycomyces paridis
  misc_feature (1)..(213): tr|A0A4S8PCM5|A0A4S8PCM5_9ACTN GTP cyclohydrolase 1 OS= Glycomyces paridis OX=2126555 GN=folE PE=3 SV=1
MAELDNLAARLVDGRINGSPVEDAVDLGRIEAAVREILAAIGEDPERPGLKETPRRVARAYAELFAGLRVDPAEVLKTSFDENHNELVLVRDIDVQSFCEHHLLPFTGVAHVGYIPGEGGQIAGLSKLARLVEVYSRRPQVQERLTSQIADQLYKSLAASGVIVVVECEHTCMSMRGIRKQGSVTVTSAVRGLLQSDARTRAEAMALLRGTAR

SEQ ID NO: 8659 - protein, 213 aa, Glycomyces sambucus
  misc_feature (1)..(213): tr|A0A1G9GWN8|A0A1G9GWN8_9ACTN GTP cyclohydrolase 1 OS= Glycomyces sambucus OX=380244 GN=folE PE=3 SV=1
MAELDNLAARLIDGRINGSPVEDAVDLDRIEAAVREILAAIGEDPDRPGLKETPRRVARAYAELFAGLRVDPAQVLKTSFDENHNELVLVREIEVQSFCEHHLLPFTGVAHVGYIPGAGGQIVGLSKLARLVEVYSRRPQVQERLTSQIADQLYTSLEATGVIVVVECEHTCMSMRGIRKQGSSTITSAVRGSLQSDARTRAEAMSLLRGTTG

SEQ ID NO: 8660 - protein, 213 aa, Glycomyces sp.
  misc_feature (1)..(213): tr|A0A4R7PX76|A0A4R7PX76_9ACTN GTP cyclohydrolase 1 OS= Glycomyces sp. MMG10089 OX=2135788 GN=folE PE=3 SV=1
MPELDNLAARLVDGRINGSPVEDAVDLGRIEAAVREILTAVGEDPDRPGLKETPRRVARAYAELFAGLRVDPAEVLKTSFDENHNELVLVRDIDVQSFCEHHLLPFTGVAHVGYIPGESGQIAGLSKLARLVEVYSRRPQVQERLTSQIADQLYRSLSAKGVIVVVECEHTCMSMRGIRKQGSKTVTSAVRGILQSDARTRAEAMSLLRGTTG

SEQ ID NO: 8661 - protein, 213 aa, Glycomyces sp.
  misc_feature (1)..(213): tr|A0A4V4HSK1|A0A4V4HSK1_9ACTN GTP cyclohydrolase 1 OS= Glycomyces sp. 18 OX=2570927 GN=folE PE=3 SV=1
MAELDNLAARLIDGRINGSPVEDSVDLPRIEAAVREILEAIGEDPDRPGLIETPRRVARAYAELFAGLRVDPSHVLKTSFDEDHNELILVREIEVQSFCEHHLLPFTGIAHVGYIPGISGQVAGLSKLARLVEVYSRRPQVQERLTSQIADQLDQSLEARGVIVVVECEHMCMSMRGIRKQGAKTVTSAVRGILQSDARTRAEAMSLLRGTTG

SEQ ID NO: 8662 - protein, 209 aa, Goodfellowiella sp.
  misc_feature (1)..(209): tr|A0A5B2XEW4|A0A5B2XEW4_9PSEU GTP cyclohydrolase 1 OS= Goodfellowiella sp. AN110305 OX=1892852 GN=folE PE=3 SV =1
MTKSVDAVVPTHEDDDAPSRPVFDQARAERAVRELLLACGEDPERQGLRDTPARVARAYREMFAGLYTDPDTVLAKTFDESHEELVLVTDIPMYSNCEHHLVPFHGVAHVGYIPNSHGRVTGLSKLARLVDLYAKRPQVQERLTSQVADALVRRLDPRGVIVVIEAEHLCMAMRGVRKPGARTTTSAVRGMFRTSASSRAEAIELIKGR

SEQ ID NO: 8663 - protein, 212 aa, Gordonia aichiensis
  misc_feature (1)..(212): tr|L7KGK2|L7KGK2_9ACTN GTP cyclohydrolase 1 OS=Gordonia aichiensis NBRC 108223 OX=1220583 GN=folE PE=3 SV=1
MTISEGHDIAAHDGTSRELMTDGGRFFDQERAEAAVRELLIAVGEDPDREGLQRTPTRVANAYREMFAGLYTDPSEVLATTFDEDHDEFVLVKDIPMYSTCEHHLVSFHGVAHVGYIPGPTGQVTGLSKLARVVDLYAKRPQVQERLTSQIADALVRRLNPRGVIVVIEAEHLCMAMRGIRKPGARTTTSAVRGIFKTSAVSRGEALDLITR

SEQ ID NO: 8664 - protein, 203 aa, Gordonia alkanivorans
  misc_feature (1)..(203): tr|A0A3T0UXV8|A0A3T0UXV8_9ACTN GTP cyclohydrolase 1 OS= Gordonia alkanivorans OX=84096 GN=folE PE=3 SV=1
MTISEGRDAVVDGHRSEFDQARAEAAVRELLLAIGEDPEREGLVRTPTRVANAYREMFAGLYTDPDEVLATTFDEDHDELVLVKDIPMYSTCEHHLVSFHGVAHVGYIPGTSGRVTGLSKLARLVDLYAKRPQVQERLTSQIADAVMRKLEPRGVIVVIEAEHLCMAMRGIRKPGATTTTSAVRGIFKTSAVSRGEALDLITR

SEQ ID NO: 8665 - protein, 203 aa, Gordonia alkanivorans
  misc_feature (1)..(203): tr|F9VQG4|F9VQG4_9ACTN GTP cyclohydrolase 1 OS=Gordonia alkanivorans NBRC 16433 OX=1027371 GN=folE PE=3 SV=1
MTISEGRDAVVNGHRSEFDQARAEAAVRELLLAIGEDPDREGLVRTPTRVANAYREMFAGLYTDPDEVLATTFDEDHDELVLVKDIPMYSTCEHHLVSFHGVAHVGYIPGTSGRVTGLSKLARLVDLYAKRPQVQERLTSQIADAVMRKLEPRGVIVVIEAEHLCMAMRGIRKPGATTTTSAVRGIFKTSAVSRGEALDLITR

SEQ ID NO: 8666 - protein, 208 aa, Gordonia amarae
  misc_feature (1)..(208): tr|G7GW06|G7GW06_9ACTN GTP cyclohydrolase 1 OS=Gordonia amarae NBRC 15530 OX=1075090 GN=folE PE=3 SV=1
MTMTEDSEPLADATPAGAARRPFDFARAEAAVRELLLAVGEDPDREGLRRTPARVAKAYEEVFAGLYTDPSEVLATTFDEDHDELVLVKDIPMYSTCEHHLVSFHGVAHVGYIPGESGQVTGLSKLARLVDLYAKRPQVQERLTSQIADAIVARLNPRGVIVVIEAEHLCMAMRGIRKPGATTTTSAVRGLFKTSAVSRGEALDLISR

SEQ ID NO: 8667 - protein, 203 aa, Gordonia amicalis
  misc_feature (1)..(203): tr|L7L1E0|L7L1E0_9ACTN GTP cyclohydrolase 1 OS=Gordonia amicalis NBRC 100051 = JCM 11271 OX=1220574 GN=folE PE =3 SV=1
MTISKGHDAVVDGHRSEFDQARAEAAVRELLLAVGEDPDREGLIRTPTRVANAYREMFAGLYTDPDEVLATTFDEDHDELVLVKDIPMYSTCEHHLVSFHGVAHVGYIPGESGRVTGLSKLARLVDLYAKRPQVQERLTSQIADAVMRKLGPRGVIVVIEAEHLCMAMRGIRKPGATTTTSAVRGIFKTSAVSRGEALDLITR

SEQ ID NO: 8668 - protein, 203 aa, Gordonia araii
  misc_feature (1)..(203): tr|G7H2W6|G7H2W6_9ACTN GTP cyclohydrolase 1 OS=Gordonia araii NBRC 100433 OX=1073574 GN=folE PE=3 SV=1
MTAEDAARPASTPGPARFDQARAEAAVRELLIAVGEDPDREGLRRTPTRVANAFHEVFAGLYTDPDEVLETTFDENHEELVLVKDIPLYSTCEHHLVAFHGVAHVGYIPGSSGRVTGLSKLARVVDLYAKRPQVQERLTSQIADAVMSKLDPRGVIVVIEAEHLCMAMRGIRKPGSSTTTSAVRGIFKTNAVSRSEALQLIAR

SEQ ID NO: 8669 - protein, 219 aa, Gordonia bronchialis
  misc_feature (1)..(219): tr|D0L433|D0L433_GORB4 GTP cyclohydrolase 1 OS=Gordonia bronchialis (strain ATCC 25592 / DSM 43247 / JCM 3198 / NCTC 10667) OX=526226 GN=folE PE=3 SV=1
MTISERHEADFDTAADVDTAADVDARAVPQRAGFDQARAEAAVRELLLAVGEDPDRQGLLRTPTRVANAYREMFAGLYTEPDDVLATTFDEDHDELVLVKDIPMYSTCEHHLVPFHGVAHVGYIPGVSGQVTGLSKLARLVDLYAKRPQVQERLTSQIADAIVRRLDPRGVIVVIEAEHLCMAMRGIRKPGATTTTSAVRGLFKTSAVSRGEALDLITR

SEQ ID NO: 8670 - protein, 205 aa, Gordonia effusa
  misc_feature (1)..(205): tr|H0R2A2|H0R2A2_9ACTN GTP cyclohydrolase 1 OS=Gordonia effusa NBRC 100432 OX=1077974 GN=folE PE=3 SV=1
MTISEETVVGQSDRREPAEFDQARAEAAVRELLIAVGEDPDREGLQRTPTRVANAYREVFAGLYTDPDEVLATTFDENHDELVLVKDIPLYSTCEHHLVSFHGVAHVGYIPGTSGRVTGLSKLARLVDLYAKRPQVQERLTSQIADAIVRKLDPRGVIVVIEAEHLCMAMRGIRKPGARTTTSAVRGLFKTSAVSRGEALDLITR

SEQ ID NO: 8671 - protein, 200 aa, Gordonia hirsuta
  misc_feature (1)..(200): tr|L7LDG6|L7LDG6_9ACTN GTP cyclohydrolase 1 OS=Gordonia hirsuta DSM 44140 = NBRC 16056 OX=1121927 GN=folE PE=3 SV=1
MSDDEQLITAEGRVFDQARAEAAVRELLLAVGEDPDREGLRRTPERVARAYREVFGGLYTEPAEVLATVFDEDHRELVLVKDIPMYSTCEHHLVSFHGVAHVGYIPGDTGQVTGLSKLARLVDLYARRPQVQERLTSQIADAMMDRLSPRGVIVVIEAEHLCMAMRGIRKPGSSTTTSAVRGIFQTSAVSRGEALDLINR

SEQ ID NO: 8672 - protein, 199 aa, Gordonia iterans
  misc_feature (1)..(199): tr|A0A2S0KCU8|A0A2S0KCU8_9ACTN GTP cyclohydrolase 1 OS= Gordonia iterans OX=1004901 GN=folE PE=3 SV=1
MSDEPLLTADGREFDQARAEAAVRELLLAVGEDPDREGLRRTPERVARAYREMFGGLYTQPDEVLATVFDEDHRELVLVKDIPMYSTCEHHLVSFHGVAHVGYIPGASGQVTGLSKLARLVDLYARRPQVQERLTSQIADALMRKLEPRGVIVVIEAEHLCMAMRGIRKPGASTTTSAVRGIFQTSAVSRGEALDLIAR

SEQ ID NO: 8673 - protein, 203 aa, Gordonia lacunae
  misc_feature (1)..(203): tr|A0A243Q5W8|A0A243Q5W8_9ACTN GTP cyclohydrolase 1 OS= Gordonia lacunae OX=417102 GN=folE PE=3 SV=1
MSINERQDAVLAGPRSEFDQARAEAAVRELLLAVGEDPDREGLLRTPTRVANAYREMFAGLYTEPDDVLATTFDEDHDELVLVKDIPMYSTCEHHLVSFHGVAHVGYIPGTSGRVTGLSKLARLVDLYAKRPQVQERLTSQIADAMMRRLEPRGVIVVIEAEHLCMAMRGIRKPGATTTTSAVRGIFKTSAVSRGEALDLITR

SEQ ID NO: 8674 - protein, 209 aa, Gordonia malaquae
  misc_feature (1)..(209): tr|M3VBL2|M3VBL2_9ACTN GTP cyclohydrolase 1 OS=Gordonia malaquae NBRC 108250 OX=1223542 GN=folE PE=3 SV=1
MTSVDDTHAVDGVTAPGHGAVGEFDQARAEAAVRELLIAVGEDPDREGLKRTPHRVANAYREMFAGLYIEPDEVLATVFDEGHSELVLVKDIPMYSTCEHHLVAFRGVAHVGYIPGESGQVTGLSKLARVVDLYAKRPQVQERLTSQIADALVRRLDPRGVIVVIEAEHLCMAMRGIRKPGATTTTSAVRGLFKTSATSRGEALDLITR

SEQ ID NO: 8675 - protein, 203 aa, Gordonia namibiensis
  misc_feature (1)..(203): tr|K6XSN6|K6XSN6_9ACTN GTP cyclohydrolase 1 OS=Gordonia namibiensis NBRC 108229 OX=1208314 GN=folE PE=3 SV=1
MTISEGRDTVVNGHRSEFDQARAEAAVRELLLAVGEDPDREGLLRTPTRVANAYREMFAGLYTDPDEVLATTFDEDHDELVLVKDIPMYSTCEHHLVSFHGVAHVGYIPGESGRVTGLSKLARLVDLYAKRPQVQERLTTQIADAIMRKLEPRGVIVVIEAEHLCMAMRGIRKPGATTTTSAVRGIFKTSAVSRGEALDLITR

SEQ ID NO: 8676 - protein, 222 aa, Gordonia neofelifaecis
  misc_feature (1)..(222): tr|F1YLP3|F1YLP3_9ACTN GTP cyclohydrolase 1 OS=Gordonia neofelifaecis NRRL B-59395 OX=644548 GN=folE PE=3 SV=1
MNGEHGEMTTSIDRNGDGGAHAVDALHVPAAAGDRLFDQARAEAAVRELLIAVGEDPDRAGLKRTPTRVANAYREMFAGLYTDPDEVLATVFDEDHEELVLVKDIPMYSTCEHHLVSFHGVAHVGYIPGETGQVTGLSKLARVVDLYAKRPQVQERLTSQIADALVRKLDPRGVIVVIEAEHLCMAMRGIRKPGARTTTSAVRGLFKTSAVSRGEALDLITR

SEQ ID NO: 8677 - protein, 212 aa, Gordonia otitidis
  misc_feature (1)..(212): tr|H5TGF8|H5TGF8_9ACTN GTP cyclohydrolase 1 OS=Gordonia otitidis NBRC 100426 OX=1108044 GN=folE PE=3 SV=1
MTISEGHDIATHEDASHATTVDGGRFFDQQRAEAAVRELLIAVGEDPDREGLRRTPTRVANAYREMFAGLYTDPSEVLATIFDEDHDELVLVKDIPMYSTCEHHLVSFHGVAHVGYIPGPTGQVTGLSKLARVVDLYAKRPQVQERLTSQIADALVNRLNPRGVIVVIEAEHLCMAMRGIRKPGARTTTSAVRGIFKTSAVSRGEALDLITR

SEQ ID NO: 8678 - protein, 203 aa, Gordonia paraffinivorans
  misc_feature (1)..(203): tr|A0A2U1ZJK8|A0A2U1ZJK8_9ACTN GTP cyclohydrolase 1 OS= Gordonia paraffinivorans OX=175628 GN=folE PE=3 SV=1
MTISERQDAVVDGHRSQFDQARAEAAVRELLLAVGEDPDREGLRRTPTRVANAYREMFAGLYTDPDDVLATTFDEDHDELVLVKDIPMYSTCEHHLVSFHGVAHVGYIPGASGRVTGLSKLARLVDLYAKRPQVQERLTSQIADAIMRRLDPRGVIVVIEAEHLCMAMRGIRKPGATTTTSAVRGIFKSSAVSRGEALDLITR

SEQ ID NO: 8679 - protein, 203 aa, Gordonia paraffinivorans; identical to SEQ ID NO: 8678
  misc_feature (1)..(203): tr|M3UXH9|M3UXH9_9ACTN GTP cyclohydrolase 1 OS=Gordonia paraffinivorans NBRC 108238 OX=1223543 GN=folE PE=3 SV =1

SEQ ID NO: 8680 - protein, 206 aa, Gordonia phthalatica
  misc_feature (1)..(206): tr|A0A0N9MSE2|A0A0N9MSE2_9ACTN GTP cyclohydrolase 1 OS= Gordonia phthalatica OX=1136941 GN=folE PE=3 SV=1
MTTDHAVDALAVPDTAETKVFDQERAEAAVRELLLAVGEDPDRPGLQRTPHRVAKAYAEMFAGLYCDPDEVLATVFDENHEELVLVKDIPMYSTCEHHLVSFHGVAHVGYIPGPTGQVTGLSKLARVVDLYAKRPQVQERLTSQIADALVRKLNPRGVIVVIEAEHLCMAMRGIRKPGARTTTSAVRGLFKTSAVSRGEALDLITR

SEQ ID NO: 8681 - protein, 204 aa, Gordonia polyisoprenivorans
  misc_feature (1)..(204): tr|H0RJG3|H0RJG3_9ACTN GTP cyclohydrolase 1 OS=Gordonia polyisoprenivorans NBRC 16320 = JCM 10675 OX=1077976 G N=folE PE=3 SV=1
MTTLDQRGPDSAAEPVREFDQARAEAAVRELLLAIGEDPDREGLRRTPTRVANAYREMFAGLYTDPSEVLATTFDEDHDELVLVKDIPLYSTCEHHLVSFHGVAHVGYIPGVSGQVTGLSKLARLVDLYAKRPQVQERLTSQVADALVRRLNPRGVIVVIEAEHLCMAMRGIRKPGARTTTSAVRGLFKTSAVSRGEALDLITR

SEQ ID NO: 8682 - protein, 204 aa, Gordonia polyisoprenivorans; identical to SEQ ID NO: 8681
  misc_feature (1)..(204): tr|H6MVN7|H6MVN7_GORPV GTP cyclohydrolase 1 OS=Gordonia polyisoprenivorans (strain DSM 44266 / VH2) OX=1112204 GN=folE PE=3 SV=1

SEQ ID NO: 8683 - protein, 120 aa, Gordonia rhizosphera
  misc_feature (1)..(120): tr|K6WB02|K6WB02_9ACTN GTP cyclohydrolase 1 (Fragment) OS=Gordonia rhizosphera NBRC 16068 OX=1108045 GN=folE P E=3 SV=1
DIPMYSTCEHHLVSFHGVAHVGYIPGESGQVTGLSKLARLVDLFAKRPQVQERLTSQIADAMMRRLEPRGVIVVIEAEHLCMAMRGIRKPGATTTTSAVRGIFKTSAVSRGEALDLISRP

SEQ ID NO: 8684 - protein, 203 aa, Gordonia rubripertincta; identical to SEQ ID NO: 8675
  misc_feature (1)..(203): tr|L7K646|L7K646_GORRU GTP cyclohydrolase 1 OS=Gordonia rubripertincta NBRC 101908 OX=1077975 GN=folE PE=3 SV= 1

SEQ ID NO: 8685 - protein, 203 aa, Gordonia rubripertincta; identical to SEQ ID NO: 8675
  misc_feature (1)..(203): tr|A0A222TPG7|A0A222TPG7_GORRU GTP cyclohydrolase 1 OS= Gordonia rubripertincta OX=36822 GN=folE PE=3 SV=1

SEQ ID NO: 8686 - protein, 216 aa, Gordonia sihwensis
  misc_feature (1)..(216): tr|L7LJ64|L7LJ64_9ACTN GTP cyclohydrolase 1 OS=Gordonia sihwensis NBRC 108236 OX=1223544 GN=folE PE=3 SV=1
MTTSSIDHDGDLNEHAVDALGVPAAAGERVFDQARAEAAVRELLLAVGEDPDREGLKRTPTRVANAYREMFAGLYTDPDEVLATVFDEDHEELVLVKDIPMYSTCEHHLVSFHGVAHVGYIPGDTGQVTGLSKLARVVDLYAKRPQVQERLTSQIADALVRKLNPRGVIVVIEAEHLCMAMRGIRKPGARTTTSAVRGLFKTSAVSRGEALDLITR

SEQ ID NO: 8687 - protein, 207 aa, Gordonia soli
  misc_feature (1)..(207): tr|M0QHK6|M0QHK6_9ACTN GTP cyclohydrolase 1 OS=Gordonia soli NBRC 108243 OX=1223545 GN=folE PE=3 SV=1
MTISETDHDGESAVDTEESGFDQARAEAAVRELLLAVGEDPDREGLRRTPSRVANAYREVFAGLYTDPDDVLATTFDENHDELVLVKDIPMYSTCEHHLVSFHGVAHVGYIPGVSGRVTGLSKLARLVDLYAKRPQVQERLTSQIADAIVRRLEPRGVIVVIEAEHLCMAMRGIRKPGARTTTSAVRGLFKTSAVSRGEALDLISRP

SEQ ID NO: 8688 - protein, 203 aa, Gordonia sp.; identical to SEQ ID NO: 8667
  misc_feature (1)..(203): tr|A0A290XT16|A0A290XT16_9ACTN GTP cyclohydrolase 1 OS= Gordonia sp. 1D OX=1737359 GN=folE PE=3 SV=1

SEQ ID NO: 8689 - protein, 212 aa, Gordonia sp.
  misc_feature (1)..(212): tr|A0A1A0KS07|A0A1A0KS07_9ACTN GTP cyclohydrolase 1 OS= Gordonia sp. 852002-10350_SCH5691597 OX=1834085 GN=folE PE=3 SV=1
MTISEGHDIATHDGASRELSTGDGRFFDQERAEAAVRELLIAVGEDPDREGLRRTPTRVANAYREMFAGLYTDPSDVLATIFDEDHDELVLVKDIPMYSTCEHHLVSFHGVAHVGYIPGPSGQVTGLSKLARVVDLYAKRPQVQERLTSQIADALVDRLNPRGVIVVIEAEHLCMAMRGIRKPGARTTTSAVRGIFKTSAVSRGEALDLITR

SEQ ID NO: 8690 - protein, 212 aa, Gordonia sputi
  misc_feature (1)..(212): tr|H5U425|H5U425_9ACTN GTP cyclohydrolase 1 OS=Gordonia sputi NBRC 100414 OX=1089453 GN=folE PE=3 SV=1
MTISEGHDIATHDGASRELSTGEGRFFDQERAEAAVRELLIAVGEDPDREGLRRTPTRVANAYREMFAGLYTDPSEVLATIFDEDHDELVLVKDIPMYSTCEHHLVSFHGVAHVGYIPGPSGQVTGLSKLARVVDLYAKRPQVQERLTSQIADALVERLNPRGVIVVIEAEHLCMAMRGIRKPGARTTTSAVRGIFKTSAVSRGEALDLITR

SEQ ID NO: 8691 - protein, 203 aa, Gordonia terrae
  misc_feature (1)..(203): tr|A0A2I1RAN1|A0A2I1RAN1_9ACTN GTP cyclohydrolase 1 OS= Gordonia terrae OX=2055 GN=folE PE=3 SV=1
MSINERQDAVLAGPRSEFDQARAEAAVRELLLAVGEDPDREGLVRTPTRVANAYREMFAGLYTEPDDVLATTFDEDHDELVLVKDIPMYSTCEHHLVSFHGVAHVGYIPGTSGRVTGLSKLARLVDLYAKRPQVQERLTSQIADAMMRRLEPRGVIVVIEAEHLCMAMRGIRKPGATTTTSAVRGIFKTSAVSRGEALDLITR

SEQ ID NO: 8692 - protein, 203 aa, Gordonia terrae
  misc_feature (1)..(203): tr|H5UDZ5|H5UDZ5_9ACTN GTP cyclohydrolase 1 OS=Gordonia terrae NBRC 100016 OX=1089454 GN=folE PE=3 SV=1
MSINERQDAVLAGPRSEFDQARAEAAVRELLLAVGEDPDREGLIRTPTRVANAYREMFAGLYTEPDDVLATTFDEDHDELVLVKDIPMYSTCEHHLVSFHGVAHVGYIPGTSGRVTGLSKLARLVDLYAKRPQVQERLTSQIADAMMRRLEPRGVIVVIEAEHLCMAMRGIRKPGATTTTSAVRGIFKTSAVSRGEALDLITR

SEQ ID NO: 8693 - protein, 203 aa, Gordonia westfalica
  misc_feature (1)..(203): tr|A0A1H2LJZ3|A0A1H2LJZ3_9ACTN GTP cyclohydrolase 1 OS= Gordonia westfalica OX=158898 GN=folE PE=3 SV=1
MTISEGRDAVVNGHRSEFDQARAEAAVRELLLAVGEDPDREGLVRTPTRVANAYREMFAGLYTDPDEVLATTFDEDHDELVLVKDIPMYSTCEHHLVSFHGVAHVGYIPGTSGRVTGLSKLARLVDLYAKRPQVQERLTSQVADAVMRKLEPRGVIVVIEAEHLCMAMRGIRKPGATTTTSAVRGIFKTSAVSRGEALDLITR

SEQ ID NO: 8694 - protein, 189 aa, Gordonibacter pamelaeae
  misc_feature (1)..(189): tr|A0A369LV53|A0A369LV53_9ACTN GTP cyclohydrolase 1 OS= Gordonibacter pamelaeae OX=471189 GN=folE PE=3 SV=1
MDAAKIEAGVRLILEGVGEDPEREGLRETPARVARMYEEVFAGLEQDPAEHFATTFDEHHEEMVLVRDIPFYSMCEHHLVPFFGKAHVAYIPAADGRICGLSKLARLVDVFAKRPQVQERLTSQIADTLIEQLHPQGVIVVLEAEHLCMSMRGVKKAGAKTTTSAVRGAFERSQATRAEALSLIFARRD

SEQ ID NO: 8695 - protein, 189 aa, Gordonibacter pamelaeae; identical to SEQ ID NO: 8694
  misc_feature (1)..(189): tr|D6EAM8|D6EAM8_9ACTN GTP cyclohydrolase 1 OS=Gordonib acter pamelaeae 7-10-1-b OX=657308 GN=folE PE=3 SV=1

SEQ ID NO: 8696 - protein, 189 aa, Gordonibacter sp.
  misc_feature (1)..(189): tr|A0A369M1R1|A0A369M1R1_9ACTN GTP cyclohydrolase 1 OS= Gordonibacter sp. 28C OX=2078569 GN=folE PE=3 SV=1
MDAAKIEAGVRLILEGVGEDPEREGLRETPARVARMYQEVFAGLEQDPAEHFATTFDEHHEEMVLVRDIPFYSMCEHHLVPFFGMAHVAYIPAADGRICGLSKLARLVDVFAKRPQVQERLTSQIADTLIEQLHPQGVIVVLEAEHLCMSMRGVKKPGAKTTTSAVRGVFERSQATRAEALSLIFARRD

SEQ ID NO: 8697 - protein, 189 aa, Gordonibacter sp.; identical to SEQ ID NO: 7013
  misc_feature (1)..(189): tr|A0A1Y4FTN3|A0A1Y4FTN3_9ACTN GTP cyclohydrolase 1 OS= Gordonibacter sp. An232A OX=1965593 GN=folE PE=3 SV=1

SEQ ID NO: 8698 - protein, 189 aa, Gordonibacter urolithinfaciens
  misc_feature (1)..(189): tr|A0A1Y4FT62|A0A1Y4FT62_9ACTN GTP cyclohydrolase 1 OS= Gordonibacter urolithinfaciens OX=1335613 GN=folE PE=3 SV=1
MDAAKIEAGVRLILEGVGEDPEREGLSETPARVARMYEEVFAGLEQDPAEHFATTFDEHHEEMVLVRDIPFYSMCEHHLVPFFGKAHVAYIPAADGRICGLSKLARLVDVFAKRPQVQERLTSQIADTLIEQLHPQGVIVVLEAEHLCMSMRGVKKAGAKTTTSAVRGAFERSQATRAEALSLIFARRD

SEQ ID NO: 8699 - protein, 192 aa, Gottschalkia acidurici
  misc_feature (1)..(192): tr|K0B395|K0B395_GOTA9 GTP cyclohydrolase 1 OS=Gottscha lkia acidurici (strain ATCC 7906 / DSM 604 / BCRC 14475 / CIP 104303 / NCIMB 10678 / 9a) OX=1128398 GN=folE PE =3 SV=1
MEGDKSMDKPRIEAAVREILIAIGENPEREGLLDTPKRIAKMYEEIFSGLKEDPKEHLKVNFGEEGHEELVLVKDIPFYSVCEHHFVPFFGKAHVGYIPKDGKLTGLSKLARVVDTVAKRPQLQERITSTIADAVQEALDPYGVIVVVEAEHMCMTMRGVKKPGSKTVTSAVRGLFNKDAKARAEAMSLIKF

SEQ ID NO: 8700 - protein, 186 aa, Gottschalkia purinilytica
  misc_feature (1)..(186): tr|A0A0L0WCK7|A0A0L0WCK7_GOTPU GTP cyclohydrolase 1 OS= Gottschalkia purinilytica OX=1503 GN=folE PE=3 SV=1
MDKPRIESAVREILIGIGENPEREGLIDTPRRIAKMYEEIFSGLTEDPKKHLQVYFQEDQHEELVLVKDIPFYSVCEHHFVPFFGKAHVGYLPKNGKLTGLSKLARVVDTVAKRPQLQERITASVADTIVEVLDPYGVIVVVEAEHMCMTMRGIKKPGSKTVTSAVRGLFKNDAKARAEAMSLIKF

SEQ ID NO: 8701 - protein, 181 aa, Gottschalkiaceae bacterium
  misc_feature (1)..(181): tr|A0A521IW91|A0A521IW91_9FIRM GTP cyclohydrolase 1 OS= Gottschalkiaceae bacterium OX=2527676 GN=EWM50_07195 PE =3 SV=1
MKDLLQATTDLVESLNPDYQNDPDMKGTPERLQKMYQHFFRNEDIEYHFEKKFPTTNDQMVVVRNIEVIGMCPHHFVPIIYRVSIGYIPDKWAIGLSKLARIAIGLASYPKLQENYTDEIVQAIKKHLKPKGVIVVVDGVHGCMRCRGVQQSESSTITSSIDGIFMDKDTAKQEFLKLIKL

SEQ ID NO: 8702 - protein, 307 aa, Gracilibacillus boraciitolerans
  misc_feature (1)..(307): tr|W4VFB7|W4VFB7_9BACI GTP cyclohydrolase FolE2 OS=Grac ilibacillus boraciitolerans JCM 21714 OX=1298598 GN=fol E2 PE=3 SV=1
MKEVSTNNFPNKEERHKLFGSVEPGKKIKPTEKDKMPDLQNTQKDFLFDINQVGIVNVKHPIQVSGKLKPTTQTTIGTFKMTSSINKNLKGTNMSRFTEMMQEYSKDNTFEISVSKLKIFAQKMAERLEHDNNQITVSFPWFFERSGPASDIKGMNHADAEISVMYDRNLGYRFEVSLQGTITTLCPCSKEISEYSAHNQRGLVTMKAELTGDFDEEQIDWKQALLEAAESNASARIHPVLKRPDEKMVTEQAYENPRFVEDMVRLVAADLFELSFVQKFTVTCQNEESIHLHDAFASISYDKSLHN

SEQ ID NO: 8703 - protein, 307 aa, Gracilibacillus dipsosauri
  misc_feature (1)..(307): tr|A0A317KYZ7|A0A317KYZ7_9BACI GTP cyclohydrolase FolE2 OS=Gracilibacillus dipsosauri OX=178340 GN=folE2 PE=3 SV=1
MDRNYPIQLPNKLERHKLFGSVEPGEKTKPTEKEKMPDLQNTKKDFLFDIDHVGITNVKHPILVSSETKPTTQTTIGTLTMTSSIKKNHKGTNMSRFTELLHDYSNGEPFDISINKLKAFTKELTEKLEQEDTQLQISFPWFFERSGPSSDKTGMNHANAMITIHYHKNTGYQLEVALEGTVTTLCPCSKEISEYSAHNQRGIVKMAVRLAPDYTEDQKDWKLALLEAAESNASARIHPVLKRPDEKMVTEQAYENPRFVEDMVRLVAADLYELPFVEQFSVTCQNEESIHLHDAIATINYDKSLAR

SEQ ID NO: 8704 - protein, 188 aa, Gracilibacillus halophilus
  misc_feature (1)..(188): tr|N4WB94|N4WB94_9BACI GTP cyclohydrolase 1 OS=Gracilib acillus halophilus YIM-C55.5 OX=1308866 GN=folE PE=3 SV =1
MSNDTLSTSKVEDHIRGILEEIGEDPKREGLLNTPTRVAKMYKEVFEGVDVPPETALTTTFDAEGYDGMVVVKNIDYYTFCEHHLIPFFGKAHIGYIPDSQIIGLSKFARLVELVAKRPQVQERMTNQIASAIEKVLQPKGVIVSVEGQHLCMCARGVKKPGSKTVTTVKKGCFETSNDLVQEFMRSE

SEQ ID NO: 8705 - protein, 307 aa, Gracilibacillus halophilus
  misc_feature (1)..(307): tr|N4WCL1|N4WCL1_9BACI GTP cyclohydrolase FolE2 OS=Grac ilibacillus halophilus YIM-C55.5 OX=1308866 GN=folE2 PE =3 SV=1
MKDERNVSLPNKAERHKLFGSVEPGPRSKPTKKHEMPDLQNTKQDFLFDIDHVGITNVKHPVIVNSHVTPHVQTTIGTFYMTSSVNKTHKGTNMSRFTELLNQYYENGELEVSLAFLKEFTAELSHRLEQEETTITVEFPWFFERRGPDSDKPGMNHADAKVTVHYHQTSGYHYTVSLKGTITTLCPCSKEISEYSAHNQRGNVSMEAELTGDFDETTTDWKLALLEAAESNASARIHPVLKRPDEKMVTEQAYENPRFVEDMVRLVAADLYEMPFIQKFTVTCQNEESIHLHDAIATITYDKSWHM

SEQ ID NO: 8706 - protein, 307 aa, Gracilibacillus kekensis
  misc_feature (1)..(307): tr|A0A1M7PKA6|A0A1M7PKA6_9BACI GTP cyclohydrolase FolE2 OS=Gracilibacillus kekensis OX=1027249 GN=folE2 PE=3 S V=1
MKEASSKQLPNKSVRHKLFGSVQPGEKIKPTEKEKMPDLQNTKKDFLFDIDQVGIANVKHPVQVFSKTKPLAQTTIGTFKMTSSIQKNHKGTNMSRFTEMMQEYSENSTFDLSIASLKTFTKEMAERLEQDDNQITVSFPWFFERSGPASDMTGMNHADAEITILYEKNAGYHVTVSLQGTITTLCPCSKEISEYSAHNQRGIVSMKTELTGEYNEDEMDWKLALLEAAESNASARIHPVLKRPDEKMVTEQAYENPRFVEDMVRLVAADLYELPFVQKFSVTCQNEESIHLHDAIATISYDKSLHN

SEQ ID NO: 8707 - protein, 307 aa, Gracilibacillus orientalis
  misc_feature (1)..(307): tr|A0A1I4QAD5|A0A1I4QAD5_9BACI GTP cyclohydrolase FolE2 OS=Gracilibacillus orientalis OX=334253 GN=folE2 PE=3 SV=1
MKDFNTKQLPNKTERHKLFGSVEPGEKKKPTEKEKMPDLQNTQKDFLFDIDQVGISNVKHPIQVTSKMKPTTQTTIGTFKMTSSIKKNHKGTNMSRFTEMIQNYSNGSPFDLSVSTLKQFTKEMADRLEQVDNQITVSFPWFFERSGPASDMAGMNHANAEITMIYDKNAGYKITVSLEGTITTLCPCSKEISEYSAHNQRGNVKMTAEFSADYQEDDVDWKQALLEAAESNASARIHPVLKRPDEKMVTEQAYENPRFVEDMVRLVAADLFEMEFIEKFTVTCENEESIHLHDAMASITYDKALHR

SEQ ID NO: 8708 - protein, 307 aa, Gracilibacillus ureilyticus
  misc_feature (1)..(307): tr|A0A1H9LDV0|A0A1H9LDV0_9BACI GTP cyclohydrolase FolE2 OS=Gracilibacillus ureilyticus OX=531814 GN=folE2 PE=3 SV=1
MFSKLPKQLPNKQERHKLFGSVEPGEKTKPTEKEKMPDLQNTKKDFLFDINQVGIANVKQPIYISSNIKPYNQTTIGNFKLTSAINKDSKGTNMSRFTELMYEYSNGEPLMVSISELKRFTKELTDKLQQEDTQITVSFPWFFERSGPSSAITGMNHAEARLTVIYDRIHGYQVDVAIEGTVTTLCPCSKEISEYSAHNQRGIVKIGAQLTPNFDEEQVDWKAALLEAAESNASARIHPVLKRPDEKMVTEQAYENPRFVEDMVRLVAADLYEMPFVEKFSVTCQNEESIHLHDAIATISYDKTLHN

SEQ ID NO: 8709 - protein, 188 aa, Gracilibacter sp.
  misc_feature (1)..(188): tr|A0A101W5U6|A0A101W5U6_9FIRM GTP cyclohydrolase 1 OS= Gracilibacter sp. BRH_c7a OX=1734398 GN=folE PE=3 SV=1
MSIDLHKIERAVEMILEAIGEDPSREGLIDTPKRVAKFYKEAFAGLQEDPSKNLTVQFSENHEEMVMVKDIPIYSLCEHHLLPFVGKAHIAYIPRNGKVTGLSKLARVVEGYARRPQLQERLTSQIADTIKDTLNARGVLVVIEAEHMCMTIRGIKTPGSHTLTSAVRGIFQTNPATRAEAFSLISSK

SEQ ID NO: 8710 - protein, 192 aa, Gracilibacter sp.
  misc_feature (1)..(192): tr|A0A101VXS9|A0A101VXS9_9FIRM GTP cyclohydrolase 1 OS= Gracilibacter sp. BRH_c7a OX=1734398 GN=folE PE=3 SV=1
MLTSSINLGKIESAVRDILEAVGENPDREGLKDTPRRVARFYQEAFVGLHEDPSRHLTVQFSENHEEMIIVKDIPIYSMCEHHLLPFVGQAHIAYIPRHEKVTGLSKLARVAEAFAKRPQLQERLTGQIADTVQQILEARGVLVVIEAEHMCMTIRGIKKPGSKTVTSAVRGIFQTSSATRAEAFSLIMSSK

SEQ ID NO: 8711 - protein, 228 aa, Gracilimonas mengyeensis
  misc_feature (1)..(228): tr|A0A521EAM9|A0A521EAM9_9BACT GTP cyclohydrolase 1 OS= Gracilimonas mengyeensis OX=1302730 GN=folE PE=3 SV=1
MKTLDLDKITAEEIGEDHIGTSVQTPLRDDAFDKSDEEKIEIIQEHFAEIMKALGLDLEDDSLKGTPYRVAKMYVKEIFEGLNPKNKPVARQFSNNYDYSGMLVEKNIQVTSFCEHHFLPFIGKAHVAYIPSGKKVIGLSKINRIVDYYSRRPQVQERLTLQIADELQGALETEDVAVFIDSKHLCVSTRGIKDHSSTTITAEYRGAFQNEDTQQKFIDYIKTDTQID

SEQ ID NO: 8712 - protein, 299 aa, Gracilimonas mengyeensis
  misc_feature (1)..(299): tr|A0A521FD87|A0A521FD87_9BACT GTP cyclohydrolase FolE2 OS=Gracilimonas mengyeensis OX=1302730 GN=folE2 PE=3 S V=1
MISNEIQRFYDPTFTVTEEYKESLPDLQNGPASLIEGANVPIQQVGISNFKLPLKFRRREGEPITLEASVDGYVSLEMDKKGINMSRIMRTFYKFQDKVFHLDRLEDILKAYKEDLDSQESFLRISFNYPMLMDSLRSGMKGYQYYKVQLEGRLDNYNQFQKYMHLDFEYSSACPCSYELSEHARETREVAAIPHSQRSVANVTVALKDEFFVEDLVQICRNALKTETQVMVKREDEQAFAEMNGAYQKFVEDAARLLYDELDSYNSIRDFVVRCVHMESLHSHDAVSRICKGLPNGLR

SEQ ID NO: 8713 - protein, 299 aa, Gracilimonas sp.
  misc_feature (1)..(299): tr|A0A316TQZ7|A0A316TQZ7_9BACT GTP cyclohydrolase FolE2 OS=Gracilimonas sp. 8A47 OX=2079485 GN=folE2 PE=3 SV=1
MITTNLRRFYDPTFTVTDSYKESLPDLQNGPASLIEGANVPIQQVGISNFKLPLKYPTPSGELLTLETSVDGYVGLDAGKKGINMGRIMRTFYKFQHDVFHPDKLEEVLKAYQDDLESRSAFLKLSFSYPMMKESLRSGLAGYQYYNVSIEGKLDESGQFTSYMHLDFEYSSACPCSYELSEHARESRDLAAIPHSQRSVATITAQLNSEIFVDDMVEICREALQTETQVIVKREDEQAFAEMNGAFQKFVEDAARLLYDELNKDERIRDFVVRCAHLESLHSHDAVSRICKGVPNGLR

SEQ ID NO: 8714 - protein, 233 aa, Gracilimonas sp.
  misc_feature (1)..(233): tr|A0A316TQJ3|A0A316TQJ3_9BACT GTP cyclohydrolase 1 OS= Gracilimonas sp. 8A47 OX=2079485 GN=folE PE=3 SV=1
MSKDKNILDTLDLNHSEAEEIGDNHLSTSVQTPLRKDAFELTDSEKIEVIEKHFAEIMHALGLDLTDESLSGTPRRVAKMYVKEIFQGLNPVNRPDTRKFGNKYEYGDMVVVKNINVTSFCEHHFLPFIGKAHVAYFSSGKVIGLSKINRMVDYYARRPQVQERLTLQIAEELQESLETDDVAVFIESKHFCVSTRGIQDRESSTVTTEYRGRFKEKEIQQRFIDYMKAEMMV

SEQ ID NO: 8715 - protein, 225 aa, Gramella flava
  misc_feature (1)..(225): tr|A0A1L7I2X3|A0A1L7I2X3_9FLAO GTP cyclohydrolase 1 OS= Gramella flava JLT2011 OX=1229726 GN=folE PE=3 SV=1
MKIDKILNEIEEMGDAHASGSAETPLREDAFEISDSEKIEKIREDVRNIMHTLGLDLKDDSLKGTPQRVAKMFVNEIFGGLDPKRKPKASVFENKYKYGEMLVEKNITVYSTCEHHLLPIVGKAHVAYISNGTVVGLSKMNRIVDYYAKRPQVQERMTMQIVQELQNVLGTPDVACVIDAKHLCVNSRGIRDIESSTVTSEFGGAFQKKDVRREFLDYIKLDTTF

SEQ ID NO: 8716 - protein, 198 aa, Gramella flava
  misc_feature (1)..(198): tr|A0A1L7I8D6|A0A1L7I8D6_9FLAO GTP cyclohydrolase 1 OS= Gramella flava JLT2011 OX=1229726 GN=folE PE=3 SV=1
MSYSYFEQYDDERTDKLRESFSEIIQNVGENPDREGVLKTPERAAKAMQFLTQGYTMDAEKILQKAIFHEKYDEMVVVKDIELYSLCEHHMLPFFGKAHIAYIPNGKIVGLSKLPRVVDVFARRLQVQERLTHDILECLNKTLQPQGVAVVIEAVHMCMMMRGVQKQNSATTTSGFRGQFEKQETRNEFLKLISSDLR

SEQ ID NO: 8717 - protein, 225 aa, Gramella forsetii
  misc_feature (1)..(225): tr|A0M4Z9|A0M4Z9_GRAFK GTP cyclohydrolase 1 OS=Gramella forsetii (strain KT0803) OX=411154 GN=folE PE=3 SV=1
MKVDKILNEIEEMGDAHAGSSANNPLREDAFDLSDEEKIELIKKDVRNILDTLGLDLNDDSLKGTPQRVAKMFVNEIFSGLHPKRKPKASTFENKYQYGEMLVEKNITVYSTCEHHLLPIVGKAHVAYISNGTVVGLSKMNRIVDYFAKRPQVQERMTMQIVHELQNVLGTPDVACVIDAKHLCVNSRGIRDIESSTVTSEFGGAFKKKEVRREFLDYIKLDTSF

SEQ ID NO: 8718 - protein, 198 aa, Gramella forsetii
  misc_feature (1)..(198): tr|A0M1E0|A0M1E0_GRAFK GTP cyclohydrolase 1 OS=Gramella forsetii (strain KT0803) OX=411154 GN=folE PE=3 SV=1
MSYKYFEEYNEEITENMKNNFQEIIKGVGENPDREGIVKTPERAAKAMQFLTQGYSMDAEEILKKAVFEESYDEMVVVKDIELYSLCEHHMLPFFGKAHIAYIPNGKIIGLSKLPRVVDVFARRLQVQERLTHDILECLNETLQPQGVAVVIEAVHMCMMMRGVQKQNSATTTSGFRGQFKEIETRNEFLKLISSDLR

SEQ ID NO: 8719 - protein, 225 aa, Gramella gaetbulicola
  misc_feature (1)..(225): tr|A0A2T6AE27|A0A2T6AE27_9FLAO GTP cyclohydrolase 1 OS= Gramella gaetbulicola OX=703340 GN=folE PE=3 SV=1
MKIDKILNEIEEMGDAHASSSANTPLREDAFEKTDQEKVDLIKEDVKNILETLGLDLTDDSLKGTPLRVAKMFVNEIFAGLHPKRKPKASTFENKYKYGEMLVEKNITVYSTCEHHLLPIVGRAHVAYISNGTVVGLSKMNRIVDYFAKRPQVQERMTMQIVHELQNVLGTPDVACVIDAKHLCVNSRGIRDIESSTVTSEFGGAFKKKEVRREFLDYIKLDTSF

SEQ ID NO: 8720 - protein, 198 aa, Gramella gaetbulicola
  misc_feature (1)..(198): tr|A0A2T6AHF9|A0A2T6AHF9_9FLAO GTP cyclohydrolase 1 OS= Gramella gaetbulicola OX=703340 GN=folE PE=3 SV=1
MSYKFIEEYDKELTQGLKANFKEIIAGVGEDPDREGVLNTPERAAKAMQFLTQGYSMDAEEILKKAVFEETYDEMVVVKDIELYSLCEHHMLPFFGKAHIAYIPNGKIVGLSKLPRVVDVFARRLQVQERLTNDILECLNKTLKPRGVAVVIEAVHLCMMMRGVQKQNSATTTSGFRGQFKEIETRNEFLKLISSDLR

SEQ ID NO: 8721 - protein, 233 aa, Gramella jeungdoensis
  misc_feature (1)..(233): tr|A0A4Y8AVS7|A0A4Y8AVS7_9FLAO GTP cyclohydrolase 1 OS= Gramella jeungdoensis OX=708091 GN=folE PE=3 SV=1
MRHEETLLNIPINGTKLNGFTFDEIGDDHLYTGIETPLTSTAFDISDEEKKEKIAKLFSQIMEVMGLDLTDDSLKGTPKRVAKMYIEEIFSGLNPENKPKIALFENKYKYNQMLVEKNIQFYSNCEHHFVPIFGKVHVAYVSSGKVIGLSKINRIVQYFANRPQVQERLTNQIALELASILETDDIAVIIDAKHLCVASRGIKDDSSATVTSYYGGIFNQQEKIVELQNYLKL

SEQ ID NO: 8722 - protein, 225 aa, Gramella jeungdoensis
  misc_feature (1)..(225): tr|A0A4Y8AWM5|A0A4Y8AWM5_9FLAO GTP cyclohydrolase 1 OS= Gramella jeungdoensis OX=708091 GN=folE PE=3 SV=1
MINKIDEIGDDHVGSSAKTPLRADAFDISDAEKRKRIEASVRDILDTLGMDLEDDSIKGTPRRVAKAYVNEIFSGLNPANKPKLSTFDNNYKYGEMLVEKNITVYSTCEHHLLPIVGRAHVAYISDGNVIGLSKMNRIVDYYAKRPQVQERLTMQIVQALQKALGTDDVACVIDAKHLCVNSRGVRDIVSSTVTSEFGGKFKEKDTKREFLDYIKMDTDFKNIEA

SEQ ID NO: 8723 - protein, 225 aa, Gramella salexigens
  misc_feature (1)..(225): tr|A0A1L3J7Y5|A0A1L3J7Y5_9FLAO GTP cyclohydrolase 1 OS= Gramella salexigens OX=1913577 GN=folE PE=3 SV=1
MKVDKILNEIEEMGDAHAGSSANTPLREDAFELSDSEKIDLIKEDVKRIMDTLGLDLTDDSLKGTPLRVAKMYVNEIFSGLHPKRKPKASVFENKYKYGEMLVEKNITVYSTCEHHLLPIVGKAHVAYISNGTVVGLSKMNRIVDYFAKRPQVQERMTMQVVHELQNVLGTPDVACVIDAKHLCVNSRGIRDIESSTVTSEFGGAFKQKEIKREFLDYIKLDTSF

SEQ ID NO: 8724 - protein, 198 aa, Gramella salexigens
  misc_feature (1)..(198): tr|A0A1L3J3H7|A0A1L3J3H7_9FLAO GTP cyclohydrolase 1 OS= Gramella salexigens OX=1913577 GN=folE PE=3 SV=1
MSYKYFEEYDQEVTGNLKRNFQEIIDGVGEDPKREGLIKTPERAAKAMQFLTQGYDLDAEKILNKAVFKESYDEMVVVKDIELYSLCEHHMLPFFGKAHIAYIPNGKIIGLSKLPRVVDVFSRRLQVQERLTHDILECLNKTLEPRGVAVVIEAVHMCMMMRGVQKQNSATTTSGFRGQFKEIETRNEFLKLISSDLK

SEQ ID NO: 8725 - protein, 225 aa, Gramella sp.
  misc_feature (1)..(225): tr|A0A1H1PEL4|A0A1H1PEL4_9FLAO GTP cyclohydrolase 1 OS= Gramella sp. MAR_2010_102 OX=1250231 GN=folE PE=3 SV=1
MKIDKILNEIEEMGDAHAGSSAHTPLREDAFEKTDQEKIDLIKEDVKNILDTLGLDLTDDSLKGTPLRVAKMFVNEVFSGLHPKRKPKASTFENKYKYGEMLVEKNITVYSTCEHHLLPIVGKAHVAYISNGTVVGLSKMNRIVDYFAKRPQVQERMTMQIVHELQNVLGTPDVACVIDAKHLCVNSRGIRDIESSTVTSEFGGAFKQKDIRREFLDYIKLDTSF

SEQ ID NO: 8726 - protein, 225 aa, Gramella sp.
  misc_feature (1)..(225): tr|A0A2R3ZAJ1|A0A2R3ZAJ1_9FLAO GTP cyclohydrolase 1 OS= Gramella sp. SH35 OX=2126553 GN=folE PE=3 SV=1
MKIDKILNEIEEMGDAHAGSSAETPIRDDAFEKSDIEKIDLIKEDVRHIMETLGLDLTDDSLKGTPMRVAKMFVNEIFSGLHPKRKPKASVFENKYKYGEMLVEKNITVYSTCEHHLLPIVGKAHVGYISNGTVVGLSKMNRIVDYFAKRPQVQERMTMQIVQELQNVLGTEDVACVVDAKHLCVNSRGIRDIESSTVTSEFGGKFKQKDIRREFLDYIKLDTSF

SEQ ID NO: 8727 - protein, 217 aa, Granulibacter bethesdensis
  misc_feature (1)..(217): tr|Q0BW17|Q0BW17_GRABC GTP cyclohydrolase 1 OS=Granulib acter bethesdensis (strain ATCC BAA-1260 / CGDNIH1) OX= 391165 GN=folE PE=3 SV=1
MTDAPSLRPSDLPAEAGMPETTRPSRQEAEQAVRTLLRWACDDPTREGLQETPSRVVRAYEEWFAGYHDDPVKVLERTFSETEGYDEIILLRGIRIESFCEHHMAPIIGRAHVAYLPRHRVVGISKLARVVEAFSKRLQIQEKLTAQIANTIDSVLQPHGVAVIVEAAHQCMTTRGVHKTGVSMVTSRMLGVFRTNPETRRELMAMINNPVQPSALG

SEQ ID NO: 8728 - protein, 232 aa, Granulibacter bethesdensis
  misc_feature (1)..(232): tr|W6I152|W6I152_9PROT GTP cyclohydrolase 1 OS=Granulib acter bethesdensis OX=364410 GN=folE PE=3 SV=1
MRCLHPLPLRKRTTELTDAPSLRPSDLPAEAGMPETTRPSRQEAEQAVRTLLRWACDDPTREGLQETPSRVVRAYEEWFAGYHDDPVKVLERTFSETEGYDEIILLRGIRIESFCEHHMAPIIGRAHVAYLPRHRVVGISKLARVVEAFSKRLQIQEKLTAQIANTIDSVLQPHGVAVIVEAAHQCMTTRGVHKTGVSMVTSRMLGVFRTNPETRRELMAMINNPVQPSALG

SEQ ID NO: 8729 - protein, 184 aa, Granulicatella sp.
  misc_feature (1)..(184): tr|A0A4Y9IUG4|A0A4Y9IUG4_9LACT GTP cyclohydrolase 1 OS= Granulicatella sp. WM01 OX=2558277 GN=folE PE=3 SV=1
MDKKKIEQAVKMIIEAVGEDGQREGLQETPQRIAKMYEEIFSGLGKNAQDHLSKSFEIVDDNMVIEKDIPFHSMCEHHFLPFYGKVHIAYVPNGRVAGLSKLARTVEVYAKKPQIQERLTIEIVEALMNYLDAKGAMVVIEAEHMCMNMRGIKKPGTSTVTSVARGVLEQDDTLKQEAYRLMGF

SEQ ID NO: 8730 - protein, 203 aa, Granulicella mallensis
  misc_feature (1)..(203): tr|G8NYD8|G8NYD8_GRAMM GTP cyclohydrolase 1 OS=Granulic ella mallensis (strain ATCC BAA-1857 / DSM 23137 / MP5A CTX8) OX=682795 GN=folE PE=3 SV=1
MTKKSSKPSAESSNPTLASASLQQIYAELLTRIGEDPSRDGLLNTPKRMEKSMAFLTQGYTQSIDAVLHGALFDVHYDEMVIVKEIEFYSQCEHHLLPFFGRAHVAYVPNGKVIGLSKIPRIIDVFARRLQVQERLTQQIAQAIEDAIQPQGVGVIVEAQHLCMMMRGVEKQGSSTVTSAMLGVFKSQQQTRNEFLSLVERRR

SEQ ID NO: 8731 - protein, 206 aa, Granulicella pectinivorans
  misc_feature (1)..(206): tr|A0A1I6M2H5|A0A1I6M2H5_9BACT GTP cyclohydrolase 1 OS= Granulicella pectinivorans OX=474950 GN=folE PE=3 SV=1
MLALRPEETTEDQTTLSAASTQEIYRELLRRMGEDPDRDGLLRTPERMEKSTAFLTQGYTQSVEEVLHEALFDVDYDEMVIVRDIEFYSQCEHHLLPFFGKAHIAYVPQGKVIGLSKLPRIVDVFARRLQVQERLTRQIAEAITGAINPQGVAVIVEAEHLCMMMRGVQKQSSATVTSAMLGVFKTQLQTRNEFLSLVRTGRGNQQ

SEQ ID NO: 8732 - protein, 199 aa, Granulicella rosea
  misc_feature (1)..(199): tr|A0A239IXM9|A0A239IXM9_9BACT GTP cyclohydrolase 1 OS= Granulicella rosea OX=474952 GN=folE PE=3 SV=1
MAIASAPPELTLESATTQDLYRELLSRIGEDPTRDGLLGTPERMEKSMAYLTRGYTMDVTEVLHNALFDVDYDEMVIVKDIEFYSMCEHHLLPFFGKAHVAYVPKGKVIGLSKVARLVDVFARRLQVQERLTRQVADAIEEAIQPQGVAVIMEASHLCMMMRGVEKQHSATVTSAMLGVFKTQLQTRNEFLSLVRRGRD

SEQ ID NO: 8733 - protein, 206 aa, Granulicella sibirica
  misc_feature (1)..(206): tr|A0A4Q0T0I3|A0A4Q0T0I3_9BACT GTP cyclohydrolase 1 OS= Granulicella sibirica OX=2479048 GN=folE PE=3 SV=1
MLATLTKDQKTASPALADASTQEIYRELLRRMGEDPDRDGLLRTPERVEKSTAFLTKGYTQSVDEVLHNALFDVDYDEMVIVRDVEFYSQCEHHLLPFFGKAHVAYVPNGKVIGLSKIPRIIDVFARRLQVQERLTRQIAEAITDAIHPQGVAVILEAEHLCMMMRGVEKQQSNTVTSAMLGVFKTQMQTRNEFLSLVRTGRGSNL

SEQ ID NO: 8734 - protein, 202 aa, Granulicella sp.
  misc_feature (1)..(202): tr|A0A3N1JIV3|A0A3N1JIV3_9BACT GTP cyclohydrolase 1 OS= Granulicella sp. GAS466 OX=2485170 GN=folE PE=3 SV=1
MAGSEATLEAAALETLSTQELYREILRRIGEDPNRDGLVRTPERMEKSMAFLTRGYTMDVTEVLHDALFDVDYDEMVIVKDVEFFSMCEHHLLPFFGKAHIAYVPNGKVIGLSKIPRLVDVFARRLQVQERLTTQIGDAITEAINPQGVAVILEAQHLCMMMRGVEKQHSSTVTSAMLGVFKTQLQTRNEFLSLVRRNGNSF

SEQ ID NO: 8735 - protein, 196 aa, Granulicella tundricola
  misc_feature (1)..(196): tr|E8X3P9|E8X3P9_GRATM GTP cyclohydrolase 1 OS=Granulic ella tundricola (strain ATCC BAA-1859 / DSM 23138 / MP5 ACTX9) OX=1198114 GN=folE PE=3 SV=1
MSEQNQTLASASTQDLYREMIRRMGEDPDRDGLLRTPERMEKSTAFLTQGYKQTVTEVLHNALFDVDYDEMVIVKDIEFYSQCEHHLLPFFGKAHVAYVPNGKVIGLSKIARLVDVFARRLQVQERLTRQIAESIEEAIAPQGVGIILEAQHLCMMMRGVEKQHSHTVTSAMLGVFKTQLQTRNEFLSLVRHKTTL

SEQ ID NO: 8736 - protein, 183 aa, Granulosicoccus antarcticus
  misc_feature (1)..(183): tr|A0A2Z2NU04|A0A2Z2NU04_9GAMM GTP cyclohydrolase 1 OS= Granulosicoccus antarcticus IMCC3135 OX=1192854 GN=folE PE=3 SV=1
MDTMKTAYLNILESVGEDPERDGLRDTPERAAKAMAFLTHGYQQTLEEVVNGAIFESESDEMVIVKNIELYSLCEHHLLPFIGKCHVAYLPRGKVIGLSKIARIVDMYARRLQIQESLTHQIATAVLEVTGGRGVGVIIESQHMCMMMRGVQKQNSSMTTSSMLGLFRKDINTRNEFLQLVKD

SEQ ID NO: 8737 - protein, 221 aa, Grimontella sp.
  misc_feature (1)..(221): tr|A0A318GFZ1|A0A318GFZ1_9GAMM GTP cyclohydrolase 1 OS= Grimontella sp. AG753 OX=2183905 GN=folE PE=3 SV=1
MSSLSKEAALVHEALVARGLETPLRPPVDMDNETRKRLIAGHMTEIMQLLNLDLNDDSLMETPHRIAKMYVDEIFSGLDYANFPKITVIENKMKVDEMVTVRDITLTSTCEHHFVTIDGKATVAYIPKESVIGLSKINRIVQFFAQRPQVQERLTQQILTALQTLLGTNNVAVSIDAVHYCVKARGIRDATSATTTTSLGGLFKSSQNTRQEFLRAVRHHN

SEQ ID NO: 8738 - protein, 252 aa, Grimontia celer
  misc_feature (1)..(252): tr|A0A128F0Q0|A0A128F0Q0_9GAMM Putative GTP cyclohydrol ase 1 type 2 OS=Grimontia celer OX=1796497 GN=GCE9029_0 1787 PE=4 SV=1
MNNYQLESLLNDFLKPFAIKDYCPNGMQVEGKAEVKKIVTGVTASQALIDAAIEQRADALLVHHGYFWRGEAEPLKGMKFKRIKALIENGINLYAYHLPLDVHPDVGNNAQLAKLLGIKQLGGLEDGNPNSVAVWGELPVTLSAEDFSDLLARKLNRQPLHIESGIAKSIKKVGWCTGGGQDFIDLAASKGMDAFVSGEISERTTYSARELGVHYFSAGHHATERYGVKALGEWLASEHGFNVSFIDIDNPV

SEQ ID NO: 8739 - protein, 218 aa, Grimontia celer
  misc_feature (1)..(218): tr|A0A128EXR0|A0A128EXR0_9GAMM GTP cyclohydrolase 1 OS= Grimontia celer OX=1796497 GN=folE PE=3 SV=1
MTALSDSAKRVREALIARGIETPMQAGSSMTAQEKKEKIEYHMREILTAMDLDLEDDSLTETPIRIAKMYVDEVFSGLDYTNFPKITVIDNKMGCDEMVRVKDITLTSTCEHHLVTIDGKCTVAYLPKSKIIGLSKINRIVRFFSQRPQVQERLTRQILVALQTLLETDNVAVHMNATHYCVKARGVMDATSATTTTALGGIFKSNASTRAEFLHGIG

SEQ ID NO: 8740 - protein, 218 aa, Grimontia hollisae
  misc_feature (1)..(218): tr|A0A377HM81|A0A377HM81_GRIHO GTP cyclohydrolase 1 OS= Grimontia hollisae OX=673 GN=folE PE=3 SV=1
MTALSDSAKRVREALIACGIETPMQAGSSMTAQEKKEKIEYHMREILSVIDLDLDDDSLTETPARIAKMYVDEIFSGLDYRNFPKITVIDNKMGCDEMVRVKDITLTSTCEHHLVTIDGKCTVAYLPKNKIIGLSKINRIVRFFAQRPQVQERLTRQILVALQTLLETENVAVHMNATHYCVKARGVMDATSATTTTALGGVFKSNASTRAEFLHGIG

SEQ ID NO: 8741 - protein, 218 aa, Grimontia hollisae; identical to SEQ ID NO: 8740
  misc_feature (1)..(218): tr|D0IB23|D0IB23_GRIHO GTP cyclohydrolase 1 OS=Grimonti a hollisae CIP 101886 OX=675812 GN=folE PE=3 SV=1

SEQ ID NO: 8742 - protein, 217 aa, Grimontia indica
  misc_feature (1)..(217): tr|R1H0I7|R1H0I7_9GAMM GTP cyclohydrolase 1 OS=Grimonti a indica OX=1056512 GN=folE PE=3 SV=1
MTALSDSAKRVREALIARGIETPMQAGSPMTAQEKKEKIEYHMREILTAMDLDLEDDSLTETPMRIAKMYVDEVFSGLDYANFPKITVIDNKMGCDEMVRVKNITLTSTCEHHLVTIDGQCTVAYLPKNKIIGLSKINRIVRFFSQRPQVQERLTRQILVALQTLLETDNVAVHMNATHYCVKARGVMDATSETTTTALGGIFKSNSATRAEFLHGI

SEQ ID NO: 8743 - protein, 252 aa, Grimontia marina
  misc_feature (1)..(252): tr|A0A128ESJ2|A0A128ESJ2_9GAMM Putative GTP cyclohydrol ase 1 type 2 OS=Grimontia marina OX=646534 GN=GMA8713_0 0217 PE=4 SV=1
MNNYQLESVLNEFLKPFAIKDYCPNGMQIEGKEEVRKIVTGVTASQALIEAAIEQDADALLVHHGYFWRGESEPLKGMKFKRIKSLIESGINLYAYHLPLDVHPEVGNNAQLATLLGIEQLGGLEDGNPNSVAVWGELPSSLSAKDFGKLLATKLNREPLHIESAIAKPIKKVGWCTGGGQDFIDLAASKGMDAFVSGEISERTTYSARELGIHYFSAGHHATERYGVKALGQWLADQHGFEVTFIDIDNPV

SEQ ID NO: 8744 - protein, 218 aa, Grimontia marina
  misc_feature (1)..(218): tr|A0A128FFM2|A0A128FFM2_9GAMM GTP cyclohydrolase 1 OS= Grimontia marina OX=646534 GN=folE PE=3 SV=1
MTALNDSAKRVREALIARGIETPMQAGSSMTAQEKKEKIEYHMREILTAMDLDLEDDSLTETPIRIAKMYVDEVFSGLDYTNFPKITVIDNKMGCDEMVRVKDITLTSTCEHHLVTIDGKCTVAYLPKNKIIGLSKINRIVRFFSQRPQVQERLTRQILVALQTLLETDNVAVHMNATHYCVKARGVMDATSATTTTALGGIFKSNASTRAEFLHGIG

SEQ ID NO: 8745 - protein, 217 aa, Grimontia sp.; identical to SEQ ID NO: 8742
  misc_feature (1)..(217): tr|A0A0F5ZVE0|A0A0F5ZVE0_9GAMM GTP cyclohydrolase 1 OS= Grimontia sp. AD028 OX=1581149 GN=folE PE=3 SV=1

SEQ ID NO: 8746 - protein, 191 aa, Gryllotalpicola sp.
  misc_feature (1)..(191): tr|A0A387BGT0|A0A387BGT0_9MICO GTP cyclohydrolase 1 OS= Gryllotalpicola sp. 2DFW10M-5 OX=2419771 GN=folE PE=3 S V=1
MTGIDRARVEAAVAELLAAIGEDPARPGLRETPSKVADAYAEFFSGLGEDPIAPLRETIPVGDVEPELVIVRDLEFRSVCEHHLLPFLGRAHLAYLPAEKVVGLGRLPQLVDTLAARPQLQERLTEQIADALVQALEPRGVVVVLDAQHQCVTTRGARQVHSTTVTVASRGELDDPVRRAEVITLIGSAAQ

SEQ ID NO: 8747 - protein, 264 aa, Gulbenkiania indica
  misc_feature (1)..(264): tr|A0A0K6H4S2|A0A0K6H4S2_9NEIS GTP cyclohydrolase FolE2 OS=Gulbenkiania indica OX=375574 GN=folE2 PE=3 SV=1
MNQTTIPDVQSTQDTRNLPINKVGIKSIRHPVKVAERAGGVQHTIGLFNMYVHLPAEFKGTHMSRFVEILNAQEREMSVAHFESVVRQMVERLEARSGYVEMSFPYFVNKTAPVSGVQSLLDYEVTYIGEMVEGEYRFTMKVVVPVTSLCPCSKKISQYGAHNQRSHVTITAKTRDYVWIEELIDIAERQASCELYGLLKRPDEKYVTERAYENPKFVEDLVRDVAAELDADGRVQAYVVESENFESIHNHSAYALIERDKLAG

SEQ ID NO: 8748 - protein, 259 aa, Gulosibacter sp.
  misc_feature (1)..(259): tr|A0A1R4FUR4|A0A1R4FUR4_9MICO GTP cyclohydrolase 1 OS= Gulosibacter sp. 10 OX=1255570 GN=FM112_06670 PE=3 SV=1
MAVDRTRAAAAIREFLAACGLAEDDPRLTRTPARVAAAAEELFAGEGADPVPALREGRISVDASADAAAGAAAGGGGLSDGAASASAAPDGVAEGDVAAGDPGEGDRGGAEDGAASPADAGVPVSAEDSAGNLVLVRNVRFRSMCEHHLLPFDGWVHLAYLPGDSIIGFGRLYDLVETVSSRLSLQERLGEDLVEAIMEGLDALGALAVVEARQGCVADRGPRQADSDSVTLAARGSLLDPQARADALRLISLGGQDRE

SEQ ID NO: 8749 - protein, 262 aa, Guyparkeria sp.
  misc_feature (1)..(262): tr|A0A426QPQ0|A0A426QPQ0_9GAMM GTP cyclohydrolase FolE2 OS=Guyparkeria sp. SCN-R1 OX=2341113 GN=folE2 PE=3 SV= 1
MNSHDMPDVQSSHDARDIAIDQVGIKAIRHPMTFLDHGQEHPTVAECQLTVGLPADKKGTHMSRFVALLNEGPLRLSVESLAEWTEAMIERLEAHSGEAHFAFPYFIAKDAPVSGQGAMMDYDVTLIGRVEHGRAHVGLKLVIPVTSLCPCSKEISAYGAHNQRSHITVETEISDPALSLRDLITAVEDQGSCPLWGLLKRPDEKWITEYAFDNPKFVEDMVRDVANALEGYPGINGFSISVENFESIHNHSAWAVIHRPGR

SEQ ID NO: 8750 - protein, 202 aa, Guyparkeria sp.
  misc_feature (1)..(202): tr|A0A426QER3|A0A426QER3_9GAMM GTP cyclohydrolase 1 OS= Guyparkeria sp. SCN-R1 OX=2341113 GN=folE PE=3 SV=1
MAALHEDDFPEPVGADEKRVETIAGAVKTILAELGEDTAREGLVDTPKRVAKALLYLNQGLNQRVESAIGNALFESDNDEMVVVRNIEFYSLCEHHMLPIIGHVDIGYIPQGKVLGLSKLARIVDLYARRLQIQENMTQQIAEAVESATGAAGVAVQVRAAHMCMAMRGVEKVESETITSRMTGQFRNSAATRNEFLQLVAR

SEQ ID NO: 8751 - protein, 187 aa, Gynuella sunshinyii
  misc_feature (1)..(187): tr|A0A0C5W1Q2|A0A0C5W1Q2_9GAMM GTP cyclohydrolase 1 OS= Gynuella sunshinyii YC6258 OX=1445510 GN=folE PE=3 SV=1
MIDKLTENYRDIIVQLGENPDREGLLDTPQRAAKAMAFLTEGYNQSLEEIVNGAIFESEMDEMVVVEGIEFYSLCEHHLLPFIGTASIAYIPDGKVLGLSKFARIVDMFARRLQIQENLTRQIAHAISDITQCKGVGVVLEAKHMCMMMRGVQKQNSVMSTSMMLGSFRKSQATRSEFLTLIGQRKP

SEQ ID NO: 8752 - protein, 176 aa, Gynuella sunshinyii
  misc_feature (1)..(176): tr|A0A0C5VFV0|A0A0C5VFV0_9GAMM GTP cyclohydrolase 1 OS= Gynuella sunshinyii YC6258 OX=1445510 GN=folE PE=3 SV=1
MLNNLGENVEREGLLDTPKRYAKAMMYLTQGYKADIKEVINGALFSSTATGVVVVKDIDFFSMCEHHILPFHGKVHIAYIPSGKVLGLSKFARVVEVFARRLQIQEQLNEQIADAIEDILEPKGVIVSIEAAHMCMSMRGVQKIGSKTLTTVARGELKDDQKCNETLFKFFNSSVS

SEQ ID NO: 8753 - protein, 368 aa, Haematobacter genomosp.
  misc_feature (1)..(368): tr|A0A212AEY2|A0A212AEY2_9RHOB GTP cyclohydrolase FolE2 OS=Haematobacter genomosp. 1 OX=366618 GN=folE2 PE=3 S V=1
MNAPTKPDLTPAAPDREKAKAALDLLRSWAALATPEEVATLDPAIARLLPGREVANYPDLNRSYPADFVADEAYRATLPDLQNGPSSLIVGAHRPIQQVGISNFRLPIRYRLRAGGEISLETSVTGTVSLASGKKGINMSRIMRSFYAHAERSFSFEVMSSVLDDYKADLGSCDARLMMRFSFPARVKALRSGLEGYQYYDIALEMIETDGRRERFVHLDYVYSSTCPCSLELSEHARQVRGQLATPHSQRSVARISVALAGGRTLWFEDLIDICRAAVPTETQVMVKREDEQAFAELNAANPIFVEDAARSFAERLLGDARIGDFRVAASHQESLHSHDAVSILTEGPTFAQRSVDPRFLATLHHSG

SEQ ID NO: 8754 - protein, 368 aa, Haematobacter massiliensis
  misc_feature (1)..(368): tr|A0A086YB82|A0A086YB82_9RHOB GTP cyclohydrolase FolE2 OS=Haematobacter massiliensis OX=195105 GN=folE2 PE=3 SV=1
MNAPTKPDLAPAAPDRQDAKAALDLLRNWAALATPEEVATLDPAIARLLPGREVSNYPDLNRSYPADFVADEAYRATLPDLQNGPSSLIVGAHRPIQQVGISNFRLPIRYRLRAGGEISLETSVTGTVSLASGKKGINMSRIMRSFYAHAERSFSFEVMSSVLDDYKADLGSCDARLMMRFSFPAKVKALRSGLEGYQYYSIALEMIETDGRRERFVHLDYVYSSTCPCSLELSEHARQVRGQLATPHSQRSVARISVALAGGRTLWFEDLIDICRAAVPTETQVMVKREDEQAFAELNAANPIFVEDAARSFAERLLDDARIGDFRVAASHQESLHSHDAVSILTEGPTFAQRSVDPRFLATLHHSG

SEQ ID NO: 8755 - protein, 368 aa, Haematobacter missouriensis
  misc_feature (1)..(368): tr|A0A212ASY3|A0A212ASY3_9RHOB GTP cyclohydrolase FolE2 OS=Haematobacter missouriensis OX=366616 GN=folE2 PE=3 SV=1
MNAPTKPDLTPIAPDREEAKAALDLLRRWAVLATPEEVATLDPAIARLLPGREVSNYPDLNRSYPADFVADEAYRATLPDLQNGPSSLIVGAHRPIQQVGISNFRLPIRYRLRAGGEISLETSVTGTVSLASGKKGINMSRIMRSFYAHAERSFSFEVMSSVLDDYKADLGSCDARLMMRFSFPARVKALRSGLEGYQYYDIALEMIETDGRRERFVHLDYVYSSTCPCSLELSEHARQARGQLATPHSQRSVARISVALAGGRTLWFEDLIDLCRVAVPTETQVMVKREDEQAFAELNAANPIFVEDAARSFAERLMDDARIGDFRVAASHQESLHSHDAVSILTEGPTFSQRSVDPRFLATLHHSG

SEQ ID NO: 8756 - protein, 204 aa, Haematospirillum jordaniae
  misc_feature (1)..(204): tr|A0A143DH27|A0A143DH27_9PROT GTP cyclohydrolase 1 OS= Haematospirillum jordaniae OX=1549855 GN=folE PE=3 SV=1
MSTVQSSVTQGKASERPSRQDAEEAVRTLLRWAGDDPAREGLLETPARVARAWEEWCSGYGNDPEEYLRRTFEEVEGYDEMVILKDITFESHCEHHLAAIIGQAHVAYLPDRRVVGISKLARIVDLYAKRLQIQEKMTAQIAGAIQDVLEPKGVAVVIEASHQCMTTRGVHKTGVNMVTSRMLGAFREDSATRREFLAVISSTR

SEQ ID NO: 8757 - protein, 218 aa, Haemophilus aegyptius
  misc_feature (1)..(218): tr|A0A3S4XY20|A0A3S4XY20_HAEAE GTP cyclohydrolase 1 OS= Haemophilus aegyptius OX=197575 GN=folE PE=3 SV=1
MSKISLDAQNVRNALIEKGIETPMIDPTQAKNERRESIAKHMHEVMKLIGLDLRDDSLEETPNRLAKMFIDEIFSGMDYANFPKMTKIKNQMKVSEMVQVNDITLTSTCEHHFVTIDGKVCVAYYPKDWVIGLSKINRIVSFFAQRPQVQERLTEQLLTAFQTILETDDVAVYVKATHFCVKARGIRDTNSYTVTSAYGGVFLEDRDTRKEFLATVQK

SEQ ID NO: 8758 - protein, 218 aa, Haemophilus ducreyi
  misc_feature (1)..(218): sp|Q7VM90|GCH1_HAEDU GTP cyclohydrolase 1 OS=Haemophilu s ducreyi (strain 35000HP / ATCC 700724) OX=233412 GN=f olE PE=3 SV=1
MSIISSEAQKVRQALIKKGIETPTIELTQDKDSRRAEIQQHMRSVLELLGLDLRDDSLEETPHRLAKMYVDEIFSGLDYATFPKITTIENRMKVSEMVLVDDITLTSTCEHHFVTIDGKVAVAYYPKKWVIGLSKINRVVQFFAQRPQVQERFTEQILTAFQTILETEDVAIYVKATHFCVKCRGIKDSNSYTVTSAFGGVFLDDRETRKEFLNLIHK

SEQ ID NO: 8759 - protein, 218 aa, Haemophilus ducreyi
  misc_feature (1)..(218): tr|A0A448KKG0|A0A448KKG0_HAEDC GTP cyclohydrolase 1 OS= Haemophilus ducreyi OX=730 GN=folE PE=3 SV=1
MSIISSEAQKVRKALIKKGIETPTIELTQDKDSRRAEIEQHMRSVLELLGLDLRDDSLEETPHRLAKMYVDEIFSGLDYATFPKITTIENRMKVSEMVLVDDITLTSTCEHHFVTIDGKVAVAYYPKKWVIGLSKINRVVQFFAQRPQVQERFTEQILTAFQTILETEDVAIYVKAMHFCVKCRGIKDSNSYTVTSAFGGVFLDDRETRKEFLNLIHK

SEQ ID NO: 8760 - protein, 218 aa, [Haemophilus] felis
  misc_feature (1)..(218): tr|A0A1T0B235|A0A1T0B235_9PAST GTP cyclohydrolase 1 OS= [Haemophilus] felis OX=123822 GN=folE PE=3 SV=1
MDKISSEAEKVRNALLQKGIETPMINLSLDKQERRIGIENHMREVMKLIGLDLRDDSLEETPVRLAKMFVDEIFSGLDYANFPKITNIENRMKVSEMVLVNDVTLTSTCEHHFVTIDGKVSVAYYPKKWVIGLSKINRIVSFFAQRPQVQERLTEQILLAFQTILETEDVAVYVKATHFCVKCRGIKDTNSYTVTSAFGGVFLDDRETRKEFISLINK

SEQ ID NO: 8761 - protein, 233 aa, Haemophilus haemoglobinophilus
  misc_feature (1)..(233): tr|A0A377HWA0|A0A377HWA0_9PAST GTP cyclohydrolase 1 OS= Haemophilus haemoglobinophilus OX=733 GN=folE PE=3 SV=1
MFGIFERYNNLWEVVMSNLSPEAIKVRNALIEKGIETPMIDVTQDKDQRRQGIEQHMREVMKLIGLDLSDDSLEETPGRLSKMFIDEIFSGLDYTNFPKITNIENRMKVSEMVLVNDVTLTSTCEHHFVTIDGKVSVAYYPKKWVIGLSKINRVVAFFAQRPQVQERLTEQILLAFQTILETEDVAVYVKAIHFCVKCRGIKDTNSYTVTSAFGGVFLDDRETRKEFLTLINK

SEQ ID NO: 8762 - protein, 218 aa, Haemophilus haemolyticus
  misc_feature (1)..(218): tr|A0A0M3G8C6|A0A0M3G8C6_HAEHA GTP cyclohydrolase 1 OS= Haemophilus haemolyticus OX=726 GN=folE PE=3 SV=1
MSKISLDALNVRHALIEKGIETPMIDPTQAKDERRESIAKHMHEVMKLIGLDLRDDSLEETPNRLAKMFIDEIFSGMDYANFPKMTKIKNQMKVSEMVQVNDITLTSTCEHHFVTIDGKVCVAYYPKDWVIGLSKINRIVSFFAQRPQVQERLTEQLLTAFQTILETDDVAVYVKATHFCVKARGIRDTNSYTVTSAYGGVFLEDRDTRKEFLATVQK

SEQ ID NO: 8763 - protein, 218 aa, Haemophilus haemolyticus
  misc_feature (1)..(218): tr|A0A0M3G233|A0A0M3G233_HAEHA GTP cyclohydrolase 1 OS= Haemophilus haemolyticus OX=726 GN=folE PE=3 SV=1
MSKISLDALNVRNALIEKGIETPMIDPTQAKDERRESIAKHMHEVMKLIGLDLRDDSLEETPNRLAKMFIDEIFSGMDYANFPKMTKIKNQMKVSEMVQVNDITLTSTCEHHFVTIDGKVCVAYYPKDWVIGLSKINRIVSFFAQRPQVQERLTEQLLTAFQTILETDDVAVYVKATHFCVKARGIRDTNSYTVTSAYGGVFLEDRDTRKEFLATVQK

SEQ ID NO: 8764 - protein, 218 aa, Haemophilus influenzae
  misc_feature (1)..(218): sp|A5UEW4|GCH1_HAEIG GTP cyclohydrolase 1 OS=Haemophilu s influenzae (strain PittGG) OX=374931 GN=folE PE=3 SV= 1
MSKISLDALNVRNALIEKGIETPMIDPTQAKNERRESIAKHMHEVMKLIGLDLRDDSLEETPNRLAKMFIDEIFSGMDYANFPKMTKIKNQMKVSEMVQVNDITLTSTCEHHFVTIDGKVCVAYYPKDWVIGLSKINRIVSFFAQRPQVQERLTEQLLTAFQTILETDDVAVYVKATHFCVKARGIRDTNSYTVTYAYGGVFLEDRDTRKEFLATVQK

SEQ ID NO: 8765 - protein, 251 aa, Haemophilus influenzae
  misc_feature (1)..(251): tr|A0A2S9RX49|A0A2S9RX49_HAEIF Nif3-like dinuclear meta l center hexameric protein OS=Haemophilus influenzae OX =727 GN=BV171_00630 PE=4 SV=1
MNNLELEQLINQKLSSDKINDYAPNGLQVEGKTEIKKIITGVTASQALIDYAISKNADAILVHHGYFWKSENPCIRGMKGKRIKALLVNDINLYGYHLPLDVHPELGNNAQLAKLLDIENLQPLEKGSVSIPVWGKLKEPMTGKDFAEKIEKVLNRKPLICIENGPHLIRKIGICTGGGQGYIDLAAEQGCDAFITGEVSEQTIHSAREQGLHFFSAGHHATERYGIKALGEWLAKEYDFDVEFKDIDNPA

SEQ ID NO: 8766 - protein, 218 aa, Haemophilus paracuniculus
  misc_feature (1)..(218): tr|A0A1T0ASV6|A0A1T0ASV6_9PAST GTP cyclohydrolase 1 OS= Haemophilus paracuniculus OX=734 GN=folE PE=3 SV=1
MSQLSLEAQQVRQALLEKGIETPTITLTKDKDSRRAEIQQHLRSVLELLGLDLRDDSLEETPHRLAKMYVDEIFSGLDYATFPKITKIKNQMKVSEMVLVDDITLTSTCEHHFVTIDGKVAVAYYPKNWVIGLSKINRVVQFFAQRPQVQERFTEQLLTAFQTILETDDVAVYVKATHFCVKCRGVKDTNSYTVTSAFGGVFLEDRETRKEFLTLINK

SEQ ID NO: 8767 - protein, 224 aa, Haemophilus parahaemolyticus
  misc_feature (1)..(224): tr|A0A377I1X5|A0A377I1X5_HAEPH GTP cyclohydrolase 1 OS= Haemophilus parahaemolyticus OX=735 GN=folE PE=3 SV=1
MTTISPILGLSDEAQKVRNALLAKGIETPTVPHTKDKDSRRAEIQAHMRSVLELLGLDLQDDSLEETPNRLAKMYVDEIFSGLDYATFPKITNIENRMKVSEMVLVDDITLTSTCEHHFVTIDGKVAVAYYPKKWVIGLSKINRVVQFFAQRPQVQERFTEQILTAFQTILETEDVAVYVKATHFCVKCRGVKDTNSYTVTSAFGGAFLDDRDVRKEFLTLIKK

SEQ ID NO: 8768 - protein, 224 aa, Haemophilus parahaemolyticus
  misc_feature (1)..(224): tr|A0A5C1QR53|A0A5C1QR53_HAEPH GTP cyclohydrolase 1 OS= Haemophilus parahaemolyticus OX=735 GN=folE PE=3 SV=1
MTTISPILGLSDEAQKVRNALLAKGIETPTVPHTKDKDSRRAEIQDHMRSVLELLGLDLQDDSLEETPNRLAKMYVDEIFSGLDYATFPKITNIENRMKVSEMVLVDDITLTSTCEHHFVTIDGKVAVAYYPKKWVIGLSKINRVVQFFAQRPQVQERFTEQILTAFQTILETEDVAVYVKATHFCVKCRGVKDTNSYTVTSAFGGVFLDDRDVRKEFLTLIKK

SEQ ID NO: 8769 - protein, 218 aa, Haemophilus parainfluenzae
  misc_feature (1)..(218): tr|A0A369ZGE5|A0A369ZGE5_HAEPA GTP cyclohydrolase 1 OS= Haemophilus parainfluenzae OX=729 GN=folE PE=3 SV=1
MNAISPDAENVRRALIAKGIETPMIDPTQCKDERRAAIASHMREVMKLIGLDLHDDSLEETPNRLAKMFIDEIFSGMDYANFPKMTKIKNQMKVSEMVQVNDITLTSTCEHHFVTIDGNVAVAYYPKDWVIGLSKINRIVAFFAQRPQVQERLTEQLLTAFQTILETDDVAVYVKATHFCVKARGVKDTHSYTVTSAYGGVFLEDRETRKEFLSSIQK

SEQ ID NO: 8770 - protein, 218 aa, Haemophilus parainfluenzae
  misc_feature (1)..(218): tr|F0EU69|F0EU69_HAEPA GTP cyclohydrolase 1 OS=Haemophi lus parainfluenzae ATCC 33392 OX=888828 GN=folE PE=3 SV =1
MNSISPDAENVRRALVAKGIETPMINPTQCKDERRAAIASHMREVMKLIGLDLRDDSLEETPNRLAKMFIDEIFSGMDYANFPKMTKIKNQMKVSEMVQVNDITLTSTCEHHFVTIDGNVAVAYYPKDWVIGLSKINRIVAFFAQRPQVQERLTEQLLTAFQTILETDDVAVYVKATHFCVKARGVKDTHSYTVTSAYGGVFLEDRETRKEFLSSIQK

SEQ ID NO: 8771 - protein, 224 aa, Haemophilus paraphrohaemolyticus
  misc_feature (1)..(224): tr|A0A369ZL55|A0A369ZL55_9PAST GTP cyclohydrolase 1 OS= Haemophilus paraphrohaemolyticus OX=736 GN=folE PE=3 SV =1
MTTISPILGLSDEAQKVRNALLAKGIETPTVSHTKDKDSRRAEIQAHMRSVLELLGLDLRDDSLEETPNRLAKMYVDEIFSGLDYATFPKITNIENRMKVSEMVLVDDITLTSTCEHHFVTIDGKVAVAYYPKKWVIGLSKINRVVQFFAQRPQVQERFTEQILTAFQTILETEDVAVYVKATHFCVKCRGVKDTNSYTVTSAFGGAFLDDRDVRKEFLTLIKK

SEQ ID NO: 8772 - protein, 224 aa, Haemophilus paraphrohaemolyticus; identical to SEQ ID NO: 8771
  misc_feature (1)..(224): tr|I2NJ71|I2NJ71_9PAST GTP cyclohydrolase 1 OS=Haemophi lus paraphrohaemolyticus HK411 OX=1095743 GN=folE PE=3 SV=1

SEQ ID NO: 8773 - protein, 218 aa, Haemophilus parasuis
  misc_feature (1)..(218): tr|A0A084EYE0|A0A084EYE0_HAEPR GTP cyclohydrolase 1 OS= Haemophilus parasuis OX=738 GN=folE PE=3 SV=1
MSNISPEAQSVRDALLAKGIETPTVCHQKDKDSRRNEIQQHMRAVLELLGLDLRDDSLEETPHRLAKMYMDEIFSGLDYKTFPKITKIKNQMKVSEMVLVDDITLTSTCEHHFVTIDGKVAVAYYPKDWVIGLSKINRVVQFFAQRPQVQERFTEQILTAFQTILETEDVAVYVKATHFCVKCRGVKDTHSQTMTSAFGGVFLQDRDTRKEFLSLINK

SEQ ID NO: 8774 - protein, 218 aa, Haemophilus parasuis; identical to SEQ ID NO: 8605
  misc_feature (1)..(218): tr|A0A143CEK7|A0A143CEK7_HAEPR GTP cyclohydrolase 1 OS= Haemophilus parasuis OX=738 GN=folE PE=3 SV=1

SEQ ID NO: 8775 - protein, 218 aa, Haemophilus pittmaniae
  misc_feature (1)..(218): tr|F9Q5Q4|F9Q5Q4_9PAST GTP cyclohydrolase 1 OS=Haemophi lus pittmaniae HK 85 OX=1035188 GN=folE PE=3 SV=1
MNTISTDAANVRDALLAKGIETPMIDPAQHKDARRAGIAAHMRQVMELIGLDLRDDSLEETPNRLAKMFIDEIFSGMDYANFPKMTKIKNQMKVSEMVQVNDITLTSTCEHHFVTIDGSVAVAYYPRDWVIGLSKINRIVAFFAQRPQVQERLTEQLLTAFQTILETDDVAVYVKATHFCVKARGVKDTHSYTVTSAYGGVFLNDRDTRKEFLASIQK

SEQ ID NO: 8776 - protein, 218 aa, Haemophilus pittmaniae
  misc_feature (1)..(218): tr|A0A377J0A7|A0A377J0A7_9PAST GTP cyclohydrolase 1 OS= Haemophilus pittmaniae OX=249188 GN=folE PE=3 SV=1
MNTISTDAANVRDALLAKGIETPMIDPAQHKDARRAGIAAHMRQVMELIGLDLRDDSLEETPNRLAKMFIDEIFSGMDYANFPKMTKIKNQMKVSEMVQVNDITLTSTCEHHFVTIDGSVAVAYYPKDWVIGLSKINRIVAFFAQRPQVQERLTEQLLTAFQTILETDDVAVYVKATHFCVKARGVKDTHSYTVTSAYGGVFLNDRDTRKEFLASIQK

SEQ ID NO: 8777 - protein, 218 aa, Haemophilus somnus
  misc_feature (1)..(218): sp|Q0I3F6|GCH1_HAES1 GTP cyclohydrolase 1 OS=Haemophilu s somnus (strain 129Pt) OX=205914 GN=folE PE=3 SV=1
MSNLSPEAIKVRNALVEKGIETPMIDLVQDKDQRRQGIEQHMREVIKLIGLDLSDDSLEETPARLSKMFIDEIFSGLDYANFPKITNIENRMKVSEMVLVDDVTLTSTCEHHFVTIDGKVSVAYYPQKWVIGLSKINRVVAFFAQRPQVQERLTQQILLAFQTILETEDVAVYVKATHFCVKCRGIKDTNSYTVTSAFGGVFLDDRETRKEFLTLLKK

SEQ ID NO: 8778 - protein, 218 aa, Haemophilus sp.; identical to SEQ ID NO: 8763
  misc_feature (1)..(218): tr|H1LN80|H1LN80_9PAST GTP cyclohydrolase 1 OS=Haemophi lus sp. oral taxon 851 str. F0397 OX=762965 GN=folE PE= 3 SV=1

SEQ ID NO: 8779 - protein, 218 aa, Haemophilus sp.; identical to SEQ ID NO: 8769
  misc_feature (1)..(218): tr|A0A1F0UEH7|A0A1F0UEH7_9PAST GTP cyclohydrolase 1 OS= Haemophilus sp. HMSC073C03 OX=1739452 GN=folE PE=3 SV=1

SEQ ID NO: 8780 - protein, 218 aa, Haemophilus sputorum
  misc_feature (1)..(218): tr|J5HTE9|J5HTE9_9PAST GTP cyclohydrolase 1 OS=Haemophi lus sputorum HK 2154 OX=1078483 GN=folE PE=3 SV=1
MNIISTEAQKVRQALLAKGIETPTVELTQDKDTRRAEIQSHMRQVMELLGLDLTDDSLEETPHRLAKMYVDEIFSGLDYATFPKITNIENRMKVSEMVLVDDITLTSTCEHHFVTIDGKVAVAYYPKKWVIGLSKINRVVQFFAQRPQVQERFTEQILTAFQTILETDDVAVYVKATHFCVKCRGVKDTNSYTVTSAFGGVFLDDRETRKEFLQLIQK

SEQ ID NO: 8781 - protein, 218 aa, Haemophilus sputorum; identical to SEQ ID NO: 8780
  misc_feature (1)..(218): tr|A0A369YJK8|A0A369YJK8_9PAST GTP cyclohydrolase 1 OS= Haemophilus sputorum OX=1078480 GN=folE PE=3 SV=1

SEQ ID NO: 8782 - protein, 220 aa, Hafnia alvei
  misc_feature (1)..(220): tr|A0A0K0HSD1|A0A0K0HSD1_HAFAL GTP cyclohydrolase 1 OS= Hafnia alvei OX=569 GN=folE PE=3 SV=1
MSSLSKEAVLVHTALEARGLETPLRGEVLDREIRKQRIKEHMTEIMQLLNLDLSDDSLAETPHRIAKMYVDEIFSGLDYANFPKITVIENKMKVDEMVTVRDITLTSTCEHHFVTIDGKATVAYIPKDCVIGLSKINRIVQFFAQRPQVQERLTQQILVALQTLLGTNNVAVSIDATHYCVKARGVRDATSATTTTSLGGLFKSSQNTRQEFLRAVRHHG

SEQ ID NO: 8783 - protein, 220 aa, Hafnia alvei; identical to SEQ ID NO: 8782
  misc_feature (1)..(220): tr|A0A097R0I8|A0A097R0I8_HAFAL GTP cyclohydrolase 1 OS= Hafnia alvei FB1 OX=1453496 GN=folE PE=3 SV=1

SEQ ID NO: 8784 - protein, 220 aa, Hafnia paralvei
  misc_feature (1)..(220): tr|A0A2A2MGT8|A0A2A2MGT8_9GAMM GTP cyclohydrolase 1 OS= Hafnia paralvei OX=546367 GN=folE PE=3 SV=1
MSLLSKEAAQVHAALEARGLETPLRGEVLDRETRKQRIKEHMTEIMQLLNLDLTDDSLAETPHRIAKMYVDEIFSGLDYANFPKITVIENKMKVDEMVTVRDITLTSTCEHHFVTIDGKATVAYIPKDCVIGLSKINRIVQFFAQRPQVQERLTQQILVALQTLLGTNNVAVSIDATHYCVKARGVRDATSATTTTSLGGLFKSSQNTRQEFLRAVRHHG

SEQ ID NO: 8785 - protein, 304 aa, Hahella chejuensis
  misc_feature (1)..(304): sp|Q2SLC0|GCH4_HAHCH GTP cyclohydrolase FolE2 OS=Hahell a chejuensis (strain KCTC 2396) OX=349521 GN=folE2 PE=3 SV=1
MQIVRALPDIAKTRTEFETYTLQWVGMEDIAVPLTLNIGGGKQQSLPAKANVYVSLDDAAEKGIHMSRLHAILNQLASQVCDKEGLDLLLRNMVASQGKISRSAKVELVFDLLLPKPSLLSNETGFQTYRIEIGGQCLSEKYDYSLKITVPYSSTCPCSAALSRQLFSDAIDNEFSTSRIDKQELLSWALTSTVATPHSQRSYAYLNLLLGNHGWPSLSSFIMQIEEAIGTPVQTMVKRTDEQEFARLNADNLMFCEDAARNVKTLLEQSSWIEDYWFKVEHQESLHAHNAVVIDQKYSKGAML

SEQ ID NO: 8786 - protein, 188 aa, Hahella chejuensis
  misc_feature (1)..(188): sp|Q2SPJ2|GCH1_HAHCH GTP cyclohydrolase 1 OS=Hahella ch ejuensis (strain KCTC 2396) OX=349521 GN=folE PE=3 SV=1
MLDKLVAQYSAIIESLGEDVNREGLRDTPKRAAKAMQFLCRGYNQSLEEVTNGAVFESDTDEMVLVKDIELYSLCEHHLLPFIGRCHIAYIPNGKVLGLSKFARIVDMFARRMQIQENLTRQIAEAVLEVTNAHGVGVIIEARHMCMMMRGVEKQNSVMSSSVMLGSMRNNPSTRSEFLTLVHSRRAL

SEQ ID NO: 8787 - protein, 188 aa, Hahella sp.
  misc_feature (1)..(188): tr|A0A451F6R6|A0A451F6R6_9GAMM GTP cyclohydrolase 1 OS= Hahella sp. KA22 OX=1628392 GN=folE PE=3 SV=1
MLDKLVAQYSAIIESLGEDVNREGLRDTPKRAAKAMQFLCRGYNQSLEEVTNGAIFESDTDEMVLVKDIELYSLCEHHLLPFIGRCHIAYIPNGKVLGLSKFARIVDMFARRMQIQENLTRQIAEAVLEVTNAHGVGVIIEARHMCMMMRGVEKQNSVMSSSVMLGSMRNNPSTRSEFLTLVHSRRAL

SEQ ID NO: 8788 - protein, 188 aa, Hahella sp.
  misc_feature (1)..(188): tr|A0A261GUH0|A0A261GUH0_9GAMM GTP cyclohydrolase 1 OS= Hahella sp. CCB-MM4 OX=1926491 GN=folE PE=3 SV=1
MLDKLAEHYRAIIEGLGEDANREGLVDTPMRAAKAMQFLCKGYDQDLETIVNGAVFESDTDEMVMVKDIELYSMCEHHMLPFIGRCHIAYLPRGRVLGLSKFARIVDMYARRMQIQENLTKQIAEAVQSVTNARGVGVIIEARHMCMMMRGVEKQNSSMVSSVMLGSMRNDISTRAEFLNLAKGSAGL

SEQ ID NO: 8789 - protein, 186 aa, Hahellaceae bacterium
  misc_feature (1)..(186): tr|A0A2D8RAU4|A0A2D8RAU4_9GAMM GTP cyclohydrolase 1 OS= Hahellaceae bacterium OX=2048971 GN=folE PE=3 SV=1
MSDTLAGHYKSILELIGEDTTREGLRDTPARAAKAMEYLCKGYNDTLAQIVNNAIFESDTEEMVVVKDIELYSLCEHHLLPFIGRCHIAYIPNGKVLGLSKFARIVDMYARRAQIQENLTKQIAEAVEQVTGAYGVGVIIEAKHLCMMARGVEKQNSSMMSSVMLGSIRTNPATRTEFLTLVKMNK

SEQ ID NO: 8790 - protein, 307 aa, Halalkalibacillus sp.
  misc_feature (1)..(307): tr|A0A2I0QWM0|A0A2I0QWM0_9BACI GTP cyclohydrolase FolE2 OS=Halalkalibacillus sp. B3227 OX=2018042 GN=folE2 PE= 3 SV=1
MNEVSTKKQLPTKSDRHKLFGSVDPGPRTKPEEKSEMVDLQNTKKDFLFELDAVGISNVKHPVSIQSGIAPNKQSTIGTFYFASTISQDSKGTNMSRFTEQLQSYSQNEFEVNIPTLKKFVYELHTRLNQRDAELSVSFPWFFERKAPYTGQSGMNHAEAWMDVRYDQDTGYDITVGLTGKVTTLCPCSKEISEYSAHNQRGNLTMEVKLDETFDDSKVDWKEVLLEAAESNASARIHPVLKRPDEKMVTEQAFENPRFVEDMVRLVAADLYEMEFVEKFYVECVNEESIHLHDAVASITYDKMSDK

SEQ ID NO: 8791 - protein, 333 aa, Halanaerobium saccharolyticum
  misc_feature (1)..(333): tr|M5DYN2|M5DYN2_9FIRM GTP cyclohydrolase I type 2 OS=H alanaerobium saccharolyticum subsp. saccharolyticum DSM 6643 OX=1293054 GN=HSACCH_00540 PE=3 SV=1
MDQFKRDVQKEEPRLVVGLNRVGVKNIQKIIRIKNNNKENLFYSTIDIFVDLLPQQKGAHMSRFDETITQIIDETIQKKVMVIEDFATYMAEMARKRQNAHRAEVRIKAKYPVEEIAPASEKKTQKINTIMGRAVSTENGSRHLIGVETNGMTVCPCAQQMIKEYAEDKLEKEGFTKEQLEKVFKHIPMPSHNQRGTGILMIGSEKKIKAEKLVRIVENSMSSKVLDLLKRVDELEIVRNAHLNPRFVEDVVREMVALTLKEFDFLSDDDYFLAKQTNYEGIHSYEVYAERSGTIGEIKEEIKKAENDYLDEDYIINCNNTSSDEWLESNGGC

SEQ ID NO: 8792 - protein, 201 aa, Haliangium ochraceum
  misc_feature (1)..(201): tr|D0LRN8|D0LRN8_HALO1 GTP cyclohydrolase I OS=Haliangi um ochraceum (strain DSM 14365 / JCM 11303 / SMP-2) OX= 502025 GN=Hoch_6562 PE=4 SV=1
MEKNQRALDLFTKGFESILEGIGELGYDITDANFADTAPRAAKGLHELIHDQAKAQDEVKKLLSKTFPARYTEMVISKHNVAFGVCPHHILPVIYRISLAYIPVKKVLGLSKLSRLARLYARSPMLQEDLTHELCRTLHEDLESEGAAVYIEGLHMCMAARGIGAHEARLVTSAVRGVFLNEPATRNEFIKLVTTAHPPLV

SEQ ID NO: 8793 - protein, 186 aa, Haliea salexigens
  misc_feature (1)..(186): tr|A0A3C1KRB7|A0A3C1KRB7_9GAMM GTP cyclohydrolase 1 (Fr agment) OS=Haliea salexigens OX=287487 GN=DCP75_16100 P E=3 SV=1
METALAGNIPYPSKMSAEAAMVRKALLERGLETPMIQNGLTRDEKYRRIVQSFTEITRTLGLDLNDDSLAETPHRIAKMYVDEIFSGLDYAQFPKISVIANKMQVEEMVQVDNIDVVSTCEHHFVTIDGLARVAYIPKDKVIGLSKINRIVRFFAQRPQVQERLTQQILVALQALLDTDDVAVTID

SEQ ID NO: 8794 - protein, 182 aa, Haliea salexigens
  misc_feature (1)..(182): tr|A0A3C1KJU0|A0A3C1KJU0_9GAMM GTP cyclohydrolase 1 OS= Haliea salexigens OX=287487 GN=folE PE=3 SV=1
MEQEWARIIEAIGEDLSRPGLADTPKRAAKAFEFLTRGYHQSVEDVVNNALFPSDSSEMVLVQNVELYSLCEHHVLPFIGKCHVAYIPTGKVLGLSKVARIVDVFARRLQIQESLTTQIAQTIMDVTEAEGVGVIIEAQHMCMMMRGVEKQNSVMKTSAMLGSFRTEQKTRDEFLSLLQLGR

SEQ ID NO: 8795 - protein, 225 aa, Haliea sp.
  misc_feature (1)..(225): tr|A0A2D5FCM7|A0A2D5FCM7_9GAMM GTP cyclohydrolase 1 OS= Haliea sp. OX=1932666 GN=folE PE=3 SV=1
METALANPLEFTENLSAEAALVRRALLEKGLETPMVHNGLSRDEKYRRLVAAFTDVTRTLGLDLNDDSLQETPHRIAKMYVDEIFSGLDYRHFPKISVIDNKMQVEEMVQIDDIDLVSTCEHHFVTIDGTAKVAYIPRDKIIGLSKINRIVRFFAQRPQVQERLTQQVLVALQALLGTDDVAVSINAVHYCVKSRGVMDSNSRTRTTALGGTFKQDPSTRAEFLT

SEQ ID NO: 8796 - protein, 225 aa, Haliea sp.
  misc_feature (1)..(225): tr|A0A2D4TEI0|A0A2D4TEI0_9GAMM GTP cyclohydrolase 1 OS= Haliea sp. OX=1932666 GN=folE PE=3 SV=1
METALAGNIPYPSKMSAEAAMVRKALLERGLETPMIQNGLTRDEKYRRIVQSFTEITRTLGLDLNDDSLAETPHRIAKMYVDEIFSGLDYAQFPKISVIANKMQVEEMVQVDNIDVVSTCEHHFVTIDGLARVAYIPKDKVIGLSKINRIVRFFAQRPQVQERLTQQILVALQALLDTDDVAVTIDAVHYCVKSRGVMDSNSRTRTTSLGGAFKSNASTRAEFLN

SEQ ID NO: 8797 - protein, 228 aa, Halieaceae bacterium
  misc_feature (1)..(228): tr|A0A2E6YME6|A0A2E6YME6_9GAMM GTP cyclohydrolase 1 OS= Halieaceae bacterium OX=2026743 GN=folE PE=3 SV=1
MSINRAAPSIATPLPGSLTDEAIAVRGALLERGLETPMINNGLNRDQRYEVIREAFGDIMNALGLDLRDDSLEETPHRIAKMYVDEVFGGLDYSQFPKITVIENKMNVEEMVCVEDIDLTSTCEHHFVTIDGSAKVAYIPNEKVIGLSKINRLVRFFAQRPQVQERLTQQVLVAMQTLLGTDNVAVTISAVHYCVKARGVKDGNSSTRTTSLGGVFKTDPASRAEFLS

SEQ ID NO: 8798 - protein, 53 aa, Halieaceae bacterium
  misc_feature (1)..(53): tr|A0A355SNH4|A0A355SNH4_9GAMM GTP cyclohydrolase I Fol E (Fragment) OS=Halieaceae bacterium OX=2026743 GN=DD45 9_05695 PE=4 SV=1
EGVGVIIEAQHMCMMMRGVEKQNSVMKTSAMLGSFRTEQKTRDEFLSLLQLGR

SEQ ID NO: 8799 - protein, 182 aa, Halioglobus japonicus
  misc_feature (1)..(182): tr|A0A2N5YF51|A0A2N5YF51_9GAMM GTP cyclohydrolase 1 OS= Halioglobus japonicus OX=930805 GN=folE PE=3 SV=1
MEKNWASIIEAIGEDLNRPGLVDTPKRAAKAFEFLTRGYHQSVEEVVNNALFPSDSSEMVLVQDIELYSLCEHHLLPFIGKCHVAYIPTGQVLGLSKVARIVDVFARRLQIQESLTTQIAKTIMEVTGAEGVGVIIEARHMCMMMRGVEKQNSVMKTSAMLGSFRKSQVTREEFLQLLRLST

SEQ ID NO: 8800 - protein, 225 aa, Halioglobus japonicus
  misc_feature (1)..(225): tr|A0A2N5YDX2|A0A2N5YDX2_9GAMM GTP cyclohydrolase 1 OS= Halioglobus japonicus OX=930805 GN=folE PE=3 SV=1
MNAITSPALNREADFSPEALAVREALIAHGLETPLVANGLSSEEQYKRLQQSFTDIMNVLGLDLRDDSLSETPHRMASMYLNDLFAGLDYGTFPKISSIENKMGVDEMVLIDDIELISTCEHHFVTIDGFARVAYVPNERVIGLSKINRLVRFFARRPQVQERLTRQIQVALQTLLETDDVAVLVQATHYCVKSRGVMDASSSTRTQALGGVFRTNDNERRSFLG

SEQ ID NO: 8801 - protein, 180 aa, Halioglobus lutimaris
  misc_feature (1)..(180): tr|A0A2N5X2W3|A0A2N5X2W3_9GAMM GTP cyclohydrolase 1 OS= Halioglobus lutimaris OX=1737061 GN=folE PE=3 SV=1
MEENWANIITAIGEDLNRPGLVDTPARAARAFEFLTRGYQQSVDEVVNEALFPSESSEMVLVQNVELYSLCEHHLLPFIGRCHVAYIPTGKVLGLSKVARLVDVFARRLQIQESLTSQIAETIMTVTGAEGVGVIIEARHMCMMMRGVEKQNSVMKTSAMLGSFREHQATRDEFLQLLQM

SEQ ID NO: 8802 - protein, 227 aa, Halioglobus lutimaris
  misc_feature (1)..(227): tr|A0A2N5X6S5|A0A2N5X6S5_9GAMM GTP cyclohydrolase 1 OS= Halioglobus lutimaris OX=1737061 GN=folE PE=3 SV=1
MKTALMESIAAPVQALSEDARRVRDALVEHGLETPMLHNGLTRDQKVERIRDAFVDIAQALELDLTDDSLCDTPKRIARMYVDEIFSGLDYSRFPKATAIENKMGVDEMVRVDDITLVSTCEHHFITIDGSARVAYVPKGRVIGLSKINRIVRFFAQRPQVQERLTRQIMVALQTLLGTEDVAVVIDAAHYCVKARGVMDATSSTRTSALGGQFRHDERCRAEFLTS

SEQ ID NO: 8803 - protein, 180 aa, Halioglobus sp.
  misc_feature (1)..(180): tr|A0A3L7DZG4|A0A3L7DZG4_9GAMM GTP cyclohydrolase 1 OS= Halioglobus sp. U0301 OX=2283635 GN=folE PE=3 SV=1
MEQHWAEIIKAIGEDLDRPGLHDTPKRAAKAFEFLTRGYQQSVDEVVNNALFPSDSSEMVLVQNVELYSLCEHHLLPFIGKCHVAYIPTGKVLGLSKVARIVDLFARRLQIQESLTTEIAQTIMDVTDAEGVGVIIEARHMCMMMRGVEKQNSVMKTSAMLGSFRDSQVTREEFLQILQM

SEQ ID NO: 8804 - protein, 227 aa, Halioglobus sp.
  misc_feature (1)..(227): tr|A0A5B0X4Z9|A0A5B0X4Z9_9GAMM GTP cyclohydrolase 1 OS= Halioglobus sp. NY5 OX=2606449 GN=folE PE=3 SV=1
MKTAVMESIASPVHALSEDARKVRDALVEHGLETPMLRNGLTRDQKVERIREAFVDIAQALELDLTDDSLCDTPNRIAKMYVDEIFSGLDYSRFPKATAIDNKMGVDEMVRVDDITLVSTCEHHFITIDGTARVAYIPKGRVIGLSKINRIVRFFAQRPQVQERLTRQVMVALQTLLGTDDVAVVIDAAHYCVKARGVMDATSSTRTSALGGQFRHDERRRSEFLAG

SEQ ID NO: 8805 - protein, 226 aa, Haliscomenobacter hydrossis
  misc_feature (1)..(226): tr|F4L522|F4L522_HALH1 GTP cyclohydrolase 1 OS=Haliscom enobacter hydrossis (strain ATCC 27775 / DSM 1100 / LMG 10767 / O) OX=760192 GN=folE PE=3 SV=1
MVTTDNTLDLVLGQKAQTMGDNHISTGVETPLRPDAFDMNDKEKMEIIAHHFAAIMDTLGLDLNDDSLQDTPKRVAKMFVQEIFHGLNPANKPEISAFDNSYDYKRMLVEKNITVKTFCEHHFLPITGKAHVGYVSNGKVIGLSKLNRIVDYYARRPQVQERMTKQILLALQEALDTKDVIIVVDAKHMCVSHRGIQHDESTTLTLEYSGCFENNDMRREFMDCLK

SEQ ID NO: 8806 - protein, 195 aa, Haloactinobacterium album
  misc_feature (1)..(195): tr|A0A1H5MRR8|A0A1H5MRR8_9MICO GTP cyclohydrolase 1 OS= Haloactinobacterium album OX=648782 GN=folE PE=3 SV=1
MSDAGTIGSYDAAAVERAVRDLLVAVGEDPEREGLRDTPGRLAKAYAEIFVGLRQRPEDVVQTFFDIDHEEMVLVRDIEVYSTCEHHLLPFHGVAHVGYIPSESGTVTGLSKLARLVDVFAKRPQVQERLTTQVADALVELLDARGVIVVIECEHLCMSMRGVRKPGSRTVTSAVRGLMRNTATRAEAMSLIARG

SEQ ID NO: 8807 - protein, 191 aa, Haloactinopolyspora alba
  misc_feature (1)..(191): tr|A0A2P8DEY2|A0A2P8DEY2_9ACTN GTP cyclohydrolase 1 OS= Haloactinopolyspora alba OX=648780 GN=folE PE=3 SV=1
MTTTANSPAVDAAALMLGQLGLYDPDSDASRDTPRRLVQALTEMTAGQHVDPDRHLKTTFPPESDDPGLIVVTAVPFISVCEHHLLPFTGTATVGYLPSAGARIVGLSKLSRVVQEYAARPQVQERLGQQVVDALTRHLDTRAAGCVIRSAHSCMTHRGARATGAEMVTSHLAGQLRTDPAMRSEFMALTR

SEQ ID NO: 8808 - protein, 204 aa, Haloactinopolyspora alba
  misc_feature (1)..(204): tr|A0A2P8EFQ6|A0A2P8EFQ6_9ACTN GTP cyclohydrolase 1 OS= Haloactinopolyspora alba OX=648780 GN=folE PE=3 SV=1
MEADGESGELELSSSARPFDYERAEAAVRELLLAVGEDPERDGLAQTPERVARAYEEMFRGLRQDPSAALTTTFELGHDEMVLVKDIELASMCEHHLVPFYGYAHIGYVPGSDGRIAGLSKLARLVDVFAKRPQVQERLTSQIADSLRDLLKPGGVIVVIEAEHLCMTMRGVRKPGAKTLTSAVRGQLRDPATRSEAMSLIIGR

SEQ ID NO: 8809 - protein, 238 aa, Haloactinospora alba
  misc_feature (1)..(238): tr|A0A543NMX1|A0A543NMX1_9ACTN GTP cyclohydrolase 1 OS= Haloactinospora alba OX=405555 GN=folE PE=3 SV=1
MSPAGGHQPGSGQNPEPSAAGPEHPVTPGEGGVPAEPDPETPLVAPASEGVDHGRLEKAVREILLAIGEDPDREGLRDTPSRVARAYTEQFAGLHQQPEDVLTTVFEAGHEEMVLVKDIELYSTCEHHLVPFYGSAHVGYIPNSQGQITGLSKLARLVDVYARRPQVQERLTTEIADALMENLAPRGVIVVIQAEHLCMTMRGVRKPGAKTVTSAVRGDFRSRDRTRSEAMSLILGDG

SEQ ID NO: 8810 - protein, 190 aa, Haloarcobacter mediterraneus
  misc_feature (1)..(190): tr|A0A4Q1AZA8|A0A4Q1AZA8_9PROT GTP cyclohydrolase 1 OS= Haloarcobacter mediterraneus OX=2023153 GN=folE PE=3 SV =1
MSKELEFENSVKNILEYIGEDVNREGLEKTPSRVRKAFEFMCGGYKQDPKEIINQALFTSTNDEMVVIKDIEFYSMCEHHMLPIIGKAHIAYIPDGKVVGLSKIPRIVDVFARRLQIQEQMTEQICDALHEALNPKGVAVMIDARHMCMEMRGVEKICSTTVTSALRGLFKREKTTKDEFLSIVAQSLHK

SEQ ID NO: 8811 - protein, 310 aa, Halobacillus aidingensis
  misc_feature (1)..(310): tr|A0A1H0N8P1|A0A1H0N8P1_HALAD GTP cyclohydrolase FolE2 OS=Halobacillus aidingensis OX=240303 GN=folE2 PE=3 SV =1
MNKTELNQNKQLPSKKERHKLFGSVEPGPRTKPMEKDQMADLQNSKKDFLFDIDMVGISSVKHPIRIPSTMTPEIQTTIGTFSFGSSIAQGSKGTNMSRFTEQLDKYHNEGFAMDIATLKQFTEELAGRLKQTDAEVEVTFPWFFERKGPYSGLAGMNHADATIRVEYDKETGHDVTVTLTGKITTLCPCSKEISEYSAHNQRGNVTMSVKLTDDFKEQEIDWKAALLEAAESNASARIHPVLKRPDEKMVTEQAYENPRFVEDIVRLVAADLYEYSFVEAFTVKCRNEESIHLHDAVASLSYDKKKEAE

SEQ ID NO: 8812 - protein, 310 aa, Halobacillus alkaliphilus
  misc_feature (1)..(310): tr|A0A1I2K2G5|A0A1I2K2G5_9BACI GTP cyclohydrolase FolE2 OS=Halobacillus alkaliphilus OX=396056 GN=folE2 PE=3 S V=1
MNKTELNHNKQLPSKEERHQLFGSVKPGPRTKPVDKDKMADLQNSKKDFLFDIDMVGISNVKHPIRIPSKLTPEIQTTIGTFSFGSSIRKGSKGTNMSRFTEQLDKYHNEGFAIDIATLKGFTEELAGRLKQKDAEVEVHFPWFFERKGPYSDLAGMNYADATIRDEYKEETGHDVTVTLTGKITTLCPCSKEISEYSAHNQRGNVSMTVTLTDDFDEQEIDWKAALLEAAESNASARIHPVLKRPDEKMVTEQAYENPRFVEDIVRLVAADLYEYEFVEAFTVTCRNEESIHLHDAVATLSYDKKQEAE

SEQ ID NO: 8813 - protein, 310 aa, Halobacillus dabanensis
  misc_feature (1)..(310): tr|A0A1I3YC81|A0A1I3YC81_HALDA GTP cyclohydrolase FolE2 OS=Halobacillus dabanensis OX=240302 GN=folE2 PE=3 SV= 1
MNKTDLNQIKKLPSKKERHKLFGSIEPGPRTKPVEKDQMADLQNSKKDFLFDIDMVGISNVKHPIRIPSQLTPEIQTTIGTFSFGSSISQGSKGTNMSRFTEQLDKYHNEGFAVDIATLKQFTEELAGRLKQSDAEVEVTFPWFFERKGPYSNLTGMNHADATIRVEYDVETGHDITVTLTGKITTLCPCSKEISEYSAHNQRGNVTMSVKLTDDFDEQDIDWKTALLEAAESNASARIHPVLKRPDEKMVTEQAYENPRFVEDIVRLVAADLYEYPFVESFTVHCRNEESIHLHDAVATLSYDKKQEEK

SEQ ID NO: 8814 - protein, 310 aa, Halobacillus faecis
  misc_feature (1)..(310): tr|A0A511WSA1|A0A511WSA1_9BACI GTP cyclohydrolase FolE2 OS=Halobacillus faecis OX=360184 GN=folE2 PE=3 SV=1
MNKTELNQNKQLPSKKERHKLFGSVEPGPRTKPMEKDQMADLQNSKKDFLFDIDMVGVSNVKHPIRIPSTMTPEIQTTIGSFSFGSSITQGSKGTNMSRFTEQLDKYHNEGFAVDIVTLKQFTEELAGRLKQSDAEVEVSFPWFFERKGPYSGLAGMNHADATIRVEYDKETGHDVTVSLTGKITTLCPCSKEISEYSAHNQRGNVTMSVKLTDDFKEQEIDWKAALLEAAESNASARIHPVLKRPDEKMVTEQAYENPRFVEDIVRLVAADLYEYSFVEAFTVKCRNEESIHLHDAVATLSYDKKKEAE

SEQ ID NO: 8815 - protein, 310 aa, Halobacillus halophilus
  misc_feature (1)..(310): tr|I0JMY0|I0JMY0_HALH3 GTP cyclohydrolase FolE2 OS=Halo bacillus halophilus (strain ATCC 35676 / DSM 2266 / JCM 20832 / NBRC 102448/ NCIMB 2269) OX=866895 GN=yciA PE= 3 SV=1
MNKTELNHNKQLPSKEERHQLFGSVNPGPRTKPVDKDKMADLQNSKKDFLFDIDMVGISNVKHPIRIPSKLTPEIQTTIGTFSFGSSIVKGSKGTNMSRFTEQLDKYHNEGFAIDIATLKGFTEELAGRLKEKDAEVEVHFPWFFERKGPYSDLAGMNYADATIRDEYREETGHDVTVTLTGKITTLCPCSKEISEYSAHNQRGNVSMTVTLTDDFDEQEIDWKAALLEAAESNASARIHPVLKRPDEKMVTEQAYENPRFVEDIVRLVAADLYELEFVEAFSVTCRNEESIHLHDAVATLSYDKKQEAE

SEQ ID NO: 8816 - protein, 310 aa, Halobacillus karajensis
  misc_feature (1)..(310): tr|A0A024P1B6|A0A024P1B6_9BACI GTP cyclohydrolase FolE2 OS=Halobacillus karajensis OX=195088 GN=folE2 PE=3 SV= 1
MNKTELSQNKQLPSKKERHKLFGSVDPGPRTKPMEKDQMADLQNSRKDFLFDIDMVGISNVKHPIRIPSTLTPEIQTTIGTFSFGSSISQGSKGTNMSRFTEQLDKYHNEGFAIDIATLKEFTEELAGRLKQTDAEVEVSFPWFFERKGPFSGLTGMNHADATIRVEYDIHSGHDVTVTLTGKITTLCPCSKEISEYSAHNQRGNVTMSVKLTDDFDEQKTDWKAALLEAAESNASARIHPVLKRPDEKMVTEQAYENPRFVEDIVRLVAADLYEYSFVEAFQVQCRNEESIHLHDAVATVSYDKKRESK

SEQ ID NO: 8817 - protein, 310 aa, Halobacillus litoralis
  misc_feature (1)..(310): tr|A0A410M854|A0A410M854_9BACI GTP cyclohydrolase FolE2 OS=Halobacillus litoralis OX=45668 GN=folE2 PE=3 SV=1
MNKTELNQIKQLPSKEERHKLFGSVDPGPRTKPVEKDRMADLQNSKKDFLFDIDMVGISNVKHPIRIPSGLTPQIQTTIGTFSFGSSIAKGSKGTNMSRFTEQLDKYHNEGFAIDIETLKGFTEELAARLKQTDAEVEVTFPWFFERKGPYSDLAGMNHADATIRVEYDQETGHDVTVTLTGKITTLCPCSKEISEYSAHNQRGNVTMCVKLTDDFDEQEQDWKSALLEAAESNASARIHPVLKRPDEKMVTEQAFENPRFVEDIVRLVAADLYEYEFVESFTVTCRNEESIHLHDAVATLSYDKKQEIL

SEQ ID NO: 8818 - protein, 310 aa, Halobacillus mangrovi
  misc_feature (1)..(310): tr|A0A1W5ZVR3|A0A1W5ZVR3_9BACI GTP cyclohydrolase FolE2 OS=Halobacillus mangrovi OX=402384 GN=folE2 PE=3 SV=1
MNKTELNHNKSLPSKEERHKLFGSVKPGPRTKPIDKKGMADLQNSKKDFLFDIDMVGISNVKHPIRIPSQLTPEIQTTIGTFSFGSSIAQGSKGTNMSRFTEQLDQYHNEGFAVDIATMKEFTKELAGRLKQNDSEVEVTFPWFFERKGPYSDLTGMNYADATIRVEYHKETGHDITVSLTGKITTLCPCSKEISEYSAHNQRGNVTMTIKLTDDFNEQEVDWKAALLEAAESNASARIHPVLKRPDEKMVTEQAYENPRFVEDIVRLVAADLYEYDFVESFTVMCRNEESIHLHDAVASLSYDKKQERE

SEQ ID NO: 8819 - protein, 310 aa, Halobacillus salinus
  misc_feature (1)..(310): tr|A0A4Z0H439|A0A4Z0H439_9BACI GTP cyclohydrolase FolE2 OS=Halobacillus salinus OX=192814 GN=folE2 PE=3 SV=1
MNKTELQQNKSLPSKQERHKLFGSVEPGPRTKPIDKNKMADLQNSKKDFLFDIDMVGISNVKHPISIPSTMTPEIQTTIGTFSFGSSIAKGSKGTNMSRFTEQLDKYHREGFAIDLTTLKTFTEELAGRLKESDAEVEVSFPWFFERKGPYSDLSGMNHAHATIRVEYDEKTGHDITCTLTGTITTLCPCSKEISEYSAHNQRGNVTMSVKLTDDFDEQKTDWKAALLEAAESNASARIHPVLKRPDEKMVTEQAYENPRFVEDIVRLVAADLYEYDFVEAFEVTCRNEESIHLHDAVASLSYDKKQELK

SEQ ID NO: 8820 - protein, 310 aa, Halobacillus sp.
  misc_feature (1)..(310): tr|A0A0B0D956|A0A0B0D956_9BACI GTP cyclohydrolase FolE2 OS=Halobacillus sp. BBL2006 OX=1543706 GN=folE2 PE=3 S V=1
MNKTELNHNKSLPSKEERHKLFGSVEPGPKTKPVDKKGMADLQNSKKDFLFDIDMVGISNVKHPIRIPSQLNPEIQTTIGTFSFGSSIAQGSKGTNMSRFTEQLDQYHNEGFAVDISTMKEFTEELSGRLKQENAEVEVSFPWFFERKGPYSDLAGMNYADATIRVEYHKQTGHDVTVSLTGKITTLCPCSKEISEYSAHNQRGNVTMTVKLTDDFNEQEIDWKAALLEAAESNASARIHPVLKRPDEKMVTEQAYENPRFVEDIVRLVAADLYEYTFIESFTVKCRNEESIHLHDAVASLSYDKKQENE

SEQ ID NO: 8821 - protein, 310 aa, Halobacillus sp.
  misc_feature (1)..(310): tr|A0A3S4DVW6|A0A3S4DVW6_9BACI GTP cyclohydrolase FolE2 OS=Halobacillus sp. SKP4-6 OX=2498856 GN=folE2 PE=3 SV =1
MNKTELQQQKQLPSKEERHKLFGSVKPGPRTKPVEKDKMADLQNSKKDFLFDIDVVGISNVKHPIRIPSQLTPEIQTTIGTFSFGSSIAKGSKGTNMSRFTEQLDKYHNEGFAVDIETLKQFTEELAGRLKETDAEVEVNFPWFFERRGPASDLAGMNHADATIRVEYDEKTGHDVTVSLTGKITTLCPCSKEISEYSAHNQRGNVTMTVKLTDDFDEQETDWKAALLEAAESNASARIHPVLKRPDEKMVTEQAYENPRFVEDIVRLVAADLYEYSFVESFTVGCRNEESIHLHDAVASLSYDKKQELE

SEQ ID NO: 8822 - protein, 310 aa, Halobacillus trueperi
  misc_feature (1)..(310): tr|A0A3E0J9I6|A0A3E0J9I6_9BACI GTP cyclohydrolase FolE2 OS=Halobacillus trueperi OX=156205 GN=folE2 PE=3 SV=1
MNKTELNQNKQLPSKKERHKLFGSVEPGPRTKPMEKDQMADLQNSKKDFLFDIDMVGISSVKHPIRIPSTMTPEIQTTIGTFSFGSSIAQGSKGTNMSRFTEQLDKYHNEGFAVDIATLKQFTEELAGRLKQTDAEVEVTFPWFFERKGPYSGLAGMNHADATIRVEYDKETGHDVTVTLTGKITTLCPCSKEISEYSAHNQRGNVTMSVKLTDDFKEQEIDWKAALLEAAESNASARIHPVLKRPDEKMVTEQAYENPRFVEDIVRLVAADLYEYSFVEAFTVKCRNEESIHLHDAVATLSYDKKQEAE

SEQ ID NO: 8823 - protein, 310 aa, Halobacillus trueperi
  misc_feature (1)..(310): tr|A0A3D8VGI5|A0A3D8VGI5_9BACI GTP cyclohydrolase FolE2 OS=Halobacillus trueperi OX=156205 GN=folE2 PE=3 SV=1
MNKTELNQNKQLPSKKERHKLFGSVEPGPRTKPMEKDQMADLQNSKKDFLFDIDMVGISSVKHPIRIPSTMTPEIQTTIGTFSFGSSIAQGSKGTNMSRFTEQLDKYHNEGFAVDIATLKQFTEELAGRLKQTDAEVEVTFPWFFERKGPYSGLAGMNHSDATIRVEYDKETGHDVTVTLTGKITTLCPCSKEISEYSAHNQRGNVTMSVKLTDDFKEQEIDWKAALLEAAESNASARIHPVLKRPDEKMVTEQAYENPRFVEDIVRLVAADLYEYSFVEAFTVKCRNEESIHLHDAVASLSYDKKKEAE

SEQ ID NO: 8824 - protein, 202 aa, Halobacteriovorax sp.
  misc_feature (1)..(202): tr|A0A2E6H7R5|A0A2E6H7R5_9PROT GTP cyclohydrolase 1 OS= Halobacteriovorax sp. OX=2020862 GN=folE PE=3 SV=1
MDFEINKDNNDKTFPGNEKEAEEALATVIKYLGEDITREGLRDTPKRILKSYKRLFGGYLQNVDEIMTTFEEDNVIPHDQIILLKDIEFYSTCEHHFLPFVGKAHVAYIPRDKVVGISKLARIVEIYSRRLQIQERIGNEVTQALMEKLNAKGSACIIESKHFCMTCRGVEKQNSVMVTSSLRGAFLEKIETRQELMTLIKN

SEQ ID NO: 8825 - protein, 196 aa, Halobacteriovorax sp.
  misc_feature (1)..(196): tr|A0A2E5JHB3|A0A2E5JHB3_9PROT GTP cyclohydrolase 1 OS= Halobacteriovorax sp. OX=2020862 GN=folE PE=3 SV=1
MSKPLFPGHKDKEKVKELMLAMFAYLGEDANREGLKDTPNRVVKSWDKLYGGYLQKPEDVLTTFEEDDVIPHDQIILLKDIEFYSTCEHHLLPFVGKAHVAYIPKDKVVGISKLARIVEIYARRLQVQERIGNQVTKALMTHLNAKGASCIIESKHFCMTCRGVEKQNSVMVTSSLRGTFLEDGRTRQELMTLIRS

SEQ ID NO: 8826 - protein, 189 aa, Halobacteroides halobius
  misc_feature (1)..(189): tr|L0K628|L0K628_HALHC GTP cyclohydrolase 1 OS=Halobact eroides halobius (strain ATCC 35273 / DSM 5150 / MD-1) OX=748449 GN=folE PE=3 SV=1
MDQDRIEKSISNILEAIGEDPQREGLEKTPKRVAKMYQEIFLGVNKEPSEALDVFVEDEANDLVLVRDITFYSLCEHHLIPFFGKVHLAYKPQGGRVTGFSKLTKLVETVAKRPQLQERMTKIIADTMMEILEPQGVYVIVEAQQLCMTMRGVEQTETETITSASRGIFKEDSGAKNEVINLIYRGRTR

SEQ ID NO: 8827 - protein, 198 aa, Halocella sp.
  misc_feature (1)..(198): tr|A0A3Q9B5L7|A0A3Q9B5L7_9FIRM GTP cyclohydrolase 1 OS= Halocella sp. SP3-1 OX=2382161 GN=folE PE=3 SV=1
MAIDKTKIEEHIRGILMALGEDPEREGLLETPARVARMYEEIFEGISYTNDEIAEMFNRTFEDDLYISEYNKEIVMLRDIEIFSFCEHHLALMYNMKVAVAYIPNGKILGLSKIARIADMVSKRLQLQERIGSDIAEIMQKVTETEDVAVLIEGQHACMTARGIKNTNAVTVTTTLCGRFNTDQCLMDKLMVLYNKIL

SEQ ID NO: 8828 - protein, 365 aa, Halocynthiibacter arcticus
  misc_feature (1)..(365): tr|A0A126UV33|A0A126UV33_9RHOB GTP cyclohydrolase FolE2 OS=Halocynthiibacter arcticus OX=1579316 GN=folE2 PE=3 SV=1
MNTDMQKTLLSRDQAKAALETLREWAAHVSPVEVAELDPAIGRLLPERALENYPALARAYPEEFTTDDAYRATLPDLQNGPESLIRGSRRPIQHVGISNFRLPIRFQARAGGDLALETSVTGTVSLEAGKKGINMSRIMRTFYKYAESVFSFDVIEAALADYKTDLESFDARIQMAFSFPVKNKSLRSGLAGYQYYNIALELVETAGKVVKIIHLDYVYSSTCPCSLELSEHARQTRHQLATPHSQRSVARISVLLNSEKPRLWFEDLIDLCRAAVPTETQVMVKREDEQAFAELNAANPIFVEDAARLFSEQLQNDERILDYRIVASHQESLHSHDAVSVLTEGQTFAAQSFDPKLFSTLFHVG

SEQ ID NO: 8829 - protein, 259 aa, Halodesulfovibrio marinisediminis
  misc_feature (1)..(259): tr|A0A1N6H6E3|A0A1N6H6E3_9DELT GTP cyclohydrolase FolE2 OS=Halodesulfovibrio marinisediminis DSM 17456 OX=1121 457 GN=folE2 PE=3 SV=1
MPKKLQDIQMSSSEVAIPIDSVGVKNLRVPLLVRDRENGAQHTVAQVEVGVDLPAAFKGTHMSRFVESLETFGEELDYHSLRDLLAQIQERLSARNAFISFTFPYFMTLPSPATKRKSRMNYEVTLTGALEDEEMSCMLEVCVPVMTVCPCSKAISDEGAHSQRAEIRLQINMSGFAWIEEFIEIANNAGSSPVYSLLKREDEKYVTEYAFANPTFVEDVVRAVAKQLSEHEKIDWYRVEVESFESIHNHSAYAVIESR

SEQ ID NO: 8830 - protein, 255 aa, Halodesulfovibrio spirochaetisodalis
  misc_feature (1)..(255): tr|A0A1B7X983|A0A1B7X983_9DELT GTP cyclohydrolase FolE2 OS=Halodesulfovibrio spirochaetisodalis OX=1560234 GN= folE2 PE=3 SV=1
MQDIQMSSSEVAIPIDSVGVKNLRVPLSVRDREKGAQHTIAQVEVGVDLPAAFKGTHMSRFVESLESFGEKLDYHSLKELLAQIQERLSARNAFISFTFPYFMTLPSPATKRESRMDYEVTLTGALEDNHMSCMLEVCVPVMTVCPCSKAISDEGAHSQRAEIRLQISMSGFAWIEEFIEIANNSGSSPVYSLLKREDEKYVTEYAFANPTFVEDVVRTVAKQLSDHEKIDWYRVEVESFESIHNHSAYAVIESK

SEQ ID NO: 8831 - protein, 228 aa, Haloechinothrix alba
  misc_feature (1)..(228): tr|A0A238XTT2|A0A238XTT2_9PSEU GTP cyclohydrolase 1 OS= Haloechinothrix alba OX=664784 GN=folE PE=3 SV=1
MGNIEGDELGPYVASGDEYVRDGEPDGAGELGETGVGRVFDAGRAEKAVRELLIACGEDPDREGLQETPARVARAYRELFAGLHTDPAAVIDRTFDESHEELVLITDIPMFSTCEHHLVPFHGVAHVGYIPDEHGRVTGLSKLARLVDLYARRPQVQERLTSQIADALERRLQPRGVIVVVEAEHLCMAMRGIRKPGARTTTSAVRGLLKSSASSRAEALDLLKGRIR

SEQ ID NO: 8832 - protein, 307 aa, Halolactibacillus alkaliphilus
  misc_feature (1)..(307): tr|A0A511WZY7|A0A511WZY7_9BACI GTP cyclohydrolase FolE2 OS=Halolactibacillus alkaliphilus OX=442899 GN=folE2 P E=3 SV=1
MTSSKKNLPNKQARHRLFGSVAPGEKTKPVEKEQMADLQNTKNDFLFHIDAVGITNVKHPVIINGDKEPKIQTSIGTFTMTSSIVKDSKGTNMSRFTEQLEAYFQQNKLTTKLSDLQAFTKELSARLKTQDAQIELSVPYFYQQAGPYSKLQGLNHIDLNFKVTYDEKEGFTTTVGIVATITTLCPCSKEISEYSAHNQRGVVTINALLNASFDETFVDWKAVLLEMAESNASARIHPVLKRTDEKVVTEHAYENPRFVEDMVRLVSADLYEWEDVVKFDVHCQNEESIHLHDAIASIHYDKRDETK

SEQ ID NO: 8833 - protein, 307 aa, Halolactibacillus halophilus
  misc_feature (1)..(307): tr|A0A1I5NGH1|A0A1I5NGH1_9BACI GTP cyclohydrolase FolE2 OS=Halolactibacillus halophilus OX=306540 GN=folE2 PE= 3 SV=1
MTQYKKHLPEKQERHRLFGSVSPGKRTKPTEKDAMADLQNTQNDFLFHIDAVGITNVTHPMTIHGEIEPHTQTSVAKFTMTSSIVQQSKGTNMSRFTEQLEAYYQKQRLTTNLKDLKAFTKELSTRLKTTDATIDITVPYFYQQRGPHSQLQGLNHVDLTIKVTYDTSSGFTVHVGLAATITTLCPCSKEISEYSAHNQRGIVSITTELDPLFDETTSDWKKWLLEMAESNASAKIHPVLKRTDEKVVTEHAYENPRFVEDMVRLVSADLYEREDVVAFKVTCRNEESIHLHDAIASITYDKRVENR

SEQ ID NO: 8834 - protein, 307 aa, Halolactibacillus miurensis
  misc_feature (1)..(307): tr|A0A1I6T483|A0A1I6T483_9BACI GTP cyclohydrolase FolE2 OS=Halolactibacillus miurensis OX=306541 GN=folE2 PE=3 SV=1
MTQYKKQLPEKQERHRLFGSVSPGKRTKPTEKDEMADLQNTQNDFLFHIDAVGITNVTHPINIHGEMEPTIQTSVAKFTMTSSIVQQSKGTNMSRFTEQLEAYYQQQRLKTNLEDLKAFTKELSSRLKTTDATIEVTVPYFYQQRGPHSQLQGLNHVDLTIKVTYDTASGFTIHVGLAATITTLCPCSKEISEYSAHNQRGIVSITTELDPSFDETAGDWKKRLLDMAESNASARIHPVLKRTDEKVVTEHAYENPRFVEDMVRLVSADLYEWDDVLAFKVTCRNEESIHLHDAIASITYDKRAEKR

SEQ ID NO: 8835 - protein, 240 aa, Halomicronema excentricum
  misc_feature (1)..(240): tr|A0A4Q7EI38|A0A4Q7EI38_9CYAN GTP cyclohydrolase 1 OS= Halomicronema excentricum str. Lakshadweep OX=2294035 G N=folE PE=3 SV=1
MTTVSSNTNNGANLSSSTADLDLRQNGMTAIRPDRNTAYGESTTAKPVSDESQLAMMDAVRTMLLSLGEDPEREGLLKTPKRVAEAMRFLTSGYSQSLDDLVNNAIFDEGHNEMVLVRDINLFSLCEHHMLPFMGRAHVAYIPKQRVVGLSKLARIVEMYSRRLQVQERLTRQVAEAIQEVLDPQGVAVVVEASHMCMSMRGVQKPGSWTVTSAMIGCFQEDSKTREEFLSLVRHQPSLF

SEQ ID NO: 8836 - protein, 252 aa, Halomicronema hongdechloris
  misc_feature (1)..(252): tr|A0A1Z3HUS7|A0A1Z3HUS7_9CYAN GTP cyclohydrolase 1 OS= Halomicronema hongdechloris C2206 OX=1641165 GN=folE1 P E=3 SV=1
MVQLTFQLARRFQLLFAMTIASSSGLNGASSPTANNGRVPSASSVRPDRSKSHGLMPPTTDESDQEAMQDAVRTLLISVGEDPDREGLLKTPKRVAEAMRFLTSGYHQSLEDLVNGAIFDEGHNEMVLVRDINAFSLCEHHMLPFMGKVHVAYIPDQKVVGLSKLARIVEMYSRRLQVQERLTRQIAEAVQSILDPQGVAVVMEASHMCMVMRGVQKPGSWTVTSAMLGVFQEDSKTREEFLSLIRHQPAFT

SEQ ID NO: 8837 - protein, 212 aa, Halomicronema hongdechloris
  misc_feature (1)..(212): tr|A0A1Z3HTR9|A0A1Z3HTR9_9CYAN GTP cyclohydrolase 1 OS= Halomicronema hongdechloris C2206 OX=1641165 GN=folE2 P E=3 SV=1
MTLSISRDDIRSGTLKTKAEPPVSDQEMEQAVRTLLLGLGEDPDREGLIDTPKRVVKALKFLTSGYHQSLGDLLNGAVFHENTNEMVLVRDIDLFSSCEHHILPILGRAHVAYIPNGKVIGLSKIARICEMYARRLQVQERLTAQIADALEGLLKPQGVAVVVEASHMCMVMRGVQKPGSWTTTSAMRGVFAADPKTRQEFMSLIRHSPSFH

SEQ ID NO: 8838 - protein, 200 aa, Halomonadaceae bacterium
  misc_feature (1)..(200): tr|A0A139CE57|A0A139CE57_9GAMM GTP cyclohydrolase 1 OS= Halomonadaceae bacterium T82-2 OX=1783518 GN=folE PE=3 SV=1
MASTAPSREEAENAVRTLIRWAGDDPDREGLVDTPARVARAYEEFFAGYTSDPVGVLERTFSEVEGYDEMIVMNDIRFESHCEHHMAPIIGKAHIGYIPDRRVVGISKLARLVEIYAKRLQIQEKMTVQIADTLHEVLQPQGVAVVIEASHQCMTTRGIHKPGASLVTSRMLGTFRKNPATRREFLRILRLSGGEAPAIS

SEQ ID NO: 8839 - protein, 185 aa, Halomonadaceae bacterium
  misc_feature (1)..(185): tr|A0A2E2BM78|A0A2E2BM78_9GAMM GTP cyclohydrolase 1 OS= Halomonadaceae bacterium OX=2026746 GN=folE PE=3 SV=1
MTEQLADHFRQIITGLGEDPEREGLRDTPKRAAKAMQFLTHGYEQSLESLINGAVFESETDEMVLVKDIELYSMCEHHMLPFIGKCHIAYLPSGKVLGLSKFARIVDMYARRLQIQENLTRQIAEAVQQVTDARGVAVVIEAKHLCMMMRGVEKQNSSMSSSVMLGAFRANQSTRQEFLTLINGR

SEQ ID NO: 8840 - protein, 185 aa, Halomonas aestuarii
  misc_feature (1)..(185): tr|A0A1J0VIS8|A0A1J0VIS8_9GAMM GTP cyclohydrolase 1 OS= Halomonas aestuarii OX=1897729 GN=folE PE=3 SV=1
MTEELANHYRAIIHDLGEDPDREGLRDTPKRAAKAMQFLNRGYTQSLEEIINGAVFESETDEMVLVKDIELYSMCEHHLLPFIGKCHIAYLPSGKVLGLSKFARIVDMYARRMQIQENLTRQIAEAVQQVTEARGVAVVIEARHLCMMMRGVEKQNSSMTSSVMLGAFREKPSTRQEFLTLVSGR

SEQ ID NO: 8841 - protein, 183 aa, Halomonas alkaliantarctica
  misc_feature (1)..(183): tr|A0A4R7YPV8|A0A4R7YPV8_9GAMM GTP cyclohydrolase 1 OS= Halomonas alkaliantarctica OX=232346 GN=folE PE=3 SV=1
MSDDIAEHYRQIISALGEDPNREGLRDTPKRAAKAMQFLNAGYTQSLDDIINGAVFESQTDEMVLVKDIELYSMCEHHLLPFIGKCHIAYLPNGKVLGLSKFARIVDMFARRMQIQENLTREIAEAVQDVTDAKGVAVVIEARHLCMMMRGVEKQNSSMTSSVMLGGFRKNQATRQEFLMLIS

SEQ ID NO: 8842 - protein, 300 aa, Halomonas alkaliantarctica
  misc_feature (1)..(300): tr|A0A4R7YLS5|A0A4R7YLS5_9GAMM GTP cyclohydrolase FolE2 OS=Halomonas alkaliantarctica OX=232346 GN=folE2 PE=3 SV=1
MTVLTLPDVASQTARSPAALTWVGMEGIALPILLGSRSVTAKLNAGVSLDDADARGIHMSRLYLALAPLEEAPLTLPAVKDVLNAFLTSQEGLSQNAYLSIEGELALKRQALISPLAGWKSYPFTLRCQLTPAGFQAELDLTVGYSSTCPCSAALARQLIQQAFEEDFSEIPLTKSAVSAWLGSEEGILATPHSQRSSVECSLRLSESENGELPIADSIENSIDRIERALGTALQTAVKRIDEQAFALANGQNLMFCEDAARRLDKVLRQAPRVSGFQLKVVHAESLHAHDAVARSEWNW

SEQ ID NO: 8843 - protein, 294 aa, Halomonas alkaliphila
  misc_feature (1)..(294): tr|A0A386X0A6|A0A386X0A6_9GAMM GTP cyclohydrolase FolE2 OS=Halomonas alkaliphila OX=272774 GN=folE2 PE=3 SV=1
MTAFTLPDIAQQPARLPGTLSWVGMEGIALPVQLAGYQVNANVSAGVSLEEAGARGIHMSRLYTALDALEHQPLTLTLIHRVLAAFLESHQALSENAYLTFSGEVLLKRDALISPLSGWKGYPFTLHSQLTPSGFKVELDVSVGYSSTCPCSAALARQLIQQAFVEDFEEIPLTKQAVLAWLGSEEGVLATPHSQRSVAHCSIRLAGNDVIPLAELIERIENALGTALQTAVKRIDEQAFALANGQNLMFCEDAAKRLDRALRRMADISGFQLRVVHAESLHAHDAVARSEWQW

SEQ ID NO: 8844 - protein, 183 aa, Halomonas alkaliphila
  misc_feature (1)..(183): tr|A0A386X8X0|A0A386X8X0_9GAMM GTP cyclohydrolase 1 OS= Halomonas alkaliphila OX=272774 GN=folE PE=3 SV=1
MTDDIAQHYRHIIAAIGENPDREGLRDTPKRAAKAMQFLNAGYQQSLEEIVNGAVFESQTDEMVLVKDIELYSMCEHHLLPFIGKCHIAYLPSGKVLGLSKFARIVDMYARRMQIQENLTREIAEAVQQVTQSRGVAVVIEARHLCMMMRGVEKQNSSMTSSVMLGSFRSNQATRQEFLTLIS

SEQ ID NO: 8845 - protein, 308 aa, Halomonas andesensis
  misc_feature (1)..(308): tr|A0A433KJ13|A0A433KJ13_9GAMM GTP cyclohydrolase FolE2 OS=Halomonas andesensis OX=447567 GN=folE2 PE=3 SV=1
MNSPLNKEAIRPARHLDDVASAASPHKGTLSWVGMEGIALPLLVAGQAIAARASAGVSLDAPDTRGIHMSRLYLALAELEHQELSLASIRSLLDTFLDSHQGLSEQAFLELNGEALLRRPALISPLSGWKTYPFALRCRRTPSGTQLILNVSIGYSSTCPCSAALSRQLIQQAFEEDFNDIPVSRAAVHAWLGSEQAILATPHSQRSQAHLSLRLTPDIDELPLLDVINSVEKSLGTALQTAVKRVDEQAFALANGQNLMFCEDAARRLHATLSHQPAVEGFALRIVHAESLHAHDAVARSEWNWEPV

SEQ ID NO: 8846 - protein, 183 aa, Halomonas andesensis
  misc_feature (1)..(183): tr|A0A3S0XY70|A0A3S0XY70_9GAMM GTP cyclohydrolase 1 OS= Halomonas andesensis OX=447567 GN=folE PE=3 SV=1
MTDDIAQHYRHIISAIGEDPDREGLRDTPKRAAKAMQFLNAGYRQSLEEIVNGAVFESQTDEMVLIKDIELYSMCEHHLLPFIGKCHIAYLPNGKVLGLSKFARIVDMYARRMQIQENLTREIAEAVQEVTQSRGVAVVIEARHLCMMMRGVEKQNSSMTSSVMLGGFRSNQATRQEFLMLIN

SEQ ID NO: 8847 - protein, 185 aa, Halomonas anticariensis
  misc_feature (1)..(185): tr|S2KMB2|S2KMB2_HALAF GTP cyclohydrolase 1 OS=Halomona s anticariensis (strain DSM 16096 / FP35) OX=1121939 GN =folE PE=3 SV=1
MTEELAHYYRQIISGLGEDPEREGLRDTPKRAAKAMQFLTRGYSQSLEALVNGAVFESETDEMVLVKDIELYSMCEHHLLPFIGKCHIAYLPSGKVLGLSKFARIVDMYARRMQIQENLTRQIAEAVLQVTEARGVAVVIEAQHMCMMMRGVEKQNSSMTSSVMLGAFRDNQPTRQEFLTLVHGR

SEQ ID NO: 8848 - protein, 183 aa, Halomonas aquamarina
  misc_feature (1)..(183): tr|A0A1H8LXC5|A0A1H8LXC5_9GAMM GTP cyclohydrolase 1 OS= Halomonas aquamarina OX=77097 GN=folE PE=3 SV=1
MTDDLAQHYRQIISALGENPDREGLRDTPKRAAKAMQFLNAGYHQSLEEIVNGAVFESQTDEMVLVKDIELYSMCEHHLLPFIGKCHIAYLPSGRVLGLSKFARIVDMYARRMQIQENLTREIAEAVQQVTQARGVAVVIEARHLCMMMRGVEKQNSSMTSSVMLGGFRSSQATRQEFLTLIN

SEQ ID NO: 8849 - protein, 184 aa, Halomonas arcis
  misc_feature (1)..(184): tr|A0A1G9YEE9|A0A1G9YEE9_9GAMM GTP cyclohydrolase 1 OS= Halomonas arcis OX=416873 GN=folE PE=3 SV=1
MTDDIAQHYQHIISALGENPDREGLRDTPKRAAKAMQFLTAGYHQSLEEIVNGAVFESQTDEMVLVKDIELYSMCEHHLLPFIGKCHIAYLPNGNVLGLSKFARIVDMYARRMQIQENLTREIAEAVQQVTQARGVAVVIEARHLCMMMRGVEKQNSSMTSSVMLGDFRANQATRQEFLTLVRS

SEQ ID NO: 8850 - protein, 183 aa, Halomonas axialensis; identical to SEQ ID NO: 8848
  misc_feature (1)..(183): tr|A0A510J6J5|A0A510J6J5_9GAMM GTP cyclohydrolase 1 OS= Halomonas axialensis OX=115555 GN=folE1 PE=3 SV=1

SEQ ID NO: 8851 - protein, 299 aa, Halomonas beimenensis
  misc_feature (1)..(299): tr|A0A291P5Z3|A0A291P5Z3_9GAMM GTP cyclohydrolase FolE2 OS=Halomonas beimenensis OX=475662 GN=folE2 PE=3 SV=1
MSEDRLADILGEAAIGDTPLAWVGMEGIDLPLQMAGQSLAAKADAGVSLDDPEARGIHMSRLYLALERLAGRDLTLPRLREVLAHFLDSHHGLSQQAFLDLSGEALLRRPALISPLAGWKAYPMAIRTRLTPAGFEARLALSIGYSSTCPCSAALARQLIQERFDRDFAEQDTVESRAMRDWLGGEQGIVATPHSQRSQAHLALLLAPDTETLPVAEVVDRAEAALGTALQTAVKRVDEQAFALANGQNLMFCEDAARRLHRALRDQPGIEGFSLRVVHAESLHAHDAVARSQWNWQEG

SEQ ID NO: 8852 - protein, 185 aa, Halomonas beimenensis
  misc_feature (1)..(185): tr|A0A291P8M6|A0A291P8M6_9GAMM GTP cyclohydrolase 1 OS= Halomonas beimenensis OX=475662 GN=folE PE=3 SV=1
MTDRLANHYRQIIEELGENPDREGLRDTPKRAAKAMQFLNHGYHQSLEEIVNGAVFESDTDEMVLVKDIELYSMCEHHLLPFIGKCHIAYLPRGKVLGLSKFARIVDMYARRMQIQENLTRQIAEAVQQVTEARGVAVVIEARHLCMMMRGVEKQNSSMTSSVMLGAFRELQSTRQEFLTLVHGR

SEQ ID NO: 8853 - protein, 183 aa, Halomonas boliviensis
  misc_feature (1)..(183): tr|A0A265DZP1|A0A265DZP1_9GAMM GTP cyclohydrolase 1 OS= Halomonas boliviensis LC1 OX=1072583 GN=folE PE=3 SV=1
MSDDIAEHYRQIISALGEDPDREGLRDTPKRAAKAMQFLNAGYTQSLDSIINGAVFEAQTDEMVLVKDIELYSMCEHHLLPFIGKCHIAYLPNGKVLGLSKFARIVDMFARRMQIQENLTRQIAEAVQDVTQAKGVAVVIEARHLCMMMRGVEKQNSSMTSSVMLGGFRKNQATRQEFLMLIS

SEQ ID NO: 8854 - protein, 300 aa, Halomonas boliviensis
  misc_feature (1)..(300): tr|A0A265E283|A0A265E283_9GAMM GTP cyclohydrolase FolE2 OS=Halomonas boliviensis LC1 OX=1072583 GN=folE2 PE=3 SV=1
MTVLTLPDIASQTTRLTSTLTWVGMEGIALPVQLGTRSVTAKLDAGVSLDDSEARGIHMSRLYLALAPLEDAPLTLPTVKDVLSTFLTSQEGLSQQAYLTVEGELPLKRQALISPLAGWKSYPFSLRGQLTPAGFQIELGLTVGYSSTCPCSAALARQSIQQAFEEDFSEIPLTPSAVSAWLGSEEGILATPHSQRSSVECSLRLTEGENEELPIADWLERAVDRIEKALGTALQTAVKRIDEQAFALANGQNLMFCEDAARRVDKALRQAPGVAGFQLKVVHAESLHAHDAVARSEWNW

SEQ ID NO: 8855 - protein, 183 aa, Halomonas campaniensis
  misc_feature (1)..(183): tr|A0A246RVU7|A0A246RVU7_9GAMM GTP cyclohydrolase 1 OS= Halomonas campaniensis OX=213554 GN=folE PE=3 SV=1
MSDDIAEHYRQIISALGEDPNREGLRDTPKRAAKAMQFLNAGYTQSLDDIINGAVFESQTDEMVLVKDIELYSMCEHHLLPFIGKCHIAYLPDGKVLGLSKFARIVDMFARRMQIQENLTREIAEAVQEVTQAKGVAVVIEARHLCMMMRGVEKQNSSMTSSVMLGGFRKNQATRQEFLMLIS

SEQ ID NO: 8856 - protein, 183 aa, Halomonas campaniensis
  misc_feature (1)..(183): tr|A0A3D0KK13|A0A3D0KK13_9GAMM GTP cyclohydrolase 1 OS= Halomonas campaniensis OX=213554 GN=folE PE=3 SV=1
MTDDIAQHYRHIITAIGENPDREGLRDTPKRAAKAMQFLTAGYQQSLEEIVNGAVFESQTDEMVLVKDIELYSMCEHHLLPFIGKCHIAYLPSGKVLGLSKFARIVDMYARRMQIQENLTREIAEAVQQVTQSRGVAVVIEARHLCMMMRGVEKQNSSMTSSVMLGSFRSNQATRQEFLTLIS

SEQ ID NO: 8857 - protein, 299 aa, Halomonas caseinilytica
  misc_feature (1)..(299): tr|A0A1M6XGY1|A0A1M6XGY1_9GAMM GTP cyclohydrolase FolE2 OS=Halomonas caseinilytica OX=438744 GN=folE2 PE=3 SV= 1
MMPETLEDVAAGRTTTRGVLNWVGMEGIALPVRVAEHPVDARVSASVSLDDPDAKGIHMSRLYLMLEELAERELEVSRLSGLLEGFLASHADLSRRARIALTGELTLRRPALISPLAGWKGYPVALRSWREGNSVETQVELTVGYSSTCPCSAALARQLIQQQFDRDFGGEPLDHAAIRDWLGESQGILATPHSQRSEARITVRLAQGVDAPPWLALIERVEQALGTALQTAVKRVDEQAFALANGQNTMFCEDAARRLHQALSEAPDITGFHVRVEHAESLHAHDAVAETQADWWWRD

SEQ ID NO: 8858 - protein, 201 aa, Halomonas caseinilytica
  misc_feature (1)..(201): tr|A0A1M6UDQ7|A0A1M6UDQ7_9GAMM GTP cyclohydrolase 1 OS= Halomonas caseinilytica OX=438744 GN=folE PE=3 SV=1
MAAPTHRNNDSAWGLSMTEQLADHYRQIIQEIGEDPDREGLRDTPKRAAKAMQFLNRGYFQSLEEIVNGAVFESDTDEMVLIKDIELYSICEHHLLPFTGKCHIAYMPRGKVLGLSKFARIVDMYARRMQIQENLTRQIAEAVQQVTDARGVAVVIEAHHLCMMMRGVEKQNSSMTSSVMLGAFRESQSTRQEFLTLVHGR

SEQ ID NO: 8859 - protein, 185 aa, Halomonas chromatireducens
  misc_feature (1)..(185): tr|A0A0X8HCX2|A0A0X8HCX2_9GAMM GTP cyclohydrolase 1 OS= Halomonas chromatireducens OX=507626 GN=folE PE=3 SV=1
MIEELANHYRQIILELGEDPQREGLRDTPKRAAKAMQFLNRGYAQTLEDIINGAVFESETDEMVLVKDIELYSMCEHHLLPFIGKCHIAYLPNGKVLGLSKFARIVDMFARRMQIQENLTRQIAEAVQQVTDARGVAVVVEARHLCMMMRGVEKQNSSMTSSVMLGAFRENQPTRQEFLTLVNSR

SEQ ID NO: 8860 - protein, 103 aa, Halomonas chromatireducens
  misc_feature (1)..(103): tr|A0A0X8HFV4|A0A0X8HFV4_9GAMM Putative GTP cyclohydrol ase 1 type 2 OS=Halomonas chromatireducens OX=507626 GN =LOKO_02822 PE=4 SV=1
MYKLAFYVPVEDAEAVKEAVFVTGAGRIGNYEACCFQTPGTGQFRPLDGASPHIGQVGDLERVEELKVELVCEDDLIEEAVAALRAAHPYEEPAFDVWKLETF

SEQ ID NO: 8861 - protein, 322 aa, Halomonas cupida
  misc_feature (1)..(322): tr|A0A1M7ASQ7|A0A1M7ASQ7_9GAMM GTP cyclohydrolase FolE2 OS=Halomonas cupida OX=44933 GN=folE2 PE=3 SV=1
MMDLMLCYYVPYHAFTIIDGNTMSQLSLPDIASGSPLIDTALDWVGMEQIALPLHVAGRSIVGRASAGVSLDTPEARGVHMSRLYLALSELENHELTLSMVSEVLDTFLASHAGLSNTAFLDLGGEALLNRPALLSPLSGWKAYPFSLRCRQDSRGFEAVLGVTVGYSSTCPCSAALARQLIQQAFDEDFVDIPLSHESVRAWLGSEQGILATPHSQRSQAHISVRLSGDAEPLPLPSLIDSAEKALGTALQTAVKRVDEQAFALANGQNLMFCEDAARRLHRTLQRHPLVEGFRVRVVHGESLHAHDAVACSQSDWPSASR

SEQ ID NO: 8862 - protein, 185 aa, Halomonas cupida
  misc_feature (1)..(185): tr|A0A1M7HUT2|A0A1M7HUT2_9GAMM GTP cyclohydrolase 1 OS= Halomonas cupida OX=44933 GN=folE PE=3 SV=1
MTDTLANHYRGIITELGEDPDREGLVDTPRRAAKAMQFLNRGYTQSLEEIVNGAVFSSETDEMVLVKDIELYSMCEHHLLPFIGKCHIAYLPNGKVLGLSKFARIVDMYARRMQIQENLTRQIADAVQQVTNAQGVAVVIEARHLCMMMRGVEKQNSSMTSSVMLGAFREKATTRQEFLTLVNGR

SEQ ID NO: 8863 - protein, 185 aa, Halomonas daqiaonensis
  misc_feature (1)..(185): tr|A0A1H7KL87|A0A1H7KL87_9GAMM GTP cyclohydrolase 1 OS= Halomonas daqiaonensis OX=650850 GN=folE PE=3 SV=1
MTEELANHYRRIIHELGEDPDREGLRDTPKRAAKAMQFLNRGYTQSLEEIINGAVFESETDEMVLVKDIELYSMCEHHLLPFIGKCHIAYLPSGKVLGLSKFARIVDMYARRMQIQENLTRQIAEAVQQVTEARGVAVVIEARHLCMMMRGVEKQNSSMTTSVMLGTFREKQSTRQEFLTLVYGR

SEQ ID NO: 8864 - protein, 185 aa, Halomonas daqingensis
  misc_feature (1)..(185): tr|A0A1H5SUY7|A0A1H5SUY7_9GAMM GTP cyclohydrolase 1 OS= Halomonas daqingensis OX=419596 GN=folE PE=3 SV=1
MNEELANFYRQIILELGEDPEREGLRDTPKRAAKAMQFLTRGYSQTLEELVNGAVFESETDEMVLIKDIELYSMCEHHLLPFIGKCHIAYLPSGKVLGLSKFARIVDMYARRMQIQENLTRQVAEAVQQVTGARGVAVVIEARHLCMMMRGVEKQNSSMSSSVMLGAFRDNPTTRQEFLMLVAGR

SEQ ID NO: 8865 - protein, 301 aa, Halomonas desiderata
  misc_feature (1)..(301): tr|A0A243SZ20|A0A243SZ20_9GAMM GTP cyclohydrolase FolE2 OS=Halomonas desiderata SP1 OX=1191209 GN=folE2 PE=3 S V=1
MNRLPLEDIAVAPATRLGTLSWVGMEGIALPFQVAGQGVTGRASAGVSLDDPTARGIHMSRLYLALAELEQRELSLMHVAAVLDGFLDTHQGLSHCAFLDLSGEAMLKRPALISPLAGWQRYPFTLRCRRDSQGFHATLELTVGYSSTCPCSAALSRQLIQQAFDEDFIDMPVSREAVRAWLGSEQGILATPHSQRSQAHLAVRLAGEQDELPLVRLVDRAERALGTALQTAVKRIDEQAFALANGQNLMFCEDAARRLHHALREQPGIGGFRLRVVHAESLHAHDAVARSEWNWDAASCS

SEQ ID NO: 8866 - protein, 185 aa, Halomonas desiderata; identical to SEQ ID NO: 8864
  misc_feature (1)..(185): tr|A0A243T301|A0A243T301_9GAMM GTP cyclohydrolase 1 OS= Halomonas desiderata SP1 OX=1191209 GN=folE PE=3 SV=1

SEQ ID NO: 8867 - protein, 97 aa, Halomonas elongata
  misc_feature (1)..(97): tr|A0A1B8P4C8|A0A1B8P4C8_HALEL GTP cyclohydrolase FolE2 OS=Halomonas elongata OX=2746 GN=folE2_1 PE=4 SV=1
MRLADGVDTPPWLDLIDSVEAALGTALQTAVKRVDEQAFALANGQNTMFCEDAARRLHQALSEASGIAGFHVRVVHAESLHAHDAVAETQADWWWRD

SEQ ID NO: 8868 - protein, 299 aa, Halomonas elongata
  misc_feature (1)..(299): tr|A0A329Q4L7|A0A329Q4L7_HALEL GTP cyclohydrolase FolE2 OS=Halomonas elongata OX=2746 GN=folE2 PE=3 SV=1
MMAEALEDVAAGRTATHGALNWVGMDGISLPVRVAEHPVDARVAASVSLDDPAARGIHMSRLYLLLEELAERELEVSRIAGLLENFLASHAGLSRRARLFLTGELTLRRPALVSPLAGWKGYPVALRSWREGNSVETQLELKVGYSSTCPCSAALARQLIQQQFDRDFGDESLDHASIRDWLGESHGILATPHSQRSEARITVRLADGVDTPPWLDLIDSVEAALGTALQTAVKRVDEQAFALANGQNTMFCEDAARRLHQALSEASGIAGFHVRVVHAESLHAHDAVAETQADWWWRD

SEQ ID NO: 8869 - protein, 185 aa, Halomonas endophytica
  misc_feature (1)..(185): tr|A0A2N7U921|A0A2N7U921_9GAMM GTP cyclohydrolase 1 OS= Halomonas endophytica OX=2033802 GN=folE PE=3 SV=1
MNEELADYYRQIILELGENPEREGLRDTPKRAAKAMQFLNRGYTQTLEDIINGAVFESETDEMVVVKDIELYSLCEHHLLPFIGKCHIAYMPNGKVLGLSKFARIVDMFARRMQIQENLTRQIAQAVQQVTDARGVAVVIEARHLCMMMRGVEKQNSSMTSSVMLGAFRDNQPTRQEFLTLVNGR

SEQ ID NO: 8870 - protein, 185 aa, Halomonas eurihalina
  misc_feature (1)..(185): tr|A0A5D9DBF2|A0A5D9DBF2_HALER GTP cyclohydrolase 1 OS= Halomonas eurihalina OX=42566 GN=folE PE=3 SV=1
MTEQLADHYRQIIQEIGEDPDREGLRDTPKRAAKAMQFLNRGYFQSLEEIVNGAVFESDTDEMVLIKDIELYSICEHHLLPFTGKCHIAYMPSGKVLGLSKFARIVDMYARRMQIQENLTRQIAEAVQQVTSARGVAVVIEARHLCMMMRGVEKQNSSMTSSVMLGAFRESQSTRQEFLTLVQGR

SEQ ID NO: 8871 - protein, 299 aa, Halomonas eurihalina
  misc_feature (1)..(299): tr|A0A5D9DFF9|A0A5D9DFF9_HALER GTP cyclohydrolase FolE2 OS=Halomonas eurihalina OX=42566 GN=folE2 PE=3 SV=1
MMSEALEDVAAGRTATHGALNWVGMDGISLPVRVVDHPVDARVAASVSLDDPAARGIHMSRLYLLLEELAERELEVPRIAGLLENFLASHTGLSRRARLFLTGELTLRRPALVSPLAGWKGYPVALRSWREGNSVETQLELKVGYSSTCPCSAALARQLIQQQFDRDFGDESLDHASIRDWLGESHGILATPHSQRSEARITVRLADGVDTPPWLDLIERVEAVLGTALQTAVKRVDEQAFALANGQNTMFCEDAARRLHQALSDVSGIAGFHVRVVHAESLHAHDAVAESQADWWWRD

SEQ ID NO: 8872 - protein, 301 aa, Halomonas gudaonensis
  misc_feature (1)..(301): tr|A0A1G8Q4T2|A0A1G8Q4T2_9GAMM GTP cyclohydrolase FolE2 OS=Halomonas gudaonensis OX=376427 GN=folE2 PE=3 SV=1
MTPRHLADVADDRRTRGSALSWVGMEGIALPLKVAGRAIAGRASAGVSLDDPTARGIHMSRLYLALAELEGQELSLSRVAGVLEAFLESHEGLASRAFLDLEGEALLRRPALISPLSGWQAYPFALRCRHDAEGLEAILDLTVGYASTCPCSAALARQLIQQAFDEDFVDMPATREAVRTWLGSEQSILATPHSQRSQALLSVRLTDDLDELPLLALVERVEKALGTPLQTAVKRIDEQAFALANGQNLMFCEDAARRLHQALREQPGIDGFALRVVHAESLHAHDAVARSEWNWTSALSD

SEQ ID NO: 8873 - protein, 185 aa, Halomonas gudaonensis
  misc_feature (1)..(185): tr|A0A1G8TGH1|A0A1G8TGH1_9GAMM GTP cyclohydrolase 1 OS= Halomonas gudaonensis OX=376427 GN=folE PE=3 SV=1
MTEELANHYRQIIQDLGEDPDREGLRDTPRRAAKAMQFLNRGYTQRLEEIINGAVFASETDEMVLVKDIELYSMCEHHLLPFIGKCHIAYLPNGKVLGLSKFARIVDMYARRMQIQENLTRQIAEAVQQVTEARGVAVVIEARHLCMMMRGVEKQNSSMTSSVMLGAFRENQPTRQEFLTLVNGR

SEQ ID NO: 8874 - protein, 185 aa, Halomonas halmophila
  misc_feature (1)..(185): tr|A0A4Y4EXK3|A0A4Y4EXK3_9GAMM GTP cyclohydrolase 1 OS= Halomonas halmophila OX=252 GN=folE1 PE=3 SV=1
MSEQLADHYRQIIQEIGEDPDREGLRDTPKRAAKAMQFLNRGYFQSLEEIVNGAVFESDTDEMVLVKDIELYSMCEHHLLPFTGKCHIAYLPQGKVLGLSKFARIVDMYARRMQIQENLTRQIAEAVQQVTDARGVAVVIEAHHLCMMMRGVEKQNSSMTSSVMLGAFRESQSTRQEFLTLVQSR

SEQ ID NO: 8875 - protein, 185 aa, Halomonas halophila
  misc_feature (1)..(185): tr|A0A510Z8W0|A0A510Z8W0_9GAMM GTP cyclohydrolase 1 OS= Halomonas halophila OX=29573 GN=folE1 PE=3 SV=1
MTEHLANHYRQIIEGLGEDPEREGLRDTPKRAAKAMQFLNHGYQQSLEEIVNGAVFASETDEMVLVKDIELYSMCEHHLLPFIGKCHIAYLPRGKVLGLSKFARIVDMYARRMQIQENLTRQIAEAVQQVTEARGVAVVVEARHLCMMMRGVEKQNSSMTSSVMLGAFREHQSTRQEFLTLVQGR

SEQ ID NO: 8876 - protein, 300 aa, Halomonas halophila
  misc_feature (1)..(300): tr|A0A510Z9C2|A0A510Z9C2_9GAMM GTP cyclohydrolase FolE2 OS=Halomonas halophila OX=29573 GN=folE2 PE=3 SV=1
MTTPLMDIADGAADQPGRLSWVGMEGIDLPLTLAGRPVQARAHAGVSLDAAEARGIHMSRLYLALERLVDREITPGRLQEVLAHFLDSHHDLSREAFLDLEGEAMLRRPALVSPLAGWKAYPFALRGRLGPDGFALRLSLEIGYSSTCPCSAGLARQLIQERFDRDFEDETALDHEAVRRWLGSEQGIVATPHSQRSRAHLELRLDGGLEALPVVEVIERAEASLGTALQTAVKRVDEQAFALANGQNLMFCEDAARRLDRTLREQPGVAGFRLRVVHAESLHAHDAVARSQWNWPEVEG

SEQ ID NO: 8877 - protein, 185 aa, Halomonas heilongjiangensis
  misc_feature (1)..(185): tr|A0A2N7TKF4|A0A2N7TKF4_9GAMM GTP cyclohydrolase 1 OS= Halomonas heilongjiangensis OX=1387883 GN=folE PE=3 SV= 1
MTEELANHYRQIILELGEDPEREGLRDTPKRAAKAMQFLNHGYNQSLEEIVNGAVFESETDEMVLVKDIELYSMCEHHLLPFIGKCHIAYLPKGRVLGLSKFARIVDMYARRMQIQENLTRQIAEAVQQVTGASGVAVVIEARHLCMMMRGVEKQNSSMTSSVMLGGFRDNQPTRQEFLTLVNGR

SEQ ID NO: 8878 - protein, 185 aa, Halomonas huangheensis
  misc_feature (1)..(185): tr|W1ND68|W1ND68_9GAMM GTP cyclohydrolase 1 OS=Halomona s huangheensis OX=1178482 GN=folE PE=3 SV=1
MIDSLANHYRNLITELGEDPDREGLVDTPRRAAKAMQFLNRGYTQSLEEIVNGAVFSSETDEMVLVKDIELYSMCEHHLLPFIGKCHIAYLPNGKVLGLSKFARIVDMYARRMQIQENLTRQIADAVQQVTDAQGVAVVIEARHLCMMMRGVEKQNSSMTSSVMLGAFREKSSTRQEFLTLVNGR

SEQ ID NO: 8879 - protein, 298 aa, Halomonas huangheensis
  misc_feature (1)..(298): tr|W1NA72|W1NA72_9GAMM GTP cyclohydrolase FolE2 OS=Halo monas huangheensis OX=1178482 GN=folE2 PE=3 SV=1
MTQMFLPDVAAGPSTLDGALCWVGMEDIALPFMVAGHVVNGRAATGVSLDDPSARGIHMSRLYLALSELQNQELSLPNVATVLDHFLETHDGLSDAAFLDLSGEAMLQRPAMISPLSGWKSYPFALRCRKDARGLHAILDLTLGYSSTCPCSAALSRQLIQQAFDEDFNDMPLSHASVKAWLGSEHGILATPHSQRSQAHLSLQLADDLEELPLVKMVECAERALGTALQTAVKRIDEQAFALANGQNLMFCEDAARRLHHALRQQADISGFRLRVVHAESLHAHDAVACSEWNWENS

SEQ ID NO: 8880 - protein, 187 aa, Halomonas hydrothermalis
  misc_feature (1)..(187): tr|A0A291JXT5|A0A291JXT5_9GAMM GTP cyclohydrolase 1 OS= Halomonas hydrothermalis OX=115561 GN=folE PE=3 SV=1
MRPTMTDDIAQHYRQIITALGENPDREGLRDTPKRAAKAMQFLTAGYKQSLEELVNGAVFESQTDEMVLVKNIELYSMCEHHLLPFIGKCHIAYLPSGKVLGLSKFARIVDMYARRMQIQENLTREIAEAVQQVTQAKGVAVVIEARHLCMMMRGVEKQNSSMTSSVMLGGFRTNQATRQEFLTLIS

SEQ ID NO: 8881 - protein, 185 aa, Halomonas ilicicola
  misc_feature (1)..(185): tr|A0A1M5BW83|A0A1M5BW83_9GAMM GTP cyclohydrolase 1 OS= Halomonas ilicicola DSM 19980 OX=1121942 GN=folE PE=3 S V=1
MTEELANHFREIIAGLGEDPDREGLRDTPMRAAKAMQFLTNGYGQTLDELVNGAVFASDTDEMVLIKDIELYSLCEHHLLPFIGKCHIAYMPGGKVLGLSKFARIVDMYARRLQIQEDLTRQIADAVQLVTEARGVAVVIEARHMCMMMRGVEKQNSSMTSSVMLGSFRGNQTTRQEFLMLVNSR

SEQ ID NO: 8882 - protein, 185 aa, Halomonas korlensis
  misc_feature (1)..(185): tr|A0A1I7FF53|A0A1I7FF53_9GAMM GTP cyclohydrolase 1 OS= Halomonas korlensis OX=463301 GN=folE PE=3 SV=1
MTEPLANHYRQIILELGEDPEREGLRDTPKRAAKAMQFLNHGYTQSLEEIINGAVFESETDEMVLVKDIELYSMCEHHLLPFIGKCHIAYLPSGRVLGLSKFARIVDMYARRMQIQENLTRQIAEAVLQVTDAKGVAVVIEARHLCMMMRGVEKQNSSMTSSVMLGAFRDKQSTRQEFLTLINSR

SEQ ID NO: 8883 - protein, 183 aa, Halomonas meridiana; identical to SEQ ID NO: 8848
  misc_feature (1)..(183): tr|A0A0D7V4M1|A0A0D7V4M1_9GAMM GTP cyclohydrolase 1 OS= Halomonas meridiana OX=29570 GN=folE PE=3 SV=1

SEQ ID NO: 8884 - protein, 183 aa, Halomonas meridiana
  misc_feature (1)..(183): tr|A0A1N6CYF8|A0A1N6CYF8_9GAMM GTP cyclohydrolase 1 OS= Halomonas meridiana OX=29570 GN=folE PE=3 SV=1
MTDDLAQHYRQIISALGENPDREGLRDTPKRAAKAMQFLNAGYHQSLEEIVNGAVFESQTDEMVLVKDIELYSMCEHHLLPFIGKCHIAYLPSGRVLGLSKFARIVDMYARRMQIQENLTREIAEAVQQVTQARGVAVVIEARHLCMMMRGVEKQNSSMTSSVMLGGFRSSQATRQEFLMLIN

SEQ ID NO: 8885 - protein, 185 aa, Halomonas muralis
  misc_feature (1)..(185): tr|A0A1G9MS76|A0A1G9MS76_9GAMM GTP cyclohydrolase 1 OS= Halomonas muralis OX=119000 GN=folE PE=3 SV=1
MTEELANHYREIIAGLGEDPSREGLRDTPKRAAKAMQFLTHGYSQTLEELVNGAVFASETDEMVLVKDIELYSMCEHHMLPFIGKCHIAYLPKGKVLGLSKFARIVDMYARRLQIQENLTRQIAEAVQQVTQASGVAVVIEAKHMCMMMRGVEKQNSSMTSSVMLGGFRENQPTRQEFLMLVNGH

SEQ ID NO: 8886 - protein, 294 aa, Halomonas nigrificans
  misc_feature (1)..(294): tr|A0A2A4HS02|A0A2A4HS02_9GAMM GTP cyclohydrolase FolE2 OS=Halomonas nigrificans OX=2042704 GN=folE2 PE=3 SV=1
MTALTLPDIAQQPTCLPGTLSWVGMEGIALPVALAGSLVNAKVSAGVSLEAAEVRGIHMSRLYMALESLEHQSLTQTSIQRVLGAFLDSHQGLSEHAYLTFSGEVLLKRDALISPLSGWKSYPFTLRGQLTPSGFQLELDVSVGYSSTCPCSAALARQLIQQAFAEDFDDIPLTKQSVLAWLGSEEGILATPHSQRSYAHCSVRLKESDDIPLAALIERIEKALGTALQTAVKRIDEQAFALANGQNLMFCEDAAKRLERMLRSMDAISGFQLKVVHAESLHAHDAVARCEWQW

SEQ ID NO: 8887 - protein, 183 aa, Halomonas nigrificans
  misc_feature (1)..(183): tr|A0A2A4HT82|A0A2A4HT82_9GAMM GTP cyclohydrolase 1 OS= Halomonas nigrificans OX=2042704 GN=folE PE=3 SV=1
MTDDIALHYRQIITALGENPDREGLRDTPKRAAKAMQFLTAGYQQSLEQIINGAVFESQTDEMVLVKDIELYSMCEHHLLPFIGKCHIAYLPSGKVLGLSKFARIVDMFARRMQIQENLTREIAEAVQQVTQARGVAVVVEARHLCMMMRGVEKQNSSMTSSMMLGSFRTNQATRQEFLTLIS

SEQ ID NO: 8888 - protein, 302 aa, Halomonas nitroreducens
  misc_feature (1)..(302): tr|A0A431V5Y9|A0A431V5Y9_9GAMM GTP cyclohydrolase FolE2 OS=Halomonas nitroreducens OX=447425 GN=folE2 PE=3 SV= 1
MSEDRLADIAGQATAAAPRLAWVGMEGIDLPLQVAGQPMAGTADAGVSLDAPGARGIHMSRLYLALERLAGQDLSLMRLREVLTHFLDSHHGLARRAFLDLEGEALLRRPALVSPLAGWKAYPLAVRSCLTPEGFEARLELAIGYSSTCPCSAALARQLIQQRFDDDFAEEAAIERESLRDWLGSERGIAATPHSQRSQAHLQLRLDPDTQTLPVVEVIDRVEAALGTALQTAVKRVDEQAFALANGQNLMFCEDAARRLNRVLREQPGVAGFRLRVVHAESLHAHDAVARSQWNWPEAEPT

SEQ ID NO: 8889 - protein, 185 aa, Halomonas nitroreducens
  misc_feature (1)..(185): tr|A0A3S0R2L5|A0A3S0R2L5_9GAMM GTP cyclohydrolase 1 OS= Halomonas nitroreducens OX=447425 GN=folE PE=3 SV=1
MTEQLANHYRRIIEELGENPEREGLRDTPKRAAKAMQFLNHGYTQSLEGIVNGAVFESDTDEMVLVKDIELYSMCEHHLLPFIGKCHIAYLPRGKVLGLSKFARIVDMYARRMQIQENLTRQIAEAVQQVTEARGVAVVIEARHLCMMMRGVEKQNSSMTSSVMLGAFREHQSTRQEFLTLVHGR

SEQ ID NO: 8890 - protein, 183 aa, Halomonas olivaria; identical to SEQ ID NO: 8855
  misc_feature (1)..(183): tr|A0A3T1DPS3|A0A3T1DPS3_9GAMM GTP cyclohydrolase 1 OS= Halomonas olivaria OX=390919 GN=folE1 PE=3 SV=1

SEQ ID NO: 8891 - protein, 298 aa, Halomonas pacifica
  misc_feature (1)..(298): tr|A0A510X5F7|A0A510X5F7_9GAMM GTP cyclohydrolase FolE2 OS=Halomonas pacifica OX=77098 GN=folE2 PE=3 SV=1
MDKHPLEDIAAAPSTRLGTLNWVGMEGIALPLKVAGQAIAGRASAGVSLDDPTARGIHMSRLYLALAELEGQELSLSRLAAVLDAFLASHRGLAHQAFLDLEGEALLRRPALISPLSGWKTYPFTLRCRRDALGLHAILEVSVGYSSTCPCSAALARQLIQQAFAEDFTEMPVTREAVHAWLGSDQGVLATPHSQRSQAHLALRLAIDGDALPLLALVDRVERSLGTALQTAVKRVDEQAFALANGQNLMFCEDAARRLHHSLREQPGIEGFSLRVVHAESLHAHDAVARSQWNWQQA

SEQ ID NO: 8892 - protein, 189 aa, Halomonas pacifica
  misc_feature (1)..(189): tr|A0A510X7P1|A0A510X7P1_9GAMM GTP cyclohydrolase 1 OS= Halomonas pacifica OX=77098 GN=folE1 PE=3 SV=1
MGHTMTEALAEHYRQIILGLGEDPEREGLRDTPKRAAKAMQFLTRGYEQSLETLVNGAVFESETDEMVLIKDIELYSLCEHHLLPFIGKCHIAYLPSGKVLGLSKFARIVDMYARRMQIQENLTRQIAEAVQQVTQARGVAVVIEAKHMCMMMRGVEKQNSSMTSSVMLGAFRENAPTRQEFLTLINGR

SEQ ID NO: 8893 - protein, 185 aa, Halomonas pantelleriensis
  misc_feature (1)..(185): tr|A0A1G9VLI1|A0A1G9VLI1_9GAMM GTP cyclohydrolase 1 OS= Halomonas pantelleriensis OX=48727 GN=folE PE=3 SV=1
MTEELANHYRQIIAGLGEDPQREGLRDTPKRAAKAMQFLTRGYHQSLEELINGAVFESETDEMVLVKDIELYSMCEHHLLPFIGKCHIAYLPNGRVLGLSKFARIVDMYARRMQIQENLTRQIAEAVLQVTEARGVAVVIEAKHMCMMMRGVEKQNSSMTSSVMLGAFRENQPTRQEFLTLVNAR

SEQ ID NO: 8894 - protein, 185 aa, Halomonas saccharevitans
  misc_feature (1)..(185): tr|A0A1I7AP37|A0A1I7AP37_9GAMM GTP cyclohydrolase 1 OS= Halomonas saccharevitans OX=416872 GN=folE PE=3 SV=1
MTEELANHYRHIIHELGENPDREGLRDTPKRAAKAMQFLNRGYSQSLEEIINGAVFESETDEMVLVKDIELYSMCEHHLLPFIGKCHIAYLPSGKVLGLSKFARIVDMYARRMQIQENLTRQIAEAVQQVTEARGVAVVIEARHLCMMMRGVEKQNSSMTSSVMLGAFREKQSTRQEFLTLVNGR

SEQ ID NO: 8895 - protein, 298 aa, Halomonas saccharevitans
  misc_feature (1)..(298): tr|A0A1I6XEG7|A0A1I6XEG7_9GAMM GTP cyclohydrolase FolE2 OS=Halomonas saccharevitans OX=416872 GN=folE2 PE=3 SV =1
MPPHHLPDVADDRTVRDSPLSWVGMEQVALPLQLAGRPVNGRVSAGVSLDDPAARGIHMSRLYLALAELQGHELTVSRMAAVLASFLDTHQGLSDVAFLDLSGEALLERPALISSLSGWQAYPFALRCRRDAEGLAITLDLTVGYSSTCPCSAALARQLIQQAFDEDFVDIPITRGAVHAWLGSEQGVLATPHSQRSQAHLSLRLGENVDELPLAALVERVEQALGTPLQTAVKRIDEQAFALANGQNLMFCEDAARRLHHALCEQPGIDGFSLRVVHAESLHAHDAVARSQWNWQEA

SEQ ID NO: 8896 - protein, 185 aa, Halomonas shengliensis
  misc_feature (1)..(185): tr|A0A1H0IM35|A0A1H0IM35_9GAMM GTP cyclohydrolase 1 OS= Halomonas shengliensis OX=419597 GN=folE PE=3 SV=1
MTEELANHYRQIIRAVGEDPGREGLLDTPKRAAKAMQFLNRGYLQSLEEIVNGAVFESETDEMVLVKDIELYSMCEHHLLPFIGKCHIAYLPSGKVLGLSKFARIVDMYARRMQIQENLTRQIAEAVQEVTQARGVAVVIEAQHLCMMMRGVEKQNSSMTSSVMLGAFRDNISTRQEFLTLIHGR

SEQ ID NO: 8897 - protein, 183 aa, Halomonas songnenensis
  misc_feature (1)..(183): tr|A0A2T0V6D2|A0A2T0V6D2_9GAMM GTP cyclohydrolase 1 OS= Halomonas songnenensis OX=1176243 GN=folE PE=3 SV=1
MTDDIAQHYRQIITALGENPDREGLRDTPKRAAKAMQFLNAGYQQSLEEIINGAVFESQTDEMVLVKNIELYSMCEHHLLPFIGKCHIAYLPDGKVLGLSKFARIVDMYARRMQIQENLTREIADAVQQVTGAKGVAVVVEARHLCMMMRGVEKQNSSMTSSVMLGGFRDNPATRQEFLTLIN

SEQ ID NO: 8898 - protein, 185 aa, Halomonas sp.
  misc_feature (1)..(185): tr|A0A4Y8W5P5|A0A4Y8W5P5_9GAMM GTP cyclohydrolase 1 OS= Halomonas sp. TBZ202 OX=2599398 GN=folE PE=3 SV=1
MTEELANHYRQILLELGEDPDREGLRDTPKRAAKAMQFLNRGYTQRLEEIINGAVFASETDEMVLVKDIELYSMCEHHLLPFIGKCHIAYLPNGKVLGLSKFARIVDMFARRMQIQENLTRQIAEAVQQVTDARGVAVVIEARHLCMMMRGVEKQNSSMTSSVMLGAFRENQPTRQEFLTLVNGR

SEQ ID NO: 8899 - protein, 185 aa, Halomonas sp.
  misc_feature (1)..(185): tr|A0A369L6R6|A0A369L6R6_9GAMM GTP cyclohydrolase 1 OS= Halomonas sp. DQ26W OX=2282311 GN=folE PE=3 SV=1
MIEELANHYRQIILELGENPEREGLRDTPKRAAKAMQFLNRGYAQTLEEIINGAVFESETDEMVLVKDIELYSMCEHHLLPFIGKCHIAYLPNGRVLGLSKFARIVDMFARRMQIQENLTRQIAEAVQQVTDARGVAVVVEARHLCMMMRGVEKQNSSMTSSVMLGAFRENQPTRQEFLTLVNSR

SEQ ID NO: 8900 - protein, 183 aa, Halomonas subglaciescola
  misc_feature (1)..(183): tr|A0A1M7EEY6|A0A1M7EEY6_9GAMM GTP cyclohydrolase 1 OS= Halomonas subglaciescola OX=29571 GN=folE PE=3 SV=1
MTDEIAQHYRQIMQHLGENPDREGLKDTPQRAAKAMQFLTAGYHQTLEEIVNGAVFESQTDEMVLVKDIELYSICEHHLLPFIGKCHVAYLPRGKVLGLSKFARITDMFARRLQIQENLTLQIAEAVQEVTDARGVAVVIEAQHLCMMMRGVEKQNSSMSSSVMLGAFRNNQPTRQEFLTLIS

SEQ ID NO: 8901 - protein, 183 aa, Halomonas subterranea
  misc_feature (1)..(183): tr|A0A1H9W4R9|A0A1H9W4R9_9GAMM GTP cyclohydrolase 1 OS= Halomonas subterranea OX=416874 GN=folE PE=3 SV=1
MTDDIAQYYQQIISALGENPEREGLKDTPLRAAKAMQFLTHGYHQSLQEIVNGAVFESQTDEMVLVKDIELYSMCEHHLLPFIGKCHIAYLPNGNVLGLSKFARIVDMYARRMQIQENLTREIAEAVQQVTQARGVAVVIEARHLCMMMRGVEKQNSSMTSSVMLGDFRANQATRQEFLTLVN

SEQ ID NO: 8902 - protein, 300 aa, Halomonas subterranea
  misc_feature (1)..(300): tr|A0A1H9PJ81|A0A1H9PJ81_9GAMM GTP cyclohydrolase FolE2 OS=Halomonas subterranea OX=416874 GN=folE2 PE=3 SV=1
MTVLTLPDIASQTTRLPSTLTWVGMEGIALPAQLGTRSVIVKLDAGVSLDDSEARGIHMSRLYLALSPLEDAPLTLPAVKDILSAFLTSQEGLSQHAYLNVEGELPLKRQALISPLAGWKSYPFSLCCQLTPDGFQAELGVTVGYSSTCPCSAALARQSIQQAFKEDFSEIPLTQSAVLAWLGSEEGILATPHSQRSFVECSLRLAEGENDELPIADWLESTIDRIQTALGTALQTAVKRIDEQAFALANGQNLMFCEDAARRVDKALRQAPGVSGFQLKVVHAESLHAHNAVARSEWNG

SEQ ID NO: 8903 - protein, 96 aa, Halomonas sulfidaeris
  misc_feature (1)..(96): tr|A0A455U7I7|A0A455U7I7_9GAMM GTP cyclohydrolase 1 OS= Halomonas sulfidaeris OX=115553 GN=HSBAA_28030 PE=3 SV= 1
MSDDIAEHYRQIISALGEDPNREGLRDTPKRAAKAMQFLNAGYSQSLETIINGAVFESETDEMVLVKDIELYSMCEHHLCPSLVNAILLICQTAKC

SEQ ID NO: 8904 - protein, 183 aa, Halomonas sulfidaeris
  misc_feature (1)..(183): tr|A0A365TTB8|A0A365TTB8_9GAMM GTP cyclohydrolase 1 OS= Halomonas sulfidaeris OX=115553 GN=folE PE=3 SV=1
MSDDIAEHYRQIISALGEDPDREGLRDTPKRAAKAMQFLNAGYSQSLETIINGAVFESETDEMVLVKDIELYSMCEHHLLPFIGKCHIAYLPSGKVLGLSKFARIVDMYARRMQIQENLTREIAEAVQEVTQAKGVAVVIEARHLCMMMRGVEKQNSSMTSSVMLGGFRSNQATRHEFLMLIN

SEQ ID NO: 8905 - protein, 185 aa, Halomonas taeanensis; identical to SEQ ID NO: 8839
  misc_feature (1)..(185): tr|A0A1G7TX33|A0A1G7TX33_9GAMM GTP cyclohydrolase 1 OS= Halomonas taeanensis OX=284577 GN=folE PE=3 SV=1

SEQ ID NO: 8906 - protein, 300 aa, Halomonas titanicae
  misc_feature (1)..(300): tr|A0A558JER4|A0A558JER4_9GAMM GTP cyclohydrolase FolE2 OS=Halomonas titanicae OX=664683 GN=folE2 PE=3 SV=1
MTVLTLPDVASQTARSPAALTWVGMEGIALPVRLGSRSVTAKLNAGVSLDDADARGIHMSRLYLALAPLEEAPLTLQTVKDVLNAFLTSQDGLSQHAYLSIEGELPLKRQALISLLAGWKSYPFTLRGQLTPAGFQAELDLTVGYSSTCPCSAALARQLIQQAFEEDFAGIPLTKSAVSAWLGSEEGILATPHSQRSSVECSLRLSESESGEWPLADSIENSIDRIERALGTALQTAVKRIDEQAFALANGQNLMFCEDAARRLDKALRQAPGVTGFQLKVVHAESLHAHDAVARSEWNW

SEQ ID NO: 8907 - protein, 188 aa, Halomonas titanicae
  misc_feature (1)..(188): tr|L9UDE7|L9UDE7_9GAMM GTP cyclohydrolase 1 OS=Halomona s titanicae BH1 OX=1204738 GN=folE PE=3 SV=1
MMRLNMSDDIAEHYRQIISALGEDPAREGLRDTPKRAAKAMQFLNAGYTQSLDDIINGAVFESQTDEMVLVKDIELYSMCEHHLLPFIGKCHIAYLPNGKVLGLSKFARIVDMYARRMQIQENLTREIAEAVQEVTEAKGVAVVIEARHLCMMMRGVEKQNSSMTSSVMLGGFRQNQATRQEFLMLIS

SEQ ID NO: 8908 - protein, 183 aa, Halomonas urumqiensis
  misc_feature (1)..(183): tr|A0A2N7UFF1|A0A2N7UFF1_9GAMM GTP cyclohydrolase 1 OS= Halomonas urumqiensis OX=1684789 GN=folE PE=3 SV=1
MTEELANHYRQIILELGEDPEREGLRDTPKRAAKAMQFLNRGYVQSLEDIVNGAVFESETDEMVLVKDIELYSMCEHHLLPFIGRCHIAYLPRGRVLGLSKFARIVEMYARRMQIQENLTRQIAEAVQQVTEARGVAVVIEAKHMCMMMRGVEKQNSSMTSSVMLGAFRDNQSTRQEFLTLIN

SEQ ID NO: 8909 - protein, 185 aa, Halomonas ventosae
  misc_feature (1)..(185): tr|A0A4R6ZRA6|A0A4R6ZRA6_9GAMM GTP cyclohydrolase 1 OS= Halomonas ventosae OX=229007 GN=folE PE=3 SV=1
MTEELANHYRRIIHELGEDPDREGLRDTPKRAAKAMQFLNRGYTQSLEEIVNGAVFESETDEMVLVKDIELYSMCEHHLLPFIGKCHIAYLPSGKVLGLSKFARIVDMYARRMQIQENLTRQIAEAVLQVTEARGVAVVIEARHLCMMMRGVEKQNSSMTSSVMLGAFREKQSTRQEFLTLVSGR

SEQ ID NO: 8910 - protein, 185 aa, Halomonas ventosae
  misc_feature (1)..(185): tr|A0A4V3C226|A0A4V3C226_9GAMM GTP cyclohydrolase 1 OS= Halomonas ventosae OX=229007 GN=folE PE=3 SV=1
MTEELANHYRRIIHELGEDPDREGLRDTPKRAAKAMQFLNRGYAQSLEEIVNGAVFESETDEMVLVKDIELYSMCEHHLLPFIGKCHIAYLPSGKVMGLSKFARIVDMYARRMQIQENLTRQIAEAVQRVTEAHGVAVVIEARHLCMMMRGVEKQNSSMTSSVMLGAFRVKQSTRQEFLTLVSGR

SEQ ID NO: 8911 - protein, 183 aa, Halomonas venusta; identical to SEQ ID NO: 8856
  misc_feature (1)..(183): tr|A0A3S8YSQ0|A0A3S8YSQ0_9GAMM GTP cyclohydrolase 1 OS= Halomonas venusta OX=44935 GN=folE PE=3 SV=1

SEQ ID NO: 8912 - protein, 294 aa, Halomonas venusta
  misc_feature (1)..(294): tr|A0A3Q8WFA8|A0A3Q8WFA8_9GAMM GTP cyclohydrolase FolE2 OS=Halomonas venusta OX=44935 GN=folE2 PE=3 SV=1
MTAFTLPDIAQQPARLPGTLSWVGMEGIALPVKLAGCQVNANVSAGVSLEEADARGIHMSRLYTALDALEHQPLTATLIHRVLAAFLESHQALSENAYLSFSGDALLKRDALISPLSGWKSYPFTLRSQLTPSGFKIELDVSVGYSSTCPCSAALARQLIQQAFSEDFEEIPLTKQTVLAWLGSEEGVLATPHSQRSVAHCSIRLAGNDVIPLADLIERIENALGTALQTAVKRIDEQAFALANGQNLMFCEDAAKRLDGALRKMADISGFQLKVVHAESLHAHDAVARSEWQW

SEQ ID NO: 8913 - protein, 185 aa, Halomonas xianhensis
  misc_feature (1)..(185): tr|A0A4R8FV98|A0A4R8FV98_9GAMM GTP cyclohydrolase 1 OS= Halomonas xianhensis OX=442341 GN=folE PE=3 SV=1
MTEELANHYREIIAGLGEDPDREGLRDTPKRAAKAMQFLTRGYSQSLESLVNGAVFASETEEMVLVKDIELYSMCEHHLLPFIGKCHIAYMPRGKVLGLSKFARIVDMYARRMQIQENLTREIAEAIQQVTGAHGVAVVIEAKHMCMMMRGVEKQNSNMTTSVMLGAFRNNQTTRQEFLLLVNGR

SEQ ID NO: 8914 - protein, 298 aa, Halomonas xianhensis
  misc_feature (1)..(298): tr|A0A1I3DNR8|A0A1I3DNR8_9GAMM GTP cyclohydrolase FolE2 OS=Halomonas xianhensis OX=442341 GN=folE2 PE=3 SV=1
MTQHELIDVAQGASVVDGTLAWVGMEAIALPFQVGGQPVNGQVSAGVSLDDPLTRGIHMSRLYLALAELENQELTLPRVAAVLENYLDSHAALSDTAFLDLRGEVLIKRPALISPLAGWKAYPFTLRCRRDGRGLQAMLDLTVGYSSTCPCSAALARQLIQQAFDEDFTDMPISREAVRAWLGSEQGILATPHSQRSQAHLSLRLADGIEKLPIEALIDDVERSLGTALQTAVKRIDEQAFTLANGQNLMFCEDAARRLHRTLRRQASVDGFQLRVVHAESLHAHDAVARSEWNWTNA

SEQ ID NO: 8915 - protein, 187 aa, Halopeptonella vilamensis
  misc_feature (1)..(187): tr|A0A4Q8D2M2|A0A4Q8D2M2_9GAMM GTP cyclohydrolase 1 OS= Halopeptonella vilamensis OX=531306 GN=folE PE=3 SV=1
MNPDLDHHFEQIITGLGEDTRRGGLEKTPYRAARAMEYLTQGYHQSLEELVNGAMFESDNDEMVIVRDVEFYSLCEHHVLPFFGHAQVGYIPNGRVIGLSKIARIVDMYARRLQIQENLAREVAEAIQHVTDARGVAVQMDARHMCMMMRGVSKQNAEMSSSVMLGTFRESVSSRNEFLQLIRRRPA

SEQ ID NO: 8916 - protein, 213 aa, Halopolyspora algeriensis
  misc_feature (1)..(213): tr|A0A368VII7|A0A368VII7_9ACTN GTP cyclohydrolase 1 OS= Halopolyspora algeriensis OX=1500506 GN=folE PE=3 SV=1
MTSTTGSAGPGDETAPGDDAVAKPRFDHARAEAAIRELLCAAGEDPDREGLQETPARVARAYQELFAGLYTDPDEVLNRTFGESHEELVLVRDIPVYSQCEHHLLPFHGMAHVGYIPNEHGRVTGLSKIARLVDLYAKRPQVQERLTSQIADALARKLDPRGVIVVVDAEHLCMGMRGVRKAGSTTTTSAVRGIFRSSSSSRSEALSLIRDGR

SEQ ID NO: 8917 - protein, 266 aa, Halorhodospira halochloris
  misc_feature (1)..(266): tr|A0A125T2Q3|A0A125T2Q3_HALHR GTP cyclohydrolase FolE2 OS=Halorhodospira halochloris OX=1052 GN=folE2 PE=3 SV =1
MEDVQGRADYRRIDINKVGIKDIRHPVRVRDRTGYEQHTVATFNMYVNLPQHFKGTHMSRFVSILSSHDREITVESFHEMLAEMTERLEAGSGHIEMTFPYFINKRAPISGVQSLMDYEVTFIGEMHPDRHETWVRVAVPLTSLCPCSKQIAERGAHNQRSLVIITALMNGFVWLEELIEIAEEEGSCDLYGLLKRPDEKYVTERAYDNPKFVEDVVRDIAARLNEDDRISAYQVTSENYESIHNHSAFALIEQDKRGYDSPFPCV

SEQ ID NO: 8918 - protein, 259 aa, Halorhodospira halophila
  misc_feature (1)..(259): sp|A1WYI8|GCH4_HALHL GTP cyclohydrolase FolE2 OS=Halorh odospira halophila (strain DSM 244 / SL1) OX=349124 GN= folE2 PE=3 SV=1
MEDVQGRADTRQIEINKVGIKDIRHPVRVRDRTGRDQHTVATFSMYVNLPQHFKGTHMSRFVSILEGHDREVTVESFHEMLAEMTDRLEAHSGHIEMAFPYFVNKQAPVTGVESLMDYEVTFIGEIHGGRHETWVRVAVPITTLCPCSKEIAERGAHNQRSLVVVTALMDGFVWLEELIDLVEREGSCELYGLLKRPDEKHVTERAYDNPKFVEDVVRDIAGRLNDDGRIAAYSVTSENYESIHNHSAFALIEQDKRGR

SEQ ID NO: 8919 - protein, 188 aa, Halospina denitrificans
  misc_feature (1)..(188): tr|A0A4R7K374|A0A4R7K374_9GAMM GTP cyclohydrolase 1 OS= Halospina denitrificans OX=332522 GN=folE PE=3 SV=1
MSDNTEGLAADYRDIISRLGEDPDREGLADTPGRAAKAMEFLTRGYHQNLESVVNGAIFESSNDEMVVVQDIELYSLCEHHLLPFVGKCHLAYLPNGRVIGLSKCARIVDMFARRLQIQESLTRQIAEAIQEVTGAKGVAVVIEANHMCMMMRGVEKQNSTMKTSVMLGAFRESQATRMEFLTLLKRG

SEQ ID NO: 8920 - protein, 188 aa, Halospina sp.
  misc_feature (1)..(188): tr|A0A5J5FLG1|A0A5J5FLG1_9GAMM GTP cyclohydrolase I Fol E OS=Halospina sp. K52047b OX=2614160 GN=folE PE=4 SV=1
MEHNTEGLAADYRDIIQRLGEDPEREGLAETPERAAKAMEFLTHGYHQDLDSIVNGAIFESSNDEMVAVQDIELYSLCEHHLLPFVGKCHLAYLPNGRVLGLSKCARIVDMFARRLQIQESLTRQIAEAIQEVTGAKGVAVVIEAHHMCMMMRGVEKQNSTMKTSVMLGTFRESQATRMEFLTLLKRS

SEQ ID NO: 8921 - protein, 185 aa, Halotalea alkalilenta
  misc_feature (1)..(185): tr|A0A172YF16|A0A172YF16_9GAMM GTP cyclohydrolase 1 OS= Halotalea alkalilenta OX=376489 GN=folE PE=3 SV=1
MTDQLARHYRAVISELGEDPTREGLRDTPERAAKAMQFLTYGYRQTLEEIVNGAVFSSSTDELVLVKDIELYSLCEHHMLPFIGRCHIGYLPSGKVLGLSKFARIVDMYARRLQIQEELTHQIASAVAEVTGAAGVGVIIEARHMCMMMRGVQKQNSSMKTSVMLGEMRENLNTRQEFLTLVGTR

SEQ ID NO: 8922 - protein, 222 aa, Halothece sp.
  misc_feature (1)..(222): tr|K9YCL6|K9YCL6_HALP7 GTP cyclohydrolase 1 OS=Halothec e sp. (strain PCC 7418) OX=65093 GN=folE PE=3 SV=1
MSNGSVKKVTNQVSLDTASSVEAAVTKDNTQEPQMQEMMGAVRTLLQGVGEDPEREGLLKTPKRVAEAMQFLTQGYEQSLEELVNGAIFDEGHNEMVLVRDIDVFSLCEHHMLPFMGKAHVAYIPNQKVVGLSKLARIVEMYSRRLQVQERLTRQIAEAIQTILDPQGVAVVMEATHMCMVMRGVQKPGSWTVTSAMLGVFQEDHKTREEFLNLIRHQPSFH

SEQ ID NO: 8923 - protein, 258 aa, Halothiobacillaceae bacterium
  misc_feature (1)..(258): tr|A0A545SKC7|A0A545SKC7_9GAMM GTP cyclohydrolase FolE2 OS=Halothiobacillaceae bacterium OX=2268194 GN=folE2 P E=3 SV=1
MSAAIPDIQGLIDTRRIAIDAVGIKGLRHPLVVQEPDGSSQSTVATCSFTVNLPHDRKGTHMSRFVGLLGDAPRAISAPLIADMHREMLVLLEADEGGIEMSFPFFVRKIAPMSGVSSLMDYVARLSAFGDREATHVTMGVEVPVTSLCPCSKEISQYGAHNQRSHIRVDVQADADLSLTELIQRLEAQASCELYGLLKRADEKHITERAYENPKFVEDMIRDVAHALGEEPRIHGFSVDVENFESIHNHSAYARLSR

SEQ ID NO: 8924 - protein, 221 aa, Halothiobacillaceae bacterium
  misc_feature (1)..(221): tr|A0A545SA81|A0A545SA81_9GAMM GTP cyclohydrolase 1 OS= Halothiobacillaceae bacterium OX=2268194 GN=folE PE=3 S V=1
MAVQKELDGIVHGGGTTLEGAGKAGRFPLLNSPHGKAESVLMEKHYEAILGAVGEDISRDGLLDTPKRAAKAMRFLTKGYHETLAQVIGGALFESDNDEMVIVKEIELYSLCEHHLLPMVGRVHVGYLPDGKVLGLSKVARIVEMFARRLQIQENMTRQIAEAILEATHAKGVAVVVEAQHFCMMMRGVEKQNSWTTTSMMLGRFREDRGTRMEFLSLIGK

SEQ ID NO: 8925 - protein, 263 aa, Halothiobacillus neapolitanus
  misc_feature (1)..(263): tr|D0L1D3|D0L1D3_HALNC GTP cyclohydrolase FolE2 OS=Halo thiobacillus neapolitanus (strain ATCC 23641 / c2) OX=5 55778 GN=folE2 PE=3 SV=1
MTQSAMPDVQSSFDPRNIEIDRVGIKAIKHPLTIVDGDHRQATIAECELTVALPADKKGTHMSRFVALLNAEPLVLSLATLPDWTRRMAELLHAQTADVLFAMPFFVEKSAPVSGQKALMDYQLSLSAHLDDQGQIETQLELVVPVTSLCPCSKEISSYGAHNQRSHVTVTARVTDASLSIVDLIGKIEDQGSCALWGLLKRPDEKYITEYAFDHPKFVEDMIRDVAGTLADYPGIDGYRVTVENFESIHNHSAWAVIDRLGS

SEQ ID NO: 8926 - protein, 203 aa, Halothiobacillus neapolitanus
  misc_feature (1)..(203): tr|D0KW31|D0KW31_HALNC GTP cyclohydrolase 1 OS=Halothio bacillus neapolitanus (strain ATCC 23641 / c2) OX=55577 8 GN=folE PE=3 SV=1
MSPLHEDDFPEPLDQSQTRIATIEAAVHQILDALGEDPNREGLQDTPKRVAKALLYLTHGLNKPLESAIGNALFASDNDEMVVVRNIEFYSLCEHHMLPIIGHVDIGYIPQGKVIGLSKLARIVDLYARRLQIQENMTQQIADAVRESTDARGVAVQVRAAHMCMAMRGVEKVNAETITSMMLGTFRSDARARNEFLQLIGRG

SEQ ID NO: 8927 - protein, 266 aa, Halothiobacillus sp.
  misc_feature (1)..(266): tr|A0A258QJI3|A0A258QJI3_9GAMM GTP cyclohydrolase FolE2 OS=Halothiobacillus sp. 28-55-5 OX=1970386 GN=folE2 PE =3 SV=1
MSHTAPPAAMPDVQSSFDARNIEIDRVGIKAIKHPLTVVDGAYRQASIAECELTVALPADKKGTHMSRFVALLNAEPLELSLATLPDWTRQMAELLHAHAADVQFTLPFFVEKAAPVSGQKALMDYQLSLISQLNAQGHSETRLALVVPVTSLCPCSKEISAYGAHNQRSHVSVTVRVTDSALSIRDLIRAIEDQGSCALWGLLKRPDEKFITEYAFDHPKFVEDMIRDVAGTLATYAGIDGYRVTVENFESIHNHSAWAVIDRLG

SEQ ID NO: 8928 - protein, 266 aa, Halothiobacillus sp.
  misc_feature (1)..(266): tr|A0A257QDF7|A0A257QDF7_9GAMM GTP cyclohydrolase FolE2 OS=Halothiobacillus sp. 20-53-49 OX=1970383 GN=folE2 P E=3 SV=1
MSHTAPPAAMPDVQSSFDARNIEIDRVGIKAIKHPLTVVDGAYRQASIAECELTVALPADKKGTHMSRFVALLNAEPLVLSLATLPDWTRQMAELLHAHAADVQFTLPFFVEKAAPVSGQKALMDYQLSLISQLNAQGHSETRLALVVPVTSLCPCSKEISAYGAHNQRSHVSVTVRVTDSALSIRDLIRAIEDQGSCALWGLLKRPDEKFITEYAFDHPKFVEDMIRDVAGTLATYAGIDGYRVTVENFESIHNHSAWAVIDRLG

SEQ ID NO: 8929 - protein, 188 aa, Halovibrio sp.
  misc_feature (1)..(188): tr|A0A2A2FBT1|A0A2A2FBT1_9GAMM GTP cyclohydrolase 1 OS= Halovibrio sp. YL5-2 OX=2032626 GN=folE PE=3 SV=1
MEHNTEGLAADYRDIIRRLGEDPQREGLAETPERAAKAMEFLTRGYHQDLDSIVNGAIFESSNDEMVAVQDIELYSLCEHHLLPFVGKCHLAYLPNGRVLGLSKCARIVDMFARRLQIQESLTRQIAEAIQEVTGAKGVAVVIEAHHMCMMMRGVEKQNSTMKTSVMLGTFRESQATRMEFLTLLKRS

SEQ ID NO: 8930 - protein, 183 aa, Halovibrio variabilis
  misc_feature (1)..(183): tr|A0A511UJS2|A0A511UJS2_9GAMM GTP cyclohydrolase 1 OS= Halovibrio variabilis OX=31910 GN=folE1 PE=3 SV=1
MSDDIAHHYRQIISALGEDPDREGLRDTPQRAAKAMQFLNAGYSQSLEGIVNGAVFESQTDEMVLVKDIELYSMCEHHLLPFIGKCHIAYLPNGKVLGLSKFARIVDMFARRMQIQENLTREIAEAVQEVTQAKGVAVVIEARHLCMMMRGVEKQNSSMTSSVMLGAFRSNQATRQEFLMLIN

SEQ ID NO: 8931 - protein, 220 aa, Hamiltonella defensa; identical to SEQ ID NO: 6213
  misc_feature (1)..(220): sp|C4K3L4|GCH1_HAMD5 GTP cyclohydrolase 1 OS=Hamiltonel la defensa subsp. Acyrthosiphon pisum (strain 5AT) OX=5 72265 GN=folE PE=3 SV=1

SEQ ID NO: 8932 - protein, 192 aa, Handelsmanbacteria sp.
  misc_feature (1)..(192): tr|A0A1F6C2D8|A0A1F6C2D8_HANXR GTP cyclohydrolase 1 OS= Handelsmanbacteria sp. (strain RIFCSPLOWO2_12_FULL_64_1 0) OX=1817868 GN=folE PE=3 SV=1
MAEDKIKRIAFHVEEMMKVLGLDLRDPHLKDTPGRVARMYLEIFGGLEDGNEPQITTFPNEERYDNMVMVKDVSFFSVCAHHMIPFFGRAHIAYIPGERIVGLSKLARIVEFYARRPQLQERLTEQITRFIEEKIHPKGSMVVVEARHLCMEMRGVEKPGALTVTSAVRGLFRDKMAREEFLDLLQLRREQG

SEQ ID NO: 8933 - protein, 216 aa, Hansschlegelia sp.
  misc_feature (1)..(216): tr|A0A4Q9GE63|A0A4Q9GE63_9RHIZ GTP cyclohydrolase 1 OS= Hansschlegelia sp. Dub OX=2528245 GN=folE PE=3 SV=1
MDAVVQHPYARVPIPAPKPAAAAAARRPTREEAEAAVRTLIAWAGDNPQREGLLDTPKRVVKAYAELFSGYSQNAAKDLERVFEDVQGYDDMVVLRDIPYFSHCEHHMVPFFGKAHVAYFPSNGVVGLSKIARVIDTYAKRLQTQETLTAQVVAAIDENLNPRGVAVMIEGEHMCMSMRGIQKQGVSTVTTQFTGLFQDDPAEQARFISLVRSVSR

SEQ ID NO: 8934 - protein, 216 aa, Hansschlegelia zhihuaiae
  misc_feature (1)..(216): tr|A0A4Q0MGA8|A0A4Q0MGA8_9RHIZ GTP cyclohydrolase 1 OS= Hansschlegelia zhihuaiae OX=405005 GN=folE PE=3 SV=1
MDAVVQHPRARVPIPAPKTIAGVPRPTREQAEAAVRTLIAWAGDDPAREGLIDTPKRVVKAYAELFSGYGKSAAEHLERVFEDVQGYGDMVVLRDIPYHSHCEHHMVPFVGKAHVAYYPSNGVVGLSKIARVVDVFAKRLQTQEALTSQIAEAIDEHLKPRGVAVMLEGEHMCMSMRGIQKEGVSTVTTQFSGVFRDDASEQVRFITLVRAGQRTG

SEQ ID NO: 8935 - protein, 198 aa, Hanstruepera neustonica
  misc_feature (1)..(198): tr|A0A2K1DYT3|A0A2K1DYT3_9FLAO GTP cyclohydrolase 1 OS= Hanstruepera neustonica OX=1445657 GN=folE PE=3 SV=1
MPYRKFEEYNMQVTDDVKNRYKKIIEDLGEDVTRDGLLKTPERASKAMQFLTQGYHQDAAAILKSAMFKESYNEMVIVKDIELYSLCEHHILPFFGKAHIAYIPNGHIVGLSKIPRVVDIFARRLQVQERLTEQILDCINDTLKPQGVAVVIEAAHMCMMMRGVQKQNSVTTTSGFRGQFEKIETRNEFLKLISDKFS

SEQ ID NO: 8936 - protein, 225 aa, Hanstruepera neustonica
  misc_feature (1)..(225): tr|A0A2K1DZH2|A0A2K1DZH2_9FLAO GTP cyclohydrolase 1 OS= Hanstruepera neustonica OX=1445657 GN=folE PE=3 SV=1
MKFNTDIEDFDAMGNDHIGTSANTPLRKDAFKLNQDEKIEIIKDDVRRIMETLGLDLTDDSLKGTPNRVAKMFVKELFGGLDPAKKPSASTFENKYKYGEMLVEKNITVYSTCEHHLLPIVGKAHVAYISNGTVVGLSKMNRIVDYYAKRPQVQERLTIQIVKELQEVLGTEDVACVIDAKHLCVNSRGIRDTESSTVTSEFGGKFKEKATRREFLDYIKLDTSF

SEQ ID NO: 8937 - protein, 235 aa, Hapalosiphon sp.
  misc_feature (1)..(235): tr|A0A0M0SIF8|A0A0M0SIF8_9CYAN GTP cyclohydrolase 1 OS= Hapalosiphon sp. MRB220 OX=1704290 GN=folE PE=3 SV=1
MTIASSNGSNRFQSPLVPDFTEAITTRPDRNTHDGRQAELHPPQEEQMEQMVEAVRTLLLGVGEDPEREGLLKTPKRVAEAMRFLTSGYNQSLEEIVNGAIFDEGHSEMVLVRDIGVFSLCEHHMLPFMGKAHVAYIPNQKVVGLSKLARIVEMYSRRLQVQERLTRQIAEAVQTILEPQGVAVVIEATHMCMVMRGVQKPGSWTVTSAMVGVFEEEHKTREEFFNLIRHQAAIF

SEQ ID NO: 8938 - protein, 235 aa, Hapalosiphonaceae cyanobacterium
  misc_feature (1)..(235): tr|A0A328IBS7|A0A328IBS7_9CYAN GTP cyclohydrolase 1 OS= Hapalosiphonaceae cyanobacterium JJU2 OX=2109628 GN=fol E PE=3 SV=1
MTIVSSNGSNRFQSPLIPDFTEAITTRPDRNTHDGRQPDLHPPQEEQMDEMVEAVRTLLLGVGEDPEREGLLKTPKRVAEAMRFLTSGYNQSLEEIVNGAIFDEGHSEMVLVRDINVFSLCEHHMLPFMGKAHVAYIPNQKVVGLSKLARIVEMYSRRLQVQERLTRQIAEAVQTILEPQGVAVVIEATHMCMVMRGVQKPGSWTVTSAMVGVFEEEHKTREEFFNLIRHQAAIF

SEQ ID NO: 8939 - protein, 209 aa, Hartmannibacter diazotrophicus
  misc_feature (1)..(209): tr|A0A2C9D572|A0A2C9D572_9RHIZ GTP cyclohydrolase 1 OS= Hartmannibacter diazotrophicus OX=1482074 GN=folE PE=3 SV=1
MYVLFNQGNADGAAKKQVARPQRPTREEAEQAVRTLIAWAGDDPDREGLVDTPARVAKAYGELFGGYDQDANEQLARVFEEVGGYKDMILVRDIPFFSHCEHHMVPFIGKAHIAYYPNAGVVGLSKLARVVDVFSRRLQTQENLTAQIADAIEEALKPRGVAVLVEAEHQCMSMRGVQKQGVSTLTTQFTGVFDRDPTEQVRFMTMVRS

SEQ ID NO: 8940 - protein, 183 aa, Hathewaya histolytica
  misc_feature (1)..(183): tr|A0A4U9R8Z1|A0A4U9R8Z1_HATHI GTP cyclohydrolase 1 OS= Hathewaya histolytica OX=1498 GN=folE PE=3 SV=1
MDKIKIQEAVKVIIDAVGEDANREGLKDTPLRISKMYEEIFKGLNEDPKDHLSKTFTVDNDNLVIEKDIHFYSMCEHHFLPFFGKAHIAYIPNGKVVGLSKLARTVEVFARRPQLQERLTEQIGNALLDNLDCKGVMVVVEAEHLCMSMRGIKKPGSKTVSMFVKGSLEKDINMQNHILTLIK

SEQ ID NO: 8941 - protein, 184 aa, Hathewaya proteolytica
  misc_feature (1)..(184): tr|A0A1M6N6S5|A0A1M6N6S5_9CLOT GTP cyclohydrolase 1 OS= Hathewaya proteolytica DSM 3090 OX=1121331 GN=folE PE=3 SV=1
MIDKEKIENAVEMLLQGIGEDPNREGLKDTPQRIARMFQEIFAGMEEEPSKHLSKTFQVENNEMVMERDITFHSMCEHHLMPFFGKVHIAYVPNGKVVGISKLARTVEVFARRLQIQEKMTAQIAHAIMNELNPKGVMVMVEAEHLCMSMRGIKKPGTNTVTVVKLGEFEENREKVEDFYRMLR

SEQ ID NO: 8942 - protein, 188 aa, Hazenella coriacea
  misc_feature (1)..(188): tr|A0A4R3L1H0|A0A4R3L1H0_9BACL GTP cyclohydrolase 1 OS= Hazenella coriacea OX=1179467 GN=folE PE=3 SV=1
MEIDHRKIEEAVRMILEAVGEDPNREGLLDTPARVARMYKEIFSGLNEDPEEHFSVIFSEDHEELVIVKDIPFFSTCEHHLVPFFGRAHVGYIPQGGRVTGLSKLARAIETVARRPQLQERITSTVADSIMEKLDPHGVIVVVEAEHMCMTMRGVKKPGSKTITTSVRGLFKEDATARAEAINLIGIK

SEQ ID NO: 8943 - protein, 180 aa, Helicobacter acinonychis
  misc_feature (1)..(180): sp|Q17WX5|GCH1_HELAH GTP cyclohydrolase 1 OS=Helicobact er acinonychis (strain Sheeba) OX=382638 GN=folE PE=3 S V=1
MENFFNQFFENIGEDKNREGLKNTPKRVQELWNFLYKGYKEDPKVALKSAYFQGVCDEMIVAQHIEFYSTCEHHLLPFFGNISLGYIPKEKIIGISAIAKLIEIYSKRLQIQERLTTQIAETFDEIIEPRGVIVICEAKHLCMSMQGVQKQNAIIKTSALKGLFKKDPKTRAEFMQLLKS

SEQ ID NO: 8944 - protein, 181 aa, Helicobacter ailurogastricus
  misc_feature (1)..(181): tr|A0A0K2XBI6|A0A0K2XBI6_9HELI GTP cyclohydrolase 1 OS= Helicobacter ailurogastricus OX=1578720 GN=folE PE=3 SV =1
MFKDCLEELFLSVGEDPKREGLINTPKRVKALWADLMAGYKDDPREILNSTVLAPTRGLVVLQNIEFYSVCEHHLLPFFGRISVGYLPDSKIVGLGAIVRLVECFSRRLQIQERLGAQIAKGLQECLEPKGVGVFCVAKHLCIAMQGVQKQESVLKTSCRLGVFEEPSVYAEFLQSLNVPV

SEQ ID NO: 8945 - protein, 181 aa, Helicobacter ailurogastricus
  misc_feature (1)..(181): tr|A0A0K2Y4G5|A0A0K2Y4G5_9HELI GTP cyclohydrolase 1 OS= Helicobacter ailurogastricus OX=1578720 GN=folE PE=3 SV =1
MFKDCLEELFLSVGEDPKREGLINTPKRVKALWADLMAGYKDDPREILNSTVLAPTRGLVVLQNIEFYSVCEHHLLPFFGRISVGYLPDSKIVGLGAIVRLVECFSRRLQIQERLGAQIAKGLQECLEPKGVGVLCVAKHLCIAMQGVQKQESVLKTSCRLGVFEEPSVYAEFLQSLNVPV

SEQ ID NO: 8946 - protein, 178 aa, Helicobacter anseris
  misc_feature (1)..(178): tr|A0A3D8J4E0|A0A3D8J4E0_9HELI GTP cyclohydrolase 1 OS= Helicobacter anseris OX=375926 GN=folE PE=3 SV=1
MFDFEKFLLQIGEDPKREGLSQTPSRIQKLYADIFDGYKQDSSKALGSIFNEENFDEMITLQNIEFYSMCEHHLLPFFGFINIGYIPDKKLAGIGGLARLVDIFSHRLQIQERLTTQIADTLMELLEPKGVMVTCKATHLCMRMQGIQKQHTDIHTSAVRGIFKSDSKTRAEFIALTK

SEQ ID NO: 8947 - protein, 179 aa, Helicobacter apodemus
  misc_feature (1)..(179): tr|A0A2U8FC86|A0A2U8FC86_9HELI GTP cyclohydrolase 1 OS= Helicobacter apodemus OX=135569 GN=folE PE=3 SV=1
MEESIKKFFDYIGEDREREGLLNTPNRVIESWKHLYSGYKSNPREILDVVFSDGACNEMVILKAIEFYSVCEHHLLPFFGKISIGYIPDSKVVGISKLARLVEVYSRRLQIQEKMTTQIADTLMEVLQPKGVMVVAEAQHMCMIMRGVEKQNSIMITSAIRGLFKSDIKTREEFMGHIR

SEQ ID NO: 8948 - protein, 179 aa, Helicobacter apodemus
  misc_feature (1)..(179): tr|A0A4U8UC43|A0A4U8UC43_9HELI GTP cyclohydrolase 1 OS= Helicobacter apodemus OX=135569 GN=folE PE=3 SV=1
MEESIKKFFDYIGEDREREGLLDTPNRVIESWKHLYSGYKSNPREILDAVFSDGACNEMVILKAIEFYSVCEHHLLPFFGKISIGYIPDSKVVGISKLARLVEVYSRRLQIQEKMTTQIADTLMEVLQPKGVMVVAEAQHMCMIMRGVEKQNSIMITSAIRGLFKSDIKTREEFMGHIR

SEQ ID NO: 8949 - protein, 188 aa, Helicobacter aurati
  misc_feature (1)..(188): tr|A0A3D8J938|A0A3D8J938_9HELI GTP cyclohydrolase 1 OS= Helicobacter aurati OX=137778 GN=folE PE=3 SV=1
MADKKPEQILSQYLDFFFQSIGENPQREGLKETSRRLIESNAFLYSGYAKNPNDILDSLFSEGACDEMVIVKHIEFYSMCEHHFLPFFGEISIGYIPDKKVVGLSNISELVEVFARRLQIQENLTTQIADTIMQVLKPKGTMVVCEALHLCMAMRGVEKQKARVITSAVRGLFKKDSRTRMEFMQLIK

SEQ ID NO: 8950 - protein, 201 aa, Helicobacter bilis
  misc_feature (1)..(201): tr|N2BN33|N2BN33_9HELI GTP cyclohydrolase 1 OS=Helicoba cter bilis WiWa OX=1235804 GN=folE PE=3 SV=1
MSSKKSISKMPKINMETHIKNTQNYMQDLFCFIGEDSKREGLIKTPERVAKLHEMLYSGYEIDPNSILDSVFSDGACNEMVVVRDIEFYSMCEHHLLPFFGKISIGYIPDKKVVGISNLSKLVEVFARRLQIQEKLTTQIADTIMHSLKPKGAMVVCEALHLCMAMRGNAKQNSKILTSAVRGLFQQDSRTRMEFMQLIKT

SEQ ID NO: 8951 - protein, 201 aa, Helicobacter bilis; identical to SEQ ID NO: 8950
  misc_feature (1)..(201): tr|A0A4U8TXP7|A0A4U8TXP7_9HELI GTP cyclohydrolase 1 OS= Helicobacter bilis OX=37372 GN=folE PE=3 SV=1

SEQ ID NO: 8952 - protein, 183 aa, Helicobacter bizzozeronii
  misc_feature (1)..(183): tr|F8KRC3|F8KRC3_HELBC GTP cyclohydrolase 1 OS=Helicoba cter bizzozeronii (strain CIII-1) OX=1002804 GN=folE PE =3 SV=1
MCDLEQLLNKWFASIGENPQREGLKDTPKRLEKLWGDLMAGYKSNPQEILQGGFDTCGCEGLVVLKNMEFYSLCEHHLLPFFGHISLGYIPNEKIVGLGAIARLVECFSRRLQIQERLSTQIADTFNQIVHPKGVAVVCSAKHLCMAMQGVQQQDSTIKTSVLRGIFKEDTHTRAEFMELLRS

SEQ ID NO: 8953 - protein, 85 aa, Helicobacter bizzozeronii
  misc_feature (1)..(85): tr|H5VEQ3|H5VEQ3_HELBI GTP cyclohydrolase 1 OS=Helicoba cter bizzozeronii CCUG 35545 OX=1002805 GN=HBZS_121830 PE=3 SV=1
MCDLEQLLNKWFASIGEDPQREGLKDTPKRLEKLWGDLMAGYASNPQEILQGGFGTCGCGGLVVLKNMEFYSLCEHHLLSLFWAY

SEQ ID NO: 8954 - protein, 182 aa, Helicobacter brantae
  misc_feature (1)..(182): tr|A0A3D8J233|A0A3D8J233_9HELI GTP cyclohydrolase 1 OS= Helicobacter brantae OX=375927 GN=folE PE=3 SV=1
MYRDFFEKLCKSVGENPHREGLKNTPQRLEQSLGELLSGYHKEAKEVFHTTFCEIPYNEMIVIKNVEFYSMCEHHLLPFFGSITIGYIPQEKIAGISDFAKLIEMYARRLQTQENLTFEIIETLMRELSPKGAMLVCEATHLCMAMRGVEKKSSTLLTSAVRGIFKESSKTRAEFLEHIKKC

SEQ ID NO: 8955 - protein, 180 aa, Helicobacter canadensis
  misc_feature (1)..(180): tr|C5ZWT0|C5ZWT0_9HELI GTP cyclohydrolase 1 OS=Helicoba cter canadensis MIT 98-5491 OX=537970 GN=folE PE=3 SV=1
MEDYIKAFFDHIGEDKEREGLLETPKRVIKSWEHLYSGYKSDPKEVLGKCFSDGACDEMVVLKNIEFYSVCEHHLLPFFGKISIGYIPNAKVVGISKLARLVEVFSRRLQIQEKMTGQIADTIMEVLQAKGAMVVAEAQHMCMVMRGVEKQNSMMITSAVRGLFKSDHRTIEEFMGHIRN

SEQ ID NO: 8956 - protein, 186 aa, Helicobacter canis
  misc_feature (1)..(186): tr|V8CKA7|V8CKA7_9HELI GTP cyclohydrolase 1 OS=Helicoba cter canis NCTC 12740 OX=1357399 GN=folE PE=3 SV=1
MSDKPLTQAELEFHAFCARIGENPTRAGLSNTPKRLQELESTLYSGYATNPKDALGTLFDNDNMDQMVLVKDIVFYSMCEHHLLPFFGHIHIGYVPKDKLAGLSGIVRLVEVFAKRLQIQENLTNQIADELSHLLEPKGVMVVCEAQHLCMSMRASNASPLIKTSALRGLFRSDPKTRAEFLELLS

SEQ ID NO: 8957 - protein, 184 aa, Helicobacter canis
  misc_feature (1)..(184): tr|A0A377J4X0|A0A377J4X0_9HELI GTP cyclohydrolase 1 OS= Helicobacter canis OX=29419 GN=folE PE=3 SV=1
MSDTTQVEQAFRAFCARIGEDPNRAGLSNTPKRLQELESTLYRGYTTSPKDALGALFSNDSMDQMVLVKDIEFYSMCEHHLLPFFGAIHIGYVPRDTLAGFSGIVRLVEAFAKRLQIQENLTNQIADELSRLLKPKGVMVVCEARHLCMSMRASNQNPLIKTSALRGLFRSDPKTRAEFLELLS

SEQ ID NO: 8958 - protein, 180 aa, Helicobacter cetorum
  misc_feature (1)..(180): tr|I0EN12|I0EN12_HELC0 GTP cyclohydrolase 1 OS=Helicoba cter cetorum (strain ATCC BAA-429 / MIT 00-7128) OX=182 217 GN=folE PE=3 SV=1
MEKFFNQFFENIGEDKNREGLKDTPKRVIELWNFLYKGYKEDPKVALKSAYFQGVCDEMVIAQHIEFYSTCEHHLLPFFGHISVGYIPNEKIVGISAIAKLIEIYSKRLQIQERLTTQIAETFNEIIEPKGVIVVCEAKHLCMSMQGVQKQNTIIKTSALKGLFKKDPKTRAEFMQLLKS

SEQ ID NO: 8959 - protein, 180 aa, Helicobacter cetorum
  misc_feature (1)..(180): tr|I0ETB5|I0ETB5_HELCM GTP cyclohydrolase 1 OS=Helicoba cter cetorum (strain ATCC BAA-540 / MIT 99-5656) OX=116 3745 GN=folE PE=3 SV=1
MENFFNQFFENIGEDKNREGLKDTPKRVQELWNFLYKGYKEDPKIALKSAYFQGVCDEMVIAQHIEFYSTCEHHLLPFFGSISVGYIPNEKIVGISAIARLIEIYSKRLQIQERLTTQIAETFNEIIEPKGVIVVCEAKHLCMSMQGVQKQNAIIKTSALKGLFKKDPKTRAEFMQLLKS

SEQ ID NO: 8960 - protein, 181 aa, Helicobacter cholecystus
  misc_feature (1)..(181): tr|A0A3D8IX85|A0A3D8IX85_9HELI GTP cyclohydrolase 1 OS= Helicobacter cholecystus OX=45498 GN=folE PE=3 SV=1
MYKEFFENLCKKIGENPHREGLLKTPKRLEQSHLELFSGYKKSAQEVFHTTFCEIPYNEMIVIKNIEFYSMCEHHLLPFFGTMSIGYIPKKKIAGIGDFAKLIEMYARRLQTQENLTFQIIESLMQELSPQGAMLVCEATHLCMTMRGAEKKSSTLLTSALRGIFKENPKTRNEFLEHIKA

SEQ ID NO: 8961 - protein, 192 aa, Helicobacter cinaedi
  misc_feature (1)..(192): tr|I7GZ38|I7GZ38_9HELI GTP cyclohydrolase 1 OS=Helicoba cter cinaedi CCUG 18818 = ATCC BAA-847 OX=537971 GN=fol E PE=3 SV=1
MKTPQDKALEQSSKAFFESLCAFVGEDSKREGLEATPKRIATSFAEMLDGYAQSPKVALGSVFEDGVCDEMIVLKKLPFYSMCEHHLLPFFGFISIGYIPDSKLVGISGLARLAEVFTHRLQIQEQLTAQIANALMSELSPKGVMVVCEARHLCLEMRGKQRQSHIITSALRGLFKKDSKTRAEFMQLLNNP

SEQ ID NO: 8962 - protein, 192 aa, Helicobacter cinaedi
  misc_feature (1)..(192): tr|A0A377JS99|A0A377JS99_9HELI GTP cyclohydrolase 1 OS= Helicobacter cinaedi OX=213 GN=folE PE=3 SV=1
MKTPQDKALEQSSKAFFESLCAFVGEDSKREGIESTPKRIATSFAEMLDGYAQSPKDALGSVFEDGVCDEMIVLKKLPFYSMCEHHLLPFFGFISIGYIPDSKLVGISGLARLAEVFTHRLQIQEQLTAQIANALMSELSPKGVMVVCEARHLCLEMRGKQRQSHIITSALRGLFKKDSKTRAEFMQLLNNP

SEQ ID NO: 8963 - protein, 185 aa, Helicobacter equorum
  misc_feature (1)..(185): tr|A0A3D8IQ02|A0A3D8IQ02_9HELI GTP cyclohydrolase 1 OS= Helicobacter equorum OX=361872 GN=folE PE=3 SV=1
MQEVLQEFEQFFAKLCEHIGEDTNREGLKNTPKRILESFQTLFSGYSQNPQELLGATFKEGLCDEMVIAKDIEFYSMCEHHLLPFFGHISIGYIPDKYLAGISSLARLVESFARRLQIQERLTEQIAQCLVETLQPKGVIVVCQAQHLCMSMRGVHKNPQIITSALRGLFKRDSKTRTEFMQLIK

SEQ ID NO: 8964 - protein, 179 aa, Helicobacter felis
  misc_feature (1)..(179): tr|E7A988|E7A988_HELFC GTP cyclohydrolase 1 OS=Helicoba cter felis (strain ATCC 49179 / NCTC 12436 / CS1) OX=93 6155 GN=folE PE=3 SV=1
MRALWLELCARIGEDPQREGLKNTPKRLKELWDHLMQGYHLNPEQILQSAFSIERCDGIIVLKDIEFYSMCEHHLLPFFGHVSVGYIPRDRVVGLDAIAKLVEAFSRRLQIQERLSEEIASTFERILQPKGVGVFCVAKHLCMAMRGVQKQDTLVKTSALKGLFKSDARTRAEFMQLLS

SEQ ID NO: 8965 - protein, 184 aa, Helicobacter fennelliae
  misc_feature (1)..(184): tr|A0A2X3DDH0|A0A2X3DDH0_9HELI GTP cyclohydrolase 1 OS= Helicobacter fennelliae OX=215 GN=folE PE=3 SV=1
MDTTAFEEFCNRIGENPKREGLLQTPKRLRECEEFLYGGYKKDPALALGSLFKNNGIDEMITLRNIEFYSMCEHHILPFFGSISIGYVPNEYIAGIGGLAHLIEVFTRRLQIQETLTNQIADTIMEILKPKGVMVVCEAKHLCMSMRGLQKQNATIKTSAVRGLFKSDSKTRTEFLQLIAHSIG

SEQ ID NO: 8966 - protein, 184 aa, Helicobacter fennelliae
  misc_feature (1)..(184): tr|T1D2M4|T1D2M4_9HELI GTP cyclohydrolase 1 OS=Helicoba cter fennelliae MRY12-0050 OX=1325130 GN=folE PE=3 SV=1
MDTTAFEEFCNRIGENPKREGLLQTPKRLRECEEFLYGGYKKDPALALGSLFKNNGIDEMITLRNIEFYSMCEHHILPFFGSISIGYVPNEYIAGIGGLAHLIEVFTRRLQIQETLTNQIADTIMEILKPKGVMVVCEAKHLCMSMRGLQKQNVTIKTSAVRGLFKSDSKTRTEFLQLIAHSIG

SEQ ID NO: 8967 - protein, 185 aa, Helicobacter ganmani
  misc_feature (1)..(185): tr|A0A3D8IGU3|A0A3D8IGU3_9HELI GTP cyclohydrolase 1 OS= Helicobacter ganmani OX=60246 GN=folE PE=3 SV=1
MQQDLQEIIRCIFDYIGEDRNREGLLETPKRVVKSWEHLYSGYKSDPKEILGRVFTEGACDEMVVLKNIEFYSVCEHHLLPFFGKISIGYIPDSKVVGISKLARLVEVYSRRLQIQEKMTSQIADTLMEVLQPKGVMVVAEAKHMCMVMRGVEKQNSIMLTSAIRGLFKSDHRTREEFMGYIKKG

SEQ ID NO: 8968 - protein, 181 aa, Helicobacter heilmannii
  misc_feature (1)..(181): tr|A0A0K2XX43|A0A0K2XX43_HELHE GTP cyclohydrolase 1 OS= Helicobacter heilmannii OX=35817 GN=folE PE=3 SV=1
MFKKCLEELFLSVGEDPKREGLVHTPKRVKALWADLVAGYKQDPKEILSGALCAPSSGLVVLQNIEFYSVCEHHLLPFFGRVSVGYLPGAKIVGLGAIVRLVECFSRRLQIQERLGMQIAKSLQECLEPRGVGVFCVARHLCVAMQGVQKQESVLKTSCRLGAFEEPSVYAEFLQSLNAPV

SEQ ID NO: 8969 - protein, 181 aa, Helicobacter heilmannii
  misc_feature (1)..(181): tr|A0A0K2XXM2|A0A0K2XXM2_HELHE GTP cyclohydrolase 1 OS= Helicobacter heilmannii OX=35817 GN=folE PE=3 SV=1
MFKACFQELCLSVGEDPSREGLQNTPKRVKALWADLMAGYKQDPKEILSAALCAPSSGLVVLQNIEFYSVCEHHLLPFFGRVSVGYLPGAKIVGLGAIVRLVECFSRRLQIQERLGMQIAKSLQECLEPRGVGVLCVARHLCVAMQGVQKQESVLKTSCRLGAFEDPAIYQEFLQSLSAPV

SEQ ID NO: 8970 - protein, 206 aa, Helicobacter hepaticus
  misc_feature (1)..(206): sp|Q7VFG4|GCH1_HELHP GTP cyclohydrolase 1 OS=Helicobact er hepaticus (strain ATCC 51449 / 3B1) OX=235279 GN=fol E PE=3 SV=1
MHNAKRAIFKKRENMQKSSHDSILECNAQAFFESLCQNVGENPTREGLLHTPKRIASAFSDMLNGYAKSPKQALGSVFEDGVCDEMIVLKKLHFYSICEHHLLPFFGHISIGYIPDKKLVGISGLARLTEVFTHRLQIQERLTAQIADALIAELKPKGAMIVCQARHLCLEMRSNVPQSHIITSALRGLFKKDSRTRAEFMQILKD

SEQ ID NO: 8971 - protein, 204 aa, Helicobacter jaachi
  misc_feature (1)..(204): tr|A0A4U8T6F7|A0A4U8T6F7_9HELI GTP cyclohydrolase 1 OS= Helicobacter jaachi OX=1677920 GN=folE PE=3 SV=1
MSAQHHSNNHIDSIHADSVSTLIESSTEFFNILCQNIGENPTREGLLRTPERMAQSLCDMLNGYTISPKAALGSIFKDNVCDEMIILKKLPFYSICEHHLLPFFGTLSIAYIPNKSFVGISGLARLAEIFAHRLQIQEQLTAQIADSIMCELDPKGAIVVCEARHLCLEMRGNHKQSPIITSALRGNFKADSKTRAEFMQLIKD

SEQ ID NO: 8972 - protein, 199 aa, Helicobacter japonicus
  misc_feature (1)..(199): tr|A0A4U8TJW8|A0A4U8TJW8_9HELI GTP cyclohydrolase 1 OS= Helicobacter japonicus OX=425400 GN=folE PE=3 SV=1
MTKHTKDQSTPLQSSLLEQNTQLFFETLCQNVGENSNREGLLRTPERIAQSLSTMLNGYVQSPKEALGSIFEESTYDEMIVLKKLHFYSMCEHHLLPFFGYISIGYIPDKKFVGISGLARLVEVFTHRLQIQENLTAQIANAIESHLHPKGTMIVCEARHLCLEMRGQQPQSPIITSALRGLFKKDSRTRAEFMQLIKD

SEQ ID NO: 8973 - protein, 186 aa, Helicobacter macacae
  misc_feature (1)..(186): tr|V8C960|V8C960_9HELI GTP cyclohydrolase 1 OS=Helicoba cter macacae MIT 99-5501 OX=1357400 GN=folE PE=3 SV=1
MQNQQINEQIFRDFCKRIGEDYTRAGLQATPKRLAQLESILYAGYSLSPKEALGGLFANSGIDEMISIKDIAFYSMCEHHLLPFFGKVHIGYVPKDSIAGISGFVRLVEVYAKRLQIQENLTNQIAQSITELLSPKGVMVVCEAHHLCMSMREATKTQAQITTSAVRGIFKSDSRTRGEFLQLIKG

SEQ ID NO: 8974 - protein, 192 aa, Helicobacter magdeburgensis
  misc_feature (1)..(192): tr|A0A4U8T320|A0A4U8T320_9HELI GTP cyclohydrolase 1 OS= Helicobacter magdeburgensis OX=471858 GN=folE PE=3 SV=1
MKTPQDKALEQNSKAFFESLCAFVGEDSKREGIESTPKRIATSFAEMLDGYAQSPKDALGSVFEDGVCDEMIVLKKLPFYSMCEHHLLPFFGFISIGYIPDSKLVGISGLARLAEVFTHRLQIQEQLTAQIANALMSELSPKGVMVVCEARHLCLEMRGKQRQSHIITSALRGLFKKDSKTRAEFMQLLNNP

SEQ ID NO: 8975 - protein, 186 aa, Helicobacter marmotae
  misc_feature (1)..(186): tr|A0A3D8I4L2|A0A3D8I4L2_9HELI GTP cyclohydrolase 1 OS= Helicobacter marmotae OX=152490 GN=folE PE=3 SV=1
MQTLEQLSQGFFKALCAKIGEDINREGLKTTPSRIATSFTQMLDGYTKSPKEALGSVFEEGAYDEMIVLKKLPFYSMCEHHLLPFFGTLSIGYIPNKHFAGISGLARLAEIFTHRLQIQERLCQEIAHAIEAELKPKGVMVVCEARHLCLEMRGEQRQSHIITSTLLGLFKRDSKTRFEFMQLIKE

SEQ ID NO: 8976 - protein, 184 aa, Helicobacter muridarum
  misc_feature (1)..(184): tr|A0A4U8TIZ5|A0A4U8TIZ5_9HELI GTP cyclohydrolase 1 OS= Helicobacter muridarum OX=216 GN=folE PE=3 SV=1
MEKITSQYLYSLFRHINENPNREGLSNSAKRILELNSFLYKGYERNPSEVLDSVFSDGACDEMVIVKNIEFYSMCEHHLLPFFGEISVGYIPDKRLVGISNIAELVEIFARRLQIQENLTTQIADTIMQTLNPKGTMVVCEALHLCMAMRGVQKQKARVVTSAVRGLFKRDSRTRAEFMQLISS

SEQ ID NO: 8977 - protein, 191 aa, Helicobacter muridarum
  misc_feature (1)..(191): tr|A0A377PUI7|A0A377PUI7_9HELI GTP cyclohydrolase 1 OS= Helicobacter muridarum OX=216 GN=folE PE=3 SV=1
MCQNDTDMEKITSQYLYSLFRHINENPNREGLSNSAKRILELNSFLYKGYERNPSEVLDSVFSDGACDEMVIVKNIEFYSMCEHHLLPFFGEISVGYIPDKRLVGISNIAELVEIFARRLQIQENLTTQIADTIMQTLNPKGTMVVCEALHLCMAMRGVQKQKARVVTSAVRGLFKRDSRTRAEFMQLISS

SEQ ID NO: 8978 - protein, 181 aa, Helicobacter mustelae
  misc_feature (1)..(181): tr|D3UJ19|D3UJ19_HELM1 GTP cyclohydrolase 1 OS=Helicoba cter mustelae (strain ATCC 43772 / LMG 18044 / NCTC 121 98 / 12198) OX=679897 GN=folE PE=3 SV=1
MINFEKFFLKIGEDPNREGLRDTPKRIKKLYESLFDGYHKDIDQALGSVFNEEHFDSMITLKDMEFYSMCEHHLLPFFGKIHIGYIPNEKLAGIGGLARLVDIFAHRLQIQERFTNQIADILMQKLSPKGVMVTCEATHLCMRMQGMQKQHANIHTSAVRGIFKTDSRTRSEFIAFVAAKS

SEQ ID NO: 8979 - protein, 260 aa, Helicobacter pametensis
  misc_feature (1)..(260): tr|A0A3P6LDR9|A0A3P6LDR9_9HELI GTP cyclohydrolase FolE2 OS=Helicobacter pametensis OX=95149 GN=folE2 PE=3 SV=1
MNAIADVQSSPDQRNMPINQVGIKDLHFPLQIQGAEGVQHTIARIGMTVALPASQKGTHMSRFVALMEERQHLVLDFTSLHQLTLDMLERLDAQAGRINISFPFFRKKAAPVSGITSFLDYAVTWQGEVPASGEYSHQIKVLAPVTSLCPCSKEISQYGAHNQRSHVTVTLACHKQEVSIEEIIDLVENKASCQLYGLLKRPDEKYVTEHAYENPKFVEDMVRDIAVALKNDPRIDCFSVESENFESIHNHSAYALIEYP

SEQ ID NO: 8980 - protein, 180 aa, Helicobacter pullorum
  misc_feature (1)..(180): tr|A0A1C0W2K0|A0A1C0W2K0_9HELI GTP cyclohydrolase 1 OS= Helicobacter pullorum OX=35818 GN=folE PE=3 SV=1
MEEKIRAFFDYIGEDRDREGLLETPMRVIKSWEHLYSGYKSDPKEILGKCFSDGACDEMVVLKDIEFYSVCEHHLLPFFGKVSIGYIPDSKVVGISKLARLVEVFSRRLQIQEKMTSQIADTIMEVLQPKGAMVVAEAKHMCMVMRGVEKQNSIMTTSAIRGLFKSDHRTREEFMGHIRS

SEQ ID NO: 8981 - protein, 180 aa, Helicobacter pullorum
  misc_feature (1)..(180): tr|A0A0N1E794|A0A0N1E794_9HELI GTP cyclohydrolase 1 OS= Helicobacter pullorum OX=35818 GN=folE PE=3 SV=1
MEEKIRAFFDYIGEDRDREGLLETPMRVIKSWEHLYSGYKSDPKEILGKCFSDGACDEMVVLKDIEFYSVCEHHLLPFFGKISIGYIPDSKVVGISKLARLVEVFSRRLQIQEKMTSQIADTIMEVLQPKGAMVVAEAKHMCMVMRGVEKQNSIMTTSAIRGLFKSDHRTREEFMGHIRS

SEQ ID NO: 8982 - protein, 243 aa, Helicobacter pylori
  misc_feature (1)..(243): sp|O25613|GTPC1_HELPY GTP cyclohydrolase 1 type 2 OS=He licobacter pylori (strain ATCC 700392 / 26695) OX=85962 GN=HP_0959 PE=1 SV=1
MALVKEVLVVLNRLSPFELQESWDNSGLNVGSENSEFSEIVACLEITLKIALNAPQNALIITHHPLIFKPLKTLNDEIYPGNILKILIQKNVSVISMHTNFDKTHLNKHFAHALLEFDGLVEKGLMLVKENANIEFDALVKKIKSSLGVGSLACVKSSQTIKDLAFVCGSGASMFSSLKAQSCLITGDVKYHDAMIAQSLGISLIDATHYYSERGFALIVAEILHSFNYLVTIENFKNPLQII

SEQ ID NO: 8983 - protein, 180 aa, Helicobacter pylori
  misc_feature (1)..(180): tr|J0LA99|J0LA99_HELPX GTP cyclohydrolase 1 OS=Helicoba cter pylori Hp H-36 OX=992044 GN=folE PE=3 SV=1
MENFFNQFFENIGEDKNREGLKETPKRVQELWKFLYKGYKEDPRVALKSAYFQGVCDEMIVAQNIEFYSTCEHHLLPFFGNISVGYIPKEKIVGISAIAKLIEIYSKRLQIQERLTTQIAETFDEIIEPRGVIVVCEAKHLCMSMQGVQKQNAIIKTSVLRGLFKKDPKTRAEFMQLLKS

SEQ ID NO: 8984 - protein, 216 aa, Helicobacter saguini
  misc_feature (1)..(216): tr|A0A347VX56|A0A347VX56_9HELI GTP cyclohydrolase 1 OS= Helicobacter saguini OX=1548018 GN=folE PE=3 SV=1
MESKRINSKKDSKKRNKESSKIDSIESNKSYKESIESYFENLCQKIGEDSKRESLAKTPKRLMDLNDFLYSGYNADVSEILSHTFNEFDGVFNEMVIIKDIEFYSMCEHHLLPFFGNISIGYIPDKKVVGISSLAKLVEVFAKRLQIQENLTKQIADSIMESLKPKGAMIVCEALHLCMAMRGAQKQNARILTSAVRGIFQKDSKTRTEFMQLIKK

SEQ ID NO: 8985 - protein, 180 aa, Helicobacter sp.
  misc_feature (1)..(180): tr|A0A3D6E4D9|A0A3D6E4D9_9HELI GTP cyclohydrolase 1 OS= Helicobacter sp. OX=218 GN=folE PE=3 SV=1
MEETIRSIFDFIGDDRHREGLLDTPKRVVKSWDKLYSGYTQDPREILGTVFEDGACDEMVVLKNIEFYSMCEHHMLPFFGKVSIGYIPDQKVVGISKLARLVEVFARRLQIQEKMTGQIADTLMEVLQPKGAMVVAEATHMCMVMRGVEKQQSVMVTSAVRGLFKRDARTREEFMGHIRH

SEQ ID NO: 8986 - protein, 199 aa, Helicobacter sp.
  misc_feature (1)..(199): tr|A0A4U8SRM5|A0A4U8SRM5_9HELI GTP cyclohydrolase 1 OS= Helicobacter sp. MIT 03-1616 OX=1548148 GN=folE PE=3 SV =1
MTKHTKNQSLPLQSPLLKQNTQLFFETLCQNVGENPNRDGLLRTPERIAQSFSTMLNGYSQSPKEALGSIFEENVCDEMIVLKKLHFYSMCEHHLLPFFGHISIGYIPDKKLVGISGLARLVEVFAHRLQIQENLTTQIANALDEELKPKGAMIVCEARHLCLEMRNKQPQSPVITSTLRGLFKKDSRTRAEFMQLIQH

SEQ ID NO: 8987 - protein, 183 aa, Helicobacter suis
  misc_feature (1)..(183): tr|A0A510HBJ0|A0A510HBJ0_9HELI GTP cyclohydrolase 1 OS= Helicobacter suis OX=104628 GN=folE PE=3 SV=1
MTQDLWNLLCARIGEDPQREGLKNTPQRVKLLWEFLTSGYQSDPEQILQSAFEIGSTDGIVLLQNIEFYSLCEHHLLPFFGHISIGYIPNDKVVGLSALARFVESFARRLQIQERLTTQIAQTLKRVLEPKGVGVICTAKHLCMAMQGIQKQDSVVKTSVLEGIFKENARTRAEFMQMLSGLV

SEQ ID NO: 8988 - protein, 183 aa, Helicobacter suis; identical to SEQ ID NO: 8987
  misc_feature (1)..(183): tr|E7G524|E7G524_9HELI GTP cyclohydrolase 1 OS=Helicoba cter suis HS5 OX=710394 GN=folE PE=3 SV=1

SEQ ID NO: 8989 - protein, 201 aa, Helicobacter trogontum
  misc_feature (1)..(201): tr|A0A4U8S9Z2|A0A4U8S9Z2_9HELI GTP cyclohydrolase 1 OS= Helicobacter trogontum OX=50960 GN=folE PE=3 SV=1
MSSKNSISEKSNTHMQMHIENTQNYMQNLFQFIGEDGNREGLVKTPERVAKLHETLYSGYAIDPNTILDSVFSDGACNEMVVVRDIEFYSMCEHHLLPFFGKISIGYIPDKKVVGISNLSKLVEVFARRLQIQEKLTTQIADTIMHSLKPKGAMVVCEALHLCMAMRDNAKQNSKILTSAVRGLFQQDSRTRMEFMQLIKT

SEQ ID NO: 8990 - protein, 201 aa, Helicobacter trogontum
  misc_feature (1)..(201): tr|A0A4U8T7Z9|A0A4U8T7Z9_9HELI GTP cyclohydrolase 1 OS= Helicobacter trogontum OX=50960 GN=folE PE=3 SV=1
MSSKNSISEKSNTHMQMHIENTQNYMQNLFQFIGEDSNREGLVKTPERVAKLHETLYSGYAIDPNTILDSVFSDGACNEMVVVRDIEFYSMCEHHLLPFFGKISIGYIPDKKVVGISNLSKLVEVFARRLQIQEKLTTQIADTIMHSLKPKGAMVVCEALHLCMAMRGNAKQNSKILTSAVRGLFQQDSRTRMEFMQLIKT

SEQ ID NO: 8991 - protein, 199 aa, Helicobacter typhlonius
  misc_feature (1)..(199): tr|A0A099UEF6|A0A099UEF6_9HELI GTP cyclohydrolase 1 OS= Helicobacter typhlonius OX=76936 GN=folE PE=3 SV=1
MTKHTKNQSLPLQSPLLKQNTQLFFETLCQNVGENPNRDGLLRTPERIAQSFSTMLNGYSQSPKEALGSIFEENVCDEMIVLKKLHFYSMCEHHLLPFFGHISVGYIPDKKLVGISGLARLVEVFAHRLQIQENLTTQIANALDEELKPKGAMIVCEARHLCLEMRNKQPQSPVITSTLRGLFKKDSRTRAEFMQLIQH

SEQ ID NO: 8992 - protein, 183 aa, Helicobacter valdiviensis
  misc_feature (1)..(183): tr|A0A2W6PM10|A0A2W6PM10_9HELI GTP cyclohydrolase 1 OS= Helicobacter valdiviensis OX=1458358 GN=folE PE=3 SV=1
MEEKIEQNFKEILEFIGEDSSREGLAQTPKRLMESFKEIFSGYSVNPSEILGTTFNEGASDEMVVLKDVEFYSMCEHHLLPFYGKVSIGYIPDKKIVGISALVRLVEVFSKRLQIQENMTTQIAKTLMEVLNPKGVMVVVEAQHLCMMMRGVKQQKGTLITSAVRGIFKSDPRTREEFMGHIR

SEQ ID NO: 8993 - protein, 192 aa, Helicobacter winghamensis
  misc_feature (1)..(192): tr|A0A2N3PL32|A0A2N3PL32_9HELI GTP cyclohydrolase 1 OS= Helicobacter winghamensis OX=157268 GN=folE PE=3 SV=1
MPKNIKENTGESTQELIRTIFDCIGEDRNREGLLDTPKRVVKSWEHLYSGYKSDPKEILGRVFTEGACDEMVVLKDIEFYSVCEHHMLPFFGKVSIGYIPDSKVVGISKLARLVEVYSRRLQIQEKMTAQIADTLMEVLQPKGVMVVAEAKHMCMVMRGVEKQNSQMLTSAIRGLFKSDHRTREEFMGLIRS

SEQ ID NO: 8994 - protein, 180 aa, Helicobacteraceae bacterium
  misc_feature (1)..(180): tr|A0A1J5FHU4|A0A1J5FHU4_9HELI GTP cyclohydrolase 1 OS= Helicobacteraceae bacterium CG2_30_36_10 OX=1805215 GN= folE PE=3 SV=1
MMMLHVGENPEREGLLETPQRVRKAYEFIYGGYKENPKEILEKALFTSSNDEMVLIKDIEFYSTCEHHLLPIIGRVHVAYIPNGKVVGLSKIPRVVNVFARRMQIQEQLTEQIADAIMDAISPKGVAVVIAARHMCMEMRGVEKINSTTTSSALRGLFKKDEKTRSEFFSLINSPTGMRY

SEQ ID NO: 8995 - protein, 179 aa, Helicobacteraceae bacterium
  misc_feature (1)..(179): tr|A0A1J4TZQ3|A0A1J4TZQ3_9HELI GTP cyclohydrolase 1 OS= Helicobacteraceae bacterium CG1_02_36_14 OX=1805214 GN= folE PE=3 SV=1
MMLHVGENPEREGLLETPSRVRKAYEFIYGGYKENPKEILEKALFTSSNDEMVLIKDIEFYSTCEHHLLPIIGRVHVAYIPDGKVVGLSKIPRVVNVFARRMQIQEQLTEQIADAIMESIAPKGVAVVVVARHMCMEMRGVEKINSTTTSSALRGLFKKDEKTRSEFFSLINSPSGTRY

SEQ ID NO: 8996 - protein, 190 aa, Heliobacterium modesticaldum
  misc_feature (1)..(190): tr|B0TAY2|B0TAY2_HELMI GTP cyclohydrolase 1 OS=Heliobac terium modesticaldum (strain ATCC 51547 / Ice1) OX=4987 61 GN=folE PE=3 SV=1
MDLMKIEQAVYMILEAIGEDPRREGLVDTPRRVARMYQEILGGLEEDPKRHLEVIFTEEHEEMVLVKDIPLYSVCEHHLLPFYGVAHVAYIPRSGMITGLSKLARLVEGFAKRPQLQERLTAQIADAIVEKLNPQGVLVVIEAEHMCMTMRGVKKPGSRTVTSAVRGIFRSRPATRSEAISLIRSSRNLP

SEQ ID NO: 8997 - protein, 189 aa, Heliophilum fasciatum
  misc_feature (1)..(189): tr|A0A4R2RIT8|A0A4R2RIT8_9FIRM GTP cyclohydrolase 1 OS= Heliophilum fasciatum OX=35700 GN=folE PE=3 SV=1
MDLKKIEQAVTMILEAIGEDPQREGLLDTPKRVARMYQEILGGIEEDPSRHLHVMFNEEHEEMVMVKDIPLYSMCEHHLLPFYGVAHIAYIPQAGRITGLSKIARTVEGFAKRPQLQERLTAQIANSLMDVLEPQGVLVVIEAEHMCMTMRGVKKPGSRTVTSAVRGIFQKNKATRSEAIALLNTGKLP

SEQ ID NO: 8998 - protein, 204 aa, Henriciella algicola
  misc_feature (1)..(204): tr|A0A399RND1|A0A399RND1_9RHOB GTP cyclohydrolase 1 OS= Henriciella algicola OX=1608422 GN=folE PE=3 SV=1
MDAITKEENRGHMDAVRRPTQEEAEDAVRTLLAWAGDDPRREGLLDTPKRVVKAYKEWFQGYEEDPVKYLSRTFDDVQGYDDMVMLREIDVESHCEHHMAPFLGTAYVAYMPTQAVVGISKIARVVEIFAKRLQTQETMTAQICDAITESLAPAGTAVLIDAVHQCMTTRGVHHPNVSTITTQFTGVFKTDKDMRDRFLRLAGR

SEQ ID NO: 8999 - protein, 204 aa, Henriciella barbarensis
  misc_feature (1)..(204): tr|A0A399QZJ2|A0A399QZJ2_9RHOB GTP cyclohydrolase 1 OS= Henriciella barbarensis OX=86342 GN=folE PE=3 SV=1
MDAITRDENRGEMDPVKRPTQQEAEDAVRTLLAWAGDDPRREGLLDTPKRVVKAYKEWFQGYEEDPVKYLSRTFDDVQGYDDMVMLREIDVESHCEHHMAPFLGTAYVAYMPTQAVVGISKIARVVEIFAKRLQTQETMTAQICDAITDSLAPAGTAVLIDAVHQCMTTRGVHHPNVSTITTQFTGVFKTDKDMRDRFLRLAGR

SEQ ID NO: 9000 - protein, 204 aa, Henriciella sp.
  misc_feature (1)..(204): tr|A0A399RLL8|A0A399RLL8_9RHOB GTP cyclohydrolase 1 OS= Henriciella sp. JN25 OX=2305466 GN=folE PE=3 SV=1
MDAITTDKELAKGEPLTRPSQEEAEAAVRTLLAWAGDDPRREGLLDTPKRVVNAYREWFQGYDEDPVKYLSRTFEDVQGYDDMVMLRDIDVESHCEHHMAPFLGKAWVAYMPTQAVVGISKLARVVEIYAKRLQTQETMTAQICDAITDSLAPSGVAVMIDAVHQCMTTRGVHHPNVSTITTQFTGVFKTDKDMRDRFLRLTGR

SEQ ID NO: 9001 - protein, 204 aa, Henriciella sp.
  misc_feature (1)..(204): tr|A0A2D8YC05|A0A2D8YC05_9RHOB GTP cyclohydrolase 1 OS= Henriciella sp. OX=1968823 GN=folE PE=3 SV=1
MDAITKDENRDHMDPVKRPTQQEAEEAVRVLLAWAGDDPRREGLLDTPKRVVNAYKEWFQGYEEDPVKYLSRTFDDVQGYDDMVMLREIDVVSHCEHHMAPFLGTAYVAYMPTQAVVGISKIARVVEIFAKRLQTQETMTAQICDAITESLAPAGTAVLIDAVHQCMTTRGVHHPNVSTITTQFTGVFKTDKDMRDRFLRLAGR

SEQ ID NO: 9002 - protein, 215 aa, Hephaestia caeni
  misc_feature (1)..(215): tr|A0A397ND43|A0A397ND43_9SPHN GTP cyclohydrolase 1 OS= Hephaestia caeni OX=645617 GN=folE PE=3 SV=1
MDFYDGSTALNNCATGDFGLPADRSPRPTTEQAVRAMIAATGDNPDREGLLETPARVARAWREWFAGYGVDPAALLARTFTESAGYDDTITLRSIPVVSTCEHHLAPITGVAHVAYRPGASVVGISKLSRLVDAYARRLQLQERLTSQIAHTLDDVLKPRGVAVVIEAHHGCMSSRGVNQHGVSLVTHCWLGDFREDPVLRRELLGTLPLPRRDR

SEQ ID NO: 9003 - protein, 206 aa, Hephaestia caeni
  misc_feature (1)..(206): tr|A0A397PDW8|A0A397PDW8_9SPHN GTP cyclohydrolase 1 OS= Hephaestia caeni OX=645617 GN=folE PE=3 SV=1
MSSLHDSPDDGKAVDAPPAIPVPDDVTEAVRTLIRWAGDDPEREGLLDTPRRVARAWKEYCAGYADDPAHHLARVFEEVGGYDEIVLLKDIPFQSHCEHHMAPIHGTAHIAYLPRNHVVGISKLARVLHAYARRLQVQERLTAEVADCIWNALHPVGVAVVIQATHACMTARGVRTPGVGMVTSRMMGAFRDDERSRREVLALMGF

SEQ ID NO: 9004 - protein, 308 aa, Herbaspirillum aquaticum
  misc_feature (1)..(308): tr|A0A225T037|A0A225T037_9BURK GTP cyclohydrolase FolE2 OS=Herbaspirillum aquaticum OX=568783 GN=folE2 PE=3 SV =1
MSVTDKRSPLPDVARDEPASIALPLQWVGMCGIALPLRLPDGTTLPASAEVAVDLPDPQAKGIHMSRLYLLLDTFAGRSRLTPAAVHELLRQMRESHADCQSRAALLRLDFALLQQRAALVTPALTGWKSYPVSLSAQLRDDTLDLRLTVSVAYSSTCPCSAALSRQALQDAFATDFAQHEAIDRDAALGWLARHASVATPHSQRSQAVLSIAVSGDAAQFPLVELIDSAEAALGTAVQTAVRRADEQAFALVNGANLMYVEDAARRLQQALEARFAACSVRVSHFESLHAHDAVATAATPGWQELLR

SEQ ID NO: 9005 - protein, 308 aa, Herbaspirillum huttiense
  misc_feature (1)..(308): tr|A0A4P7AAT9|A0A4P7AAT9_9BURK GTP cyclohydrolase FolE2 OS=Herbaspirillum huttiense OX=863372 GN=folE2 PE=3 SV =1
MPHISKRNPLPDVARDEPASIALPLQWVGMCGIALPLRLSDGMQLPASAEVAVDLPDPQAKGIHMSRLYLLLDAFASRSRLTPTAVHELLRQMRESHADCQSRAALLRLDFALLQQRAALVTPELAGWKSYPVTLTAQLRDTTLALRLTVRITYSSTCPCSAALSRQALQDAFAADFAQQQAIGRDAALGWLARNASLATPHSQRSEAELNIAVSGDAAQFPLLELIDTAEAALGTAVQTAVRRADEQAFALANGANLMYVEDAARRLRQALEARFAACSVRVSHFESLHAHDAVATAVTPGWQELLR

SEQ ID NO: 9006 - protein, 308 aa, Herbaspirillum huttiense
  misc_feature (1)..(308): tr|A0A561L366|A0A561L366_9BURK GTP cyclohydrolase FolE2 OS=Herbaspirillum huttiense OX=863372 GN=folE2 PE=3 SV =1
MSVTSIRSALPDVARDEPAGIALPLQWVGMRGIALPLRLSDGTQLPASAEVAVDLPDPRAKGIHMSRLYLLLDTFAVRSRLTPAAVHALLRQMRESHADCRSRAALLRLDFALLQQRAALVTPELAGWKSYPVSLSAQLRDDALDIRLTVSVAYSSTCPCSAALSRQALQDAFAADFAQQEAIGRDAALGWLARHASVATPHSQRSKAELSIAVGGDAAQFPLLELIDTAEAALGTAVQTAVRRADEQAFALANGANLMYVEDAARRLRQALEARFAACSVRVSHFESLHAHDAVATAATPGWQEPLR

SEQ ID NO: 9007 - protein, 302 aa, Herbaspirillum robiniae
  misc_feature (1)..(302): tr|A0A2D0B768|A0A2D0B768_9BURK GTP cyclohydrolase FolE2 OS=Herbaspirillum robiniae OX=2014887 GN=folE2 PE=3 SV =1
MTARLPDVAREERAAIPLPLDSAGMQGVAAMLRLDGGLLLPARAELAVDLPDPQAKGIHMSRLYRLLDERASGEQLSPPMLASLLQKMLDSHADCGSRVAWLALAFDLPVRRAALVTPGLAGWKTYPARLLAELSDGAIRMQLGVRVEYSSTCPCSAALSRQALRDAFAADFAGAQSVSRDEVLDWISERASLATPHSQRSAADVAVALAPHGERLPLAALIDTAEDALGTPVQTAVKRADEQAFALRNGANLMYVEDAARRLRLALEAGFRACSVRVSHIESLHAHDAVATASTPGWQPLR

SEQ ID NO: 9008 - protein, 309 aa, Herbaspirillum rubrisubalbicans
  misc_feature (1)..(309): tr|A0A0U3LMR4|A0A0U3LMR4_9BURK GTP cyclohydrolase FolE2 OS=Herbaspirillum rubrisubalbicans M1 OX=1078773 GN=fo lE2 PE=3 SV=1
MRMAEFNKRPLPDVAREERPAIALPLEWVGMRGIALPLQLDSGKTVAASAEVAVDLPDPHAKGIHMSRLYLLLDTFASRARLTPVALHELLRQLRESHADCHSRAAALRLDFALLQQRAALVTPDLDGWKSYPVTLSAELHDDVLEISLRVSIAYSSTCPCSAALSRQALQDAFAQAFAGQPAIEREAALAWLQRNASLATPHSQRSQAELSINVSPKAEQLPIAALIDTAEAALGTAVQTAVRRADEQAFALANGANLMYVEDAARRLRQALETRFGACAVRVAHLESLHAHDAVAATATPGWQDRVR

SEQ ID NO: 9009 - protein, 310 aa, Herbaspirillum rubrisubalbicans
  misc_feature (1)..(310): tr|A0A328J9Q9|A0A328J9Q9_9BURK GTP cyclohydrolase FolE2 OS=Herbaspirillum rubrisubalbicans OX=80842 GN=folE2 P E=3 SV=1
MRMAELNQRSLLPDVARDERPAIALPLEWVGMRGIALPLQLDSGKTVAASAEVAVDLPDPHAKGIHMSRLYLLLDTFASRARLTPIALHELLRQLRESHADCHSRAAALRLDFALLQQRAALVTPDLDGWKSYPVTLSAELHDDVLEISLRVSIAYSSTCPCSAALSRQALQDAFAQAFAGQPAIEREAALAWLQRNASLATPHSQRSQAELNINVSPKAEQLPIAALIDTAEAALGTAVQTAVRRADEQAFALANGANLMYVEDAARRLRQALETRFGACAVRVAHLESLHAHDAVAATATPGWQDRVR

SEQ ID NO: 9010 - protein, 308 aa, Herbaspirillum seropedicae
  misc_feature (1)..(308): tr|A0A4R8NKR5|A0A4R8NKR5_HERSE GTP cyclohydrolase FolE2 OS=Herbaspirillum seropedicae OX=964 GN=folE2 PE=3 SV= 1
MTLISKRNSLPDVARDEPASIALPLQWVGMCGIALPLRLADGTPLPASAEVAVDLPDPQAKGIHMSRLYLLLDAFAARSRLTPAAVHELLRQMRESHADCQSRAALLRLDFALLQQRAALVTPELAGWKSYPVRLTAQLRDATLQIRLQVRIAYSSTCPCSAALSRQALQDAFAADFAQHEAIGRDAALGWLARHASLATPHSQRSEAELNIAVSGDAAQFPLSELIDTAEAALGTAVQTAVRRADEQAFALANGANLMYVEDAARRLRQALEARFATCSVRVSHFESLHAHDAVATAVTPGWQELLR

SEQ ID NO: 9011 - protein, 303 aa, Herbaspirillum seropedicae
  misc_feature (1)..(303): tr|D8IWM4|D8IWM4_HERSS GTP cyclohydrolase FolE2 OS=Herb aspirillum seropedicae (strain SmR1) OX=757424 GN=folE2 PE=3 SV=1
MATALPDVAREERASIALPLDWVGMCGIALPVRLDNGQIVPASAEIAVDLPHAQAKGIHMSRLYLLLDRFAAQATLNPAALHALLDQMRASHADCGSRAASLRLDFALLHQRAALVTPALAGWKSYPFTLAAELQQDRLHLTLQVRIAYSSTCPCSAALSRQALQDAFASEFGPHTSVAQPAVLDWLARHGSRATPHSQRSYADLGVTVAQEAAELPLLALIDTAEQALGTAVQTAVRRADEQAFALANGANLMYVEDAARRLRQAVEARFGACAIRVSHVESLHAHDAVAATASPGWSGQLR

SEQ ID NO: 9012 - protein, 311 aa, Herbaspirillum sp.
  misc_feature (1)..(311): tr|A0A542LS12|A0A542LS12_9BURK GTP cyclohydrolase FolE2 OS=Herbaspirillum sp. SJZ130 OX=2572918 GN=folE2 PE=3 SV=1
MGLSVASALPDVARHESSAIALALDWVGMRGIAIPLPPGGRESGSGAPLAATAELAVDLPDPLAKGIHMSRLYRLLGEFARHGELSPRALRRLLLGMIESHADCGSRAARLGLAFDLLQQRPALRTPELAGWQSYPASVQAVQRGHATQVELAVRIQYSSTCPCSAALSRQAVRDAFAADFDDTALVARGDALDWISARASLATPHSQRSEAEVRIRLSPDAAALPVSALIDCAETALATPVQTAVKRADEQAFALLNGANLMYVEDAARRLRRALEQNFGACSVTVSHHESLHPHDAVASCATPGWERID

SEQ ID NO: 9013 - protein, 308 aa, Herbaspirillum sp.
  misc_feature (1)..(308): tr|A0A2E7P6T2|A0A2E7P6T2_9BURK GTP cyclohydrolase FolE2 OS=Herbaspirillum sp. OX=1890675 GN=folE2 PE=3 SV=1
MPLISKRTTLPDVARDEPASIALPLQWVGMCGIALPLRLADGTQLPASAEVAVDLPDPQAKGIHMSRLYLLLDAFASRSRLTPTAVHELLRQMRESHADCQSRAALLRLDFALLQQRAALVTPDLAGWKSYPVTLTAQLRDSTLEIRLQVRIAYSSTCPCSAALSRQALQDAFAADFAQQQAIGRDAALGWLARNASLATPHSQRSEAELNIAVSGDAAQFPLLQLIDTAEAALGTAVQTAVRRADEQAFALANGANLMYVEDAARRLRQALEARFAACSIRVSHFESLHAHDAVATAMTPGWQELLR

SEQ ID NO: 9014 - protein, 213 aa, Herbiconiux ginsengi
  misc_feature (1)..(213): tr|A0A1H3KFX4|A0A1H3KFX4_9MICO GTP cyclohydrolase 1 OS= Herbiconiux ginsengi OX=381665 GN=folE PE=3 SV=1
MSVDRERIEAAVSEILAAIGEDPEREGLLETPRRVAELYAELFGGVGDDPARALRSVFAAPAVKQVAPGGPGAATESGDQPVLIRDITFRSICEHHFLPFEGVVHVAYVPSDRIAGLGSIVSVVESASSRPQLQERLTDDIADAIERGLGARGVLVVVDAKHGCVSARGPRQTRSTTLTLAARGTLVEPAARAEITALIAAPRSDEHGGGDER

SEQ ID NO: 9015 - protein, 216 aa, Herbiconiux sp.
  misc_feature (1)..(216): tr|A0A521MP23|A0A521MP23_9MICO GTP cyclohydrolase 1 OS= Herbiconiux sp. OX=1871186 GN=folE PE=3 SV=1
MATVDRQRIEAAVAELLAAVGDDPARAELRDTPRRVAELYAELYAGVGHDPAGALGSTFETPDAATPANPRPPAQAAAGEPESSPSGRPVLLRDIAFRSVCEHHLLPFEGVAHVAYEPDRIIAGLGGIVSVIECAASRPQLQERLTDDIAEAIERGLGARGVLVVLDARHGCVTARGPRQTASTTVTLAARGSLAEPAARAELMSLIAAPTRGATP

SEQ ID NO: 9016 - protein, 194 aa, Herbidospora sp.
  misc_feature (1)..(194): tr|A0A4U3MCB1|A0A4U3MCB1_9ACTN GTP cyclohydrolase 1 OS= Herbidospora sp. NEAU-GS14 OX=2575442 GN=folE PE=3 SV=1
MVGKPLQVDNARIEAAVREILIAIGEDPGREGLVETPARVARAYAEQFAGLGQRPEDVLTTVFDADHDEMVLVRDIEIYSTCEHHLVPFHGVAHIGYIPNDKGQVTGLSKLARLADLYARRPQVQERLTSQVADALMEVLKPRGAIVVIEAEHMCMTMRGVRKPGAKTITSAVRGIFREDDKTRAEAMSLIIGR

SEQ ID NO: 9017 - protein, 500 aa, Herbihabitans rhizosphaerae
  misc_feature (1)..(500): tr|A0A4Q7KW05|A0A4Q7KW05_9PSEU GTP cyclohydrolase 1 OS= Herbihabitans rhizosphaerae OX=1872711 GN=folE PE=3 SV= 1
MTGFPWQSADGSQPVFDAERAEKAVRELLLACGEDPDRNGLQETPARVARAFREMFAGLYNNPDSVLDKTFDECHDELVLVTDIPLFSTCVPSKQTVNAVGGRKQAREVQVGDQLWTLADGKVEPTTVTQISSHTTRELVEVTTTGGRFTVTPDHPLATPEGWLEAKDVEGTFIEWTHARQLSRDRWRPTLGYDFGYVVGSVCADGTTAERYVSLVVNDRDYAKKFAVSLRRAFGIEARIEPVERPSGHFRVRVTSSYFADLMRQYASGNFPAVVLNDRSTFNGFLDGCTDGDGAPPLDDLAPLIGARFTPKAGGPASHLYVADSWFRKHGFPQQTVRHELIESEWVRVESVRRIEATGTKPYTVYSFKCDPHPTFLIAGHLSHNCEHHLVPFHGVAHVGYIPSEEGKVTGLSKLARLVDLYAKRPQVQERLTSQIADALVRKLNPRGVIVVIEAEHLCMAMRGIRKPGARTTTSAVRGLHKTSVSSRAEALDLINGRTR

SEQ ID NO: 9018 - protein, 261 aa, Herminiimonas arsenicoxydans
  misc_feature (1)..(261): sp|A4G1X0|GCH4_HERAR GTP cyclohydrolase FolE2 OS=Hermin iimonas arsenicoxydans OX=204773 GN=folE2 PE=3 SV=1
MSAIPDVQSTPDTRNIVIQRVGVKGVRYPITVKTSSGVQPSVGSWNMYVRLTEEQKGTHMSRFIALLEENNQPLDVAVFGALMRKMLVLLDADAGRIEVSFPYFINKTAPVSGVQSLMDYEVGLTGEMKNGELEVTLKVLVPVTSLCPCSKKISAYGAHNQRSHITVHAVLNGDLVVEELIAKIEEQASCELYGLLKRPDEKYVTERAYDNPKFVEDLVRDVAGMLNKDERVLAYTLEAENFESIHNHSAYALIERDKRLS

SEQ ID NO: 9019 - protein, 201 aa, Herminiimonas arsenicoxydans
  misc_feature (1)..(201): tr|A4G565|A4G565_HERAR GTP cyclohydrolase 1 OS=Herminii monas arsenicoxydans OX=204773 GN=folE PE=3 SV=2
MSAHAGSAVVSEMEANDFSEHDWRRLLIHLGENPNRQGLQETPKRVQKAWQQWTAGYAQDPAEILKVFSDGAEQYKELIIVRGIPVYSHCEHHLAPFFGTATIGYTPNGKIVGLSKLTRLVDCYARRLQVQERLTIQIAETLMEHVQPLSVGVVIRCRHMCMESRGIQTQGEETVTSALLGEMRSNPALRSEFLTLTREKD

SEQ ID NO: 9020 - protein, 209 aa, Herminiimonas fonticola
  misc_feature (1)..(209): tr|A0A4R6G8Z8|A0A4R6G8Z8_9BURK GTP cyclohydrolase 1 OS= Herminiimonas fonticola OX=303380 GN=folE PE=3 SV=1
MKIHPLDEHLLHTRPTALAEIKDDDFSEHDWRRLLIHLGENPKRQGLQDTPRRVQKAWQHWTAGYAQNPAEILKVFEDGAEQYNELIVVRGIPVYSHCEHHLAPFFGTATIGYTPNGKIVGLSKLTRLVDCFARRLQVQERLTIQIAETLMEHVQPLSVGVVIRCRHMCMESRGIQTPGEETVTSALLGEMRSNLGLRSEFLSLAREKN

SEQ ID NO: 9021 - protein, 268 aa, Herminiimonas fonticola
  misc_feature (1)..(268): tr|A0A4V3BUY9|A0A4V3BUY9_9BURK GTP cyclohydrolase FolE2 OS=Herminiimonas fonticola OX=303380 GN=folE2 PE=3 SV= 1
MNTRDLSLSAMPDVQATPDTRHIVIQRVGVKGVRYPLTVKTSAGTQPSVGTWNMYVHLAEEQKGTHMSRFIALLEDLRGPLDVPAFSKLMRDMLVLLDADAGRIEVSFPYFINKTAPVSGVQSLMDYEVGLTGEIKNGALEITLKVLVPVTSLCPCSKKISAYGAHNQRSHITVHAVLNGDLLVEELIAKIEEQASCELYGLLKRPDEKYVTERAYDNPKFVEDLVRDVAVMLNNEERVLAYTLEAENFESIHNHSAYALIENDKRLK

SEQ ID NO: 9022 - protein, 266 aa, Herminiimonas sp.
  misc_feature (1)..(266): tr|A0A3N7AB74|A0A3N7AB74_9BURK GTP cyclohydrolase FolE2 OS=Herminiimonas sp. KBW02 OX=2153363 GN=folE2 PE=3 SV =1
MNTRDPGLSAIPDVQSTPDTRSIAIQRVGVKGVRYPLTVKTLSGVQPSVGTWNMYVHLAEAQKGTHMSRFIALLEENTQALDVQVFGEIMRKMLALLDADAGRIEVSFPYFINKTAPVSGVQSLMDYEVGFIGELKNDKLEITLKVLVPVTSLCPCSKKISAYGAHNQRSHITVQALLGDDLVVEELIANIEAQASCELYGLLKRPDEKYVTERAYDNPKFVEDLVRDVAVMLNQEQRVLAYTLEAENFESIHNHSAYALIEMDKR

SEQ ID NO: 9023 - protein, 198 aa, Herminiimonas sp.
  misc_feature (1)..(198): tr|A0A3N7C420|A0A3N7C420_9BURK GTP cyclohydrolase 1 OS= Herminiimonas sp. KBW02 OX=2153363 GN=folE PE=3 SV=1
MKQVTNTAQSENDDFSTEDWRRLLTHLGENADRQGLRETPQRVEKAWKHWTSGYDQDPADILKVFEDGAEQYNELIVVRGIPVYSHCEHHLAPFFGTATIGYTPNGKIVGLSKLTRLVDCFAKRLQVQERLTIQIADTLMEHVQPLSVGVVIRCRHMCMESRGIRTPGEETVTSALLGEMRTNLGLRNEFMMLAREKD

SEQ ID NO: 9024 - protein, 206 aa, Herpetosiphon aurantiacus
  misc_feature (1)..(206): tr|A9B5F8|A9B5F8_HERA2 GTP cyclohydrolase 1 OS=Herpetos iphon aurantiacus (strain ATCC 23779 / DSM 785 / 114-95 ) OX=316274 GN=folE PE=3 SV=1
MTLIYSGNGLNGNSAPAVREDMEAAVRTILEGLGEDVDREGLQRTPHRVAKMFGELTAGYHTDPVALINDAIFTVEYNEMVLVRDIEFSSLCEHHMLPFWGKAHVAYVPNGKVLGLSKIPRIVDMFAKRLQVQERLTREIADFVAQTIDASGVAVVVQGAHMCSMIRGVKKANARMVTQSLQGVFKTDPQIRAEFMGHITANFSDD

SEQ ID NO: 9025 - protein, 206 aa, Herpetosiphon geysericola
  misc_feature (1)..(206): tr|A0A0P6XYP0|A0A0P6XYP0_9CHLR GTP cyclohydrolase 1 OS= Herpetosiphon geysericola OX=70996 GN=folE PE=3 SV=1
MTLIYSGNGLNSNSAPAVREDMEAAVKTIIEGLGEDVEREGLQRTPHRVAKMFTELTAGYRTDPVALINEAIFTVDYNEMVLVRDIEFSSLCEHHMLPFWGKAHVAYIPNGKVIGLSKIPRIVDMFAKRLQVQERLTREIADFVAEAIGASGVAVVVHGAHMCSMIRGVKKANARMVTQSLQGVFKTDPQIRAEFMGHITANYSDE

SEQ ID NO: 9026 - protein, 183 aa, Hespellia stercorisuis
  misc_feature (1)..(183): tr|A0A1M6KNU9|A0A1M6KNU9_9FIRM GTP cyclohydrolase 1 OS= Hespellia stercorisuis DSM 15480 OX=1121950 GN=folE PE= 3 SV=1
MDQDKIKEGVRLILEGIGEDVNREGLLETPDRIARMYGEIAGGMSQSAEEPLSKRFHVDNNEMVLEKDIVFYSMCEHHMLPFYGKAHVAYIPDGSVVGLSKIARTVEIFAKRLQIQEQLTAQIADAFVEYLKPQGVMVMIEAEHLCMTMRGVKKPGAQTVTYVTRGVFDENEQLQNKFFRLVK

SEQ ID NO: 9027 - protein, 184 aa, Hespellia stercorisuis
  misc_feature (1)..(184): tr|A0A1M6MMQ2|A0A1M6MMQ2_9FIRM GTP cyclohydrolase 1 OS= Hespellia stercorisuis DSM 15480 OX=1121950 GN=folE PE= 3 SV=1
MDKNKIKEGVRLILEGIGEDVNREGLRETPDRIARMYEEIMAGMLQTAEEPLSKQFRAENNEMIAEKDIVFYSMCEHHMLPFCGKAHIAYIPDGSVVGISKIVRAVEVYAKRLQLQEQLTAQIADAFVEYLHPRGVMVIVEAEHLCMTMRGVKKPGAKTISYVTRGVFEKNPELQNAFFRMVHN

SEQ ID NO: 9028 - protein, 256 aa, Hippea maritima
  misc_feature (1)..(256): tr|F2LY46|F2LY46_HIPMA GTP cyclohydrolase FolE2 OS=Hipp ea maritima (strain ATCC 700847 / DSM 10411 / MH2) OX=7 60142 GN=folE2 PE=3 SV=1
MKLADVQSLRDNRNLPIDKVGVKNLRYPITLLDRTKKRQHTIATVNMYVLLPSDFKGTHMSRFIEVLNENRECIDIRKIGKILKQMREKLNARKSYIEFDFPYFIEKEAPVTKIKSLMSYDCKVEAFGDSHTEELFLNVEVPITSLCPCSKEISSYGAHNQRGVARIRAQLAEFVWIEELVEVAESSASCEIYSLLKRPDEKFVTEKAYNNPMFVEDIARNITLELSKDKRIPHFSVEVENFESIHNHNAYAFINR

SEQ ID NO: 9029 - protein, 204 aa, Hirschia baltica
  misc_feature (1)..(204): tr|C6XNB5|C6XNB5_HIRBI GTP cyclohydrolase 1 OS=Hirschia baltica (strain ATCC 49814 / DSM 5838 / IFAM 1418) OX= 582402 GN=folE PE=3 SV=1
MDAIVKDGAVTRDNNDKRPTREEAEKAVKTLLAWAGDDPEREGLLDTPKRVVKAYEEWFSGYRDDPVKYLSRTFEDVQGYDDIVMLRDIDVESHCEHHMAPFMGKAYVAYMPTDSVVGISKLARVVEIYAKRLQTQETMTSQICEAIEESLKPAGVAVMIDAVHQCMTTRGVHHPNVSTITTQFTGVFKTDKDLRDRFLRLSER

SEQ ID NO: 9030 - protein, 203 aa, Hirschia sp.
  misc_feature (1)..(203): tr|A0A2E4QT48|A0A2E4QT48_9RHOB GTP cyclohydrolase 1 OS= Hirschia sp. OX=2024835 GN=folE PE=3 SV=1
MDAIVKGGAAVPEESLKPSREEAEAAVRTLLAWAGDDPKREGLIDTPKRVVNAYQEWFSGYREDPITYLSRTFEDVQGYDDIVMLRDIDVESHCEHHMAPFMGKAYVAYMPTNAVVGISKLARVVEIYAKRLQTQETMTAQICDAITESLKPAGAAIMIDAVHQCMTTRGVHHPNVSTITTQFTGVFKTDKELRERFLRLCER

SEQ ID NO: 9031 - protein, 368 aa, Histidinibacterium lentulum
  misc_feature (1)..(368): tr|A0A3N2QS37|A0A3N2QS37_9RHOB GTP cyclohydrolase FolE2 OS=Histidinibacterium lentulum OX=2480588 GN=folE2 PE= 3 SV=1
MNILTPLIERDPSRAEVETALELLRNWAETASAEELADLDPRLASLRSGPAAASYPELSRDYPEGFQADHAYRATLPDLQNGPASLIRGEAAQIQHVGISNFRLPIRYRTRDGAMLTLETGVTGTVSLDADKKGINMSRIMRTFYRHAERTFSFEVIEAALDDYKTDLDSLDARIQMRFRFPAKLRSLRSGLEGFQYYDIALELVERAGVRRKMIHLDYVYSSTCPCSLELSEHARMTRGQLATPHSQRSVARLSVEIAAGTGDCLWFEDLIDMARAAVPTETQVMVKREDEQAFAELNAANAIFVEDAARLFCEQLRADARIGDFRVVASHQESLHSHDAVSVLTDGPTFASESLDPRFFESLYHTG

SEQ ID NO: 9032 - protein, 218 aa, Histophilus somni; identical to SEQ ID NO: 8777
  misc_feature (1)..(218): sp|B0UUA9|GCH1_HISS2 GTP cyclohydrolase 1 OS=Histophilu s somni (strain 2336) OX=228400 GN=folE PE=3 SV=1

SEQ ID NO: 9033 - protein, 218 aa, Histophilus somni; identical to SEQ ID NO: 8777
  misc_feature (1)..(218): tr|A0A4S2QWN9|A0A4S2QWN9_HISSO GTP cyclohydrolase 1 OS= Histophilus somni OX=731 GN=folE PE=3 SV=1

SEQ ID NO: 9034 - protein, 200 aa, Hoeflea halophila
  misc_feature (1)..(200): tr|A0A286HKS6|A0A286HKS6_9RHIZ GTP cyclohydrolase 1 OS= Hoeflea halophila OX=714899 GN=folE PE=3 SV=1
MDAIVKKLHDHDNRPTEAEAEEAVRTLLRFIGDDIGREGLRDTPKRVVKAYKEMFAGYDQDAEEELGRTFEEVAGYDDIVLVKDIPFFSHCEHHMVPIIGKAHVAYLPDGKVLGLSKIARVIEIYGRRLQIQETLTAQIAHGIDDALHPRGVAVMIEAEHMCMAMRGIKKQGSTTITTSFTGAFKSDPHEQVRFMTLIRG

SEQ ID NO: 9035 - protein, 204 aa, Hoeflea marina
  misc_feature (1)..(204): tr|A0A317PR75|A0A317PR75_9RHIZ GTP cyclohydrolase 1 OS= Hoeflea marina OX=274592 GN=folE PE=3 SV=1
MDAIIKNFPSDAVDTRPTLAEAEEAVRTLLRWAGDDVSREGLADTPKRVAASYRELFSGYDQDPEEVLGRTFEEVAGYDDIVLVKDIPFFSHCEHHMVPIIGKAHIAYLPGGKVLGLSKIARVVEIFGRRLQTQEAMTAQVASAIDGTLQPRGVAVMIEAEHLCMAMRGIQKQGSTTITTTFTGAFKSDPHEQVRFMTLIRGRG

SEQ ID NO: 9036 - protein, 202 aa, Hoeflea olei
  misc_feature (1)..(202): tr|A0A1C1YZH4|A0A1C1YZH4_9RHIZ GTP cyclohydrolase 1 OS= Hoeflea olei OX=1480615 GN=folE PE=3 SV=1
MDAIVNPLPGTDEDNRPTQAEAEAAVSTLLRWIGDDTTREGLIDTPMRVVKAYKELFSGYDQDAEEALGRTFEEVAGYDDIVLIKDIPFFSHCEHHMVPIIGKAHVAYLPDGKVVGLSKIARVVEIFGRRLQTQETLTAQIAHAIDETLRPRGVAVMIEAEHMCMAMRGIQKQGSTTMTTTFTGAFKTDPHEQVRFMTMLRG

SEQ ID NO: 9037 - protein, 204 aa, Hoeflea phototrophica
  misc_feature (1)..(204): tr|A9D9T1|A9D9T1_HOEPD GTP cyclohydrolase 1 OS=Hoeflea phototrophica (strain DSM 17068 / NCIMB 14078 / DFL-43) OX=411684 GN=folE PE=3 SV=2
MDAIVKTFPGKDGEARPTQAEAEEAVRTLLRWAGDDVTREGLIDTPKRVAKAYKELFAGYEQDAEEELGRTFEEVAGYDDIVLVKDIPFFSHCEHHMVPIIGKAHVAYLPDGKVLGLSKIARVVEIFGRRLQTQETMTAQVAHSIDDTLHPRGVAVMIEAEHMCMAMRGIKKQGSTTITTTFTGAFKTEPHEQVRFMTLVRGRD

SEQ ID NO: 9038 - protein, 200 aa, Hoeflea sp.
  misc_feature (1)..(200): tr|A0A2G2DJN1|A0A2G2DJN1_9RHIZ GTP cyclohydrolase 1 OS= Hoeflea sp. OX=1940281 GN=folE PE=3 SV=1
MDAIVNRLNDQDNRPTEAEAEEAVRTLLRWVGDDITREGLLDTPKRVVKAYKELFSGYDQDAEEELGRTFEEVAGYDDIVLVKDIPFFSHCEHHMVPIIGKAHVAYLPDGKVLGLSKIARVIEIYGRRLQIQETMTAQVAHSIDDALHPRGVAVMIEAEHMCMAMRGIKKQGSTTITTTFTGAFKTDPHEQVRFMTLIRG

SEQ ID NO: 9039 - protein, 202 aa, Hoeflea sp.
  misc_feature (1)..(202): tr|A0A0F7PLW3|A0A0F7PLW3_9RHIZ GTP cyclohydrolase 1 OS= Hoeflea sp. IMCC20628 OX=1620421 GN=folE PE=3 SV=1
MDAIVNKMSDKGKDNRPTEAEAEEAVRTLLRWTGDDITREGLLDTPKRVVKAYKELFSGYDLDAEEELGRTFEEVAGYDDIVLIKDIPFFSHCEHHMVPIIGKAHVAYLPDGKVLGLSKIARAVEIFGRRLQTQETMTAQVAHSIDETLQPRGVAVMIEAEHMCMAMRGIKKQGSTTITTTFTGAFKQDPHEQVRFITLIRG

SEQ ID NO: 9040 - protein, 194 aa, Homoserinibacter sp.
  misc_feature (1)..(194): tr|A0A5C8IEG8|A0A5C8IEG8_9MICO GTP cyclohydrolase 1 OS= Homoserinibacter sp. GY 40078 OX=2603275 GN=folE PE=3 S V=1
MAIDSERIEAAVVELLRAIGEDPDRPGLSATPRRVAESYAELFSGVGEDPLTHLADAADFTGDDASGELVLLRDIAFRSTCEHHLLPFTGVAHLAYVPGERIVGLGSLARVVETVSARPQLQERLTEQIADAIEVGLAPRGVLVVMDARHGCVTARGVRQAESTTVTVAARGTLIDPAAQAGVLALLGRGAVTP

SEQ ID NO: 9041 - protein, 221 aa, Homoserinimonas aerilata
  misc_feature (1)..(221): tr|A0A542Y1M6|A0A542Y1M6_9MICO GTP cyclohydrolase 1 OS= Homoserinimonas aerilata OX=1162970 GN=folE PE=3 SV=1
MAGASGTGVDGSPARSGVDRPRIEAAVLELLAAIGEDTARPGLASTPARVAEAYSEFFSGLSVDPVSHLADSVELEPDELGELVLLRGIEFRSICEHHLLPFLGVAHVAYVPRTRVVGLGRLPRVVDTLASRPQLQERLGEEIADALQEGLDPRGVLVVLDASHGCVVSRGVRQVHSSTLTVASRGELDDPAQRAAVLSLIGSSPAGGGVAAHDPVDGSRG

SEQ ID NO: 9042 - protein, 233 aa, Hormoscilla sp.
  misc_feature (1)..(233): tr|A0A533P8M9|A0A533P8M9_9CYAN GTP cyclohydrolase 1 OS= Hormoscilla sp. GUM202 OX=2480853 GN=folE PE=3 SV=1
MTIASLNGSQRPDMTKNQDAKKVLTRPDRNTSNGLQPRQPDEEIDDEQMMAAVKTMLLGVGEDPNREGLLKTPKRVAEAMRFLTNGYNQSLEEIVNGAIFDEDHNEMVLVRDINLFSLCEHHMLPFMGKAHVAYIPTQKVVGLSKLARIVEMYARRLQVQERLTRQVAEAIQEILGPQGVAIVVEATHMCMVMRGVQKPGSWTVTSAMLGVFQEDQKTKEEFLNLIRHQPAFF

SEQ ID NO: 9043 - protein, 212 aa, Hormoscilla sp.
  misc_feature (1)..(212): tr|A0A533NW15|A0A533NW15_9CYAN GTP cyclohydrolase 1 OS= Hormoscilla sp. GUM202 OX=2480853 GN=folE PE=3 SV=1
MILSISPDDIRKQAILTEPKAPVSDEEMRQAVRTLLLGLGEDPDREGLRDTPKRVVKALKFLTSGYNQSLDELLNGAVFHEDTNEMVLVRDIDLFSSCEHHILPILGRAHVAYIPNGKVIGLSKIARICEMYGRRLQVQERLTQQIAHALQGLLQPQGVAVVVEATHMCMVMRGVQKPGSWTVTSSMQGVFAENVSTRQEFMALIRHTPSLH

SEQ ID NO: 9044 - protein, 209 aa, Hoyosella subflava
  misc_feature (1)..(209): tr|F6EG69|F6EG69_HOYSD GTP cyclohydrolase 1 OS=Hoyosell a subflava (strain DSM 45089 / JCM 17490 / NBRC 109087 / DQS3-9A1) OX=443218 GN=folE PE=3 SV=1
MTSIRPEDRIDPEDRIGEVPRVFDQPRAEAAVRELLIAVGEDPSRSGLADTPARVARAYAELFAGLHTDPDHVLDTTFDEGHDELVLLKDIPMYSTCEHHLVPFHGVAHVGYIPNESGRVTGLSKLARLVDLYAKQPQVQERLTSQIADAMMRKLDPRGVIVVVEAEHLCMAMRGIRKPGATTTTSAVRGLFKSSAASRSEALDLIIRK

SEQ ID NO: 9045 - protein, 190 aa, Humibacillus sp.
  misc_feature (1)..(190): tr|A0A1E8D1B2|A0A1E8D1B2_9MICO GTP cyclohydrolase 1 OS= Humibacillus sp. DSM 29435 OX=1869167 GN=folE PE=3 SV=1
MAVDQARAEAAVRELLLAVGEDPDREGLVDTPGRVARAYAEIFAGLDMRADQVLDKTFEIDHQELVIVRDIELYSTCEHHLVPFHGVAHVGYIPNKSGRVTGLSKLARLVDVYARRPQVQERLTSQIADALVEHLDVQGVIVVIQAEHLCMSMRGIRKSGASTITSAVRGQLRDPATRAEAMSLMLQSNR

SEQ ID NO: 9046 - protein, 191 aa, Humibacillus sp.
  misc_feature (1)..(191): tr|A0A1E8CU42|A0A1E8CU42_9MICO GTP cyclohydrolase 1 OS= Humibacillus sp. DSM 29435 OX=1869167 GN=folE PE=3 SV=1
MHVVRDSAGVDEAGVVQAATDLLRALGRDTNSPHLADTPRRIAAAYVELLSPRPFELTTFSNDDGYDGLVLVRDIPVHSLCAHHLLPFNGVAHVAYLPADRILGLSKLARVVEMFARDLQVQERLTQQVANWLQEHLEPQGVGVVIEAEHLCMSMRGVQASGTLTLTSALHGLMREDPRTRQEFFDLVRRS

SEQ ID NO: 9047 - protein, 190 aa, Humibacillus xanthopallidus
  misc_feature (1)..(190): tr|A0A543PMQ5|A0A543PMQ5_9MICO GTP cyclohydrolase 1 OS= Humibacillus xanthopallidus OX=412689 GN=folE PE=3 SV=1
MAIDQARAEAAVRELLLAIGEDPTREGLLDTPARVARSYSEIFAGLDMDAADVLGTTFMIDHQELVIVRDIELYSTCEHHLVPFHGVAHVGYIPSQDGRVTGLSKLARLVEVYARRPQVQERLTSQVADALVEHLDVQGVIVVIQAEHLCMSMRGIRKPGASTITSAVRGQLRDAATRAEAMALMLEGNK

SEQ ID NO: 9048 - protein, 218 aa, Humibacillus xanthopallidus
  misc_feature (1)..(218): tr|A0A543PLY7|A0A543PLY7_9MICO GTP cyclohydrolase 1 OS= Humibacillus xanthopallidus OX=412689 GN=folE PE=3 SV=1
MNPSSTSSHPSPTVLPPRPHHTRQPWNGTGAVGEPDLERAATGARILLEALGIDVHSEAMMRTPERMAASLLEMTSPRPFHLTTFPNDGNYDELILAKSIPLRSLCEHHMLPFVGTAHIGYLPGERILGLSKLARVLEHFASRPQVQERLTVQIADWLSAQLSAAGVGVVIEAEHLCMTLRRVQAPGTTTITSSLLGVMREDPRTRAEFLALTRVPRY

SEQ ID NO: 9049 - protein, 222 aa, Humibacter sp.
  misc_feature (1)..(222): tr|A0A345K1V0|A0A345K1V0_9MICO GTP cyclohydrolase 1 OS= Humibacter sp. BT305 OX=2282656 GN=folE PE=3 SV=1
MGSVDRDRIRAAVGEILAAIGEDPAREGLRDTPRRVAELYAELFAGVGDDPADAFGGAFALRDGESDAEPDRAGSSAAKVVGLPDASAGDADEALDRIGSVVLMRDLAFRSICEHHLLPFEGVVHIAYEPDAELAGLGRFAAVVEVASSRPQLQERLGDDIADAVERGLTARGVLVVIEARHGCVTARGPRQTASTTVTLSARGSLADPAARAEVMALVARS

SEQ ID NO: 9050 - protein, 190 aa, Humibacter sp.
  misc_feature (1)..(190): tr|A0A5B8M5B0|A0A5B8M5B0_9MICO GTP cyclohydrolase 1 OS= Humibacter sp. WJ7-1 OX=2599293 GN=folE PE=3 SV=1
MAVDRARIEAAVADILAAIGEDVARPGLDQTPQRVADAYAEFFGGLALDPLEPLRDTVPLGDSDAETVVLRDIHFRSMCEHHLLPFTGVAHLAYLPGDRVVGLGRLPKVVEILASRPQLQERLTEEIADTFVAGLEPRGVLVVLDATHTCVTTRGARQTDASTVTIASRGELGDPIARAELIALIGRGIR

SEQ ID NO: 9051 - protein, 212 aa, Humitalea rosea
  misc_feature (1)..(212): tr|A0A2W7J4Q5|A0A2W7J4Q5_9PROT GTP cyclohydrolase 1 OS= Humitalea rosea OX=990373 GN=folE PE=3 SV=1
MNIQTPPAPIALADTSLPRPTQAEAEAAIRTLLLWAGDDPLREGLLDTPKRVARAYREWFCGYDEDPRDLLARSFEEVEGYDEMVVLRDIRLESVCEHHMAPIIGRVHIGYLPAGRVVGISKLARVVDAFGKRLQIQEKLTAQIANTISEVLQPKGVAVVIEAAHQCMTTRGVHKTGVSMVTSRMLGAFRDDQSTRREFLAMIQGTRAHTEG

SEQ ID NO: 9052 - protein, 188 aa, Hungateiclostridiaceae bacterium; identical to SEQ ID NO: 4075
  misc_feature (1)..(188): tr|A0A1C7GRA4|A0A1C7GRA4_9FIRM GTP cyclohydrolase 1 OS= Hungateiclostridiaceae bacterium KB18 OX=1834198 GN=fol E PE=3 SV=1

SEQ ID NO: 9053 - protein, 187 aa, Hungateiclostridium clariflavum
  misc_feature (1)..(187): tr|G8LSX5|G8LSX5_HUNCD GTP cyclohydrolase 1 OS=Hungatei clostridium clariflavum (strain DSM 19732 / NBRC 101661 / EBR45) OX=720554 GN=folE PE=3 SV=1
MVDKERIKAAVKEILIAIGENPDREGLVETPDRVARMYEEIFAGLHQDPKEVVKVFQEENHEEMVMVKDIPLYSMCEHHLVPFVGVAHVVYIPKKGKIMGLSKLARIVDLLAKKPQLQERLTSEVANVIMETIDPLGVAVVVEAEHLCMTMRGIKKPGSKTVTSALRGIIKTDARTRAEVMSLINRK

SEQ ID NO: 9054 - protein, 187 aa, Hungateiclostridium saccincola
  misc_feature (1)..(187): tr|A0A2K9E654|A0A2K9E654_9FIRM GTP cyclohydrolase 1 OS= Hungateiclostridium saccincola OX=1677857 GN=folE2 PE=3 SV=1
MIDKERVKAAVREILIAIGEDPDREGLVETPDRVARMYEEIFAGLYTDPKDCIKVFQENTHEEMILVKDIPMYSVCEHHLLPFVGVAHVVYIPRKGKILGLSKLARIVDIIAKKPQLQERLTSEVADIIMNSINPLGVAVVVEAEHLCMTMRGVKKPGSKTVTSALRGIIKTDARTRSEVMSLINGL

SEQ ID NO: 9055 - protein, 187 aa, Hungateiclostridium sp.
  misc_feature (1)..(187): tr|A0A4Q0I735|A0A4Q0I735_9FIRM GTP cyclohydrolase 1 OS= Hungateiclostridium sp. N2K1 OX=2487273 GN=folE PE=3 SV =1
MIDKERIKAAVREILIGIGEDPDREGVLETPDRVARMCEEIFAGLHQDPKSVVKVFQEESHEEMVMVKDIPIYSVCEHHLLPFVGVAHVVYIPKKGRIMGLSKLARIVDLIAKKPQLQERLGSEVANVIMESINPLGVAVVVEAEHLCMTMRGIKKPGSKTVTSALRGIIKTDARTRAEVMALINGR

SEQ ID NO: 9056 - protein, 187 aa, Hungateiclostridium straminisolvens
  misc_feature (1)..(187): tr|W4V3Q9|W4V3Q9_9FIRM GTP cyclohydrolase 1 OS=Hungatei clostridium straminisolvens JCM 21531 OX=1294263 GN=fol E PE=3 SV=1
MIDKERIKAAVREILIGIGEDPDREGLLETPDRVARMCEEIFAGLHQDPRSVVKVFQEENHEEMVMVKDIPIYSVCEHHLLPFVGVAHVVYIPRKGRIMGLSKLARIVDLIAKKPQLQERLGSEVANVIMETIDPLGVAVVVEAEHLCMTMRGIKKAGSKTVTSALRGIIKTDARTRAEVMALINGK

SEQ ID NO: 9057 - protein, 187 aa, Hungateiclostridium thermocellum
  misc_feature (1)..(187): sp|A3DHH6|GCH1_HUNT2 GTP cyclohydrolase 1 OS=Hungateicl ostridium thermocellum (strain ATCC 27405 / DSM 1237 / JCM 9322 / NBRC 103400 / NCIMB 10682 / NRRL B-4536 / VP I 7372) OX=203119 GN=folE PE=3 SV=1
MIDKERIKAAVRELLIGIGEDPDREGLLETPDRVARMCEEIFAGLHQDPKSVVKVFQEENHEEMVMVKDIPIYSICEHHLLPFIGVAHVVYIPRKGKIMGLSKLARIVDIIARKPQLQERLGSEVANVIMESINPLGVAVVVEAEHLCMTMRGIKKAGSKTVTSALRGIIKTDARTRAEVMALINGR

SEQ ID NO: 9058 - protein, 187 aa, Hungateiclostridium thermocellum; identical to SEQ ID NO: 9057
  misc_feature (1)..(187): tr|A0A4V3Z8C1|A0A4V3Z8C1_HUNTH GTP cyclohydrolase 1 OS= Hungateiclostridium thermocellum OX=1515 GN=folE PE=3 S V=1

SEQ ID NO: 9059 - protein, 184 aa, Hungatella hathewayi
  misc_feature (1)..(184): tr|A0A3E2WKX6|A0A3E2WKX6_9CLOT GTP cyclohydrolase 1 OS= Hungatella hathewayi OX=154046 GN=folE PE=3 SV=1
MIDQEKIKQAVKLLLEGIGEDAEREGLKETPERIARMYEEIYGGIEEDAAEHLKKTFHVDNNEIVMEKDITFYSTCEHHLLPFYGKAHIAYIPDGKVVGLSKLARTVEAFARRLQIQEQLTGQIADALMEHLKPKGVLVMIEAEHMCMTMRGIKKPGSQTVTVVKRGVFLEDPELTNLFFQMIR

SEQ ID NO: 9060 - protein, 185 aa, Hungatella hathewayi
  misc_feature (1)..(185): tr|A0A3E2UHI3|A0A3E2UHI3_9CLOT GTP cyclohydrolase 1 OS= Hungatella hathewayi OX=154046 GN=folE PE=3 SV=1
MIDRNKVEQAVRLLLEGMGEDPSREGLIDTPERVARMYEELYSGMDEHPGMYLEKTFRAENNDLIVEKGITFYSVCEHHLLPFYGKVHVAYVPDKKVAGLSKLARTVEVFSRRLQIQEQLTAQIADALMDGLAPRGVMVMMEAEHMCMTMRGIKKPGSRTVTVVKRGCFCRQEDLVNLFFQMVRG

SEQ ID NO: 9061 - protein, 212 aa, Hwanghaeella grinnelliae
  misc_feature (1)..(212): tr|A0A3S2Z757|A0A3S2Z757_9PROT GTP cyclohydrolase 1 OS= Hwanghaeella grinnelliae OX=2500179 GN=folE PE=3 SV=1
MARIGQLTPEQSGGVSRSGASRERAEKAVRTLIEWAGEDPDREGLVGTPARVVRAYEEFFAGYREDPVELLATTYEENSYDEMIVLRDIRLETHCEHHIVPILGKVHVGYLPSGRVVGISKLVRVVEVFAKRMQIQESLTAQIADAIQTVLEPKGVAVVIEAAHQCMTTRGVRKPGVSMVTSRLLGAFREDPQMRRDYLAMIGQGQGRLDSA

SEQ ID NO: 9062 - protein, 210 aa, Hwanghaeella grinnelliae
  misc_feature (1)..(210): tr|A0A437QI05|A0A437QI05_9PROT GTP cyclohydrolase 1 OS= Hwanghaeella grinnelliae OX=2500179 GN=folE PE=3 SV=1
MTASRLNLVQQIDKDREDALARRPSREDAMAAVRTLLAFAGDDPDREGLLETPDRVVRSWDEFFAGYFEDPVEILSRTFEETDGYDEMVILRDIPFNSHCEHHIRPIIGHAHIAYLPNKRVVGISKLARILEVYAKRLQIQEKMTAQIANAINDVLAPKGVGVVIEATHECMTTRGVNKQGVSMVTSTLLGTFKQDPRTRSEFLRLIGRE

SEQ ID NO: 9063 - protein, 366 aa, Hwanghaeicola aestuarii
  misc_feature (1)..(366): tr|A0A2W7NIP6|A0A2W7NIP6_9RHOB GTP cyclohydrolase FolE2 OS=Hwanghaeicola aestuarii OX=568105 GN=folE2 PE=3 SV= 1
MNVHNPDIAEPMEAEEAAELYERLRAWAASADRCALDRAGPSLRSFAAAQGEEYPALSSDYPEGFVADAAYRAELPDLQNGPAASIKGDRRHIQHVGIHNFRLPIHFRTRDHGALTLETSVTGTVSLEAEKKGINMSRIMRTFYAHADHTFSFDVIETALDATKTDLESFDARIQMRFSYPLRIDSLRSGLSGYQYYDIALELVERAGVRKKIVHLDYVYSSTCPCSLELSEHARRARGQLATPHSQRSVARLSVELDEAAGCLWFEDLIELCRGAVPTETQVMVKREDEQAFAELNAANPIFVEDAARLFARALDADPRVRDFRVVASHQESLHSHDAVSVLTEGATFAQASLDPRLFATLLHHG

SEQ ID NO: 9064 - protein, 191 aa, Hyalangium minutum
  misc_feature (1)..(191): tr|A0A085W3A9|A0A085W3A9_9DELT GTP cyclohydrolase 1 OS= Hyalangium minutum OX=394096 GN=folE PE=3 SV=1
MPDAAAMANAVRDFLRAAGLPLTDENLVNTPDRVTQAWMSEFLDGYQRTPEEVLGKTYPAPPHSAGELVVVTDLRFHSMCPHHLLPFEGRAHVAYVPGKRVVGFGRMAALVDCFAHRLILQEELARQVASSLARVLGSPATACIIEAKQSCLRLRGDQQRDAITHSEAYEGRLRKDGALRRELWARLGMPR

SEQ ID NO: 9065 - protein, 198 aa, Hydrobacter penzbergensis
  misc_feature (1)..(198): tr|A0A1H2STX9|A0A1H2STX9_9BACT GTP cyclohydrolase 1 OS= Hydrobacter penzbergensis OX=1235997 GN=folE PE=3 SV=1
MAYSKKEHYDEHTTEKLIKHYHGVLEHLGEDPEREGLLKTPERVAKAMQFLTQGYHLDARSIIHSARFKEEVNEMIIVKDIELYSMCEHHMLPFFGKAHIAYIPNGWITGLSKLARVVDVYSRRLQVQERLTTQILEAIKESLNPLGVAVVIEAKHLCMMMRGVQKQNSVTTTSAFDGEFMKNPTRSEFLKLISTKLD

SEQ ID NO: 9066 - protein, 225 aa, Hydrobacter penzbergensis
  misc_feature (1)..(225): tr|A0A1H2YDA2|A0A1H2YDA2_9BACT GTP cyclohydrolase 1 OS= Hydrobacter penzbergensis OX=1235997 GN=folE PE=3 SV=1
MQIQYQRALAGQMASVSGEEDHFSSGSQTPLRPDAFAMSAEEKVHDIAYHFRSIMHTLGLDLSDDSLKDTPMRVAKMYVRELFSGLDPVNKPAISLFNNSYGYGQLLLEKNIPFVSQCEHHFVPIRGKAHVAYFAGDKVIGLSKLNRIVDYFARRPQVQERLTVQIGQELQQALSTEDVAVIIDAEHMCVSMRGIRQDGCSTVSSFYGGRFNNASVKNELLLQLK

SEQ ID NO: 9067 - protein, 188 aa, Hydrocarboniclastica marina
  misc_feature (1)..(188): tr|A0A4P7XDQ9|A0A4P7XDQ9_9ALTE GTP cyclohydrolase 1 OS= Hydrocarboniclastica marina OX=2259620 GN=folE PE=3 SV= 1
MTHSLDTLASSYRQILEQLGEDPSREGLRDTPLRAAKAMQFLTQGYQQNLETIVNGAVFESTNDEMVVVQNIELYSMCEHHMLPFIGKAHIAYLPDGKVLGLSKLARIVDMFARRLQIQENLTRQIADAVLEATDARGVGVVIEAQHMCMMMRGVEKQNSVMSTSVMLGGFRKSQATRSEFLTLISRR

SEQ ID NO: 9068 - protein, 212 aa, Hydrocarboniphaga daqingensis
  misc_feature (1)..(212): tr|A0A1M5P6C2|A0A1M5P6C2_9GAMM GTP cyclohydrolase 1 OS= Hydrocarboniphaga daqingensis OX=490188 GN=folE PE=3 SV =1
MDDFAPLSAGTVDDEFEPAAGISLSRGEHHLAPLYRDLLRGVGEDVNREGLVGTPQRAAKAFEFLTQGYTQDIQALLNGAVFESANRDMVIVRDIEFYSLCEHHILPFYGKVHVAYLPAGKVIGLSKIPRIVDVFARRLQIQENLTEQVARCVQEVTGAKGVAVVVEARHMCMLMRGVEKQNSSMVTNTMLGQFRENENARMQFLRFLPNVI

SEQ ID NO: 9069 - protein, 191 aa, Hydrocarboniphaga daqingensis
  misc_feature (1)..(191): tr|A0A1M5LSR2|A0A1M5LSR2_9GAMM GTP cyclohydrolase 1 OS= Hydrocarboniphaga daqingensis OX=490188 GN=folE PE=3 SV =1
MQNKPPQKGIIVEEHYRAIIEALGENPDREGLLRTPARAAKAMRFLTQGYEQDIDTIVNGAIFESSNDEMVIVRDIELYSMCEHHLLPFIGKAHVAYLPQGKVVGLSKISRIVDMFARRLQIQENLTKQIGECIQQVTNAAGVAVVIEAKHLCSMMRGVEKQNSAMVTSMMIGRFREDSRTRTEFLNLVRG

SEQ ID NO: 9070 - protein, 181 aa, Hydrocarboniphaga effusa
  misc_feature (1)..(181): tr|I7ZHJ2|I7ZHJ2_9GAMM GTP cyclohydrolase 1 OS=Hydrocar boniphaga effusa AP103 OX=1172194 GN=folE PE=3 SV=1
MEEHYRAIIEAIGENPEREGLLRTPHRAAKAMEFLTRGYDQDIGEIVNGAIFESDNEEMVIVRDIELYSMCEHHLLPFIGRCHVAYLPQGKVIGLSKIPRIVDMFARRLQIQENLTKQIGDCIQGVTSAAGVAVVIEAKHLCAMMRGVEKQNSSMITSMMLGRFREDPRTRQEFLNLVQRR

SEQ ID NO: 9071 - protein, 218 aa, Hydrococcus rivularis
  misc_feature (1)..(218): tr|A0A1U7HBB6|A0A1U7HBB6_9CYAN GTP cyclohydrolase 1 OS= Hydrococcus rivularis NIES-593 OX=1921803 GN=folE PE=3 SV=1
MTLSKSEPTAIKSTKSSFPNLTTEHQSLVSQEDMIQAVRTLLLGLGEDPDREGLKDTPKRVVKALQFLTSGYHQSLDELLNGAVFHEDTDEMVLVRDIDLFSSCEHHILPILGRAHVAYIPDGKVMGLSKIARICEMYARRLQVQERLTAQIADAIQGLLKPKGVAVVIEATHMCMVMRGVQKPGSWTSTSAVRGVFAEDAKTRQEFMSLICHNPTFH

SEQ ID NO: 9072 - protein, 242 aa, Hydrococcus rivularis
  misc_feature (1)..(242): tr|A0A1U7HE33|A0A1U7HE33_9CYAN GTP cyclohydrolase 1 OS= Hydrococcus rivularis NIES-593 OX=1921803 GN=folE PE=3 SV=1
MTITSSNGFNRPNSSSMNRPNALNPNLIERVKSRPDRNTHDGQEAQFHAASAENQDRMIEAVRTMLESVGEDPEREGLLKTPKRVAEAMQFLTQGYTQSLEELVNGAIFDEGHNEMVLVRDIDFFSLCEHHMLPFMGRAHVAYIPNQKVVGLSKLARIVEMYSRRLQVQERLTRQIAEAIQTILDPQGVAVVMEASHMCMVMRGVQKPGSWTVTSAMVGVFQEDQKTREEFLNLIRHRPNFM

SEQ ID NO: 9073 - protein, 243 aa, Hydrocoleum sp.
  misc_feature (1)..(243): tr|A0A261KUA6|A0A261KUA6_9CYAN GTP cyclohydrolase 1 OS= Hydrocoleum sp. CS-953 OX=1671698 GN=folE PE=3 SV=1
MTQTFSNGSNSSKTLNINGVKTSDADVTGKISYRPDRSSSSNGQSIRQQPPAEESNEAMMEAVRTMLLSVGEDPEREGLLKTPKRVAEAMQFLTSGYSQSLEEIVNGAIFDEGHNEMVLVRDINLFSLCEHHMLPFMGKAHVAYIPNQKVVGLSKLARIVEMYSRRLQVQERLNRQIAEAIQTILEPKGVAVVIEATHMCMVMRGVQKPGSWTVTSAMLGVFEEDQKTREEYLSLIRHQPAFF

SEQ ID NO: 9074 - protein, 236 aa, Hydrocoleum sp.
  misc_feature (1)..(236): tr|A0A261KKT3|A0A261KKT3_9CYAN GTP cyclohydrolase 1 (Fr agment) OS=Hydrocoleum sp. CS-953 OX=1671698 GN=AFK68_2 6015 PE=3 SV=1
MTQTFSNGSNSSKTLNINGVKTSDADVTGKISYRPDRSSSSNGQSIRQQPPAEESNEAMMEAVRTMLLSVGEDPEREGLLKTPKRVAEAMQFLTSGYSQSLEEIVNGAIFDEGHNEMVLVRDINLFSLCEHHMLPFMGKAHVAYIPNQKVVGLSKLARIVEMYSRRLQVQERLNRQIAEAIQTILEPKGVAVVIEATHMCMVMRGVQKPGSWTVTSAMLGVFEEDQKTREEYLSLI

SEQ ID NO: 9075 - protein, 190 aa, Hydrogenibacillus schlegelii
  misc_feature (1)..(190): tr|A0A179ITH7|A0A179ITH7_HYDSH GTP cyclohydrolase 1 OS= Hydrogenibacillus schlegelii OX=1484 GN=folE PE=3 SV=1
MAVDHEKIEHAVRLILEAIGEDPDREGLRETPARVARMYEEIFSGLHEDPGKHFSAIFGESHEEIVIVKDIPFYSMCEHHLVPFFGKAHVGYIPREGRVVGLSKLARAVETVARRPQLQERMTAEIADAIMTHLEAHGAIVVIEAEHLCMVMRGVKKPGSKTVTSAVRGVFAHDAKARAEAMALITGRLS

SEQ ID NO: 9076 - protein, 190 aa, Hydrogenibacillus schlegelii
  misc_feature (1)..(190): tr|A0A2T5GD01|A0A2T5GD01_HYDSH GTP cyclohydrolase 1 OS= Hydrogenibacillus schlegelii OX=1484 GN=folE PE=3 SV=1
MAVDHEKIEHAVRLILEAIGEDPDREGLRETPARVARMYEEIFSGLHEDPGKHFSAIFSESHEEIVIVKDIPFYSMCEHHLVPFFGKAHVGYIPREGRVVGLSKLARAVETVARRPQLQERMTAEIADAIMSHLEAHGAIVVIEAEHLCMVMRGVKKPGSKTVTSAVRGVFAHDAKARAEAMALITGRLS

SEQ ID NO: 9077 - protein, 43 aa, Hydrogenimonas sp.
  misc_feature (1)..(43): tr|A0A3G9GUZ1|A0A3G9GUZ1_9PROT GTP cyclohydrolase I, ty pe 1 OS=Hydrogenimonas sp. OX=2231112 GN=NNO_0084 PE=4 SV=1
MAVVIEARHICMEMRGVEKINSTTVSSALRGSSSVTQRRGKSS

SEQ ID NO: 9078 - protein, 195 aa, Hydrogenimonas sp.
  misc_feature (1)..(195): tr|A0A432QYR2|A0A432QYR2_9PROT GTP cyclohydrolase 1 OS= Hydrogenimonas sp. OX=2231112 GN=folE PE=3 SV=1
MSNEEKAKKFEEAVTTILELIGEDPTREGLVKTPHRVYKAFEHLCEGYKMDPKKVLNDALFESSNDEMVLVRDIEFYSMCEHHLLPIIGRVHVAYIPDGKVVGLSKIPRMVNIYARRLQIQEQMTEQIADAILETIQPKGVGVIVEARHMCMEMRGVEKINSTTVSSALRGLFKRDAKTREEFMSMVNAPIRPRY

SEQ ID NO: 9079 - protein, 194 aa, Hydrogenimonas thermophila
  misc_feature (1)..(194): tr|A0A1I5NFJ3|A0A1I5NFJ3_9PROT GTP cyclohydrolase 1 OS= Hydrogenimonas thermophila OX=223786 GN=folE PE=3 SV=1
MSIEKAKKFEEAITTILELIGEDPNREGLKKTPHRVYKAFEHLCEGYKMDPKKVLNDALFESSNDEMVLVRDIEFYSMCEHHMLPIIGRVHVAYIPDGKVVGLSKIPRMVNIYARRLQIQEQMTEQIADAILETIQPKGVGVIVEARHMCMEMRGVEKINSTTVSSALRGLFKSDAKTREEFMSMVNAPLRPRY

SEQ ID NO: 9080 - protein, 264 aa, Hydrogenispora ethanolica
  misc_feature (1)..(264): tr|A0A4R1R9Q4|A0A4R1R9Q4_9FIRM GTP cyclohydrolase FolE2 OS=Hydrogenispora ethanolica OX=1082276 GN=folE2 PE=3 SV=1
MIDVQSRRDERGIEIQKVGLKDVNLPFQIRMRDGGFQHVHGNVVVSVTLPHHFKGTHLSRFMELLMSWSEKPISWKEIRQILAELCSHLEVSAAEISLKFRYFLPVPAPVSGIVGYLDYLGEFRGVFRQPSGHFHFQLGAEIPVLSLCPCSKEISAYGAHNQRAAIRTLVHCSYPGKILWLEELIELLRIQGSCPIYPVLKREDEKYVTEAAYQNPKFVEDILRDSVLALRSEPRIRSFQVEVESYESIHNHSAFASHVEEAAD

SEQ ID NO: 9081 - protein, 530 aa, Hydrogenivirga caldilitoris
  misc_feature (1)..(530): tr|A0A497XN72|A0A497XN72_9AQUI GTP cyclohydrolase 1 OS= Hydrogenivirga caldilitoris OX=246264 GN=folE PE=3 SV=1
MVDKEKIKQAIRLFLEGIGEDPDREGLRETPDRIARMWEEFESMRSFDMKLFEEFGEYNEMVLVKDITFYSLCEHHLLPFFGKVHIAYIPDGVICGLSKLVRTVRAFALRPQVQERLTEEIADFLEGELKPKGVAVVMSAEHLCYSEDTEILTDQGWKLFKELNGTEKVAQVYPDTLEIEFTEPVMYHRYPYKGYMINFRNKSLNLLVSPDHKMLFSTDWIFSKSRRENVWLTERADKLLGRTIIVPQAGIMKGKEKEYFEIESEDSVSYYGNTALKTRALKVNANTFLKFLGMYLAEGCVYENPNYRMHKVRIVQKEGYKAELMESVLREMPFKVFKHRRTNGVVEFFINSKALCNFLSPLGKSKDKRLPKEIFNLSPDQKLLFLQYYSLGDGYIKPNGKLHLVSKSKKLMDDIQALLVTIGISTTVYESYTNDQVYYRLETRGDKQGRYKFYSKVRESLKEPYEGYIYSVTVPSGFILVRREGRTAISGNCMSMRGAMSPGHQTVTSALRGVFLKDMKTREEFLKLVR

SEQ ID NO: 9082 - protein, 117 aa, Hydrogenivirga sp.
  misc_feature (1)..(117): tr|A8V1C4|A8V1C4_9AQUI GTP cyclohydrolase 1 OS=Hydrogen ivirga sp. 128-5-R1-1 OX=392423 GN=HG1285_04233 PE=3 SV =1
MSIDENKLKQSIKLFLEAIGENPDREGLKETPDRIVRLWKEFKTHENFNMTVFEDIGSYDEMVVVRDIQFYSLCEHHLLPFFGKAHIAYIPDGKVCGLSKLVRVVNKFSYRPQFKKG

SEQ ID NO: 9083 - protein, 183 aa, Hydrogenivirga sp.
  misc_feature (1)..(183): tr|A8UY02|A8UY02_9AQUI GTP cyclohydrolase 1 OS=Hydrogen ivirga sp. 128-5-R1-1 OX=392423 GN=folE PE=3 SV=1
MIDRDKIKEAIRLFLEGIGEDPDREGLKETPERIARMWEEFESMRSFDMKLFEEFGDYNEMVLVKDIQFYSLCEHHLLPFYGKVHIAYIPDGVICGLSKLVRTVRAFALRPQVQERLTDEIADFLERELKPKGVGVIVEAEHLCMSMRGAMSPGHVTTTSALRGVFLSDMKTREEFLKLTKGA

SEQ ID NO: 9084 - protein, 186 aa, Hydrogenobacter hydrogenophilus
  misc_feature (1)..(186): tr|A0A285NS25|A0A285NS25_9AQUI GTP cyclohydrolase 1 OS= Hydrogenobacter hydrogenophilus OX=35835 GN=folE PE=3 S V=1
MAVDKEKMKQAVRLFLEAIGEDPNREGLKDTPERVARMWEEFDRMRDFDFKLFEEFGNYNEMVLVKDINVYSICEHHLLPFFGKAHIAYIPDKIVCGLSKLVRTVRAFSLSPQLQERLTNQIADFLMDNLKPKGVAVVLEMEHLCMSMRGVMSPGHLTVTSALRGVFLSDMRTREEFLKLIRKEKE

SEQ ID NO: 9085 - protein, 186 aa, Hydrogenobacter thermophilus
  misc_feature (1)..(186): tr|D3DI93|D3DI93_HYDTT GTP cyclohydrolase 1 OS=Hydrogen obacter thermophilus (strain DSM 6534 / IAM 12695 / TK- 6) OX=608538 GN=folE PE=3 SV=1
MAVDREKIKQAVRLFLEGIGEDPNREGLKETPDRVARMWEEFDSMREFDFKLFEEFGSYNEMVLVKDINIYSICEHHLLPFFGKAHVAYIPDGIVCGLSKLVRTVRAFALRPQLQEKLTNEIADFLMEQLKPKGVAVVLEMEHLCMSMRGVISPGHLTTTSALRGIFLSDIRTREEFLKLIKRGRE

SEQ ID NO: 9086 - protein, 182 aa, Hydrogenobaculum sp.
  misc_feature (1)..(182): sp|B4U640|GCH1_HYDS0 GTP cyclohydrolase 1 OS=Hydrogenob aculum sp. (strain Y04AAS1) OX=380749 GN=folE PE=3 SV=1
MIDKEKIIEGIKLFLEGIGEDITREGIKETPERVAKMWEEFEKERSFDFKLFEEYSNYSEMIIVKDIPFYSMCEHHLLPFFGKAHIAYIPNKKICGLSKLVRTVRAMALKPQVQERLTEEIADIVQKELEPMGVGVVIEAEHLCMSMRGVRSPGHCTVTSSLRGNFLSDIRTKEEFFKLIRQ

SEQ ID NO: 9087 - protein, 182 aa, Hydrogenobaculum sp.
  misc_feature (1)..(182): tr|M1QGV2|M1QGV2_9AQUI GTP cyclohydrolase 1 OS=Hydrogen obaculum sp. HO OX=547144 GN=folE PE=3 SV=1
MIDKEKIIQGIKLFLEGIGEDITREGIKETPERVARMWEEFEKERSFDFKLFEEYSNYSEMIIVKDIPFYSMCEHHLLPFFGKAHIAYIPNKKICGLSKLVRTVRAMALKPQVQERLTEEIADIVQKELEPMGAGVVIEAEHLCMSMRGVRSPGHCTVTSSLRGSFLSDIRTKEEFFKLIRQ

SEQ ID NO: 9088 - protein, 242 aa, Hydrogenophaga intermedia
  misc_feature (1)..(242): tr|A0A1L1PNC5|A0A1L1PNC5_HYDIT GTP cyclohydrolase I OS= Hydrogenophaga intermedia OX=65786 GN=BN948_03710 PE=4 SV=1
MLMKTDPDQTPATPPSGDEGVPVSVKIRERLKAARQRFHSNDNIAEFIQPGELEKLLDEVTEKMQGVLESMVIDTDSDHNTGNTARRVAKMYLKEVFAGRYVKGPAVTEFPNAEHLNELMIVGPITVRSACSHHFCPVIGKLWIGVMPNEHTNVIGLSKYARLAEWIMGRPQIQEEAVIQLADLIQEKTQPDGLAIVMEASHYCMAWRGVKDMNSKMINSVMRGVFLKDANLRREFLALVPR

SEQ ID NO: 9089 - protein, 251 aa, Hydrogenophaga intermedia
  misc_feature (1)..(251): tr|A0A1L1PGD0|A0A1L1PGD0_HYDIT Putative GTP cyclohydrol ase 1 type 2 OS=Hydrogenophaga intermedia OX=65786 GN=B N948_00415 PE=4 SV=1
MSTSRNTLVHAFDTLLQPAQFKDYGPNGLQVEGRQEIRRLISGVTASLALIEAAIEAKADTIFVHHGLFWRGQDGRVTGWMKQRLSRLLAHDINLIAYHLPLDAHPTLGNNAQLAKVLGIALEEGARFGEQALGFVGQRPAEPAETLATHVERALGRPVTLVNPPGRVVRRIGLCTGGAQGYFEAAIAAGVDAFITGEISEPQAHYARECGVAYLACGHHASERYGAPAVAAHVASALGVEHRFIDIPNPA

SEQ ID NO: 9090 - protein, 236 aa, Hydrogenophaga pseudoflava
  misc_feature (1)..(236): tr|A0A4P6X1C0|A0A4P6X1C0_HYDPS GTP cyclohydrolase 1 OS= Hydrogenophaga pseudoflava OX=47421 GN=folE PE=4 SV=1
MSNPEQLDDSEGTPVSVKIRERLKAARHRFHSNDNIADFIEPGELEKLLDEVTVKMQGVLDAMVIDTENDHNTGDTARRVAKMYLKEVFNGRYVKGPSVTEFPNAEHLNELMIVGPITVRSACSHHFCPVIGKIWIGVMPNEHTNVIGLSKYARLAEWIMGRPQIQEEAVVQLADLIQEKTQPDGLAIVMEASHYCMAWRGVKDMDSKMINSVMRGVFLKDPNLRREFLSLIPRKS

SEQ ID NO: 9091 - protein, 273 aa, Hydrogenophaga pseudoflava
  misc_feature (1)..(273): tr|A0A4P6X7Y1|A0A4P6X7Y1_HYDPS GTP cyclohydrolase 1 typ e 2 OS=Hydrogenophaga pseudoflava OX=47421 GN=ybgI PE=4 SV=1
MSVAAGSDITASMPPDTSPGQGVSRDELLAACDRLLQPALFKDYGPNGLQVEGRARVRKLVSGVTASLAFIDAAIDAGADALFVHHGLFWRGQDGRVTGWMKQRLARLLSHDINLLAYHLPLDAHAELGNNAQLARRIGVRLLEADGGRFGDQSLGFLGLRPPAPAAELLKDIESALGRSALLVGDPGRRVERVAICTGGAQGYFEAAIAAGADVFITGEISEPQTHYAREAGVAYIACGHHASERYGAPAVADHLAELLGIDHQFIDIPNPA

SEQ ID NO: 9092 - protein, 244 aa, Hydrogenophaga sp.
  misc_feature (1)..(244): tr|W7X3H6|W7X3H6_9BURK GTP cyclohydrolase 1 OS=Hydrogen ophaga sp. T4 OX=1437444 GN=folE PE=4 SV=1
MLMKTEPDMTTADTIDDDQGVPVSVKIRERIKAARHRFHSNDNIAGFIEPGELEQLLEEVTVKMQGVLDSMVIDTESDHNTGDTARRVAKMYLKEVFNGRYVHGPSVTEFPNAEHLNELMIVGPITVRSACSHHFCPVIGKIWIGVMPNEHTNVIGLSKYARLAEWIMGRPQIQEEAVVQLADLIQEKTQPDGLAIVMEASHYCMAWRGVKDMDSKMINSVMRGVFLKDPNLRREFLSLIPRNS

SEQ ID NO: 9093 - protein, 273 aa, Hydrogenophaga sp.
  misc_feature (1)..(273): tr|A0A358BED9|A0A358BED9_9BURK GTP cyclohydrolase FolE2 OS=Hydrogenophaga sp. OX=1904254 GN=folE2 PE=3 SV=1
MSDLSSGVRAVMPDVQGRHDVRAMPIARVGVKNLRYPLVLEVAGRVQHSVGLWDLHVGLKAEQKGAHMSRLLAWLDAFTLDGEVVDFDRLQLAMPELMALLETDSAGLSVSFPFFIRKTAPVSGQQSLLEYEGGWLARCEGGRTEVRMVATVPVKSLCPCSKEVSEDGAHNQRSHIRLEVLLGEAVPWAELVRFAEDHASCELWGLLKRSDEKWVTERAYAHPKFVEDLVRDVALALNDDPRVLTYTVDVINFESIHAHDVHARIAHDKNTAV

SEQ ID NO: 9094 - protein, 277 aa, Hydrogenophilaceae bacterium
  misc_feature (1)..(277): tr|A0A1J4Z552|A0A1J4Z552_9PROT GTP cyclohydrolase FolE2 OS=Hydrogenophilaceae bacterium CG1_02_62_390 OX=18052 18 GN=folE2 PE=3 SV=1
MNPCDSVCDTASPCPTNVMPDVQSYHDARQIAIDKVGIKAIRHPIRVADKNGGVQHTIATFNMYVYLPHHFKGTHMSRFVEILNSYEREFSVESFEAMMRQMVERLEAKSGHVEMSFPYFITKKAPVSGVESMIDYDITFIGEIKDGEYLQTIRAVVPVTSLCPCSKQISDYGAHNQRSHVTLTVRTNRFVWIEDLVRFAEDNGSCELYGLLKRPDEKYVTERAYDNPKFVEDMVRDVAAALNQDARIDAYIVEAENFESIHNHSAYALIERDKKTS

SEQ ID NO: 9095 - protein, 214 aa, Hydrogenophilaceae bacterium
  misc_feature (1)..(214): tr|A0A1J4YZX1|A0A1J4YZX1_9PROT GTP cyclohydrolase 1 OS= Hydrogenophilaceae bacterium CG1_02_62_390 OX=1805218 G N=folE PE=3 SV=1
MSDCCDHDCQSPYQPGHLGIPQVGKFDPAAFEQAVTDLLKACGVEPDSTHTGRTARRVRELWQRRLLGGYDMDPGEVLGDGFEDSRDDMVVVHGIAIHGVCPHHLVPFRGVAHVAYIPGGRLHGFGRIARMVDAIGHRFTYQEWMTRDIAEALIGHGHAQGAACVIEAEQLCLLLGEDRRGDERVVTQAFSGTFRNNPQLRNEFLRAIGVSLHR

SEQ ID NO: 9096 - protein, 213 aa, Hydrogenophilales bacterium
  misc_feature (1)..(213): tr|A0A259EUH1|A0A259EUH1_9PROT GTP cyclohydrolase 1 OS= Hydrogenophilales bacterium 17-64-11 OX=1970526 GN=folE PE=3 SV=1
MASEPPDTLFRASEPPARPDRNDAENAVRMLIRWAGDDPDREGLRDTPARVARAYEEFFAGYLEDPVQILSRTFSEVEGYDEMIVMTDIRFESHCEHHMAPIIGKAHVAYLPDRRVVGISKLARLVDIYAKRLQIQERMTVQIADTLNDVLQPKGVAVVIEGAHQCMTTRGVHKPGAAMVTSRMLGAFRSDGSTRREFLAMIGRTGAGPLSNA

SEQ ID NO: 9097 - protein, 214 aa, Hydrogenophilales bacterium
  misc_feature (1)..(214): tr|A0A259ESE0|A0A259ESE0_9PROT GTP cyclohydrolase 1 OS= Hydrogenophilales bacterium 17-61-9 OX=1970524 GN=B7X93 _06435 PE=3 SV=1
MSDSCDHDGHPPHGSGSLGIPQTGSFDPVAFEAAVNAMLAACGVAPDSVHTGRTAHRVRELWQKRLLGGYAITPEEALGEGFADDRDDMVVVRGIAVHGVCPHHLVPFRGVAHVAYIPGGRLHGFGRIGRMVDAIGHRFTYQEWMTRDIAEALVTHGMAKGAACIVEAEQLCLLLGEDRRGDERVVTQAFTGCFRDSDQMRNEFLRATSQRELR

SEQ ID NO: 9098 - protein, 272 aa, Hydrogenophilus thermoluteolus
  misc_feature (1)..(272): tr|A0A2Z6DVX8|A0A2Z6DVX8_HYDTE GTP cyclohydrolase FolE2 OS=Hydrogenophilus thermoluteolus OX=297 GN=folE2 PE=3 SV=1
MTEIAQPPLADVAHEMPDVQGSADHRNLDIDRVGIKSIRHPIRVSDRSGGVQHTVATFNMYVGLPRHFKGTHMSRFVEILNQQERELSVESFEPMLRHMVERLEAATGRVEMTFPYFVLKKAPVSGVESLMDYDVTFIGEIDESNRYRFTLTVVVPVTSLCPCSKRISERGAHNQRSHITITATLADHVWIEELIDIAETEASCQLYGLLKRPDEKYVTEYAYDHPKFVEDLVRDVAARLNRDPRIVRYVVESENFESIHNHSAYALIEGPK

SEQ ID NO: 9099 - protein, 187 aa, Hydrogenothermus marinus
  misc_feature (1)..(187): tr|A0A3M0BRK0|A0A3M0BRK0_9AQUI GTP cyclohydrolase 1 OS= Hydrogenothermus marinus OX=133270 GN=folE PE=3 SV=1
MSIDEKKLKESIRLFLEAIGEDPDREGLKETPDRIVRLWKEFKSYENFNMTVFEDIGNYNEMVVVKDIQFYSLCEHHLLPFFGKAHIAYIPDGKVCGLSKLVRVVNKFSYRPQVQERLTGQIAEFLEKELNPKGVAVVMEAEHLCMSMRGVKNPTSYTVTSKLTGIFMENEKTRNEFLNLINSHKKY

SEQ ID NO: 9100 - protein, 187 aa, Hydrogenothermus sp.
  misc_feature (1)..(187): tr|A0A432REJ3|A0A432REJ3_9AQUI GTP cyclohydrolase 1 OS= Hydrogenothermus sp. OX=2231113 GN=folE PE=3 SV=1
MNIDEKKLKQSVRLFLEAIGENPDREGLKETPDRIVRLWKEFKSYEDFNMTIFEDIGNYDEMVVVRDINFYSLCEHHLLPFFGKAHIAYIPDGKVCGLSKLVRVVNKFSYRPQVQERLTAEIAEYLEKELNPKGVAVVLEAIHLCMAMRGVKNPSSYTVTSKLTGVFKECEKTRNEFLNLINSNKSL

SEQ ID NO: 9101 - protein, 311 aa, Hydrogenovibrio crunogenus
  misc_feature (1)..(311): sp|Q31EF8|GCH4_HYDCU GTP cyclohydrolase FolE2 OS=Hydrog enovibrio crunogenus (strain XCL-2) OX=317025 GN=folE2 PE=3 SV=2
MPDIACQPHQDPQGKLNWVGMSGIELPIKIEQDSQTLTLSSQVQAYVSLDDPLSKGIHMSRLYLILDEMGSNAPLNPASIQTLLTAFIESHQGLSQNAFVEFRFDYYERRRSLKSDNSGWKHYPCTLRGEMRNGQFECEISISVPYSSTCPCSAALSRQLIQEAFEQQFNGQDLDYNQVLEWLGTPEGICATPHSQRSYAQVKLKVNAEHPLNLSNVINQIEDAVKTPVQSTVKREDEQEFARLNATNLMFCEDAARRLQAKLESCPEYKDYWVRVNHLESLHPHDAVAIVTKNVPGGYSDEPNFMERFQN

SEQ ID NO: 9102 - protein, 315 aa, Hydrogenovibrio crunogenus
  misc_feature (1)..(315): tr|A0A4V1C924|A0A4V1C924_9GAMM GTP cyclohydrolase FolE2 OS=Hydrogenovibrio crunogenus OX=39765 GN=folE2 PE=3 S V=1
MTKHMPDIACQPHQDPQGKLNWVGMSGIELPIKIEQDSQTLTLSSQVQAYVSLDDPLSKGIHMSRLYLILDEMGSNAPLNPASIQTLLTAFIESHQGLSQNAFVEFRFDYYERRRSLKSDNSGWKHYPCTLRGEMRNGQFECEISISVPYSSTCPCSAALSRQLIQEAFEQQFNGQELDYNQVLEWLGTPEGICATPHSQRSYAQVKLKVNAEHPLNLSNVINQIEDAVKTPVQSTVKREDEQEFARLNATNLMFCEDAARRLQAKLESCPEYKDYWVRVNHLESLHPHDAVAIVTKNVPGGYSDEPNFMERFQN

SEQ ID NO: 9103 - protein, 317 aa, Hydrogenovibrio marinus
  misc_feature (1)..(317): tr|A0A066ZVU0|A0A066ZVU0_HYDMR GTP cyclohydrolase FolE2 OS=Hydrogenovibrio marinus OX=28885 GN=folE2 PE=3 SV=1
MTKNMPDIACQPYENPQGKLNWVGMSGIELPILVENEQRTPTQLSSQVQAYVSLDDPLSKGIHMSRLYVLLDQKGAEAPLSAQHVKGLLQAFIDSHEGLSNHAFVEFRFDYYERRRSLKSDNSGWKHYPTTLRGELKDGTFECEVSISVPYSSTCPCSAALSRQLIQEAFEQKFSGDQVDYQEVLAWLGTPEGICATPHSQRSYAQVKVKIAEDAPLSISALINQIEDAVQTPVQSTVKREDEQEFARLNASNLMFCEDAARRLQNKFSQQTEYLDFWIRVNHLESLHPHDAVAIVTKGIPGGYDDEPNFMDRLSVN

SEQ ID NO: 9104 - protein, 316 aa, Hydrogenovibrio sp.
  misc_feature (1)..(316): tr|A0A2I2A4I3|A0A2I2A4I3_9GAMM GTP cyclohydrolase FolE2 OS=Hydrogenovibrio sp. SC-1 OX=2065820 GN=folE2 PE=3 S V=1
MTKHMPDIACQPHQAPQGKLNWVGMSGIELPILIEQSAQQTLTLSSQVQAYVSLDDPLSKGIHMSRLYLLLDEMGSNEPLTPNRIQVLLEAFLESHHGLSQNAFVEFKFDYYERRKSLKTDNSGWKHYPCTLRGQLRDGQYECEISISVPYSSTCPCSAALSRQLIQEAFQQQFADQPLDYQQVLAWLGTPEGICATPHSQRSYAQIKLKVTADHVLNLSTVINQIEDAVKTPVQSTVKRQDEQEFARLNATNLMFCEDAARRLQAKLESCPEYIDYWVRVNHLESLHPHDAVAVVTKNIPNGYSDEPNFMDAFEH

SEQ ID NO: 9105 - protein, 316 aa, Hydrogenovibrio thermophilus
  misc_feature (1)..(316): tr|A0A410H5G4|A0A410H5G4_9GAMM GTP cyclohydrolase FolE2 OS=Hydrogenovibrio thermophilus OX=265883 GN=folE2 PE= 3 SV=1
MTKHMPDIACQPHQDPQGKLNWVGMSGIELPIQLQQDSQNTLTLSSQVQAYVSLDDPLSKGIHMSRLYLILDETGSKAPLTPASIQNMLQAFIESHQGLSQNAFVEFRFDYYERRRSLKSDNSGWKHYPCTMRGEMRDGQYECEVSISVPYSSTCPCSAALSRQLIQEAFEQQFNGQALDYNQVLEWLGTPEGICATPHSQRSYAQIKLKVDASHDLNLSTVINQIEDAVKTPVQSTVKREDEQEFARLNATNLMFCEDAARRMQAKLESCTEYQDYWVRVNHLESLHPHDAVAIVTKNVPGGYSDEPNFMDRFEH

SEQ ID NO: 9106 - protein, 269 aa, Hydromonas duriensis
  misc_feature (1)..(269): tr|A0A4R6Y4M0|A0A4R6Y4M0_9BURK GTP cyclohydrolase FolE2 OS=Hydromonas duriensis OX=1527608 GN=folE2 PE=3 SV=1
MNSPTDLKNIPDVQSSVDARNMPISRVGIKDVRFPLQIDLGAGAQATVASYTMCVFLPADQKGTHMSRFVALLEENKNVFTLSSFKSLIDDMMVRLESQKGDIQVQFPYFVEKTAPISGIKSLMDYQITLNGTHQHGQSQVALSVLIPMTSLCPCSKKISEYGAHNQRSHVTAHMTFADANMAQFDLHALIAQIEAQGSCELYGLLKRPDEKYVTERAYDNPKFVEDLVRDVAGVLKSQDYVAQFTVEAENFESIHNHSAYAVIQSVDI

SEQ ID NO: 9107 - protein, 269 aa, Hydromonas sp.
  misc_feature (1)..(269): tr|A0A345DAN4|A0A345DAN4_9BURK GTP cyclohydrolase FolE2 OS=Hydromonas sp. F02 OX=2268024 GN=folE2 PE=3 SV=1
MNSPTDLKAIPDVQSTIDARNMPISRVGIKDVRFPLSIDLGAGAQATVARYTMCVYLPADQKGTHMSRFVALLEENKTVFSLSSFKTLIDDMMVRLESEKGDIQAHFPYFVEKVAPVSGIKSLMDYEITLNGTHVKGHSQVTLSVLIPMTSLCPCSKKISAYGAHNQRSHVTAHMTFDDEHMAEFDLHALISAIEAQGSCELYGLLKRPDEKYVTERAYDNPKFVEDLVRDVAGVLKAQTYVAQFSVEAENFESIHNHSAYAVIESTDI

SEQ ID NO: 9108 - protein, 239 aa, Hydrotalea sandarakina
  misc_feature (1)..(239): tr|A0A2W7RRH2|A0A2W7RRH2_9BACT GTP cyclohydrolase 1 OS= Hydrotalea sandarakina OX=1004304 GN=folE PE=3 SV=1
MKPSEIMSSIQLNGKNIALTDVLVDEMGDNHVQTSVDTPLRNDAFVLSDEDKIKAIEKHFRAIMEVLGLDLNDDSLKGTPKRVAKMYVKEIFKGLNPENMPKVTLFNNSYHYNQMLVEKNISFYSNCEHHFVPIIGRAHVAYISNGKVIGLSKLNRIVNYFAKRPQVQERLTMQIGTALQKILGTQDVAVVIDAKHLCVASRGIEDDTSTTVTSFYEGKFKEEATRSEFLKYLELHTKV

SEQ ID NO: 9109 - protein, 240 aa, Hydrotalea sp.
  misc_feature (1)..(240): tr|A0A4Q0AVB8|A0A4Q0AVB8_9BACT GTP cyclohydrolase 1 OS= Hydrotalea sp. AMD OX=2501297 GN=folE PE=3 SV=1
MKQSETMSSIQLNGKTKAELTDVLIDEMGDNHILTSVDTPLREDAFDLSDEEKTKAIEKHFRSIMEIMGLDLTDDSLKGTPKRMAKMYIKEIFRGLNPANKPKVTLFNNTYQYNQMLVEKNISFYSNCEHHFVPIIGKAHVAYMSNGKVIGLSKLNRMVEYFAKRPQVQERLTMQIGTELQQILGTNDVAVVIDAKHLCVASRGVEDDTSTTITSFYEGKFKEETTRNEFLKYLELNTKF

SEQ ID NO: 9110 - protein, 237 aa, Hyella patelloides
  misc_feature (1)..(237): tr|A0A563VVJ7|A0A563VVJ7_9CYAN GTP cyclohydrolase 1 OS= Hyella patelloides LEGE 07179 OX=945734 GN=folE PE=3 SV =1
MTQVFSNGSNSSINSNGLKSSLREQVSSRPDRNTHDGKEAVINATSEAAKEKMMDAVKVMLESVGEDPDREGLLKTPKRVAEAMQFLTQGYNQSLEKLVNGAIFDEGHNEMVLVRDIDFFSLCEHHMLPFMGRAHVAYIPSQKVVGLSKLARIVEMYARRLQVQERLTRQIAEAIQEVLEPQGVAVVMEATHMCMSMRGVQKPGSWTVTSAMLGVFQDEQKTREEFLNLIRHQPSFM

SEQ ID NO: 9111 - protein, 235 aa, Hyella patelloides
  misc_feature (1)..(235): tr|A0A563VZ98|A0A563VZ98_9CYAN GTP cyclohydrolase 1 OS= Hyella patelloides LEGE 07179 OX=945734 GN=folE PE=3 SV =1
MIAWLLPLLFNLILFKFMTLAKSKPNQVNKIDNKLPLLNTTQQPPVSEEEMRQAVRTLLLGLGEDPDREGLRDTPKRVVKALKFLTSGYHQSLDELLNGAVFHENTDEMVLVRDIDLFSSCEHHILPILGRAHVAYIPDRKVIGLSKIARICEMYGRRLQVQERLTAQIADALQGLLQPKGVAVVVEASHMCMVMRGVQKPGSWTSTSAVRGVFANDAKTRQEFMSLIRHNPALR

SEQ ID NO: 9112 - protein, 225 aa, Hymenobacter actinosclerus
  misc_feature (1)..(225): tr|A0A1I0AJ73|A0A1I0AJ73_9BACT GTP cyclohydrolase 1 OS= Hymenobacter actinosclerus OX=82805 GN=folE PE=3 SV=1
MDNLPLSAVAGSPAAAADAQLPPDLRTPLRPDAFEQSEEAKIEAIAGHFREIMQVLGLDLTDDSLAGTPRRVAKMYVQEWFRGLNPAYHPEVRLFENRYQYQQMLVERDITLFSCCEHHFVPIIGKAHVAYLPGEHVVGLSKLNRVVQYFARRPQVQERLTRQIAEELKRSLGTDDVAVLIEADHLCVMSRGVNDTSSSTLTAEYGGAFGQDATLRQEFLRLIGK

SEQ ID NO: 9113 - protein, 229 aa, Hymenobacter amundsenii
  misc_feature (1)..(229): tr|A0A246FME8|A0A246FME8_9BACT GTP cyclohydrolase 1 OS= Hymenobacter amundsenii OX=2006685 GN=folE PE=3 SV=1
MDNPLSAATAVAGGAAAATAVDAQLPADLRTPLRPDAFALDEEAKIEAIAGHFREIMQVLGLDLTDDSLNGTPRRVAKMYVQEWFRGLNPEYRPDVRLFENRYQYQQMLVERDITLFSCCEHHFVPIIGKAHVAYLPGEHVVGLSKLNRVVQYFARRPQVQERLTRQIAEELKNALHTDNVAVLIEADHLCVMSRGVNDTSSSTLTAEYGGVFGQDAALRQEFLRLIGK

SEQ ID NO: 9114 - protein, 225 aa, Hymenobacter aquaticus
  misc_feature (1)..(225): tr|A0A4Z0PY10|A0A4Z0PY10_9BACT GTP cyclohydrolase 1 OS= Hymenobacter aquaticus OX=1867101 GN=folE PE=3 SV=1
MDNSVSAASAAHSAGPADSHLSPDLRTPLRADAFALSDEEKITGIAEHFHEIMLLLGLDLTDDSLQGTPRRVAKMYVQEWFRGLDPKHRPDVKLFDNRYGYQQMLVERDITVFSCCEHHFVPIMGKAHVAYLPGEHVVGLSKLNRVVQYYARRPQVQERLTRQIAEELKQSLRTDNVAVLIEADHLCVMSRGVNDTGSSTLTAEYGGLFKDDQALRAEFLRQIGK

SEQ ID NO: 9115 - protein, 235 aa, Hymenobacter chitinivorans
  misc_feature (1)..(235): tr|A0A2M9BAQ4|A0A2M9BAQ4_9BACT GTP cyclohydrolase 1 OS= Hymenobacter chitinivorans DSM 11115 OX=1121954 GN=folE PE=3 SV=1
MKRTATLLNTMDNSVSAAAAAHSFGSADAHLSPDLRTPLRPDAFALSEEEKIAGIAEHFHEIMQLLGLDLNDDSLKGTPRRVAKMYVQEWFRGLDPKHRPEVKLFDNRYGYGQMLVEKDITVFSCCEHHFVPIMGKAHVAYLPGEHVVGLSKLNRVVQYYARRPQVQERLTRQIAEELKHSLQTENVAVLIEADHLCVMSRGVNDTSSSTLTAEYGGLFKEDSTLRAEFLRLLGK

SEQ ID NO: 9116 - protein, 219 aa, Hymenobacter coccineus
  misc_feature (1)..(219): tr|A0A1G1TJW0|A0A1G1TJW0_9BACT GTP cyclohydrolase 1 OS= Hymenobacter coccineus OX=1908235 GN=folE PE=3 SV=1
MDNDSGARPAPDAHLPPGLRTPLRPDAFDAADDTKIAAIAGHFAAIMQELGLDLADDSLAGTPHRVAKMYVQEWFRGLNPAHRPHVKLFENRYGYHQLLVERDITLFSCCEHHFVPIVGKAHVAYLPADNVVGLSKLNRVVQHYARRPQVQERLTRQIAEELQQSLGTPDVAVLIEADHLCVMSRGVNDTSSSTLTSEYGGRFATDAALRTEFLRQIGK

SEQ ID NO: 9117 - protein, 224 aa, Hymenobacter daecheongensis
  misc_feature (1)..(224): tr|A0A1M6CKE3|A0A1M6CKE3_9BACT GTP cyclohydrolase 1 OS= Hymenobacter daecheongensis DSM 21074 OX=1121955 GN=fol E PE=3 SV=1
MDKSAPAVGPDGSGLPDTHLSADLRAPLRADAFALTDEAKIAGIAEHFREIMQLLGLDLTDDSLQGTPRRVAKMYVHEWFKGLDPKHRPDVKLFENRYAYKQMLVERDITVFSCCEHHFVPIMGKAHVAYLPGEHVVGLSKLNRVVQYYARRPQVQERLTRQIAEELKQTLHTNNVAVLIEADHLCVMSRGVNDAGSSTITAEYGGAFERDEALRTEFLRLIGK

SEQ ID NO: 9118 - protein, 225 aa, Hymenobacter elongatus
  misc_feature (1)..(225): tr|A0A4Z0PSW7|A0A4Z0PSW7_9BACT GTP cyclohydrolase 1 OS= Hymenobacter elongatus OX=877208 GN=folE PE=3 SV=1
MDNSVPAAAAAHRFGPADAHLSPDLRTPLRPDAFALSDEEKIAGIAGHFHEIMQLLGLDLTDDSLQGTPRRVAKMYVQEWFRGLDPKHRPDVKLFENRYGYQQMLVERDITVFSCCEHHFVPIMGKAHVAYLPEEHVVGLSKLNRVVQYYARRPQVQERLTRQIAEELKNSLRTENVAVLIEADHLCVMSRGVNDTGSSTLTAEYGGIFKEDQALRAEFLRFIGK

SEQ ID NO: 9119 - protein, 226 aa, Hymenobacter gelipurpurascens
  misc_feature (1)..(226): tr|A0A212UAJ6|A0A212UAJ6_9BACT GTP cyclohydrolase 1 OS= Hymenobacter gelipurpurascens OX=89968 GN=folE PE=3 SV= 1
MDNLVPAASAAEGATPATDGHLAPSLRTPLRPDAFVLSDEEKIDTIAGHFREIMDVLGLDLTDDSLSGTPKRVAKMYVQEWFRGLNPEHRPDVKLFENRYQYENMLVERDITLFSCCEHHFVPIIGKAHVAYLPGEHVVGLSKLNRVVQYYARRPQVQERLTRQIAEELKQTLHTDNVAVLIEADHLCVMSRGVNDTSSGTLTAEYGGVFKDDSGLRQEFLRLIGK

SEQ ID NO: 9120 - protein, 222 aa, Hymenobacter gummosus
  misc_feature (1)..(222): tr|A0A3S0IP46|A0A3S0IP46_9BACT GTP cyclohydrolase 1 OS= Hymenobacter gummosus OX=1776032 GN=folE PE=3 SV=1
MANQPDPGAASGLPDAHLASALRTPLRPDAFALSEEEKIAGITEHFRHIMDLLGLDLTDDSLAGTPRRVAKMFVHEWFRGLNPEHRPDVRLFDNRYQYQQMLVERDITLFSCCEHHFVPIVGKAHVAYLPGEHVVGLSKLNRVVQYYARRPQVQERLTRQIAEELKHSLQTEDVAVLIEADHLCVMSRGVNDTSSSTITAEYGGRFGQDETLRQEFLRQIGK

SEQ ID NO: 9121 - protein, 219 aa, Hymenobacter lapidarius
  misc_feature (1)..(219): tr|A0A1G1T4Z6|A0A1G1T4Z6_9BACT GTP cyclohydrolase 1 OS= Hymenobacter lapidarius OX=1908237 GN=folE PE=3 SV=1
MDNPSGSAPAPDAHLPAELRTPLRDNAFAESDEAKITAISGHFEAIMRELGLDLTDDSLAGTPRRVAKMYVQEWFKGLDPKNRPEVRMFDNRYNYHQLLVERDITLFSCCEHHFVPIIGKAHVAYLPGTNVVGLSKLNRVVQYYARRPQVQERLTRQIAEELKQSLGTDDVAVLIEADHLCVMSRGVNDTSSSTLTSEYSGRFAKDEALRGEFLRQIGK

SEQ ID NO: 9122 - protein, 226 aa, Hymenobacter mucosus
  misc_feature (1)..(226): tr|A0A238W613|A0A238W613_9BACT GTP cyclohydrolase 1 OS= Hymenobacter mucosus OX=1411120 GN=folE PE=3 SV=1
MANSEPAASAADSTTPAADAHLDSALRTPLRPDAFAQSDDEKITAIAEHFREIMQILGLDLTDDSLSGTPRRVAKMYVQEWFRGLDPAHRPDVKLFDNRYQYNNILVERDITLFSCCEHHFVPIIGKAHVAYLPGEHVVGLSKLNRVVQYYARRPQVQERLTRQIAEELKLALHTEDVAVLIEADHLCVMSRGVNDTSSGTLTAEYGGAFGRDEALRREFLRLIGK

SEQ ID NO: 9123 - protein, 219 aa, Hymenobacter nivis
  misc_feature (1)..(219): tr|A0A502H0Y2|A0A502H0Y2_9BACT GTP cyclohydrolase 1 OS= Hymenobacter nivis OX=1850093 GN=folE PE=3 SV=1
MANDSGARPAPDAHLPPGLRTPLRPDAFDAADDTKIAAIAGHFAAIMEELGLDLADDSLAGTPHRVAKMYVQEWFRGLNPAHRPDVKLFENRYGYHQLLVERDITLFSCCEHHFVPIVGKAHVAYLPAGNVVGLSKLNRVVQHYARRPQVQERLTRQIAEELQQSLGTPDVAVLIEADHLCVMSRGVNDTSSSTLTSEYGGRFATDAALRTEFLRQIGK

SEQ ID NO: 9124 - protein, 219 aa, Hymenobacter nivis
  misc_feature (1)..(219): tr|A0A2Z3GQL6|A0A2Z3GQL6_9BACT GTP cyclohydrolase 1 OS= Hymenobacter nivis OX=1850093 GN=folE PE=3 SV=1
MDNDSGARPAPDAHLPAGLRTPLRPDAFDASDETKITAIAGHFAAIMRELGLDLTDDSLAGTPRRVAKMYVQEWFRGLNPAHRPDVKLFENRYQYHQLLVERDITLFSCCEHHFVPIMGKAHVAYLPADNVVGLSKLNRVVQHYARRPQVQERLTRQITAELQQSLGTPDVAVLIEADHLCVMSRGVNDTSSSTLTSEYGGRFATDAALRTEFLRQIGK

SEQ ID NO: 9125 - protein, 228 aa, Hymenobacter perfusus
  misc_feature (1)..(228): tr|A0A428KHF0|A0A428KHF0_9BACT GTP cyclohydrolase 1 OS= Hymenobacter perfusus OX=1236770 GN=folE PE=3 SV=1
MDNSVPAASAANGATARPAIDTHLPADLRTPLRPDAFALSDDEKIAAIAAHFREIMLVLGLDLNDDSLSGTPKRVAKMYVQEWFKGLDPKHRPDVRLFENRYQYHNMLVERDITLFSCCEHHFVPIIGKAHVAYLPGEHVVGLSKLNRVVQYFARRPQVQERLNRQIAEELKNALNTEDVAVLIEADHLCVMSRGVNDTNSSTITAEYGGAFGRDEALRREFLRLIGK

SEQ ID NO: 9126 - protein, 227 aa, Hymenobacter psychrophilus
  misc_feature (1)..(227): tr|A0A1H3FL70|A0A1H3FL70_9BACT GTP cyclohydrolase 1 OS= Hymenobacter psychrophilus OX=651662 GN=folE PE=3 SV=1
MDNLPLSAAVAGGPAAAATDTQLPPDLRTPLRADAFELSEDAKIEAISGHFREIMQVLGLDLTDDSLAGTPRRVAKMYVQEWFRGLNPAYRPEVRLFENRYQYRQMLVERDITLFSCCEHHFVPIIGKAHVAYLPGENVVGLSKLNRVVQYFARRPQVQERLTRQIAEELKQSLGTDDVAVLIEADHLCVMSRGVNDTSSSTLTAEYGGAFGQDAALRQEFLRLIGK

SEQ ID NO: 9127 - protein, 223 aa, Hymenobacter psychrotolerans
  misc_feature (1)..(223): tr|A0A1M6TLN6|A0A1M6TLN6_9BACT GTP cyclohydrolase 1 OS= Hymenobacter psychrotolerans DSM 18569 OX=1121959 GN=fo lE PE=3 SV=1
MDNAAPTSGSNLRPTDAHLPTDLHTPLRPDAFALSEEDKIASITEHFREIMQLLGLDLTDDSLAGTPRRVAKMYVQEWFRGLHPENRPEVRLFGNRYQYGQMLLERDITLFSCCEHHFVPIIGKAHVAYLPGENVVGLSKLNRVVQYYARRPQVQERLTRQIAEELKQSLHTDNVAVLIEADHLCVMSRGVNDTSSSTITAEYSGAFETDATLRAEFLRLLGK

SEQ ID NO: 9128 - protein, 227 aa, Hymenobacter rigui
  misc_feature (1)..(227): tr|A0A428KXB3|A0A428KXB3_9BACT GTP cyclohydrolase 1 OS= Hymenobacter rigui OX=334424 GN=folE PE=3 SV=1
MDNPVPVASAADGAHRSAVDTQLPADLRTPLRPDAFHLSDDEKITAIAGHFHEIMLLLGLDLTDDSLSGTPRRVAKMYVQEWFKGLDPKHRPDVRLFENRYHYRNILVERDITVFSCCEHHFVPIIGKAHVAYLPGEHVVGLSKLNRVVQYFARRPQVQERLTRQIAEELKTTLGTEDVAVLIEADHLCVMSRGVNDTNSSTITAEYSGAFGRDETLRQEFLRMLGK

SEQ ID NO: 9129 - protein, 235 aa, Hymenobacter roseosalivarius
  misc_feature (1)..(235): tr|A0A1W1VUQ6|A0A1W1VUQ6_9BACT GTP cyclohydrolase 1 OS= Hymenobacter roseosalivarius DSM 11622 OX=645990 GN=fol E PE=3 SV=1
MRPNATLLNTMDNAVPAAAATDRPVPNDAHLPVDLRTPLRPDAFTLSEEEKIAGIADHFREIMMLLGLDLDDDSLNGTPRRVAKMYVQEWFRGLNPVYQPDVKLFDNRYQYHQMLVERDITLFSCCEHHFVPIIGKAHVAYLPGEHVVGLSKLNRVVQYYARRPQVQERLTRQIAEELKNTLHTNDVAVLIEADHLCVMSRGVNDTSSGTLTAEYGGAFDRDQTLRTEFLRLIGK

SEQ ID NO: 9130 - protein, 219 aa, Hymenobacter roseosalivarius
  misc_feature (1)..(219): tr|A0A1W1UG83|A0A1W1UG83_9BACT GTP cyclohydrolase 1 OS= Hymenobacter roseosalivarius DSM 11622 OX=645990 GN=fol E PE=3 SV=1
MKNAPCALLSRLPQPAATAHLTLPNGPEPRSEEDKIAAISAHFAAIMRELGLDLSDDSLAGTPRRVAKMYVQEWFRGLDPKNRPEMKLFENKYDYHQLLVARDITLFSCCEHHFVPIIGKAHVAYLPADKVVGLSKLNRVVQYYARRPQVQERLTRQIAEELKQSLGTDDVAVLLEADHLCVQSRGVNDTSSATLTSEYGGRFAAEASLRAEFLRQIGK

SEQ ID NO: 9131 - protein, 228 aa, Hymenobacter rubripertinctus
  misc_feature (1)..(228): tr|A0A418QUC0|A0A418QUC0_9BACT GTP cyclohydrolase 1 OS= Hymenobacter rubripertinctus OX=2029981 GN=folE PE=3 SV =1
MDNPMSAATAAVDCSGAAAVDAQLAADLRTPLRPDAFALSDEAKIDAIAGHFREIMHVLGLDLTDDSLNGTPRRVAKMYVQEWFRGLNPQHRPDVRLFENRYQYQQMLVERDITLFSCCEHHFVPIIGKAHVAYLPGEHVVGLSKLNRVVQYYARRPQVQERLTRQIAEELKNALHTDNVAVLIEADHLCVMSRGVNDTSSSTLTAEYGGVFGQDQALRQEFLRLIGK

SEQ ID NO: 9132 - protein, 219 aa, Hymenobacter sedentarius
  misc_feature (1)..(219): tr|A0A0U4AB11|A0A0U4AB11_9BACT GTP cyclohydrolase 1 OS= Hymenobacter sedentarius OX=1411621 GN=folE PE=3 SV=1
MDNLSGLAPATDAHLPSSLRTPLRDDAFDQADEAKIAAIAGHFEAIMRELGLDLRDDSLAGTPRRVAKMYVQEWFKGLDPKHRPEVRLFENRYGYHQLLVERDITLFSCCEHHFVPIIGKAHVAYLPGSHVVGLSKLNRVVQYYARRPQVQERLTRQIAEELKLSLGTDDVAVLIEADHLCVMSRGVNDTSSSTLTSEYGGRFASDEALRSEFLRQIGK

SEQ ID NO: 9133 - protein, 223 aa, Hymenobacter sp.
  misc_feature (1)..(223): tr|A0A4Q5LDK3|A0A4Q5LDK3_9BACT GTP cyclohydrolase 1 OS= Hymenobacter sp. 1-3-3-3 OX=2025506 GN=folE PE=3 SV=1
MDNSAAAAPDGSGLPDTHLSAGLRTPLRPDAFALTDEAKIAGIAEHFREIMLLLGLDLTDDSLQGTPRRVAKMYVQEWFKGLDPKHRPDVRLFDNRYGYQQLLVERDITVFSCCEHHFVPIMGKAHVAYLPGEHVVGLSKLNRVVQYYARRPQVQERLTRQIAEELKQTLHTDSVAVLIEADHLCVMSRGVNDTGSSTLTAEYGGAFATDPALRAEFLRQIGK

SEQ ID NO: 9134 - protein, 218 aa, Hymenobacter sp.
  misc_feature (1)..(218): tr|A0A495VFF5|A0A495VFF5_9BACT GTP cyclohydrolase 1 OS= Hymenobacter sp. YR204 OX=2135668 GN=folE PE=3 SV=1
MDNSVPGPEADAHLPLDLRTPLRTDAFALSDQEKIAAIEPHFREIMTLLGLDLTDDSLSGTPRRVAKMYVQEWFRGLNPEHQPEVRLFENRYNYHQMLVERDITLFSCCEHHFVPIIGKAHVAYMPGDKVVGLSKLNRVVQYYARRPQVQERLTRQIAEELKHALHTNDVAVLIEADHLCVMSRGVNDTSSSTITAEYSGIFLQQEHYRTEFLRLIGK

SEQ ID NO: 9135 - protein, 218 aa, Hymenobacter swuensis
  misc_feature (1)..(218): tr|W8F1P4|W8F1P4_9BACT GTP cyclohydrolase 1 OS=Hymenoba cter swuensis DY53 OX=1227739 GN=folE PE=3 SV=1
MDGAAARPAIDTHLPADLRTPLRPDAFALSDDEKIAAIAAHFREIMQVLGLDLTDDSLSGTPKRVAKMYVQEWFKGLDPKHRPDVRLFENRYQYHNMLVERDITLFSCCEHHFVPIIGKAHVAYLPGEHVVGLSKLNRVVQYFARRPQVQERLTRQIAEELKNALHTEDVAVLIEADHLCVMSRGVNDTNSSTITAEYGGAFGRDEALRREFLRLIGK

SEQ ID NO: 9136 - protein, 226 aa, Hymenobacter wooponensis
  misc_feature (1)..(226): tr|A0A4Z0MHJ0|A0A4Z0MHJ0_9BACT GTP cyclohydrolase 1 OS= Hymenobacter wooponensis OX=1525360 GN=folE PE=3 SV=1
MDNPVPAASAADGAAPAADGHLTESLRTPLRSDAFTLSDEEKITAIAGHFREIMEVLGLDLSDDSLNGTPRRVAKMYVQEWFRGLNPEHRPDVKLFENRYQYQNLLVERDITLFSCCEHHFVPIIGKAHVAYLPGEHVVGLSKLNRVVQYYARRPQVQERLTRQIAEELKQALRTDDVAVLIEADHLCVMSRGVNDTSSGTLTAEYGGAFNTDSALRQEFLRLVGK

SEQ ID NO: 9137 - protein, 196 aa, Hyphomicrobiaceae bacterium
  misc_feature (1)..(196): tr|A0A5C7LXS7|A0A5C7LXS7_9RHIZ GTP cyclohydrolase 1 OS= Hyphomicrobiaceae bacterium OX=2015799 GN=folE PE=3 SV= 1
MEHDDRSLNEPAPVFDNIEINVAEILLALGRGNDEGTRETPKRVRKFYLDWTTAGEPTFKLTDFDAESFDQMVIQRRIPFFSMCEHHLLPFFGLATVAYIPNGKILGLSKLARIVDWFSRRPQNQERLTQQIGNFISKTLKPKGVGVSLTGRHMCMEMRGIRTYGTMTTTNVLMGIIRTAPDAREEFLRSTTYEQL

SEQ ID NO: 9138 - protein, 206 aa, Hyphomicrobiaceae bacterium; identical to SEQ ID NO: 8086
  misc_feature (1)..(206): tr|A0A424LYL7|A0A424LYL7_9RHIZ GTP cyclohydrolase 1 OS= Hyphomicrobiaceae bacterium TMED74 OX=1986774 GN=folE P E=3 SV=1

SEQ ID NO: 9139 - protein, 216 aa, Hyphomicrobium denitrificans
  misc_feature (1)..(216): tr|N0BFB9|N0BFB9_9RHIZ GTP cyclohydrolase 1 OS=Hyphomic robium denitrificans 1NES1 OX=670307 GN=folE PE=3 SV=1
MSQNQLIKPANQNPEISDQMNSDKKPTRAEVEAAVRTILRWTGDDPTRDGLLETPARVVRAYEEYFAGYNEDPKAILQKTFEEIEGYDEMIVLRGIRFESHCEHHMAPIIGRAWVAYIPRGRVVGISKLARSVDAFAKRLQIQEKMTAQIANTIQEVLDPQGVAVVLKAEHHCMTTRGAHKPGTDMVTSRMLGVFRDNPITRQEFLALVTEDQRIG

SEQ ID NO: 9140 - protein, 203 aa, Hyphomicrobium denitrificans
  misc_feature (1)..(203): tr|N0B2R9|N0B2R9_9RHIZ GTP cyclohydrolase 1 OS=Hyphomic robium denitrificans 1NES1 OX=670307 GN=folE PE=3 SV=1
MKKLPLSTHVTALSPRRPSRAEAEEAVRTLIAWSGDNPARPGLEKTPERVADAFGEYFRGYKEDALAELAATFEEPSGYNDMVLLKDIAFESHCEHHIAPFFGTAHIAYLPSERIVGLSKIARVVDIFARRLQTQEGLTDQIASALEEGLRARGVAIIMSARHHCMAARGVHQRGVATVTFRFLGEFERDSALRDRFMAAVRD

SEQ ID NO: 9141 - protein, 209 aa, Hyphomicrobium facile
  misc_feature (1)..(209): tr|A0A1I7MTQ3|A0A1I7MTQ3_9RHIZ GTP cyclohydrolase 1 OS= Hyphomicrobium facile OX=51670 GN=folE PE=3 SV=1
MNVNPQMFDKARCLKNIEADRPDRPDRADVEAAFRTIIRWTGDNPERSGLIETPARATRALEEFFTGYAQDPALILRKTFDEIEGYDEMIVLRDIRFESHCEHHMAPILGRAWVGYVPSGRVVGISKLARVVEAYAKRLQIQEKMTAQIANTINDVLRPQGVGVIIKAAHQCMTTRGVHKPNADLVTSRMLGCVRDNPLTRQEFMSLAV

SEQ ID NO: 9142 - protein, 197 aa, Hyphomicrobium facile
  misc_feature (1)..(197): tr|A0A1I7MVL9|A0A1I7MVL9_9RHIZ GTP cyclohydrolase 1 OS= Hyphomicrobium facile OX=51670 GN=folE PE=3 SV=1
MNSNNKPTRAEVEAAVKTIIRWTGDDPSRDGLKETPSRVTKAFEEYFRGYDQDPVAILQKTFEEIEGYDEMIVLRGIRFESHCEHHMAPIIGRAWVGYIPDGRVVGISKLARVVDAYAKRLQIQEKMTAQIANTIQDVLQPQGVAVMIKAEHHCMTTRGVMKPGTDMVTSRMLGAFRDNPITRQEFLAIVTEDTKTS

SEQ ID NO: 9143 - protein, 201 aa, Hyphomicrobium nitrativorans
  misc_feature (1)..(201): tr|V5SBV7|V5SBV7_9RHIZ GTP cyclohydrolase 1 OS=Hyphomic robium nitrativorans NL23 OX=1029756 GN=folE PE=3 SV=1
MSNKIIKPDASELSVPTREEAEAAVRTLLRWAGDDPTRDGLIETPKRVAKAFQDYFRGYNDDPEEILQKTFEETEGYDEMIVLRGIRFESHCEHHLAPIVGRAWVGYIPNGRVVGISKLARVVDVFAKRLQIQEKMTSQIANIIDDVLKPQGVAVVIKAEHHCMTTRGIHKPGTDMVTSRMLGVFRDNALTRQEFLSVIDD

SEQ ID NO: 9144 - protein, 207 aa, Hyphomicrobium nitrativorans
  misc_feature (1)..(207): tr|V5SDN0|V5SDN0_9RHIZ GTP cyclohydrolase 1 OS=Hyphomic robium nitrativorans NL23 OX=1029756 GN=folE PE=3 SV=1
MDLHISRLQTSQRKRPSRDVAEAAVRTLIEWAGDDPDREGLLGTPDRVVRAYEEFYAGYAEDPVAILKRTFEETAGYDEIVMLRDIRLESHCEHHMVPIIGRAHVAYLPEGRVVGISKLARLVEIYAKRLQIQEVLTAQIADTINEVLKPKGVAVLIEAAHQCMTTRGIKKPSVVTITSRMTGCFRTDASTRAEFMGMLNARPLDAI

SEQ ID NO: 9145 - protein, 231 aa, Hyphomicrobium sp.
  misc_feature (1)..(231): tr|A0A2S5P5E3|A0A2S5P5E3_HYPSQ GTP cyclohydrolase 1 OS= Hyphomicrobium sp. OX=82 GN=folE PE=3 SV=1
MAKNGNPGGSRPRNDSIRTTREAAVGSRVERLKSGLLKQKGAEVTRPSREEAEAAFRTIIRWAGDDPDRDGLHETPSRVARAFEEWFHGYNDDPESILKKTFEEIEGYDEMIVLRGIRFESYCEHHMAPIIGKAWVGYIPNGRVVGISKLARVVEVYAKRLQIQEKMTAQIANIIQQVLQPHGVGVVIKAEHHCMTTRGVHKHGTDMVTSRMLGTFRDSAITRQEFLSMVE

SEQ ID NO: 9146 - protein, 215 aa, Hyphomicrobium sp.
  misc_feature (1)..(215): tr|A0A1E4BZ28|A0A1E4BZ28_9RHIZ GTP cyclohydrolase 1 OS= Hyphomicrobium sp. SCN 65-11 OX=1660102 GN=folE PE=3 SV =1
MEQMIKKNGAARLELTGETTPGRPTRAEAEEAVRTLLAWAGDDPDREGLRDTPKRVAAAFEEYFAGYDADPVEALSRTFEDVGGYDDMVMLRDIRVQSHCEHHIAPFVGVAHIAYLPSNRVVGLSKLARVVEIFASRLQTQEKLTAEIVGAIESVLKPRGVAILIEAEHQCMSMRGVRQHGVATVTTRFSGVFDTDASYRDRFLQMVHAGPKQRT

SEQ ID NO: 9147 - protein, 208 aa, Hyphomicrobium sulfonivorans
  misc_feature (1)..(208): tr|A0A120CTT7|A0A120CTT7_HYPSL GTP cyclohydrolase 1 OS= Hyphomicrobium sulfonivorans OX=121290 GN=folE PE=3 SV= 1
MDAVVEDLVKRQLRPRPSREDAEAAVRTLIEWAGDDPDREGLVGTPARVARAYEEFFAGYAEDPVEILRTTFEETAGYDEIVMLRDIRLESHCEHHIVPIIGRAHIAYYPSQRVVGISKLARLAEIYAKRLQIQEVLTAQIADAMETVLKPKGVAILIEASHQCMTTRGIKKPGVVTITSRMTGCFRREPETRAEFYRLVAGRPLDPV

SEQ ID NO: 9148 - protein, 191 aa, Hyphomicrobium sulfonivorans
  misc_feature (1)..(191): tr|A0A109BI81|A0A109BI81_HYPSL GTP cyclohydrolase 1 OS= Hyphomicrobium sulfonivorans OX=121290 GN=folE PE=3 SV= 1
MDQSDRPSRSEVEAAFRTILRWTGENPDRDGLHETPKRMARAYEEYFRGYNEDPEAILSKTFEETEGYDEMIVLRGIRFESHCEHHMAPIIGRAWVAYIPSGRVVGISKLARVVEVYAKRLQIQEKMTAQIANAIESVLQPQGVAVVLKAEHHCMTARGIMKPGTDLVTSRMLGCFRDNPVTRQEFLSMIA

SEQ ID NO: 9149 - protein, 205 aa, Hyphomonadaceae bacterium
  misc_feature (1)..(205): tr|A0A0F2QIX9|A0A0F2QIX9_9RHOB GTP cyclohydrolase 1 OS= Hyphomonadaceae bacterium BRH_c29 OX=1629720 GN=folE PE =3 SV=1
MDAITPKKDIVRADPVKRPTQAEAEEAVRTLIAWAGDDPAREGVIDTPKRVVNAYKEWFSGYGEDPVKYLSRTFEDVQGYDDIVMLRNIDVESHCEHHMAPFLGKAFVAYMPSENVVGISKLARVVEIFSKRLQTQETMTAQICDAITESLAPMGTAVLIDAVHECMSTRGVHHKDVSTITTQFTGVFKSDADLRNRFLRMAGHG

SEQ ID NO: 9150 - protein, 204 aa, Hyphomonadaceae bacterium
  misc_feature (1)..(204): tr|A0A354TZI2|A0A354TZI2_9RHOB GTP cyclohydrolase 1 OS= Hyphomonadaceae bacterium OX=2026748 GN=folE PE=3 SV=1
MDKITTPGSYERTEPLTRPSREEAEDAVRTLLAWAGDDPRREGLIDTPKRVVKAYEEWFSGYTEDPVAYLSRTFDDVQGYDDLVMLREIDVESHCEHHMAPFLGKAYVAYQPTDAVVGISKLARVVEIFAKRLQTQETMTAQICDAITESLAPAGCAVLIDAKHQCMTTRGVHHPDVSTITTQFTGVFKTDKDKRDRFLRLAGK

SEQ ID NO: 9151 - protein, 205 aa, Hyphomonas adhaerens
  misc_feature (1)..(205): tr|A0A3B9H1L2|A0A3B9H1L2_9RHOB GTP cyclohydrolase 1 OS= Hyphomonas adhaerens OX=81029 GN=folE PE=3 SV=1
MDAITPKNEVARADTVNRPSQEEAEEAVRTLIAWAGDDPAREGLIDTPKRVVNAYKEWFSGYTEDPVKYLSRTFEDVQGYDDIVMLRDIDVESHCEHHMAPFLGKAYVAYMPTEAVVGISKLARVVEIFSKRLQTQETMTSQICDAITESLAPMGTAVLIDAVHECMSTRGVHHKDVSTITTQFTGVFKSDADLRNRFLRMTGRG

SEQ ID NO: 9152 - protein, 205 aa, Hyphomonas adhaerens; identical to SEQ ID NO: 9151
  misc_feature (1)..(205): tr|A0A069E8S5|A0A069E8S5_9RHOB GTP cyclohydrolase 1 OS= Hyphomonas adhaerens MHS-3 OX=1280949 GN=folE PE=3 SV=1

SEQ ID NO: 9153 - protein, 207 aa, Hyphomonas atlantica
  misc_feature (1)..(207): tr|A0A059EAR0|A0A059EAR0_9RHOB GTP cyclohydrolase 1 OS= Hyphomonas atlantica OX=1280948 GN=folE PE=3 SV=1
MAMDAITPNKDKARAEPVKRPTVQEAEEAVRTLIAWAGDDPQREGLLDTPKRVVNAYKEWFSGYDEDPVKYLSRTFEDVQGYDDIVMLRSIDVESHCEHHMAPFLGKAYVAYMPSAAVVGISKLARVVEIFSKRLQTQETMTAQICDAITESLAPMGTAVLIDAVHECMSTRGVHHKDVSTITTQFTGVFKSDADLRNRFLRMAGKG

SEQ ID NO: 9154 - protein, 205 aa, Hyphomonas atlantica
  misc_feature (1)..(205): tr|A0A356W508|A0A356W508_9RHOB GTP cyclohydrolase 1 OS= Hyphomonas atlantica OX=1280948 GN=folE PE=3 SV=1
MDAITPNKDKARAEPVKRPTVQEAEEAVRTLIAWAGDDPQREGLLDTPKRVVNAYKEWFSGYDEDPVKYLSRTFEDVQGYDDIVMLRSIDVESHCEHHMAPFLGKAYVAYMPSAAVVGISKLARVVEIFSKRLQTQETMTAQICDAITESLAPMGTAVLIDAVHECMSTRGVHHKDVSTITTQFTGVFKSDADLRNRFLRMAGKG

SEQ ID NO: 9155 - protein, 207 aa, Hyphomonas beringensis
  misc_feature (1)..(207): tr|A0A062UEX4|A0A062UEX4_9RHOB GTP cyclohydrolase 1 OS= Hyphomonas beringensis OX=1280946 GN=folE PE=3 SV=1
MAMDAITPKKDMPRTDPVKRPSVEEAEEAVRTLIAWAGDDPRREGLLDTPKRVVNAYKEWFSGYEEDPVKYLSRTFEDVQGYDDIVMLRNIEVESHCEHHMAPFLGKAYVAYMPSEAVVGISKLARVVEIFSKRLQTQETMTAQICDAITESLAPMGTAVLIDAVHECMSTRGVHHKDVSTITTQFTGVFKSDADLRNRFLRMANHG

SEQ ID NO: 9156 - protein, 206 aa, Hyphomonas chukchiensis
  misc_feature (1)..(206): tr|A0A062UMT4|A0A062UMT4_9RHOB GTP cyclohydrolase 1 OS= Hyphomonas chukchiensis OX=1280947 GN=folE PE=3 SV=1
MAMDAITPKNEKSRGEPLVRPTVQEAEEAVRTLIAWAGDDPRREGLLDTPKRVVNAYKEWFSGYDEDPVKYLSRTFEDVQGYDDIVILRNIDVESHCEHHMAPFIGKAYVAYKPSDAVVGISKLARVVEIFAKRLQTQETMTAQICDAITESLAPMGTAVLIEAVHECMSTRGVHHKDVTTITTQFTGVFKSDADLRNRFLRAANQ

SEQ ID NO: 9157 - protein, 206 aa, Hyphomonas hirschiana
  misc_feature (1)..(206): tr|A0A059F8K6|A0A059F8K6_9RHOB GTP cyclohydrolase 1 OS= Hyphomonas hirschiana VP5 OX=1280951 GN=folE PE=3 SV=1
MDAVTPKKDIPRPDSVRRPSQQEAEEAVRTLIAWAGDDPAREGLIDTPKRVVNAYKEWFEGYGEDPVKYLSRTFEDVQGYDDIVMLRNIEVESHCEHHIAPFIGKAFIAYKPSTAVVGISKLARVVEIFAKRLQTQETMTAQICDAITESLAPMGTAVFIEAEHQCMSTRGVHHKHVTTITTQFTGVFKSDADLRNRFLNMCGQTV

SEQ ID NO: 9158 - protein, 207 aa, Hyphomonas jannaschiana
  misc_feature (1)..(207): tr|A0A059F7U7|A0A059F7U7_9RHOB GTP cyclohydrolase 1 OS= Hyphomonas jannaschiana VP2 OX=1280952 GN=folE PE=3 SV= 1
MAMDAITPKNEIARANPVKRPSQEEAEEAVRTLIAWAGDDPAREGLIDTPKRVVNAYKEWFSGYTEDPVKYLSRTFEDVQGYDDIVMLRDIDVESHCEHHMAPFLGKAYVAYMPTEAVVGISKLARVVEIFSKRLQTQETMTSQICDAITESLAPMGTAVLIDAVHECMSTRGVHHKDVSTITTQFTGVFKSDADLRNRFLRMTGRG

SEQ ID NO: 9159 - protein, 206 aa, Hyphomonas johnsonii
  misc_feature (1)..(206): tr|A0A059FM41|A0A059FM41_9RHOB GTP cyclohydrolase 1 OS= Hyphomonas johnsonii MHS-2 OX=1280950 GN=folE PE=3 SV=1
MAMDAITPKNDKSRGDPLVRPTVEEAEAAVRTLIAWAGDDPRREGLLDTPKRVVNAYREWFGGYDEDPVKYLSRTFEDVQGYDDIVILRNIDVESHCEHHMAPFIGKAFVAYKPSDAVVGISKLARVVEIFAKRLQTQETMTAQICDAITESLAPMGTAVLIEAVHECMSTRGVHHKDVTTVTTQFTGVFKSDADLRNRFLRVSGQ

SEQ ID NO: 9160 - protein, 206 aa, Hyphomonas neptunium; identical to SEQ ID NO: 9157
  misc_feature (1)..(206): sp|Q0BXB5|GCH1_HYPNA GTP cyclohydrolase 1 OS=Hyphomonas neptunium (strain ATCC 15444) OX=228405 GN=folE PE=3 S V=1

SEQ ID NO: 9161 - protein, 206 aa, Hyphomonas oceanitis
  misc_feature (1)..(206): tr|A0A059G571|A0A059G571_9RHOB GTP cyclohydrolase 1 OS= Hyphomonas oceanitis SCH89 OX=1280953 GN=folE PE=3 SV=1
MAMDAITPKNDKSRGEPLVRPTVQEAEEAVRTLIAWAGDDPRREGLIDTPKRVVNAYKEWFSGYDEDPVKYLSRTFEDVQGYDDIVILRNIDVESHCEHHMAPFIGKAYVAYKPSDAVVGISKLARVVEIFAKRLQTQETMTAQICDAITDSLAPMGTAVLIEAVHECMSTRGVHHKDVTTITTQFTGVFKSDADLRNRFLRAANQ

SEQ ID NO: 9162 - protein, 206 aa, Hyphomonas polymorpha
  misc_feature (1)..(206): tr|A0A062VBH2|A0A062VBH2_9RHOB GTP cyclohydrolase 1 OS= Hyphomonas polymorpha PS728 OX=1280954 GN=folE PE=3 SV= 1
MDAVTPKKDIPRADPVRRPTQQEAEEAVRTLIAWAGDDPRREGLIDTPKRVVNAYKEWFEGYGEDPVKYLSRTFEDVQGYDDIVMLRNIEVESHCEHHIAPFIGKAFVAYKPSSAVVGISKLARVVEIFAKRLQTQETMTAQICDAITESLAPMGTAVFIEAEHQCMSTRGVHHKHVTTITTQFTGVFKSDADLRNRFLAMCNQNG

SEQ ID NO: 9163 - protein, 203 aa, Hyphomonas sp.
  misc_feature (1)..(203): tr|A0A1Z9XT51|A0A1Z9XT51_9RHOB GTP cyclohydrolase 1 OS= Hyphomonas sp. TMED17 OX=1986605 GN=folE PE=3 SV=1
MDAITPKEEITRVELERPTVEEAMDAVRTLIAWAGDDPRREGLIDTPKRVVKAYQEFFSGYREDPVEYLSRTFDDVQGYDDLVMLKNINVESHCEHHMVPFLGKAFIAYMPTQSVVGISKLARVVEIFAKRLQTQETMTAQICDAITESLAPMGVAVLIDAEHQCMSTRGVHHKDVTTVTTQFTGVFKTDKDLRNRFLRLTES

SEQ ID NO: 9164 - protein, 205 aa, Hyphomonas sp.
  misc_feature (1)..(205): tr|A0A258BNZ1|A0A258BNZ1_9RHOB GTP cyclohydrolase 1 OS= Hyphomonas sp. 32-62-5 OX=1970391 GN=folE PE=3 SV=1
MRSCLSPSARKAKNSVIRGPAFPVESVRTLIAWAGDDPAREGLIDTPKRVVNAYKEWFEGYGEDPVKYLSRTFEDVQGYDDIVMLRNIEVESHCEHHMAPFIGKAFVAYKPSTAVVGISKLARVVEIFAKRLQTQETMTAQICDAITESLAPMGTAVFIEAEHQCMSTRGVHHKHVTTITTQFTGVFKSDADLRNRFLAMCNQKV

SEQ ID NO: 9165 - protein, 200 aa, Hypnocyclicus thermotrophus
  misc_feature (1)..(200): tr|A0A4R7L075|A0A4R7L075_9FUSO GTP cyclohydrolase 1 OS= Hypnocyclicus thermotrophus OX=1627895 GN=folE PE=3 SV= 1
MKEGYKDTMNKEKIAYHVKEILKLIGENPEREGLQGTPMRVARMYEEIFEGLKYTNDEIVKMFGVTFDEEDCYIENNKDMVLLKDIEIFSMCEHHLALMYNMKVAVAYIPKEKIIGLSKVVRIADMVGRRPQLQERIGKDIAEIMQKITETEDVAVIITGEHACMTTRGIKKPGTKTMTTTLRGKFKEDKELLNNLLGML

SEQ ID NO: 9166 - protein, 224 aa, Hyunsoonleella jejuensis
  misc_feature (1)..(224): tr|A0A1H9GLT7|A0A1H9GLT7_9FLAO GTP cyclohydrolase 1 OS= Hyunsoonleella jejuensis OX=419940 GN=folE PE=3 SV=1
MKFDNLEEFDALGDEHIGSSENTPMRSDAFKLSNEEKIDIIKDDVRHIMETLGLDLTDDSLNGTPNRVAKMFVKEIFGGLDPKKKPSASTFENKYKYGEMLVEKNITVYSTCEHHLLPIVGRAHVAYISNGTVVGLSKMNRIVDYYAKRPQVQERLTIQIVKELQEVLNTKDVACVIDAKHLCVNSRGIRDIESSTVTSEFGGKFKDMATRREFLDYIQLDTQF

SEQ ID NO: 9167 - protein, 245 aa, Hyunsoonleella jejuensis
  misc_feature (1)..(245): tr|A0A1H9K946|A0A1H9K946_9FLAO GTP cyclohydrolase 1 OS= Hyunsoonleella jejuensis OX=419940 GN=folE PE=3 SV=1
MINNTVKTAQKKEDMQLEKLKTKTNGHKLNGFTVEDIGDDHLYTGLETPMKSDAFKLTDTEKKERIAILFEEIMDVMGLDLTDDSLKGTPQRVAKMYIDEIFSGLNPENKPKVALFDNKYQYNQMLVEKNITFYSNCEHHFVPIIGKAHVAYISSGKVIGLSKLNRIVQYYAKRPQVQERLTNQIANELRTILDTDDIAVIIDAKHLCVSSRGIKDDTSATVTSYYGGQFNTSEKIAELQNYLNN

SEQ ID NO: 9168 - protein, 231 aa, Hyunsoonleella pacifica
  misc_feature (1)..(231): tr|A0A4V2JBF8|A0A4V2JBF8_9FLAO GTP cyclohydrolase 1 OS= Hyunsoonleella pacifica OX=1080224 GN=folE PE=3 SV=1
MQLEKLKQKANGHKLNGFSIDDIGDDHLFTGLDTPMRSDAFKLSDTEKKARIAILFEEIMEVMGLDLTDDSLKGTPKRVAKMYIDEIFSGLNPENKPKVALFDNKYQYNQMLVEKNITFYSNCEHHFVPIIGKAHVAYISSGKVIGLSKLNRIVQYYAKRPQVQERLTNQIANELKEALNTEDIAVIIDAKHLCVSSRGIKDDTSATVTAYYGGKFNTSEKITELQNYLNN

SEQ ID NO: 9169 - protein, 224 aa, Hyunsoonleella pacifica
  misc_feature (1)..(224): tr|A0A4Q9FN35|A0A4Q9FN35_9FLAO GTP cyclohydrolase 1 OS= Hyunsoonleella pacifica OX=1080224 GN=folE PE=3 SV=1
MKFDNLEEFDALGDEHIGTSEDTPMRSDAFKLTSEEKIDIIKDDVRHIMETLGLDLTDDSLSGTPNRVAKMFVNEIFGGLDPKKKPNASTFDNKYKYGEMLVEKNITVYSTCEHHLLPIVGRAHVAYISNGTVVGLSKMNRIVDYFAKRPQVQERLTIQIVKELQSVLNTKDVACVIDAKHLCVNSRGIRDIESSTVTSEFGGKFKDMATRREFLDYIQLDTQF

SEQ ID NO: 9170 - protein, 224 aa, Hyunsoonleella sp.
  misc_feature (1)..(224): tr|A0A4Q9FGM8|A0A4Q9FGM8_9FLAO GTP cyclohydrolase 1 OS= Hyunsoonleella sp. T58 OX=2527939 GN=folE PE=3 SV=1
MKFDNLEEFDALGDEHVGSSEDTPLRNDAFELTNEEKIDIIKDDVRHIMETLGLDLTDDSLNGTPNRVAKMFVNEIFGGLDPKKKPSASTFENKYKYGEMLVEKNITVYSTCEHHLLPIVGRAHVAYISNGTVVGLSKMNRIVDYFAKRPQVQERLTIQIVKELQKVLNTKDVACVIDAKHLCVNSRGIRDIESSTVTSEFGGKFKDRATRREFLDYIKLDTEF

SEQ ID NO: 9171 - protein, 231 aa, Hyunsoonleella sp.
  misc_feature (1)..(231): tr|A0A4Q9F9B5|A0A4Q9F9B5_9FLAO GTP cyclohydrolase 1 OS= Hyunsoonleella sp. T58 OX=2527939 GN=folE PE=3 SV=1
MQLEKLEEKKNGHKLNGFTLEDIGDDHLFTSLETPMKPDAFKLSDTEKKERIAILFEEIMDVMGLDLTDDSLKGTPKRVAKMYIDEIFSGLNPENKPKVALFDNKYQYNQMLVEKNITFYSNCEHHFVPIIGKAHVAYISSGKVIGLSKLNRIVQYYAKRPQVQERLTNQIANELKEILDTEDVAVIIDAKHLCVSSRGIKDDTSSTVTAYYGGEFNTSEKITELQNYLNG

SEQ ID NO: 9172 - protein, 198 aa, Ichthyenterobacterium magnum
  misc_feature (1)..(198): tr|A0A420DM43|A0A420DM43_9FLAO GTP cyclohydrolase 1 OS= Ichthyenterobacterium magnum OX=1230530 GN=folE PE=3 SV =1
MPYRKFEEYNIKVTDDVKARYKNIIEDLGEDTSRDGLLKTPERASKAMQFLTQGYQQDASEILKSAMFAESYNEMVIVKDIELYSLCEHHILPFFGKAHIAYIPNGHIVGLSKIPRIVDVFARRLQVQERLTEQILDCINNTLKPEGVAVVIEASHMCMMMRGVQKQNSTTTTSGFRGAFKNIETRTEFLKLISEKLS

SEQ ID NO: 9173 - protein, 225 aa, Ichthyenterobacterium magnum
  misc_feature (1)..(225): tr|A0A420DF26|A0A420DF26_9FLAO GTP cyclohydrolase 1 OS= Ichthyenterobacterium magnum OX=1230530 GN=folE PE=3 SV =1
MKIEKDIKDFESLGDNHIGTSAETPMRNDAFKLSNDEKIDIIKDDVRHIMETLGLDLSDDSLKGTPNRVAKMFVKEIFGGLNPKKKPSASTFDNKYKYGEMLVEKNITVYSTCEHHLLPIVGKAHVAYISNGTVVGLSKMNRIVDYYAKRPQVQERLTIQIVKELQEVLNTKDVACVIDAKHLCVNSRGIRDVDSSTVTSEFGGKFKEKETKREFLDYIKLDTTF

SEQ ID NO: 9174 - protein, 176 aa, Ichthyobacterium seriolicida
  misc_feature (1)..(176): tr|A0A1J1DZG5|A0A1J1DZG5_9FLAO GTP cyclohydrolase 1 OS= Ichthyobacterium seriolicida OX=242600 GN=JBKA6_1293 PE =3 SV=1
MLTLGLDMNDDSLAGTPKRVAKMFVKELFSGLKPMDNEHSSFDNKYNYGEMLIEKNITLYSTCEHHFLPIVGKAHVGYISNGKVIGLSKINRIVNNFSKRPQVQERLTIQIVREMQKNLKTQNVACIIDAKHLCVNSRGIKDTASSTITAEFGGEFKNKEVKENFLNYIQLGTIFH

SEQ ID NO: 9175 - protein, 264 aa, Ideonella sakaiensis
  misc_feature (1)..(264): tr|A0A0K8P0B4|A0A0K8P0B4_IDESA GTP cyclohydrolase FolE2 OS=Ideonella sakaiensis (strain NBRC 110686 / TISTR 22 88 / 201-F6) OX=1547922 GN=folE2 PE=3 SV=1
MSHLKDVLHIPDTQSERDERHLAIQRVGIKDVRWPMTLRVGTEALPTVAQWDLDVALPAEQKGTHMSRFVAWLDGFGSEAVDAPLLRARMAAMLDKLHAQRGRIEARFPFFLRKRAPVSGVESLLEYQGRWIVESGPAGTAVWAEAVVPVKSLCPCSKEISDYGAHNQRSHVTVRVELKDEIAWPELVRFAEDSASCEIWPMLKRADEKWVTERAYENPKFVEDLVRDVALRLNADERVGRYRVEVENFESIHAHSAYACIERP

SEQ ID NO: 9176 - protein, 247 aa, Ideonella sakaiensis
  misc_feature (1)..(247): tr|A0A0K8NZR4|A0A0K8NZR4_IDESA GTP cyclohydrolase I OS= Ideonella sakaiensis (strain NBRC 110686 / TISTR 2288 / 201-F6) OX=1547922 GN=ISF6_1191 PE=4 SV=1
MPTAALPMPASTSTVTLDDAELSRLAASERIRYRLVAADCRYHANDNIAAYIRDGELDELRTEVEAHMHQVLKALVIDTESDHNTQETAKRVAKMFLTEVFRGRYVPMPSVTEFPNVERLNELMIVGPITVRSACSHHLCPILGRVWIGILPNEHSNLIGLSKYARICEWIMSRPQIQEEAVTMLANELQDRVKPDGLAIVMEADHFCMHWRGVKDNDSMMTNSVMRGAFLKDANLRREFLSLLSKK

SEQ ID NO: 9177 - protein, 266 aa, Ideonella sp.
  misc_feature (1)..(266): tr|A0A437RHP9|A0A437RHP9_9BURK GTP cyclohydrolase FolE2 OS=Ideonella sp. KYPY4 OX=1862385 GN=folE2 PE=3 SV=1
MTNMTDALHIPDTQSERDDRHLAIQRVGVKDVRYPLSIEVAGAVQQTAALWALDVALPAEKKGTHMSRFVAWLDALALSGEPLDAASLRAKHAAMLDKLGADEGRIEAAFSFFIRKRAPVSGLQSLLDYQGRWISETRAGITRVHAEVAVPVKSLCPCSKEISDYGAHNQRSLVTLRVELLQPVPWHELVRFAEDSASSEIWPMLKRPDEKWITERAYENPKFVEDLVRDVALRLNSDARIGRYRVDVENFESIHNHSAYARIERA

SEQ ID NO: 9178 - protein, 267 aa, Ideonella sp.
  misc_feature (1)..(267): tr|A0A523Q0X2|A0A523Q0X2_9BURK GTP cyclohydrolase FolE2 OS=Ideonella sp. MAG2 OX=2083017 GN=folE2 PE=3 SV=1
MNPQANSLHIPDTQSERDERHLAIQRVGVKDVRYPLTLKVAGAVQSTAALWSLDVALPAEQKGTHMSRFVAWLDAQHEPMDAARLSTELAAMLEKLHADEGRIEARFSFFLRKRAPVSGLESLLDYQGAWIAERRQGQTVIWAEVGVPVKSLCPCSKEISDYGAHNQRSLVTIRVAFKDPVAGAMEWHELVRFAEESASSEIWPMLKRADEKWVTERAYENPKFVEDLVRDVALRLNAEPRIGRYRVDVENFESIHNHSAWARIERD

SEQ ID NO: 9179 - protein, 308 aa, Idiomarina abyssalis
  misc_feature (1)..(308): tr|A0A370Q6F4|A0A370Q6F4_9GAMM GTP cyclohydrolase FolE2 OS=Idiomarina abyssalis OX=86102 GN=folE2 PE=3 SV=1
MPTVMPDVANQTQAQTEGALDWVGMSNIEVPLMVAAAGVPERPVAAKVEAFVNLKNPKTKGIHMSRLYLLLDKMSTEGELSHDTLKQLLNDFIESHKDISDQAFIKFDFDYHLRRKSLISKKQGWKAYPVSLTGRYDAGQLKLELSVDVPYSSTCPCSAALARQLIQDAFSEKFAGQEQVDASIMHEWLGSTEGIVATPHSQRSVAEVKVALSDSVNDFPIVELIDAIEGALKTPVQAAVKREDEQEFARLNGQNLMFCEDASRRLQHQLNQMSNFRDFWLRVNHYESLHAHDAVSVTTKGVPGGYSA

SEQ ID NO: 9180 - protein, 308 aa, Idiomarina aquatica
  misc_feature (1)..(308): tr|A0A4R6PNG2|A0A4R6PNG2_9GAMM GTP cyclohydrolase FolE2 OS=Idiomarina aquatica OX=1327752 GN=folE2 PE=3 SV=1
MPNSMPDVANHSQAQTEGTLDWVGMSNIEVPLMVAASDAAERPVAAHVEAFVNLKDPKTKGIHMSRLYLLLDQLSTEGELSHASLKQLLRDFIDSHSDISDQAFIKFDFEYHLRRESLISRKKGWKAYPVSLTGRYDAGRLSLELSVDVPYSSTCPCSAALARQLIQEAFVDKFADKEVIDKATMHEWLGSTEGIVATPHSQRSTAEVKVKLAEDLEEFPIVALIDAVEGALKTPVQAAVKREDEQEFARLNGQNLMFCEDASRRLKHQLNQMAIFKDFWLRVNHYESLHAHDAVAIATKGVDSGYRA

SEQ ID NO: 9181 - protein, 304 aa, Idiomarina aquimaris
  misc_feature (1)..(304): tr|A0A432XNT0|A0A432XNT0_9GAMM GTP cyclohydrolase FolE2 OS=Idiomarina aquimaris OX=641841 GN=folE2 PE=3 SV=1
MPDIANQTKAQTEGALDWVGMSNIEMPLVVGAANEPERPVSALVDAFVNLKDPKAKGIHMSRLYLLLEDLSNNNVLSHQSLSKLLHDFIDSHEGLADQAYVKFSFDYHLRRKALISKKPGWKAYPVTVIGRYDHGKLYLQLGVDVPYSSTCPCSAALARQLIQDAFADQFGTDADVDAEMVHRWLGTTQGIVATPHSQRSIAEVKVVMGEEISELPIIALVDAIEEALQTPVQAAVKREDEQEFARLNGQNLMFCEDAARRLQHALNQHKEFSDFWVRVNHYESLHAHDAVSITTKGVPGGFKS

SEQ ID NO: 9182 - protein, 304 aa, Idiomarina atlantica
  misc_feature (1)..(304): tr|A0A094IPP5|A0A094IPP5_9GAMM GTP cyclohydrolase FolE2 OS=Idiomarina atlantica OX=1517416 GN=folE2 PE=3 SV=1
MPDIANQTKAQTEGALDWVGMSNIEMPLVVGAANEPERPVSAKVDAFVNLKDPKAKGIHMSRLYLLLEELSNNDVLSHQSLRKLLHDFIDSHEGLADQAYVKFTFDYHLRRKALISKKPGWKAYPVTVVGRYDAGKLHLELGVEVPYSSTCPCSAALARQLIQDAFAEQFGTDADVDAELVHRWLGTTKGIVATPHSQRSIAEVKVIMGEQVSELPIIHLIDSIEDALQTPVQAAVKREDEQEFARLNGQNLMFCEDAARRLQHALNQNAVFSDFWIRVNHYESLHAHDAVSITTKGVTGGFKA

SEQ ID NO: 9183 - protein, 308 aa, Idiomarina baltica
  misc_feature (1)..(308): tr|A0A348WQ73|A0A348WQ73_9GAMM GTP cyclohydrolase FolE2 OS=Idiomarina baltica OX=190892 GN=folE2 PE=3 SV=1
MPNSMPDVANQTQAQTEGTLDWVGMSNIEVPMMVAASDASERPVAAHVEAFVNLKDPKAKGIHMSRLYLLLDQLSTEGELSHASLKQLLRDFIESHQDISDRAFIKFDFDYHLRRESLISRKKGWKAYPVSLTGRYDEGHLNLELAVDVPYSSTCPCSAALARQLIQEAFDAKFAEQEHIDKATIHQWLGTTEGIVATPHSQRSTAQVKVALSDSVEEFPIVALIDAIEDALKTPVQAAVKREDEQEFARLNGQNLMFCEDASRRLQHRLNQMPIFEDFWVRVNHYESLHAHDAVSVTTKGVKGGYSS

SEQ ID NO: 9184 - protein, 304 aa, Idiomarina donghaiensis
  misc_feature (1)..(304): tr|A0A432XMS0|A0A432XMS0_9GAMM GTP cyclohydrolase FolE2 OS=Idiomarina donghaiensis OX=519452 GN=folE2 PE=3 SV= 1
MPDIANQTRAQTEGKLDWVGMSNIEMPLVVLAAQEPERPVGAHVDAFVNLTDPKAKGIHMSRLYLLLEDLSNNDVLSHQSLGKLLHDFIDSHDGLADQAYVKFSFDYHLRRKSLISKKQGWKAYPVTVTGRYDNGHLTLELGVEVPYSSTCPCSAALARQLIQDAFADQFGTDAEVDAELVHRWLGTTQGIVATPHSQRSVAQVKVIMGDDISELPIIALIDAIEDALKTPVQAAVKREDEQEFARLNGQNLMFCEDAARRLQHALNQQSHFSDFWVRVNHYESLHAHDAVSITTKGVPGGYKA

SEQ ID NO: 9185 - protein, 308 aa, Idiomarina fontislapidosi
  misc_feature (1)..(308): tr|A0A432Y280|A0A432Y280_9GAMM GTP cyclohydrolase FolE2 OS=Idiomarina fontislapidosi OX=263723 GN=folE2 PE=3 S V=1
MPNSMPDVANQTQAQTEGTLDWVGMSNIEVPIMVAASDASERPVAAHVEAFVNLKDPKAKGIHMSRLYLLLDQLSTEGELSHASLKKLLHDFIESHQDISDRAFIKFDFDYHLRRESLISRKKGWKAYPVSLTGRYDEGHLNLELAVDVPYSSTCPCSAALARQLIQEAFDEKFAGQESVDKATIHQWLGSTEGIVATPHSQRSTAQVKVALSDTVEEFPIVALVDAIENALKTPVQAAVKREDEQEFARLNGQNLMFCEDASRRLQHALNQMPIFEDFWVRVNHYESLHAHDAVSVTTKGVKGGYSS

SEQ ID NO: 9186 - protein, 304 aa, Idiomarina halophila
  misc_feature (1)..(304): tr|A0A432XWW6|A0A432XWW6_9GAMM GTP cyclohydrolase FolE2 OS=Idiomarina halophila OX=1449799 GN=folE2 PE=3 SV=1
MPDIANQTKAQTEGALDWVGMSNIEMPLVVGAANEPERPVSARVDAFVNLKDPKAKGIHMSRLYLLLEDLSNNNVLSHQSLSKLLHDFIDSHEGLSDQAYVKFSFDYHLRRKALISKKPGWKSYPVTVIGRYDHGKLYLQLAVDVPYSSTCPCSAALARQLIQEAFANQFGTDADVDAELVHRWLGTTQGIVATPHSQRSIAEVKVVMGEQISELPIIALIDSIEDALQTPVQAAVKREDEQEFARLNGQNLMFCEDAARRLQHALNQQPVFSDFWVRVNHYESLHAHDAVSITTKGVSGGFQA

SEQ ID NO: 9187 - protein, 304 aa, Idiomarina homiensis
  misc_feature (1)..(304): tr|A0A432Y7I4|A0A432Y7I4_9GAMM GTP cyclohydrolase FolE2 OS=Idiomarina homiensis OX=364198 GN=folE2 PE=3 SV=1
MPDIANQTKAQTEGALDWVGMSNIEMPLVVGAANEPERPVSALVDAFVNLKDPKAKGIHMSRLYLLLEDLSNNDVLSHQSLSKLLHDFIDSHEGLADQAYVKFSFDYHLRRKALISKKPGWKAYPVTVIGRYDHGKLYLQLGVDVPYSSTCPCSAALARQLIQDAFADQFGTDADVDAEMVHRWLGTTQGIVATPHSQRSIAEVKVVMGEQVSELPIIALVDAIEDALQTPVQAAVKREDEQEFARLNGQNLMFCEDAARRLQHALNQHHEFSDFWVRVNHYESLHAHDAVSITTKGVPGGFKS

SEQ ID NO: 9188 - protein, 312 aa, Idiomarina indica
  misc_feature (1)..(312): tr|A0A1G6BDU2|A0A1G6BDU2_9GAMM GTP cyclohydrolase FolE2 OS=Idiomarina indica OX=1159017 GN=folE2 PE=3 SV=1
MSTATPTMMPDIANQTRAQTEGTLDWVGMSNIEMPLVVGAAQELERPVSAHVDAFVNLTDPKAKGIHMSRLYLLLEELSNNDVLNHQSLKKLLHDFIDSHEGLSDQAYVRFSFDYHLRRKSLISKKQGWKAYPVTVTGRYDNGQLVLELGVDVPYSSTCPCSAALARQLIQDAFAEKFGTDTDIDAEMVHRWLGTTQGIVATPHSQRSVAQVKVIMSNDMTELPISLLIDAIEDSLKTPVQAAVKREDEQEFARLNGQNLMFCEDAARRLQHTLNQLPQYTDFWIRVNHYESLHAHDAVSITTKGVTGGYKA

SEQ ID NO: 9189 - protein, 304 aa, Idiomarina insulisalsae
  misc_feature (1)..(304): tr|A0A432YNY0|A0A432YNY0_9GAMM GTP cyclohydrolase FolE2 OS=Idiomarina insulisalsae OX=575789 GN=folE2 PE=3 SV= 1
MPDIANQTKAQTEGALDWVGMSNIEMPLVVGAANEPERPVSALVDAFVNLKDPKAKGIHMSRLYLLLEDLSNNNVLSHQSLSKLLHDFIDSHEGLSDQAYVKFSFDYHLRRKALISKKPGWKAYPVTVIGRYDHGKLYLQLGVEVPYSSTCPCSAALARQLIQDAFAEQFGTDAEVDAEMVHRWLGTTQGIVATPHSQRSIAEVKVVMGEEISELPIIALVDAIENALQTPVQAAVKREDEQEFARLNGQNLMFCEDAARRLQHALNQHSEFSDFWVRVNHYESLHAHDAVSITTKGVPGGFQS

SEQ ID NO: 9190 - protein, 308 aa, Idiomarina loihiensis; identical to SEQ ID NO: 9179
  misc_feature (1)..(308): sp|Q5R041|GCH4_IDILO GTP cyclohydrolase FolE2 OS=Idioma rina loihiensis (strain ATCC BAA-735 / DSM 15497 / L2-T R) OX=283942 GN=folE2 PE=3 SV=1

SEQ ID NO: 9191 - protein, 304 aa, Idiomarina marina
  misc_feature (1)..(304): tr|A0A432YGT0|A0A432YGT0_9GAMM GTP cyclohydrolase FolE2 OS=Idiomarina marina OX=502366 GN=folE2 PE=3 SV=1
MPDIANQTRAQTEGKLDWVGMSNIEMPLVVGAAQEPERPVSAHVDAFVNLTDPKAKGIHMSRLYLLLEDLSNNDVLSHQSLGKLLHDFIDSHDGLADQAYVKFSFDYHLRRKSLISKKQGWKAYPVTVTGRYDNGKLNLELGVEVPYSSTCPCSAALARQLIQDAFANQFGTDSEVDAELVHRWLGTTQGIVATPHSQRSVAQVKVIMGDNVSELPIIALIDAIEDALKTPVQAAVKREDEQEFARLNGQNLMFCEDAARRLQHALNLQTQFSDFWVRVNHYESLHAHDAVSITTKGVPGGYKA

SEQ ID NO: 9192 - protein, 312 aa, Idiomarina maritima
  misc_feature (1)..(312): tr|A0A317Q2I3|A0A317Q2I3_9GAMM GTP cyclohydrolase FolE2 OS=Idiomarina maritima OX=519453 GN=folE2 PE=3 SV=1
MPTATPTMMPDIANQTRAQTEGKLDWVGMSNIEMPLVVGAANEPERPVSARVDAFVNLTDPKAKGIHMSRLYLLLEDLSNNDVLSHQSLRTLLHDFIDSHEGLADQAYVKFSFDYHLRRKSLISKKQGWKAYPVTVVGRYDNGNLQLELSVEVPYSSTCPCSAALARQLIQEAFAEQFGTEQEVDAELVHRWLGTTQGIVATPHSQRSIAQVKVALAEQANELPIIMLIDAIEDALKTPVQAAVKREDEQEFARLNGQNLMFCEDAARRLQHELHQHAGFADFWIRVNHYESLHAHDAVSITTKGIPGGFKA

SEQ ID NO: 9193 - protein, 312 aa, Idiomarina maritima
  misc_feature (1)..(312): tr|A0A1I6GUJ1|A0A1I6GUJ1_9GAMM GTP cyclohydrolase FolE2 OS=Idiomarina maritima OX=519453 GN=folE2 PE=3 SV=1
MPTATPTMMPDIANQTRAQTEGKLDWVGMSNIEMPLVVGAAQEPERPVSAHVDAFVNLTDPKAKGIHMSRLYLLLEDLSNNDVLSHHSLGKLLHDFIDSHDGLADQAYVKFSFDYHLRRKSLISKKQGWKAYPVTVTGRYDSGKLNLELGVEVPYSSTCPCSAALARQLIQDAFANQFGTDAEVDAELVHRWLGTTQGIVATPHSQRSIAQVKVIMGDNVSELPIIALIDAIEDALKTPVQAAVKREDEQEFARLNGQNLMFCEDAARRLQHALNLQAQFSDFWVRVNHYESLHAHDAVSITTKGVPGGYKA

SEQ ID NO: 9194 - protein, 308 aa, Idiomarina piscisalsi
  misc_feature (1)..(308): tr|A0A432YU20|A0A432YU20_9GAMM GTP cyclohydrolase FolE2 OS=Idiomarina piscisalsi OX=1096243 GN=folE2 PE=3 SV=1
MPTVMPDVANQTQAQTEGTLDWVGMSNIEVPLMVAAAGASERPVSAHVEAFVNLKDPKTKGIHMSRLYLLLDELSTNGELSHESLKQLLNDFIESHKDISNQAFIKFDFDYHLRRKSLISKKQGWKAYPVSLTGRYDAGTLNLELSVDVPYSSTCPCSAALARQLIQDAFSEKFAGQDTVDAATMHEWLGSTEGIVATPHSQRSVAEVKVQLSENVTDFPIVELIDAVEGALKTPVQAAVKREDEQEFARLNGQNLMFCEDASRRLQHTLNQMPNFRDFWLRVNHYESLHAHDAVSVTTKGVPGGYKA

SEQ ID NO: 9195 - protein, 312 aa, Idiomarina planktonica
  misc_feature (1)..(312): tr|A0A1Y6EFH9|A0A1Y6EFH9_9GAMM GTP cyclohydrolase FolE2 OS=Idiomarina planktonica OX=1323738 GN=folE2 PE=3 SV= 1
MSTMTPTIMPDIANQTSAQTEGALDWVGMSNIEIPLMVAAIGEPDRQVSAKVEAFVNLADPKAKGIHMSRLYLLLDELSNNGTLSHASLKQLLNDFIGSHEGLADKAFVRFDFDYHLRRKSLISKKQGWKAYPVTVVGVYDDGNLDLELGVEVPYSSTCPCSAALARQLIQDAFAAKFAGNDAVDAATVKEWLGTTEGIVATPHSQRSIAEVKVTMGKDVDELPIIHLIDSIEDALQTPVQAAVKREDEQEFARLNAQNLMFVEDSARRLQAALNRMPMFTDFWVRVNHLESLHAHDAVSVATKGVQGGFKY

SEQ ID NO: 9196 - protein, 308 aa, Idiomarina ramblicola
  misc_feature (1)..(308): tr|A0A432Z1R4|A0A432Z1R4_9GAMM GTP cyclohydrolase FolE2 OS=Idiomarina ramblicola OX=263724 GN=folE2 PE=3 SV=1
MPTVMPDVANQTQAQTEGALDWVGMSNIEVPLMVAAAGASERPVAAKVEAFVNLKNPKTKGIHMSRLYLLLDKMSTEGELSHGSMKELLNNFIESHKDISDQAFIKFDFDYHLRRKSLVSKKQGWKAYPVSLTGRYDAGQLKLELSVDVPYSSTCPCSAALARQLIQDAFSEKFAGQEKVDSNILHEWLGSTEGIVATPHSQRSVAEVKVALSESVNDFPIVELIDAVEDALKTPVQAAVKREDEQEFARLNGQNLMFCEDASRRLQHQLNQMPHFRDFWLRVNHYESLHAHDAVSVTTKGVPGGYSA

SEQ ID NO: 9197 - protein, 304 aa, Idiomarina salinarum
  misc_feature (1)..(304): tr|A0A094IUD8|A0A094IUD8_9GAMM GTP cyclohydrolase FolE2 OS=Idiomarina salinarum OX=435908 GN=folE2 PE=3 SV=1
MPDIANQTLAQTEGALDWVGMSNIEMPLVVGAANEPERPVSARIDAFVNLTDPKAKGIHMSRLYLLLEDLSNNDVLNHDSLRKLLHDFIDSHDGLADQAYVKFSFDYHLRRKALVSKKPGWKAYPITLVGRYDNGKLALQLGVDVPYSSTCPCSAALARQLIQDAFAGQFGTDAEVDAETVHRWLGTTQGIIATPHSQRSVAEVKVLLSDDLNELPIIHLVDAIEEALQTPVQAAVKREDEQEFARLNGQNLMFCEDAARRLKFMLSHQSQFFDFWIRVNHYESLHAHDAVSIATKGVPGGFQP

SEQ ID NO: 9198 - protein, 304 aa, Idiomarina sediminum
  misc_feature (1)..(304): tr|A0A432ZB16|A0A432ZB16_9GAMM GTP cyclohydrolase FolE2 OS=Idiomarina sediminum OX=431675 GN=folE2 PE=3 SV=1
MPDIANQTQAQTEGALDWVGMSNIEMPLVVGAANEPERPVSALVDAFVNLKDPKAKGIHMSRLYLLLEDLSNNDVLSHQSLGKLLHDFIDSHDGLADQAYVKFSFDYHLRRKALISKKPGWKAYPVTVVGRYDDGQLYLQLGVEVPYSSTCPCSAALARQLIQDAFADQFGTDADVDAELVHRWLGTTQGIVATPHSQRSVAEVKVVMGEQISELPIIALIDAIEHALQTPVQAAVKREDEQEFARLNGQNLMFCEDAARRLQHALNQQSAFSDFWIRVNHYESLHAHDAVSITTKGIPNGFKA

SEQ ID NO: 9199 - protein, 308 aa, Idiomarina seosinensis
  misc_feature (1)..(308): tr|A0A432ZD23|A0A432ZD23_9GAMM GTP cyclohydrolase FolE2 OS=Idiomarina seosinensis OX=281739 GN=folE2 PE=3 SV=1
MPNSMPDVANQSQAQTEGTLDWVGMSNIEVPLMVAASDAAERPVAAHVEAFVNLKDPKTKGIHMSRLYLLLDKLSTDGELSHASLKQLLLDFIESHNDISDQAFIKFDFDYHLRRESLISRKKGWKAYPVTLTGRYDAGKLSLELAVDVPYSSTCPCSAALARQLIQEAFVDKFSDQEVVDKATIHEWLGSTEGIVATPHSQRSTAQVKVKLSEELEEFPIVALVDAVEAALKTPVQAAVKREDEQEFARLNGQNLMFCEDASRRLKHQLNQMPIFKDFWLRVNHYESLHAHDAVAIATKGIESGYRS

SEQ ID NO: 9200 - protein, 308 aa, Idiomarina sp.
  misc_feature (1)..(308): tr|A0A2D9G4J6|A0A2D9G4J6_9GAMM GTP cyclohydrolase FolE2 OS=Idiomarina sp. OX=1874361 GN=folE2 PE=3 SV=1
MPTVMPDVANQTQAQTEGALDWVGMSNIEVPLMVAAAGVPERPVAAKVEAFVNLKNPKTKGIHMSRLYLLLDKLSTEGELSHDTLKQLLNDFIESHKDISDQAFIKFDFDYHLRRKSLISKKQGWKAYPVTLTGRYDAGKLKLELSVDVPYSSTCPCSAALARQLIQDAFSAQFAGQEQVDAATMHEWLGSTEGIVATPHSQRSIAEVKVALSESVTDFPIVELIDAVEDALKTPVQAAVKREDEQEFARLNGQNLMFCEDASRRLQHQLNQMSHFRDFWLRVNHYESLHAHDAVSVTTKGIPGGYSA

SEQ ID NO: 9201 - protein, 308 aa, Idiomarina sp.
  misc_feature (1)..(308): tr|A0A1S2SYD5|A0A1S2SYD5_9GAMM GTP cyclohydrolase FolE2 OS=Idiomarina sp. MD25a OX=1889913 GN=folE2 PE=3 SV=1
MPNSMPDVANQTQAQTEGTLDWVGMSNIEVPIMVAASDASERPVAAHVEAFVNLKDPKAKGIHMSRLYLLLDQLSTEGELSHASLKQLLRDFIESHQDISDRAFIKFDFDYHLRRESLISRKKGWKAYPVSLTGRYDEGHLNLELAVDVPYSSTCPCSAALARQLIQEAFDEKFAGQDSVDKATIHQWLGSTEGIVATPHSQRSTAQVKVALSDSVEEFPIVALVDAIEDALKTPVQAAVKREDEQEFARLNGQNLMFCEDASRRLQHKLNQMPIFEDFWVRVNHYESLHAHDAVSVTTKGIKGGYSS

SEQ ID NO: 9202 - protein, 312 aa, Idiomarina tainanensis; identical to SEQ ID NO: 9192
  misc_feature (1)..(312): tr|A0A368UL49|A0A368UL49_9GAMM GTP cyclohydrolase FolE2 OS=Idiomarina tainanensis OX=502365 GN=folE2 PE=3 SV=1

SEQ ID NO: 9203 - protein, 304 aa, Idiomarina taiwanensis
  misc_feature (1)..(304): tr|A0A432ZLC7|A0A432ZLC7_9GAMM GTP cyclohydrolase FolE2 OS=Idiomarina taiwanensis OX=337250 GN=folE2 PE=3 SV=1
MPDIANQTKAQTEGTLDWVGMSNIEMPVVVGAANEPERPVSARVEAFVNLTDPKAKGIHMSRLYLLLEDLSNNNALNYSTLKTLLNDFISSHDGLANQAFVQFAFDYHLRRKSLISKKQGWKAYPVVITGRYNQGNLDLQLAVEVPYSSTCPCSAALARQLIQDAFAEQFGTDEEVDAELVHRWLGTTQGIVATPHSQRSIAEVKVKLSEQTTEFPVVELIDAIEDALQTPVQAAVKREDEQEFARLNGQNLMFCEDAARKLQHALNQESQYADFWIRVNHYESLHAHDAVSITTKGITGGFSA

SEQ ID NO: 9204 - protein, 308 aa, Idiomarina tyrosinivorans
  misc_feature (1)..(308): tr|A0A432ZRA1|A0A432ZRA1_9GAMM GTP cyclohydrolase FolE2 OS=Idiomarina tyrosinivorans OX=1445662 GN=folE2 PE=3 SV=1
MPTTMPDVANQAKAQTEGTLDWVGMSNIEVPLLIAASGAPERPVGAHVEAFVNLKDPKTKGIHMSRLYLLLDQMSNEGELSHDSLKQLLLDFIASHEDISDQAYVKFEFDYHLRRKSLISKKQGWKAYPVTLVGRYDHGHLSLELKVDVPYSSTCPCSAALARQLIQEAFAKRFEGEQAVDAEQIYEWLGTTEGIVATPHSQRSVAEVKVALSDDLSEFPIIELIDAIEDALQTPVQAAVKREDEQEFARLNGQNLMFCEDAGRRLQHTLNSKPVFTDFWVRVNHYESLHAHDAVSITTKGVVGGFTS

SEQ ID NO: 9205 - protein, 312 aa, Idiomarina woesei
  misc_feature (1)..(312): tr|A0A0K6H7G3|A0A0K6H7G3_9GAMM GTP cyclohydrolase FolE2 OS=Idiomarina woesei OX=1381080 GN=folE2 PE=3 SV=1
MPTATPTLMPDIANQTRAQTEGKLDWVGMSNIEMPLVVLAAQEPERPVGAHVDAFVNLTDPKAKGIHMSRLYLLLEDLSNNDVLSHQSLGKLLHDFIDSHDGLADQAYVKFSFDYHLRRKSLISKKQGWKAYPVTVTGRYDNGHLTLELGVEVPYSSTCPCSAALARQLIQDAFADQFGTDAEVDAELVHRWLGTTQGIVATPHSQRSVAQVKVIMGNDISELPIIALIDAIEDALKTPVQAAVKREDEQEFARLNGQNLMFCEDAARRLQHALNQQSHFSDFWVRVNHYESLHAHDAVSITTKGVPGGYKA

SEQ ID NO: 9206 - protein, 304 aa, Idiomarina xiamenensis
  misc_feature (1)..(304): tr|K2KBT7|K2KBT7_9GAMM GTP cyclohydrolase FolE2 OS=Idio marina xiamenensis 10-D-4 OX=740709 GN=folE2 PE=3 SV=1
MPDVANTSQAQTEGTLDWVGMSNIEVPLVVAASEVPEQTVSAKVETFVNLPDPKAKGIHMSRLYLLLDQLSTEGELSHASLKQLLNDFITSHQGLSDQAFVKFSFDYLLRRKSLISKKQGWKAYPVTLTGRYNNGQLSLELGVNVPYSSTCPCSAALARQLIQEAFSERFANQAQIDASTVHEWLGSTDGIVATPHSQRSVAELKVALSEELTEFPIVALIDLVENALKTPVQAAVKREDEQEFARLNGQNLMFCEDASRRLKYALSQQPQFTDFWVRVNHYESLHAHDAVSIATKGVEGGFKA

SEQ ID NO: 9207 - protein, 308 aa, Idiomarina zobellii
  misc_feature (1)..(308): tr|A0A1G7T2A4|A0A1G7T2A4_9GAMM GTP cyclohydrolase FolE2 OS=Idiomarina zobellii OX=86103 GN=folE2 PE=3 SV=1
MPTVMPDVANQTQAQTEGTLDWVGMSNIEVPLMVAAAGASERPVSAHVEAFVNLKDPKTKGIHMSRLYLLLDELSTNGELSHESLKQLLNDFIESHKDISNQAFIKFDFDYHLRRKSLISKKQGWKAYPVSLTGRYDAGSLNLELSVDVPYSSTCPCSAALARQLIQDAFSEKFAGQDTVDAATMHEWLGSTEGIVATPHSQRSVAEVKVQLSENVTDFPIVELIDAVEGALKTPVQAAVKREDEQEFARLNGQNLMFCEDASRRLQHTLNQMPNFRDFWLRVNHYESLHAHDAVSVTTKGVPGGYKA

SEQ ID NO: 9208 - protein, 308 aa, Idiomarinaceae bacterium
  misc_feature (1)..(308): tr|A0A2D5Q0U2|A0A2D5Q0U2_9GAMM GTP cyclohydrolase FolE2 OS=Idiomarinaceae bacterium OX=1898113 GN=folE2 PE=3 S V=1
MPNSMPDVANQTQAQTEGTLDWVGMSNIEVPIMVAASDASERPVAAHVEAFVNLKDPKAKGIHMSRLYLLLDQLSTEGELSHASLKQLLRDFIESHQDISDRAFIKFDFDYHLRRESLISRKKGWKAYPVSLTGRYDEGHLNLELAVDVPYSSTCPCSAALARQLIQEAFDEKFAGQDSVDKATIHQWLGSTEGIVATPHSQRSTAQVKVALSDSVEEFPIVALVDAIEDALKTPVQAAVKREDEQEFARLNGQNLMFCEDASRRLQHKLNQMPIFEDFWVRVNHYESLHAHDAVSVTTKGVKGGYSS

SEQ ID NO: 9209 - protein, 320 aa, Idiomarinaceae bacterium
  misc_feature (1)..(320): tr|A0A0P8B3H7|A0A0P8B3H7_9GAMM GTP cyclohydrolase FolE2 OS=Idiomarinaceae bacterium HL-53 OX=1298881 GN=folE P E=3 SV=1
MYKEPDNYSGVAQRMNSSMPDIASHTKTAHVGTLDWVGMSEIEMPLVFVEGGQKHTVGARIDAFVSLDEAEAKGIHMSRLYLALEALSTEGELTPASLRELLAGFIQTHADLSKRAMVAIRFDYHLRRKALLSGKQGWKAYPIEIKAELNEGQFVCDVSLDVTYSSTCPCSAALARQLIQEAFRAKFEGNQLDSEEVAEWLGTTEGIVATPHSQRSVAEAKIRLADSVVDFPVQELIDQLENELKTPVQAAVKREDEQEFARLNGQNNMFCEDAGRILKKALNNREDVTDFRVRINHYESLHAHDAVSIVTKGIPNGFQP

SEQ ID NO: 9210 - protein, 271 aa, Ignatzschineria cameli
  misc_feature (1)..(271): tr|A0A2U2ASN8|A0A2U2ASN8_9GAMM GTP cyclohydrolase FolE2 OS=Ignatzschineria cameli OX=2182793 GN=folE2 PE=3 SV= 1
MTNGDVTAIKDVQAYEDERNVEISQVGISGLRLPIEFSNGGQSQHSVMEAAFTVTLQQERKGTHMSRFIEVWDSLEKPFSLTSVTTLLNRLEEKLDAEKAQVELKFPLFFTRTAPVSKAESLMDFNCEIVAASNQSDPAKSHYELRLMAPVTSLCPCSKEISEFSAHSQRSHLTIALQFRDRQGFEAVDIDQLLMEMESVGSSRLYPLLKRPDEKYVTEMAYKTPRFVEDLVRDLVVLLRERQDLTAFSVQSENFESIHNHQAYAKVNYTF

SEQ ID NO: 9211 - protein, 271 aa, Ignatzschineria indica
  misc_feature (1)..(271): tr|A0A2U2ANK4|A0A2U2ANK4_9GAMM GTP cyclohydrolase FolE2 OS=Ignatzschineria indica OX=472583 GN=folE2 PE=3 SV=1
MTNGDVTAIKDVQAYEDGRNVEISQVGISGLRLPIEFSNGGQSQHSVMEAAFTVTLQKERKGTHMSRFIEVWDRLEKPFSLERVTTLLNSLEEKLDAEKAQIELKFPLFFTRTAPVSQAKSLMDFNCEIVAESNHSDPGESHYELRLMAPVTSLCPCSKEISEFSAHSQRSHLTIALQFRDRAGFEAIDIDQLLMEMESVGSSRLYPLLKRPDEKYVTEMAYKTPRFVEDLVRDLVVLLRERQDLIAFSVQSENFESIHNHQAYAKVNYTF

SEQ ID NO: 9212 - protein, 271 aa, Ignatzschineria sp.
  misc_feature (1)..(271): tr|A0A256CU12|A0A256CU12_9GAMM GTP cyclohydrolase FolE2 OS=Ignatzschineria sp. F8392 OX=1980117 GN=folE2 PE=3 SV=1
MTNGDVTAIKDVQAYEDERNVEISQVGISGLRLPIEFSNGGQSQHSVMEAAFTVTLQKERKGTHMSRFIEVWDRLEKPFSLERVTTLLNSLEEKLDAEKAQIELKFPLFFTRTAPVSQAKSLMDFNCEIVAESNHSDPGKSHYELRLMAPVTSLCPCSKEISEFSAHSQRSHLTIALQFRDRAGFEAIDIDQLLMEMESVGSSRLYPLLKRPDEKYVTEMAYKTPRFVEDLVRDLVVLLRERQDLIAFSVQSENFESIHNHQAYAKVNYTF

SEQ ID NO: 9213 - protein, 272 aa, Ignatzschineria ureiclastica
  misc_feature (1)..(272): tr|A0A2U2AGM4|A0A2U2AGM4_9GAMM GTP cyclohydrolase FolE2 OS=Ignatzschineria ureiclastica OX=472582 GN=folE2 PE= 3 SV=1
MIVSNGALTTIKDVQAYEDERNVEISQVGISGLRLPLEFANGGKSQHTVMEAAFTVTLQKERKGTHMSRFIEVWDMQPKPFSLEGVGILLQDLKTKLDAPQAQASLQFPLFFEREAPVSKAKSLMDFECGIDVELCEDEADSSYTLHLMAPVTSLCPCSKEISEFSAHSQRSHLTITLEFKDFTSFAALEIDQLLKTMESVGSSKLYPLLKRPDEKYVTEHAYKNPQFVEDLVRDLVVLLRERTDLLAFSVQSENFESIHNHQAYAKVNYIF

SEQ ID NO: 9214 - protein, 196 aa, Ignavibacteria bacterium
  misc_feature (1)..(196): tr|A0A2M7MQN0|A0A2M7MQN0_9BACT GTP cyclohydrolase 1 OS= Ignavibacteria bacterium CG_4_10_14_3_um_filter_37_18 O X=1974037 GN=folE PE=3 SV=1
MSNTEESEMDVNKIKNLIEALIIEIGEDPNREGLLRTPNRVAKSYEFLTSGYSKNIDTVLNGAIFNEKYDEMVLVKNIDFYSLCEHHMLPFYGKVHVAYVPNGKIVGLSKIPRIVDVFARRLQVQERMTQQIADTIDKYLAPKGVAVVSEAYHMCMMMRGVEKQNSSATSSAMHGLFKEDARTRTEFLDLIRMNKI

SEQ ID NO: 9215 - protein, 187 aa, Ignavibacteria bacterium
  misc_feature (1)..(187): tr|A0A1G0VF42|A0A1G0VF42_9BACT GTP cyclohydrolase 1 OS= Ignavibacteria bacterium RIFOXYB2_FULL_37_11 OX=1798448 GN=folE PE=3 SV=1
MDYSKFEDSVKTILSEVGEDMSREGLLKTPSRVAKSFEFLTDGYRKNIDEILNDAIFDEKYDEMVIVKDIDFYSMCEHHLLPFYGKIHIAYIPNGKIVGLSKIPRIVEMYARRLQVQERMTQEVADTLEKYLQPRGVAIVAEGYHMCMMMRGVEKQNSITTTSAMHGIFKEDARTRAEFLNLIAKRI

SEQ ID NO: 9216 - protein, 191 aa, Ignavibacteriae bacterium
  misc_feature (1)..(191): tr|A0A3N5L485|A0A3N5L485_9BACT GTP cyclohydrolase 1 OS= Ignavibacteriae bacterium OX=2026749 GN=folE PE=3 SV=1
MDGASTSKMEHIVKDLLIEMGEDPTREGLLRTPLRVAKAYKFLTKGYEQDVNTVLNGAIFNECYNEIVLVKDIDFFSLCEHHLLPFYGKCHIAYIPNNKIVGLSKIPRIVEIFSRRLQVQERMTKQIGDVLYKALQPKGVAVVIEARHLCMMMRGVEKQNSIATTSNMLGVFKSDAKTRAEFLKLINAKLS

SEQ ID NO: 9217 - protein, 188 aa, Ignavibacteriae bacterium
  misc_feature (1)..(188): tr|A0A2N1VYY4|A0A2N1VYY4_9BACT GTP cyclohydrolase 1 OS= Ignavibacteriae bacterium HGW-Ignavibacteriae-2 OX=2013 809 GN=folE PE=3 SV=1
MDLNLVASNVKTILEQIGEDPEREGLQKTPERVAKAYQFLTQGYQKNIDEILNGAIFKEEYDEMVIVKDIDFYSMCEHHLLPFYGKVHVAYIPNGKIVGLSKIPRIVDAFARRLQIQERMTRQIADVIDEYLSPIGVGVVVEGYHMCMMMRGVEKQNSITTTSAMLGVFNNEASTRSEFLNLTSYKRI

SEQ ID NO: 9218 - protein, 225 aa, Ignavibacteriales bacterium
  misc_feature (1)..(225): tr|A0A2M7ZB33|A0A2M7ZB33_9BACT GTP cyclohydrolase 1 OS= Ignavibacteriales bacterium CG_4_9_14_3_um_filter_34_10 OX=1974044 GN=folE PE=3 SV=1
MSYKENYDFDSLGDEHIGTSLETPLRNDAFSLDDETKIEIIEDLFQQIMITLGLDLNDDSLKGTPHRVAKMYVQEIFSGLKPDNKPVARAFTNNYKYQGMVVEKNINFSSTCEHHFVPIIGHAHVAYIPNGNVIGLSKINRIVNYYAKRPQVQERMTKQILNELKSTLNTDNVAVVIEAKHFCVHSRGIEDNTSTTTTSEFSGKFLDIETKKEFMGYVVNTLTKL

SEQ ID NO: 9219 - protein, 188 aa, Ignavibacteriales bacterium
  misc_feature (1)..(188): tr|A0A2M7ZNF1|A0A2M7ZNF1_9BACT GTP cyclohydrolase 1 OS= Ignavibacteriales bacterium CG_4_9_14_3_um_filter_30_11 OX=1974043 GN=folE PE=3 SV=1
MNIKRLEEIVTNILNEIGEDTKREGLQKTPQRVAKSYEFLTSGYQKDIAKVLNGAIFHEKYDEMVLVKNIDFYSLCEHHMLPFYGKVHIAYIPNGKIVGLSKIPRIVDVFSRRLQVQERMTQQIADIINEYLEPQGVAVVSEAFHMCMMMRGVQKQNSSATTSAVHGIFKEDARTRTEFLDLISHKNL

SEQ ID NO: 9220 - protein, 188 aa, Ignavibacterium album
  misc_feature (1)..(188): tr|I0AJ92|I0AJ92_IGNAJ GTP cyclohydrolase 1 OS=Ignaviba cterium album (strain DSM 19864 / JCM 16511 / NBRC 1018 10 / Mat9-16) OX=945713 GN=folE PE=3 SV=1
MNKEKFESLIRNILIEIGEDPNREGLLSTPKRVAEAYQFLTAGYQKDIDEVLNNAIFTEKYDEMVLVKNIDFYSMCEHHMLPFYGKVHVAYIPNGKIVGLSKIPRIVEVFARRLQVQERMTQQIADTLEKYLQPVGVAVVSEAYHMCMMMRGVEKQNSSATTSAMHGVFKEDAKTRNEFINLVGIKNL

SEQ ID NO: 9221 - protein, 227 aa, Ignavibacterium album
  misc_feature (1)..(227): tr|I0AHX5|I0AHX5_IGNAJ GTP cyclohydrolase 1 OS=Ignaviba cterium album (strain DSM 19864 / JCM 16511 / NBRC 1018 10 / Mat9-16) OX=945713 GN=folE PE=3 SV=1
MKDGKPNTKSFQNDDDFNDEHYFTSIETPIRSDAFEIDDEIKIELIEKRFREIMEVLGLDLSDDSLKDTPKRVAKMYVKEIFKGLDPRNKPSVTLFENKYKFNQMLVEKDISVYSYCEHHFVPIIGKAHVAYYSAGKVVGLSKINRMVQYYSKRPQVQERLTVQIANEMKEMLQTEDVAVLIEADHLCVASRGVQDVSSSTVTSSYHGKFLNPQIRDEFLRYVYSEK

SEQ ID NO: 9222 - protein, 184 aa, Ignavigranum ruoffiae
  misc_feature (1)..(184): tr|A0A1H9DBI3|A0A1H9DBI3_9LACT GTP cyclohydrolase 1 OS= Ignavigranum ruoffiae OX=89093 GN=folE PE=3 SV=1
MNKEKIEKAVQMIIEAIGEDPKREGLVETPQRIAKMYQEVFSGLNQTAESHLQKSFEIVDNNLVVEKDINFHSMCEHHFLPFWGKAHIAYIPSGRVAGLSKLARTVDIYARKPQIQERLTLEITEALMTYLKAQGAMVVIEAEHMCMNMRGVQKPGTKTVTCVAKGCLETDKELKAEAFRMMGL

SEQ ID NO: 9223 - protein, 273 aa, Ilumatobacter fluminis
  misc_feature (1)..(273): tr|A0A4R7HUE5|A0A4R7HUE5_9ACTN GTP cyclohydrolase FolE2 OS=Ilumatobacter fluminis OX=467091 GN=folE2 PE=3 SV=1
MNVSLEDVQGRPDERAICLQRAGVEALRYPVDVADTTGDAQSSVANFDLSVELPGHIKGTHMSRFVEAVAALSDPLSPTSIGGLAEDVRARLKAESATIRTSFPLFLDRAAPATGATAKLEYSCALTAVAASSARRTVVSVRVPVTSLCPCSKAISDYGAHNQRGQVTIAVDIGDSSSVGLIDLIGIAEACASSPVYPLVKRPDERVMTMTAYDKPVFVEDMVRDSVAMVAGKWPGLEFSVLAQNEESIHHHAAFAETWSPGFDHRLAPTHRD

SEQ ID NO: 9224 - protein, 197 aa, Ilyobacter polytropus
  misc_feature (1)..(197): tr|E3HCY1|E3HCY1_ILYPC GTP cyclohydrolase 1 OS=Ilyobact er polytropus (strain DSM 2926 / CuHBu1) OX=572544 GN=f olE PE=3 SV=1
MKKIDKKKIEEHVKGILEALGDDPDRPGLVDTPKRVANMYAEIFLGLAYTNDDIADMYGVTFDEEDIYTEPGSDMVLMKDIDIFSHCEHHLSLMYNMTVAVAYIPREKVIGLSKIARIADMVSRRPQLQERIGKDIAEIIQKVTQSHDVAVIVKGEHGCMTTRGIKKPGTKTITTTLRGRFKSDDALYGRLMELYRS

SEQ ID NO: 9225 - protein, 212 aa, Imhoffiella purpurea
  misc_feature (1)..(212): tr|W9V9W6|W9V9W6_9GAMM GTP cyclohydrolase 1 OS=Imhoffie lla purpurea OX=1249627 GN=folE PE=3 SV=1
MSEKAKLSQMLAHSHYATSFEPEPDEEVYDPAKEDLVRRMLMEIGEDPDREGLRRTPLRVAKALDFLTSGYDLSAEEIIKGAVFAEDVKEMVVVRDIEFYSMCEHHMLPFFGHAHVGYLPNGKVVGLSKVARVVDVFARRLQVQERLTNQIADALMEHLGAHGVAVVLEASHTCMMMRGVQKQRSTTVSSAMRGTFDEDPRTRAEFMSFIKN

SEQ ID NO: 9226 - protein, 303 aa, Imhoffiella purpurea
  misc_feature (1)..(303): tr|W9V272|W9V272_9GAMM GTP cyclohydrolase FolE2 OS=Imho ffiella purpurea OX=1249627 GN=folE2 PE=3 SV=1
MNPKSSGMKAVQIRRGTRPMEQALEPNCRATGAVTDIADVQGSADTRRIAIDKVGIKDIRHPVRVRERGGSEQHTVATFNMYVYLPHDFKGTHMSRFVQVLNNHEREISVSSFKEMLVEMSDRLESEAGHIEMRFPYFISKKAPVSGVESLLDYEVTFIGEIRHGEPRLQLKVAVPVTSLCPCSKKISAYGAHNQRSHVTVQVRMQGFMWLEELIELIEREASSELFGLLKRPDEKYVTEHAYDNPKFVEDLVRDVAKRLNQDERILSYVVEAENFESIHNHSAYALIERDKQSEARMAEASL

SEQ ID NO: 9227 - protein, 271 aa, Immundisolibacter cernigliae
  misc_feature (1)..(271): tr|A0A1B1YW80|A0A1B1YW80_9GAMM GTP cyclohydrolase FolE2 OS=Immundisolibacter cernigliae OX=1810504 GN=folE2 PE =3 SV=1
MNKPSEPAVPQIADVQGSPDTRRLDIDRVGIKGIRHPVRILARSGTEQHTVANFNMYVHLPHNFKGTHMSRFIEILNGHEQEISLGTFRQMLREMCERLEARAGHIEMSFPFFVNKAAPVTGVTSLMDYQVSYIGEIAHGQAERLTAKLVIPVTSLCPCSKKISDYGAHNQRTHVTLTAHLGTPVWIEELIELVEAQASSELYGLLKRPDEKYVTEHAYDNPKFVEDLVRDIAGALNADERLAGYVVEAENFESIHNHSAYALIEKPVRAG

SEQ ID NO: 9228 - protein, 236 aa, Imperialibacter sp.
  misc_feature (1)..(236): tr|A0A5E8AN50|A0A5E8AN50_9BACT GTP cyclohydrolase 1 OS= Imperialibacter sp. EC-SDR9 OX=2038371 GN=folE PE=3 SV= 1
MKQKETLLSTQPSQALDIDDMEDDHVATSYETPLRADAFEMDDDLKMELIAKHFREIMHILGMDLTDDSLKGTPNRVAKMYVKEVFSGLNPKNKPTAKLFDNKYEYNEMLVERDITFYSYCEHHFVPIYGKAHVAYISSGKVIGLSKINRIVQYYAKRPQVQERMTVQIANELKKILKTDNVGVVVDAVHMCVSSRGVGDTNSRTGTAHFSGKFSDENTKKEFLNYINTPNNLNGK

SEQ ID NO: 9229 - protein, 209 aa, Imperialibacter sp.
  misc_feature (1)..(209): tr|A0A5E7YDV2|A0A5E7YDV2_9BACT GTP cyclohydrolase 1 OS= Imperialibacter sp. EC-SDR9 OX=2038371 GN=folE PE=3 SV= 1
MERIELLEIKHLSPCLNDEKRLGDDEKVVIIARHFKSIMETLGLDVNDDSLKATPVRVAKMYVKEVFSGLNPINKPSISLFENTYGYNEMLVEKDITLYSYCEHHFVPIIGKVHVAYIPAAKVIGLSKINRLTQYYSRRPQVQERLTREISEGLREALQTQDVAVCIEAAHLCVASRGVEDTKSSTRTVMYSGRFQEAGMKLEFLSALR

SEQ ID NO: 9230 - protein, 226 aa, Imtechella halotolerans
  misc_feature (1)..(226): tr|I0WGV0|I0WGV0_9FLAO GTP cyclohydrolase 1 OS=Imtechel la halotolerans K1 OX=946077 GN=folE PE=3 SV=1
MKMDNALEEEFDAFGDDHIASSAETPLRNDAFELSDEEKIDRIQADVYNIMETLGLDLTDDSLKGTPKRVAKMFVKEIFGGLHPNKKPSASTFDNKYKYGEMLVEKNITVYSTCEHHLLPIVGRAHIAYISKGKVVGLSKMNRIVDYFAKRPQVQERMTIQIVQELQKVLGTDDVACVVDAKHLCVNSRGIRDIESSTVTAEFGGQFKNPSVRREFLDYIKLDTQF

SEQ ID NO: 9231 - protein, 199 aa, Imtechella halotolerans
  misc_feature (1)..(199): tr|I0W788|I0W788_9FLAO GTP cyclohydrolase 1 OS=Imtechel la halotolerans K1 OX=946077 GN=folE PE=3 SV=1
MSYKKFEEYNIKVTKEVKHGYQEIIKTLGEDIHREGLLKTPERAAKAMQFLTSGYHLDADEILKSAMFKESYNDMVIVKDIEIYSLCEHHMLPFYGKAHIAYIPDGQIVGLSKIPRIVDVFARRLQVQERLTHDILECLNRTLKPQGVAVVIEASHMCMMMRGVQKQNSVTTTSGFRGQFMKNETRNEFLKLISSDLSR

SEQ ID NO: 9232 - protein, 221 aa, Indibacter alkaliphilus
  misc_feature (1)..(221): tr|S2DCV6|S2DCV6_9BACT GTP cyclohydrolase 1 OS=Indibact er alkaliphilus LW1 OX=1189612 GN=folE PE=3 SV=1
MGISDSHQIDEIGDEHIGTSHDTPLREDAFEMDDDLKMEIIEKHFKEIMHVLGLDLSDDSLKGTPRRVAKMYIKEIFSGLNPKNKPDIKLFENKYKYKEMLVEKDITFYSNCEHHFVPIYGKAHVAYISNGNVIGLSKINRIVQYFAKRPQVQERLTMQIGNELREVLGSDDVAVVIDAHHMCVSTRGVQDVNSSTVTSYYSGKFETDENSRNEFMKYISL

SEQ ID NO: 9233 - protein, 269 aa, Inhella sp.
  misc_feature (1)..(269): tr|A0A437LCD1|A0A437LCD1_9BURK GTP cyclohydrolase FolE2 OS=Inhella sp. CCP-18 OX=2499851 GN=folE2 PE=3 SV=1
MSPSSTHSAHLPIPDTQSERDERHLAIQRVGVRRVKFPLLVQTERGVQPSVGEWTLDVALPAEQKGTHMSRFVAWLEEGAEQALDAATLRSRHLAMLEKLHASDGVTEVAFTLFERKRAPVSGIESRLDLQARWVVETRGGQTTVWQEVAVPVKSLCPCSKEISDYGAHNQRSIVTVRVEWLADKPLPFSAQMRFAEDSASSEIWPLLKRADEKWVTERAYENPKFVEDLVRDVALRLNADERVGRYHVDVENFESIHSHSAYAVIERN

SEQ ID NO: 9234 - protein, 271 aa, Inmirania thermothiophila
  misc_feature (1)..(271): tr|A0A3N1XSV3|A0A3N1XSV3_9GAMM GTP cyclohydrolase FolE2 OS=Inmirania thermothiophila OX=1750597 GN=folE2 PE=3 SV=1
MSDSSRDAGIADVQSSHDTRRIPIDRVGIKDIRHPVRVRDRSDGEQHTVASFDMYVNLPHNFKGTHMSRFVEILNRHEREISVDSIRDMLCEMVQVLEAEAGHIEMRFPYFVNKRAPVTGVESLMDYDVTLTAELLDGQVRTWIQVVVPVTSLCPCSKEISDRGAHNQRSHVTVRVRTRGFVWIEELIELVEQEASCELFGLLKRPDEKYVTERAYDNPKFVEDMVRDVAARLNADDRIAAYVVESENFESIHNHSAYAMIDRDKEAEPPC

SEQ ID NO: 9235 - protein, 210 aa, Inquilinus limosus
  misc_feature (1)..(210): tr|A0A211YSJ1|A0A211YSJ1_9PROT GTP cyclohydrolase 1 OS= Inquilinus limosus OX=171674 GN=folE PE=3 SV=1
MTRNPFTPVAANVAAQSASEQRPSRSEAEEAVRVLLRWAGEDIGREGLRDTPKRVVKAYEEFFRGYDQDPVELLSRTFEEVEGYDEMVLLRDIDFESHCEHHMVPIIGKAHVAYLPDRRVVGISKLARVVDAYAKRLQIQERLTAQIAGAIDQVLKPRGVAVMVSSQHHCMTTRGVHKHGTQMVTSCMIGAFRDEPQLRREFQMMIGMPV

SEQ ID NO: 9236 - protein, 202 aa, Inquilinus limosus
  misc_feature (1)..(202): tr|A0A0A0D0F3|A0A0A0D0F3_9PROT GTP cyclohydrolase 1 OS= Inquilinus limosus MP06 OX=1398085 GN=folE PE=3 SV=1
MAANVTAQSASEQRPSRSEAEEAVRVLLRWAGEDIGREGLRDTPKRVVKAYEEFFRGYDQDPVELLSRTFEEVEGYDEMVLLRDIDFESHCEHHMVPIIGKAHVAYLPDRRVVGISKLARVVDAYAKRLQIQERLTAQIAGAIDQVLKPRGVAVMVSSQHHCMTTRGVHKHGTQMVTSCMIGAFRDEPQLRREFQMMIGMPV

SEQ ID NO: 9237 - protein, 212 aa, Inquilinus sp.
  misc_feature (1)..(212): tr|A0A554SF46|A0A554SF46_9PROT GTP cyclohydrolase 1 OS= Inquilinus sp. KBS0705 OX=2578108 GN=folE PE=3 SV=1
MNKDNNIPDRDSGINGYQKIDRYNPELIKNLSGLYHEVLKDIGENPERDGLLKTPERMAKAMLYLTHGYDLSAKDILNSAMFKEEYSQMVIVKDIEVYSMCEHHMLPFFGKAHVAYIPNGYVVGLSKIPRVVDVFSRRLQVQERLTNEIRDCIQETLNPIGVGVVIECRHLCMSMRGVQKQNSVTTTSAFTGEFLKEKTRTEFLNLISSKLS

SEQ ID NO: 9238 - protein, 226 aa, Inquilinus sp.
  misc_feature (1)..(226): tr|A0A554SAG6|A0A554SAG6_9PROT GTP cyclohydrolase 1 OS= Inquilinus sp. KBS0705 OX=2578108 GN=folE PE=3 SV=1
MTNNTIVDQQDEQDLLHFDHDHHSSTLNTPLREDAFVLDDDTKVDLIAKHFAGIMQVLGMDLEDDSLKDTPKRVAKMYVKEIFSGLNPANKPKPTLFKNPFRYKQMLVEKNISVFSNCEHHFVPIVGKAHVAYISNGQVIGLSKLNRIVQYCSQRPQVQERLTIQIANLMKEALGTEDVAVIVDAHHHCVSSRGIRDAGSTTITAEYSGRFLEADTRNEFLKHIAS

SEQ ID NO: 9239 - protein, 203 aa, Insolitispirillum peregrinum
  misc_feature (1)..(203): tr|A0A1N7JDT8|A0A1N7JDT8_9PROT GTP cyclohydrolase 1 OS= Insolitispirillum peregrinum OX=80876 GN=folE PE=3 SV=1
MTVSSPSPRPTDTLAPTREDAETAVRTLLRWAGDDPTREGLVDTPARVARAFEEWFAGYGSDPAEVLRRTFEEVEGYDEMVVLKDIPFESHCEHHLAPIIGYAHVAYIPRRRVVGISKLARVVEIYAKRLQIQEKMTAQVANTIQEVLDPLGVAVVISGQHQCMTTRGVHKHGVSMVTSRMLGAFRDDPSTRREFLAMIGNPK

SEQ ID NO: 9240 - protein, 192 aa, Insolitispirillum peregrinum
  misc_feature (1)..(192): tr|A0A1N7NB61|A0A1N7NB61_9PROT GTP cyclohydrolase 1 OS= Insolitispirillum peregrinum OX=80876 GN=folE PE=3 SV=1
MNAEDSMSIRSRAMAALIRATGDDPARLGLTGTPERAARAHAELFDGYDINPQALLAKAMEPADGYAGLVLVRGIRLYSHCEHHMLPMEGLVHVGYLPDSHLLGLSKVARAIEVLTRQLQGQERLTREIADIIEKVAHPKGVAVAVVARHHCITERGVRQTDSDTVTVVTRGTLDSNPGLRRDFLGLCGLAG

SEQ ID NO: 9241 - protein, 188 aa, Intestinibacter bartlettii; identical to SEQ ID NO: 6805
  misc_feature (1)..(188): tr|B0AC37|B0AC37_9FIRM GTP cyclohydrolase 1 OS=Intestin ibacter bartlettii DSM 16795 OX=445973 GN=folE PE=3 SV= 1

SEQ ID NO: 9242 - protein, 188 aa, Intestinibacter bartlettii; identical to SEQ ID NO: 6805
  misc_feature (1)..(188): tr|W1UR51|W1UR51_9FIRM GTP cyclohydrolase 1 OS=Intestin ibacter bartlettii DORA_8_9 OX=1403940 GN=folE PE=3 SV= 1

SEQ ID NO: 9243 - protein, 190 aa, Intrasporangium calvum
  misc_feature (1)..(190): tr|E6S9V6|E6S9V6_INTC7 GTP cyclohydrolase 1 OS=Intraspo rangium calvum (strain ATCC 23552 / DSM 43043 / JCM 309 7 / NBRC 12989 / 7 KIP) OX=710696 GN=folE PE=3 SV=1
MAIDVARAEAAVRELLIAIGEDPERDGLVDTPARVARSYAEIFAGLDMEAGDVLDKTFEIEHDELIILRDIELYSTCEHHLVPFHGVAHVGYIPGRDGRVTGLSKLARLVEVYARRPQVQERLTSQIADALVEHLGVQGVIVVIQAEHLCMSMRGIRKPGASTITSAVRGQLRDPATRAEAMALMLEGNK

SEQ ID NO: 9244 - protein, 190 aa, Intrasporangium chromatireducens
  misc_feature (1)..(190): tr|W9GRC2|W9GRC2_9MICO GTP cyclohydrolase 1 OS=Intraspo rangium chromatireducens Q5-1 OX=584657 GN=folE PE=3 SV =1
MAVDQARAAKAVRELLIAVGEDPDREGLRDTPERVARAYAEVFAGLDMEAADVLDKTFNMDHEELVIVRDIELYSTCEHHLVPFHGVAHVGYIPDKHGRVTGLSKLARLVEVYARRPQVQERLTSQIADALVEHLGVQGVIVVIQAEHLCMSMRGIRKPGASTITSAVRGQLRDPATRAEAMALMLEGNK

SEQ ID NO: 9245 - protein, 205 aa, Intrasporangium chromatireducens
  misc_feature (1)..(205): tr|W9GGD2|W9GGD2_9MICO GTP cyclohydrolase 1 OS=Intraspo rangium chromatireducens Q5-1 OX=584657 GN=folE PE=3 SV =1
MSEQTVPEAARERPLHSIRTAQPEPQLEVAARAARQFLEALGVDCDTPSTERSPMRMARAYAEMLSARPFELTTFPNDEGYDEMVVVRGIPVASLCEHHLLPFTGVAHIAYLPGDRILGLSKFARVVEMFARRPQVQERLTKQVADWLDEHLAPRGVGVVVEAEHSCLSLRGARVGGAVTRTSALAGLFRENDATRAEFLDALRA

SEQ ID NO: 9246 - protein, 190 aa, Intrasporangium oryzae
  misc_feature (1)..(190): tr|W9GI82|W9GI82_9MICO GTP cyclohydrolase 1 OS=Intraspo rangium oryzae NRRL B-24470 OX=1386089 GN=folE PE=3 SV= 1
MPIDHDRAAAAVRELLLAVGEDPEREGLQDTPQRVARAYAEIFAGLDMSAADVLGTTFEIDHQELVIVRDIELYSTCEHHLVPFHGVAHVGYIPGKDGRVTGLSKLARLVEVFARRPQVQERLTTQIADALVEHLMVQGVIVVVQAEHLCMSMRGIRKPGASTITSAVRGQLRDPATRAEAMALMLEGNK

SEQ ID NO: 9247 - protein, 263 aa, Iodobacter fluviatilis
  misc_feature (1)..(263): tr|A0A377SW73|A0A377SW73_9NEIS GTP cyclohydrolase FolE2 OS=Iodobacter fluviatilis OX=537 GN=folE2 PE=3 SV=1
MTMAIADVQNTVDTRNIAINKVGIKSIRHPVKVADRTDGVQHTIAMFDMYVFLPKQFKGTHMSRFVEILNSHEKEISVDSFETILREMCDRLEAESGYLEMRFPYFINKTAPVSGVQSLMDYDITLVGELKNGVFEQKLKVLAPVTSLCPCSKKISAYGAHNQRSHVTVTATLAQSIWIEEIVTLIEQEASSELWGLLKRPDEKFVTERAYDNPKFVEDMVRDVAARVHADPRVSAYVVESENFESIHNHSAYALIEHDKREA

SEQ ID NO: 9248 - protein, 263 aa, Iodobacter sp.
  misc_feature (1)..(263): tr|A0A3S8ZWU8|A0A3S8ZWU8_9NEIS GTP cyclohydrolase FolE2 OS=Iodobacter sp. H11R3 OX=2496266 GN=folE2 PE=3 SV=1
MTMAIADVQNTVDTRNIAINKVGIKSIRHPVKVADRTDGVQHTIAMFDMYVFLPKQFKGTHMSRFVEILNSHEKEISVDSFETILREMCDRLEAESGYLEMRFPYFINKTAPVSGVQSLMDYDITLLGELKNGVFEQKLKVLVPVTSLCPCSKKISAYGAHNQRSHVTVTATLAQNVWIEEIVTLIEQEASSELWGLLKRPDEKYVTERAYDNPKFVEDMVRDVAARVHADPRITAYVVESENFESIHNHSAYALIEHDKREA

SEQ ID NO: 9249 - protein, 263 aa, Iodobacter sp.
  misc_feature (1)..(263): tr|A0A2G3J8V3|A0A2G3J8V3_9NEIS GTP cyclohydrolase FolE2 OS=Iodobacter sp. BJB302 OX=1506510 GN=folE2 PE=3 SV=1
MTMAIADVQNTVDTRNIAINKVGIKSIRHPVKVADRTDGVQHTIAMFDMYVFLPKQFKGTHMSRFVEILNSHEKEISVDSFETILREMCDRLEAESGYLEMRFPYFINKTAPVSGVQSLMDYDITLVGELKNGVFEQKLKVLAPVTSLCPCSKKISAYGAHNQRSHVTVTATLAQSIWIEEIVTLIEQEASSELWGLLKRPDEKFVTERAYDNPKFVEDMVRDVAACVHADPRVSAYVVESENFESIHNHSAYALIEHDKREA

SEQ ID NO: 9250 - protein, 188 aa, Isobaculum melis
  misc_feature (1)..(188): tr|A0A1H9QXN2|A0A1H9QXN2_9LACT GTP cyclohydrolase 1 OS= Isobaculum melis OX=142588 GN=folE PE=3 SV=1
MDKKQQAIIEAAVTQILTAIGEDPKRSGLKDTPKRVARMYGEVFSSLTEPVFDDYALFDSRNEEDMVLVKDIQFYSMCEHHLLPFFGKAHIAYIPDGNQVLGLSKLPRLVEYCAKRPSVQEDLTMMIAEELSKNVPVKGIAVSIEAAHMCMTMRGVKTPDSLTKTFHYRGLFKENSEWKNDFLQAIRN

SEQ ID NO: 9251 - protein, 209 aa, Isoptericola dokdonensis
  misc_feature (1)..(209): tr|A0A168FUE5|A0A168FUE5_9MICO GTP cyclohydrolase 1 OS= Isoptericola dokdonensis DS-3 OX=1300344 GN=folE PE=3 S V=1
MSGSDLPLSPVSLGVRAAADVPAYDEPRAEAAVRELLLAVGEDPEREGLKDTPARVARAYREIFAGLRQEPEEVLTTTFDLGHEEMVLVKDIEVYSTCEHHLVPFHGVAHIGYIPNTDGRITGLSKLARLVEVFARRPQVQERLTTQIADSLVRILDPRGVIVVVECEHLCMSMRGVRKPGARTVTSAVRGGMQNAATRAEAMSLILGR

SEQ ID NO: 9252 - protein, 288 aa, Isoptericola dokdonensis
  misc_feature (1)..(288): tr|A0A168EDE9|A0A168EDE9_9MICO Putative GTP cyclohydrol ase 1 type 2 OS=Isoptericola dokdonensis DS-3 OX=130034 4 GN=I598_0323 PE=4 SV=1
MSTPTLADVVAVLEDLYPPSTAEGWDAVGLVAGDPRREVRKVLLAVDPVAAVVDEALDWGADLVVTHHPLFLKGVHSVAATTFKGSVVHRLLTAGCGLYVAHTNADSAPRGVADALADLVGLVDRAPLVARADDVERGIGRVGRLEAPTTLGAFARHVAGVLPATAQGVRVAGDLDAPVATAAVVGGSGDSLFDAVRAAEVDVYVTADLRHHPASELRERAGFEAGDPEEATAATPFLVDVAHFASEWPWLAYAAADLTSRLPGGTVTTRVSTLVTDPWTARIGAGDR

SEQ ID NO: 9253 - protein, 209 aa, Isoptericola jiangsuensis
  misc_feature (1)..(209): tr|A0A2A9EZD5|A0A2A9EZD5_9MICO GTP cyclohydrolase 1 OS= Isoptericola jiangsuensis OX=548579 GN=folE PE=3 SV=1
MTGTDLPLSPVSLGMRAAADVPPYDEARAEAAVRELLLAVGEDPDREGLKDTPARVARAYREIFAGLRQEPEEVLTTTFDIGHEEMVLVKDIEVYSTCEHHLVPFHGVAHIGYIPSTDGRITGLSKLARLVEVFARRPQVQERLTTQIADSLVRILDPRGVIVVVECEHLCMSMRGVRKPGARTVTSAVRGGMQNAATRAEAMSLILGR

SEQ ID NO: 9254 - protein, 209 aa, Isoptericola sp.
  misc_feature (1)..(209): tr|A0A2T0Y4L9|A0A2T0Y4L9_9MICO GTP cyclohydrolase 1 OS= Isoptericola sp. CG 20/1183 OX=1881052 GN=folE PE=3 SV= 1
MSDEDLPLTAVSIGVRPAADVPAYDAERAEAAVRELLVAVGEDPDREGLVDTPARVARAYREIFAGLRQDPEDVLTTTFDLGHEEMVLVKDIEVYSTCEHHLVPFHGVAHVGYIPSADGRITGLSKLARLVEVYARRPQVQERLTTQVADALVRILEPRGVIVVVECEHLCMSMRGVRKPGSRTVTSAVRGAMQNAATRAEAMSLILGR

SEQ ID NO: 9255 - protein, 197 aa, Isoptericola sp.
  misc_feature (1)..(197): tr|A0A2W5WTQ9|A0A2W5WTQ9_9MICO GTP cyclohydrolase 1 OS= Isoptericola sp. PW21 OX=2607479 GN=folE PE=3 SV=1
MGARPAAEVPPYDAARAEAAVRELLLAVGEDPEREGLRDTPARVARAYQEIFAGLRQEPEDVLTTTFDLGHEEMVLVKDIEVYSTCEHHLVPFHGVAHVGYIPNVDGRITGLSKLARLVEVYARRPQVQERLTSQVADALVRILEPRGVLVVVECEHLCMSMRGVRKPGSRTVTSAVRGQMRDPATRAEAMSLVLGK

SEQ ID NO: 9256 - protein, 218 aa, Isoptericola variabilis
  misc_feature (1)..(218): tr|F6FTY7|F6FTY7_ISOV2 GTP cyclohydrolase 1 OS=Isopteri cola variabilis (strain 225) OX=743718 GN=folE PE=3 SV= 1
MTRHAAEVDDERDLPLTAVSVGVRPASEVPPYDAARAEAAVRELLLAIGEDPDREGLRDTPARVARAYREIFAGLRQEPEDVLTTTFDIGHEEMVLVKDIEVYSTCEHHLVPFHGVAHVGYIPNTDGRITGLSKLARLVEVYARRPQVQERLTTQVADALVRILEPRGVIVVVECEHLCMSMRGVRKPGSRTVTSAVRGIMQDAPATRSEAMSLILGK

SEQ ID NO: 9257 - protein, 200 aa, Isosphaera pallida
  misc_feature (1)..(200): tr|E8R3F8|E8R3F8_ISOPI GTP cyclohydrolase 1 OS=Isosphae ra pallida (strain ATCC 43644 / DSM 9630 / IS1B) OX=575 540 GN=folE PE=3 SV=1
MEEDGPPTAASTPSPVDLERIARAVREILIAVGENPDREGIRDTPQRVARMYAEVFQGLHQNPRDHLKTAFTETYEDTILIRDIAFISFCEHHLLPFVGKTHVAYRPRGRVVGLSKVPRVVDVLSRRPQLQERLTTDLADLLHCELDAQGVAVMVEATHSCMTIRGVSKPGSSCWTFAMRGVYETDPALRAEVLAMVRGG

SEQ ID NO: 9258 - protein, 219 aa, Isosphaeraceae bacterium
  misc_feature (1)..(219): tr|A0A432MFE7|A0A432MFE7_9BACT GTP cyclohydrolase 1 OS= Isosphaeraceae bacterium GM2012 OX=2080755 GN=folE PE=3 SV=1
MSESLSCHPHTLGEPADDRAGPGATDGSHPVDLDRIRRAVREILLAVGEDPDREGLLETPDRVARMYAEVFRGLHQDPSTHLAKRFTQKYDEMVTIRDITFSSFCEHHLLPFSGKAHVAYLPSGKVVGLSKIPRVIDVLSRRPQVQERLTEQIADLLMEQLDALGVAVVMEGVHSCMTVRGVQKPGSTYITSAMRGSFRENVATRMEVLSLIHGASRSV

SEQ ID NO: 9259 - protein, 221 aa, Izhakiella australiensis
  misc_feature (1)..(221): tr|A0A1S8YE61|A0A1S8YE61_9ENTR GTP cyclohydrolase 1 OS= Izhakiella australiensis OX=1926881 GN=folE PE=3 SV=1
MTTLSQEARLVHDALVTRGLETPLRTPVRQLDDDTRKALIAGHMTEIMQLLNLDLEDDSLAETPHRIAKMYVNEVFSGLDYANFPKITLIENKMKVDEMVTVRDITLTSTCEHHFVIIDGKATVAYIPKDKVIGLSKINRIVQFFAQRPQVQERLTQQILVALQTLLGTNNVAVSIDAVHYCVKARGIRDATSATTTTSLGGLFKSSQNTRQEFLRAVRHS

SEQ ID NO: 9260 - protein, 221 aa, Izhakiella capsodis
  misc_feature (1)..(221): tr|A0A1I4Y301|A0A1I4Y301_9ENTR GTP cyclohydrolase 1 OS= Izhakiella capsodis OX=1367852 GN=folE PE=3 SV=1
MPTLSQEARLVHDALVTRGLETPLRKPVHQLDDNKRKALIAGHMTEIMQLLNLDLDDDSLAETPHRIAKMYVNEVFSGLDYANFPKITLIENKMNVDEMVTVRDITLTSTCEHHFVIIDGKATVAYIPKDKVIGLSKINRIVQFFAQRPQVQERLTQQILVAMQTLLGTNNVAVLIDAVHYCVKARGIRDANSATTTTSLGGLFKSSQNTRQEFLRAVRHR

SEQ ID NO: 9261 - protein, 222 aa, Izhakiella sp.
  misc_feature (1)..(222): tr|A0A4P8YMP6|A0A4P8YMP6_9ENTR GTP cyclohydrolase 1 OS= Izhakiella sp. KSNA2 OX=2579935 GN=folE PE=3 SV=1
MPSLSKEAALVHEALVARGLETPLRPPVHELDNETRKSRIAGHMTEIMQLLNLDLSDDSLMETPHRIAKMYVDEIFSGLDYANFPKITLIENKMKVDEMVTVRDITLTSTCEHHFVTIDGKATVAYIPKDTVIGLSKINRIVQFFSSRPQVQERLTQQILVALQTLLGTNNVAVSIDAVHYCVKARGIRDVTSATTTTSLGGLFKSSQNTRQEFLRAVRHHG

SEQ ID NO: 9262 - protein, 191 aa, Janibacter hoylei
  misc_feature (1)..(191): tr|K1E474|K1E474_9MICO GTP cyclohydrolase 1 OS=Janibact er hoylei PVAS-1 OX=1210046 GN=folE PE=3 SV=1
MADVDLGRIEAAVREILLAVGEDPGRDGLLETPARVARSYAEVFAGLRADPAELLATTFDIDHDELVIVRDIALYSTCEHHLVPFHGVAHVGYTPGKSGKVTGLSKIARLVDIFAKRPQVQERLTSQIADALVEHLDVAGVIVVVEAEHLCMSMRGVRKPGATTITSAVRGQLRDSTTRAEAMALLTGAAR

SEQ ID NO: 9263 - protein, 191 aa, Janibacter indicus
  misc_feature (1)..(191): tr|A0A1W2CTH1|A0A1W2CTH1_9MICO GTP cyclohydrolase 1 OS= Janibacter indicus OX=857417 GN=folE PE=3 SV=1
MTDVDLPRIEAAVREILLAVGEDPDRDGLVDTPGRVARAYAEVFSGLHVDPAELLATTFDIDHGELVIVRDIPLYSTCEHHLVPFHGVAHVGYLPGSSGKVTGLSKIARLVDLFAKRPQVQERLTTQVADALVEHLDVGGVIVVVEAEHLCMSMRGVRKPGATTITSAVRGQLRDATTRAEAMALLTGAAR

SEQ ID NO: 9264 - protein, 191 aa, Janibacter indicus
  misc_feature (1)..(191): tr|A0A1L3MIT0|A0A1L3MIT0_9MICO GTP cyclohydrolase 1 OS= Janibacter indicus OX=857417 GN=folE PE=3 SV=1
MNDVDLPRIEAAVREILLAVGEDPDRDGLVDTPGRVARAYAEVFSGLHVDPAELLATTFDIDHGELVIVRDIPLYSTCEHHLVPFHGVAHVGYLPGSSGKVTGLSKIARLVDLFAKRPQVQERLTTQVADALVEHLDVGGVIVVVEAEHLCMSMRGVRKPGATTITSAVRGQLRDATTRAEAMALLTGAAR

SEQ ID NO: 9265 - protein, 212 aa, Janibacter limosus
  misc_feature (1)..(212): tr|A0A4P6N007|A0A4P6N007_9MICO GTP cyclohydrolase 1 OS= Janibacter limosus OX=53458 GN=folE PE=3 SV=1
MTPAPSPAAGHDAREASRPHLRVAGTHPAVDPAAAEAAAAALLAALGLDLTAEHLARTPHRMAQALIEMTSSEDFELTTFPNDEGYDELVLVRDIPVQSVCEHHILPFTGVAHVGYLPGERILGLSKFARMVEWHARRPQTQERLTHQIATHLDDALGPRGVGVVVQAEHTCMTLRGARVAGTATTTSALFGRLREDPRSRAEFLALTRSTP

SEQ ID NO: 9266 - protein, 191 aa, Janibacter limosus
  misc_feature (1)..(191): tr|A0A4V0ZAN0|A0A4V0ZAN0_9MICO GTP cyclohydrolase 1 OS= Janibacter limosus OX=53458 GN=folE PE=3 SV=1
MADVDLDRIEAAVREILIAVGEDPDRDGLVETPARVARSYAEVFAGLRSDPAQLLSTTFDIDHDELVIVRDIELYSTCEHHLVPFHGVAHVGYTPGPSGKVTGLSKLARLVDMFAKRPQVQERLTSQIADALVEHLDVAGVIVVVEAEHLCMSMRGVRKPGAKTITSAVRGQLRDSTTRAEAMALLAGAAR

SEQ ID NO: 9267 - protein, 208 aa, Janibacter melonis
  misc_feature (1)..(208): tr|A0A176QEE6|A0A176QEE6_9MICO GTP cyclohydrolase 1 OS= Janibacter melonis OX=262209 GN=folE PE=3 SV=1
MSQHEAEALEAGAGTGPVAAAMDLPRIEAAVREILIAVGEDPDREGLLETPARVARAYAETFAGLHQDPAEILATTFDIDHDELVMVRDIPLYSTCEHHLVPFHGVAHVGYVPGRSGQVTGLSKLARLVDVYARRPQVQERLTSQVADALVECLDVTGVIVVVEAEHLCMSMRGVRKPGARTLTSAVRGQLRDPATRAEAMSLLMGAR

SEQ ID NO: 9268 - protein, 191 aa, Janibacter sp.
  misc_feature (1)..(191): tr|A0A0Q9K853|A0A0Q9K853_9MICO GTP cyclohydrolase 1 OS= Janibacter sp. Soil728 OX=1736393 GN=folE PE=3 SV=1
MADVDLDRIEAAVREILIAVGEDPDRDGLVETPARVARSYAEVFAGLRAEPAELLSTTFDIDHDELVIVRDIELYSTCEHHLVPFHGVAHVGYTPGPSGKVTGLSKLARLVDMFAKRPQVQERLTSQIADALVEHLDVAGVIVVVEAEHLCMSMRGVRKPGAKTITSAVRGQLRDSTTRAEAMALLAGAAR

SEQ ID NO: 9269 - protein, 221 aa, Janibacter sp.
  misc_feature (1)..(221): tr|A3THT0|A3THT0_9MICO GTP cyclohydrolase 1 OS=Janibact er sp. HTCC2649 OX=313589 GN=folE PE=3 SV=1
MSTPKGTEPGSAPVDAPETPDTRDEVDSVPARQVDHERARAAVRELLFAIGEDPDREGLRDTPDRVARAATQLYAGLSQDPSDVLSARFSIDHEELIIVRDIEIFSTCEHHLLPFHGVAHVGYIPAPDGTVTGLSKLARLVDVFARRPQVQERITTQVADALVEHLGVQGVIVVIEAEHLCMSMRGVHKPGSRTITSAVRGQLRDPATRAEAMSLLLGGKR

SEQ ID NO: 9270 - protein, 191 aa, Janibacter terrae
  misc_feature (1)..(191): tr|A0A3D1L7Z6|A0A3D1L7Z6_9MICO GTP cyclohydrolase 1 OS= Janibacter terrae OX=103817 GN=folE PE=3 SV=1
MGDVDLARIEAAVREILLAVGEDPDRDGLVDTPARVARSYAEVFAGLRQSPEELLATTFDIDHDELVIVRDIELYSTCEHHLVPFHGLAHVGYVPGHGGQVTGLSKLARLVDIFAKRPQVQERLTSQVADALVTHLDVAGVIVVIEAEHLCMSMRGVRKPGAKTITSAVRGQLRDPTTRAEAMALLTGAAR

SEQ ID NO: 9271 - protein, 346 aa, Jannaschia aquimarina
  misc_feature (1)..(346): tr|A0A0D1EJ77|A0A0D1EJ77_9RHOB FolE2 protein OS=Jannasc hia aquimarina OX=935700 GN=folE2 PE=4 SV=1
MNVHAPDIDRPVTEDEAQAALALLNRYAGQSGAAPMPYPVLAALYDDAHVADEGYRTTLPDLQNGPASLIRGADRRIQHVGISNFRLPLSVPTREGPHRVDASVTGTVSLEAGSKGINMSRIMRSFYRHSGDTMGFDTVEAALDDYLVDLGAFDARLLLRFQLPLEVTALRSGLKGWQYYDCAIEMIQKDGVRTRILHLDYVYSSTCPCSLELSEHARRERGRLATPHSQRSVARLSVEVTGALTHEDIVDACRRVVPTETQVMVKREDEQAFAELNAANPIFVEDAARLFAEALEAEAGAGAFRVVCSHQESLHSHDAVSVLTAGDLFDVETLEPRLFGTLVHPG

SEQ ID NO: 9272 - protein, 346 aa, Jannaschia donghaensis
  misc_feature (1)..(346): tr|A0A0M6YK28|A0A0M6YK28_9RHOB GTP cyclohydrolase folE2 OS=Jannaschia donghaensis OX=420998 GN=folE2 PE=4 SV=1
MTVHQPDIERHPTEAEAKEALALLQRYAKTDPSAAVALYPEMSNVYPVHVSDEAYRATLPDLQNGPASLIRGADRRIEHVGISNFRLPMQIATRSGVQAVQVSVTGTVSLEAGKKGINMSRIMRSFYAHADAHMGFDVAEAALDDYLTDLAAFDARLLLSFSLPLRVESLRSGLTGWQYYDISMEVVQSCGVRRRVLHLDYVYSSTCPCSLELSEHARRTRGQLATPHSQRSVARLSAEVTGAVAFEDLIDMCRLAVPTETQVMVKREDEQAFAELNAANPIFVEDAARLFAQGLEAITGVGDFRVVASHQESLHSHDAVSVLTQGDLFATETLEPRLFGTLVHAG

SEQ ID NO: 9273 - protein, 346 aa, Jannaschia rubra
  misc_feature (1)..(346): tr|A0A0M6XMN5|A0A0M6XMN5_9RHOB GTP cyclohydrolase folE2 OS=Jannaschia rubra OX=282197 GN=folE2 PE=4 SV=1
MTIHAPDIDRDPTEAEAQAALNLLRRYAETGQDARAGLYPALSASFPDHVVDDAYRATLPDLQNGPASLIRGADRRIQHVGISNFRLPLQVATRDGARSVDASVTGTVSLEAGRKGINMSRIMRSFYAHAARSVGFDVVEAALDDYLADLGSFDARLLLRYSLPLQVNSLRSGLIGWQYYDVAMEVTQTGQTRRRILHVDYVYSSTCPCSLELSEHARRTRGQLATPHSQRSVARLSVEVTSDVTVEDVIDMCRAQVPTETQVMVKREDEQAFAELNAANPIFVEDAARLFAEGLERLDGVADFRIVASHQESLHSHDAVSVLTHGDLFAADTLEPRLFGTLIHGG

SEQ ID NO: 9274 - protein, 376 aa, Jannaschia seosinensis
  misc_feature (1)..(376): tr|A0A0M7BFB5|A0A0M7BFB5_9RHOB GTP cyclohydrolase folE2 OS=Jannaschia seosinensis OX=313367 GN=folE2 PE=4 SV=1
MSQVFHGNELAFRSGSPKSRNVSANRGEHDMNVYAPDIDRIPTEEEAQAALDLLKRYAATGQGAAVPLYPDLANIYPSHAADAAYRATLPDLQNGPAALIRGADRRIQHVGISNFRLPMRIATRTGDHLAQVSVTGTVSLEAGLKGINMSRIMRSFYRHAEETSDFNVVDRILDDYVTDLDAFDARLLLRFQLPLQVESLRSGLKGWQYYDIAMEVVQMAGTRRHILHLDYVYSSTCPCSLELSEHARRTRGQLATPHSQRSVARLSAQVESGTTVEDMIDMCRAQVPTETQVMVKREDEQAFAELNAANPIFVEDAARLFAEGLEALPGVGDFRVVASHQESLHSHDAVSVLTHGDLFAADTLEPRLFGTMVHPG

SEQ ID NO: 9275 - protein, 362 aa, Jannaschia sp.
  misc_feature (1)..(362): sp|Q28R88|GCH4_JANSC GTP cyclohydrolase FolE2 OS=Jannas chia sp. (strain CCS1) OX=290400 GN=folE2 PE=3 SV=1
MNVHVKTADQTPSTVQAQDALAILSAWASEASADQIDALDPGIARLVRVQAYPDLRAEYPGDFTVDEAYRATLPDLQNGPASLIKGANRRIQHVGISNFRLPIRYAVQDGSEVMLETSVTGTVSLEADQKGINMSRIMRSFYKHADASFGFDVIEAALDDYKADLGSFDARIQMRLSYPMKVDSLRSGLSGWQYYDIALELVERGGVRQRIVHLDYVYSSTCPCSLELSEHARATRGQLATPHSQRSVARISVELQGQGVWFEDLIEMARSGVPTETQVMVKREDEQAFAELNAANPIFVEDAARLFAEQLQAHSGVGDFRVMASHQESLHSHDAVSLLTEGDTFAEVSLDPKLFPSLIHVG

SEQ ID NO: 9276 - protein, 362 aa, Jannaschia sp.
  misc_feature (1)..(362): tr|A0A1B6YYD5|A0A1B6YYD5_9RHOB GTP cyclohydrolase FolE2 OS=Jannaschia sp. EhC01 OX=1849359 GN=folE2 PE=3 SV=1
MNVHVKTADQRPSTLQIQNALELLSAWAEDASADQINALDPKLARLVRAQSYPEFSRSYPDDFAVDAAYRATLPDLQNGPASLIKGANRRIQHVGISNFRLPIRYDVRDGTQVMLETSVTGTVSLEADQKGINMSRIMRSFYKHAEAAFGFDVIEAALDDYKADLGSFDARIQMRLSYPMQVESLRSGLSGWQYYDIALELVERDGVRQRIVHLDYVYSSTCPCSLELSEHARATRGQLATPHSQRSVARLSVELKGEGVWFEELIEMARKGVPTETQVMVKREDEQAFAELNAANPIFVEDAARLFAEQLQSHEGVGDFRVMASHQESLHSHDAVSLLTEGDTFAEVSLDPKLFPSLIHVG

SEQ ID NO: 9277 - protein, 303 aa, Janthinobacterium agaricidamnosum
  misc_feature (1)..(303): tr|A0A3G2EBP5|A0A3G2EBP5_9BURK GTP cyclohydrolase FolE2 OS=Janthinobacterium agaricidamnosum OX=55508 GN=folE2 PE=3 SV=1
MKRDSLSSPLPDVAAGPHLGHPLPLEWVGMQGIALPLWLEEGGQAQQVHAWADVHVDLPAPRVKGIHMSRLYLLLDAFAAAQPLDAGALAAVLRRMVDSHADCGSTQARIALAFPVLLRRPALLTAGLAGWKSYPVRLQASVSPQGFALSLTVEIGYSSTCPCSAALARQLLADAFAAQFGKGGIDGAAARDWLQEHASLATPHSQRSTATVTVPLTEQAELGLFPLIDRVEAALATPLQTAVKRADEQAFARLNGANLMYVEDAARRVQAALAPHYAQPRVTVRHMESLHPHDAVAQAGQLA

SEQ ID NO: 9278 - protein, 187 aa, Janthinobacterium agaricidamnosum
  misc_feature (1)..(187): tr|W0UZP9|W0UZP9_9BURK GTP cyclohydrolase 1 OS=Janthino bacterium agaricidamnosum NBRC 102515 = DSM 9628 OX=134 9767 GN=folE PE=3 SV=1
MSKEEFTENDWRRLLVSLGEDPQRTGLLETPARVAKAWKHWTSGYGQDPVELLKAFEDGAEQYNELIVVRGIPVYSHCEHHLAPFFGRATIGYVPNGKIVGLSKLTRLVDCYAKRLQVQERMTIQIANSLMEVLEPKAVGVVVRCRHMCMESRGIRTQGEETVTSAMLGELQPNLALRTEFLALARE

SEQ ID NO: 9279 - protein, 188 aa, Janthinobacterium lividum
  misc_feature (1)..(188): tr|A0A1S1UFF5|A0A1S1UFF5_9BURK GTP cyclohydrolase 1 OS= Janthinobacterium lividum OX=29581 GN=folE PE=3 SV=1
MSQEEFSENDWRRLISSFGEDPQRPGLLETPARVAKAWKHWTSGYGQDPVDLLKAFEDGAEQYNELIVVRGIPVYSHCEHHLAPFFGKATIGYVPNGKIVGLSKLTRLVDCFSKRLQVQERMTMQIANALMEVLEPKSVGVVVRCRHLCMESRGIRTPGEETITSAMLGEMQPNLALRTEFLALAREV

SEQ ID NO: 9280 - protein, 188 aa, Janthinobacterium lividum
  misc_feature (1)..(188): tr|A0A031GMF2|A0A031GMF2_9BURK GTP cyclohydrolase 1 OS= Janthinobacterium lividum OX=29581 GN=folE PE=3 SV=1
MSQEEFSENDWRRLISSFGEDPQRPGLLETPARVAKAWKHWTSGYGQDPVDLLKAFEDGAEQYNELIVVRGIPVYSHCEHHLAPFFGKATIGYVPNGKIVGLSKLTRLVDCFSKRLQVQERMTMQIANALMEVLEPKSVGVVVRCRHLCMESRGIRTPGEETITSAMLGEMQPNLALRTEFLALARES

SEQ ID NO: 9281 - protein, 268 aa, Janthinobacterium sp.
  misc_feature (1)..(268): sp|A6SUS5|GCH4_JANMA GTP cyclohydrolase FolE2 OS=Janthi nobacterium sp. (strain Marseille) OX=375286 GN=folE2 P E=3 SV=1
MNTRDPGLAAIPDVQATPDTRRIAIQRVGVKGVRYPLTVKTLSGVQPSVGTWNMYVHLAEEQKGTHMSRFIALLEENTQALDVNVFGGMIRKMLALLEADAGRIEVSFPYFINKTAPVSGVQSLMDYEVGFNGEIKNGKLEITLKVLVPVTSLCPCSKKISAYGAHNQRSHITVQALLADDLVVEELIAQIEAQASCELFGLLKRPDEKYVTERAYDNPKFVEDLVRDVAVMLNNEARVLAYTLEAENFESIHNHSAYALIELDKRLA

SEQ ID NO: 9282 - protein, 188 aa, Janthinobacterium sp.
  misc_feature (1)..(188): tr|A0A349L3G1|A0A349L3G1_9BURK GTP cyclohydrolase 1 OS= Janthinobacterium sp. OX=1871054 GN=folE PE=3 SV=1
MSKEEFSEHDWRRLLASFGEDPKRPGLIETPARVSKAWKHWTSGYGQDPVELLKAFEDGAEQYNELIVVRGIPVYSHCEHHLAPFFGKATIGYVPNGKIVGLSKLTRLVDCFSKRLQVQERMTIQIANALMEVLEPKAVGVVVRCRHLCMESRGIRTPGEETITSAMLGELQPNLALRTEFLALARES

SEQ ID NO: 9283 - protein, 309 aa, Janthinobacterium svalbardensis
  misc_feature (1)..(309): tr|A0A290WXW1|A0A290WXW1_9BURK GTP cyclohydrolase FolE2 OS=Janthinobacterium svalbardensis OX=368607 GN=folE2 PE=3 SV=1
MTMKRDSVSTPLPDVAAGPHLGHPLPLEWVGMQGIALPVWLEEGGQAQQVHAWADVQVDLPDPHVKGIHMSRLYRLLDAFAAAQPLDAGALAAVLRRMVDSHADCGSTQARLALAFPVLRRQAALLTAGLAGWKSYPVRLQASVSAQCFALTLTVEIGYSSTCPCSAALARQLLADAFAARFGEGGIDGIAARDWLREHASLATPHSQRSTATVSVALTEQAELDLFPLIDLVEAALATPLQTAVKRADEQAFARLNGANLMYVEDAARRVQAALAQHYAQARVTVRHMESLHPHDAVAQAGQLARVFQ

SEQ ID NO: 9284 - protein, 188 aa, Janthinobacterium svalbardensis; identical to SEQ ID NO: 9279
  misc_feature (1)..(188): tr|A0A290WQ88|A0A290WQ88_9BURK GTP cyclohydrolase 1 OS= Janthinobacterium svalbardensis OX=368607 GN=folE PE=3 SV=1

SEQ ID NO: 9285 - protein, 195 aa, Jatrophihabitans endophyticus
  misc_feature (1)..(195): tr|A0A1M5R5G4|A0A1M5R5G4_9ACTN GTP cyclohydrolase 1 OS= Jatrophihabitans endophyticus OX=1206085 GN=folE PE=3 S V=1
MSDSELLGIDVERAEAAVRELLIAIGEDPDREGLRKTPARVARACAEVFGGLNAEPSDVLETTFDEDHDELVLVKDIPIFSTCEHHLLPWHGTAAIGYIPGADGRITGLSKLARLVDLYARRPQVQERLTSQVADALASRLQPQGVIVVIQAEHLCMSMRGIRKPGSQTMTSAVRGIFKGDPRTRSEALSLILGH

SEQ ID NO: 9286 - protein, 197 aa, Jatrophihabitans sp.
  misc_feature (1)..(197): tr|A0A522QTY8|A0A522QTY8_9ACTN GTP cyclohydrolase 1 OS= Jatrophihabitans sp. OX=1932789 GN=folE PE=3 SV=1
MPAGQLRVSVDLARAQAAVRELLLAIGENPDRDGLRDTPARVARAYAEVFAGLFVEPDEVLETTFDEDHDELVLVKDIPLYSMCEHHLVPWHGTAAVGYIPGEDGRITGLSKLARVVDLFARRPQVQERLTSQVADAVVRRLDPRGVIVVIEAEHLCMAMRGVRKPGAMTITSAVRGIFADDARTRAEALSLIRGRS

SEQ ID NO: 9287 - protein, 197 aa, Jatrophihabitans sp.
  misc_feature (1)..(197): tr|A0A286EI42|A0A286EI42_9ACTN GTP cyclohydrolase 1 OS= Jatrophihabitans sp. GAS493 OX=1907575 GN=folE PE=3 SV= 1
MTEPDGEPGGIDLARAEAAVRELLLAIGENPDRPGLERTPERVARSFTEIYGGLHLNPDDVLETQFDEHHDELVLVKDIPLYSTCEHHLVPWHGTAAVGYIPGASGRITGLSKLARVVDLYAKRPQVQERLTSQVADAVMSRLQPRGVIVVLEAEHLCMAMRGVRKPGARTLTSAVRGIFQSDSRTRAEAMSLILGR

SEQ ID NO: 9288 - protein, 195 aa, Jejuia pallidilutea
  misc_feature (1)..(195): tr|A0A098LSA2|A0A098LSA2_9FLAO GTP cyclohydrolase 1 OS= Jejuia pallidilutea OX=504487 GN=folE PE=3 SV=1
MPYKNIEDYSETVTQGVKDRYKEIIESLGEDTQREGLLKTPERAAKAMQFLTQGYEQDPVEILTSAMFKESYNEMVIVKDIELYSLCEHHILPFFGKVHIAYIPNGYIVGLSKLPRIVDVFARRLQVQERLTEQILDCINDTLKPQGVAVVIEASHMCMMMRGVQKQNSITTTSGFRGQFEKIETRNEFLKLIGK

SEQ ID NO: 9289 - protein, 224 aa, Jejuia pallidilutea
  misc_feature (1)..(224): tr|A0A090VTX8|A0A090VTX8_9FLAO GTP cyclohydrolase 1 OS= Jejuia pallidilutea OX=504487 GN=folE PE=3 SV=1
MKFDNLEDFDALGDEHIGSSENTPMRSDAFKLTNEEKIDIIKDDVRHIMETLGLDLTDDSLNGTPNRVAKMFVKEIFGGLDPKRKPSASTFENKYKYGEMLVEKNITVYSTCEHHLLPIVGRAHVAYISNGTVVGLSKMNRIVDYFAKRPQVQERLTIQIVKELQNVLNTKDVACVIDAKHLCVNSRGIRDIESSTVTSEFGGKFKDMATRREFLDYIQLDTQF

SEQ ID NO: 9290 - protein, 264 aa, Jeongeupia sp.
  misc_feature (1)..(264): tr|A0A1D9BHD0|A0A1D9BHD0_9NEIS GTP cyclohydrolase FolE2 OS=Jeongeupia sp. USM3 OX=1906741 GN=folE2 PE=3 SV=1
MNAPQSIPDVQSTPDLRNIAINKVGIKSIRHPVRVADRSEGVQHTVATFDMYVFLPQHFKGTHMSRFVEILNGHEREISVDSFETILRQMCERLEAEAGYLEMRFPYFINKTAPVSGVESLLDYDVALIGELKNGVFTQQLKVLVPVTSLCPCSKKISQYGAHNQRSHVTITATLGEHVWIEELVQIVEAEASCELYGLLKRPDEKFVTERAYENPKFVEDMVRDVAARLNADARVVAYTVESENFESIHNHSAYALIEHDKRG

SEQ ID NO: 9291 - protein, 204 aa, Jeotgalibacillus alimentarius
  misc_feature (1)..(204): tr|A0A0C2VYA3|A0A0C2VYA3_9BACL GTP cyclohydrolase 1 OS= Jeotgalibacillus alimentarius OX=135826 GN=folE PE=3 SV =1
MDHTTENITTLNSNDTNRVDREKIQRAITMLLEAVGEDPSREGLLDTPKRVAKMYEEMFSGLNSDPKEYFKTVFNEDHEELVFVKDIPFHSMCEHHLVPFYGKAHVAYLPKDGKVTGLSKLARAVETTARRPQLQERITSTVADAIMEMLAPHGAYVIVEAEHMCMTMRGVKKPGAKTVTTAARGVYEEDHVLRNEVMTLLKMD

SEQ ID NO: 9292 - protein, 205 aa, Jeotgalibacillus campisalis
  misc_feature (1)..(205): tr|A0A0C2VGS6|A0A0C2VGS6_9BACL GTP cyclohydrolase 1 OS= Jeotgalibacillus campisalis OX=220754 GN=folE PE=3 SV=1
MDQNSKDQSVMTVNEEKNKVNRPQIEAAIRMLLEAVGEDPNREGLLDTPKRVAKMYEELFEGLHKDPREYFKTVFNEDHEELVFVKDIPFYSMCEHHLIPFFGKAHVAYLPKEGRVTGLSKLARAVETTARKPQLQERITSTVADSIMEMLSPHGAMVIVEAEHMCMTMRGVKKPGAMTITTAARGVFENDAIRRNEVLALMKNI

SEQ ID NO: 9293 - protein, 202 aa, Jeotgalibacillus malaysiensis
  misc_feature (1)..(202): tr|A0A0B5ATI4|A0A0B5ATI4_9BACL GTP cyclohydrolase 1 OS= Jeotgalibacillus malaysiensis OX=1508404 GN=folE PE=3 S V=1
MDHTTEQLTTITDTGRVDREKIQKAITMLLEAVGEDPSREGLLDTPKRVAKMYEEMFSGLHSDPKEYFKTVFNEDHEELVFVKDIPFHSMCEHHLVPFYGKAHVAYLPKNGKVTGLSKLARAVETTARRPQLQERITSTVADAIMEMLAPHGAYVIVEAEHMCMTMRGVKKPGAKTVTTAARGVYEEDSVLRNEVMTLLKMD

SEQ ID NO: 9294 - protein, 190 aa, Jeotgalibacillus marinus; identical to SEQ ID NO: 5047
  misc_feature (1)..(190): tr|A0A0M0L385|A0A0M0L385_9BACL GTP cyclohydrolase 1 OS= Jeotgalibacillus marinus OX=86667 GN=folE PE=3 SV=1

SEQ ID NO: 9295 - protein, 304 aa, Jeotgalibacillus marinus; identical to SEQ ID NO: 5046
  misc_feature (1)..(304): tr|A0A0M0KY21|A0A0M0KY21_9BACL GTP cyclohydrolase FolE2 OS=Jeotgalibacillus marinus OX=86667 GN=folE2 PE=3 SV= 1

SEQ ID NO: 9296 - protein, 195 aa, Jeotgalibacillus proteolyticus
  misc_feature (1)..(195): tr|A0A2S5GFE7|A0A2S5GFE7_9BACL GTP cyclohydrolase 1 OS= Jeotgalibacillus proteolyticus OX=2082395 GN=folE PE=3 SV=1
MTVNTEKNKVNRPQIEEAIRMLLEAVGEDPNREGLIDTPKRVAKMYEEVFEGLHIDPKEYFKTVFNEDHEELVFVKDIPFYSMCEHHLIPFYGKAHVAYLPKNGKVTGLSKLARAVETTARRPQLQERITSTVADGIMEMLAPHGAMVIVEAEHMCMTMRGVKKPGAMTVTTAARGVFEHDAVRRNEVLALMKMN

SEQ ID NO: 9297 - protein, 204 aa, Jeotgalibacillus salarius
  misc_feature (1)..(204): tr|A0A4Y8LNS2|A0A4Y8LNS2_9BACL GTP cyclohydrolase 1 OS= Jeotgalibacillus salarius OX=546023 GN=folE PE=3 SV=1
MDHTTEQLTTLTENNTGRVDREKIETAITMLLEAVGEDPSREGLLDTPKRVAKMYEEMFSGLHSDPKEYFKTVFNEDHEELVFVKDIPFHSMCEHHLVPFYGKAHVAYLPKDGKVTGLSKLARAVETTARRPQLQERITSTVADAIMDMLSPHGAYVIVEAEHMCMTMRGIKKPGAKTVTTAARGVYETDHVLRNEVMTLLKMD

SEQ ID NO: 9298 - protein, 208 aa, Jeotgalibacillus soli
  misc_feature (1)..(208): tr|A0A0C2V5B6|A0A0C2V5B6_9BACL GTP cyclohydrolase 1 OS= Jeotgalibacillus soli OX=889306 GN=folE PE=3 SV=1
MTHMKRTEDNKSTISDKEEKIYKVNLPQIEEAVRLILEAVGEDPNREGLLDTPKRVAKMYEEVFEGLHIDPKEYFKTVFNEEHEELVFVKDIPFYSICEHHLVPFYGKAHVAYLPKDGKVTGLSKLARAVEATARRPQLQERITSTVADAIMEMLSPHGAMVIVEAEHMCMTMRGVKKAGAMTITIASRGVFEEDSVKRNEVIALMKS

SEQ ID NO: 9299 - protein, 205 aa, Jeotgalibacillus sp.
  misc_feature (1)..(205): tr|A0A4V3B0X2|A0A4V3B0X2_9BACL GTP cyclohydrolase 1 OS= Jeotgalibacillus sp. S-D1 OX=2552189 GN=folE PE=3 SV=1
MDHTQENQTTVALTDQKNKVNRPKIEEAITMLLEAVGEDPTREGLLDTPKRVAKMYEEMFEGLHIDPKEYFNTVFNEDHEELVFVKDIPFYSMCEHHLVPFFGKAHVAYLPKDGKVTGLSKLARAVESTARRPQLQERITSTVADAIMEMLAPHGAMVIVEAEHMCMTMRGVKKPGAMTVTTAARGIFEKEAIRRNEVLALMKMR

SEQ ID NO: 9300 - protein, 304 aa, Jeotgalibacillus sp.
  misc_feature (1)..(304): tr|A0A4Y8L6B3|A0A4Y8L6B3_9BACL GTP cyclohydrolase FolE2 OS=Jeotgalibacillus sp. R-1-5s-1 OX=2555897 GN=folE2 P E=3 SV=1
MNAMLNKALPTKEERHKQFGSVDKIKGTKPTDKEKMADLQNEKKDYYFAIDQVGISNIRYPVFIESERAPVFQQTEGIFKLTTSLPDSEKGINMSRLPEALHAFYEAQKPLTFETLRELTGDIAGRMKQEKAHIEVTFPWYTERKSPAMEVSGLHHTHVTLASSWQADGKRTESITMKAKVATLCPCSKEISEYSAHNQRGVVTVNMQFDSGQLPKSYKEDLLHILESNASAALYPILKRPDEKFVTEQAFENPRFVEDLIRLIASELYETGWVRAFEITCENQESIHLHDAYAHLKVDKERQR

SEQ ID NO: 9301 - protein, 292 aa, Jeotgalicoccus halophilus
  misc_feature (1)..(292): tr|A0A1G9AZS7|A0A1G9AZS7_9STAP GTP cyclohydrolase FolE2 OS=Jeotgalicoccus halophilus OX=586411 GN=folE2 PE=3 S V=1
MEEFDLTTREGRFKHFGSVDPVEGTKPKNKEEMADLQNSRKDFLFEVDSVGINNLTYPVIIGDFQSVGTFELATSLQKDEKGINMSRLIESLETVNSSGVPLNFETIKNLLTTLRERMKQNSAELTASGKWFFNKMSPGTSLSAVAHADVFYSAAFDGDSFTRKQFGMTAQVTTLCPCSKEISEYSAHNQRGNVKVLIDIDDSVELPDTYKEDLYEILEINASSQLYPILKRTDEKMVTERAYENPRFVEDLIRLVAYDLVELDWVKGFELECRNEESIHQHDAFSRLTYQK

SEQ ID NO: 9302 - protein, 292 aa, Jeotgalicoccus halotolerans
  misc_feature (1)..(292): tr|A0A3E0AXB2|A0A3E0AXB2_9STAP GTP cyclohydrolase FolE2 OS=Jeotgalicoccus halotolerans OX=157227 GN=folE2 PE=3 SV=1
MEEFDLTTREGRFKYFGSVDPVEGTKPKVKEDMADLQNSRKDFLFEVDSVGINNLSYPVVIGDFQSVGNFELATSLEKDEKGINMSRLIESLETVNSNGVPLDFDTIKELLSKLRDRMKQNSAELTVDGKWFFNKPAPGTGLNAVANADVVYSAAFDGESFTRKQFGMTAQVTTLCPCSKEISEYSAHNQRGNVKVLIDIDDSAELPATYKEDLYEILEINASSQLYPILKRTDEKMVTERAYENPRFVEDLIRLVAYDLVELDWVKGFELECRNEESIHQHDAFSRLKYQK

SEQ ID NO: 9303 - protein, 292 aa, Jeotgalicoccus nanhaiensis
  misc_feature (1)..(292): tr|A0A4Y9HHG8|A0A4Y9HHG8_9STAP GTP cyclohydrolase FolE2 OS=Jeotgalicoccus nanhaiensis OX=568603 GN=folE2 PE=3 SV=1
MEEFDLTTREGRFKYFGSVDPIEGTKPKVKEDMADLQNSRKDFLFEVDSVGINNLSYPVVIGDFQSVGNFELATSLEKDEKGINMSRLIESLETVNSGGVPLDFDTIKELLSKLRGRMKQNSAELTVDGKWFFNKPSPGTGLNAVANADVVYSAAFDGESFTRKQFGMTAQVTTLCPCSKEISEYSAHNQRGNVKVLIDIDDSAELPATYKEDLYEILEINASSQLYPILKRTDEKMVTERAYENPRFVEDLIRLVAYDLVELDWVKGFELECRNEESIHQHDAFSRLKYQK

SEQ ID NO: 9304 - protein, 292 aa, Jeotgalicoccus saudimassiliensis
  misc_feature (1)..(292): tr|A0A078MDR5|A0A078MDR5_9STAP GTP cyclohydrolase FolE2 OS=Jeotgalicoccus saudimassiliensis OX=1461582 GN=folE 2 PE=3 SV=1
MEEFDLTTREGRFKHFGSVDPVEGTKPKNKEDMADLQNSRKDFLFEVDSVGINNLTYPVVIGDFQSVGNFELATSLEKDEKGINMSRLIESLETVNSNGVPLNFDTIKELLTRLRDRMKQNSAELTVDGKWFFNKPSPGTGLDAIANADVVYSAEFDGEKFTRKQFGMTAQVTTLCPCSKEISEYSAHNQRGNVKVLIDIDDSVELPETYKEDLYEVLEINASSQLYPILKRTDEKMVTERAYENPRFVEDLIRLVAYDLVELDWVKGFELECRNEESIHQHDAFSRLKYQK

SEQ ID NO: 9305 - protein, 292 aa, Jeotgalicoccus sp.
  misc_feature (1)..(292): tr|A0A358JV24|A0A358JV24_9STAP GTP cyclohydrolase FolE2 OS=Jeotgalicoccus sp. OX=1871619 GN=folE2 PE=3 SV=1
MEEFDLTTREGRFKYFGSVDPVEGTKPKNKEDMADLQNSRKDFLFEVDSVGINNLTYPVVIGDFQSVGNFELATSLEKDEKGINMSRLIESLETVNNGGVALDFDTLKELLSKLRSNMKQNSAELTVDGTWFFNKPSPGTGLNAVANADIVYSAAFDGESFTRKQFGMTAQVTTLCPCSKEISEYSAHNQRGNVKVLIDIDDSVELPATYKEDLYEVLEINASSQLYPILKRTDEKMVTERAYENPRFVEDLIRLVAYDLVELDWVKGFELECRNEESIHQHDAFSRLKYQK

SEQ ID NO: 9306 - protein, 367 aa, Jhaorihella thermophila
  misc_feature (1)..(367): tr|A0A1H5W7T3|A0A1H5W7T3_9RHOB GTP cyclohydrolase FolE2 OS=Jhaorihella thermophila OX=488547 GN=folE2 PE=3 SV= 1
MNLQTRDIEKTPDQEAAAAALDLLRTWAATASPTEISNLDPAIARLLPGRAVSNYPDLSRDYPHEFDADHAYKATLPDLQNGPSSLIRGAKQHIEHVGISNFRLPIRFHTRDNGDVTLETSVTGTVSLDAEKKGINMSRIMRSFYRHAERTFSFEVMEHALDDYMTDLDSFDARIMMRFSFPMKVESLRSGLSGYQYYDIALELVDMGGVRQKFMHLDYVYSSTCPCSLELSEHARSQRGQLATPHSQRSVARISVQVNCDGPCLWFEDLIELSRRAVPTETQVMVKREDEQAFAELNAANPIFVEDAARLFCEQLRADPRIGDFRIVASHQESLHSHDAVSILTEGETFAATSLDPRLFSTLFHVG

SEQ ID NO: 9307 - protein, 199 aa, Jiangella alba
  misc_feature (1)..(199): tr|A0A1H5PF40|A0A1H5PF40_9ACTN GTP cyclohydrolase 1 OS= Jiangella alba OX=561176 GN=folE PE=3 SV=1
MNAEPVPTPPPGQFDHARVEAAVRELLVAIGEDPERDGLLDTPSRVARAYAEMFGGLHQDPADVLTTTFELGHDEMVLVKDIELASMCEHHLVPFYGFAHVGYIPGPSGRIAGLSKLARLVDVYAKRPQVQERLTSQVANSLVELLKPAGVIVVVEAEHLCMTMRGVRKPGAKTVTSAVRGQLRDATTRAEAMSLIIGH

SEQ ID NO: 9308 - protein, 199 aa, Jiangella alba
  misc_feature (1)..(199): tr|A0A1H5CNW3|A0A1H5CNW3_9ACTN GTP cyclohydrolase 1 OS= Jiangella alba OX=561176 GN=folE PE=3 SV=1
MDASTHLRVVHEPDDELDLEAAERAAADFLRALGVHADGEGMRRTPARMARAYAELFTPRPFDLTTFPNDEGYDELVLARDIPVRSVCEHHLLPFVGVAHVGYLPGERILGLSKLARIVEHFARRPQVQERLTKQVADWLGDRLAPKGVGVVVEAEHSCMVLRGVQAIGSTTVTSTLLGTLREDGRSRQEFFALSGVRA

SEQ ID NO: 9309 - protein, 209 aa, Jiangella alkaliphila
  misc_feature (1)..(209): tr|A0A1H2LDF7|A0A1H2LDF7_9ACTN GTP cyclohydrolase 1 OS= Jiangella alkaliphila OX=419479 GN=folE PE=3 SV=1
MTAAAARLAPAGVGTHRLRIVGARSEPDRPALVAAVADLLVALGRDPTDAHLAETPSRVADAYAELLTPRAFDLTTFPNDEGYDELVMARDIPIHSLCQHHLLPFHGVAHVGYLPGQRILGLSKLARVVELFARDLQVQERLTQQIANWLQDNLAPKGVGVVIEAEHLCMSLRGVRAAGARTVTSALHGALRDDDRSRQEFFALAVGAR

SEQ ID NO: 9310 - protein, 196 aa, Jiangella alkaliphila
  misc_feature (1)..(196): tr|A0A1H2GKF1|A0A1H2GKF1_9ACTN GTP cyclohydrolase 1 OS= Jiangella alkaliphila OX=419479 GN=folE PE=3 SV=1
MSREPVPPGQFDHARVEAAVRELLVAIGEDPKRDGLLDTPARVARAYEEMFNGLRQDPADVLTTTFELGHEEMVLVKDIELASMCEHHLVPFYGFAHVGYIPGPSGRIAGLSKLARLVDVFAKRPQVQERLTSQVANSLVDLLKPAGVIVVVEAEHLCMTMRGVRKPGAKTVTSAVRGQLRDATTRAEAMSLIIGR

SEQ ID NO: 9311 - protein, 202 aa, Jiangella sp.
  misc_feature (1)..(202): tr|A0A4R5ADJ8|A0A4R5ADJ8_9ACTN GTP cyclohydrolase 1 OS= Jiangella sp. 8K307 OX=2530373 GN=folE PE=3 SV=1
MRYVNAEPVLPVPPGRFDHARAEAAVRELLVAIGEDPDRDGLLDTPARVARAYAEMFRGLHQDPAEVLTTTFELGHDEMVLVKDIELASMCEHHLVPFYGYAHVGYIPGPSGRIAGLSKLARLVDVYAKRPQVQERLTSQVANSLVELLKPAGVIVVIEAEHLCMTMRGVRKPGAKTLTSAVRGQLRDATTRAEAMSLIIGR

SEQ ID NO: 9312 - protein, 202 aa, Jiangella sp.
  misc_feature (1)..(202): tr|A0A418KY62|A0A418KY62_9ACTN GTP cyclohydrolase 1 OS= Jiangella sp. NEAU-YY265 OX=2293569 GN=folE PE=3 SV=1
MRDVNAEPVLPEPPGQFDYARAEAAVRELLVAIGEDPDRDGLLDTPSRVARAYAEMFRGLHQDPADVLTTTFELGHDEMVLVKDIELASMCEHHLVPFYGYAHVGYIPGPSGRIAGLSKLARLVDVYAKRPQVQERLTSQVANSLVELLKPAGVIVVVEAEHLCMTMRGVRKPGAKTLTSAVRGQLRDATTRAEAMSLIIGR

SEQ ID NO: 9313 - protein, 205 aa, Jiella sp.
  misc_feature (1)..(205): tr|A0A4Y8RWA1|A0A4Y8RWA1_9RHIZ GTP cyclohydrolase 1 OS= Jiella sp. CBS5Q-3 OX=2558362 GN=folE PE=3 SV=1
MEAVVKKFPEKPDEAGRPSRAEAEAAVETLLRWIGENPGREGLKETPKRVVKAYEELFAGYGHGPGEVLGRVFEEVAGYNDIVLVKDIAFHTHCEHHMVPVIGKAHVAYLPDGRVLGLSKIARLVDMFGRRLQTQEAMTAQIADALNDTLKPRGVAVILEAEHLCMSMRGIRSHGSSTFTGTYRGSFADDVAEQDRVLRLVGLGG

SEQ ID NO: 9314 - protein, 219 aa, Jishengella endophytica
  misc_feature (1)..(219): tr|A0A2W2CKI4|A0A2W2CKI4_9ACTN GTP cyclohydrolase 1 OS= Jishengella endophytica OX=515350 GN=folE PE=3 SV=1
MAASATEPDDVLDYIAARLVNGRLTGRPVEDAIDLARIEKAVREILIAVGENPDRDGLQQTPARVARAYAELFAGLRVDPATVLTTTFEANHEELVLVRDIDVMSLCEHHLLPFRGSAHIGYIPGPDGRITGLSKLARLVEVFARRPQVQERLTVQIADLLMERLSPRGVVVVLECEHMCMAMRGIQKSGAKTITSAVRGTLQRDAKSRAEAMALIIPR

SEQ ID NO: 9315 - protein, 205 aa, Jishengella sp.
  misc_feature (1)..(205): tr|A0A2W2DR73|A0A2W2DR73_9ACTN GTP cyclohydrolase 1 OS= Jishengella sp. NA12 OX=1655439 GN=folE PE=3 SV=1
MAARLVNGRLTGRPVEDAMDLGRIEKAVREILIAVGEDPDRDGLQQTPARVARAYAELFAGLRVDPATVLTTTFEANHEELVLVRDIDVMSLCEHHLLPFRGSAHIGYIPGPDGRITGLSKLARLVEVFARRPQVQERLTSQIADLLMERLAPRGVVVVLECEHMCMAMRGIQKAGAKTITSAVRGTLQRDAKSRAEAMALIIHR

SEQ ID NO: 9316 - protein, 236 aa, Jiulongibacter sediminis
  misc_feature (1)..(236): tr|A0A0P7BQF1|A0A0P7BQF1_9BACT GTP cyclohydrolase 1 OS= Jiulongibacter sediminis OX=1605367 GN=folE PE=3 SV=1
MKLKETMSSTQHNDRKVDEIGDDHISSNIFDTPLRPDAFEMDDETKMAKIEEHFREIMHIMGLDLADDSLNGTPRRVAKMYVKELFSGLNPKNLPSLTHFKNHYKYKDMLVERDIMFHSNCEHHFVPIVGKAHVAYIANGHVIGLSKLHRIVNHFARRPQVQERMTIQIGEALKTVLGTESVAVILDADHMCVSSRGINDQTSSTVTSFYGGEFNNTDTRTEFIKMVGLRQNGMKY

SEQ ID NO: 9317 - protein, 200 aa, Jonesia denitrificans
  misc_feature (1)..(200): tr|C7R116|C7R116_JONDD GTP cyclohydrolase 1 OS=Jonesia denitrificans (strain ATCC 14870 / DSM 20603 / CIP 5513 4) OX=471856 GN=folE PE=3 SV=1
MTSPRDPLAGVPGEVDLDRAAAAVRELLTAVGEDPDREGLRDTPRRVAKAYAEVFAGLRQNPTDVLNTVFDIGHDEMILVRDIDVYSTCEHHLVPFHGVAHVGYIPGEDGRVTGLSKLARLVDVYAKRPQVQERLTTQIADSLVDVLHPRGVIVVVECEHLCMTMRGVRKPGARTITSAVRGQLRDPATRAEAMSLIVGK

SEQ ID NO: 9318 - protein, 198 aa, Joostella marina
  misc_feature (1)..(198): tr|I3C9X2|I3C9X2_9FLAO GTP cyclohydrolase 1 OS=Joostell a marina DSM 19592 OX=926559 GN=folE PE=3 SV=1
MAYKTFEEYNIETTETIRNQYENIISEIGEDTAREGLLKTPERASKAMQFLTQGYQQNAAEILKGAMFKEDYNEMVIVKDIELYSLCEHHLLPFFGKAHIAYIPNGYIVGLSKLPRIVDVYARRLQVQERLTHDILECINSTLKPQGVAVVIEASHMCMMMRGVQKQNSVTTTSGFRGQFEKIETRNEFLKLISSDLG

SEQ ID NO: 9319 - protein, 226 aa, Joostella marina
  misc_feature (1)..(226): tr|I3C697|I3C697_9FLAO GTP cyclohydrolase 1 OS=Joostell a marina DSM 19592 OX=926559 GN=folE PE=3 SV=1
MKIDKALEDHFEELGNDHVSSAAETPMRKDAFDISDDEKIEQIESQVYNIMETLGLDLTDDSLRGTPRRVAKMFVKEIFAGLHPDRKPKASTFSNKYKYGEMLVEKNITVYSTCEHHLLPIVGRAHIAYISNGSVVGLSKMNRIVDYYAKRPQVQERMTMQVVQELQRALGTKDVACVIDAKHLCVNSRGIRDIESSTVTAEFGGKFKDPAVRREFLDYIKLDTEF

SEQ ID NO: 9320 - protein, 208 aa, Kaistia algarum
  misc_feature (1)..(208): tr|A0A2S5TT86|A0A2S5TT86_9RHIZ GTP cyclohydrolase 1 OS= Kaistia algarum OX=2083279 GN=folE PE=3 SV=1
MDAKIETSKPREPEPRAAPVRPSQAEAEAAVRTLIAFAGDDPSREGLIETPARVAKAFREFYCGYEQNPTDTLDRVFDEAGGYDDMVLVRDIPFYSHCEHHMVPFIGKAHIAYFPDGGVVGLSKLARVVDIFARRLQMQERLTAEIAAAVDDGLRPRGVAVLLEAEHHCVSMRGAEKSGVSTVTTRFTGVFKTDAAERVRFLALANRR

SEQ ID NO: 9321 - protein, 206 aa, Kaistia soli
  misc_feature (1)..(206): tr|A0A1M5AKD7|A0A1M5AKD7_9RHIZ GTP cyclohydrolase 1 OS= Kaistia soli DSM 19436 OX=1122133 GN=folE PE=3 SV=1
MDAKTPPQLKYAPRAAERPSAAEAEAAVRTLIAYAGDDPDREGLLETPARVAKAYREFYSGYEEDPAAILDRVFDEAGGYDDFVLLRDIPFHSHCEHHMVPFIGKAHIAYLPNGGVVGLSKLARLVDAYARRLQMQERLTQQIADAIEIGLAPHGVAVLIEAEHHCVSMRGARKSGVSTVTTSFKGVFKTDPAERARFLQLVEGRR

SEQ ID NO: 9322 - protein, 210 aa, Kaistia sp.
  misc_feature (1)..(210): tr|A0A1E4CY63|A0A1E4CY63_9RHIZ GTP cyclohydrolase 1 OS= Kaistia sp. SCN 65-12 OX=1660103 GN=folE PE=3 SV=1
MDAVIKKFSSPAPQPAKPADRPSQAEVEAAVRVLLRWTGDDPDREGLVDTPKRVAKAYREMFSGYAMDPADELGRTFEEVAGYDDLVIVKDIEFHSHCEHHMVPIIGKAHVGYLPDRKVVGLSKIIRVVEIFAHRLQTQEAMTAQIAGAIQDVLNPRGVAVILEAEHMCIAMRGIRKQGSTTLTSTFTGSFKDNPEEQARFIGMIRNAVK

SEQ ID NO: 9323 - protein, 221 aa, Kalamiella piersonii
  misc_feature (1)..(221): tr|A0A3A9IV10|A0A3A9IV10_9GAMM GTP cyclohydrolase 1 OS= Kalamiella piersonii OX=2364647 GN=folE PE=3 SV=1
MSTLSQEAILVHEALLARGLETPLRAPTREMDDETRKRLIAGHMTEVMQLLNLDLEDDSLMETPHRIAKMYVDEVFSGLDYANFPKITVIENKMKVDEMVTVRDITLTSTCEHHFVIIDGKATVAYIPKDKVIGLSKINRIVQFFAQRPQVQERLTQQVLVALQTLLGTNNVAVSIDAVHYCVKARGVKDATSATTTTSLGGLFKSSQNTRQEFLRAVRHI

SEQ ID NO: 9324 - protein, 188 aa, Kandleria vitulina
  misc_feature (1)..(188): tr|A0A0R2HJW8|A0A0R2HJW8_9FIRM GTP cyclohydrolase 1 OS= Kandleria vitulina DSM 20405 OX=1410657 GN=folE PE=3 SV =1
MIDTKAIEEHIRGILIALGDDPDREGLKETPQRVARMYEEVFEGMNYTNHEIAEMFNKTFEEDLNEHNQDIVFVKDIDAFSYCEHHMALMYDMKISVAYIPNGKVIGLSKIARICDMVTKRLQLQERIGSDIADIISEVTGSEDVAVFIEAKHSCMSARGIRNTGAKTYSRTLRGRFEKEPYLLGGMM

SEQ ID NO: 9325 - protein, 188 aa, Kandleria vitulina
  misc_feature (1)..(188): tr|A0A1H2Q9X3|A0A1H2Q9X3_9FIRM GTP cyclohydrolase 1 OS= Kandleria vitulina OX=1630 GN=folE PE=3 SV=1
MIDTKAIEEHIRGILIALGDDPDREGLKETPQRVARMYEEVFEGMNYTNHEIAGMFNKTFEENLNEHNQDIVFVKDIDAFSYCEHHMALMYDMKISVAYIPNGKVIGLSKIARICDMVTKRLQLQERIGSDIADIISEVTGSEDVAVFIEAKHSCMSARGIRNTGAKTYSRTLRGRFEKEPYLLGGMI

SEQ ID NO: 9326 - protein, 185 aa, Kangiella geojedonensis
  misc_feature (1)..(185): tr|A0A0F6TPR4|A0A0F6TPR4_9GAMM GTP cyclohydrolase 1 OS= Kangiella geojedonensis OX=914150 GN=folE PE=3 SV=1
MSDKLANLYKDVLVELGEDISRNGILDTPTRAAKAMQFLTQGYEQDLNTVVNGAIFDSDNDSMVIVKDIELYSMCEHHMLPFIGKAHVGYLPTGKVIGLSKIARIVDMFARRLQIQENLTKQIAEAIQEVTGASGVGVIIEAKHMCMMMRGVEKQNSVMTSSTMLGQFRSSQNTRNEFLTLIEKK

SEQ ID NO: 9327 - protein, 306 aa, Kangiella geojedonensis
  misc_feature (1)..(306): tr|A0A0F6RC20|A0A0F6RC20_9GAMM GTP cyclohydrolase FolE2 OS=Kangiella geojedonensis OX=914150 GN=folE2 PE=3 SV= 1
MIKEQLPDITSDTSSQKSYSLRWVGMEGIAVPLHLSDKDAVGQVINSSTSIYVSLDSVESKGIHMSRLHKNINQLSTLKLAKQSLDKLLRSAIKSQEGISCNAKVRLEFDVTFEKSSLLSKNSGYQSYPVAINGEASLDNTDYEYELTIPYSSTCPCSAALARQLYSQQIDQRFEGESISKQELLNWVQSAQNSFATPHSQRSYAYLKLKLKQGELLSLKSLITVLEDVIGTPVQTVVKRVDEQEFARLNGQNLMFCEDAARKLKQYLEQNDSIVDYWIKVEHQESLHAHNAVVMDQKQQVLDTKL

SEQ ID NO: 9328 - protein, 185 aa, Kangiella koreensis
  misc_feature (1)..(185): tr|C7RAU3|C7RAU3_KANKD GTP cyclohydrolase 1 OS=Kangiell a koreensis (strain DSM 16069 / KCTC 12182 / SW-125) OX =523791 GN=folE PE=3 SV=1
MSDKLENLYREILVEIGEDISRNGILDTPKRAAKAMKFLTHGYEQDLNEVVNGAIFDSDNDAMVIVKDIELYSMCEHHILPFIGKVHVGYLPTGKVIGLSKIARIVDMFARRLQIQENLTKQIAHAVQDVTGASGVGVIVEAKHMCMMMRGVEKQNSVMTSSTMLGQFRTSQNTRQEFLTLIEKR

SEQ ID NO: 9329 - protein, 185 aa, Kangiella profundi
  misc_feature (1)..(185): tr|A0A2K9AFI5|A0A2K9AFI5_9GAMM GTP cyclohydrolase 1 OS= Kangiella profundi OX=1561924 GN=folE PE=3 SV=1
MSDKLENLYREILVEIGEDISRNGILDTPKRAAKAMKFLTHGYEQDLDEVVNGAIFDSDNDAMVIVKDIELYSMCEHHILPFIGKVHVGYLPTGKVIGLSKIARIVDMFARRLQIQENLTKQIAHAVQDVTGAAGVGVIVEAKHMCMMMRGVEKQNSVMTSSTMLGQFRSSQNTRNEFLTLIEKR

SEQ ID NO: 9330 - protein, 184 aa, Kangiella sediminilitoris
  misc_feature (1)..(184): tr|A0A1B3B9S3|A0A1B3B9S3_9GAMM GTP cyclohydrolase 1 OS= Kangiella sediminilitoris OX=1144748 GN=folE PE=3 SV=1
MSDKLANLYKEVLVELGEDVSRNGILDTPTRAAKAMQFLTQGYEQDLNTVVNGAIFDSDNDSMVIVKNIELYSMCEHHMLPFIGKAHVGYLPTGKVIGLSKIARIVDMFARRLQIQENLTKQIAEAIQEVTGASGVGVIIEAKHMCMMMRGVEKQNSVMQSSTMLGQFRSSQNTRNEFLTLIEK

SEQ ID NO: 9331 - protein, 184 aa, Kangiella sp.
  misc_feature (1)..(184): tr|A0A3D8UQL2|A0A3D8UQL2_9GAMM GTP cyclohydrolase 1 OS= Kangiella sp. HD9-110m-PIT-SAG07 OX=2283595 GN=folE PE= 3 SV=1
MSDKLANLYKDVLVELGEDVSRNGILDTPTRAAKAMQFLTQGYEQDLNTVVNGAIFDSDNDSMVIVKDIELYSMCEHHMLPFIGKAHVGYLPTGKVIGLSKIARIVDMFARRLQIQENLTKQIAEAIQDVTGAAGVGVIIEAKHMCMMMRGVEKQNSVMTSSTMLGQFRSSQNTRNEFLTLIEK

SEQ ID NO: 9332 - protein, 184 aa, Kangiella sp.
  misc_feature (1)..(184): tr|A0A2G2KYW2|A0A2G2KYW2_9GAMM GTP cyclohydrolase 1 OS= Kangiella sp. OX=1920245 GN=folE PE=3 SV=1
MSDNLEKHYSNILTDLGEDISRDGLIDTPKRAAKAMKFLTQGYDLCLNDVVNNAIFESDNDDMVIVKDIELYSLCEHHMLPFIGKCHVAYLPTGKVLGLSKIARIVDMFARRLQIQENMTKQIAEAIMKVTNAAGVGVIMEAKHMCMMMRGVEKQNSAMITSVMLGAFRKKPATRAEFLNLVKN

SEQ ID NO: 9333 - protein, 185 aa, Kangiella spongicola
  misc_feature (1)..(185): tr|A0A318D0G8|A0A318D0G8_9GAMM GTP cyclohydrolase 1 OS= Kangiella spongicola OX=796379 GN=folE PE=3 SV=1
MSDKLESLYKDVLVELGEDISRNGILDTPKRAAKAMKFLTQGYEQDLNTVVNNAIFDSDNDSMVIVKDIELYSMCEHHMLPFIGKAHVGYLPTGKVIGLSKIARIVDMFARRLQIQENLTKQIAEAIQDVTGASGVGVIIEAKHMCMMMRGVEKQNSVMTSSTMLGQFRSSQNTRNEFLTLIEKK

SEQ ID NO: 9334 - protein, 205 aa, Kangiellaceae bacterium
  misc_feature (1)..(205): tr|A0A2E2VS78|A0A2E2VS78_9GAMM GTP cyclohydrolase 1 OS= Kangiellaceae bacterium OX=2026751 GN=folE PE=3 SV=1
MSKPSADKITVISDHNHGLEQAYTNILTDIGEDTKREGLVDTPKRAAKAIRYLTGGYEQSLDDVINGAVFSSDNDNMVLVKNIEFFSQCEHHMLPFLGYCHVAYYPNGKVLGLSKLARIVDMYARRLQIQENLSKQIADAINDILKPRGVAVQMTAIHMCMMMRGVEKHSSETTTSALVGEFKSSEAARQEFLQQIGPHNKPIFG

SEQ ID NO: 9335 - protein, 256 aa, Keratinibaculum paraultunense
  misc_feature (1)..(256): tr|A0A4R3L209|A0A4R3L209_9CLOT GTP cyclohydrolase FolE2 OS=Keratinibaculum paraultunense OX=1278232 GN=folE2 P E=3 SV=1
MIDIQKEIDTRDIALKNVGIKDFKWPILVLDRENKNQRTIANIDASVGLCHNIKGTHMSRFVEIIKEIKEVSPKTIEEILENMMVKLDSKSAYMKIEFDYFIKKVSPVTEIEALSDIKCRYEASKEEQFKLLMGVTIPVITLCPCSKAISKFGAHNQRAIVDILVDMNSLVWIEEMVEIAEESASSPVYPLLKRKDEKHVTEQSYLKPRFVEDVVREVALRLERNKRIDWYSVKVESIESIHNHTAFAYTEKGYIL

SEQ ID NO: 9336 - protein, 271 aa, Kerstersia gyiorum
  misc_feature (1)..(271): tr|A0A171KUU5|A0A171KUU5_9BURK GTP cyclohydrolase FolE2 OS=Kerstersia gyiorum OX=206506 GN=folE2 PE=3 SV=1
MTSIVESAVVIPDVQSFADVRQIPIQRVGISGVRHPMVVADGSGAAHPTVAEWTLTVALPAEEKGTHMSRFVALLEKYRATPLTPALFSAMAGEMLPLLHAQSGDITASFPYFINKTAPVSGVRSLLDYAVVWTARANGDAVEFELTVTVPVTSLCPCSKSISKYGAHNQRSHVTVRTIVTDGAAFNLDDFISQIEKQGSCELWGLLKRPDEKYVTEHAYENPKFVEDIVRDVAATLNAYAGIAGYRVTVENFESIHNHSAYAVVEGHGKG

SEQ ID NO: 9337 - protein, 271 aa, Kerstersia gyiorum
  misc_feature (1)..(271): tr|A0A4Q7MSI1|A0A4Q7MSI1_9BURK GTP cyclohydrolase FolE2 OS=Kerstersia gyiorum OX=206506 GN=folE2 PE=3 SV=1
MTSIVESAVVIPDVQSFADVRQIPIQRVGISGVRHPMVVADGSGAAHPTVAEWTLTVALPAEEKGTHMSRFVALLEKYRATPLTPALFSAMAGEMLPLLHAQSGDITASFPYFINKTAPVSGVRSLLDYAVVWTARANGDAVEFELTVTVPVTSLCPCSKSISKYGAHNQRSHVTVRTIVTDGAAFNLDDFISQIEKQGSCELWGLLKRPDEKYVTEHAYENPKFVEDIVRDVAATLNAHAGIAGYRVTVENFESIHNHSAYAVVEGHGKG

SEQ ID NO: 9338 - protein, 305 aa, Ketobacter alkanivorans
  misc_feature (1)..(305): tr|A0A2K9LRU6|A0A2K9LRU6_9GAMM GTP cyclohydrolase FolE2 OS=Ketobacter alkanivorans OX=1917421 GN=folE2 PE=3 SV =1
MPDIATVSQPKAPGLLDWVGMSEIEVPLSIPTRNGSVAHAVAKAQAYVNLINPEAKGIHMSRLYLLLDELCSQTLTAHSLRDVLARFLESHEGLSDQAFVDFRFDFLARRPALKSEFSGWKAYPARIIATEDPEGFHFELRVEIPYSSTCPCSAALARQLIQKQFREDFGADQQVSADDVYGWLGTEQGIVATPHSQRSIAEIKVRLSDDTDDFPLEDLIDVVEGALKTPVQTAVKREDEQEFALLNGQNLMFCEDAARKIQAAMNDQVSYQDFWVRVNHLESLHAHNAVAIVTKGLKGGYLPQP

SEQ ID NO: 9339 - protein, 305 aa, Ketobacter sp.
  misc_feature (1)..(305): tr|A0A3F2UY05|A0A3F2UY05_9GAMM GTP cyclohydrolase FolE2 OS=Ketobacter sp. OX=2083498 GN=folE2 PE=3 SV=1
MPDIAVASQAKASVALDWVGMSEIDVPLAIPTRNGAVAHAVAKAQAYVNLINPEAKGIHMSRLYLLLDEVCSQTMTARGLRDILRRFLESHEGLSDQAFVDFRFEFLARRPALKSEFSGWKAYPARIVASESPEGFQFELHVEIPYSSTCPCSAALARQLIQQQFRKDFAGHDPISAEEVHGWLGTEQGIVATPHSQRSVAEIKVQLSEDTDDFPLEELIDVVEDALKTPVQTAVKREDEQEFALLNGQNLMFCEDAARRIQTVLNEHESYQDFWLRVNHLESLHAHNAVAIVSKGIKGGYLPKP

SEQ ID NO: 9340 - protein, 181 aa, Ketobacter sp.
  misc_feature (1)..(181): tr|A0A3L8BIL0|A0A3L8BIL0_9GAMM GTP cyclohydrolase 1 OS= Ketobacter sp. OX=2083498 GN=folE PE=3 SV=1
MKENFAAIITAIGEDLTRPGLEKTPERAAKAFEYLTRGYHQQLDDVINNALFPSDASEMVVVKDIELYSMCEHHLLPFIGRAHVAYIPSGKVLGLSKVARIVDMYARRLQIQEQLTTQIAETIQDVVGAAGVGVVVEAQHMCMMMRGVEKQNSVMKTSAMLGTFRDNQATRYEFLSLINAR

SEQ ID NO: 9341 - protein, 199 aa, Kibdelosporangium aridum
  misc_feature (1)..(199): tr|A0A1Y5Y1D4|A0A1Y5Y1D4_KIBAR GTP cyclohydrolase 1 OS= Kibdelosporangium aridum OX=2030 GN=folE PE=3 SV=1
MRAGTALRVVHEPDTGVDIAAAEDAAAAFLRALGVSTDTESLRGTPGRMARAYAELFSPRPFDLTTFPNDEGYDELVLARAIPVRSVCEHHLLPFVGTAHVGYLPGERILGLSKLARIVEYFACRPQVQERLTKQVADWLNDHLNPRGVGVVIEAEHTCMTLRGVLASGSTTVTSTLLGSLREDVRSRQEFFALSGVHI

SEQ ID NO: 9342 - protein, 203 aa, Kibdelosporangium aridum
  misc_feature (1)..(203): tr|A0A1W2DRM5|A0A1W2DRM5_KIBAR GTP cyclohydrolase 1 OS= Kibdelosporangium aridum OX=2030 GN=folE PE=3 SV=1
MGAASSDGVRSVRPVFDQARAEKAVRELLLACGEDPDRDGLADTPARVARAYREMFAGLYMDPDAVLAKTFDESHEELVLVTDIPMYSTCEHHLVPFHGVAHVGYIPNEGGKVTGLSKLARLVDAYAKRPQVQERLTSQIADALMRKLEPRGVIVVVEAEHLCMSMRGIRKPGARTTTSAVRGQFKTSASSRAEALDLIKARR

SEQ ID NO: 9343 - protein, 198 aa, Kibdelosporangium phytohabitans
  misc_feature (1)..(198): tr|A0A0N9HSS1|A0A0N9HSS1_9PSEU GTP cyclohydrolase 1 OS= Kibdelosporangium phytohabitans OX=860235 GN=folE PE=3 SV=1
MDGARSVRPVFDQARAERAVRELLLACGEDPDREGLAETPARVARAYREMFAGLYMDPDTVLAKTFDESHEELVMVTDIPMYSCCEHHLLPFHGVAHVGYIPNEHGKVTGLSKLARLVDAYAKRPQVQERLTSQIADSLMRTLQPRGVIVVMEAEHLCMSMRGIRKPGARTTTSAVRGQFKTSASSRAEALDLIKARR

SEQ ID NO: 9344 - protein, 196 aa, Kibdelosporangium phytohabitans
  misc_feature (1)..(196): tr|A0A0N9HX76|A0A0N9HX76_9PSEU GTP cyclohydrolase 1 OS= Kibdelosporangium phytohabitans OX=860235 GN=folE PE=3 SV=1
MTLTDQALELDIRARAEDGVRALLELAGDDPDRAGLARTPARFVDAMLEMTAAPGDPAQFLAVQFEDVGQVDEMVHLGPIPFTSVCEHHILPFTGHAWVAYLPTAGRVVGLSKLARLVEHYARQLQVQERLTGQIVDTLIKHLDPRGAGVVLRATHACMAQRGISKPDAVMTTSALRRAFREQPAARAEFLSFATP

SEQ ID NO: 9345 - protein, 199 aa, Kibdelosporangium sp.
  misc_feature (1)..(199): tr|A0A0K3BKQ8|A0A0K3BKQ8_9PSEU GTP cyclohydrolase 1 OS= Kibdelosporangium sp. MJ126-NF4 OX=703222 GN=folE PE=3 SV=1
MRAGTALRVVHEPDSGIDLAAAEDAAAAFLRALGVSTDTESLRGTPGRMARAYAELFSPRPFDLTTFPNDEGYDELVLARAIPVRSVCEHHLLPFMGTAHVGYLPGERILGLSKLARIVEYFASRPQVQERLTKQVADWLDDHLRPRGVGVVIEAEHTCMTLRGVLASGSTTVTSTLLGSLRDDARSRQEFFALSGVHA

SEQ ID NO: 9346 - protein, 179 aa, Kibdelosporangium sp.
  misc_feature (1)..(179): tr|A0A0K3BEZ1|A0A0K3BEZ1_9PSEU GTP cyclohydrolase 1 OS= Kibdelosporangium sp. MJ126-NF4 OX=703222 GN=folE PE=3 SV=1
MRELLLACGEDPDRQGLAETPARVARAYREMFAGLYMDPDMVLAKTFDEAHEELVLVTDIPMYSTCEHHLVPFHGVAHVGYIPNEHGKVTGLSKLARLVDAFAKRPQVQERLTSQVADSLMRMLEPRGVIVVMEAEHLCMSMRGIRKPGARTTTSAVRGQFKTSASSRAEALDLIKARR

SEQ ID NO: 9347 - protein, 205 aa, Kiloniella litopenaei
  misc_feature (1)..(205): tr|A0A0M2R8A5|A0A0M2R8A5_9PROT GTP cyclohydrolase 1 OS= Kiloniella litopenaei OX=1549748 GN=folE PE=3 SV=1
MQSVSDKDSKVIRPSRDEALAAVETLLRWAGDDPTREGLLGTPDRVVRSYEEFFAGYNIEPRELLERTFEEVEGYDEIVLLRDIRFESHCEHHMAPIIGKAHVAYLPNNRVVGISKLARVIEAYAKRLQIQEKMTAQVANAINEVLQPKGVAVVIEAAHQCMTTRGVHKSGVTMVTSRMLGLFRTNPSTRREFLSLIGNPSSSAS

SEQ ID NO: 9348 - protein, 203 aa, Kiloniella litopenaei
  misc_feature (1)..(203): tr|A0A0M2RBR3|A0A0M2RBR3_9PROT GTP cyclohydrolase 1 OS= Kiloniella litopenaei OX=1549748 GN=folE PE=3 SV=1
MTKVAKPNVSSEHQNSPSREEAMQAVKTLISWAGDDPNREGLIDTPKRVINAYKEFFAGYGMNPDEILARTFEEVEGYDEMVIIKNVRLESHCEHHIVPILGKAHVAYIPDKRVVGISKLARLVDVYAKRLQTQETLTAQIADTLERVLKPRGVAVVIDAGHQCMTTRGIHKTETSTVTSRMLGLFRKDPRTRAEFMNLITKI

SEQ ID NO: 9349 - protein, 222 aa, Kiloniella sp.
  misc_feature (1)..(222): tr|A0A2D7AIJ1|A0A2D7AIJ1_9PROT GTP cyclohydrolase 1 OS= Kiloniella sp. OX=1938587 GN=folE PE=3 SV=1
MAPHESAAFFDADRDQVEETGEVVSPDNVVPIKGPEQPNRTEAEAAVKTLIAYTGEDAERPGVIETPKRVVKAFDEWFGGYQIDADTLLSKTFDEVEGYQDMVLLRDVPFHSHCEHHMAPIVGKAHVAYMPRGRVVGISKLARVVDAFARRFQIQERMTQEVAQTIDRVLQPAGVAVVIEAEHHCMTTRGIHTHGTVMHTKHLSGVFLEDPNLRREFFDALR

SEQ ID NO: 9350 - protein, 202 aa, Kiloniella spongiae
  misc_feature (1)..(202): tr|A0A0H2MFG6|A0A0H2MFG6_9PROT GTP cyclohydrolase 1 OS= Kiloniella spongiae OX=1489064 GN=folE PE=3 SV=1
MSDKDSKVIRPSRDEALAAVETLLRWAGDDPTREGLLGTPDRVVRSYEEFFAGYNVEPRELLERTFEEVEGYDEIVLLRDIRFESHCEHHMAPIIGKAHVAYLPNNRVVGISKLARVIEAYAKRLQIQEKMTAQVANAINEVLQPKGVAVVIEAAHQCMTTRGVHKSGVTMVTSRMLGLFRTNPSTRREFLSLIGNPSSSAS

SEQ ID NO: 9351 - protein, 205 aa, Kineococcus radiotolerans
  misc_feature (1)..(205): tr|A6W5D9|A6W5D9_KINRD GTP cyclohydrolase 1 OS=Kineococ cus radiotolerans (strain ATCC BAA-149 / DSM 14245 / SR S30216) OX=266940 GN=folE PE=3 SV=1
MSTSGAPVPDARTVPGVHDGPRAEAAVREFLLAIGEDPDREGLRETPARVARAAQELFAGLRQDPADVLATDFGLEHDELVLVKDIEVQSTCEHHLLPFHGVAHVGYIPGEHGRVTGLSKLARLVDVYARRPQLQERLTTQVADALVDGLHPRGVIVVVEAEHSCMTYRGVRKPGAKTITSAVRGALRNPATRAEAMSLIVAGHR

SEQ ID NO: 9352 - protein, 198 aa, Kineococcus rhizosphaerae
  misc_feature (1)..(198): tr|A0A2T0R5K2|A0A2T0R5K2_9ACTN GTP cyclohydrolase 1 OS= Kineococcus rhizosphaerae OX=559628 GN=folE PE=3 SV=1
MSDAPPVPGTFDRARAENAVREFLLAIGEDPDREGLRDTPQRVAKAATELFAGLWLEPADVLVTDFGLEHDELVLVKDIEVQSTCEHHLLPFHGVAHVGYIPGEHGRVTGLSKLARLVDVYARRPQLQERLTTQVADALVDHLRPRGAIVVVEAEHSCMTYRGVRKPGAKTVTSAVRGALRNAATRAEAMSLIVAGHR

SEQ ID NO: 9353 - protein, 177 aa, Kineococcus xinjiangensis
  misc_feature (1)..(177): tr|A0A2S6IGV7|A0A2S6IGV7_9ACTN GTP cyclohydrolase 1 OS= Kineococcus xinjiangensis OX=512762 GN=folE PE=3 SV=1
MRELLLAIGEDPDREGLRDTPQRVARAYREMFAGLWQDPTDVLVTDFGLEHDELVLVRDIEVQSMCEHHLLPFHGVAHVGYIPGEHGRVTGLSKLARLVDLYARRPQLQEQLTTQVADALMSRLHPRGAIVVVECEHFCMSYRGVRKDGARTVTSAVRGALRNPATRAEAMSLIVGR

SEQ ID NO: 9354 - protein, 197 aa, Kineosphaera limosa
  misc_feature (1)..(197): tr|K6X0U2|K6X0U2_9MICO GTP cyclohydrolase 1 OS=Kineosph aera limosa NBRC 100340 OX=1184609 GN=folE PE=3 SV=1
MTELTQPSPVDQPRIEAAVREILLAVGENPEREGLRDTPARVARAYAEIFSGLHMDPAEVLGTRFEIEHDELVLVRDIELYSTCEHHLVPFHGVAHIAYIPDRNGRVTGLSKLARLVEVYARRPQVQERLTSQVADALVDHLDAQGVLVVLECEHLCMSMRGVRKPGARTITSAVRGILHRPETRAEAMSLVLGGTR

SEQ ID NO: 9355 - protein, 185 aa, Kineothrix alysoides
  misc_feature (1)..(185): tr|A0A4R1QQ85|A0A4R1QQ85_9FIRM GTP cyclohydrolase 1 OS= Kineothrix alysoides OX=1469948 GN=folE PE=3 SV=1
MVNRKKIEEGVRLLLEGIGEDVTREGIADTPDRIARMYEEIFGGMEENAAEHLTKTFTAENNEMVIEKDIVFYSTCEHHMMPFYGKAHVAYIPDGKVTGISKLARTVEVYAKRLQIQEQMTAQIADAIMEYLNPQGVMVMIEAEHMCMTMRGVKKPGSKTVTFVTRGAFEENERLQNIFFQMIKQ

SEQ ID NO: 9356 - protein, 314 aa, Kingella denitrificans
  misc_feature (1)..(314): tr|F0EZT4|F0EZT4_9NEIS GTP cyclohydrolase FolE2 OS=King ella denitrificans ATCC 33394 OX=888741 GN=folE2 PE=3 S V=1
MPKYGEVIYCALLKTVAILICRKQEVQAAFNSIQNLCRIERYGCGALVHTNEELYGMNAIADVQSSQDLRNIPIDQVGIKDLRFPIRIQSQSGEQSTVARLTMTVFLPADQKGTHMSRFVALMEEQQAAFSAAELQRLTEKMLARLDSDAGKISASFPFFRTKTAPVSGIRSLLDYDVSLSCEIRNGAAKSSLHVVVPVTSLCPCSKEISQYGAHNQRSHVTVRLHTNAPVEIEEVLDWVEGQASCQLYGLLKRPDEKYVTERAYDNPKFVEDMVRDIALILQQDARIESFELESENFESIHNHSAYAVICWQR

SEQ ID NO: 9357 - protein, 310 aa, Kingella kingae
  misc_feature (1)..(310): tr|F5S821|F5S821_9NEIS GTP cyclohydrolase FolE2 OS=King ella kingae ATCC 23330 OX=887327 GN=folE2 PE=3 SV=1
MSAVQSDSIAERADNIEIFSSVREAHHEEMRKRWGFAKVSGCNQHIHKEINRMSAIADVQSSKDLRNIPINQVGIKDLRFPIRVQSAQGEQHTVARLTMTVFLPADQKGTHMSRFVALMEEQQLAFNAHNLRDLTAQMVAKLDSHSGKISATFPFFRTKTAPVSGIQSLLDYDVTLSCEIVQGKAQSSLRVLVPVTSLCPCSKEISQYGAHNQRSHVTVSLNTNAPVEVEEVLDWVEQQASCQLYGLLKRPDEKFVTERAYENPKFVEDMVRDVATILQQDSRIDSFVLESENFESIHNHSAYAVIEWAR

SEQ ID NO: 9358 - protein, 258 aa, Kingella negevensis
  misc_feature (1)..(258): tr|A0A238T9E9|A0A238T9E9_9NEIS GTP cyclohydrolase FolE2 OS=Kingella negevensis OX=1522312 GN=folE2 PE=3 SV=1
MNEIPDIQSSKDLRNIPINQVGIKDLRFPVSVRSQSGEQATVARFTMTVFLPAEQKGTHMSRFVALLEEFDSVLDWGSLKTLTLEMLARLDSHAGKLSVSFPFFRKKSAPVSGIESLLDYDVSLTGEVSAKGEYSGSLKVLIPVTSLCPCSKEISQYGAHNQRSHVTVSLQCVENVAVEEVLDWVEAQASSQLYGLLKRPDEKFVTERAYENPKFVEDMVRDIAAVLLADKRISAFTVESENFESIHNHSAYALIQYP

SEQ ID NO: 9359 - protein, 250 aa, Kingella negevensis
  misc_feature (1)..(250): tr|A0A238HET3|A0A238HET3_9NEIS Putative GTP cyclohydrol ase 1 type 2 OS=Kingella negevensis OX=1522312 GN=KEBUR ONENSIS_00960 PE=4 SV=1
MNSRQTLLTWCDQTLQTTQFKDYAPNGLQVEGKNEIRKIITAVTASRAAIEFAAEQGADMLLVHHGMFWKSEPVTITGWKKQRIATLLKHQINLVGYHLPLDAHPTLGNNTQLAAQMSWQPENAFGEQNLLNIGSLPENQQTLADLAAQLKTVLQREPVVVGNLSGSLKKVAWCTGGAQGFFQAAIDAGADVFITGEISEAQYHLANETGVAFVSAGHHATERYGVQALGKAIAEEFGLDVQFFDESNPA

SEQ ID NO: 9360 - protein, 254 aa, Kingella oralis
  misc_feature (1)..(254): tr|C4GK71|C4GK71_9NEIS GTP cyclohydrolase FolE2 OS=King ella oralis ATCC 51147 OX=629741 GN=folE2 PE=3 SV=1
MPDVQSTPDVRNIPIDQVGIKDLRFPVRIRSQAGEQATVARISMTVSLPAEQKGTHMSRFVALMEEHRAALDFATLEALTGNMLARLEANAGKISIAFPFFRQKAAPVSGCLSLMDYDVTLIGEMREHAFIGSLKIVIPVTSLCPCSKEISDYGAHNQRSHVTLTLRCREAVAIEEAIDWVENQASCQLYGLLKRPDEKFVTEHAYENPKFVEDMVRDIATVLKQDPRIAAFTVESENFESIHNHSAYALVAFP

SEQ ID NO: 9361 - protein, 257 aa, Kingella potus
  misc_feature (1)..(257): tr|A0A377QZB7|A0A377QZB7_9NEIS GTP cyclohydrolase FolE2 OS=Kingella potus OX=265175 GN=folE2 PE=3 SV=1
MSAIADVQSSKDLRNLPINQVGIKDLRFPVQILTASGIQSTIARLTMTVRLPADQKGTHMSRFVALMESRQRPLDYGELQNLTQQMLELLDADAGEISISFPFFRSKSAPVSGIRSLLDYDVGLSGRVAGGAYSYGLKVLVPVTSLCPCSKEISQYGAHNQRSHVTVSLICRQDVPPEDIIDIVEEQASCQLYGLLKRPDEKYVTERAYENPKFVEDMVRDVAVALRGDPRIESFTVESENFESIHNHSAYACIAYP

SEQ ID NO: 9362 - protein, 314 aa, Kiritimatiella glycovorans
  misc_feature (1)..(314): tr|A0A0G3EJ57|A0A0G3EJ57_9BACT GTP cyclohydrolase FolE2 OS=Kiritimatiella glycovorans OX=1307763 GN=folE2 PE=3 SV=1
MPISCLSLAFPFMPFPPSWLTSFLSPPFPPFLPLDNRAECVSMGPPIRTAADMKDTQNSPDFRNMPIRKVGIKGLRYPIIVKDRQYESQHTVARVNMYVDLPHHFKGTHMSRFVEILNQYHGRISIHKLEGILRAMIRTLDSRTAHLEIRFPYFIEKQAPVSGAVSLMDYDCAFIASLDTNGEEHPPDLVVEVDVPVCTLCPCSKAISTDGAHNQRSSIRIQIRSQAMVWIEDLIEIAESEASAPLYSLLKREDEKAVTEQAYRNPRFVEDVVRGVGVRLKEDPRIDWYRVESENAESIHNHSAYALVEPEKRR

SEQ ID NO: 9363 - protein, 180 aa, Kiritimatiellaceae bacterium
  misc_feature (1)..(180): tr|A0A2E0R8C3|A0A2E0R8C3_9BACT GTP cyclohydrolase 1 OS= Kiritimatiellaceae bacterium OX=2026752 GN=folE PE=3 SV =1
MNKEYLNIIKQIGEDPQREGLLKTADRAAEAMKFLTDGYRQNLEEVINDAVFTVEDNHMIIVKDIELYSLCEHHMLPFFGKCHIGYIPNGKVLGVSKLARIVDLFSRRLQIQERLTHQVAKTISTRLEADGVGVVIEAQHLCMMMRGVEKQNSNMVTSAMLGSFRRDASTRNEFLKLIGS

SEQ ID NO: 9364 - protein, 194 aa, Kiritimatiellaceae bacterium
  misc_feature (1)..(194): tr|A0A2E1U5D1|A0A2E1U5D1_9BACT GTP cyclohydrolase 1 OS= Kiritimatiellaceae bacterium OX=2026752 GN=folE PE=3 SV =1
MVLSPPYKSSSETLMNKEYLNIIKHIGEDPQREGLLKTADRAAEAMKFLTDGYRQNLEEVINDAVFTVEDNHMIIVKDIELYSLCEHHMLPFFGKCHIGYIPNGKVLGVSKLARIVDLFSRRLQIQERLTHQVAKTISTRLEADGVGVVIEAQHLCMMMRGVEKQNSNMVTSAMLGSFRRDASTRNEFLKLIGS

SEQ ID NO: 9365 - protein, 201 aa, Kitasatospora albolonga
  misc_feature (1)..(201): tr|A0A1V0V7K4|A0A1V0V7K4_9ACTN GTP cyclohydrolase 1 OS= Kitasatospora albolonga OX=68173 GN=folE PE=3 SV=1
MTDPVTLDGQGSIGEFDEKRAEAAVRELLIAVGEDPDREGLRETPGRVARAYKEIFAGLYQQPEDVLTTTFDLGHDEMVLVKDIEVFSTCEHHLVPFRGVAHVGYIPASTGKITGLSKLARLVDVYARRPQVQERLTTQIAESLMEILEPRGVIVVVECEHMCMSMRGIRKPGAKTLTSAVRGQLRDPATRAEAMSLIMAR

SEQ ID NO: 9366 - protein, 214 aa, Kitasatospora atroaurantiaca
  misc_feature (1)..(214): tr|A0A561EIX5|A0A561EIX5_9ACTN GTP cyclohydrolase 1 OS= Kitasatospora atroaurantiaca OX=285545 GN=folE PE=3 SV= 1
MTTRLHPAPAGPQKPPMRTGPALRVVHETGAVDLAAAEDAAAAFLHALGIPTDSESLRGTPGRMARAYAELFSPRPFDLTTFPNDEGYDELVLARSIPVRSVCEHHLLPFVGTAHVGYLPGTRILGLSKLARVVEHFACRPQVQERLTKQVADWLQAHLDPKGVGVVIEAEHTCMTLRGVQATGSRTMTSTLLGILREDARSRAEFLALTGLPT

SEQ ID NO: 9367 - protein, 201 aa, Kitasatospora atroaurantiaca
  misc_feature (1)..(201): tr|A0A561ETM4|A0A561ETM4_9ACTN GTP cyclohydrolase 1 OS= Kitasatospora atroaurantiaca OX=285545 GN=folE PE=3 SV= 1
MIDPVTLEQDATIGTFDQKRAENAVRELLIAVGEDPDREGLLETPARVARAYKEIFAGLWQEPEDVLTTTFDLGHDEMVLVKDIEVFSTCEHHLVPFQGVAHVGYIPSVQGKITGLSKLARLVDVYARRPQVQERLTSQVADSLMRILEPRGAIVVIECEHMCMSMRGIRKPGAKTITSAVRGQLRDPATRAEAMSLIIGR

SEQ ID NO: 9368 - protein, 201 aa, Kitasatospora aureofaciens
  misc_feature (1)..(201): tr|A0A1E7N778|A0A1E7N778_KITAU GTP cyclohydrolase 1 OS= Kitasatospora aureofaciens OX=1894 GN=folE PE=3 SV=1
MIDPVTLDGPPAVGTFDQKRAENAIRELLLAVGEDPDREGLLETPARVARAYKEIFAGLWQVPEDVLTTTFDLGHDEMVLVKDIELTSVCEHHLVPFRGVAHVGYIPSTSGKITGLSKLARLVDVYARRPQVQERLTSQVADALMRILEPRGAIVVVECEHMCMSMRGIRKPGAKTITSCVRGQLRDPATRAEAMSLIIGR

SEQ ID NO: 9369 - protein, 201 aa, Kitasatospora aureofaciens
  misc_feature (1)..(201): tr|A0A0L8NYR1|A0A0L8NYR1_KITAU GTP cyclohydrolase 1 OS= Kitasatospora aureofaciens OX=1894 GN=folE PE=3 SV=1
MTDPVTLDGDGKIGEFDEKRAENAVRELLIAVGEDPDREGLLETPARVARAYKEILAGLRQEPEDVLTTTFDLGHDEMVLVKDIEIVSLCEHHLLPFHGVAHVGYIPAESGKITGLSKLARLVEVFARRPQVQERLTTQIADSLMRILEARGAIVVIEAEHMCMSVRGIRKPGAKTTTSAVRGQLRDSTTRSEAMSLILAR

SEQ ID NO: 9370 - protein, 201 aa, Kitasatospora cheerisanensis
  misc_feature (1)..(201): tr|A0A066YR71|A0A066YR71_9ACTN GTP cyclohydrolase 1 OS= Kitasatospora cheerisanensis KCTC 2395 OX=1348663 GN=fo lE PE=3 SV=1
MIDPVTLDGEPPVGEFDQKRAENAVRELLIAVGEDPDREGLLETPARVARAYREIFAGLWQQPEDVLTTTFDLGHDEMVLVKDIEVYSTCEHHLVPFRGVAHVGYIPSVSGKITGLSKLARLVDVYARRPQVQERLTSQVADALMRILEPRGAIVVIECEHMCMSMRGIRKPGATTVTSAVRGQLRDPATRAEAMSLIIGR

SEQ ID NO: 9371 - protein, 201 aa, Kitasatospora cineracea
  misc_feature (1)..(201): tr|A0A3N1YYG5|A0A3N1YYG5_9ACTN GTP cyclohydrolase 1 OS= Kitasatospora cineracea OX=88074 GN=folE PE=3 SV=1
MIDPVTLDGETPVREFDQKRAENAVRELLLAVGEDPDREGLLETPARVARAYREIFAGLWQQPEDVLTTTFDLGHDEMVLVKDIEVFSTCEHHLVPFRGVAHVGYIPSTSGKITGLSKLARLVDVYARRPQVQERLTSQVADALMRILEPRGAIVVFECEHMCMSMRGIRKPGAKTITSAVRGQLRDPATRNEAMSLIIGR

SEQ ID NO: 9372 - protein, 197 aa, Kitasatospora cineracea
  misc_feature (1)..(197): tr|A0A3N1YWY2|A0A3N1YWY2_9ACTN GTP cyclohydrolase 1 OS= Kitasatospora cineracea OX=88074 GN=folE PE=3 SV=1
MTSTDNTIDLARAAEHAAGLFAALGIPCDTESTAATPARVAKALAELTAGQHLDPTRHLAVTFPPEGQRAGLIAAVDVPFTALCEHHGLPFTGRAAVAYLPVPGARIVGLSKLARLLQEFAARPQVQERLGEQVVEALGAHLDVQGAACLIRSVHACMTLRGARAHGAAMVTTHLTGALHADPAHRAEVLALMPPSP

SEQ ID NO: 9373 - protein, 201 aa, Kitasatospora griseola
  misc_feature (1)..(201): tr|A0A0D0PXD5|A0A0D0PXD5_KITGR GTP cyclohydrolase 1 OS= Kitasatospora griseola OX=2064 GN=folE PE=3 SV=1
MIDPVTLDGEFPVGEFDQKRAENAVRELLIAVGEDPDREGLLETPARVARAYREIFAGLWQQPEDVLTTTFDLGHDEMVLVKDIEVFSTCEHHLVPFRGVAHVGYIPATTGKITGLSKLARLVDVFARRPQVQERLTSQVADALMRILEPRGAIVVIECEHMCMSMRGIRKPGATTVTSAVRGQLRDPATRAEAMSLIIGR

SEQ ID NO: 9374 - protein, 201 aa, Kitasatospora niigatensis; identical to SEQ ID NO: 9371
  misc_feature (1)..(201): tr|A0A3N4RQA2|A0A3N4RQA2_9ACTN GTP cyclohydrolase 1 OS= Kitasatospora niigatensis OX=88075 GN=folE PE=3 SV=1

SEQ ID NO: 9375 - protein, 201 aa, Kitasatospora setae
  misc_feature (1)..(201): tr|E4NF86|E4NF86_KITSK GTP cyclohydrolase 1 OS=Kitasato spora setae (strain ATCC 33774 / DSM 43861 / JCM 3304 / KCC A-0304 / NBRC 14216 / KM-6054) OX=452652 GN=folE P E=3 SV=1
MIDPVTLDGEQPVREFDQKRAENAVRELLIAVGEDPDREGLLETPARVARAYREIFAGLWQRPEDVLTTTFDLGHDEMVLVKDIEVFSTCEHHLVPFRGVAHVGYIPSASGKITGLSKLARLVDVYARRPQVQERLTSQVADALMRILEPRGAIVVIECEHMCMSMRGIRKPGAKTLTSAVRGQLRDPATRNEAMSLIIGR

SEQ ID NO: 9376 - protein, 202 aa, Kitasatospora sp.
  misc_feature (1)..(202): tr|A0A0Q8PBZ3|A0A0Q8PBZ3_9ACTN GTP cyclohydrolase 1 OS= Kitasatospora sp. Root187 OX=1736486 GN=folE PE=3 SV=1
MIDPVTLEQDAAAIGTFDQKRAENAVRELLIAVGEDPDREGLLETPARVARAYQEIFAGLWQEPEDVLTTTFDLGHDEMVLVKDIEVFSTCEHHLVPFRGVAHVGYIPSPSGKITGLSKLARLVDVYARRPQVQERLTSQVADSLMRILEPRGAIVVIECEHMCMSMRGIRKAGAKTITSAVRGQLRDPATRAEAMSLIIGR

SEQ ID NO: 9377 - protein, 201 aa, Kitasatospora sp.
  misc_feature (1)..(201): tr|A0A2H5B3W2|A0A2H5B3W2_9ACTN GTP cyclohydrolase 1 OS= Kitasatospora sp. MMS16-BH015 OX=2018025 GN=folE PE=3 S V=1
MIDPVTLDGEATVGQFDQKRAENAVRELLIAVGEDPDREGLLETPARVARAYKEIFAGLWQQPEDVLSTTFDLGHDEMVLVKDIEVYSTCEHHLVPFRGVAHVGYIPSTSGKITGLSKLARLVDVYARRPQVQERLTTQVADALMRILEPRGVIVVIECEHMCMSMRGIRKPGAKTITSAVRGQLRDPATRNEAMSLIIGR

SEQ ID NO: 9378 - protein, 201 aa, Kitasatospora viridis
  misc_feature (1)..(201): tr|A0A561UGI6|A0A561UGI6_9ACTN GTP cyclohydrolase 1 OS= Kitasatospora viridis OX=281105 GN=folE PE=3 SV=1
MIDPVTLDGQSVIGTFDQKRAENAVRELLIAVGEDPDREGLLDTPARVARAYKEIFAGLWQQPEDVLTTTFDLGHDEMVLVKDIEVFSTCEHHLVPFQGVAHVGYIPAATGKITGLSKLARLVDVFARRPQVQERLTSQVADSLMRILEPRGAIVVIECEHMCMSMRGIRKPGAKTLTSAVRGQLRDPATRAEAMSLIMSR

SEQ ID NO: 9379 - protein, 198 aa, Kitasatospora xanthocidica
  misc_feature (1)..(198): tr|A0A373A511|A0A373A511_9ACTN GTP cyclohydrolase I Fol E OS=Kitasatospora xanthocidica OX=83382 GN=folE PE=4 S V=1
MTSIPVQSQNRRPVDRVRAQELTRELLLALGEDPDRDGLQDTPRRFADWWGEFLDHDAGRLDTSFAQEGRYGDFVLLTGIEAWSVCEHHLLPFRLDVSVAYVPDTAVLGLSKLVRHLEARTHALQLQERITHDVAHDLAKAAATDDVAVFTTGEHLCMSMRGVKATAVRSTTMCRLGRTESDPDLAARIERLALPVRL

SEQ ID NO: 9380 - protein, 197 aa, Kitasatospora xanthocidica
  misc_feature (1)..(197): tr|A0A373A1P8|A0A373A1P8_9ACTN GTP cyclohydrolase 1 OS= Kitasatospora xanthocidica OX=83382 GN=folE PE=3 SV=1
MTTPANTADLARAVEHAAGLLAALGIPCDTESTAATPRRMAKALAELTAGVRLDPARHLAVTFPPEGERAGLIAAVDVPFTALCEHHVLPFTGRAAVAYLPTPGARIVGLSKLARLVQEFAARPQVQERLGQQVVDALGAHLDIQGAGCLIRSQHACMTARGARAHGAAMVTTHLTGALHADLARRAEVLALMPPPA

SEQ ID NO: 9381 - protein, 222 aa, Klebsiella aerogenes
  misc_feature (1)..(222): tr|A0A3S4MKM7|A0A3S4MKM7_KLEAE GTP cyclohydrolase 1 OS= Klebsiella aerogenes OX=548 GN=folE PE=3 SV=1
MSSLSKEAVLVHEALVARGLETPMRAPVQEIDNETRKRLITGHMTEIMQLLNLDLSDDSLMETPHRIAKMYVDEIFSGLDYSRFPKITVIENKMKVDEMVTVRDITLTSTCEHHFVTIDGKATVAYIPKDSVIGLSKINRIVQFFAQRPQVQERLTQQILIALQTLLGTNNVAVSIDAVHYCVKARGIRDATSATTTTSLGGLFKSSQNTRQEFLRAVRHHD

SEQ ID NO: 9382 - protein, 311 aa, Klebsiella aerogenes
  misc_feature (1)..(311): tr|A0A0F0YQJ4|A0A0F0YQJ4_KLEAE GTP cyclohydrolase FolE2 OS=Klebsiella aerogenes OX=548 GN=folE2 PE=3 SV=1
MSIAAKQTLCPGMLPDIQSTKGDGEGESLSWVGMEQIDLPIDIAGRPVSAKVNAGINLLSSPEAEKGIHMSRLYLLLDELTQGEITPALLQHVLKAFLVSHQGRSDEASIEISGDLLLSRKSLNSNHSGWKAYPLTLSAELRQSFTVTLKVGIPYSSTCPASAALSRHVAGLQFSKDFGNRIDRLPAAEIADWLVEKGMPATPHSQRSWAWVSIRLNPEAKSLPVIELIDYAEVALGTAVQTVVKRSDEQAFAVANGQNLMFCEDAARRLNNVFRCAPFCEAFDIRVEHQESLHPHNAVARIHWKGSKNVT

SEQ ID NO: 9383 - protein, 222 aa, Klebsiella grimontii
  misc_feature (1)..(222): tr|A0A285B6M5|A0A285B6M5_9ENTR GTP cyclohydrolase 1 OS= Klebsiella grimontii OX=2058152 GN=folE PE=3 SV=1
MSSLSKEAILVHEALVARGLETPLRPPVQEIDNETRKRLIAGHMTEIMQLLNLDLSDDSLMETPHRIAKMYVDEIFSGLDYARFPKITVIENKMQVDEMVTVRDITLTSTCEHHFVTIDGKATVAYIPKDSVIGLSKINRIVQFFSQRPQVQERLTQQILTALQTLLGTSNVAVSIDAVHYCVKARGIRDATSATTTTSLGGLFKSSQNTRQEFLRAVRHHN

SEQ ID NO: 9384 - protein, 312 aa, Klebsiella michiganensis
  misc_feature (1)..(312): tr|A0A0D5WS43|A0A0D5WS43_9ENTR GTP cyclohydrolase FolE2 OS=Klebsiella michiganensis OX=1134687 GN=folE2 PE=3 S V=1
MRYMTVTPMLCPKTLPDIQSLRSHEFDTALSWVGMEKIDLPVEVAGRPMTAKVNAGINLLSSPEAEKGIHMSRIYLLLDELTQGEITPAVLRHLLGEFLVSHQRSSDRASVEITGELLLSRKSLISNHFGWKAYPISILAECGKSFAVTIRVGIPYSSTCPASAALSRNLAQQQFLRDFGSRHDGVSVEEMMAWLGEKGMPGTPHSQRSWAWISSQLKPDVATLPFLALIDLGEATLGTAVQTVVKRGDEQAFAWANGQNLMFCEDAARRLNKAMLDAPFSEAFSLRVEHQESLHAHNAVARIHWTGNHHVA

SEQ ID NO: 9385 - protein, 222 aa, Klebsiella michiganensis; identical to SEQ ID NO: 9383
  misc_feature (1)..(222): tr|H3N002|H3N002_9ENTR GTP cyclohydrolase 1 OS=Klebsiel la michiganensis OX=1134687 GN=folE PE=3 SV=1

SEQ ID NO: 9386 - protein, 308 aa, Klebsiella oxytoca
  misc_feature (1)..(308): tr|A0A170C9N0|A0A170C9N0_KLEOX GTP cyclohydrolase FolE2 OS=Klebsiella oxytoca OX=571 GN=folE2 PE=3 SV=1
MNEVALPPRRSLPDAQAWRGEMSDVGLDWVGMQGIALPLELAGKPLMAKVDAGINLRAEAAGERGIHMSRLYLALDELTQGELTPQRIGRTLQAFLDSQPEHSDRAKLAIGGELLLSRPALLSPQRGWKAYPLRIEATLTNRLTLALTVGVPYSSTCPSSAALSRQLAQQQFQFDFEQAAERVSQRQVSEWLLEQGMPATPHSQRSWAWVTVTPENERAFEPVKLIDRIEHALGTPVQTLVKRRDEQAFALANGQNLMFCEDAARRLYRMLRSQCDYRAFSLRVEHQESLHAHNAVAELSWPGENHAA

SEQ ID NO: 9387 - protein, 222 aa, Klebsiella oxytoca; identical to SEQ ID NO: 7955
  misc_feature (1)..(222): tr|A0A181WMA5|A0A181WMA5_KLEOX GTP cyclohydrolase 1 OS= Klebsiella oxytoca OX=571 GN=folE PE=3 SV=1

SEQ ID NO: 9388 - protein, 222 aa, Klebsiella pneumoniae
  misc_feature (1)..(222): sp|B5XP57|GCH1_KLEP3 GTP cyclohydrolase 1 OS=Klebsiella pneumoniae (strain 342) OX=507522 GN=folE PE=3 SV=1
MSSLSKEAVLVHEALVARGLETPMRAPVQEIDNETRKRLITGHMTEIMQLLNLDLSDDSLMETPHRIAKMYVDEIFSGLDYSRFPKITVIENKMKVDEMVTVRDITLTSTCEHHFVTIDGKATVAYIPKDAVIGLSKINRIVQFFAQRPQVQERLTQQILIALQTLLGTSNVAVSIDAVHYCVKARGIRDATSATTTTSLGGLFKSSQNTRQEFLRAVRHHN

SEQ ID NO: 9389 - protein, 222 aa, Klebsiella pneumoniae
  misc_feature (1)..(222): tr|W8UX47|W8UX47_KLEPN GTP cyclohydrolase 1 OS=Klebsiel la pneumoniae 30684/NJST258_2 OX=1420013 GN=folE PE=3 S V=1
MSSLSKEAVLVHEALVARGLETPMRAPVQEIDNETRKRLITGHMTEIMQLLNLDLSDDSLMETPHRIAKMYVDEIFSGLDYSRFPKITVIENKMKVDEMVTVRDITLTSTCEHHFVTIDGKATVAYIPKDSVIGLSKINRIVQFFAQRPQVQERLTQQILIALQTLLGTNNVAVSIDAVHYCVKARGIRDATSATTTTSLGGLFKSSQNTRQEFLRAVRHHN

SEQ ID NO: 9390 - protein, 222 aa, Klebsiella quasipneumoniae
  misc_feature (1)..(222): tr|A0A2A5MJD0|A0A2A5MJD0_9ENTR GTP cyclohydrolase 1 OS= Klebsiella quasipneumoniae OX=1463165 GN=folE PE=3 SV=1
MSSLSKEAVLVHEALVARGLETPMRAPVQEIDNETRKRLITGHMTEIMQLLNLDLSDDSLMETPHRIAKMYVDEIFSGLDYSRFPKITVIENKMKVDEMVTVRDITLTSTCEHHFVTIDGKATVAYIPKDSVIGLSKINRIVQFFAQRPQVQERLTQQILIALQTLLGTSNVAVSIDAVHYCVKARGIRDATSATTTTSLGGLFKSSQNTRQEFLRAVRHHS

SEQ ID NO: 9391 - protein, 222 aa, Klebsiella quasipneumoniae; identical to SEQ ID NO: 9390
  misc_feature (1)..(222): tr|A0A5C6ITY9|A0A5C6ITY9_9ENTR GTP cyclohydrolase 1 OS= Klebsiella quasipneumoniae subsp. similipneumoniae OX=1 463164 GN=folE PE=3 SV=1

SEQ ID NO: 9392 - protein, 222 aa, Klebsiella quasivariicola
  misc_feature (1)..(222): tr|A0A223U8Q7|A0A223U8Q7_9ENTR GTP cyclohydrolase 1 OS= Klebsiella quasivariicola OX=2026240 GN=folE PE=3 SV=1
MSSLSKEAVLVHEALVARGLETPMRAPVQEIDNETRKRLITGHMTEIMQLLNLDLSDDSLMETPHRIAKMYVDEIFSGLDYSRFPKITVIENKMKVDEMVTVRDITLTSTCEHHFVTIDGKATVAYIPKDSVIGLSKINRIVQFFAQRPQVQERLTQQILIALQTLLGTSNVAVSIDAVHYCVKARGIRDATSATTTTSLGGLFKSSQNTRQEFLRAVRHHN

SEQ ID NO: 9393 - protein, 222 aa, Klebsiella sp.; identical to SEQ ID NO: 9390
  misc_feature (1)..(222): tr|A0A3T0QLS0|A0A3T0QLS0_9ENTR GTP cyclohydrolase 1 OS= Klebsiella sp. LY OX=2015795 GN=folE PE=3 SV=1

SEQ ID NO: 9394 - protein, 222 aa, Klebsiella sp.; identical to SEQ ID NO: 9388
  misc_feature (1)..(222): tr|A0A3G5D2B0|A0A3G5D2B0_9ENTR GTP cyclohydrolase 1 OS= Klebsiella sp. P1CD1 OX=2267618 GN=folE PE=3 SV=1

SEQ ID NO: 9395 - protein, 222 aa, Klebsiella variicola
  misc_feature (1)..(222): tr|A0A2N4YYV3|A0A2N4YYV3_KLEVA GTP cyclohydrolase 1 OS= Klebsiella variicola OX=244366 GN=folE PE=3 SV=1
MSSLSKEAVLVHEALVARGLETPMRAPVQEIDNETRKRLITGHMTEIMQLLNLDLSDDSLMETPHRIAKMYVDEIFSGLDYSRFPKITVIENKMKVDEMVTVRDITLTSTCEHHFVTIDGKATVAYIPKDAVIGLSKINRIVQFFAQRPQVQERLTQQILIALQTLLGTSNVAVSIDAVHYCVKARGIRDATSATTTTSLGGLFKSSQNTRQEFLRAVRHHT

SEQ ID NO: 9396 - protein, 222 aa, Klebsiella variicola; identical to SEQ ID NO: 9388
  misc_feature (1)..(222): tr|A0A087FM50|A0A087FM50_KLEVA GTP cyclohydrolase 1 OS= Klebsiella variicola OX=244366 GN=folE PE=3 SV=1

SEQ ID NO: 9397 - protein, 204 aa, Klenkia brasiliensis
  misc_feature (1)..(204): tr|A0A1G7M8W7|A0A1G7M8W7_9ACTN GTP cyclohydrolase 1 OS= Klenkia brasiliensis OX=333142 GN=folE PE=3 SV=1
MIDHTVDPHPVPHDQDGVDHARAEAAVRELLLAVGEDPDRPGLRETPARVARAYAETFAGLRQDPATILSTTFDEDHDELVLVKDIPMYSTCEHHLVPFHGVAHIGYIPGQDGRVTGLSKLARLVEVYARRPQVQERMTKQIADAMVESLHPRGVIVVVEAEHLCMAMRGVRKPGSRTMTSAVRGVFKQSAATRAEALSLVLGR

SEQ ID NO: 9398 - protein, 204 aa, Klenkia marina
  misc_feature (1)..(204): tr|A0A1G4XDW6|A0A1G4XDW6_9ACTN GTP cyclohydrolase 1 OS= Klenkia marina OX=1960309 GN=folE PE=3 SV=1
MIDPTVDPRPVPHDQDGVDHARAEAAVRELLIAVGEDPDRPGLQETPARVARAYAEVFAGLRQDPVQILSTTFDEDHDELVLVRDIALYSTCEHHLVPFHGVAHIGYIPGADGRVTGLSKLARLVEVYARRPQVQERMTKQIADAMVDSLHPRGVIVVIEAEHLCMAMRGVRKPGARTTTSAVRGIFKESASTRAEALSLVLGR

SEQ ID NO: 9399 - protein, 204 aa, Klenkia soli
  misc_feature (1)..(204): tr|A0A1H0NGY6|A0A1H0NGY6_9ACTN GTP cyclohydrolase 1 OS= Klenkia soli OX=1052260 GN=folE PE=3 SV=1
MIDHSVDPRPVPHAEDGVDHARAEAAVRELLIAVGEDPDRPGLRETPARVARAYAETFAGLRQDPVQVLSTVFDEDHDELVLVRDIALYSTCEHHLVPFHGVAHIGYIPGADGRVTGLSKLARLVEVFARRPQVQERMTKQIADAMMTGLQPRGVIVVVEAEHLCMAMRGVRKPGTRTLTSAVRGIFKESQATRSEAMSLVLGR

SEQ ID NO: 9400 - protein, 204 aa, Klenkia taihuensis
  misc_feature (1)..(204): tr|A0A1I1NGZ4|A0A1I1NGZ4_9ACTN GTP cyclohydrolase 1 OS= Klenkia taihuensis OX=1225127 GN=folE PE=3 SV=1
MIDHSVDPRPVPHSEDGVDHARAEAAVRELLLAVGEDPDRPGLRETPARVARAYAETFAGLRQDPATILSTTFDEDHDELVLVKDIPMYSTCEHHLVPFHGVAHIGYIPGSDGRVTGLSKLARLVEVYARRPQVQERMTKQIADAMVSSLHPRGVIVVVEAEHLCMAMRGVRKPGSRTMTSAVRGVFKESAATRAEALSLVLGR

SEQ ID NO: 9401 - protein, 192 aa, Klugiella xanthotipulae
  misc_feature (1)..(192): tr|A0A543I5P1|A0A543I5P1_9MICO GTP cyclohydrolase 1 OS= Klugiella xanthotipulae OX=244735 GN=folE PE=3 SV=1
MNESRIDKARIEAAVAEILAAIGEDLDRPGLQTTPARVAEACTDFFSGVGEDAEAHLADSIPVGEDTGDLVMLRDIQFRSMCEHHLLPFQGVAHIAYQPDKRVVGLGALPRLLASLAARPQVQERLTEQVANSLESALHPHGVFVLIEASHGCVTARGPRQLGSTTVTMAGRGRLGEPAQRAELIALIGGSE

SEQ ID NO: 9402 - protein, 222 aa, Kluyvera ascorbata
  misc_feature (1)..(222): tr|A0A2T2Y8F0|A0A2T2Y8F0_9ENTR GTP cyclohydrolase 1 OS= Kluyvera ascorbata OX=51288 GN=folE PE=3 SV=1
MSSLSKEAVLVHEALVARGLETPLRPPVREMDNETRKRLIAGHMTEIMQLLNLDLSDDSLMETPHRIAKMYVNEIFSGLDYANFPKITVIENKMKVDEMVTVRDITLTSTCEHHFVTIDGKATVAYIPKDSVIGLSKINRIVQFFAQRPQVQERLTQQILTALQTLLGTNNVAVSIDAVHYCVKARGIRDATSATTTTSLGGLFKSSQNTRQEFLRAVRHHN

SEQ ID NO: 9403 - protein, 222 aa, Kluyvera ascorbata
  misc_feature (1)..(222): tr|A0A378GK19|A0A378GK19_9ENTR GTP cyclohydrolase 1 OS= Kluyvera ascorbata OX=51288 GN=folE PE=3 SV=1
MSSLSKEAVLVHEALVARGLETPLRPSEREMDNETRKRLITGHMTEIMQLLNLDLSDDSLMETPHRIAKMYVDEIFSGLDYANFPKITVIENKMKVDEMVTVRDITLTSTCEHHFVTIDGKATVAYIPKDSVIGLSKINRIVQFFAQRPQVQERLTQQILTALQTLLGTNNVAVSIDAVHYCVKARGIRDATSATTTTSLGGLFKSSQNTRQEFLRAVRHHN

SEQ ID NO: 9404 - protein, 222 aa, Kluyvera cryocrescens
  misc_feature (1)..(222): tr|A0A2X3GB20|A0A2X3GB20_KLUCR GTP cyclohydrolase 1 OS= Kluyvera cryocrescens OX=580 GN=folE PE=3 SV=1
MSSLSKEAVLVHEALVARGLETPLRPPVREMDNETRKNLISGHMTEIMQLLNLDLSDDSLMETPRRIAKMYVDEIFSGLDYANFPKITVIENKMKVDEMVTVRDITLTSTCEHHFVTIDGKATVAYIPKDSVIGLSKINRIVQFFAQRPQVQERLTQQILTALQTLLGTNNVAVSIDAVHYCVKARGIRDATSATTTTSLGGLFKSSQNTRQEFLRAVRHHN

SEQ ID NO: 9405 - protein, 222 aa, Kluyvera georgiana
  misc_feature (1)..(222): tr|A0A1B7K2F2|A0A1B7K2F2_9ENTR GTP cyclohydrolase 1 OS= Kluyvera georgiana ATCC 51603 OX=1354264 GN=folE PE=3 S V=1
MSSLSKEAVLVHEALVARGLETPLRPPVREMDNETRKRLITGHMTEIMQLLNLDLSDDSLMETPRRIAKMYVDEIFSGLDYANFPKITVIENKMKVDEMVTVRDITLTSTCEHHFVTIDGKATVAYIPKDSVIGLSKINRIVQFFAQRPQVQERLTQQILTALQTLLGTNNVAVSIDAVHYCVKARGIRDATSATTTTSLGGLFKSSQNTRQEFLRAVRHHN

SEQ ID NO: 9406 - protein, 222 aa, Kluyvera intermedia
  misc_feature (1)..(222): tr|A0A3S4IAZ4|A0A3S4IAZ4_KLUIN GTP cyclohydrolase 1 OS= Kluyvera intermedia OX=61648 GN=folE PE=3 SV=1
MSSLSKEAVLVHEALVARGLETPLRPPVREMDNETRKQLISGHMTEIMQLLNLDLSDDSLMETPRRIAKMYVDEIFSGLDYANFPKITVIENKMKVDEMVTVRDITLTSTCEHHFVTIDGKATVAYIPKESVIGLSKINRIVQFFAQRPQVQERLTQQILTALQTLLGTNNVAVSIDAVHYCVKARGIRDATSATTTTSLGGLFKSSQNTRQEFLRAVRHHN

SEQ ID NO: 9407 - protein, 221 aa, Kluyvera intermedia; identical to SEQ ID NO: 8737
  misc_feature (1)..(221): tr|A0A1X0XFW2|A0A1X0XFW2_KLUIN GTP cyclohydrolase 1 OS= Kluyvera intermedia OX=61648 GN=folE PE=3 SV=1

SEQ ID NO: 9408 - protein, 221 aa, Kluyvera sp.; identical to SEQ ID NO: 8737
  misc_feature (1)..(221): tr|A0A2T3XAX2|A0A2T3XAX2_9ENTR GTP cyclohydrolase 1 OS= Kluyvera sp. Nf5 OX=2116543 GN=folE PE=3 SV=1

SEQ ID NO: 9409 - protein, 215 aa, Knoellia aerolata
  misc_feature (1)..(215): tr|A0A0A0JVR9|A0A0A0JVR9_9MICO GTP cyclohydrolase 1 OS= Knoellia aerolata DSM 18566 OX=1385519 GN=folE PE=3 SV= 1
MSIPTPTDGASADPDLSAEIDSVAPRQVDHERARAAVREFLLAIGEDPDRAGLRDTPDRVARAATQLFGGLSQDPVEVLSARFSIDHEELIIVRDIEIYSTCEHHLLPFHGVAHVGYIPAPDGTVTGLSKLARLVDVFARRPQVQERITTQVADALVDHLGVQGVIVVIEAEHLCMSMRGVHKPGSRTITSAVRGQLRDPATRAEAMSLLLGGKR

SEQ ID NO: 9410 - protein, 215 aa, Knoellia flava
  misc_feature (1)..(215): tr|A0A0A0J1Q8|A0A0A0J1Q8_9MICO GTP cyclohydrolase 1 OS= Knoellia flava TL1 OX=1385518 GN=folE PE=3 SV=1
MSTPTPTDGGSAVPDTSDESDTLPPRQVDHDRARRAVRELLLAIGEDPDREGLRDTPDRVARAATQLYAGLSQDPADVLSARFSIDHEELIIVRDIEIYSTCEHHLLPFHGVAHVGYIPAPDGTVTGLSKLARLVDVFARRPQVQERITTQVADALVEHLGVQGVIVVIEAEHLCMSMRGVHKPGSRTITSAVRGQLRDPATRSEAMSLLLGGKR

SEQ ID NO: 9411 - protein, 203 aa, Knoellia locipacati
  misc_feature (1)..(203): tr|A0A512T0X0|A0A512T0X0_9MICO GTP cyclohydrolase 1 OS= Knoellia locipacati OX=882824 GN=folE PE=3 SV=1
MPDTSDETDTLPPRQVDHERARAAVREFLIAIGEDPDREGLLDTPDRVARAATQLYAGLSQDPAQVLSARFSIDHEELIIVRDIEIFSTCEHHLLPFHGVAHVGYIPATDGTVTGLSKLARLVDVFARRPQVQERITTQVADALVENLGVQGVIVVIEAEHLCMSMRGVHKPGSRTITSAVRGQLRDPATRAEAMSLLLGGKR

SEQ ID NO: 9412 - protein, 216 aa, Knoellia remsis
  misc_feature (1)..(216): tr|A0A2T0UN40|A0A2T0UN40_9MICO GTP cyclohydrolase 1 OS= Knoellia remsis OX=407159 GN=folE PE=3 SV=1
MATDGAAVDGRTFDGVLPKEADSLPARVVDHERAAAAVREYLIAIGEDPDREGLRDTPDRVARAATQLYAGLSQSPEDVLSARFSIDHEELIIVRDIEIFSTCEHHLLPFHGVAHVGYIPATDGTVTGLSKLARLVDVFARRPQVQERITTQVADALVEHLGVQGVIVVVEAEHLCMSMRGVHKPGSRTITSAVRGQLRNPATRAEAMSLLLGGKR

SEQ ID NO: 9413 - protein, 211 aa, Knoellia sinensis
  misc_feature (1)..(211): tr|A0A0A0J7P2|A0A0A0J7P2_9MICO GTP cyclohydrolase 1 OS= Knoellia sinensis KCTC 19936 OX=1385520 GN=folE PE=3 SV =1
MTEPADRRASEFDDEEDTIPPRQVDHARARAAMREYLFAIGEDPDREGLRDTPDRVARAATQLYAGLSQDPADVLSARFSIDHEELIIVRDIELFSTCEHHLLPFHGVAHVGYIPAVDGTVTGLSKLARLVDVFARRPQVQERITTQVADALVEHLNVQGVIVVIEAEHLCMSMRGVHKPGSRTLTSAVRGQLRDPATRAEAMSLLLGGKR

SEQ ID NO: 9414 - protein, 209 aa, Knoellia sp.
  misc_feature (1)..(209): tr|A0A0Q9KU98|A0A0Q9KU98_9MICO GTP cyclohydrolase 1 OS= Knoellia sp. Soil729 OX=1736394 GN=folE PE=3 SV=1
MTSTGLHHREPARPRPSWAAVEAVGEPDVDSATSAAADLLTALGVDVESESLRRTPERMVLALAEMLRPRPFELTTFPNDGGYDELIVARNIPVRSLCEHHVLPFIGTAHVGYLPGERILGLSKLARVVEHFSRRPQVQERLTMQVSTWLRDQLGATGVGVVIEAEHMCMTLRGVQVPGTSTVTSSLLGVLRDDPRTRAEFLALTHSPR

SEQ ID NO: 9415 - protein, 188 aa, Knoellia sp.
  misc_feature (1)..(188): tr|A0A0Q9KZ98|A0A0Q9KZ98_9MICO GTP cyclohydrolase 1 OS= Knoellia sp. Soil729 OX=1736394 GN=folE PE=3 SV=1
MDHERARAAVRELLFAIGEDPDREGLQDTPDRVARAATQLYAGLSQDPADILSTRFSIDHEELIIVRDIEIYSTCEHHLLPFHGVAHVGYIPSPDGTVTGLSKLARLVDVFARRPQVQERITTQVADALVEHLGVQGVIVVIEAEHLCMSMRGVHKPGSRTITSAVRGQLRDPATRAEAMSLLLGGKR

SEQ ID NO: 9416 - protein, 207 aa, Knoellia subterranea
  misc_feature (1)..(207): tr|A0A0A0JN15|A0A0A0JN15_9MICO GTP cyclohydrolase 1 OS= Knoellia subterranea KCTC 19937 OX=1385521 GN=folE PE=3 SV=1
MTESPDLKDDEGDALPPRQVDHERARAAIREYLFAIGEDPDREGLRDTPDRVARAATQLYAGLSQSPEDVLSARFSIDHEELIIVRDIEIFSTCEHHLLPFHGVAHVGYIPAPDGTVTGLSKLARLVDVFARRPQVQERITTQVADALVTHLGVQGVIVVVEAEHLCMSMRGVHKPGSRTITSAVRGQLRDPATRAEAMSLLLGGKR

SEQ ID NO: 9417 - protein, 248 aa, Kocuria flava
  misc_feature (1)..(248): tr|A0A2N4SYD3|A0A2N4SYD3_9MICC GTP cyclohydrolase 1 OS= Kocuria flava OX=446860 GN=folE PE=3 SV=1
MGREAGRARRPALPGETAQHQEEGALPHEARTDGTTPHDPRQEAFEPPYPDPDPALEAGAGAVDQERVAAAVRELLLAIGEDPDREGLQGTPGRVARAWAEMFAGLHQDPGEVLGTTFDIGHSEMVLVKDIPFYSTCEHHLVPFHGHAHVGYIPGHDGAVTGLSKLARLVDLYARRPQVQERLTTQIVDAIVEHLAPAGVIVVVECEHLCMSMRGVRKPGAKTVTSAVRGQLRETATRAEAMSLILGR

SEQ ID NO: 9418 - protein, 248 aa, Kocuria flava
  misc_feature (1)..(248): tr|A0A0U3G350|A0A0U3G350_9MICC GTP cyclohydrolase 1 OS= Kocuria flava OX=446860 GN=folE PE=3 SV=1
MGREAGRARRPALPGETAQHQEEGALPHEARTDGTTPHDPRQEAFEPPYPDTDPALEAGAGAVDQERVAAAVRELLLAIGEDPDREGLQGTPGRVARAWAEMFAGLHQDPGEVLGTTFDIGHSEMVLVKDIPFYSTCEHHLVPFHGHAHVGYIPGHDGAVTGLSKLARLVDLYARRPQVQERLTTQIVDAIVEHLAPAGVIVVVECEHLCMSMRGVRKPGAKTVTSAVRGQLRETATRAEAMSLILGR

SEQ ID NO: 9419 - protein, 218 aa, Kocuria indica
  misc_feature (1)..(218): tr|A0A4P6RS17|A0A4P6RS17_9MICC GTP cyclohydrolase 1 OS= Kocuria indica OX=1049583 GN=folE PE=3 SV=1
MHGTHEDDPHEPVSGSYADYADAPQLDPTIDQPRIAAAVREILLAVGEDPDRDGLRDTPARVARAYAEVFAGLHQDPADLLATSFDIGHSEMVLVRDIPFYSTCEHHLVPFHGLAHVGYIPGPEGKVTGLSKLARLVDLYAKRPQVQERLTTQVVEALSEHLHPAGAIVVIECEHLCMSMRGVRKPGAMTVTSAVRGQLRNPATRAEAMNLIQAGHAQ

SEQ ID NO: 9420 - protein, 218 aa, Kocuria indica
  misc_feature (1)..(218): tr|A0A1X7DXY1|A0A1X7DXY1_9MICC GTP cyclohydrolase 1 OS= Kocuria indica OX=1049583 GN=folE PE=3 SV=1
MHGTHEDDPHEPVSGSYADYADAPQLDPTIDQPRIAAAVREILLAVGEDPDRDGLRDTPARVARAYAEVFAGLHQDPADLLATSFDIGHSEMVLVRDIPFYSTCEHHLVPFHGLAHVGYIPGPEGKVTGLSKLARLVDLYAKRPQVQERLTTQVVEALSEHLHPAGAIVVIECEHLCMSMRGVRKPGAKTVTSAVRGQLRNPATRAEAMNLIQAGHAR

SEQ ID NO: 9421 - protein, 189 aa, Kocuria marina
  misc_feature (1)..(189): tr|A0A0B0DDV9|A0A0B0DDV9_9MICC GTP cyclohydrolase 1 OS= Kocuria marina OX=223184 GN=folE PE=3 SV=1
MDQPRIAAAVREILLAVGEDPDRGGLRDTPARVARAYAEVFAGLHQDPVDLLATSFDIGHSEMVLVRDIPFYSTCEHHLVPFHGLAHVGYIPGPEGKVTGLSKLARLVDLYAKRPQVQERLTTQVVEALSEHLHPAGAIVVIECEHLCMSMRGVRKPGAKTVTSAVRGQLRNPATRAEAMNLIQAGRAQ

SEQ ID NO: 9422 - protein, 204 aa, Kocuria palustris
  misc_feature (1)..(204): tr|A0A0X3Q839|A0A0X3Q839_9MICC GTP cyclohydrolase 1 OS= Kocuria palustris OX=71999 GN=folE PE=3 SV=1
MQQQDHHEVGGGPGDLAPVDQPRIRDAVREILSAIGEDPDREGLRETPDRVARAYAEMFSGLAQDPSEVLSASFDIGHSELVLVKDISFYSTCEHHLVPFHGSAHVGYIPGPSGRVTGLSKIARLVEVYARRPQVQERLTTQIADALMDELNAAGAIVVVQCEHLCMSMRGVRKPGASTVTSAVRGQLREPATRSEAMSLILGG

SEQ ID NO: 9423 - protein, 204 aa, Kocuria palustris
  misc_feature (1)..(204): tr|M2YG42|M2YG42_9MICC GTP cyclohydrolase 1 OS=Kocuria palustris PEL OX=1236550 GN=folE PE=3 SV=1
MQQQDHHEVGGGPGDLAPVDQPRIRDAVREILSAIGEDPDREGLRETPDRVARAYAEMFSGLAQDPSEVLSASFDIGHSELVLVKDISFYSTCEHHLVPFHGSAHVGYIPGPSGRVTGLSKIARLVEVYARRLQVQERLTTQIADALMGELNAAGAIVVVQCEHLCMSMRGVRKPGASTVTSAVRGQLREPATRSEAMSLILGG

SEQ ID NO: 9424 - protein, 193 aa, Kocuria polaris
  misc_feature (1)..(193): tr|A0A0W8I3E1|A0A0W8I3E1_9MICC GTP cyclohydrolase 1 OS= Kocuria polaris OX=136273 GN=folE PE=3 SV=1
MEAGAGAVDQPRVAAAVRELLLAIGEDPDRDGLQGTPGRVARAYAEMFAGLHQDPAEVLGTTFDIGHSEMVLVKDIAFYSTCEHHLVPFHGHAHVGYIPGHDGMVTGLSKLARLVDLYARRPQVQERLTTQIVEAIVEHLQPAGVIVVIECEHLCMSMRGVRKPGAMTVTSAVRGQLRETATRAEAMSLILGR

SEQ ID NO: 9425 - protein, 251 aa, Kocuria polaris
  misc_feature (1)..(251): tr|A0A0A6YCM7|A0A0A6YCM7_9MICC GTP cyclohydrolase 1 OS= Kocuria polaris OX=136273 GN=folE PE=3 SV=1
MERQPVASADSRPVRQTPPHRQIPKEGALPHEARTKQTSAHDLRAEAFDPPYPDPAPALEAGAGAVDQPRVAAAVRELLLAIGEDPDRDGLQGTPGRVARAYAEMFAGLHQDPAEILGTTFDIGHSEMVLVKDIPFYSTCEHHLVPFHGHAHVGYIPGHDGMVTGLSKLARLVDLFARRPQVQERLTTQVVEAIMEHLQPAGVIVVVECEHLCMSMRGVRKPGAKTVTSAVRGQLREPATRAEAMSLILGR

SEQ ID NO: 9426 - protein, 216 aa, Kocuria rhizophila
  misc_feature (1)..(216): tr|A0A0B4DT43|A0A0B4DT43_KOCRH GTP cyclohydrolase 1 OS= Kocuria rhizophila OX=72000 GN=folE PE=3 SV=1
MTHQHEPGEPVSGSYLEHVAGAETAAAVDQPRIAAAVREILLAVGEDPDRSGLRDTPERVARAYAEVFAGLHEDPAELLATSFDIGHSEMVLVRDVPFYSTCEHHLVPFHGVAHVGYIPGPEGKVTGLSKLARLVDLFAKRPQVQERLTTQVVEALVEHLHPAGAIVVVECEHLCMSMRGVRKPGAKTVTSAVRGQLRDPATRAEAMNLIAAGHSR

SEQ ID NO: 9427 - protein, 232 aa, Kocuria rhizophila
  misc_feature (1)..(232): tr|B2GG73|B2GG73_KOCRD GTP cyclohydrolase 1 OS=Kocuria rhizophila (strain ATCC 9341 / DSM 348 / NBRC 103217 / DC2201) OX=378753 GN=folE PE=3 SV=1
MAPAPEQNAPIPSAPEHDAHEPVSEPVSGSFLDHAGTGEVSAAVDQPRIAAAVREILLAVGEDPDRNGLRDTPARVARAYAEVFAGLHEDPAELLATSFDIGHSEMVLVRDVPFYSTCEHHLVPFHGVAHVGYIPGPEGKVTGLSKLARLVDLYAKRPQVQERLTTQVVEALVAHLHPAGAIVVVECEHLCMSMRGVRKPGARTVTSAVRGQLRDPATRAEAMNLIAAGHGR

SEQ ID NO: 9428 - protein, 251 aa, Kocuria rosea
  misc_feature (1)..(251): tr|A0A4R5YAT4|A0A4R5YAT4_KOCRO GTP cyclohydrolase 1 OS= Kocuria rosea OX=1275 GN=folE PE=3 SV=1
MERQPVASADSRPVRQTPPHRQIPKEGALPHEARTKQTSAHDLRAEAFDPPYPDPAPALEAGAGAVDQPRVAAAVRELLLAIGEDPDRDGLQGTPGRVARAYAEMFAGLHQDPAEILGTTFDIGHSEMVLVKDIPFYSTCEHHLVPFHGHAHVGYIPGHDGMVTGLSKLARLVDLFARRPQVQERLTTQVVEAIVEHLQPAGVIVVVECEHLCMSMRGVRKPGAKTVTSAVRGQLREPATRAEAMSLILGR

SEQ ID NO: 9429 - protein, 251 aa, Kocuria rosea
  misc_feature (1)..(251): tr|A0A378GSL9|A0A378GSL9_KOCRO GTP cyclohydrolase 1 OS= Kocuria rosea OX=1275 GN=folE PE=3 SV=1
MERQPVASADSRPVRQTPPHRQIPKEGALPHEARTKQTSAHDLRAEAFDPPYPDPAPALEAGAGAVDQPRVAAAVRELLLAIGDDPDRDGLQGTPGRVARAYAEMFAGLHQDPAEILGTTFDIGHSEMVLVKDIPFYSTCEHHLVPFHGHAHVGYIPGHDGMVTGLSKLARLVDLFARRPQVQERLTTQVVEAIMEHLQPAGVIVVVECEHLCMSMRGVRKPGAKTVTSAVRGQLREPATRAEAMSLILGR

SEQ ID NO: 9430 - protein, 206 aa, Kocuria sp.
  misc_feature (1)..(206): tr|A0A1A0J9L3|A0A1A0J9L3_9MICC GTP cyclohydrolase 1 OS= Kocuria sp. ICS0012 OX=1834155 GN=folE PE=3 SV=1
MSGSYADYADAPQLDPTVDQPRIAAAVREILLAVGEDPDRDGLRDTPARVARAYAEVFAGLHQDPADLLATSFDIGHSEMVLVRDIPFYSTCEHHLVPFHGLAHVGYIPGPEGKVTGLSKLARLVDLYAKRPQVQERLTTQVVEALSEHLHPAGAIVVIECEHLCMSMRGVRKPGAMTVTSAVRGQLRNPATRAEAMNLIQAGHAQ

SEQ ID NO: 9431 - protein, 218 aa, Kocuria sp.
  misc_feature (1)..(218): tr|A0A3S1A140|A0A3S1A140_9MICC GTP cyclohydrolase 1 OS= Kocuria sp. HSID17590 OX=2419513 GN=folE PE=3 SV=1
MTSADQHGVPEPVSGSYEELAAVASASPAVDQPRIAAAVREILLAVGEDPDRSGLEETPERVARAYAEIFAGLHEDPAKLLATSFDIGHSEMVLVKDIPFYSTCEHHLVPFHGVAHVGYIPGPEGKVTGLSKLARLVDLFAKRPQVQERLTTQVVEALVTHLNPAGAIVVVECEHLCMSMRGVRKPGARTVTSAVRGQLRDPATRAEAMNLIAAEHRR

SEQ ID NO: 9432 - protein, 222 aa, Kocuria turfanensis
  misc_feature (1)..(222): tr|A0A512IC77|A0A512IC77_9MICC GTP cyclohydrolase 1 OS= Kocuria turfanensis OX=388357 GN=folE PE=3 SV=1
MPHEARTHTHTHDLAAEAFEPPYPDPAPALEAGAGAVDQPRVAAAVRELLLAIGEDPDRDGLQGTPGRVARAYAEMFAGLHQDPAEILGTTFDIGHSEMVLVKDIPFYSTCEHHLVPFHGHAHVGYIPGHDGMVTGLSKLARLVDLFARRPQVQERLTTQIVEAIVEHLKPAGVIVVVECEHLCMSMRGVRKPGAKTVTSAVRGQLRETATRAEAMSLILGR

SEQ ID NO: 9433 - protein, 191 aa, Kocuria tytonicola
  misc_feature (1)..(191): tr|A0A3L9KZE3|A0A3L9KZE3_9MICC GTP cyclohydrolase 1 OS= Kocuria tytonicola OX=2055946 GN=folE PE=3 SV=1
MSPAIDQPRIAAAVREILLAVGEDPDRNGLRDTPARVARSYAEVFAGLHEDPAELLATSFDIGHSEMVLVRDVPFYSTCEHHLMPFHGVAHVGYIPGPEGKVTGLSKLARLVDLYARRPQVQERLTTQVVEAIVEHLHPAGAIVVVECEHLCMSMRGVRKPGAKTVTSAVRGQLRNPATRAEAMNLIASGH

SEQ ID NO: 9434 - protein, 226 aa, Kocuria varians
  misc_feature (1)..(226): tr|A0A4Y4D0V0|A0A4Y4D0V0_KOCVA GTP cyclohydrolase 1 OS= Kocuria varians OX=1272 GN=folE PE=3 SV=1
MSPQDQYGSPEPVSARTAEPVSGSYAEYAENAELSHEVDQPRIAAAVREILLAVGEDPDRSGLRDTPQRVARAYAEVFAGLHQDPSRLLATSFDIGHSEMVLVKDIPFFSTCEHHLVPFHGVAHVGYIPGPEGKVTGLSKLARLVDLYAKRPQVQERLTTQVVEALVAHLAPAGAIVVVECEHLCMSMRGVRKPGAQTVTSAVRGQLRDPATRAEAMNLIAAGHRR

SEQ ID NO: 9435 - protein, 204 aa, Komagataeibacter cocois
  misc_feature (1)..(204): tr|A0A365YYV5|A0A365YYV5_9PROT GTP cyclohydrolase 1 OS= Komagataeibacter cocois OX=1747507 GN=folE PE=3 SV=1
MTPTDTAPLHRPTREEAEDAVRTLLRWAGEDPGREGLHDTPSRVVRSYEEFFCGYAEDPVDLLTRTFSEVEDYDEMVLLRDIRFESHCEHHMVPIVGVAHVAYLPRKRVVGISKLARVVDAYSKRFQIQERLTAQIANTINDVLQPRGVGVVIEGSHQCMTTRGVHRPGVSMVTSRMLGTFRSNSDTRREFLSILNRPGVTGGV

SEQ ID NO: 9436 - protein, 201 aa, Komagataeibacter europaeus
  misc_feature (1)..(201): tr|A0A0M0EI03|A0A0M0EI03_KOMEU GTP cyclohydrolase 1 OS= Komagataeibacter europaeus OX=33995 GN=folE PE=3 SV=1
MTPIDSRPSRTEAEEAVRTLLRWAGEDPDREGLRDTPQRVIKSYDEFFCGYAEDPVDLLRRTFSEVDDYDEMVLLRDIRVESHCEHHMVPIIGVAHVAYLPRKRVVGISKLARVVDAYARRFQIQERLTAQIANTINEELQPYGVGVVIEASHQCMTTRGVHRPGVSMVTSRMLGTFRTNSDTRREFLSILNRPAMNSSGI

SEQ ID NO: 9437 - protein, 201 aa, Komagataeibacter europaeus
  misc_feature (1)..(201): tr|A0A0D6Q1D5|A0A0D6Q1D5_KOMEU GTP cyclohydrolase 1 OS= Komagataeibacter europaeus NBRC 3261 OX=1234669 GN=folE PE=3 SV=1
MTPIDSRPSRTEAEEAVRTLLRWAGEDPDREGLRDTPQRVIKSYDEFFCGYAEDPVDLLRRTFSEVDDYDEMVLLRDIRVESHCEHHMVPIIGVAHVAYLPRKRVVGISKLARVVDAYARRFQIQERLTAQIANTINEELQPYGVGVVIEASHQCMTTRGVHRPGVSMVTSRMLGTFRTNSDTRREFLSILNRPAMNSGGI

SEQ ID NO: 9438 - protein, 204 aa, Komagataeibacter hansenii
  misc_feature (1)..(204): tr|A0A318PW88|A0A318PW88_KOMHA GTP cyclohydrolase 1 OS= Komagataeibacter hansenii OX=436 GN=folE PE=3 SV=1
MTPTDSAPLPPPTREEAEDAVRTLLRWAGEDPRREGLHDTPSRVVRSYEEFFCGYAEDPVDLLTRTFSEVEDYDEMVLLRDIRFESHCEHHMVPIIGVAHVAYLPRKRVVGISKLARVVDAYAKRFQIQERLTAQIANTINDVLQPRGVGVVIEASHQCMTTRGVHRPGVSMVTSRMLGTFRSNSDTRREFLSILNRPGVTGGV

SEQ ID NO: 9439 - protein, 204 aa, Komagataeibacter hansenii; identical to SEQ ID NO: 9438
  misc_feature (1)..(204): tr|D5QJ61|D5QJ61_KOMHA GTP cyclohydrolase 1 OS=Komagata eibacter hansenii ATCC 23769 OX=714995 GN=folE PE=3 SV= 1

SEQ ID NO: 9440 - protein, 208 aa, Komagataeibacter intermedius
  misc_feature (1)..(208): tr|A0A0N0MDD8|A0A0N0MDD8_9PROT GTP cyclohydrolase 1 OS= Komagataeibacter intermedius AF2 OX=1458464 GN=folE PE= 3 SV=1
MQQEPTAMTPIDSHPTRQEAEEAVRTLLRWAGEDPDREGLRDTPQRVIKSYDEFFCGYAEDPVDLLRRTFSEVDDYDEMVLLRDIRVESHCEHHMVPIIGVAHVAYLPRKRVVGISKLARVVDAYARRFQIQERLTAQIANTINEELQPYGVAVVIEASHQCMTTRGVHRPGVSMVTSRMLGTFRTNSDTRREFLSILNRPAMNSSGI

SEQ ID NO: 9441 - protein, 161 aa, Komagataeibacter maltaceti
  misc_feature (1)..(161): tr|A0A2S3W323|A0A2S3W323_9PROT GTP cyclohydrolase 1 OS= Komagataeibacter maltaceti OX=1203393 GN=folE PE=3 SV=1
MVRSYEEFFCGYAEDPVDLLTRTFSEVEDYDEMVLLRDIRFESHCEHHMVPIIGVAHVAYLPRKRVVGISKLARVVDAYARRFQIQERMTAQIANTINEVLQPRGVGVVIEASHQCMTTRGVHRPGVSMVTSRMLGTFRSNSDTRREFLSILNRPGVTGGV

SEQ ID NO: 9442 - protein, 201 aa, Komagataeibacter medellinensis
  misc_feature (1)..(201): tr|G2I6M6|G2I6M6_KOMMN GTP cyclohydrolase 1 OS=Komagata eibacter medellinensis (strain NBRC 3288 / BCRC 11682 / LMG 1693 / Kondo 51) OX=634177 GN=folE PE=3 SV=1
MTPIDTRPTRADAEEAVRTLLRWAGEDPGREGLLDTPARVVKSYGEFFCGYAEDPAEMLRRTFSEVADYDEMVLLRDIRVESHCEHHMVPIIGVAHVAYLPRRRVVGISKLARVVDAYARRFQIQERLTAQIANTINDELQPYGVGVVIEAAHQCMTTRGVHRPGVSMVTSRMLGTFRTNSDTRREFLSILNRPAMNGTGI

SEQ ID NO: 9443 - protein, 201 aa, Komagataeibacter nataicola
  misc_feature (1)..(201): tr|A0A1U9RK56|A0A1U9RK56_9PROT GTP cyclohydrolase 1 OS= Komagataeibacter nataicola OX=265960 GN=folE PE=3 SV=1
MTPIDSHPTRTEAEEAVRTLLRWAGEDPDREGLRDTPARVIKSYGEFFAGYAEDPVDMLRRTFSEVDDYDEMVLLRDIRVESHCEHHMVPIIGVAHVAYLPRKRVVGISKLARVVDAYARRFQIQERLTAQIANTINEELQPYGVGVVIEAAHQCMTTRGVHRPGVSMVTSRMLGTFRTNSDTRREFLSILNRPAMSSAGI

SEQ ID NO: 9444 - protein, 210 aa, Komagataeibacter nataicola; identical to SEQ ID NO: 3686
  misc_feature (1)..(210): tr|A0A1U9RPQ9|A0A1U9RPQ9_9PROT GTP cyclohydrolase 1 OS= Komagataeibacter nataicola OX=265960 GN=folE PE=3 SV=1

SEQ ID NO: 9445 - protein, 201 aa, Komagataeibacter oboediens
  misc_feature (1)..(201): tr|A0A318QWX3|A0A318QWX3_9PROT GTP cyclohydrolase 1 OS= Komagataeibacter oboediens OX=65958 GN=folE PE=3 SV=1
MTPIDSHPTRQEAEEAVRTLLRWAGEDPDREGLRDTPQRVIKSYDEFFCGYAEDPVDLLRRTFSEVDDYDEMVLLRDIRVESHCEHHMVPIIGVAHVAYLPRKRVVGISKLARVVDAYARRFQIQERLTAQIANTINEELQPYGVAVVIEASHQCMTTRGVHRPGVSMVTSRMLGTFRTNSDTRREFLSILNRPAMNSSGI

SEQ ID NO: 9446 - protein, 204 aa, Komagataeibacter pomaceti; identical to SEQ ID NO: 9435
  misc_feature (1)..(204): tr|A0A318QDN2|A0A318QDN2_9PROT GTP cyclohydrolase 1 OS= Komagataeibacter pomaceti OX=2021998 GN=folE PE=3 SV=1

SEQ ID NO: 9447 - protein, 201 aa, Komagataeibacter rhaeticus; identical to SEQ ID NO: 8619
  misc_feature (1)..(201): tr|A0A181CDE7|A0A181CDE7_9PROT GTP cyclohydrolase 1 OS= Komagataeibacter rhaeticus OX=215221 GN=folE PE=3 SV=1

SEQ ID NO: 9448 - protein, 201 aa, Komagataeibacter rhaeticus; identical to SEQ ID NO: 8619
  misc_feature (1)..(201): tr|A0A070AFL4|A0A070AFL4_9PROT GTP cyclohydrolase 1 OS= Komagataeibacter rhaeticus AF1 OX=1432055 GN=folE PE=3 SV=1

SEQ ID NO: 9449 - protein, 201 aa, Komagataeibacter saccharivorans
  misc_feature (1)..(201): tr|A0A347WBG0|A0A347WBG0_9PROT GTP cyclohydrolase 1 OS= Komagataeibacter saccharivorans OX=265959 GN=folE PE=3 SV=1
MNAIDSRPSRTDAEEAVRTLLRWAGEDPDREGLRDTPERVIKSYDEFFCGYAEDPVDLLRRTFSEVEDYDEMVLLRDIRVESHCEHHMVPIIGVAHVAYLPRKRVVGISKLARVVDAYARRFQIQERLTAQIANTINEELQPYGVGVVIEASHQCMTTRGVHRPGVSMVTSRMLGTFRSNSDTRREFLSILNRPPMNSSGI

SEQ ID NO: 9450 - protein, 201 aa, Komagataeibacter sp.; identical to SEQ ID NO: 9436
  misc_feature (1)..(201): tr|A0A4P5P5V2|A0A4P5P5V2_9PROT GTP cyclohydrolase 1 OS= Komagataeibacter sp. MSKU15 OX=1932664 GN=folE PE=3 SV= 1

SEQ ID NO: 9451 - protein, 201 aa, Komagataeibacter sp.; identical to SEQ ID NO: 9436
  misc_feature (1)..(201): tr|A0A4P5NQE4|A0A4P5NQE4_9PROT GTP cyclohydrolase 1 OS= Komagataeibacter sp. MSKU9 OX=1932662 GN=folE PE=3 SV=1

SEQ ID NO: 9452 - protein, 201 aa, Komagataeibacter sucrofermentans
  misc_feature (1)..(201): tr|A0A318QKL7|A0A318QKL7_9PROT GTP cyclohydrolase 1 OS= Komagataeibacter sucrofermentans OX=1053551 GN=folE PE= 3 SV=1
MTPIDSRPTRTEAEDAVRTLLRWAGEDPDREGLRDTPARVIKSYGEFFAGYAEDPVDMLRRTFSEVDDYDEMVLLRDIRVESHCEHHMVPIIGVAHVAYLPRKRVVGISKLARVVDAYARRFQIQERLTAQIANTINEELQPYGVGVVIEAAHQCMTTRGVHRPGVSMVTSRMLGTFRTNSDTRREFLSILNRPAMSSAGI

SEQ ID NO: 9453 - protein, 201 aa, Komagataeibacter swingsii
  misc_feature (1)..(201): tr|A0A2V4RAJ6|A0A2V4RAJ6_9PROT GTP cyclohydrolase 1 OS= Komagataeibacter swingsii OX=215220 GN=folE PE=3 SV=1
MTSIDSRPSRTEAEEAVRTLLRWAGEDPDREGLRDTPQRVIKSYDEFFCGYAEDPVDLLRRTFSEVDDYDEMVLLRDIRVESHCEHHMVPIIGVAHVAYLPRKRVVGISKLARVVDAYARRFQIQERLTAQIANTINEELQPYGVGVVIEASHQCMTTRGVHRPGVSMVTSRMLGTFRTNSDTRREFLSILNRPAMNSSGI

SEQ ID NO: 9454 - protein, 201 aa, Komagataeibacter xylinus; identical to SEQ ID NO: 8619
  misc_feature (1)..(201): tr|A0A2D3HAP0|A0A2D3HAP0_KOMXY GTP cyclohydrolase 1 OS= Komagataeibacter xylinus OX=28448 GN=folE PE=3 SV=1

SEQ ID NO: 9455 - protein, 204 aa, Komagataeibacter xylinus
  misc_feature (1)..(204): tr|A0A143WN06|A0A143WN06_KOMXY GTP cyclohydrolase 1 OS= Komagataeibacter xylinus OX=28448 GN=folE PE=3 SV=1
MTPTDSAPLPPPTREEAEDAVRTLLRWAGEDPRREGLHDTPSRVVRSYEEFFCGYAEDPVDLLTRTFSEVEDYDEMVLLRDIRFESHCEHHMVPIIGVAHVAYLPRKRVVGISKLARVVDAYAKRFQIQERLTAQIANTINDVLQPRGVGVVIEASHQCMTTRGVHRPGVSMVTSRMLGTFRSNSDTRREFLSILNRPGITGGV

SEQ ID NO: 9456 - protein, 198 aa, Kordia algicida
  misc_feature (1)..(198): tr|A9DXR7|A9DXR7_9FLAO GTP cyclohydrolase 1 OS=Kordia a lgicida OT-1 OX=391587 GN=folE PE=3 SV=1
MPYRKLEEYNIEVTNEVKDRYKAIIEELGEDTTREGLLKTPERAAKAMQFLTQGYDMDPAEILKGAMFAEDYNEMVIVKDIELYSLCEHHILPFFGKAHIAYIPNGHIVGLSKLPRIVDVFSRRLQVQERLTHDILECINNTLKPKGVAVVIEASHMCMMMRGVQKQNSVTTTSGFRGAFETIETRTEFLKLISSSLS

SEQ ID NO: 9457 - protein, 233 aa, Kordia algicida
  misc_feature (1)..(233): tr|A9E3M2|A9E3M2_9FLAO GTP cyclohydrolase 1 OS=Kordia a lgicida OT-1 OX=391587 GN=folE PE=3 SV=1
MKTADVLNHMNGTAISLNGFNHDEIGDEHLLTGMETPMRADAFKMSDEEKKQKISYHFAEIMETLGLDLNDDSLKGTPNRVAKMYIEEIFSGLNPMNKPKVALFDNKYQYNQMLIEKNIQFYSNCEHHFVPIMGKAHVAYISSGKVIGLSKLNRIVQYYAKRPQVQERLTNQIATELCEILQTDDVAVIIDAKHLCVSSRGVKDDSSTTITSYYGGVFNTPEKIIELQNFLNN

SEQ ID NO: 9458 - protein, 198 aa, Kordia periserrulae
  misc_feature (1)..(198): tr|A0A2T6C3U5|A0A2T6C3U5_9FLAO GTP cyclohydrolase 1 OS= Kordia periserrulae OX=701523 GN=folE PE=3 SV=1
MSYRKLEEYDLQVTQEVKNRYKTIIEELGEDTTREGLLKTPERAAKAMQFLTQGYDMDAAEILKGAMFAEDYNEMVIVKDIELYSLCEHHILPFFGKAHIAYIPNGHIVGLSKLPRVVDVFARRLQVQERLTHDILECINNTLKPKGVAVVIEASHMCMMMRGVQKQNSVTTTSGFRGAFESMETRNEFLKLISSDLS

SEQ ID NO: 9459 - protein, 226 aa, Kordia periserrulae
  misc_feature (1)..(226): tr|A0A2T6BYR7|A0A2T6BYR7_9FLAO GTP cyclohydrolase 1 OS= Kordia periserrulae OX=701523 GN=folE PE=3 SV=1
MKIDKALEEEIQAMGDDHMMTSYETPMREDAFDLSDDEKIQSIRKDVANIMQTLGLDMTDDSLKGTPNRVAKMFVKEIFGGLHPDRRPKASTFDNKYKYNEMLVEKNITVYSTCEHHLLPIVGRAHIAYISNGNVVGLSKMNRIVDYYAKRPQVQERLTIQVVKELQKVLGTEDVACVIDAKHLCVNSRGIRDIESSTVTAEFGGKFKNEKTRLEFLDYIKLDTKF

SEQ ID NO: 9460 - protein, 226 aa, Kordia sp.
  misc_feature (1)..(226): tr|A0A501HI58|A0A501HI58_9FLAO GTP cyclohydrolase 1 OS= Kordia sp. TARA_039_SRF OX=2530203 GN=folE PE=3 SV=1
MKIDKALEEEIQAMGDDHIMTSYETPLREDAFDLSDDEKIVSIRKDVANIMQTLGLDMTDDSLKGTPNRVAKMFVKEIFGGLHPDRRPKASTFDNKYKYNEMLVEKNITVYSTCEHHLLPIVGRAHIAYISNGNVVGLSKMNRIVDYYAKRPQVQERLTIQVVKELQKVLGTEDVACVIDAKHLCVNSRGIRDIESSTVTAEFGGKFKNEKTRLEFLDYIKLDTKF

SEQ ID NO: 9461 - protein, 220 aa, Kordia sp.
  misc_feature (1)..(220): tr|A0A501HD16|A0A501HD16_9FLAO GTP cyclohydrolase 1 OS= Kordia sp. TARA_039_SRF OX=2530203 GN=folE PE=3 SV=1
MNKEQIELLGDNHIASSPETPLRPDAFDTSDDEKVKNIQEYFGMIMQELGLDLTDDSLSGTPYRVAKMYVKELFYGLNPANKPKLSTFENKYEYGKMLVEQQITIDSSCEHHFLPIVGYAHVAYVPKDRVIGLSKINRLVDYYAHRPQVQERLSLQILKDLQTALNTEDVIVMVVAKHLCVSSRGIKDKNSFTTTVEFGGCFEQDEKRQEFLDIVTKISM

SEQ ID NO: 9462 - protein, 228 aa, Kordiimonadales bacterium
  misc_feature (1)..(228): tr|A0A5A7N3T1|A0A5A7N3T1_9PROT GTP cyclohydrolase 1 OS= Kordiimonadales bacterium JCM 17846 OX=1236968 GN=folE_ 1 PE=3 SV=1
MDELIRLASGDRDGTALHRPYDSKAISDENRGDDVLNGQLRPDRQAAMQAVETLLAFMGENPQRSGLLETPRRVVDALLEHGRGYDLDPDAILARTFDEVEGYDDMVLLQGIRFESRCEHHLEPIIGVAHVAYLPSDRVVGLSKIARVVDVFAKRLQVQERMTAQIASAIDRALAPRGVAVWLSAEHFCMASRGVHKVGVSTHTQRMTGLFAKDVHLATRFMTLAKAD

SEQ ID NO: 9463 - protein, 213 aa, Kordiimonadales bacterium
  misc_feature (1)..(213): tr|A0A2A4VM78|A0A2A4VM78_9PROT GTP cyclohydrolase 1 OS= Kordiimonadales bacterium OX=2030814 GN=folE PE=3 SV=1
MDAVLDRIDHDPELKVVSQDTEISTSKRPSRAEAEAAVRTLIRWAGDDPTREGLIDTPKRVTKAYEEFFEGYDQDPEEILARTFDEVAGYDDMVVLRGIRVESHCEHHMVPVQGTAHVAYMPNGSVVGISKLARIVETYSKRLQTQETMTAQIADAIEKYLDPKGVAIVIDATHQCMSCRGVKHQNVYTITRQFRGCFKEADQERRFWDLVRG

SEQ ID NO: 9464 - protein, 220 aa, Kordiimonas lacus
  misc_feature (1)..(220): tr|A0A1G6Y2C3|A0A1G6Y2C3_9PROT GTP cyclohydrolase 1 OS= Kordiimonas lacus OX=637679 GN=folE PE=3 SV=1
MDAVLERADTGSELKVIPDDARGDAGAGTTPRVIKPSRAEAEEAVRTLIRWAGDDPTREGLLDTPKRVTKAYKEFFKGYEDDPAEILSRTFEEVAGYDDMVVLRGIKVESHCEHHMVPVLGTAHVAYMPNGSVVGISKLARIVEAYGKRLQTQETMTAQIADAIETYLKPKGVAVVIDATHSCMSCRGVKHSDVYTITRQFRGVFREADQERRFWDLVRG

SEQ ID NO: 9465 - protein, 211 aa, Kordiimonas sp.
  misc_feature (1)..(211): tr|A0A2E1CSV0|A0A2E1CSV0_9PROT GTP cyclohydrolase 1 OS= Kordiimonas sp. OX=1970157 GN=folE PE=3 SV=1
MVVKAVQKQEAAVVRPDREEAEAAVRTLLQWAGDDPDREGLLDTPARVARAFEEYFAGYKMDPVDYLSRTFEEVAGYDEMVVLKDIPFESHCEHHLAPIIGRAHVGYLPSNRVVGISKLARVVEAYAKRLQVQEKMTAQIADCILDVLQPKGVAVYIEATHHCMTTRGVHKHGVSMVTSRLLGAFRDDEKTRREFLATVGTTQFSSPHFVG

SEQ ID NO: 9466 - protein, 199 aa, Koribacter versatilis
  misc_feature (1)..(199): tr|Q1IPJ1|Q1IPJ1_KORVE GTP cyclohydrolase 1 OS=Koribact er versatilis (strain Ellin345) OX=204669 GN=folE PE=3 SV=1
MKTEKEPTTLTSASNEELVAELLQRIGEDPKREGLLRTPERYAKALKFLTKGYDEDPETVLNGALFTVTYDEMVIVKDIEMFSLCEHHLLPFFGKVHIAYIPNGKVIGLSKLPRLVEVFARRLQVQERLTTEIAQTIERVIEPLGVGVIIEARHLCMMMRGVEKQHSSTVTSAMLGAFRAPQTREEFLSLVRNSKTNGF

SEQ ID NO: 9467 - protein, 222 aa, Kosakonia arachidis
  misc_feature (1)..(222): tr|A0A1I7CXH2|A0A1I7CXH2_9ENTR GTP cyclohydrolase 1 OS= Kosakonia arachidis OX=551989 GN=folE PE=3 SV=1
MSSLSKEAALVHEALVARGLETPLRPPVREMDNETRKRLISGHMTEIMQLLNLDLNDDSLMETPHRIAKMYVDEIFSGLDYANFPKITVIENKMKVDEMVTVRDITLTSTCEHHFVTIDGKATVAYIPKESVIGLSKINRIVQFFAQRPQVQERLTQQILTALQTLLGTNNVAVSIDAVHYCVKARGIRDATSATTTTSLGGLFKSSQNTRQEFLRAVRHSN

SEQ ID NO: 9468 - protein, 221 aa, Kosakonia cowanii
  misc_feature (1)..(221): tr|A0A3R5YF60|A0A3R5YF60_9ENTR GTP cyclohydrolase 1 OS= Kosakonia cowanii OX=208223 GN=folE PE=3 SV=1
MSSLSKEAALVHEALVARGLETPLRPPVQMDNETRKRLIAGHMTEIMQLLNLDLNDDSLMETPHRIAKMYVDEIFSGLDYANFPKITVIENKMKVDEMVTVRDITLTSTCEHHFVTIDGKATVAYIPKESVIGLSKINRIVQFFAQRPQVQERLTQQILTALQTLLGTNNVAVSIDAVHYCVKARGIRDATSATTTTSLGGLFKSSQNTRQEFLRAVRHTN

SEQ ID NO: 9469 - protein, 222 aa, Kosakonia oryzae; identical to SEQ ID NO: 9467
  misc_feature (1)..(222): tr|A0A1T5HHT2|A0A1T5HHT2_9ENTR GTP cyclohydrolase 1 OS= Kosakonia oryzae OX=497725 GN=folE PE=3 SV=1

SEQ ID NO: 9470 - protein, 222 aa, Kosakonia oryzendophytica
  misc_feature (1)..(222): tr|A0A1C3Z092|A0A1C3Z092_9ENTR GTP cyclohydrolase 1 OS= Kosakonia oryzendophytica OX=1005665 GN=folE PE=3 SV=1
MSSLSKEAALVHEALVARGLETPLRPPVRETDNETRKRLIAGHMTEIMQLLNLDLNDDSLMETPHRIAKMYVDEIFSGLDYANFPKITVIENKMKVDEMVTVRDITLTSTCEHHFVTIDGKATVAYIPKESVIGLSKINRIVQFFAQRPQVQERLTQQILTALQTLLGTNNVAVSIDAVHYCVKARGIRDATSATTTTSLGGLFKSSQNTRQEFLRAVRHHN

SEQ ID NO: 9471 - protein, 222 aa, Kosakonia oryziphila
  misc_feature (1)..(222): tr|A0A1C4AU15|A0A1C4AU15_9ENTR GTP cyclohydrolase 1 OS= Kosakonia oryziphila OX=1005667 GN=folE PE=3 SV=1
MSSLSKEAALVHEALVARGLETPLRPPVREMDNETRKRLISGHMTEIMQLLNLDLTDDSLMETPHRIAKMYVDEIFSGLDYANFPKITVIENKMKVDEMVTVRDITLTSTCEHHFVTIDGKATVAYIPKESVIGLSKINRIVQFFAQRPQVQERLTQQILTALQTLLGTNNVAVSIDAVHYCVKARGIRDATSATTTTSLGGLFKSSQNTRQEFLRAVRHSN

SEQ ID NO: 9472 - protein, 222 aa, Kosakonia radicincitans; identical to SEQ ID NO: 9467
  misc_feature (1)..(222): tr|A0A1V0LBM0|A0A1V0LBM0_9ENTR GTP cyclohydrolase 1 OS= Kosakonia radicincitans DSM 16656 OX=1177180 GN=folE PE =3 SV=1

SEQ ID NO: 9473 - protein, 222 aa, Kosakonia radicincitans; identical to SEQ ID NO: 9467
  misc_feature (1)..(222): tr|A0A5E8BNW6|A0A5E8BNW6_9ENTR GTP cyclohydrolase 1 OS= Kosakonia radicincitans OX=283686 GN=folE PE=3 SV=1

SEQ ID NO: 9474 - protein, 221 aa, Kosakonia sp.; identical to SEQ ID NO: 8737
  misc_feature (1)..(221): tr|A0A1I2CP18|A0A1I2CP18_9ENTR GTP cyclohydrolase 1 OS= Kosakonia sp. S29 OX=1855371 GN=folE PE=3 SV=1

SEQ ID NO: 9475 - protein, 221 aa, Kosakonia sp.
  misc_feature (1)..(221): tr|A0A4R0H2J8|A0A4R0H2J8_9ENTR GTP cyclohydrolase 1 OS= Kosakonia sp. WCHEs120001 OX=2529380 GN=folE PE=3 SV=1
MSSLSKEAALVHEALVARGLETPLRPPVQMDNESRKRLIAGHMTEIMQLLNLDLNDDSLMETPHRIAKMYVDEIFSGLDYANFPKITVIENKMKVDEMVTVRDITLTSTCEHHFVTIDGKATVAYIPKDSVIGLSKINRIVQFFAQRPQVQERLTQQILTALQTLLGTNNVAVSIDAVHYCVKARGIRDATSATTTTSLGGLFKSSQNTRQEFLRAVRHTN

SEQ ID NO: 9476 - protein, 256 aa, Kosmotoga arenicorallina
  misc_feature (1)..(256): tr|A0A176K2W9|A0A176K2W9_9BACT GTP cyclohydrolase FolE2 OS=Kosmotoga arenicorallina S304 OX=1453497 GN=folE2 P E=3 SV=1
MRDVQNERDERNVPIDMVGIRGLKYPIVVLDRANGRQRTVGTFDLFVDLPRDFRGTHMSRFVEVLDRHNNRITPRNMESILRDMRTFLKADVAHINVFFPYFLRKSAPISGISSYSSFICGFIARLNEGFDFILEVNVPVMTVCPCSKEISERGAHNQRANAKVRIRMKSLVWIEEIIEIAESSASAPIFSLLKREDEKYITELSYDNPRFVEDLSREIVLRLEKDQRITWYRVEVASQESIHNHEAYACIEKRGI

SEQ ID NO: 9477 - protein, 257 aa, Kosmotoga olearia
  misc_feature (1)..(257): sp|C5CEC0|GCH4_KOSOT GTP cyclohydrolase FolE2 OS=Kosmot oga olearia (strain ATCC BAA-1733 / DSM 21960 / TBF 19. 5.1) OX=521045 GN=folE2 PE=3 SV=1
MRDVQSEKDHRNIPINMVGIKGLKYPIIVMDRTNKRQHTIGTFNLFVDLPKDFRGTHMSRFVEVLDRHNMKVTPKNMESILDDMREALKATVAHVTVDFPYFIRKNAPISGIGSYSSYNCGFISTKNKEFDFILKVEVPVLTVCPCSKEISDRGAHNQRAMVNVQVRMNSLVWIEEIIEMVEDAASAPIFTLLKREDEKFITEVSYDNPRFVEDVSREVVLRFMNDPRISWYRVEVSSQESIHNHEAYACIEKGKSL

SEQ ID NO: 9478 - protein, 263 aa, Kosmotoga pacifica
  misc_feature (1)..(263): tr|A0A0G2Z681|A0A0G2Z681_9BACT GTP cyclohydrolase FolE2 OS=Kosmotoga pacifica OX=1330330 GN=folE2 PE=3 SV=1
MKNEKAFLRDVQNERDERNVPIDMVGIRGLKYPIVVLDRANGRQRTVGTFDLFVDLPRDFRGTHMSRFVEVLDRHNNRITPRNMESILKDMREFLKADVAHINVFFPYFLRKSAPVSGISSYSSFECGFITRLNEGFDFILEVNVPVMTVCPCSKEISDRGAHNQRANAKVRIRMNSLVWIEEIIEIAETSASAPIFSLLKREDEKFITELSYDNPRFVEDLSREIVLRLEKDPRITWYRVEVASQESIHNHEAYACIEKRGI

SEQ ID NO: 9479 - protein, 258 aa, Kosmotoga sp.
  misc_feature (1)..(258): tr|A0A5D0SSM9|A0A5D0SSM9_9BACT GTP cyclohydrolase FolE2 OS=Kosmotoga sp. OX=1955248 GN=folE2 PE=3 SV=1
MRDIQNEMDNRNLSIDMVGIRSLEYPIIVLDRKEGKQSTIGHFDLFVDLPQNFRGTHMSRFVEVLNKHNKKITPKNMRSMLQDMRDSLKAKVAHINVSFPYFIKKAAPVSKIESYSRFHCSFITTLNNSFDFILEVNVPVMTVCPCSREISDRGAHNQRANVRIKIKMNSLVWIEELIEYSEKSASAPIYSLLKREDERFITEISYDRPRFVEDLSREVVLHLQKDERIDWYRVEVSSQESIHNHEAYACIEKGKKWV

SEQ ID NO: 9480 - protein, 258 aa, Kosmotogaceae bacterium
  misc_feature (1)..(258): tr|A0A3B8NA24|A0A3B8NA24_9BACT GTP cyclohydrolase FolE2 OS=Kosmotogaceae bacterium OX=2053567 GN=folE2 PE=3 SV =1
MIMRDVQNDRDKRNIPVDMVGVRSVMYPIVVLDKENQNQNTVGSFNICVDLPKDFRGTHMSRFIEVLDSHNKKITPRNMKHILDDILRSLDAAVAHLKVEFPYFIRKQAPVSRVESYSSYKCSFTATKNNHFDFVLGVSVPVMTVCPCSREISDRGAHNQRAETHVQLRMNSLVWIEDVVQIVEDSASSPVFSLLKREDEKFVTENSYDNPRFVEDLSREIVQKLEMDRRISWYKVEVTSMESIHNHEAYACIERKDD

SEQ ID NO: 9481 - protein, 223 aa, Kouleothrix aurantiaca
  misc_feature (1)..(223): tr|A0A0P9D523|A0A0P9D523_9CHLR GTP cyclohydrolase 1 OS= Kouleothrix aurantiaca OX=186479 GN=folE PE=3 SV=1
MTSNGHTNGNGTLPLALSAEDNDLVLPGQGKLEGMTFASNDQIEAAVSTILTNIGEDPAREGLQRTPYRVAKMYAELTAGYHVDPVALINDAIFSVDYDEMVLVKDIDFYSLCEHHMLPFMGRVHVAYIPNGKVIGLSKIPRIVETYARRLQVQERMTVEIANFINDALHPQGVAVVAEGVHMCSVMRGVKKANAKMVTSAMRGVFRKDARTRAEFMSHIDHD

SEQ ID NO: 9482 - protein, 200 aa, Kozakia baliensis
  misc_feature (1)..(200): tr|A0A1D8UXB9|A0A1D8UXB9_9PROT GTP cyclohydrolase 1 OS= Kozakia baliensis OX=153496 GN=folE PE=3 SV=1
MGGERPLGPIDRPADAEERIADAVKEILTALGEDPEREGLFETPQRVARMYLDVLGGLHQDPREHLYKQFVADHHEGAVIVRDIGFHSMCEHHLLPFFGKAHVAYLPEDGRLTGLSKIARMVDALARRPQLQERLTDQIAASIIEVLEPKAVMVLVEAEHMCMAMRGIRSVGSRTVTTVARGVWQRDAQARAEILSLLKG

SEQ ID NO: 9483 - protein, 218 aa, Kozakia baliensis
  misc_feature (1)..(218): tr|A0A511GP03|A0A511GP03_9PROT GTP cyclohydrolase 1 OS= Kozakia baliensis OX=153496 GN=folE PE=3 SV=1
MNKPTADLVALDAARHKGLGGERPLGPIDRPADAEERIADAVKEILTALGEDPEREGLFETPQRVARMYLDVLGGLHQDPREHLYKQFVADHHEGAVIVRDIGFHSMCEHHLLPFFGKAHVAYLPEDGRLTGLSKIARMVDALARRPQLQERLTDQIAASIIEVLEPKAVMVLVEAEHMCMAMRGIRSVGSRTVTTVARGVWQRDAQARAEILSLLKG

SEQ ID NO: 9484 - protein, 187 aa, Krasilnikovia cinnamomea
  misc_feature (1)..(187): tr|A0A4Q7ZK42|A0A4Q7ZK42_9ACTN GTP cyclohydrolase 1 OS= Krasilnikovia cinnamomea OX=349313 GN=folE PE=3 SV=1
MLDPHARAAAEEHLRELLKVFGHDIDREGLVDTPRRYVRFLEQFLVPEEFDFTSFSKENYDQMIVQRDVPFYSICEHHLVPFFGVGTIAYIPDRRIVGLSKLARCLRFHAAGLQNQERITMATASRLQEALEPKGVAVILQARHLCMEMRGIKAYGATTITSEVIGAFRDQNRTRGELLSLISQGQK

SEQ ID NO: 9485 - protein, 204 aa, Krasilnikoviella flava
  misc_feature (1)..(204): tr|A0A1T5IKX6|A0A1T5IKX6_9MICO GTP cyclohydrolase 1 OS= Krasilnikoviella flava OX=526729 GN=folE PE=3 SV=1
MTDPVTDLGMRAAADVPPYDSARAEAAVRELLLAVGEDPEREGLKETPARVARAYQEIFAGLRQEPEDVLTTTFDLGHEEMVLVRDIEVYSTCEHHLVPFHGVAHVGYIPSTDGRITGLSKIARLVEVYARRPQVQERLTTQIADAMVRILEPRGVLVVVECEHLCMSMRGVRKPGSRTVTSAVRGIMQSATTRAEAMSLVMGR

SEQ ID NO: 9486 - protein, 190 aa, Kribbella albertanoniae
  misc_feature (1)..(190): tr|A0A4R4QFX7|A0A4R4QFX7_9ACTN GTP cyclohydrolase 1 OS= Kribbella albertanoniae OX=1266829 GN=folE PE=3 SV=1
MTSPKFDHARAERAVRELLFAIGEDPDRDGLRETPARVARSYAEITAGLGQRAEDVLSTTFELEHDEMVLVKDIEVWSVCEHHLVPFTGVAHVGYIPNRDGRITGLSKLARLVDVYAKRPQVQERLTTQIAESLVELLEPRGVIVVIECEHLCMTMRGVRKAGAKTITSAVRGQLRNPVTRAEAMSLIVG

SEQ ID NO: 9487 - protein, 203 aa, Kribbella albertanoniae
  misc_feature (1)..(203): tr|A0A4R4P1I2|A0A4R4P1I2_9ACTN GTP cyclohydrolase 1 OS= Kribbella albertanoniae OX=1266829 GN=folE PE=3 SV=1
MAISADLEAVPLHIVASRAEIDLPAAERAVADLLKALGRDPHSSHLADTPRRVANAYAEMLTPREFALTTFPNDEGYDELVLAKDIPVQSLCEHHLLPFQGVAHVGYLPGDRILGLSKLARVVELFARDLQVQERLTKQVADWLQDHLAPQGVGVVIEAEHQCMSLRGVRAVGSRTVTSALHGVLRDKPSSRQEFFALTGLTP

SEQ ID NO: 9488 - protein, 215 aa, Kribbella amoyensis
  misc_feature (1)..(215): tr|A0A561BWE8|A0A561BWE8_9ACTN GTP cyclohydrolase 1 OS= Kribbella amoyensis OX=996641 GN=folE PE=3 SV=1
MTTIRSELADPTTQLADPDAPAKLHVVGGRPGIDLPAAQQAVADLLRALGRDPDSAHLADTPRRVANAYAEMLTPREFDLTTFPNDEGYDELVLARDIPVQSLCEHHLLPFEGVAHVGYLPGDRILGLSKLARVVELFARDLQVQERLTKQVADWLQGHLAPKGVGVVIEAEHQCMSLRGVRATGSRTVTSSVHGVLRTNPASRQEFFALTGIAA

SEQ ID NO: 9489 - protein, 190 aa, Kribbella amoyensis
  misc_feature (1)..(190): tr|A0A561BLU8|A0A561BLU8_9ACTN GTP cyclohydrolase 1 OS= Kribbella amoyensis OX=996641 GN=folE PE=3 SV=1
MTSPKFDHDRAERAIRELLIAIGEDPDREGLKETPARVARSYAEIAGGLGQSAADVLTTTFDLGHDEMVLVKDIEVWSLCEHHLVPFTGVAHVGYIPSAEGRITGLSKLARLVDVYAKRPQVQERLTTQVADSLVELLGPRGVIVVVECEHLCMTMRGVRKPGAKTITSAVRGQLRDPVTRAEAMSLIVG

SEQ ID NO: 9490 - protein, 190 aa, Kribbella antibiotica
  misc_feature (1)..(190): tr|A0A4R4ZV26|A0A4R4ZV26_9ACTN GTP cyclohydrolase 1 OS= Kribbella antibiotica OX=190195 GN=folE PE=3 SV=1
MTSPKFDHARAERAVRELLFAIGEDPDRDGLRDTPARVARSYAEITAGLGQTAEEVLSTTFDLGHDEMVLVKDIEVWSICEHHLVPFTGVAHVGYIPNRDGRITGLSKLARLVDVYAKRPQVQERLTTQVAESLMELLEPRGVIVVIQCEHLCMTMRGVRKAGAKTITSAVRGQLRNPVTRAEAMSLIVG

SEQ ID NO: 9491 - protein, 207 aa, Kribbella antibiotica
  misc_feature (1)..(207): tr|A0A4R4Z4G7|A0A4R4Z4G7_9ACTN GTP cyclohydrolase 1 OS= Kribbella antibiotica OX=190195 GN=folE PE=3 SV=1
MSAMAISADLEPVAPLRIVAGRERIDLPAAERAVADLLRALGRDPDSVHLADTPRRVAHAYEEMLTPREFSLTTFPNDEGYDELVLAKDIPVQSLCEHHMLPFQGVAHVGYLPGDRILGLSKLARVVELFARDFQVQERLTKQVADWLQDHLAPKGVGVVIEAEHQCMSLRGVRAIGSRTVTSSLHGILRDKPSSRQEFFALTGLTP

SEQ ID NO: 9492 - protein, 208 aa, Kribbella flavida
  misc_feature (1)..(208): tr|D2PXS2|D2PXS2_KRIFD GTP cyclohydrolase 1 OS=Kribbell a flavida (strain DSM 17836 / JCM 10339 / NBRC 14399) O X=479435 GN=folE PE=3 SV=1
MTTIRTELVETATPATLHVVGGRPAIDLAAAERAVADLLVALGRDPHSAHLAETPRRVANAYAEMLTPREFDLTTFPNDEGYDELVLARDIPVQSLCEHHMLPFQGVAHVGYLPGARILGLSKLARVVELFARDLQVQERLTKQVADWLQLQLAPKGVGVVIEAEHQCMSLRGVRATGSTTVTSAVHGALRENPASRQEFFALTGIAA

SEQ ID NO: 9493 - protein, 198 aa, Kribbella flavida
  misc_feature (1)..(198): tr|D2PY96|D2PY96_KRIFD GTP cyclohydrolase 1 OS=Kribbell a flavida (strain DSM 17836 / JCM 10339 / NBRC 14399) O X=479435 GN=folE PE=3 SV=1
MPAGCAAPVTSPKFDHERAERAVRELLIAIGEDPDREGLKETPARVARSYEEITAGLGLTASDVLTTTFDLGHDEMILVKDIEVWSLCEHHLVPFTGVAHVGYIPNPDGRITGLSKLARLVDVYAKRPQVQERLTTQVAESLVELLQPRGVIVVIECEHLCMTMRGVRKPGARTITSAVRGQLRNPSTRAEAMSLIVG

SEQ ID NO: 9494 - protein, 203 aa, Kribbella jejuensis
  misc_feature (1)..(203): tr|A0A542DB10|A0A542DB10_9ACTN GTP cyclohydrolase 1 OS= Kribbella jejuensis OX=236068 GN=folE PE=3 SV=1
MAISADLESVPLHIVARREQIDLPAAQRAVADLLTALGRDPQSAHLADTPRRVANAYAEMLTPREFELTTFPNDEGYDELVLAKDIPVQSLCEHHLLPFQGVAHVGYLPGDRILGLSKLARVVELFARDFQVQERLTKQVADWLQDHLEPKGVGVVIEAEHQCMSLRGVRATGSKTVTSALHGTLRNNPSSRAEFFALTGLTP

SEQ ID NO: 9495 - protein, 190 aa, Kribbella jejuensis
  misc_feature (1)..(190): tr|A0A542ESL2|A0A542ESL2_9ACTN GTP cyclohydrolase 1 OS= Kribbella jejuensis OX=236068 GN=folE PE=3 SV=1
MTSPKFDHARAERAVRELLIAIGEDPEREGLRDTPARVARSYAEMTAGLGNRAEDVLTTTFALEHDEMVLVKDIEVWSLCEHHLVPFTGVAHVGYIPSRDGRVTGLSKLARLVDVYAKRPQVQERLTTQVAESLVEILQPRGVIVVIECEHLCMTMRGVRKPGAKTITSAVRGQLRNPVTRAEAMSLIVG

SEQ ID NO: 9496 - protein, 203 aa, Kribbella pittospori
  misc_feature (1)..(203): tr|A0A4R0KZV8|A0A4R0KZV8_9ACTN GTP cyclohydrolase 1 OS= Kribbella pittospori OX=722689 GN=folE PE=3 SV=1
MAMSADLESVPLHIVPGRAEIDLPAAQRAVADLLTALGRDPHSAHLADTPRRVADAYAEMLTPREFELTTFPNDEGYDELVLAKDIPVQSLCEHHLLPFTGVAHVGYLPGERILGLSKLARVVELFARDFQVQERLTKQVADWLQDHLAPKGVGVVIEAEHQCMSLRGVRATGSRTVTSSLHGTLRENPSSRQEFFALTGLTP

SEQ ID NO: 9497 - protein, 190 aa, Kribbella pittospori
  misc_feature (1)..(190): tr|A0A4R0KGE5|A0A4R0KGE5_9ACTN GTP cyclohydrolase 1 OS= Kribbella pittospori OX=722689 GN=folE PE=3 SV=1
MTSPKFDHARAERAVRELLIAIGEDPDREGLLDTPARVARSYAEITGGLGQRAEDVLTTTFDIGHDEMVLVKGIEVWSLCEHHLVPFTGVAHVGYIPSRDGRITGLSKLARLVDVYAKRPQVQERLTTQVADSLVELLEPRGVIVVIECEHLCMTMRGVRKPGAKTITSAVRGQLRNPVTRAEAMSLIVG

SEQ ID NO: 9498 - protein, 190 aa, Kribbella sindirgiensis
  misc_feature (1)..(190): tr|A0A4R0I676|A0A4R0I676_9ACTN GTP cyclohydrolase 1 OS= Kribbella sindirgiensis OX=1124744 GN=folE PE=3 SV=1
MVSPNFDHERAERAVRELLYAIGEDPDREGLRDTPARVARSYAEITAGLGQGAEDVLTTTFALEHDEMILVKDIEVWSLCEHHLVPFTGVAHVGYIPSRDGRVTGLSKLARLVDVYAKRPQVQERLTTQVAESLVEILQPRGVIVVIECEHLCMTMRGVRKPGAKTITSAVRGQLRNPVTRAEAMSLIVG

SEQ ID NO: 9499 - protein, 203 aa, Kribbella sindirgiensis
  misc_feature (1)..(203): tr|A0A4R0IMT5|A0A4R0IMT5_9ACTN GTP cyclohydrolase 1 OS= Kribbella sindirgiensis OX=1124744 GN=folE PE=3 SV=1
MAISADLESVPLHIVARRAEIDLPAAQRAVADLLTALGRDPHSAHLADTPRRVANAYAEMLTPREFELTTFPNDEGYDELVLAKDIPVQSLCEHHLLPFQGVAHVGYLPGDRILGLSKLARVVELFARDFQVQERLTKQVADWLQDHLAPKGVGVVIEAEHQCMSLRGVRAAGSRTVTSSLHGILRESPSSRQEFFALTGLTP

SEQ ID NO: 9500 - protein, 190 aa, Kribbella soli
  misc_feature (1)..(190): tr|A0A4Q7X9T1|A0A4Q7X9T1_9ACTN GTP cyclohydrolase 1 OS= Kribbella soli OX=1124743 GN=folE PE=3 SV=1
MTSPNFDHERAANAVRELLFAIGEDPDREGLRDTPDRVARSYAEITAGLGQSAGDVLTTTFALEHDEMILVKDIEVWSICEHHLVPFTGVAHVGYIPSRDGRITGLSKLARLVDVYAKRPQIQERLTTQVAESLVEILEPRGVIVVIECEHLCMTMRGVRKPGAKTITSAVRGQLRNPVTRAEAMSLIVG

SEQ ID NO: 9501 - protein, 203 aa, Kribbella soli
  misc_feature (1)..(203): tr|A0A4Q7WPW2|A0A4Q7WPW2_9ACTN GTP cyclohydrolase 1 OS= Kribbella soli OX=1124743 GN=folE PE=3 SV=1
MAISADLESVPLHIVARRAEIDLPAAQRAVADLLTALGRDPESAHLADTPRRVANAYAEMLTPREFELTTFPNDEGYDELVLAKDIPVQSLCEHHLLPFQGVAHVGYLPGDRILGLSKLARVVELFARDFQVQERLTKQVADWLQDHLDPKGVGVVIEAEHQCMSLRGVRAAGSKTVTSSLQGILRDNPSSRQEFFALTGLTP

SEQ ID NO: 9502 - protein, 203 aa, Kribbella sp.; identical to SEQ ID NO: 9499
  misc_feature (1)..(203): tr|A0A4R0IZD0|A0A4R0IZD0_9ACTN GTP cyclohydrolase 1 OS= Kribbella sp. YM55 OX=1572660 GN=folE PE=3 SV=1

SEQ ID NO: 9503 - protein, 203 aa, Kribbella sp.
  misc_feature (1)..(203): tr|A0A4R8DXF6|A0A4R8DXF6_9ACTN GTP cyclohydrolase 1 OS= Kribbella sp. VKM Ac-2566 OX=2512218 GN=folE PE=3 SV=1
MAISADLESVPLHIVARREEIDLPAAQRAVADLLTALGRDPQSAHLADTPRRVANAYAEMLTPREFELTTFPNDEGYDELVLAKDIPVQSLCEHHLLPFQGVAHVGYLPGDRILGLSKLARVVELFARDFQVQERLTKQVADWLKDHLDPKGVGVVIEAEHQCMSLRGVRAAGSRTVTSSLHGVLRDSPSSRQEFFALTGLTP

SEQ ID NO: 9504 - protein, 238 aa, Kriegella aquimaris
  misc_feature (1)..(238): tr|A0A1G9RJD8|A0A1G9RJD8_9FLAO GTP cyclohydrolase 1 OS= Kriegella aquimaris OX=192904 GN=folE PE=3 SV=1
MYIFAIRFSHSSMKIDSTLEDHFEEMGNNHVSTSGETPLRNDAFVLNDEDKIERIKESVRDILLTLGLDLEDDSLKGTPNRVAKMFVNEIFGGLHPDRKPKSSTFKNKYKYGEMLVEKNITLYSTCEHHLLPIVGRAHIAYISSGTVVGLSKMNRIVDYYAKRPQVQERLNIQIVRELQKVMNTEDVACVIDAKHLCVNSRGIRDIESSTVTAEYGGKFKDEAVRREFLDYINLETKF

SEQ ID NO: 9505 - protein, 199 aa, Kriegella aquimaris
  misc_feature (1)..(199): tr|A0A1G9J2Q5|A0A1G9J2Q5_9FLAO GTP cyclohydrolase 1 OS= Kriegella aquimaris OX=192904 GN=folE PE=3 SV=1
MSPYRNLEEYNLEITDEVRDRYASIINEIGEDVTREGLEKTPERAAKAMLFLTQGYKQDAVEILKGAMFKESYDDMVIIKDIELYSLCEHHMLPFFGKAHVAYIPNGHIVGLSKIPRVVDVFARRLQVQERLTHDILECINDTLKPKGVAVVIEAAHMCMMMRGVQKQNSVTTTSGFRGQFEKIETRNEFLKLISSHLS

SEQ ID NO: 9506 - protein, 212 aa, Kroppenstedtia eburnea
  misc_feature (1)..(212): tr|A0A1N7IPW3|A0A1N7IPW3_9BACL GTP cyclohydrolase 1 OS= Kroppenstedtia eburnea OX=714067 GN=folE PE=3 SV=1
MKFLIGSGLPTRKKLRKREATQDMGVNHEQIQQAVRMILEAVGEDPDREGLKETPARVARMYEEIFSGMGEDPDEYFSTVFGEDHEELVLVKDIPFFSLCEHHLVPFFGKAHVGYIPKSGRVTGLSKLARAVDTVARRPQLQERITYTVADSLERTLQPHGVIVVVEAEHMCMTMRGIKKPGSRTVTSAVRGVFEKNSAARAEAFSLIGFGK

SEQ ID NO: 9507 - protein, 196 aa, Kroppenstedtia sanguinis
  misc_feature (1)..(196): tr|A0A482U4A3|A0A482U4A3_9BACL GTP cyclohydrolase 1 OS= Kroppenstedtia sanguinis OX=1380684 GN=folE PE=3 SV=1
MSTEPSRIGEFDQARAEAAVRELLLALGEDPDREGLRRTPTRVANAFREVFAGLYTDPDEVLSTTFDENHEELVLVKDIPLYSTCEHHLVAFHGVAHVGYIPGPSGRVTGLSKLARVVDLYAKRPQVQERLTSQIADAVMSKLDPRGVIVVIEAEHLCMAMRGIRKPGSSTTTSAVRGIFKTNAVSRSEALQLIAR

SEQ ID NO: 9508 - protein, 216 aa, Ktedonobacter racemifer
  misc_feature (1)..(216): tr|D6TD44|D6TD44_9CHLR GTP cyclohydrolase 1 OS=Ktedonob acter racemifer DSM 44963 OX=485913 GN=folE PE=3 SV=1
MTLNIDLDDLEFEDAIELKQRHISVEQMRTFEGYMAEIFDAMGMNVSTPGTEDTPKRFLKAMLDATEGYDGDPKLIKVFPAEHPNGTNSHLSQVIEGPIHFFSLCEHHAFPFFGQAYVGYIADEHIIGLSKLTRLVRVFAKRFSVQERITQQIASSLEAILQPQGVAVYLEANHLCMAMRGVRESSALTRTTAWRGEYEHNAELRSEFFSTANIRP

SEQ ID NO: 9509 - protein, 205 aa, Ktedonobacter racemifer
  misc_feature (1)..(205): tr|D6TZN0|D6TZN0_9CHLR GTP cyclohydrolase 1 OS=Ktedonob acter racemifer DSM 44963 OX=485913 GN=folE PE=3 SV=1
MTTHMNKGQLNGHASLESLLTAGQKKVDYPRLLELGRELLIAIGEDPDREGLLDTPRRWADSWREFVEYDPGSTETCFSSASTDQMVCVSGMRVFSMCEHHLMPFWCDVAIGYIAGDKVLGLSKFARIAHQFAHKLQLQERIGHEIADEITRITGSPDVAVVLKGEHMCMTARGIRTPGVMTSSVMRGVFRSESEARLEFLRLIE

SEQ ID NO: 9510 - protein, 202 aa, Ktedonobacter sp.
  misc_feature (1)..(202): tr|A0A1Q7A5K0|A0A1Q7A5K0_9CHLR GTP cyclohydrolase 1 OS= Ktedonobacter sp. 13_2_20CM_2_56_8 OX=1805232 GN=folE P E=3 SV=1
MMELQRREISQEQMRKFEGYMAEIFDALGMDLNTPATEETPQRFVRAMFDATEGYDGDPKLLKVFETECRGGSDCRLSQVIEGPIPFFALCEHHALPFYGLAYIGYIAHVHIIGISKLTRLVRLFAKRFTVQERLGRQIADTFTAMLEPHGVAVYVEAHHLCMQMRGVKETASLTRTTVWRGEYEQNSSLRVEFLLGCGADV

SEQ ID NO: 9511 - protein, 202 aa, Ktedonobacter sp.; identical to SEQ ID NO: 9510
  misc_feature (1)..(202): tr|A0A1Q7WT79|A0A1Q7WT79_9CHLR GTP cyclohydrolase 1 OS= Ktedonobacter sp. 13_1_20CM_3_54_15 OX=1805224 GN=folE PE=3 SV=1

SEQ ID NO: 9512 - protein, 194 aa, Ktedonobacterales bacterium
  misc_feature (1)..(194): tr|A0A4V0YYN2|A0A4V0YYN2_9CHLR GTP cyclohydrolase I Fol E OS=Ktedonobacterales bacterium SCAWS-G2 OX=2509675 GN =folE PE=4 SV=1
MVDEILRPTTPRVDYDTLVRLGRELLVAIGEDPQREGIQDTPRRWADWWREYIEYEPGTTDTSFTSTRAGQLVCISGIRVWTLCEHHLLPFWCDVAIGYLVNETVLGLSKFARIAHHCAHRLQHQEQLGQHIADMVSQMVQTDDVAVCLRGEHLCMMMRGIKTPALITSTVMSGAFEREKELQSQFLHLVAPHF

SEQ ID NO: 9513 - protein, 212 aa, Kuenenia stuttgartiensis
  misc_feature (1)..(212): tr|Q1Q0A8|Q1Q0A8_KUEST Strongly similar to GTP cyclohyd rolase I OS=Kuenenia stuttgartiensis OX=174633 GN=folE PE=4 SV=1
MNENVIANENNFLKVKKRQISDEQIRKFEGYAAEIFTTLGLNLNTAATKETPHRFINALIESTEGYDGDPKLVKVFETECRGGPDCRLSQIIEGPIRFFALCEHHCLPFYGVVYVGYISHEHIIGLSKLTRLVHLFSRRFEVQERIGQQIADTLNQLLLPHGVAVYIEAHHLCVEMRGVKEISSISRTTFWRGNYDGDPALRAEFLAACGKK

SEQ ID NO: 9514 - protein, 187 aa, Kuenenia stuttgartiensis
  misc_feature (1)..(187): tr|Q1PYF3|Q1PYF3_KUEST GTP cyclohydrolase 1 OS=Kuenenia stuttgartiensis OX=174633 GN=gch PE=3 SV=1
MIDKEKIQAAIRLFIEGIGEDPNREGLQETPERVAEMCEEIFAGIGQDSHSVIKVLKSEKYDEIVLLKDIPFYSMCEHHLLPFSGVSHVAYIPQGNRVTGISKLARVVNIEARRPQVQERLTTDIAESIMKALKPKGVLVIIEAEHLCMTMRGIKKPGTKVLTSVVRGIFRDNPATRAEVMALIKGH

SEQ ID NO: 9515 - protein, 204 aa, Kurthia sibirica
  misc_feature (1)..(204): tr|A0A2U3AJ03|A0A2U3AJ03_9BACL GTP cyclohydrolase 1 OS= Kurthia sibirica OX=202750 GN=folE PE=3 SV=1
MDSKQWRIHTVTKTNTQAVDIEKIQEAVKMILEAVGEDPSREGLLDTPKRVSKMYAEMFEGLHMDPRDYFETVFHEGHNEVVLVKDIPFFSMCEHHLVPFYGKAHIAYIPQDGVVAGLSKLARTVETVAKRPQLQERITTTVANTMMEMLKPQGVYVVIEAEHMCMTMRGIKKPGAKTITTVAKGIFENDDVKRNEILSFIQMP

SEQ ID NO: 9516 - protein, 197 aa, Kurthia sp.
  misc_feature (1)..(197): tr|A0A433RSS5|A0A433RSS5_9BACL GTP cyclohydrolase 1 OS= Kurthia sp. 3B1D OX=1562256 GN=folE PE=3 SV=1
MTNTTEHTDNKVDLDKIKQAVTMILEAVGEDPTREGLEDTPKRVAKMYAEMFAGLHTDAREYFETVFHEGHDEVVLVKDIPFFSMCEHHLVPFYGKAHVAYIPQNGVVAGLSKLARTVDTVARRPQLQERITAEVATVLEEKLNPKGVYVLIEAEHMCMTMRGIKKPGAKTITTVAKGIFETDEVKRSEILSFIQMS

SEQ ID NO: 9517 - protein, 194 aa, Kurthia sp.
  misc_feature (1)..(194): tr|A0A0X1RY00|A0A0X1RY00_9BACL GTP cyclohydrolase 1 OS= Kurthia sp. 11kri321 OX=1750719 GN=folE PE=3 SV=1
MTKEISSQVDINKIQTAVKMILEAVGENPSREGLLDTPKRVAKMYAEMFEGLHKDPKEYFETVFHEGHDEVVLVKDIPFFSMCEHHLVPFYGKAHVAYIPKDGVVAGLSKLARTVETVARRPQLQERITDTVAQTLMDMLSPQGVYVVVEAEHMCMTMRGIKKPGAKTITSVAKGVFEEDSVKRNEILSFIQMP

SEQ ID NO: 9518 - protein, 210 aa, Kurthia zopfii
  misc_feature (1)..(210): tr|A0A2U3AFT8|A0A2U3AFT8_9BACL GTP cyclohydrolase 1 OS= Kurthia zopfii OX=1650 GN=folE PE=3 SV=1
MLTSKREFHVDNGGLKLTKQINSQVDIDKIKDAVTMILEAVGEDPTREGLIDTPKRVAKMYAEMFEGLHKDPKEYFETVFNEGHDEVVLVKDIPFFSMCEHHLVPFYGKAHVAYIPQGGVVAGLSKLARTVETVARRPQLQERITGTVAETLMEMLKPQGVYVVVEAEHMCMTMRGIKKPGAKTITSVAKGIFETDDVKRNEILSFIQMP

SEQ ID NO: 9519 - protein, 234 aa, Kurthia zopfii
  misc_feature (1)..(234): tr|A0A3S4Z1X3|A0A3S4Z1X3_9BACL GTP cyclohydrolase 1 OS= Kurthia zopfii OX=1650 GN=folE PE=3 SV=1
MFVSKNNKKFVGIIVLHLCYAWGYMLTSKREFHVDNGGLKLTKQINSQVDIDKIKDAVTMILEAVGEDPTREGLIDTPKRVAKMYAEMFEGLHKDPKEYFETVFNEGHDEVVLVKDIPFFSMCEHHLVPFYGKAHVAYIPQGGVVAGLSKLARTVETVARRPQLQERITGTVAETLMEMLKPQGVYVVVEAEHMCMTMRGIKKPGAKTITSVAKGIFETDDVKRNEILSFIQMP

SEQ ID NO: 9520 - protein, 202 aa, Kushneria avicenniae
  misc_feature (1)..(202): tr|A0A1I1G1U6|A0A1I1G1U6_9GAMM GTP cyclohydrolase 1 OS= Kushneria avicenniae OX=402385 GN=folE PE=3 SV=1
MPRCPYVTPDIPETQERNMSQEMENHYREILSALGEDPEREGLQDTPARAAKAMQFLTHGYQQSLGDIVNDAVFSSDTDEMVIVKDIELYSMCEHHMLPFIGKCHIGYLPRGKVLGLSKFARIVDMYARRLQIQEELTRQIANAVQDATDARGVGVIVEARHMCMMMRGVEKQNSSMKTSVMLGDFRDNLPSRQEFLTLVYN

SEQ ID NO: 9521 - protein, 184 aa, Kushneria indalinina
  misc_feature (1)..(184): tr|A0A3D9DYY1|A0A3D9DYY1_9GAMM GTP cyclohydrolase 1 OS= Kushneria indalinina DSM 14324 OX=1122140 GN=folE PE=3 SV=1
MSQEMENHYREILSALGENPEREGLQDTPARAAKAMQFLTHGYQQSLDDIVNGAVFSSDTDEMVIVKDIELYSMCEHHMLPFIGKCHIGYLPRGKVLGLSKFARIVDMYARRLQIQEELTRQIANAVQDATDARGVGVIVEARHMCMMMRGVEKQNSSMKTSVMLGDFRDNLPSRQEFLTLVYN

SEQ ID NO: 9522 - protein, 184 aa, Kushneria konosiri
  misc_feature (1)..(184): tr|A0A2Z2H8N0|A0A2Z2H8N0_9GAMM GTP cyclohydrolase 1 OS= Kushneria konosiri OX=698828 GN=folE PE=3 SV=1
MSQEMENHYREILSALGEDPEREGLQDTPARAAKAMQFLTHGYQQSLEDIVNGAVFSSDTDEMVIIKDIELYSMCEHHMLPFIGKCHIGYLPRGKVLGLSKFARIVDMYARRLQIQEELTRQIASAVLDATDARGVGVIVEARHMCMMMRGVQKQNSSMKSSVMLGDFRDNLSTRQEFLTLVHN

SEQ ID NO: 9523 - protein, 184 aa, Kushneria marisflavi
  misc_feature (1)..(184): tr|A0A240ULI3|A0A240ULI3_9GAMM GTP cyclohydrolase 1 OS= Kushneria marisflavi OX=157779 GN=folE PE=3 SV=1
MSQEMENHYREILSALGEDPEREGLQDTPARAAKAMQFLTHGYQQSLEDIVNGAVFSSDTDEMVIVKDIELYSMCEHHMLPFIGKCHIGYLPRGKVLGLSKFARIVDMYARRLQIQEELTRQIANAVLDATDARGVGVIVEARHMCMMMRGVQKQNSSMKSSVMLGDFRDNLSTRQEFLTLVHN

SEQ ID NO: 9524 - protein, 184 aa, Kushneria phyllosphaerae
  misc_feature (1)..(184): tr|A0A2R8CKF7|A0A2R8CKF7_9GAMM GTP cyclohydrolase 1 OS= Kushneria phyllosphaerae OX=2100822 GN=folE PE=3 SV=1
MSQEMENHYREILSALGEDPEREGLQDTPARAAKAMQYLTHGYQQSLGDIVNDAVFSSDTDEMVIVKDIELYSMCEHHMLPFIGKCHIGYLPRGKVLGLSKFARIVDMYARRLQIQEELTRQIANAVLDATDARGVGVIVEARHMCMMMRGVQKQNSSMKTSVMLGDFRENLSTRQEFLTLVHN

SEQ ID NO: 9525 - protein, 300 aa, Kushneria sinocarnis
  misc_feature (1)..(300): tr|A0A420WU69|A0A420WU69_9GAMM GTP cyclohydrolase FolE2 OS=Kushneria sinocarnis OX=595502 GN=folE2 PE=3 SV=1
MTRTELPDIAMESSMLQGALSRVGMERIALPLQVTGQGIVGRASAGVSLDDPAARGVHMSRLYLALRALEHRELSIAAVEGVLDAFLETHQGLSDTAFVDLSGEALLSRPAMVSPLSGWKSYPFTLRCRKDAQGMQVTLELTIGYSSTCPCSAALARQLIQQAFDERFRETPLTHEAVHDWLGSEQGVPATPHSQRSQAHLSLQLERTLEVLPLPAIIDGVEEALGTALQTAVKRVDEQAFALANGQNLMFCEDAARRLHHTLKAQEGVIGFQLRVVHAESLHAHDAVASSEWHRAPPMP

SEQ ID NO: 9526 - protein, 186 aa, Kushneria sinocarnis
  misc_feature (1)..(186): tr|A0A420WYX4|A0A420WYX4_9GAMM GTP cyclohydrolase 1 OS= Kushneria sinocarnis OX=595502 GN=folE PE=3 SV=1
MSEKLSQHYRAIIEGLGEDPDREGLRETPMRAAKAMSFLTHGYQQSLDDVVNGAVFTSSSDEMVLIKDIELYSMCEHHMLPFIGKCHIGYLPNGKVLGLSKFARIVDMYARRLQIQEELTRQIADAIVEATDARGVGVIIEARHLCMMMRGVEKQNSSMKTSVMLGDFREHQATRNEFLNLAGRQA

SEQ ID NO: 9527 - protein, 184 aa, Kushneria sp.
  misc_feature (1)..(184): tr|A0A5C1A1E0|A0A5C1A1E0_9GAMM GTP cyclohydrolase 1 OS= Kushneria sp. YCWA18 OX=657387 GN=folE PE=3 SV=1
MSEELSHHYRAIIEGLGEDPDREGLRETPMRAAKAMGFLTRGYQQSLDEVVNGAVFTSSSDEMVLIKDIELYSMCEHHMLPFIGKCHIGYLPNGKVLGLSKFARIVDMYARRLQIQEELTRQIADAIVEATDARGVGVIVEARHLCMMMRGVEKQNSSMKTSVMLGDFRQSQATRNEFLNLVGR

SEQ ID NO: 9528 - protein, 302 aa, Kushneria sp.
  misc_feature (1)..(302): tr|A0A5C0ZVP3|A0A5C0ZVP3_9GAMM GTP cyclohydrolase FolE2 OS=Kushneria sp. YCWA18 OX=657387 GN=folE2 PE=3 SV=1
MNRNDLPDIATETSTLQGALSRVGMEQIALPLQVAGQGIVGRASAGVSLDNASARGVHMSRLYLALSALENRELSIDEVEGVLDAFLDTHQGLSDRAFLDLSGEAMLRRPALVSPLSGWKAYPFTLRCRKDTQGLQATLELTIGYSSTCPCSAALARQLIQQSFDEHFQDTPLTHEAVHDWLGSEQGVPATPHSQRSQTHLSLRLKNTPEALPLEAAINRVEDALGTALQTAVKRVDEQAFALANGQNLMFCEDAARRLHHTLQTQEEVIGFQLQVVHAESLHAHDAVASSEWNWQGCGEAF

SEQ ID NO: 9529 - protein, 194 aa, Kutzneria albida
  misc_feature (1)..(194): tr|W5W5D0|W5W5D0_9PSEU GTP cyclohydrolase 1 OS=Kutzneri a albida DSM 43870 OX=1449976 GN=folE PE=3 SV=1
MSLHVAPEVGQPDLAAAELAAGQFLRALGISTESESLRDTPRRMAKAYAELFSPRPFDLTTFPNDEGYDELVLARSIPLRSVCEHHLLPFVGVAHVGYLPGSRILGLSKLARVVEHFACRPQVQERLTKQVADWLHAQLQPKGVGVVIAAEHTCMTLRGVQAVGSSTVTSTLLGTLRSDARSRQEFFALTGINP

SEQ ID NO: 9530 - protein, 199 aa, Kutzneria albida
  misc_feature (1)..(199): tr|W5WA63|W5WA63_9PSEU GTP cyclohydrolase 1 OS=Kutzneri a albida DSM 43870 OX=1449976 GN=KALB_4072 PE=3 SV=1
MTTSTTYPDPAGEGRDPLEDVARQLLIAIGENPDRDGLKQTPARFARWWREFSGYDAGEVNTLFSLRTQQGQTVTVSDIHLWSLCEHHLLPFSCTVTIAYRPNGDVLGLSKFARIAHRHAHRLQIQERLVQDIAEEITAVSGSPDVAVIAQGEHLCMTMRGIRTPALMTSSVLNGVFGQDGPARQELMATAFPALSGRR

SEQ ID NO: 9531 - protein, 196 aa, Kutzneria buriramensis
  misc_feature (1)..(196): tr|A0A3E0HK68|A0A3E0HK68_9PSEU GTP cyclohydrolase 1 OS= Kutzneria buriramensis OX=1045776 GN=folE PE=3 SV=1
MSVTDLDLDGDPAVSRTAEDPLVDLARQLLKEIGEDPNRDGLRDTPARFARWWREFINYDTGSLGTLFESVGTSQLVVVSDIQVWSLCEHHLLPFNCSITIAYRPTGQLLGLSKFARVAHQYAHKLQVQERLVDQIALEISTLSGASDVAVIAKGEHLCMTMRGIKAAAQMTSTAYRGAFGTDSGLRGELFDLLRA

SEQ ID NO: 9532 - protein, 195 aa, Kutzneria buriramensis
  misc_feature (1)..(195): tr|A0A3E0I560|A0A3E0I560_9PSEU GTP cyclohydrolase 1 OS= Kutzneria buriramensis OX=1045776 GN=folE PE=3 SV=1
MHALRVVHEPAAGIDLDAAERAAGDLLRALGVDTDSESLRATPGRMARAYAELFTPRPFDLTTFPNDEGYDELVLARGIPVRSVCEHHLLPFVGVAHVGYLPAGRILGLSKLARVVEHFASRPQVQERLTKQVADWLCEQLEPKGVGVVIEAEHTCMTLRGVRAVGSDTVTSTLLGTLRSDARSRQEFFALAGVK

SEQ ID NO: 9533 - protein, 209 aa, Kutzneria sp.
  misc_feature (1)..(209): tr|W7SNV3|W7SNV3_9PSEU GTP cyclohydrolase 1 OS=Kutzneri a sp. 744 OX=345341 GN=folE PE=3 SV=1
MNSAAPAWITQTRTESALHVVHESGVVDPAAAERAAADLLRALGIEHSSESMRETPARMARAYAELFTPRPFDLTTFPNDEGYDELVLARDIPVRSVCEHHLLPFVGVAHVGYLPGERILGLSKLARVVEHFACRPQVQERLTKQIADWLADQLDPVGVGVVVRAEHSCMTLRGVQAIGSCTVTSTLLGSLREDARSRHEFFALAGIMS

SEQ ID NO: 9534 - protein, 195 aa, Kutzneria sp.
  misc_feature (1)..(195): tr|W7SSV7|W7SSV7_9PSEU GTP cyclohydrolase 1 OS=Kutzneri a sp. 744 OX=345341 GN=folE PE=3 SV=1
MQALRVVHEPATGVDLEAAERAAGDLLRALGVDTDTESLRATPGRMARAYAELFTPRPFDLTTFPNDEGYDELVLARSIPVRSVCEHHLLPFVGVAHVGYLPDARILGLSKLARVVEHFASRPQVQERLTKQVADWLSTQLAPKGVGVVIEAEHTCMTLRGVKAAGSSTVTSTMLGVLRSDARSRQEFFALAGVK

SEQ ID NO: 9535 - protein, 188 aa, Kyrpidia spormannii
  misc_feature (1)..(188): tr|A0A2K8N8L0|A0A2K8N8L0_9BACL GTP cyclohydrolase 1 OS= Kyrpidia spormannii OX=2055160 GN=folE PE=3 SV=1
MGFDVDKIQTAVRMILEAIGEDPEREGLKDTPGRVARMYQEVFRGLHQDPREELNAIFNIEHEELVLVRDILFYSMCEHHLVPFFGKAHVAYLPRGGRVTGLSKLARLVETVARRPQLQERITSTVADAIMEKLEARGAVVVLEAEHMCMTMRGVNKPGSQTVTSAVRGVFLEDGKLREEVFRLIGHR

SEQ ID NO: 9536 - protein, 207 aa, Kyrpidia tusciae
  misc_feature (1)..(207): tr|D5WQ81|D5WQ81_KYRT2 GTP cyclohydrolase 1 OS=Kyrpidia tusciae (strain DSM 2912 / NBRC 15312 / T2) OX=562970 GN=folE PE=3 SV=1
MVHDRGRVAGVGEGKGTTSMDFDVDKIQTAVRMILEAIGEDPEREGLQDTPARVARMYQEVFRGLHQDPREELNAIFNIEHEELVLVRDILFYSMCEHHLVPFFGKAHVAYLPRGGRVTGLSKLARLVETVARRPQLQERITSTVADAIMDKLEARGAVVVLEAEHMCMTMRGVNKPGSQTVTSAVRGVFLQDGKLREEVFRLIGHR

SEQ ID NO: 9537 - protein, 186 aa, Kytococcus aerolatus
  misc_feature (1)..(186): tr|A0A212U692|A0A212U692_9MICO GTP cyclohydrolase 1 OS= Kytococcus aerolatus OX=592308 GN=folE PE=3 SV=1
MDHARAEAAVRELLLAIGEDPDRDGLLETPARVARSFAELTSGLEGDPAEVLGTRFAIDHDEMVLVRDIEMHSLCEHHLLPFHGVAHVGYTPRGGTVVGLSKLARLVELYARRPQVQERLTTQVANALVDHLDPGGVIVVVEAEHLCMTMRGVRKAGARTVTSAVRGHFTDQATRAEAMSLIASHR

SEQ ID NO: 9538 - protein, 185 aa, Kytococcus schroeteri
  misc_feature (1)..(185): tr|A0A2I1PC12|A0A2I1PC12_9MICO GTP cyclohydrolase 1 OS= Kytococcus schroeteri OX=138300 GN=folE PE=3 SV=1
MDLARAEAAVRELLLAVGEDPDRDGLLDTPARVARSYAELTSGLEQDPADVLGTTFAVDHDEMVLVRDIEMYSLCEHHLLPFHGVAHVGYTPRNGRVAGLSKLARLVEMYARRPQVQERLTTQVANALVDHLDPGGVIVVVEAEHLCMTMRGVRKPGARTVTSAVRGHFTDQATRAEALTLLRNG

SEQ ID NO: 9539 - protein, 195 aa, Kytococcus sedentarius
  misc_feature (1)..(195): tr|C7NFT4|C7NFT4_KYTSD GTP cyclohydrolase 1 OS=Kytococc us sedentarius (strain ATCC 14392 / DSM 20547 / CCM 314 / 541) OX=478801 GN=folE PE=3 SV=1
MGAGGFAGRLMDHARAEAAVRELLLAVGEDPDRDGLVDTPARVARSYAELTSGLDQDPSEILGTTFAIDHDEMVMVRDIEMHSLCEHHLLPFHGVAHVGYTPQDGRVVGLSKLARLVEMYARRPQVQERLTTQVANALVDHLRPGGVIVVVEAEHLCMTMRGVRKPGARTVTSAVRGQFTDQATRAEALSLLRNG

SEQ ID NO: 9540 - protein, 185 aa, Kytococcus sp.
  misc_feature (1)..(185): tr|A0A1F1KGM2|A0A1F1KGM2_9MICO GTP cyclohydrolase 1 OS= Kytococcus sp. HMSC28H12 OX=1581067 GN=folE PE=3 SV=1
MDLARAEAAVRELLLAVGEDPDRDGLLDTPARVARSYAELTSGLGQDPADVLGTTFAVDHDEMVLVRDIEMYSLCEHHLLPFHGVAHVGYTPRNGRVAGLSKLARLVETYARRPQVQERLTTQVANALVDHLDPGGVIVVVEAEHLCMTMRGVRKPGARTVTSAVRGQFTDQATRAEALTLLRNG

SEQ ID NO: 9541 - protein, 211 aa, Labedaea rhizosphaerae
  misc_feature (1)..(211): tr|A0A4R6SF36|A0A4R6SF36_9PSEU GTP cyclohydrolase 1 OS= Labedaea rhizosphaerae OX=598644 GN=folE PE=3 SV=1
MTNSLSDRSATVSKLRPRLSHAGAPVDLAAAERAAADFLVALGIDVSSEATEDTPRRMAHAFAEMLTVPEFDMTTFPNDQDYDELVVVEGIEFRSLCEHHMLPFTGVAHVGYLPGERILGLSKLARLVAFFAARPQTQERLTKQIADELNRNLAPKGVGVVVMAEHACMSLRGARARNTHTVTSALYGDVRENPALRAEFLSLTKNARTNP

SEQ ID NO: 9542 - protein, 203 aa, Labedaea rhizosphaerae
  misc_feature (1)..(203): tr|A0A4R6SMY3|A0A4R6SMY3_9PSEU GTP cyclohydrolase 1 OS= Labedaea rhizosphaerae OX=598644 GN=folE PE=3 SV=1
MTGTLDGVTQQARVFDQERAERAIRELLIACGEDPNREGLLETPARVARAYREMFAGLYTDPDEVLSKTFDESHEELVLVTDIPMFSSCEHHLVPFHGVAHVGYIPNEKGKVTGLSKLARLVDLYAKRPQVQERLTSQVADALMRKLAPRGAIVVIEAEHLCMAMRGIRKPGARTTTSAVRGLLKDSSSSRAEALDLIKGRTR

SEQ ID NO: 9543 - protein, 199 aa, Labedella endophytica
  misc_feature (1)..(199): tr|A0A433JX44|A0A433JX44_9MICO GTP cyclohydrolase 1 OS= Labedella endophytica OX=1523160 GN=folE PE=3 SV=1
MAGVDRRRIEAAVTELLLAIGEDPDREGLDATPQRVAESYAEFFAGIGADPLDHLRETIPTGSSDSVGELTGETVIVRDIAFRSVCEHHLLPFTGVAHIAYVPGDAVVGLGRLPRVVDTLASRPQVQERLTEQIASAIDEGLAPLGVLVVLDASHQCVTTRGSRQTASTTVTVASRGTLASGPGRSDVLALIGSGRAHD

SEQ ID NO: 9544 - protein, 200 aa, Labedella gwakjiensis
  misc_feature (1)..(200): tr|A0A2P8GSC3|A0A2P8GSC3_9MICO GTP cyclohydrolase 1 OS= Labedella gwakjiensis OX=390269 GN=folE PE=3 SV=1
MADVDRRRIESAVTELLLAIGEDPGRDGLESTPQRVAEAYAEFFGGVGADPLEHLRETIPTGSPDAVGQLTGETVIVRDIAFRSVCEHHLLPFVGVAHIAYIPGDAVVGLGRLPRVVDTLASRPQVQERLTEQIAGAIDEGLAPRGVLVVLDASHQCVTTRGARQTASSTVTVASRGDLRSGSARSDVIALIGAGVQGRS

SEQ ID NO: 9545 - protein, 196 aa, Labedella phragmitis
  misc_feature (1)..(196): tr|A0A444PSJ0|A0A444PSJ0_9MICO GTP cyclohydrolase 1 OS= Labedella phragmitis OX=2498849 GN=folE PE=3 SV=1
MAGVDRRRIEAAVTELLLAIGERPDREGLLSTPERVADAYAEFFGGLGHDPVDHLRETVPTELDTAGEAVIVRDISFRSVCEHHLLPFTGVAHVAYLPDAAVVGLGRFARVVDTLASRPQVQERLTEQIADAIDEGLAPLGVLVVLDASHQCMTTRGPRQTGSTTVTIASRGALSSGPLRSDVLALIGAGRSRDDD

SEQ ID NO: 9546 - protein, 195 aa, Labedella populi
  misc_feature (1)..(195): tr|A0A444Q6J4|A0A444Q6J4_9MICO GTP cyclohydrolase 1 OS= Labedella populi OX=2498850 GN=folE PE=3 SV=1
MAGVDRRRIEAAVTELLLAIGERPDREGLLSTPQRVADAYAEFFGGLGEDPLDHLRETIPTEIDTAGEAVIVRDIAFRSVCEHHLLPFTGVAHVAYLPGVSAVGLGRFARVVDTLASRPQVQERLTEQIADAVDEGLSPRGVLVVLDASHQCLTARGPRQTSSTTVTIASRGALVSGAERSDVLALIGGSAGRDE

SEQ ID NO: 9547 - protein, 209 aa, Labilibaculum antarcticum
  misc_feature (1)..(209): tr|A0A1Y1CGJ4|A0A1Y1CGJ4_9BACT GTP cyclohydrolase 1 OS= Labilibaculum antarcticum OX=1717717 GN=folE PE=3 SV=1
MEFSTNGDSHNGFTKIEKYNQDTTEQLMFHYKKVLELLGEDAEREGLLKTPLRVAKAMQFLTQGYHNNPEDILKSAIFKEDYRQMVIVKDIEVYSMCEHHMLPFVGRAHVAYIPNGTITGLSKIARVVDAFARRLQVQERLTTQIKDCIQNTLNPLGVAVVIEAQHMCMSMRGVQKQNAITTTSDFTGAFEKVATREEFIRLISTKSNY

SEQ ID NO: 9548 - protein, 209 aa, Labilibaculum filiforme
  misc_feature (1)..(209): tr|A0A2N3I5P2|A0A2N3I5P2_9BACT GTP cyclohydrolase 1 OS= Labilibaculum filiforme OX=1940526 GN=folE PE=3 SV=1
MEFSTNEDNHKGFTKIEKYDQETTEQLMFHYKKVLELLGEDAEREGLLKTPLRVAKAMQFLTQGYHNNPEDILKSAIFQEDYRQMVIVKDIEVYSMCEHHMLPFVGRAHVAYIPNGTITGLSKIARVVDAFARRLQVQERLTTQIKDCIQNTLNPLGVAVVIEAQHMCMAMRGVQKQNAITTTSDFTGAFEKVATREEFIRLIATKSSY

SEQ ID NO: 9549 - protein, 209 aa, Labilibaculum manganireducens
  misc_feature (1)..(209): tr|A0A2N3IFY7|A0A2N3IFY7_9BACT GTP cyclohydrolase 1 OS= Labilibaculum manganireducens OX=1940525 GN=folE PE=3 S V=1
MEFSTNGDNNKGFTKIEKYNQDTTEQLMFHYKKVLELLGEDAEREGLLKTPLRVAKAMQFLTQGYHNNPEDILRSAMFQEDYRQMVIVKDIEVYSMCEHHMLPFVGRAHVAYIPNGTITGLSKLARVVDAFARRLQVQERLTTQIKDCIQNTLNPLGVAVVIEAQHMCMSMRGIQKQNAITTTSDFTGAFEKVATREEFIRLIANKSNY

SEQ ID NO: 9550 - protein, 211 aa, Labrenzia aggregata
  misc_feature (1)..(211): tr|A0A0M6XY41|A0A0M6XY41_9RHOB GTP cyclohydrolase 1 OS= Labrenzia aggregata OX=187304 GN=folE PE=3 SV=1
MDAVLKPVEKTFERKSPDQLHRPSREEAEAAVRTLLAWTGDDPDREGLVETPKRVVKALSQLYSGYFEDPAEHLARTFEDVGGYKDIVLVRGIPFHSHCEHHMLPFIGEAHIAYYPAEGVVGLSKLARVVDIYAKRLQTQENLTAQIASVIDDALAPRGLAVMLEAEHQCMTMRGVQKPGVSTITTQFTGVFQDDPAEQAKFMSLVRGKGL

SEQ ID NO: 9551 - protein, 211 aa, Labrenzia aggregata
  misc_feature (1)..(211): tr|A0NWQ8|A0NWQ8_LABAI GTP cyclohydrolase 1 OS=Labrenzi a aggregata (strain ATCC 25650 / DSM 13394 / JCM 20685 / NBRC 16684 / NCIMB 2208 / IAM 12614) OX=384765 GN=fol E PE=3 SV=1
MDAVLKPVEKTFERKSPDQLHRPSREEAEAAVRTLLAWTGDDPDREGLVETPKRVVKALSQLYSGYYEDPAEHLARTFEDVGGYKDIVLVRGIPFHSHCEHHMLPFIGEAHIAYYPAEGVVGLSKLARVVDIYAKRLQTQENLTAQIASVIDDALAPRGLAVMLEAEHQCMTMRGVQKPGVSTITTQFTGVFQDDPAEQAKFMSLVRGKGL

SEQ ID NO: 9552 - protein, 211 aa, Labrenzia alba
  misc_feature (1)..(211): tr|A0A0M6Z9T0|A0A0M6Z9T0_9RHOB GTP cyclohydrolase 1 OS= Labrenzia alba OX=311410 GN=folE PE=3 SV=1
MDAVLKPVEKRFERKSPEQLLRPSREEVEAAVRTILAWTGDDPDREGLVETPKRVVKALSQLYSGYFEDPAEHLERTFEDVGGYQDIVLVRGIPFHSHCEHHMLPFIGEAHIAYYPAEGVVGLSKLARVVDIYAKRLQTQENLTAQIASVIDDTLAPRGLAVMLEAEHQCMTMRGVQKPGVSTITTQFTGVFQDDPAEQAKFMTMVRSKGL

SEQ ID NO: 9553 - protein, 236 aa, Labrenzia alba
  misc_feature (1)..(236): tr|A0A0M6YMY8|A0A0M6YMY8_9RHOB GTP cyclohydrolase 1 OS= Labrenzia alba OX=311410 GN=folE PE=3 SV=1
MVRSFWANDLCTKERRMTSDKGKIARIPMDAVLKPVVKAFERRSPDQLHRPSREEVEAAVRTILAWTGDDPDREGLVETPKRVVKALSQLYSGYFEDPAEHLARTFEDVGGYQDIVLVRGIPFHSHCEHHMLPFIGEAHIAYYPAEGVVGLSKLARVVDIYAKRLQTQENLTAQIASVIDDALAPRGLAVMLEAEHQCMTMRGVQKPGVSTITTQFTGVFQDDPAEQAKFMSLVRG

SEQ ID NO: 9554 - protein, 208 aa, Labrenzia alexandrii
  misc_feature (1)..(208): tr|A0A5E8GU03|A0A5E8GU03_LABAD GTP cyclohydrolase 1 OS= Labrenzia alexandrii (strain DSM 17067 / NCIMB 14079 / DFL-11) OX=244592 GN=folE PE=3 SV=1
MDAVLKPVGKTFERKTPDQLQRPSREEAEAAVRTILAWTGDDPEREGLLDTPKRVVKAITQLYGGYFEDPAEHLERTFEDVGGYQDIVLVRGIPFHSHCEHHMLPFVGEAHIAYYPAEGVVGLSKLARVVDIFAKRLQTQENLTSQIASTIDDALAPRGLAVMMEAEHQCMTMRGVQKPGVSTITTQFTGIFEDDPAEQAKFMTLVRG

SEQ ID NO: 9555 - protein, 208 aa, Labrenzia alexandrii
  misc_feature (1)..(208): tr|A0A0M7A1B8|A0A0M7A1B8_9RHOB GTP cyclohydrolase 1 OS= Labrenzia alexandrii OX=388408 GN=folE PE=3 SV=1
MDAVLKPVGKTFERKTPDQLQRPSREEAEAAVRTILAWTGDDPDREGLLDTPKRVVKAITQLYGGYFEDPAEHLERTFEDVGGYQDIVLVRGIPFHSHCEHHMLPFVGEAHIAYYPAEGVVGLSKLARVVDIFAKRLQTQENLTSQIASTIDDALAPRGLAVMMEAEHQCMTMRGVQKPGVSTITTQFTGIFEDDPAEQAKFMTLVRG

SEQ ID NO: 9556 - protein, 211 aa, Labrenzia marina
  misc_feature (1)..(211): tr|A0A2S3UVN2|A0A2S3UVN2_9RHOB GTP cyclohydrolase 1 OS= Labrenzia marina OX=281252 GN=folE PE=3 SV=1
MDAVLKPVAKPLERKTPDQLHRPSREEAEAAVRTILAWTGDDPDREGLADTPKRVVKALSQLYSGYYEDPAEHLERTFEDVGGYRDIVVVRGIPFHSHCEHHMLPFIGEAHIAYYPAEGVVGLSKLARVVDIYAKRLQTQENLTAQIASVIDDTLAPRGLAVMLEAEHQCMTMRGVQKPGVSTITTQFTGVFQDDPAEQAKFMTLVRGKGF

SEQ ID NO: 9557 - protein, 212 aa, Labrenzia sp.
  misc_feature (1)..(212): tr|A0A222F467|A0A222F467_9RHOB GTP cyclohydrolase 1 OS= Labrenzia sp. VG12 OX=2021862 GN=folE PE=3 SV=1
MNYAATVTAMAEYRKEHGLRPSRADAEAAVRILLEWTGDDPDREGLVDTPARVVRAYEEFFEGYTIDPAELLARTFEETNDYNDLIVLRNMRLESHCEHHVVPIIGKVHIAYLPANRVVGISKLARVVEVFAKRLQIQETLTSQIADTIQDVLRPRGVAVVIEAAHMCMTTRGIRKPGVSMLTRRLLGEFQTDPDLRRDFLSSISSSLKGEV

SEQ ID NO: 9558 - protein, 211 aa, Labrenzia sp.
  misc_feature (1)..(211): tr|A0A163U4G9|A0A163U4G9_9RHOB GTP cyclohydrolase 1 OS= Labrenzia sp. OB1 OX=1561204 GN=folE PE=3 SV=1
MDAVLKPVAKPFERKTPDELQRPSREEAEAAVRTILAWTGDDPDREGLVDTPKRVVKALSQLYSGYFEDPAEHLSRTFEDVGGYKDIVLVRGIPFHSHCEHHMLPFIGEAHIAYYPADGVVGLSKLARVVDIFAKRLQTQENLTAQVASVIDDALAPRGLAVMLEAEHQCMTMRGVQKPGVSTITTQFTGVFQDEPAEQAKFMTLVRGKGV

SEQ ID NO: 9559 - protein, 211 aa, Labrenzia suaedae
  misc_feature (1)..(211): tr|A0A1M7G2X3|A0A1M7G2X3_9RHOB GTP cyclohydrolase 1 OS= Labrenzia suaedae OX=735517 GN=folE PE=3 SV=1
MDAVLKNGSASHQRKSPKEIRRPSREEAEAAVRTLLAWTGDDPDREGLLDTPKRVVKAYSELFGGYFEDPIQHLERTFEDVGGYKDIVMVRGIPFHSHCEHHMLPFIGQAHIAYYPAEGVVGLSKLARVVDIFAKRLQTQENLTAQIASAIDDQLAPRGLAVLLEAEHQCMTMRGVQKPGVSTITTQFTGIFQDEPAEQAKFMSLVRGGGL

SEQ ID NO: 9560 - protein, 215 aa, Labrys neptuniae
  misc_feature (1)..(215): tr|A0A5C1WPN8|A0A5C1WPN8_9RHIZ GTP cyclohydrolase 1 OS= Labrys neptuniae OX=376174 GN=folE PE=3 SV=1
MDALVDKPAAKLERDDVARAPMPRPTRKEAEAAVRTLIQWAGDDPDREGLIDTPKRMVKAWREMFKGYEHDAAEELDTVFEEVGGYDDMVLVRDIPFFSHCEHHIVPILGHAHIAYYPSGGVVGLSKLARVVEIYARRLQTQEHLTANVTQAIEERLKPRGLAVMLEAEHMCMAMRGIQKQGVSTVTTGFTGIFKSEPQQQMHFLSLVQRAYKAR

SEQ ID NO: 9561 - protein, 215 aa, Labrys okinawensis
  misc_feature (1)..(215): tr|A0A2S9Q5E1|A0A2S9Q5E1_9RHIZ GTP cyclohydrolase 1 OS= Labrys okinawensis OX=346911 GN=folE PE=3 SV=1
MDALVDKPAAKLERDDAIRAPLPRPTRKEAEAAVRTLIQWAGDDPDREGLVDTPKRVVKAWREMFKGYEHDAGEELDTVFEEVGGYDDMVLVRDIPFYSHCEHHIVPILGHAHIAYYPSGGVVGLSKLARVVEIYARRLQTQEHLTANVTQAIEERLKPRGLAVMLEAEHMCMAMRGIQKQGISTVTTGFTGIFKSDPQQQMHFLSLVQRAYKAR

SEQ ID NO: 9562 - protein, 187 aa, Laceyella sacchari
  misc_feature (1)..(187): tr|A0A2I7SS69|A0A2I7SS69_LACSH GTP cyclohydrolase 1 OS= Laceyella sacchari OX=37482 GN=folE PE=3 SV=1
MIDHRKIEDAVRMILEAIGEDPNREGLLDTPARVARMYAEIFSGLNEDPKEHFSVVFGEDHEELVLVKDIPFFSTCEHHLVPFFGKAHVGYIPRGGRVTGLSKLARALETVARRPQLQERITATVADSIMEKLDPHGVIVVVEAEHMCMTMRGVKKPGSKTITSAVRGVFAEDSAARAEALSLIGLK

SEQ ID NO: 9563 - protein, 187 aa, Laceyella sediminis; identical to SEQ ID NO: 9562
  misc_feature (1)..(187): tr|A0A2T0YH82|A0A2T0YH82_9BACL GTP cyclohydrolase 1 OS= Laceyella sediminis OX=573074 GN=folE PE=3 SV=1

SEQ ID NO: 9564 - protein, 201 aa, Lachnobacterium bovis
  misc_feature (1)..(201): tr|A0A1H3LS01|A0A1H3LS01_9FIRM GTP cyclohydrolase 1 OS= Lachnobacterium bovis DSM 14045 OX=1122142 GN=folE PE=3 SV=1
MINQENQAIKKIDTEKIEKNIREILIALGANPDSEGLKETPKRVAKMYEEVFEGMNYTNDQIAEMFNKTFSEDIKTTSSKDMVIVKDIDAFSYCEHHMALMYNMKIDVAYIPNGKVIGLSKIARIVDMVTKRLQLQERIGTDILDIMKKITESQDIAVIIRANHSCMTARGIKNINSRTYTQTLSGKFEEDTTLLNRLTYA

SEQ ID NO: 9565 - protein, 191 aa, Lachnobacterium bovis
  misc_feature (1)..(191): tr|A0A1H9UMP6|A0A1H9UMP6_9FIRM GTP cyclohydrolase 1 OS= Lachnobacterium bovis OX=140626 GN=folE PE=3 SV=1
MIDVEKIEKNIREIIVALGANPDSEGLRETPKRVAKMYEEVFEGMNYTNDQIAEMFNKTFSEDLESTSSNDMVIVKDIDAFSYCEHHMALMYNMKIDVAYIPNGKVIGLSKIARIVDMVTKRLQLQERIGTDILDIMKKITGSSDIAVIIRANHSCMTARGIKNTNSRTYTQTLSGKFEEDPLLLNRLNYA

SEQ ID NO: 9566 - protein, 194 aa, Lachnoclostridium phytofermentans
  misc_feature (1)..(194): tr|A9KKW3|A9KKW3_LACP7 GTP cyclohydrolase 1 OS=Lachnocl ostridium phytofermentans (strain ATCC 700394 / DSM 188 23 / ISDg) OX=357809 GN=Cphy_2334 PE=3 SV=1
MSIDKNLIQESVSNILIALGEDPLREGLIDTPKRVANMYEEVFLGIQYTNDDIVTMFNKCFEEDQNTFLANGIVWIKDIECFSFCEHHMTLIYDMHITIGYKPLHKVIGISKIARIADMVCKRLQIQERIASDILEILTKITGSDDIFIKIEGKHGCMTSRGIQKPHATTCTILTSGIFQHNPMSFITKESGHV

SEQ ID NO: 9567 - protein, 194 aa, Lachnoclostridium phytofermentans
  misc_feature (1)..(194): tr|A0A3D2XAX1|A0A3D2XAX1_9FIRM GTP cyclohydrolase 1 OS= Lachnoclostridium phytofermentans OX=66219 GN=DHW61_180 50 PE=3 SV=1
MGINKKIIQESVSNILVALGENPLREGLIDTPKRVANMYEEVFLGIQYTNDDIVSMFNKCFEEEQDIFLTNGIVWINDIECFSFCEHHMSLIYDMHITIGYKPLHKVIGISKIARIADMVCKRLQIQERIASDILEILGKITESNDIFIKIEGKHGCMTSRGIQKTHATTCTILTSGIFQHNPLSFNTKESGLV

SEQ ID NO: 9568 - protein, 186 aa, Lachnoclostridium sp.
  misc_feature (1)..(186): tr|A0A1Y3T9M8|A0A1Y3T9M8_9FIRM GTP cyclohydrolase 1 OS= Lachnoclostridium sp. An76 OX=1965654 GN=folE PE=3 SV=1
MIDEKKIEQAVRLMLEGIGEDPDREGLADTPSRIARMCAELYGGMSDDAGIHLSRTFTSDSSEMVIEKDITFYSMCEHHVLPFYGKAHIAYIPDGKVVGLSKLARTVEVFARRLQIQEQLTGQIADALMEYMQPKGALVLIEAEHMCMTMRGIKKPGSQTVTLAKRGVFETDPALEERFFRMMDRR

SEQ ID NO: 9569 - protein, 186 aa, Lachnoclostridium sp.
  misc_feature (1)..(186): tr|A0A1Y4RMT6|A0A1Y4RMT6_9FIRM GTP cyclohydrolase 1 OS= Lachnoclostridium sp. An138 OX=1965560 GN=folE PE=3 SV= 1
MMDYEKIKAGVQLLLEGIGEDVGREGLLETPDRIARMCQEIYGGLYEDPAVHLKKQFSVERNDMVIEKDITFYSVCEHHLLPFYGKAHIGYLPDGKVVGLSKLARTVDVFARRPQIQEKMTAQIARALEENLNPRGVIVMLEAEHTCMTMRGIKKPGSKTVTMTATGVFQDNYELQNRFLSMVKQG

SEQ ID NO: 9570 - protein, 183 aa, Lachnospira multipara
  misc_feature (1)..(183): tr|A0A1H5UGV3|A0A1H5UGV3_9FIRM GTP cyclohydrolase 1 OS= Lachnospira multipara OX=28051 GN=folE PE=3 SV=1
MFDDEKIKEGVRLILEGIGEDVNREGLLETPDRVARMYHELAAGYSDDAKEHLSKRFHVDNSDIVMEKDIYFYSLCEHHMLPFYGKAAIAYIPNGEVVGLSKIARTVEVYARRLQIQEQLTNQIADAFMKELNCKGVMVHIEAEHMCMTMRGIKKPGSKTVTVVKRGAFEDEKLENTFYRMLG

SEQ ID NO: 9571 - protein, 195 aa, Lachnospira pectinoschiza
  misc_feature (1)..(195): tr|A0A174G2S2|A0A174G2S2_9FIRM GTP cyclohydrolase 1 OS= Lachnospira pectinoschiza OX=28052 GN=folE PE=3 SV=1
MKQIDSEAIRFHIRGILEALGDDPDREGLKETPDRVARMYEEVFEGMKYSNDEIADMFDKTFAEDVDDEGTSRYGDMVVVKDIDIFSYCEHHIALMYDMKVTVAYVPKGRVIGLSKIARIADMVGKRLQLQERIGSDIADIICKVTGSEDVAVFIEGCHSCMTARGIKKTNTKTYTQTLRGRFSNESNGFMQWWR

SEQ ID NO: 9572 - protein, 183 aa, Lachnospira pectinoschiza; identical to SEQ ID NO: 9570
  misc_feature (1)..(183): tr|A0A1G9WT26|A0A1G9WT26_9FIRM GTP cyclohydrolase 1 OS= Lachnospira pectinoschiza OX=28052 GN=folE PE=3 SV=1

SEQ ID NO: 9573 - protein, 184 aa, Lachnospiraceae bacterium
  misc_feature (1)..(184): tr|R6EUC2|R6EUC2_9FIRM GTP cyclohydrolase 1 OS=Lachnosp iraceae bacterium CAG:215 OX=1262985 GN=folE PE=3 SV=1
MIDQEKIKQAVRLLLEGIGEDPSREGLVETPERIARMYEEIYGGLTEDAGVHLAKTFTVEHSEMVLEKDITFYSTCEHHLLPFYGKAHIAYIPDGRVVGLSKLARTVEVYARRPQIQEQLTGQIADALEKYLEPKGVMVMIEAEHMCMTMRGIKKPGSKTVTVAKRGVFAEEEALQNTFFRMLS

SEQ ID NO: 9574 - protein, 186 aa, Lachnospiraceae bacterium
  misc_feature (1)..(186): tr|R9IX85|R9IX85_9FIRM GTP cyclohydrolase 1 OS=Lachnosp iraceae bacterium 3-1 OX=397288 GN=folE PE=3 SV=1
MIDREKIEQAVTLLLEGMGEDVTREGLKETPRRIARMYEEIFAGIGQTPEEYLGKTFSVEDGGMVLEKGIVFYSTCEHHLLPFYGKAHIAYIPDGKVVGLSKLARTVEVYARRPQLQERLTVQIADALMEYLQPKGVMVLVEAEHMCMTMRGIKKPGTQTVTVAARGSFAKDKSLQEEFWRMLERR

SEQ ID NO: 9575 - protein, 184 aa, Lachnotalea glycerini
  misc_feature (1)..(184): tr|A0A255I0U5|A0A255I0U5_9FIRM GTP cyclohydrolase 1 OS= Lachnotalea glycerini OX=1763509 GN=folE PE=3 SV=1
MVDKEKVKEAIKLLLEGIGEETTREGLRETPERIARMCEEIYGGMSDDANIHLSKTFQVENNEMVIEKDITFYSMCEHHLMPFYGKASMAYIPDGRVVGLSKLARTVEVFAKRPQIQEKLTAQIADALMYHLMPKGAIVLIEAEHLCMTMRGIKKPGSKTITIVARGEFETNLELKNEFLQLVK

SEQ ID NO: 9576 - protein, 198 aa, Lacibacter cauensis
  misc_feature (1)..(198): tr|A0A562SE08|A0A562SE08_9BACT GTP cyclohydrolase 1 OS= Lacibacter cauensis OX=510947 GN=folE PE=3 SV=1
MAYKKTEQYEEKITSGLIENYRSAIDLLGEDSSREGLLKTPERVAKAMQYLTQGYHMDAKAILESAKFHEEVSEMVIVKDIELYSMCEHHMLPFFGKAHIAYIPNGWITGLSKLARVVDVYSRRMQVQERLTTQILEAIKESLNPMGVAVVVEAQHLCMMMRGVQKQNSVTTTSAFSGEFQKEATRSEFLKLISGKFN

SEQ ID NO: 9577 - protein, 198 aa, Lacibacter sp.
  misc_feature (1)..(198): tr|A0A4Q1CNY6|A0A4Q1CNY6_9BACT GTP cyclohydrolase 1 OS= Lacibacter sp. TTM-7 OX=2508719 GN=folE PE=3 SV=1
MAYKKTEQYEEKITSGLIENYRSAIDLLGEDSQREGLLKTPERVAKAMQFLTQGYHMDAKAILESAKFHEEVSEMVIVKDIELYSMCEHHMLPFFGKAHIAYIPNGWITGLSKLARVVDVYSRRLQVQERLTTQILEAIKESLNPMGVAVVVEAQHLCMMMRGVQKQNSVTTTSAFSGEFQKEATRSEFLKLISGKFN

SEQ ID NO: 9578 - protein, 184 aa, Lacimicrobium alkaliphilum
  misc_feature (1)..(184): tr|A0A0U3AG96|A0A0U3AG96_9ALTE GTP cyclohydrolase 1 OS= Lacimicrobium alkaliphilum OX=1526571 GN=folE PE=3 SV=1
MSDEIKHHYQKIIELLGEDVSRDGLADTPKRAATAMQYLTDGYNKTLDEVVNGAVFESDTDEMVVIQDIEFYSLCEHHMLPFIGRCHISYLPTGKVLGLSKFARIVDMFARRLQIQEGLTKQIAEAVQLVTGAKGVGVIMEGKHMCMMMRGVQKQNSSMVTSVMLGHMRSNQATRNEFLRLIGK

SEQ ID NO: 9579 - protein, 225 aa, Lacinutrix sp.
  misc_feature (1)..(225): tr|A0A4U0EYW9|A0A4U0EYW9_9FLAO GTP cyclohydrolase 1 OS= Lacinutrix sp. CAU 1491 OX=2565367 GN=folE PE=3 SV=1
MKIEREIEDFDSLGDNHVGTSSNTPLRADAFKLTKEEKIDIIKDDVRHIMETLGLDLTDDSLQGTPNRVAKMFVSEIFGGLDPQKKPNASTFENKYKYGEMLVEKNITVYSTCEHHLLPIVGKAHVAYISNGTVVGLSKMNRIVDYFAKRPQVQERLTIQIVEELQKVLNTKDVACVIDAKHLCVNSRGIRDTESSTVTSEFGGKFKEKETKREFLDYIKLDTQF

SEQ ID NO: 9580 - protein, 198 aa, Lacinutrix sp.
  misc_feature (1)..(198): tr|A0A1J5KRB5|A0A1J5KRB5_9FLAO GTP cyclohydrolase 1 OS= Lacinutrix sp. MedPE-SW OX=1860087 GN=folE PE=3 SV=1
MPYKKFEEYNIKVTDDVKNRYKEIIEDLGEDTSREGLVKTPERAAKAMQFLTQGYNQNAADILRGAMFKEDYNDMVVVKDIEFYSLCEHHILPFFGKAHIAYIPNGHIVGLSKLPRIVDVFARRLQVQERLTHEILNCIDDTLKPEGVAVVLEASHMCMQMRGVQKQNSVTTTSGFRGAFKNIETRTEFLKLISETLS

SEQ ID NO: 9581 - protein, 225 aa, Lacinutrix venerupis
  misc_feature (1)..(225): tr|A0A420ZE34|A0A420ZE34_9FLAO GTP cyclohydrolase 1 OS= Lacinutrix venerupis OX=1486034 GN=folE PE=3 SV=1
MKIENTTNTNDDLGENHVGTSSDTPMKADAFKLSDNEKIDIIQSDVRHIMETLGLDLTDDSLNGTPKRVAKMFVNEIFGGLNPDKKPSASVFDNKYKYGEMLVEKNITVYSTCEHHLLPIVGKAHIAYISNGTVVGLSKMNRIVDYFAKRPQVQERLTIQIVKELQKVLNTDDVACVIDAKHLCVNSRGIRDIESSTVTSEFGGQFKNKEIKREFLDYISLETKF

SEQ ID NO: 9582 - protein, 265 aa, Lactobacillus algidus
  misc_feature (1)..(265): tr|A0A2C8EMK8|A0A2C8EMK8_9LACO Putative GTP cyclohydrol ase 1 type 2 OS=Lactobacillus algidus OX=105612 GN=LALC M10_130101 PE=4 SV=1
MTRISDLIQRFELFAPKNMAEIGDPVGLQLGNMNNKVSKVMTTLDVRPEVVQEAIDNNIDFIFAHHPLMFRPAKNLDTTNPQNKMYADLLSHNITVYAAHTNLDNVVGGMNDWLADQLGLQKTIPLVHTTSMDYGMGRVGNLKNEMTVAEFSEYCKQQFNLSGLRVISTDLTQSVKRVAILGGDGGKFYPEAIKNQADVYVTGDVYYHTAHDMLAEGLSAVDPGHHIESICKPQLKRLFNEWTIDNDWQIETIESTINTDPFQFI

SEQ ID NO: 9583 - protein, 351 aa, Lactobacillus aquaticus
  misc_feature (1)..(351): tr|A0A0R2CYI7|A0A0R2CYI7_9LACO GTP cyclohydrolase 1 OS= Lactobacillus aquaticus DSM 21051 OX=1423725 GN=folE PE =3 SV=1
MESIYLSLGSNIGDRQNYLKKALEHLGSESRLIIDKVSNYYETAPVGGVEQDAFLNIAAKIYTTCTPEELLNIIHKVEAKLNRSRKVHWGPRTLDIDIIFWGDRSINNEKLIIPHKETFKRLFVLIPLLDIYDKSSIFYKKIKQSITFLKQTEKEQKVIRVPEKEENTQTIKRVVKELLLAIGDDPQREGVRETPRRVAEMYQEIFSSQNQNEFQEYKVFETPKRDNSQMVLVKDISFYSMCEHHMLPFFGKAHVAYIPRNGRIIGLSKIPRLVDFVSRRLSLQEKITSDIADTLMEILDPVGVAVVVEARHMCVEMRGVKKSNSLTRTTYFTGDFNSNAQLRAEFLRVLN

SEQ ID NO: 9584 - protein, 185 aa, Lactobacillus aviarius
  misc_feature (1)..(185): tr|A0A0R1ZCK3|A0A0R1ZCK3_9LACO GTP cyclohydrolase 1 OS= Lactobacillus aviarius subsp. araffinosus DSM 20653 OX= 1423820 GN=folE PE=3 SV=1
MKDNIEKIITQLLESIGEDPSRPGIVETPKRIEKMYQEIFSSINQENFTDFKLFDNDAVNENQDIIVTDIPFYSMCEHHMLPFFGVAHVAYIPNDKIIGLSKIPRLVDFVTKKLTLQEKVTRDIALQLNKILHPKGVAVQTEARHMCIEMRGIKKTNSTTKVKYYDGIYQENNHMLDNFISTING

SEQ ID NO: 9585 - protein, 187 aa, Lactobacillus backii
  misc_feature (1)..(187): tr|A0A192H1F0|A0A192H1F0_9LACO GTP cyclohydrolase 1 OS= Lactobacillus backii OX=375175 GN=folE PE=3 SV=1
MKQTELKKIELAVQTILETVGEDIKRPGLKETPARVARMYAEIFASVKQTEFTDYKMFKTDSENDLVIVKEIPFYSMCEHHLLPFWGTVSVGYVPKAGQIIGLSKIARLVDYVAKRPSVQERLTSQIVTELDKILRPGGIAVEVKARHMCMEMRGIQKTGSETVTAAFSGGLKNAVAKSEFQQRLAL

SEQ ID NO: 9586 - protein, 215 aa, Lactobacillus backii
  misc_feature (1)..(215): tr|A0A1Q8FGF7|A0A1Q8FGF7_9LACO GTP cyclohydrolase 1 OS= Lactobacillus backii OX=375175 GN=folE PE=3 SV=1
MTTNNDHYNEAELLASYFSETANNSELLQQKLTDVQQIEQALQTLMALCGQDDNNPDLDKTPFRVVKAFLEYTSGYREDPTAHLEKVFDIQQNDPIIVKDIEFYSMCEHHFAPFFGVAHVAYLPDQKVTGLSKIARVVEGYARRFQVQERLTNQIADAIDTVLQPKGVMVAIEAKHLCVSSRGAKKEQAQTFTLASRGAYIKDSQLRSEFMTAIK

SEQ ID NO: 9587 - protein, 187 aa, Lactobacillus bifermentans
  misc_feature (1)..(187): tr|A0A0R1H1A2|A0A0R1H1A2_9LACO GTP cyclohydrolase 1 OS= Lactobacillus bifermentans DSM 20003 OX=1423726 GN=folE PE=3 SV=1
MTDEATAQIEAAVRTILTAIGEDPDRPGLQETPARVARMYAEVFSSVQQPQFTNYKLFPTESQDDLVLVKDIPFYSMCEHHLLPFFGHVHVAYVPQHKQIIGLSKIARLVDYCAKRPNVQERLTSAIADELQTILDPAGIAVEVQARHMCMEMRGIQKTGSQTVTASFRGTLNNAEAKAEFQRRVQL

SEQ ID NO: 9588 - protein, 357 aa, Lactobacillus brevis
  misc_feature (1)..(357): tr|C2D4Q7|C2D4Q7_LACBR GTP cyclohydrolase 1 OS=Lactobac illus brevis subsp. gravesensis ATCC 27305 OX=525310 GN =folE PE=3 SV=1
MNDDIVLSLGSNIGNREFYINKAIQLLGSDANILIDKVSNFYETSPVGNVKQRHFVNIALKIATTYTPEKLLAVIHQVELSLHRTREIHWGPRTLDIDIIFWGDKKMSTDDLTIPHPETFNRLFVLVPILELISKQFPFYQQISKQIQVLQKKDQTVSLIKKDAQPKRLVESSIHNILSAIGDDPDRPGLVETPDRVARMYDEIFSSEGLENFEDYKLFKSKSSNHSKMVLMKNIPFYSMCEHHMMPFWGKAHIAYIPDHGTIIGLSKIPRLVDFVSHKLGLQEKLTDDIVDQLNKILAPKGAAVVIDARHMCVEMRGVKKTDSSTRTIRFSGIFDTDQDLQMAFLNSIGDINGKSI

SEQ ID NO: 9589 - protein, 353 aa, Lactobacillus buchneri
  misc_feature (1)..(353): tr|A0A4R5NKX6|A0A4R5NKX6_LACBU GTP cyclohydrolase 1 OS= Lactobacillus buchneri DSM 20057 OX=1423728 GN=folE PE= 3 SV=1
MEDVYLSLGSNIGNREAFLQQAIEALGSDPRIMIEKQASLYETSPVGGVKQRAFVNTAVKIGTTYEPLALLKVIHEIESGLHRTRQVHWGPRTVDIDIIFFGNEQIDQPGLSIPHPEAFNRLFVLIPIQELIDGQFPDADKIATAIKSLQQDDQSIKKISPANNFYTEITNNVTNILAAIGDDPTRKGLIETPDRVARMYANIFDSIGLEDFQDYKLFDSPESDDSKTVMVKGIPFYSMCEHHMMPFWGKVSVAYVPDNGKIIGLSKILRLVDFVSHKLSLQEKITDDVLSQMEKILHPKGVAVIVDARHMCIEMRGVKKTGTVTRTTKFTGVFQQNDELRSEFLNSIQVGQI

SEQ ID NO: 9590 - protein, 353 aa, Lactobacillus buchneri; identical to SEQ ID NO: 9589
  misc_feature (1)..(353): tr|A0A4U0D823|A0A4U0D823_LACBU GTP cyclohydrolase 1 OS= Lactobacillus buchneri OX=1581 GN=folE PE=3 SV=1

SEQ ID NO: 9591 - protein, 351 aa, Lactobacillus capillatus
  misc_feature (1)..(351): tr|A0A0R1M6K1|A0A0R1M6K1_9LACO GTP cyclohydrolase 1 OS= Lactobacillus capillatus DSM 19910 OX=1423731 GN=folE P E=3 SV=1
MESIYLSLGSNIGNRQENLEKAIEYLGNDKNLIVDQVSEYYETSPVGDIVQDNFLNIAVKVFTTYTPGELLKQIHKIEAFLKRIRKVHWGPRTLDIDIIFWGNKQFKTSELTVPHQETFNRLFVLIPLLDIYEKTGPFYSQIKETIMILEQEEQDQKITRVPKKDSRTVTIERAITTLLVAIGDDPKREGIVETPKRVAKMYQEIFASQSQDDFQDYKVFKTPKKDNAQMVLVKDIPFYSMCEHHMLPFFGKVHVAYIPQNGKIIGLSKIPRLVDFVSRRLSLQEKITSDIAETLTKILNPAGVAVMAEARHMCVEMRGVKKSSSLTRTTYFTGDFDLNAQLRAEFLSTLK

SEQ ID NO: 9592 - protein, 190 aa, Lactobacillus casei
  misc_feature (1)..(190): tr|A0A1Z2F3L1|A0A1Z2F3L1_LACCA GTP cyclohydrolase 1 OS= Lactobacillus casei OX=1582 GN=folE PE=3 SV=1
MKPFDRALLETSVRNILIAIGDDPDREGLKETPARVASAYEEMFSSLHQKAFTESKVFNSSLANDGELVVVADIPFYSMCEHHLLPFFGSVSVGYMPKNGRIIGLSKIPRLVDYVAKKPNVQENLTSQIGLELQKLVDPQGVAVVVKARHMCTEMRGIKKANSHTLTSFFSGAFKNKDYRMEFLQEIKNQ

SEQ ID NO: 9593 - protein, 190 aa, Lactobacillus casei
  misc_feature (1)..(190): tr|A0A1Q9MM36|A0A1Q9MM36_LACCA GTP cyclohydrolase 1 OS= Lactobacillus casei OX=1582 GN=folE PE=3 SV=1
MKPFDRALLETSVRNILIAIGDDPDREGLQETPARVASAYEEMFSSLHQKAFTESKVFNSSMANDGELVVVADIPFYSMCEHHLLPFFGSVSVGYMPKNGRIIGLSKIPRLVDYVAKKPNVQENLTSQIGLELQKLVDPQGVAVVVKARHMCTEMRGIKKANSHTLTSFFSGAFKNKDYRMEFLQEIKNQ

SEQ ID NO: 9594 - protein, 192 aa, Lactobacillus coleohominis
  misc_feature (1)..(192): tr|A0A0R2BPI5|A0A0R2BPI5_9LACO GTP cyclohydrolase 1 OS= Lactobacillus coleohominis DSM 14060 OX=887896 GN=folE PE=3 SV=1
MDQQKIEKVVRDLLIAIGENPHREGLLETPQRVAKMYQEVFSSLKRQPEDVANYKVFHASDVPEMVLFQHIPFYSMCEHHLLPFFGYANVAYVPKDDQVIGLSKIPRLIDFVTKKPGMQERVTTDLAAELQRILDPAGIAVTISARHLCMEMRGVNKAGQYTYTDKFTGRFKEDKDLKREFLMQTRNNHADL

SEQ ID NO: 9595 - protein, 192 aa, Lactobacillus coleohominis
  misc_feature (1)..(192): tr|C7XWW0|C7XWW0_9LACO GTP cyclohydrolase 1 OS=Lactobac illus coleohominis 101-4-CHN OX=575594 GN=folE PE=3 SV= 1
MDQQKIEKVVRDLLIAIGENPHREGLLETPQRVAKMYQEVFSSLKRQPEDVANYKVFHVSDVPEMVLVQHIPFYSMCEHHLLPFFGYANVAYVPKDDQVIGLSKIPRLIDFVTKKPGMQERVTTDLAAELQRILDPAGIAVTISARHLCMEMRGVNKAGQYTYTDKFTGRFKEDKDLKREFLMQTRNNHADL

SEQ ID NO: 9596 - protein, 189 aa, Lactobacillus collinoides
  misc_feature (1)..(189): tr|A0A166HUI1|A0A166HUI1_LACCL GTP cyclohydrolase 1 OS= Lactobacillus collinoides OX=33960 GN=folE PE=3 SV=1
MIDKTNQEKIEKAVRMILEAVGEDPDRPGLVETPARVARSYGEIFSSLNAPAFDNYKLFPVEETTEMVLIKDIPFYSMCEHHLLPFFGTVQVAYVPDHKRVMGLSKIPRLIDYCAKRPNVQERLTVNIAKELNRILDPNGVAVSISARHMCMEMRGVEKTGSQTESSYYTGNFKTDTVLKQEFLQRING

SEQ ID NO: 9597 - protein, 189 aa, Lactobacillus collinoides; identical to SEQ ID NO: 9596
  misc_feature (1)..(189): tr|A0A0R2BCT6|A0A0R2BCT6_LACCL GTP cyclohydrolase 1 OS= Lactobacillus collinoides DSM 20515 = JCM 1123 OX=14237 33 GN=folE PE=3 SV=1

SEQ ID NO: 9598 - protein, 182 aa, Lactobacillus composti
  misc_feature (1)..(182): tr|A0A0R1Y1R9|A0A0R1Y1R9_9LACO GTP cyclohydrolase 1 OS= Lactobacillus composti DSM 18527 = JCM 14202 OX=1423734 GN=folE PE=3 SV=1
MITQAVRQILTAVGEDPDRPGLVETPDRVARMYAEVFSSLEDREFKDYKIFDSDHDQDEIVLVKDIPFYSMCEHHLLPFFGTVSVAYIPKDGKIIGLSKIPRLVDFVSHKPTLQENITAEIAQTLDHILKPAGVAVIVKARHMCMEMRGVKKTNSQTRTTYYSGAFKTPQTRQDLMLQLQAV

SEQ ID NO: 9599 - protein, 186 aa, Lactobacillus coryniformis
  misc_feature (1)..(186): tr|A0A5B8THS5|A0A5B8THS5_9LACO GTP cyclohydrolase 1 OS= Lactobacillus coryniformis OX=1610 GN=folE PE=3 SV=1
MNDEQKQQIIAAVKQILVAVGEDPERAGLVETPERVARMYTEIFSSLREPEFTNYKLFQTDSHAEMVLVKDIPFYSMCEHHLLPFFGTAHIAYLPADGQIIGLSKIARLVDYVAHKPNVQERLTSQLVDELQKILQPRGIAVELEARHMCMEMRGIQKTGSQTVTTRFTGALDDPVRIAEFERRLH

SEQ ID NO: 9600 - protein, 186 aa, Lactobacillus coryniformis
  misc_feature (1)..(186): tr|A0A0R1F7I4|A0A0R1F7I4_9LACO GTP cyclohydrolase 1 OS= Lactobacillus coryniformis subsp. coryniformis KCTC 316 7 = DSM 20001 OX=913848 GN=folE PE=3 SV=1
MNDEQKQQIIAAVKQILVAVGEDPERAGLVETPERVARMYAEIFSSLREPEFTNYKLFQTDSHAEMVLVKDIPFYSMCEHHLLPFFGTVHIAYLPADGQIIGLSKIARLVDYVAHKPNVQERLTSQLVDELQKILQPRGIAVELEARHMCMEMRGIQKTGSQTVTTRFTGALDDPVRIAEFERRLH

SEQ ID NO: 9601 - protein, 357 aa, Lactobacillus curieae
  misc_feature (1)..(357): tr|A0A1S6QKD0|A0A1S6QKD0_9LACO GTP cyclohydrolase 1 OS= Lactobacillus curieae OX=1138822 GN=folE PE=3 SV=1
MQTNVILSLGSNIGNREFNINRAITAISSDPQNMLVNTSNFYETSPVGNVEQKNFINVAINVATNYEPEKLLAKIHQIEADLHRTRDIHWGPRTIDIDIVFWGDQTISDSDLVVPHPEAFNRLFVLVPSLEVLPADFNLNDTIKQRITELSASDQSIKLIKQNKRGDQEIMQSVRTILANIGEDPDRAGLLETPDRVQRMYAEIFSTTGQEKFQDYKLFDSENPDSSKMIMMRNIPFYSMCEHHMMPFFGKAHVAYIPTNGKIIGLSKIPRLVDFVTHKLGLQEKVTDDIATQLNKILNPQGVAVVVDARHMCVEMRGVKKTDSSTRTFSFSGLFKEDSNLQAEFLNSIGDLNDQNL

SEQ ID NO: 9602 - protein, 190 aa, Lactobacillus curieae
  misc_feature (1)..(190): tr|A0A401FNE3|A0A401FNE3_9LACO GTP cyclohydrolase 1 OS= Lactobacillus curieae OX=1138822 GN=folE PE=3 SV=1
MNEEKIEAAITSLLEAVGEDPNREGLVETPKRVAKAYAEIFAGLNHRPEEFTDYKIFHVDEDPEMILVQQIPFYSMCEHHLLPFFGVANVAYVPKDGQVIGISKIPRLVEFVSKRPGMQERVNTQIVTELEDILHPQGIAVSLSARHMCMEMRGINKDGLSTYTSKFTGVFKDNLDLKNEFLQQTRNLRG

SEQ ID NO: 9603 - protein, 357 aa, Lactobacillus delbrueckii
  misc_feature (1)..(357): tr|A0A219D3D6|A0A219D3D6_LACDE GTP cyclohydrolase 1 OS= Lactobacillus delbrueckii subsp. bulgaricus OX=1585 GN= folE PE=3 SV=1
MMENVILSLGSNIGNREAYINKAVALLGNDPAILIDKASSFYETSPVGNVNQRAFINIALKIATTDSPEDLLTKIHQIELHLHRTRDVHWGPRTLDVDIIFWGDQKIKTESLIIPHPEAFNRLFVLVPTLEIVTPEFPFYNQIKAQIQKLQKADQTIQLVQKQTQSKQVVESAIRQILNAIGDDPDRPGLVETPDRVARMYNEIFSSEGLDNFEDYKLFNTKETDNSKMVMVKNIPFYSMCEHHMMPFWGKAHIAYVPDHGKIIGLSKIPRLVDFVSHKLGLQEKLTDDIVAQMNRILAPKGVAVIVDARHMCVEMRGVKKADSLTRTIRFSGVFETDQALRMAFLNSIGDVNGKTI

SEQ ID NO: 9604 - protein, 357 aa, Lactobacillus delbrueckii
  misc_feature (1)..(357): tr|F0JZ38|F0JZ38_LACD2 GTP cyclohydrolase 1 OS=Lactobac illus delbrueckii subsp. bulgaricus (strain 2038) OX=35 3496 GN=folE PE=3 SV=1
MMENVILSLGSNIGNREAYINKAVALLGNDPAILIDKASSFYETSPVGNVNQRAFINIALKIATTDSPEDLLTKIHQIELHLHRTRDVHWGPRTLDIDIIFWGDQKIKTESLIIPHPEAFNRLFVLVPTLEIVTPEFPFYNQIKAQIQKLQKADQTIQLVQKQTQSKQVVESAIRQILNAIGDDPDRPGLVETPDRVARMYNEIFSSEGLDNFEDYKLFNTKETDNSKMVMVKNIPFYSMCEHHMMPFWGKAHIAYVPDHGKIIGLSKIPRLVDFVSHKLGLQEKLTDDIVAQMNRILAPKGVAVIVDARHMCVEMRGVKKADSLTRTIRFSGVFETDQALRMAFLNSIGDVNGKTI

SEQ ID NO: 9605 - protein, 220 aa, Lactobacillus dextrinicus
  misc_feature (1)..(220): tr|A0A0R2BKQ5|A0A0R2BKQ5_9LACO GTP cyclohydrolase 1 OS= Lactobacillus dextrinicus DSM 20335 OX=1423738 GN=folE PE=3 SV=1
MTLSFEKNATEHYDLDHLLTTYFPELINQPTELATKKTTVNEIELALQKLIALCGEDPQQADLAETPFRVIKAFLEYTAGYREDPTAHLEKVFDIQQNDPIIVKDIEFYSMCEHHFAPFFGVAHVAYLPDQKVTGLSKIARVVEGYARRFQVQERLTNQIADAIDTVLQPKGVMVAIEAKHLCVSSRGAKKEQAQTFTLASRGAYIKDSQLRSEFMAAIK

SEQ ID NO: 9606 - protein, 202 aa, Lactobacillus dextrinicus
  misc_feature (1)..(202): tr|A0A5J6UV21|A0A5J6UV21_9LACO GTP cyclohydrolase I Fol E OS=Lactobacillus dextrinicus OX=51664 GN=folE PE=4 SV =1
MTTYFPELINQPTELATKKTTVNEIELALQKLIALCGEDPQQADLAETPFRVIKAFLEYTAGYREDPTAHLEKVFDIQQNDPIIVKDIEFYSMCEHHFAPFFGVAHVAYLPDQKVTGLSKIARVVEGYARRFQVQERLTNQIADAIDTVLQPKGVMVAIEAKHLCVSSRGAKKEQAQTFTLASRGAYIKDSQLRSEFMAAIK

SEQ ID NO: 9607 - protein, 190 aa, Lactobacillus diolivorans
  misc_feature (1)..(190): tr|A0A0R1SD44|A0A0R1SD44_9LACO GTP cyclohydrolase 1 OS= Lactobacillus diolivorans DSM 14421 OX=1423739 GN=folE PE=3 SV=1
MSPENKQIIETSIRHILTAVGENPDRAGLKETPARVARMYEEIFSSLEKKSFDDGKVFDADKSVDDEIVTVKHVPFYSMCEHHLLPFFGTVSVGYVPQNGKIIGLSKIPRLIEYVAAKPSVQEEITSQIGKEMTKILAPQGVAVVITARHMCVEMRGIKKLNSQTTTSYYDGILKKDRDKKAEFLQEINR

SEQ ID NO: 9608 - protein, 190 aa, Lactobacillus fabifermentans
  misc_feature (1)..(190): tr|W6TBR2|W6TBR2_9LACO GTP cyclohydrolase 1 OS=Lactobac illus fabifermentans T30PCM01 OX=1400520 GN=folE PE=3 S V=1
MIDETNQAKIRHAVREILTAVGEDPDRPGLVETPDRVARMYAEVFATKTAAPFDNYKLFEVTDPTEMVLLKDIPFYSMCEHHLLPFFGTVQVAYVPQHDQVIGLSKIPRLIDYCAQQPNVQERLTVSIAKELQRILDPAGIAVSITARHMCMEMRGVSKPGVQTESSYYSGQFKTDLDLKREFLQRIASK

SEQ ID NO: 9609 - protein, 190 aa, Lactobacillus fabifermentans; identical to SEQ ID NO: 9608
  misc_feature (1)..(190): tr|A0A0R2NC87|A0A0R2NC87_9LACO GTP cyclohydrolase 1 OS= Lactobacillus fabifermentans DSM 21115 OX=1413187 GN=fo lE PE=3 SV=1

SEQ ID NO: 9610 - protein, 357 aa, Lactobacillus farraginis
  misc_feature (1)..(357): tr|X0PF78|X0PF78_9LACO GTP cyclohydrolase 1 OS=Lactobac illus farraginis DSM 18382 = JCM 14108 OX=1423743 GN=fo lE PE=3 SV=1
MMENVILSLGSNIGNREAYINKAVALLGNDPAILIDKVSSFYETSPVGNVNQRAFINIALKIATTDSPEDLLTKIHQIELHLHRTRDVHWGPRTLDVDIIFWGDQKIKTESLIIPHPEAFNRLFVLVPTLEIVTPEFPFYNQIKAQIQKLQKADQTIQLVQKQTQSKQVVESAIRQILNAIGDDPDRPGLVETPDRVARMYNEIFSSEGLDNFEDYKLFNTKETDNSKMVMVKNIPFYSMCEHHMMPFWGKAHIAYVPDHGKIIGLSKIPRLVDFVSHKLGLQEKLTDDIVAQMNRILAPKGVAVIVDARHMCVEMRGVKKADSSTRTIRFSGVFDTDQALRMAFLNSIGDVNGKTI

SEQ ID NO: 9611 - protein, 190 aa, Lactobacillus fermentum
  misc_feature (1)..(190): tr|A0A3R5XFA0|A0A3R5XFA0_LACFE GTP cyclohydrolase 1 OS= Lactobacillus fermentum OX=1613 GN=folE PE=3 SV=1
MDQEKLIKATKMMIEAFGEDPDREGLRETPERVAKMYAEIFSSLDAKRPEAVTNYKVFHVADTPEMVAIQEIPFYSMCEHHLLPFFGTVSVAYVPKNGRVIGLSKIPRLVDFVSHKPGMQERVTTELVQELTRLLDPAGVAVVVAARHMCMEMRGVTKAGQFTYTSHFTGAFFDQPNLKQEFLDQVRGRP

SEQ ID NO: 9612 - protein, 190 aa, Lactobacillus fermentum
  misc_feature (1)..(190): tr|A0A2K2TK15|A0A2K2TK15_LACFE GTP cyclohydrolase 1 OS= Lactobacillus fermentum OX=1613 GN=folE PE=3 SV=1
MDQEKLIKATKMMIEAFGEDPDREGLRETPERVAKMYAEIFSSLDAKRPEAVTNYKVFHVADTPEMVVVQEIPFYSMCEHHLLPFFGTVSVAYVPKNGRVIGLSKIPRLVDFVSHKPGMQERVTTELVQELTRLLDPAGVAVVVAARHMCMEMRGVTKAGQFTYTSHFTGAFLDQPNLKQEFLDQVRGRP

SEQ ID NO: 9613 - protein, 190 aa, Lactobacillus frumenti
  misc_feature (1)..(190): tr|A0A5J6VF03|A0A5J6VF03_9LACO GTP cyclohydrolase I Fol E OS=Lactobacillus frumenti OX=104955 GN=folE PE=4 SV=1
MDQVKVERAIHDLIVALGEDPDREGLRETPTRVAKMYGEIFSSLNHRPEEFTNYKVFHVDEQPEMVLIQHIPFYSMCEHHFLPFFGYANVAYVPRNGRVIGLSKIPRLVDFVTKKPGMQERVTTELVGELQRILDPQGIAVTIVARHMCMEMRGICKAGQFTYTDKFTGDFHDRQDLRQEFLQQTRQTQC

SEQ ID NO: 9614 - protein, 187 aa, Lactobacillus frumenti
  misc_feature (1)..(187): tr|A0A0R1P5E2|A0A0R1P5E2_9LACO GTP cyclohydrolase 1 OS= Lactobacillus frumenti DSM 13145 OX=1423746 GN=folE PE= 3 SV=1
MKVERAIHDLIVALGEDPDREGLRETPTRVAKMYGEIFSSLNHRPEEFTNYKVFHVDEQPEMVLIQHIPFYSMCEHHFLPFFGYANVAYVPRNGRVIGLSKIPRLVDFVTKKPGMQERVTTELVGELQRILDPQGIAVTIVARHMCMEMRGICKAGQFTYTDKFTGDFHDRQDLRQEFLQQTRQTQC

SEQ ID NO: 9615 - protein, 189 aa, Lactobacillus fuchuensis
  misc_feature (1)..(189): tr|A0A0R1S5I6|A0A0R1S5I6_9LACO GTP cyclohydrolase 1 OS= Lactobacillus fuchuensis DSM 14340 = JCM 11249 OX=14237 47 GN=folE PE=3 SV=1
MVDKTVQQIEKDVRDILKQVGDDPQRAGVFETPQRVAKMYQEVLAYQGQTDFKDYKLFETEIVDDDQLVLMQAIPFYSMCEHHMLPFFGQVNVAYLPAEGRIIGLSKIPRLVDFVSKRLSVQENLTRDIGQILNQILAPQGVAVQVTARHMCVEMRGIKKATSQTLTTFYSGQFKTDRQLRNEFLQLLK

SEQ ID NO: 9616 - protein, 189 aa, Lactobacillus fuchuensis; identical to SEQ ID NO: 9615
  misc_feature (1)..(189): tr|A0A2N9DV02|A0A2N9DV02_9LACO GTP cyclohydrolase 1 OS= Lactobacillus fuchuensis OX=164393 GN=folE PE=3 SV=1

SEQ ID NO: 9617 - protein, 357 aa, Lactobacillus gallinarum
  misc_feature (1)..(357): tr|A0A0P0EFI5|A0A0P0EFI5_9LACO GTP cyclohydrolase 1 OS= Lactobacillus gallinarum OX=52242 GN=folE PE=3 SV=1
MMENVILSLGSNIGNREAYINKAVALLGNDPAILIDKASSFYETSPVGNVNQRAFINIALKIATTDSPEDLLTKIHQIELHLHRTRDVHWGPRTLDVDIIFWGDQKIKTESLIIPHPEAFNRLFVLVPTLEIVTPEFPFYNQIKAQIQKLQKADQTIQLVQKQTQSKQVVESAIRQILNAIGDDPDRPGLVETPDRVARMYNEIFSSEGLDNFEDYKLFNTKETDNSKMVMVKNISFYSMCEHHMMPFFGKAHIAYVPDHGKIIGLSKIPRLVDFVSHKLGLQEKLTDDIVAQMNRILAPKGVAVIVDARHMCVEMRGVKKADSSTRTIRFSGVFDTDQALRMAFLNSIGDVNGKTI

SEQ ID NO: 9618 - protein, 190 aa, Lactobacillus ginsenosidimutans
  misc_feature (1)..(190): tr|A0A0H4QLH1|A0A0H4QLH1_9LACO GTP cyclohydrolase 1 OS= Lactobacillus ginsenosidimutans OX=1007676 GN=folE PE=3 SV=1
MTPDNQKIIEDSVKNILKAVGDDPDREGVQETPARVARMYSEIFSSLEEPEFNDSKIFQSSNLVDGENVIVKDIPFYSMCEHHLLPFFGKVTVGYEPKNGKIIGLSKIPRLVDFVARKPNVQENITSEIGTRLNKLLAPQGVAVIVTARHMCVEMRGVQKTASKTTTTFYSGVFRDRDKKMEFLEEIKYN

SEQ ID NO: 9619 - protein, 191 aa, Lactobacillus heilongjiangensis
  misc_feature (1)..(191): tr|A0A0K2LDJ4|A0A0K2LDJ4_9LACO GTP cyclohydrolase 1 OS= Lactobacillus heilongjiangensis OX=1074467 GN=folE PE=3 SV=1
MSVNRTTNIEESVRNIIKLTGDNPEREGLLETPKRVARMYQEILSSQGKKKFEEYKIFTANTTNNSQMILINDIPFYSMCEHHMLPFFGTAHVAYIPNNGKIIGLSKIPRLVDFVSRKLNVQENITRDVALILDEILNPKGVAVVLDARHMCVEMRGIKKGNCVTRTSFYSGKFDKYPQMRYEFLQNLNNK

SEQ ID NO: 9620 - protein, 357 aa, Lactobacillus helveticus
  misc_feature (1)..(357): tr|W5XG05|W5XG05_LACHE GTP cyclohydrolase 1 OS=Lactobac illus helveticus H9 OX=767456 GN=folE PE=3 SV=1
MMENVILSLGSNIGNREAYINKAVALLGNDPAILIDKASSFYETSPVGNVNQRAFINIALKIATTDSPEDLLTKIHQIELHLHRTRDVHWGPRTLDVDIIFWGDQKIKTESLIIPHPEAFNRLFVLVPTLEIVTPEFPFYNQIKAQIQKLQKADQTIQLVQKQTQSKQVVESAIRQILNAIGDDPDRPGLVETPDRVARMYNEIFSSEGLDNFEDYKLFNTKETDNSKMVMVKNIPFYSMCEHHMMPFWGEAHIAYVPDHGKIIGLSKIPRLVDFVSHKLGLQEKLTDDIVAQMNRILAPKGVAVIVDARHMCVEMRGVKKADSLTRTIRFSGVFETDQALRMAFLNSIGDVNGKTI

SEQ ID NO: 9621 - protein, 265 aa, Lactobacillus helveticus
  misc_feature (1)..(265): tr|A0A0R2MQ78|A0A0R2MQ78_LACHE GTP cyclohydrolase 1 typ e 2 OS=Lactobacillus helveticus OX=1587 GN=IV62_GL00126 6 PE=4 SV=1
MTKVKDIVNRLREDFPEDIASKGDPVGMQIGSMEADVTKVMTTLDVRPQVVEEAVEKGVNFIVSHHPVMFRPARNLDFADAQNAMYGNIIKNGITVYSIHTNSDKAQDGSADWQAEELGLKDVEPFCLDDDGIAMGRKGRLPETMTAYDFAYYVKEKMGIKMARLITADNNKKISTVGFICGDGGKYWTRALDNHLDAFITGDVYYHVGHDMISSGLTVVDPGHYTEKLFKYKVYDRLKKWNQENNWNVGVELSEVSTNPFQDLF

SEQ ID NO: 9622 - protein, 357 aa, Lactobacillus hilgardii
  misc_feature (1)..(357): tr|C0XLW6|C0XLW6_LACHI GTP cyclohydrolase 1 OS=Lactobac illus hilgardii DSM 20176 = ATCC 8290 OX=1423757 GN=fol E PE=3 SV=1
MKDDIVLSLGSNIGNREFYINKAIQLLGNDANILIDKVSNFYETSPVGNVKQRHFVNIALKIATTYTPEKLLAVIHQVELSLHRTREIHWGPRTLDIDIIFWGDKKMSTDDLTIPHPETFNRLFVLVPILEIISKQFPFYQQISKQIQVLQKKDQTVSLIKKDAQPKRLVESSIHNILSAIGDDPDRPGLVETPDRVARMYDEIFSSEGLENFEDYKLFKSKSSNHSKMVLMKNIPFYSMCEHHMMPFWGKAHIAYIPDHGTIIGLSKIPRLVDFVSHKLSLQEKLTDDIVDQLNKILAPKGAAVVIDARHMCVEMRGVKKTDSSTRTIRFSGIFDTDQDLQMAFLNSIGDINGKSI

SEQ ID NO: 9623 - protein, 189 aa, Lactobacillus hokkaidonensis
  misc_feature (1)..(189): tr|A0A0A1GY17|A0A0A1GY17_9LACO GTP cyclohydrolase 1 OS= Lactobacillus hokkaidonensis JCM 18461 OX=1291742 GN=fo lE PE=3 SV=1
MDEKRIENAVKEILNAIGDDPNREGLVETPARVAKMYGEVFASLDEKATFDDYKVFHVDEDPGMVLIQQIPFYSMCEHHLLPFFGTANVAYVPRDGKIMGLSKIPRLVDFVAKRPGVQERITTQIVAQMEQILHPKGIAVSLSARHMCMEMRGISKSGLFTYTSKFEGVFKDDLELKNEFLRQTGNHSE

SEQ ID NO: 9624 - protein, 186 aa, Lactobacillus iners
  misc_feature (1)..(186): tr|E1NNV2|E1NNV2_9LACO GTP cyclohydrolase 1 OS=Lactobac illus iners LactinV 03V1-b OX=879298 GN=folE PE=3 SV=1
MNQQKIEHAVRELLVAVGEDPDRSGLVETPKRVAKMYQEIFSSLNHRPEDFANYKKFHVDSNPEMVSINHIPIYSMCEHHLLPFFGYADIAYIPNNNMVLGLSKIPRLVEFVSKKPTMQEKITTDIVKQLAKFIDPKGIAVAIKARHLCMEMRGINKYGQYTYTSDYAGLFNEDDRLKQEFLNQRG

SEQ ID NO: 9625 - protein, 186 aa, Lactobacillus iners
  misc_feature (1)..(186): tr|A0A2N6RTX1|A0A2N6RTX1_9LACO GTP cyclohydrolase 1 OS= Lactobacillus iners OX=147802 GN=folE PE=3 SV=1
MNQQKIEHAVRELLVAVGEDPDRSGLVETPKRVAKMYQEIFSSLNHRPEDFANYKKFHVDSNPEMVSINHIPIYSMCEHHLLPFFGYADIAYIPNNNTVLGLSKIPRLVEFVSKKPTMQEKITTDIVKQLAKFINPKGIAVAIKARHLCMEMRGINKYGQYTYTSDYAGLFNEDDRLKQEFLKQRG

SEQ ID NO: 9626 - protein, 191 aa, Lactobacillus ingluviei
  misc_feature (1)..(191): tr|A0A0R2GWC1|A0A0R2GWC1_9LACO GTP cyclohydrolase 1 OS= Lactobacillus ingluviei OX=148604 GN=folE PE=3 SV=1
MDLARIEAAVREILLAVGEDPTREGLQETPARVARMYSEVFASLGKQAEEVANYKTFHVEERPEMVLVQDIPFYSMCEHHLLPFFGVISLAYVPNDRVIGLSKIPRLVDYVTKKPGMQERVTTELLAELDRLLAPAGVAVSVAARHMCMEMRGVHKTGQFTYTSKFSGQFATQEALRQEFLQQVRTHHDQL

SEQ ID NO: 9627 - protein, 191 aa, Lactobacillus ingluviei
  misc_feature (1)..(191): tr|A0A0R1U7L8|A0A0R1U7L8_9LACO GTP cyclohydrolase 1 OS= Lactobacillus ingluviei DSM 15946 OX=1423760 GN=folE PE =3 SV=1
MDLARIEAAVREILLAVGEDPTREGLQETPARVARMYSEVFASLGKQAEEVANYKAFHVEERPEMVLVQDIPFYSMCEHHLLPFFGVISLAYVPNDRVIGLSKIPRLVDYVTKKPGMQERVTTELLTELDRLLAPAGVAVSVAARHMCMEMRGVHKTGQFTYTSKFSGQFATQEALRQEFLQQVRTHHDQL

SEQ ID NO: 9628 - protein, 347 aa, Lactobacillus kefiri
  misc_feature (1)..(347): tr|A0A511DR80|A0A511DR80_LACKE GTP cyclohydrolase 1 OS= Lactobacillus kefiri OX=33962 GN=folKE PE=3 SV=1
MQDVYLSLGSNIGNRELYLHKAIEMLGNDPQILIDKVADFYETSPVGGVKQRSFINTAVKIATNDEPLQLLDKIHQIEADLQRVRTVHWGPRTVDIDIIFFGTQETQIDKLTIPHPEAFNRLFVLIPIKQIMDHDSPYYAKVTQKIDQFPDKDQLIAKSNHPDSYKESIKRSVTNLLSTIGEDPNRPGLLETPDRVARMYGEIFASTGLDDFQDYKLFDDPNKDSKMVMIKNIPFYSMCEHHMMPFWGKVNVGYLPKNGKIIGLSKIPRLVDFVSHKLSLQEKITDDIVSQMNKILAPQGVAVVVDARHMCVEMRGVKKTGSITRTTKFSGIFEENSALRHEFLQSL

SEQ ID NO: 9629 - protein, 189 aa, Lactobacillus kimchicus
  misc_feature (1)..(189): tr|A0A0R1HJT3|A0A0R1HJT3_9LACO GTP cyclohydrolase 1 OS= Lactobacillus kimchicus JCM 15530 OX=1302272 GN=folE PE =3 SV=1
MINEENQAKIETAVKMILEAVGEDPTRDGLQETPARVARMYQEVFSSLNAPAFDNYKLFPVEETTEMVLIKDISFYSMCEHHLLPFFGVVHVAYIPNHKQVMGLSKIPRLIDYCAKRPNVQERMTVNIAAELTRILDPKGVAVAVSARHMCMEMRGVEKTGSHTETSYYTGEFKTNNALKSEFLQRTIG

SEQ ID NO: 9630 - protein, 354 aa, Lactobacillus kisonensis
  misc_feature (1)..(354): tr|A0A0R1NSY7|A0A0R1NSY7_9LACO GTP cyclohydrolase 1 OS= Lactobacillus kisonensis DSM 19906 = JCM 15041 OX=14237 66 GN=folE PE=3 SV=1
MEDVYLSLGSNIGNRQQYLNAAITLLGNNRQIIIERVANFYETSPVGNVSQRPFVNTAVKIATTLEPDDLLLVIHQIEKRLHRSRKIHWGPRTLDIDIIFYGQRVVHSDDLEIPHPEAFNRRFVLIPIKELVDHSFPYYEQITRAITHINSKDQELKPVSAKDNRGNIIERATTSILTAIGEDPSRAGLLETPNRVSRMDAEIFSSVGLTDFTDYKLFHSEDSDQSKMIMMNNLPFYSMCEHHMMPFWGSVNVAYMPANGTIIGLSKIPRLIDFVSHKLTLQERLTDEIIDQMTRILAPKGVAVVVDARHMCVEMRGVKSRGAITRTIRFSGDFERNQALQNEFLSAIKVTGKQ

SEQ ID NO: 9631 - protein, 354 aa, Lactobacillus kisonensis; identical to SEQ ID NO: 9630
  misc_feature (1)..(354): tr|H1LG97|H1LG97_9LACO GTP cyclohydrolase 1 OS=Lactobac illus kisonensis F0435 OX=797516 GN=folE PE=3 SV=1

SEQ ID NO: 9632 - protein, 191 aa, Lactobacillus manihotivorans
  misc_feature (1)..(191): tr|A0A0R1QKH7|A0A0R1QKH7_9LACO GTP cyclohydrolase 1 OS= Lactobacillus manihotivorans DSM 13343 = JCM 12514 OX=1 423769 GN=folE PE=3 SV=1
MDQQRIENAVRELLDAVGEDTTRPGLIETPERVARMYQEVFGSLDKPADFKDYKVFETTEDPGLVMVQQIPFYSMCEHHLLPFFGHVTIGYMPSHKRIIGLSKLGRLVDFVARRPSVQEVLTTSIADQLQRVLDPKGIAVSVTARHMCMEMRGINRGDLFTYTSRYTGVFKTDLALRQEFQQEAQHRNGNR

SEQ ID NO: 9633 - protein, 189 aa, Lactobacillus mixtipabuli
  misc_feature (1)..(189): tr|A0A1Z5IDY1|A0A1Z5IDY1_9LACO GTP cyclohydrolase 1 OS= Lactobacillus mixtipabuli OX=1435342 GN=folE PE=3 SV=1
MIDDANQKKIEQAVKMILEAVGEDPNRDGLIETPARVARMYNEVFSSVKAPAFDNYKLFPVDETTEMVLIKDISFYSMCEHHLLPFFGTVDVAYIPNHQRVMGLSKIPRLIDYCAKRPNVQERMTVNIAKELTRILDPKGIAVSVTARHMCMEMRGVEKTGSQTETSYYTGAFKEDRELKQEFLQRING

SEQ ID NO: 9634 - protein, 190 aa, Lactobacillus mucosae
  misc_feature (1)..(190): tr|A0A0D4CIU9|A0A0D4CIU9_LACMC GTP cyclohydrolase 1 OS= Lactobacillus mucosae LM1 OX=1130798 GN=folE PE=3 SV=1
MDQEKIKHAVSELLEAFGEDPQREGLKETPQRVAKMYAEIFASLNHQPEDFSNYKTFHVDDQPEMVLIQQIPFYSMCEHHLLPFFGNVSVAYVPRDGKVIGLSKIPRLVDFVAKKPGMQERLTTELANELQRILNPKGIAIKVAARHMCMEMRGINKAGQFTYTSKFTGEFKDDLALRKEFLMQTKDLVK

SEQ ID NO: 9635 - protein, 190 aa, Lactobacillus mucosae; identical to SEQ ID NO: 9634
  misc_feature (1)..(190): tr|A0A0R1P8J1|A0A0R1P8J1_LACMC GTP cyclohydrolase 1 OS= Lactobacillus mucosae DSM 13345 OX=1423771 GN=folE PE=3 SV=1

SEQ ID NO: 9636 - protein, 189 aa, Lactobacillus odoratitofui
  misc_feature (1)..(189): tr|A0A0R1M524|A0A0R1M524_9LACO GTP cyclohydrolase 1 OS= Lactobacillus odoratitofui DSM 19909 = JCM 15043 OX=142 3776 GN=folE PE=3 SV=1
MINEANQQKIEQAVKMILEAVGEDPKREGLIETPARVARMYGEVFSSVNAPAFDNYKLFPVDETTEMVLIKDIPFYSMCEHHLLPFFGQVHVAYIPDQKRVMGLSKIPRLVNYCAKRPNVQERLTVNIAKELTRILDPKGIAVSISARHMCMEMRGVEKTGSLTETSYYTGSFKTDQDLKREFLQRING

SEQ ID NO: 9637 - protein, 187 aa, Lactobacillus oligofermentans
  misc_feature (1)..(187): tr|A0A0R1RGD2|A0A0R1RGD2_9LACO GTP cyclohydrolase 1 OS= Lactobacillus oligofermentans DSM 15707 = LMG 22743 OX= 1423778 GN=folE PE=3 SV=1
MDEKRIENAVSEIISAIGEDPTREGLVETPARVAKMYTEIFSSLSDEPSDFDNFKVFHEDESPEMVLVQQIPFYSMCEHHFLPFFGVANVAYIPNNGEVIGISKIPRLVDYVAKKPGMQERITNDILSEMERILHPKGVAVSLSARHMCMEMRGINKSELSTYTSKFSGEFANNLDLKTEFLRQTGH

SEQ ID NO: 9638 - protein, 347 aa, Lactobacillus otakiensis
  misc_feature (1)..(347): tr|S4NEY2|S4NEY2_9LACO GTP cyclohydrolase 1 OS=Lactobac illus otakiensis DSM 19908 = JCM 15040 OX=1423780 GN=fo lE PE=3 SV=1
MEDVYLSLGSNIGNRERYLHQAISMLGNDSGILVDKVAHFYETSPVGGVEQRAFLNTAVKIATRYQPEELLQKIHDIESELQRTRTIHWGPRTLDIDIIFFGNQKIQNQRLTIPHPEAFNRLFVLMPIQEIMDESLPQFSKINQTISQFPDKDQEIHKINSADSFDDSIKTSIRKLLTTIGEDPDRSGLKETPDRVARMYGEIFSSIGIEDFQDYKLFDEPIKDSKMIMIKSIPFYSMCEHHMMPFWGTVNVGYLPKDGKIIGLSKIPRLVDFVSHKLSLQEKITDDVLSQMDKILSPQGVAVVVDARHMCVEMRGVKKTGSVTRTTKFSGVFEQDPSLRQEFLQSI

SEQ ID NO: 9639 - protein, 353 aa, Lactobacillus parabuchneri
  misc_feature (1)..(353): tr|A0A0R1Z9Q8|A0A0R1Z9Q8_9LACO GTP cyclohydrolase 1 OS= Lactobacillus parabuchneri DSM 5707 = NBRC 107865 OX=14 23784 GN=folE PE=3 SV=1
MDEVYLSLGSNIGNRQAFLEQAIHGLGNDPQILIEKQADFYETSPVGGVKQRAFINTAVKIGTTYSPEALLEVIHQIESGLHRTRKIHWGPRTVDIDIIFFGNQKIQTANLSVPHPEAFKRLFVLVPILELVDEHFSQYEQIKQAVESLKNQDQTIQKVNPANDFATEVKTNVTHILSAIGDDPNRKGLIETPDRVARMYADIFDSIGIEDFQDYKLFDSPESNDSKTIMVKEIPFYSMCEHHMMPFWGKVSVAYLPDNGKIIGLSKIPRLVDFVSHKLSLQEKITDDVLDQMEKILHPKGVGVVVDARHMCIEMRGVKKTGTVTRTTKFSGVFQQNDELRSEFLNSIQVGQI

SEQ ID NO: 9640 - protein, 353 aa, Lactobacillus parabuchneri; identical to SEQ ID NO: 9639
  misc_feature (1)..(353): tr|A0A1X1FBP2|A0A1X1FBP2_9LACO GTP cyclohydrolase 1 OS= Lactobacillus parabuchneri OX=152331 GN=folE PE=3 SV=1

SEQ ID NO: 9641 - protein, 189 aa, Lactobacillus paracollinoides
  misc_feature (1)..(189): tr|A0A0R1TEZ7|A0A0R1TEZ7_9LACO GTP cyclohydrolase 1 OS= Lactobacillus paracollinoides DSM 15502 = JCM 11969 OX= 1423785 GN=folE PE=3 SV=1
MIDKTNQEKIEKAVRMILEAVGEDPDRPGLVETPARVARSYGEIFSSLNAPAFDNYKLFPVEETTEMVLIKDIPFYSMCEHHLLPFFGTVHVAYVPDHNRVMGLSKIPRLIDYCAKRPNVQERLTVNIAKELTRILDPKGVAVSISARHMCMEMRGVEKTGSQTESSYYTGTFKTDTALKQEFLQRING

SEQ ID NO: 9642 - protein, 189 aa, Lactobacillus paracollinoides
  misc_feature (1)..(189): tr|A0A1B2IWG8|A0A1B2IWG8_9LACO GTP cyclohydrolase 1 OS= Lactobacillus paracollinoides OX=240427 GN=folE PE=3 SV =1
MIDKTNQEKIEKAVRMILEAVGEDPDRPGLVETPARVARSYGEIFSSLNAPAFDNYKLFPVEETTEMVLIKDIPFYSMCEHHLLPFFGTVHVAYVPDHKRVMGLSKIPRLIDYCAKRPNVQERLTVNIAKELTRILDPKGVAVSISARHMCMEMRGVEKTGSQTESSYYTGTFKTDTALKQEFLQRING

SEQ ID NO: 9643 - protein, 357 aa, Lactobacillus parafarraginis
  misc_feature (1)..(357): tr|G9ZS90|G9ZS90_9LACO GTP cyclohydrolase 1 OS=Lactobac illus parafarraginis F0439 OX=797515 GN=folE PE=3 SV=1
MENNVILSLGSNIGNREFYLNQAISQIGQDTHILVNQQSDFYETSPVGNVKQRQFINLALNIATTYTPEKLLTKVHQIEASLNRTRDIHWGPRTLDIDIVFWNDQQIKTTDLTVPHPEAFNRLFVLAPTLEVIDANFPLYKQIKAAVDGWSAKDQQVNLIRREDQSETVIQSSVRHLLSAIGDDPDRPGLVETPDRVFRMYHEIFSSQGIENFQDYKLFKTNETNDAKMIMMKNIPFYSMCEHHMMPFWGKVHIAYIPDHGTIIGLSKLPRLVDFVSHKLGLQEKVTDDLVIQLNRILAPKGVAVIVDARHMCVEMRGVKKTDSSTRTIRFTGIFDKQPELRTEFINSIGDVNGKTI

SEQ ID NO: 9644 - protein, 357 aa, Lactobacillus parafarraginis
  misc_feature (1)..(357): tr|A0A0R1YHR1|A0A0R1YHR1_9LACO GTP cyclohydrolase 1 OS= Lactobacillus parafarraginis DSM 18390 = JCM 14109 OX=1 423786 GN=folE PE=3 SV=1
MENNVILSLGSNIGNREFYLNQAISQIGQDTHILVNQQSDFYETSPVGNVKQRQFINLALNIATTYTPEKLLTRVHQIEASLNRTRDIHWGPRTLDIDIVFWNDQQIKTTDLTVPHPEAFNRLFVLAPTLEVIDANFPLYKQIKAAVDGWSAKDQQVNLIRREDQSETVIQSSVRHLLSAIGDDPDRPGLVETPDRVFRMYHEIFSSQGIENFQDYKLFKTDETNDAKMIMMKNIPFYSMCEHHMMPFWGKVHIAYIPDHGTIIGLSKLPRLVDFVSHKLGLQEKVTDDLVIQLNRILAPKGVAVIVDARHMCVEMRGVKKTDSSTRTIRFTGVFDKQPELRTEFLNSIGDVNGKTI

SEQ ID NO: 9645 - protein, 353 aa, Lactobacillus parakefiri
  misc_feature (1)..(353): tr|A0A269YPN4|A0A269YPN4_9LACO GTP cyclohydrolase 1 OS= Lactobacillus parakefiri OX=152332 GN=folE PE=3 SV=1
MEDVYLSLGSNIGNREAFLQQAIEALGSDPRIMIEKQASLYETSPVGGVKQRSFVNTAVKIGTTYEPLALLKVIHEIESGLHRTRSIHWGPRTVDIDIIFFGSEHIQEPGLSVPHPEAFNRLFVLIPIQELIDEQFPDAHKIEMAISILEKEDQSIKKISPANDFYTEITSNVTKVLAAIGDDPSRKGLIETPDRVARMYANIFDSIGLEDFQDYKLFDSPESDDSKTVMVKGIPFYSMCEHHMMPFWGKVSVAYVPDNGKIIGLSKIPRLVDFVSHKLSLQEKITDDVLVQMERILHPKGVAVIVDARHMCIEMRGVKKTGTVTRTTKFTGIFQQNDELRSEFLNSIQVGQI

SEQ ID NO: 9646 - protein, 353 aa, Lactobacillus parakefiri
  misc_feature (1)..(353): tr|A0A4R5NYL8|A0A4R5NYL8_9LACO GTP cyclohydrolase 1 OS= Lactobacillus parakefiri OX=152332 GN=folE PE=3 SV=1
MEDVYLSLGSNIGNREAFLQQAIEALGSDPRIMIEKQASLYETSPVGGVKQRAFVNTAVKIGTTYEPLALLKVIHEIESGLHRTRSIHWGPRTVDIDIIFFGSEHIQEPGLSVPHPEAFNRLFVLIPIQELIDEQFPDAHKIEMAISILEKEDQSIKKISPANDFYTEITSNVTKVLAAIGDDPSRKGLIETPDRVARMYANIFDSIGLEDFQDYKLFDSPESDDSKTVMVKGIPFYSMCEHHMMPFWGKVSVAYVPDNGKIIGLSKIPRLVDFVSHKLSLQEKITDDVLVQMERILHPKGVAVIVDARHMCIEMRGVKKTGTVTRTTKFTGIFQQNDELRSEFLNSIQVGQI

SEQ ID NO: 9647 - protein, 189 aa, Lactobacillus paraplantarum
  misc_feature (1)..(189): tr|A0A4Q9XYX4|A0A4Q9XYX4_9LACO GTP cyclohydrolase 1 OS= Lactobacillus paraplantarum OX=60520 GN=folE PE=3 SV=1
MIDEKNQAKIEHAVREILSAVGEDPDRPGLFETPARVARMYAEVFATKTAAPFDNYKLFKVENPTEMVLLKDIPFYSMCEHHLLPFFGTVQVAYVPQHEQVIGLSKIPRLIDYCSQQPNVQERLTVSIATELQRILDPAGIAVSITARHMCMEMRGVSKPGVHTESSYYSGQFKTDLDLKREFLQRIAK

SEQ ID NO: 9648 - protein, 189 aa, Lactobacillus paraplantarum
  misc_feature (1)..(189): tr|A0A098R9V6|A0A098R9V6_9LACO GTP cyclohydrolase 1 OS= Lactobacillus paraplantarum OX=60520 GN=folE PE=3 SV=1
MIDEKNQAKIEHAVREILSAVGEDPDRPGLVETPARVARMYAEVFATKTAAPFDNYKLFKVENPTEMVLLKDIPFYSMCEHHLLPFFGTVQVAYVPQHEQVIGLSKIPRLIDYCSQQPNVQERLTVSIATELQRILDPAGIAVSITARHMCMEMRGVSKPGVHTESSYYSGQFKTDLDLKREFLQRIAK

SEQ ID NO: 9649 - protein, 189 aa, Lactobacillus pentosiphilus
  misc_feature (1)..(189): tr|A0A1Z5IYL2|A0A1Z5IYL2_9LACO GTP cyclohydrolase 1 OS= Lactobacillus pentosiphilus OX=1714682 GN=folE PE=3 SV= 1
MMDDANQKKIEQAVKMILEAVGEDPNRDGLVETPARVARMYGEVFSSVNAPAFDNYKLFPVDETTEMVLIKDISFYSMCEHHLLPFFGTVDVAYIPNHKRVMGLSKIPRLIDYCAKRPNVQERMTVNIAKELTKILDPKGIAVSVSARHMCMEMRGVEKTGSQTETSYYTGAFKTDHELKQEFLQRING

SEQ ID NO: 9650 - protein, 189 aa, Lactobacillus pentosus
  misc_feature (1)..(189): tr|A0A241RR12|A0A241RR12_LACPE GTP cyclohydrolase 1 OS= Lactobacillus pentosus OX=1589 GN=folE PE=3 SV=1
MIDEKNKAKIEHAVREILSAVGEDPDRPGLVETPARVARMYAEVFATKTAAPFDNYKLFKVENPTEMVLLKDIPFYSMCEHHLLPFFGTVQVAYVPQHDQVIGLSKIPRLVDYCAQQPNVQERLTVSIATELQRILDPAGIAVSITARHMCMEMRGVSKPGVQTESSYYSGQFKTDIELKREFLQRIAK

SEQ ID NO: 9651 - protein, 189 aa, Lactobacillus pentosus; identical to SEQ ID NO: 9650
  misc_feature (1)..(189): tr|G0M580|G0M580_LACPE GTP cyclohydrolase 1 OS=Lactobac illus pentosus IG1 OX=1042160 GN=folE PE=3 SV=1

SEQ ID NO: 9652 - protein, 189 aa, Lactobacillus plantarum
  misc_feature (1)..(189): sp|Q88ST4|GCH1_LACPL GTP cyclohydrolase 1 OS=Lactobacil lus plantarum (strain ATCC BAA-793 / NCIMB 8826 / WCFS1 ) OX=220668 GN=folE PE=3 SV=1
MIDEKNQAKIEHAVREILSAVGEDPDRPGLVETPARVARMYAEVFATKTAAPFDNYKLFKVEHPTEMVLLKDIPFYSMCEHHLLPFFGTVQVAYVPQHEQVIGLSKIPRLIDYCSQQPNVQERLTVSIATELQRILDPAGIAVSITARHMCMEMRGVSKPGVHTESSYYSGQFKTDLDLKREFLQRIAK

SEQ ID NO: 9653 - protein, 189 aa, Lactobacillus plantarum
  misc_feature (1)..(189): tr|A0A2I0YX27|A0A2I0YX27_LACPN GTP cyclohydrolase 1 OS= Lactobacillus plantarum OX=1590 GN=folE PE=3 SV=1
MIDEKNQAKIEHAVREILSAVGEDPDRPGLVETPARVARMYAEVFATKTAAPFDNYKLFKVEHPTEMVLLKDIPFYSMCEHHLLPFFGTAQVAYVPQHEQVIGLSKIPRLIDYCSQQPNVQERLTVSIATELQRILDPAGIAVSITARHMCMEMRGVSKPGVHTESSYYSGQFKTDLDLKREFLQRIAK

SEQ ID NO: 9654 - protein, 351 aa, Lactobacillus rapi
  misc_feature (1)..(351): tr|A0A512PJA4|A0A512PJA4_9LACO GTP cyclohydrolase 1 OS= Lactobacillus rapi OX=481723 GN=folKE PE=3 SV=1
MEEVYLSLGSNIGNRQRYINSAIQMLGNNSQIIIDDVASFYETSPVGNVSQRSFINTAVKITTNLDPESLLNVIHAIEKSLRRTRKVHWGPRTLDIDIIFYGNQVINSDDLQIPHPETFNRKFVLVPVKQLIQRTFPYYEQINTAISKLDSQEQRLTKVPDTDNSQDTIEKAITDILAAIGDDPQRDGLVETPNRVSRMYSEIFSSVGLKDFSDYKLFHSEESGKSKMVIMNHIPFYSMCEHHLMPFFGTVNVAYIPNNGTIIGLSKIPRLVDFVSHKLTLQEQVTDDIVDQLNQILSPKGVAVVIDARHMCVEMRGVKKSGSTTRTVRFDGDFDGNVPLQNEFLSSIEAN

SEQ ID NO: 9655 - protein, 192 aa, Lactobacillus reuteri
  misc_feature (1)..(192): tr|B3XN19|B3XN19_LACR1 GTP cyclohydrolase 1 OS=Lactobac illus reuteri (strain DSM 17509 / CIP 109821 / 100-23) OX=349123 GN=folE PE=3 SV=1
MDQQKIAKAVKDLLIAIGEDPEREGLAETPQRVAKMYQEVFSSLNHQPEEMANYKVFHVDDVPEMVLVQHIPFYSMCEHHLLPFFGYANVAYVPKDKKVIGLSKIPRLLDFVTKKPGMQERVTTDLVAELQRILDPAGIAVTIAARHLCMEMRGVNKAGQFTYTDKFTGQFKTDRDLKQEFLNQTRNYRADL

SEQ ID NO: 9656 - protein, 192 aa, Lactobacillus reuteri
  misc_feature (1)..(192): tr|A0A0U5JY21|A0A0U5JY21_LACRE GTP cyclohydrolase 1 OS= Lactobacillus reuteri OX=1598 GN=folE PE=3 SV=1
MDQQKIAKAVKDLLIAIGEDPEREGLAETPQRVAKMYQEVFSSLNHQPEEMANYKVFHVDDVPEMVLVQHIPFYSMCEHHLLPFFGYANVAYVPKDKRVIGLSKIPRLLDFVTKKPGMQERVTTDLVAELQRILDPAGIAVTIAARHLCMEMRGVNKAGQFTYTDKFTGQFKTDRDLKQEFLNQTRNYRADL

SEQ ID NO: 9657 - protein, 193 aa, Lactobacillus rossiae
  misc_feature (1)..(193): tr|A0A0R1RTJ5|A0A0R1RTJ5_9LACO GTP cyclohydrolase 1 OS= Lactobacillus rossiae DSM 15814 OX=1114972 GN=folE PE=3 SV=1
MTDEQQATIEGAVRQILTAVGEDPDRAGLVETPARVARAYAEMFSSLEQPTFKDYKLFHEEDNADMVVVGQIPFYSMCEHHLLPFFGRVSVAYVPTNGTIIGLSKIPRLVDYVSRRPTVQENITNQVAAELEKILKPAGVAVSVAARHMCMEMRGVNKTGSVTQTATYWGEFKTNNALRQEFLMRAEHGNINV

SEQ ID NO: 9658 - protein, 189 aa, Lactobacillus sakei
  misc_feature (1)..(189): sp|Q38WN0|GCH1_LACSS GTP cyclohydrolase 1 OS=Lactobacil lus sakei subsp. sakei (strain 23K) OX=314315 GN=folE P E=3 SV=1
MIEQANQQIEKDVRDILKQVGDDPERAGVLETPQRVAKMYGEVLAYQGETIFKDYKLFETEETDDDQMVMMQDIPFYSMCEHHMLPFFGQVSVAYLPANGQIIGLSKIPRLVDFVSKRLSVQENLTRDIGQILNQILKPYGVAVQVTARHMCVEMRGIKKANSQTHTTFYSGNFKTDRQLRSEFLQLLK

SEQ ID NO: 9659 - protein, 189 aa, Lactobacillus sakei
  misc_feature (1)..(189): tr|A0A4R5MS79|A0A4R5MS79_LACSK GTP cyclohydrolase 1 OS= Lactobacillus sakei subsp. sakei OX=214326 GN=folE PE=3 SV=1
MIEQANQQIEKDVRDILKQVGDDPERAGVLETPQRVAKMYGEVLAYQGETIFKDYKLFETEETDDDQMVMMQDIPFYSMCEHHMLPFFGQVSVAYLPANGQIIGLSKIPRLVDFVSKRLSVQENLTRDIGQILNQILKPHGVAVQVTARHMCVEMRGIKKANSQTHTTFYSGNFKTDRQLRSEFLQLLK

SEQ ID NO: 9660 - protein, 351 aa, Lactobacillus satsumensis
  misc_feature (1)..(351): tr|A0A0A7RGD9|A0A0A7RGD9_9LACO GTP cyclohydrolase 1 OS= Lactobacillus satsumensis OX=259059 GN=folE PE=3 SV=1
MESIYLSLGSNLGARQENIEKALTYLGNDHQIIIDQVSDYYETSPVGGVEQGMFLNVAAKIYTTYQPAKLLQIIHQIEAALQRVRKVHWGPRTLDIDIIFWGTERLNSQDLIVPHKETFKRLFVLRPLLDIYPQTEPYFKQITESIAALEQAEPQQKVTKVPQKKDSMAVIEQAVTELLQAIGDDPQRAGIKETPQRVAKMYQEIFSSQKQSEFQDYKIFATPKKDNSQMVLVKNIPFYSMCEHHMLPFFGQAHVAYIPRNGKIIGLSKIPRLVDFVARKLSLQEKITSDVAETLTDILDPLGVAVVVDARHMCIEMRGVKKSNSTTRTTYFTGNFDTDNQLRAEFLRVLN

SEQ ID NO: 9661 - protein, 344 aa, Lactobacillus satsumensis
  misc_feature (1)..(344): tr|A0A0R1V0N3|A0A0R1V0N3_9LACO GTP cyclohydrolase 1 OS= Lactobacillus satsumensis DSM 16230 = JCM 12392 OX=1423 801 GN=folE PE=3 SV=1
MGSNLGARQENIEKALTYLGNDHQIIIDQVSDYYETSPVGGVEQGMFLNVAAKIYTTYQPAKLLQIIHQIEAALQRVRKVHWGPRTLDIDIIFWGTERLNSQDLIVPHKETFKRLFVLRPLLDIYPQTEPYFKQITESIAALEQAEPQQKVTKVPQKKDSMAVIEQAVTELLQAIGDDPQRAGIKETPQRVAKMYQEIFSSQKQSEFQDYKIFATPKKDNSQMVLVKNIPFYSMCEHHMLPFFGQAHVAYIPRNGKIIGLSKIPRLVDFVARKLSLQEKITSDVAETLTDILDPLGVAVVVDARHMCIEMRGVKKSNSTTRTTYFTGNFDTDNQLRAEFLRVLN

SEQ ID NO: 9662 - protein, 189 aa, Lactobacillus silagei
  misc_feature (1)..(189): tr|A0A1Z5IIR5|A0A1Z5IIR5_9LACO GTP cyclohydrolase 1 OS= Lactobacillus silagei JCM 19001 OX=1302250 GN=folE PE=3 SV=1
MIDDANQKKIEQAVKMILEAVGEDPNREGLVETPARVARMYNEVFSSVNAPAFDNYKLFPVDETTEMVLIKDISFYSMCEHHLLPFFGTVDVAYIPNHQRVMGLSKIPRLINYCAKRPNVQERMTVNIAKELTRILDPKGIAVSVSARHMCMEMRGVEKTGSQTETSYYTGVFKSDHDLKQEFLQRING

SEQ ID NO: 9663 - protein, 189 aa, Lactobacillus silagincola
  misc_feature (1)..(189): tr|A0A1Z5J2W0|A0A1Z5J2W0_9LACO GTP cyclohydrolase 1 OS= Lactobacillus silagincola OX=1714681 GN=folE PE=3 SV=1
MINDANQKKIEQAVKMILEAVGEDPDRDGLVETPGRVARMYSEVFSSVNAPAFDNYKLFPVDETTEMVLIKDISFYSMCEHHLLPFFGTVDVAYIPNHQRVMGLSKIPRLIDYCAKRPNVQERMTVNIAKELTRILDPQGIAVSVSARHMCMEMRGVEKTGSQTETSYYTGAFKTDRELKQEFLQRING

SEQ ID NO: 9664 - protein, 193 aa, Lactobacillus siliginis
  misc_feature (1)..(193): tr|A0A0R2KZB8|A0A0R2KZB8_9LACO GTP cyclohydrolase 1 OS= Lactobacillus siliginis OX=348151 GN=folE PE=3 SV=1
MTDEQQQTIEKAVRQILTAVGENPDRPGLVETPGRVARAYQEIFSSLGETEFTDYKLFHEETNADMVVVAQIPFYSMCEHHLLPFFGHVSVGYIPTDGTIIGLSKIPRLVDFVSHKPTVQENITTAISSELEKILKPAGIAVNVTARHMCMEMRGVNKTGSVTHTATYTGAFKNDAALRQEFLMRTANGNVNL

SEQ ID NO: 9665 - protein, 188 aa, Lactobacillus similis
  misc_feature (1)..(188): tr|A0A0R2FDF7|A0A0R2FDF7_9LACO GTP cyclohydrolase 1 OS= Lactobacillus similis DSM 23365 = JCM 2765 OX=1423804 G N=folE PE=3 SV=1
MNEANQAKIEQAVKLILEAVGEDPERQGLLETPARVARMYGEVFSSVTAPAFDNYKLFPVDETTEMVLIKDIPFYSMCEHHLLPFFGTVHVAYIPDHQRVMGLSKIPRLVDYCAKRPNVQERLTVNIAKELNRILDPKGVAISISARHMCMEMRGVEKTGSQTETSYYTGTFKTDHELKAEFLQRING

SEQ ID NO: 9666 - protein, 190 aa, Lactobacillus sp.; identical to SEQ ID NO: 9634
  misc_feature (1)..(190): tr|A0A3C1IAN5|A0A3C1IAN5_9LACO GTP cyclohydrolase 1 OS= Lactobacillus sp. OX=1591 GN=folE PE=3 SV=1

SEQ ID NO: 9667 - protein, 193 aa, Lactobacillus sp.
  misc_feature (1)..(193): tr|A0A349MV06|A0A349MV06_9LACO GTP cyclohydrolase 1 OS= Lactobacillus sp. OX=1591 GN=folE PE=3 SV=1
MTDEQQHTIEGAVRQILTAVGEDPNRAGLVETPARVARAYAEMFSSLEQPTFKDYKLFHEEDNADMVVVGQIPFYSMCEHHLLPFFGRVSVAYVPTNGTIIGLSKIPRLVDFVSHRPTVQENITNQVAAEMEKILQPAGVAVSVAARHMCMEMRGVNKTGSVTQTATYLGDFKTNAALRQEFLMRAEHGNINV

SEQ ID NO: 9668 - protein, 186 aa, Lactobacillus suebicus
  misc_feature (1)..(186): tr|A0A0R1W4P6|A0A0R1W4P6_9LACO GTP cyclohydrolase 1 OS= Lactobacillus suebicus DSM 5007 = KCTC 3549 OX=1423807 GN=folE PE=3 SV=1
MDNKRIEDAVSDILTGIGDDTNREGVVETPARVAKMYEEIFSSMGQKHFEDYKLFHVDDDPEMVLVQQIPFYSMCEHHLLPFFGVANVAYVPKDGVVIGLSKIPRLVDFTAKKPGMQERITTDIMKEMERMLHPQGVAVTLSARHMCMEMRGINKSNLYTYTSKFSGIFKTDKDLKQEFLQQTEKK

SEQ ID NO: 9669 - protein, 348 aa, Lactobacillus sunkii
  misc_feature (1)..(348): tr|A0A1E7XAQ5|A0A1E7XAQ5_9LACO GTP cyclohydrolase 1 OS= Lactobacillus sunkii OX=481719 GN=folE PE=3 SV=1
MNDVYLSLGSNIGNRELFLHEAIEALGNDANILIDKTAGFYETSPVGNVEQRPFVNTAVKIATTYTPQQLIRFIHEIEQGLHRTRTIHWGPRTIDIDIVFFGDQQINTKELTVPHPEAFNRLFVLVPILEIIDKGFPSYQKIESTISALKDKDQTIQKLTSNENYKGTLQASVRQLLTTVGENPDRPGLVETPDRVARMYGEIFSSIGIEDFDDYKLFDAPVSQSSKMVMVKDIPFYSMCEHHMMPFWGKVSVGYIPDHGKIIGLSKIPRLVDFVSHKLSLQEKVTNDIITQMNKILQPKGVAVLIDARHMCVEMRGVKKTGSVTRTTSFSGIFQTDEQLQSEFMSSI

SEQ ID NO: 9670 - protein, 348 aa, Lactobacillus sunkii; identical to SEQ ID NO: 9669
  misc_feature (1)..(348): tr|A0A0R1L2L7|A0A0R1L2L7_9LACO GTP cyclohydrolase 1 OS= Lactobacillus sunkii DSM 19904 OX=1423808 GN=folE PE=3 SV=1

SEQ ID NO: 9671 - protein, 351 aa, Lactobacillus uvarum
  misc_feature (1)..(351): tr|A0A0R1PXK7|A0A0R1PXK7_9LACO GTP cyclohydrolase 1 OS= Lactobacillus uvarum DSM 19971 OX=1423812 GN=folE PE=3 SV=1
MESIYLSLGSNIGNKQNNLEKAIEYLGNDSHLIIDKVSDYYETSPVGGIEQDVFLNIAVKIYTTYTPEELLTLIHKIEADLKRSRKVHWGPRTLDIDIIFWGNRSLNDEKLVIPHKETFNRLFVLIPLLDVYDKNDFFYEHIKKGISILERTEQTQKVVKVPKKEGNMQTIERVVTKLLLAIGDDPKREGIRETPRRVAEMYQEIFSSQNQNDFQEFKVFKTPKKDNSQMVLVKDIPFYSMCEHHMLPFFGKAHVAYIPRNGKIIGLSKIPRLVDFVSHRLSLQEKVTSDIADTLMDILDPVGVAVVVEARHMCVEMRGVKKNNSLTRTTYFTGDFNSNVQLRAEFLRVLN

SEQ ID NO: 9672 - protein, 186 aa, Lactobacillus vaccinostercus
  misc_feature (1)..(186): tr|A0A0R2ABR8|A0A0R2ABR8_9LACO GTP cyclohydrolase 1 OS= Lactobacillus vaccinostercus DSM 20634 OX=1423813 GN=fo lE PE=3 SV=1
MDKKRIENAVSEILAGVGDDPTREGVVETPARVAKMYEEIFSSVGKPHFEDYKLFHIDDDPEMVLVQQIPFYSMCEHHLLPFFGVANVAYVPQDGVVIGLSKVPRLVDFAARKPGMQERITVDILNEMERMLHPAGVAVSLSARHMCMEMRGINKSNLYTYTSKFSGAFKEDRDLKKEFLRQTERK

SEQ ID NO: 9673 - protein, 190 aa, Lactobacillus versmoldensis
  misc_feature (1)..(190): tr|A0A0R1SHG1|A0A0R1SHG1_9LACO GTP cyclohydrolase 1 OS= Lactobacillus versmoldensis DSM 14857 = KCTC 3814 OX=14 23815 GN=folE PE=3 SV=1
MSPENQQIIEQSVKNILKAVGDDPDRSGLKETPARVAKMYAEVFSSLEEPNFDDIKIFQEDTAVDGENVIVRNIPFYSMCEHHLLPFFGEITVGYVPKGGRIIGLSKIPRLVNYVAAKPNVQENITSELGRKLEKLLAPQGVAVIVTARHMCIEMRGVKKTDSKTTTSYYSGVFKDPTHKMAFLQEIKTC

SEQ ID NO: 9674 - protein, 189 aa, Lactobacillus wasatchensis
  misc_feature (1)..(189): tr|A0A0D0Y368|A0A0D0Y368_9LACO GTP cyclohydrolase 1 OS= Lactobacillus wasatchensis OX=1335616 GN=folE PE=3 SV=1
MDEKKIENAVKEILMAIGEDPAREGLMETPARVAKMYGEVFASLDESPEFDDYKVFHVEEDPGMVLVQQIPFYSMCEHHLLPFFGTANVAYVPRDGQIMGLSKIPRLVDFVAKRPGVQERITTQIAAQMKRILQPKGIAVSLSARHMCMEMRGISKSGLFTYTSKFDGVFKSDVEMRNEFLRQTGNHSE

SEQ ID NO: 9675 - protein, 189 aa, Lactobacillus xiangfangensis
  misc_feature (1)..(189): tr|A0A0R2MLJ1|A0A0R2MLJ1_9LACO GTP cyclohydrolase 1 OS= Lactobacillus xiangfangensis OX=942150 GN=folE PE=3 SV= 1
MIDEQNKAKIERAVRDILTAVGEDPDRAGLVETPERVARMYAEVFSTKTAAPFDNYKLFKVEDPTEMVLLKDIPFYSMCEHHLLPFFGTVQVAYVPQHDQVIGLSKIPRLIDYCAKQPNVQERLTVNIAKELQRILDPAGIAVSITARHMCMEMRGVSKPGVHTESSYYSGQFKTNLDLKREFLQRIAK

SEQ ID NO: 9676 - protein, 190 aa, Lactobacillus zeae; identical to SEQ ID NO: 9593
  misc_feature (1)..(190): tr|A0A0R1F0N1|A0A0R1F0N1_LACZE GTP cyclohydrolase 1 OS= Lactobacillus zeae DSM 20178 = KCTC 3804 OX=1423816 GN= folE PE=3 SV=1

SEQ ID NO: 9677 - protein, 215 aa, Lactobacillus zeae
  misc_feature (1)..(215): tr|A0A0R1EV24|A0A0R1EV24_LACZE GTP cyclohydrolase 1 OS= Lactobacillus zeae DSM 20178 = KCTC 3804 OX=1423816 GN= folE PE=3 SV=1
MTTNNDHYNEAELLASYFPETANNSELLQQKLTDVQQIEQALQTLMALCGQDDNNPDLDKTPFRVVKAFLEYTSGYREDPTAHLEKVFDIQQNDPIIVKDIEFYSMCEHHFAPFFGVAHVAYLPDQKVTGLSKIARVVEGYARRFQVQERLTNQIADAIDTVLQPKGVMVAIEAKHLCVSSRGAKKEQAQTFTLASRGAYIKDSQLRSEFMTAIK

SEQ ID NO: 9678 - protein, 181 aa, Lactococcus chungangensis
  misc_feature (1)..(181): tr|A0A1K2HHC6|A0A1K2HHC6_9LACT GTP cyclohydrolase 1 OS= Lactococcus chungangensis CAU 28 = DSM 22330 OX=1122154 GN=folE PE=3 SV=1
MLETGTKNLLQAIGDNPNRDGLLETPKRVAKAYAEIFSATGETQFDNYKLFPTDQDSDMVIVADIPFYAMCEHHLLPFFGMVTVGYVPDGEIIGLSKIPRLVDWAARRPSVQENLTALICSEMQRIVHPKGVAVHIQSRHMCMEMRGINRPGTFTTTSLYKGILKTDAFLRQEFMMKVSGK

SEQ ID NO: 9679 - protein, 191 aa, Lactococcus fujiensis
  misc_feature (1)..(191): tr|A0A2A5RLR4|A0A2A5RLR4_9LACT GTP cyclohydrolase 1 OS= Lactococcus fujiensis JCM 16395 OX=1291764 GN=folE PE=3 SV=1
MQEEKYNHLKELFSDEEKINQAITGIEALIDLIGEDVNREGLQDTPYRFLKAFAEYSQGYKVDPKTYLETQFEAESHDVVVVRDIPFESACEHHLARFHGVAHVAYIPNEKITGLSKFPRMINGYARRLQVQERLTAQAADAIYEVLNPEACAVVIEATHSCMTARGAMAHGSSTKTFAVRGEKNLLEYLK

SEQ ID NO: 9680 - protein, 349 aa, Lactococcus garvieae
  misc_feature (1)..(349): tr|A0A173M3H1|A0A173M3H1_9LACT GTP cyclohydrolase 1 OS= Lactococcus garvieae OX=1363 GN=folE PE=3 SV=1
MHTVYLSLGSNIGDKQAYLQDAVSLLGQNPAILIDKKSKFYQTSPVGGVEQDDFVNMALKISTTLEPTQLLEFIHEIEAQLNRVRKIHWGPRTIDIDILFYGNEQIFENDLIVPHKEVFNRLFVLVPLLEVLEQDFPYEQQVKQAIEKLKDTEQEIVEIPTEKPARKRIEHAVREILSAVGENPEREGLLETPERVAKMYEEILSSQKLTQFEEYKLFKIEKTAQDQTILIKDIPFYSMCEHHMLPFFGKANVAYIPKDGNIIGLSKIPRLVNYVSHKLSVQENITRDIAEILNDILEPKGVAVVVEARHMCVEMRGVKKGNSQTKTSFFMGEFEESRETRLEFLESLN

SEQ ID NO: 9681 - protein, 349 aa, Lactococcus garvieae
  misc_feature (1)..(349): tr|F9VDS2|F9VDS2_LACGL GTP cyclohydrolase 1 OS=Lactococ cus garvieae (strain Lg2) OX=420890 GN=folE PE=3 SV=1
MQTVYLSLGSNIGDKQAYLQDAVSLLGQNSAILIDKKSKFYQTSPVGGVEQDDFVNMAVKISTTLEAKQLLALIHEIEAKLKRVRKIHWGPRTIDIDILFYGNDQISEEDLIVPHKEVFNRLFVLVPLLEILEPGFSHEQQVKQAIEKLKNTEQEIVELPTEKPARKRIEFAVREILSAVGEDPDREGLLETPERVAKMYEEILSSQKLTQFEEYKLFKIEKTDQDQTILIKDIPFYSMCEHHILPFFGKANVAYIPKDGNIIGLSKIPRLVNYVSHKLSVQENITRDIAEILNDILEPKGVAVVVEARHMCVEMRGVKKGNSQTKTSFFMGEFEENRETRLEFLESLN

SEQ ID NO: 9682 - protein, 349 aa, Lactococcus lactis
  misc_feature (1)..(349): sp|Q9CGE3|FOLKE_LACLA Bifunctional protein FolKE OS=Lac tococcus lactis subsp. lactis (strain IL1403) OX=272623 GN=folKE PE=3 SV=1
MQTTYLSMGSNIGDRQYYLHEAIRLLGKHPKIMIEKVSNFYESTPVGGVKQDDFTNLALKVATLLEPLELLSFIHEVELSLNRERKIHWGPRTIDIDIIFYDDLEMQVENLVIPHKEAFNRLFVLKPIFELIDKDFKYYASIEKAIAELSVSEQELHVIKEEKTPRNRIEDAVKEILFAVGENPNREGLLETPARVAKMYEEILSSQRLSKFNEYKLFEIDSSKTDSIVLIKDIPFYSMCEHHMLPFFGKAHVAYIPADGKIIGLSKIPRLVDYVSRKLSVQENITHDIGDILTDILNPKGVAVLVEGRHMCVEMRGVKKVNSITKTSYFLGEFKENNEKRMEFLESLL

SEQ ID NO: 9683 - protein, 349 aa, Lactococcus lactis
  misc_feature (1)..(349): tr|H5SYZ1|H5SYZ1_LACLL GTP cyclohydrolase 1 OS=Lactococ cus lactis subsp. lactis IO-1 OX=1046624 GN=folE PE=3 S V=1
MQTTYLSMGSNIGDRQYYLHEAIRLLGKHPKIMIEKVSNFYESTPVGGVKQDDFTNLALKVATLLEPLELLSFIHEVELSLNRERKIHWGPRTIDIDIIFYNDLEMQEENLVIPHKEAFNRLFVLKPIFELIDKDFKYYASIEKAIAELSVSEQELHVIKEEETPRNRIEDAVKEILFAVGENPNREGLLETPARVAKMYEEILSSQRLCKFNEYKLFEIDSSKTDSIVLIKDIPFYSMCEHHMLPFFGKAHVAYIPADGKIIGLSKIPRLVDYVSRKLSVQENITHDIGDILTDILNPKGVAVLVEGRHMCVEMRGVKKVNSITKTSYFLGEFKENNEKRMEFLESLL

SEQ ID NO: 9684 - protein, 349 aa, Lactococcus petauri
  misc_feature (1)..(349): tr|A0A252CEP0|A0A252CEP0_9LACT GTP cyclohydrolase 1 OS= Lactococcus petauri OX=1940789 GN=folE PE=3 SV=1
MQTVYLSLGSNIGDKQAYLQDAVSLLGQDSAILIDRRSKFYQTSPVGGVEQDDFVNMALKISTTLEASQLLELIHKIEAKLNRVRKIHWGPRTIDIDILFYGNEQILEEDLMVPHKEVFNRLFVLVPLLEILEPGFSYEQQVKQAIEKLKDTEQEIVEIPTEKPARKRIELAVREILSAVGEDPEREGLLETPERVAKMYEEILSSQKLTQFEEYKLFKIEKTDQDQTILIKDIPFYSMCEHHMLPFFGKANVAYIPKDGNIIGLSKIPRLVNYVSHKLSVQENITRDIAEILNDILEPKGVAVVVEARHMCVEMRGVKKGNSQTKTSFFMGEFEESRETRLEFLESLN

SEQ ID NO: 9685 - protein, 191 aa, Lactococcus piscium
  misc_feature (1)..(191): tr|A0A2C8EJX8|A0A2C8EJX8_9LACT GTP cyclohydrolase 1 OS= Lactococcus piscium OX=1364 GN=folE PE=3 SV=1
MKKNYQENKQHIESGTKKLLQAIGDDPTRDGLLETPERVFKAYSEIFASTGETQFDNYKLFPTDQDADMVIVGDIPFYAMCEHHLLPFFGTVSVGYVPDGEIIGLSKIPRLVNWAARRPSVQENLTALICSEMQRIVHPKGIAVHVHSRHMCMEMRGINRPGTFTTTSLYKGDLKTDAFLRQEFMMKVSDK

SEQ ID NO: 9686 - protein, 191 aa, Lactococcus piscium
  misc_feature (1)..(191): tr|A0A0D6DZ93|A0A0D6DZ93_9LACT GTP cyclohydrolase 1 OS= Lactococcus piscium MKFS47 OX=297352 GN=folE PE=3 SV=1
MKKNYQENKQHIESGTKKLLQAIGDDPTRDGLLETPERVFKAYSEIFASTGETQFDNYKLFPTDQDADMVIVGDIPFYAMCEHHLLPFFGTVSVGYVPDGEIIGLSKIPRLVDWAARRPSVQENLTALICSEMQRIVHPKGIAVHVHSRHMCMEMRGINRPGTFTTTSLYKGDLKTDAFLRQEFMMKVSDK

SEQ ID NO: 9687 - protein, 190 aa, Lactococcus plantarum
  misc_feature (1)..(190): tr|A0A2A5S0C7|A0A2A5S0C7_9LACT GTP cyclohydrolase 1 OS= Lactococcus plantarum OX=1365 GN=folE PE=3 SV=1
MTKISHEHKEQIETGTRNLLQAIGDNPNRDGLLETPERVFKAYSEIFAATGETQFNNYKLFPTDQETDMVIVADIPFYAMCEHHLLPFFGTVSVGYIPDGEIIGLSKIPRLVDWAARRPSVQENMTALICSEMERITHPKGVAVYIQSRHMCMEMRGINRPGTYTTTSLYKGLLKTDTLLRQEFMMKVRD

SEQ ID NO: 9688 - protein, 191 aa, Lactococcus raffinolactis
  misc_feature (1)..(191): tr|A0A290Q6W5|A0A290Q6W5_9LACT GTP cyclohydrolase 1 OS= Lactococcus raffinolactis OX=1366 GN=folE PE=3 SV=1
MKKFSQEHQETLKTGTKNLLQAIGDDPNRDGLLETPKRVAKAYAEIFSATGETQFDNYKLFPTDQDSDMVIVADIPFYAMCEHHLLPFFGTVTVGYVPDGEIIGLSKIPRLVDWAARRPSVQENLTALICSEMQRIVHPKGVAVHVQSRHMCMEMRGINRPGTYTTTSLYKGLLKTDAFLRQEFMMKVSGK

SEQ ID NO: 9689 - protein, 191 aa, Lactococcus raffinolactis
  misc_feature (1)..(191): tr|I7JGE6|I7JGE6_9LACT GTP cyclohydrolase 1 OS=Lactococ cus raffinolactis 4877 OX=1215915 GN=folE PE=3 SV=1
MKKFSQEHQETLETGTKNLLQAIGDNPNRDGLLETPKRVAKAYAEIFSATGETQFDNYKLFPTDQDSDMVIVADIPFYAMCEHHLLPFFGTVTVGYVPDGEIIGLSKIPRLVDWAARRPSVQENLTALICSEMQRIVHPKGVAVHMQSRHMCMEMRGINRPGTYTTTSLYKGLLKTDTFLRQEFMMKVSGK

SEQ ID NO: 9690 - protein, 191 aa, Lactococcus reticulitermitis
  misc_feature (1)..(191): tr|A0A224XE95|A0A224XE95_9LACT GTP cyclohydrolase 1 OS= Lactococcus reticulitermitis OX=2025039 GN=folE PE=3 SV =1
MKKFSQEYQETLETGTKNLLQAIGDNPNRDGLLETPKRVAKAYAEIFSATGERQFDNYKLFPTDQDSDMVVVADIPFYAMCEHHLLPFFGTVSVGYVPDGEIIGLSKIPRLVDWAARRPSVQENLTALICSEMERIVHPKGVAVHIQSRHMCMEMRGINRPGTFTTTSLYKGQLKTDAFLRQEFMMKVSGK

SEQ ID NO: 9691 - protein, 196 aa, Lactococcus sp.
  misc_feature (1)..(196): tr|A0A5C8K4V8|A0A5C8K4V8_9LACT GTP cyclohydrolase 1 OS= Lactococcus sp. dk310 OX=2603289 GN=folE PE=3 SV=1
MMKEEKFNHLKTLFEDEDEDEEKIIKATEGIEALLDLIGEDKDREGLQDTPYRFLKAFAEYTQGYKIDPKTYLETQFEAESHDVVVVRDIPFESACEHHLARFHGVAHVAYIPSEKITGLSKFPRMINGYARRLQVQERLTAQVADAIYDVLNPEACAVVIEASHSCMTARGAMAHGSSTKTFAVRGDKNLLDYLK

SEQ ID NO: 9692 - protein, 349 aa, Lactococcus sp.
  misc_feature (1)..(349): tr|A0A3C1XAZ8|A0A3C1XAZ8_LACSP GTP cyclohydrolase 1 OS= Lactococcus sp. OX=44273 GN=folE PE=3 SV=1
MQTVYLSLGSNIGDKQAYLQEAVNLLGQNSAILIEKKSKVYQTSPVGGVPQDDFVNIALKLSTTLEAETLLEVIHDIEGKLNRVRAVHWGPRTIDIDILFYGTEKFREEHLTIPHKELFNRLFVLIPLMDILEEGFEYETQVKQAISNLEGKGQKIIEIPEEKTARKRIENAVRDILTAVGENPEREGLLETPERVAKMYEEILSSQKLTAFEEYKLFKIEATEQDQTILIKDIPFYSMCEHHMLPFFGTANVAYIPKDGNIIGLSKIPRLINYVSRKLSVQENITRDIAEILNDILQPKGVAVVVEARHMCIEMRGVKKGNSQTRTSFFLGEFEENRETRLEFLESLT

SEQ ID NO: 9693 - protein, 345 aa, Lactococcus termiticola
  misc_feature (1)..(345): tr|A0A2R5HG69|A0A2R5HG69_9LACT GTP cyclohydrolase 1 OS= Lactococcus termiticola OX=2169526 GN=folE PE=3 SV=1
MHSVYLSLGSNMGDRQDYLRRAIASLGENPGILMEQVSRFYETSPVGGVVQDDFINVALKLSTTLGPDELLAFIHEVEAKLGRERLIHWGPRTIDIDILLYDELEMNSDDLTLPHPELFKRLFVLEPLAELLPDDGRIKTAIEQLSKTDQAVQVVEAEAPAEERLEDAVGEILKAVGEDPSREGLLETPSRVAKMYAEILSSQKKAKFDEYKLFKIDVAEQDQEILVKDIPFYSMCEHHMLPFFGVAHVAYLPTDGNIIGLSKIPRLVDYVSRRLSVQENITREIAETMNEILKPKGVAVLVEARHMCIEMRGVKKLNSKTKTTFFLGEYDSNLNQRQEFLEAIK

SEQ ID NO: 9694 - protein, 184 aa, Lactonifactor longoviformis
  misc_feature (1)..(184): tr|A0A1M4YC22|A0A1M4YC22_9CLOT GTP cyclohydrolase 1 OS= Lactonifactor longoviformis DSM 17459 OX=1122155 GN=fol E PE=3 SV=1
MVNQDKVREGVRLILEGIGEDINREGLVETPDRIARMYTELVGGMEEDAGEHLKKRFHVTNNEMVVEKDIVFYSLCEHHMLPFYGKAHIAYIPDHEVVGLSKIARTVEVFARRLQLQEQLTAQIADSFMEHLSPRGVMVMIEAEHLCMTMRGIKKPGSKTVTMVTRGVFEGNTELQNTFYQLVK

SEQ ID NO: 9695 - protein, 323 aa, Lacunisphaera limnophila
  misc_feature (1)..(323): tr|A0A1D8ARJ1|A0A1D8ARJ1_9BACT GTP cyclohydrolase FolE2 OS=Lacunisphaera limnophila OX=1838286 GN=folE2_1 PE=4 SV=1
MKQMYLHRSDCGQPPLVQRGYDRKFKSSPAYRATLPDMMDVAHEAIQGANVPIQQVGIHNFKLPLKYRTKAGKTLTLETSVTGTVSLEAELKGINMSRIMRTFYEHKNGVTTGEWMGKILKGYLRKVETKDARLKIAFSYPMVRTSLRTGLEGYQFYTVAFEGVMTRDGRYRRFIHFDFVYSSACPCSAELTEHARAKRGAYGVPHSQRSKARITLEEVDGKKIWIEDVHALCLKALQTETQVMVKREDEQAFAELNGAYLKFVEDAARLLYREFDRDKRIADFRIACSHLESLHSHDAVSVICKGVKGGFSADFMDFGMLVC

SEQ ID NO: 9696 - protein, 250 aa, Lacunisphaera limnophila
  misc_feature (1)..(250): tr|A0A1D8AX70|A0A1D8AX70_9BACT GTP cyclohydrolase 1 typ e 2 OS=Lacunisphaera limnophila OX=1838286 GN=Verru16b_ 02576 PE=4 SV=1
MASLSQLVEYCDKRTRRPSFKDFPGAHNGLQVANDGRVTRIGAAVDAGLVPFEQAVARGVDFLIVHHGLFWGGVQPLTGGVYGRYSALVRGNCAVYSSHLPLDAHEDLGNNVLMARQLGLKPRRQFLPHENELIGWIAPNRFKRAQLCARLEELYPRVVSIECGSPTPKLVAFCSGSGNGAVPHLVAAGVDTLITGELREEWFNYAQEHKLNLICCGHYATETHGVKALAAELAKKFRLPWEFIETDNPL

SEQ ID NO: 9697 - protein, 308 aa, Lampropedia hyalina
  misc_feature (1)..(308): tr|A0A1M4TGB8|A0A1M4TGB8_9BURK GTP cyclohydrolase FolE2 OS=Lampropedia hyalina DSM 16112 OX=1122156 GN=folE2 P E=3 SV=1
MNISLPDVSLTECPAVLAPLDWVGMQGIDVPLWLAEFEAPQQVHAQADIQVDLPQPHTKGIHMSRLYRLLDEAVQQPLTPTLLAQLLADAIHSHADCHSRRARLQLRFALLARRAALLTPGLAGWKSYPVQVRAQWQDGHLSLHTSVEIVYSSTCPCSAALTRQLVEQAFTAHFAGQEQVSRSDAAAWLRQQATLATPHSQRSVARVRVSLPATAATLGLLPLIDTVEAALATPVQTAVKRADEQAFARLNGQNLMFVEDAARRVQQALHEYQDASVQVQHLESLHPHDAVAWAGPDHTQATAPASHL

SEQ ID NO: 9698 - protein, 190 aa, Lapillicoccus jejuensis
  misc_feature (1)..(190): tr|A0A542DXF2|A0A542DXF2_9MICO GTP cyclohydrolase 1 OS= Lapillicoccus jejuensis OX=402171 GN=folE PE=3 SV=1
MAVDQERAEAAVRELLLAVGEDPDREGLRETPGRVARAYAEIFAGLDMTPSMVLDKTFAINHDELVIVRDIEVYSTCEHHLVPFHGLAHVGYIPAKDGKVTGLSKIGRLVDVFARRPQVQERLTTQVADALVDHLGVRGVIVVVECEHLCMSMRGVHKPGSRTITSAVRGQLRDAATRAEAMSLLRGGRS

SEQ ID NO: 9699 - protein, 244 aa, Larkinella arboricola
  misc_feature (1)..(244): tr|A0A327X9U0|A0A327X9U0_9BACT GTP cyclohydrolase 1 OS= Larkinella arboricola OX=643671 GN=folE PE=3 SV=1
MKPNGTSLNTRSNGHHLNFDVLNELTVEEIGDDHMASSLETPLREDAFALTDEAKIERIEEHFREIMNILGLDLTDDSLKGTPKRVAKMYVKEIFSGLNPDNKPKAALFENKYQYKEMLVEKNITVQSHCEHHFVPILGRAHVAYISSGKVIGLSKLNRIVQYFAKRPQVQERLTVQIANELKEVLQTEDVAVIIDARHLCVSMRGVQDVNSSTVTAHYGGKFKDDEATRQEFLRHVSEPTAAI

SEQ ID NO: 9700 - protein, 244 aa, Larkinella knui
  misc_feature (1)..(244): tr|A0A3P1CWX2|A0A3P1CWX2_9BACT GTP cyclohydrolase 1 OS= Larkinella knui OX=2025310 GN=folE PE=3 SV=1
MKPNGTSLNTRSNGHHLAYDLLNDVSVDEMGDDHVASSSETPMREDAFELSDDTKIELIEGHFREIMNILGLDLTDDSLKGTPRRVAKMYVKEIFSGLNPAKKPIATLFENKYQYSEMLVEKGITVHSQCEHHFVPIIGRAHVAYISSGKVIGLSKLNRIVQYFAKRPQVQERLTVQIANELKAVLQTEDVAVIIDARHLCVSMRGVQDANSSTVTVHYCGKFKDDEATRQEFLRHVSEPTATL

SEQ ID NO: 9701 - protein, 244 aa, Larkinella rosea
  misc_feature (1)..(244): tr|A0A3P1C0N8|A0A3P1C0N8_9BACT GTP cyclohydrolase 1 OS= Larkinella rosea OX=2025312 GN=folE PE=3 SV=1
MKPNGTSLNTRSNGHHPAYDVLSDLTIDEMGDDHVASAVETPLRADAFEISDDTKIELIEDHFREILTILGLDLTDDSLKGTPHRVAKMYVKEIFSGLNPAKKPKATLFENKYQYNEMLVEKGITVHSHCEHHLVPIIGRAHVAYISSGKVIGLSKLNRLVQYFAKRPQVQERLTEQIANELKTVLQTEDVAVIIDARHLCVSMRGVQDVNSSTVTAHYGGKFKEDEATRQEFLRHVSEPTASL

SEQ ID NO: 9702 - protein, 244 aa, Larkinella sp.
  misc_feature (1)..(244): tr|A0A368JRX7|A0A368JRX7_9BACT GTP cyclohydrolase 1 OS= Larkinella sp. ZZJ9 OX=2315727 GN=folE PE=3 SV=1
MKPNGTSLNTRSNGHHPAYDLLHDVTVDEMGDDHVASSIETPLRDDAFDLSDEAKMDLIEGHFRHIMNILGLDLTDDSLKGTPRRVAKMYVKEIFSGLNPAKKPQAALFENKYQYNEMLVEKGITVHSHCEHHFVPIIGRAHVAYISSGKVIGLSKLNRIVQYFAKRPQVQERLTVQIANELKAVLETEDVAVVIDARHLCVSMRGVQDVNSSTVTVHYGGKFKSDEATRQEFLRHVSEPTAAL

SEQ ID NO: 9703 - protein, 244 aa, Larkinella sp.
  misc_feature (1)..(244): tr|A0A4R8D0K7|A0A4R8D0K7_9BACT GTP cyclohydrolase 1 OS= Larkinella sp. BK230 OX=2512173 GN=folE PE=3 SV=1
MKPNGTSLNTRSNGHHHNYDLLNELTVEEIGDDHVASSLETPLRDDAFALTDETKMELIEDHFREIMNILGLDLTDDSLKGTPRRVAKMYVKEIFSGLNPKNKPKAALFENKYQYSEMLVEKNITVQSHCEHHFVPIMGRAHVAYISSGKVIGLSKLNRIVQYFAKRPQVQERLTVQIANELKEVLQTEDVAVIIDARHLCVSMRGVQDVNSSTVTAHYGGKFKDDEATRQEFLRHVSEPTAAL

SEQ ID NO: 9704 - protein, 193 aa, Latescibacteria bacterium
  misc_feature (1)..(193): tr|A0A0S7XG06|A0A0S7XG06_9BACT GTP cyclohydrolase 1 OS= Latescibacteria bacterium DG_63 OX=1703781 GN=folE PE=3 SV=1
MPKAKKQRAIDLAKIERAVRSILEAIGENPRREGIKNTPRRVAELYQRVFSGIGQDPTRNLKLYTVENQDGMILVRDILFHSMCEHHLLPFFGKIQLAYLPDNNRIAGLSSLTKIVEILSQKPQLQERLTNEIADALMKALKPKGLLVAVEAQHLCMVMNGTDRSGTVTVSYAMRGVMAKEAMKAEILSILRS

SEQ ID NO: 9705 - protein, 252 aa, Lautropia sp.
  misc_feature (1)..(252): tr|A0A1D2SGR7|A0A1D2SGR7_9BURK GTP cyclohydrolase FolE2 OS=Lautropia sp. SCN 69-89 OX=1660104 GN=folE2 PE=3 SV =1
MTCRAAPLPIQRVGVKGLRYPLRWRSAGADQPSVGQFGLYVALPAEQKGTHMSRFVALLEARLADGRPALDAAGMRAMFVEMLGLLEADSGRIELALPLFVRKTAPVSQVQSLMDYDLSIVVEGGARDAVTTLTVVVPCTSLCPCSKTISDYGAHNQRSHLTVSVVADAAIEPEELIVLAEAQASSEIYGLLKRVDEKHVTERAYDNPKFVEDLVRDVATALRRDARVRRFVVEAENFESIHNHSAYARIEG

SEQ ID NO: 9706 - protein, 276 aa, Lautropia sp.
  misc_feature (1)..(276): tr|A0A3B8RMV5|A0A3B8RMV5_9BURK GTP cyclohydrolase FolE2 OS=Lautropia sp. OX=2053568 GN=folE2 PE=3 SV=1
MNTRDLNQNQAIPDVQGYRDQRNLAIQRVGVRGLKYPLRWRAQDGVQHTVMQAALDVALPADQKGTHMSRFIALLQAQGQEDALDLEGMLKLHHKMLERLQAQDGQIELQFPLFLKKKAPVSGVESLLDYQIVLKTQGSLDATHCELSVTAPVTSLCPCSKEVSAYGAHNQRSHLALEVRLNPTRLADCDAESLIAIAESQASSEVYGLLKRVDEKHVTERAYDNPKFVEDLVHDVAAALHASQDQFGLIAYCVRAENFESIHNHSAWAELHSANW

SEQ ID NO: 9707 - protein, 195 aa, Lawsonella clevelandensis
  misc_feature (1)..(195): tr|A0A2W5ID32|A0A2W5ID32_9ACTN GTP cyclohydrolase 1 OS= Lawsonella clevelandensis OX=1528099 GN=folE PE=3 SV=1
MSYGEYDAQRVEHAVRELLIGIGEDPDREGLRDTPSRVARAYTEIFGGLHCDPADVLATSFTEGYDELVLVRDIPVYSMCEHHLLPFHGVAHIGYIPNKETGRIMGLSKLARLVDLYAKRPQIQERLTGQVADAIMDRLDARGAVVVIECEHLCMAMRGIRKPGAITTTSAVRGSLRANATSRAEALALIRDPRC

SEQ ID NO: 9708 - protein, 231 aa, Lawsonella clevelandensis
  misc_feature (1)..(231): tr|A0A5E3ZYM9|A0A5E3ZYM9_9ACTN GTP cyclohydrolase 1 OS= Lawsonella clevelandensis OX=1528099 GN=folE PE=3 SV=1
MTGWAAYSAAGAPASGGTNLHPAPTSTPNSTRIDTIMSYGEYDAARVEHAIRELLIGIGEDPDREGLRDTPNRVARAYTEIFGGLHCEPSDVLATAFTEGYDELVLVRDIPVYSMCEHHLLPFHGVAHIGYLPNKETGRITGLSKLARLVDLYAKRPQVQERLTGQVADAIMERLDARGAVVVIECEHLCMAMRGIRKPGSITTTSAVRGSLRTNATSRAEALALIRDPRR

SEQ ID NO: 9709 - protein, 258 aa, Lawsonia intracellularis
  misc_feature (1)..(258): sp|Q1MPD2|GCH4_LAWIP GTP cyclohydrolase FolE2 OS=Lawson ia intracellularis (strain PHE/MN1-00) OX=363253 GN=fol E2 PE=3 SV=1
MKDIQSTPAQIAFPIDRVGVKGLKFPIQIQTRDIGMQHTVAIVDMGVDLSVSSRGTHMSRFVEVLQDWNEPLCCESLERLVKQTQKKLQSQHAYIAFFFPYFLHKRAPSTNMLSLFSYDCKLSAKSINYNIEFILELTVPVMTVCPCSKAISHEGAHSQRSEIYIQLRLEQFRFIEDFIVLAESSASSPLYSLLKRADEKYVTEDAFAHPKFVEDVVRNISSKLITVTDVLGFRVEVESFESIHAHNAFAYIEHEFIC

SEQ ID NO: 9710 - protein, 221 aa, Leadbetterella byssophila
  misc_feature (1)..(221): tr|E4RZB3|E4RZB3_LEAB4 GTP cyclohydrolase 1 OS=Leadbett erella byssophila (strain DSM 17132 / KACC 11308 / 4M15 ) OX=649349 GN=folE PE=3 SV=1
MLNILKTEDEIGNDHQMTSAKTPLRPDAFELSDEEKIEKIAVHFREIMHTLGLDLNDESLAGTPRRVAKMYVQELFSGLRPDNMPSVTLFENNYKFSEILVERDITFYSNCEHHFVPIVGKVHIGYISTGKVIGLSKLHRIVNYFSRRPQVQERLTIQIGETLTRVLATEDVAVVVDADHFCVSSRGIADQSSSTVTSFFSGAFHDSAKKEEFLQLVKLRA

SEQ ID NO: 9711 - protein, 255 aa, Lebetimonas natsushimae
  misc_feature (1)..(255): tr|A0A292YFQ7|A0A292YFQ7_9PROT GTP cyclohydrolase I OS= Lebetimonas natsushimae OX=1936991 GN=LNAT_P1137 PE=4 S V=1
MLEKIRKIYESKNLTTPFEKALEIYNSTPCFKINENVYDKNPNWNDDVHFLMRLIATEKMKKVFKALKIDMDDPNVAENLEEGNIGTAGRIVKMWSGRDTKDDRELMGGRFNKPVRLAKFPNEISRDFDNPIIKEVDLTAVCSHHFAPFSTKFSDKAKIVIAYIPKDYVLGISKLQRVVRFIAQRGWLQEDLTKAIYKEISKTAETDDVYVKLKNIKHSCEFLRGALSESDGFTTEYFGGKFRKNRDLLDFVRNY

SEQ ID NO: 9712 - protein, 206 aa, Lechevalieria deserti
  misc_feature (1)..(206): tr|A0A316HVU6|A0A316HVU6_9PSEU GTP cyclohydrolase 1 OS= Lechevalieria deserti OX=531939 GN=folE PE=3 SV=1
MTNTLDRLAPSESLVSSGPVDTERVADLVGQLLAAIGEDPGREGLSDTPARVAAWWRRFFSPEPSAAPTSFPEQHLSGQLVVIGGMSVWSLCEHHLLPMNLDVAVGYVPDGEVIGLSKFGRIAQQYAGRLQVQERFTRQVADEIAVVIGSSDVAVAVRGTHLCMSARGVRMEAARTTTVQAGGRFESDPVLSQQFLTLATDRWRVA

SEQ ID NO: 9713 - protein, 186 aa, Lechevalieria deserti
  misc_feature (1)..(186): tr|A0A316I0N8|A0A316I0N8_9PSEU GTP cyclohydrolase 1 OS= Lechevalieria deserti OX=531939 GN=folE PE=3 SV=1
MTDPVIDTEAARHAVTDLLKALGKDPFSVHLADTPRRVAEAYAELLTPRAFNLTTFPNDEGYDELVLARGIPVQSLCEHHMLPFHGVAHVGYLPGERILGLSKLARVVEMFARDLQVQERLTKQVADWLQEHLRPKGVGVVIEAEHLCMALRGVRVNGSRTVTSALQGLLRSDPASRQEFFTLVHA

SEQ ID NO: 9714 - protein, 215 aa, Lechevalieria fradiae
  misc_feature (1)..(215): tr|A0A1G8AR82|A0A1G8AR82_9PSEU GTP cyclohydrolase 1 OS= Lechevalieria fradiae OX=200378 GN=folE PE=3 SV=1
MTEHDQLDADAGLTLDGEAGVSARRVFDQARAEAAVRELLIACGEDPEREGLRETPARVARAYRELFAGLYTDADAVLAKTFDESHEELVLVTDIPMFSFCEHHLLPFHGVAHVGYIPNEQGRVTGLSKLARLVDLYSKRPQVQERLTSQVADALVRKLEPRGVIVVVEAEHLCMGMRGVRKPGSRTTTSAVRGILRTSASSRAEAIELIRGRTR

SEQ ID NO: 9715 - protein, 192 aa, Lechevalieria fradiae
  misc_feature (1)..(192): tr|A0A1G7UJL4|A0A1G7UJL4_9PSEU GTP cyclohydrolase 1 OS= Lechevalieria fradiae OX=200378 GN=folE PE=3 SV=1
MTLPSRTEASPIDTEAARQAVADLLKALGKDPFSVHLADTPRRVADAYAELLTPRTFTLTTFPNDEGYDELVLARGIPVQSLCEHHMLPFHGVAHVGYLPGERILGLSKLARVVEMFARDLQVQERLTKQVADWLQEHLRPKGVGVVIEAEHMCMALRGVRVAGSSTVTSALQGVLREDPASRQEFFTLVHA

SEQ ID NO: 9716 - protein, 215 aa, Lechevalieria xinjiangensis
  misc_feature (1)..(215): tr|A0A1H9EYK0|A0A1H9EYK0_9PSEU GTP cyclohydrolase 1 OS= Lechevalieria xinjiangensis OX=402600 GN=folE PE=3 SV=1
MTEHHQLDADAGLTHNGEAGVSARRVFDQARAEAAVRELLLACGEDPEREGLRDTPARVARAYRELFAGLYTDADTVLAKTFDESHEELVLVTDIPMFSFCEHHLLPFHGVAHVGYIPNEAGRVTGLSKLARLVDLYSKRPQVQERLTSQVADALVRRLEPRGVIVVVEAEHLCMGMRGVRKPGSRTTTSAVRGLLRTSASTRAEAIELIRGRSR

SEQ ID NO: 9717 - protein, 222 aa, Leclercia adecarboxylata
  misc_feature (1)..(222): tr|A0A3E2A0P0|A0A3E2A0P0_9ENTR GTP cyclohydrolase 1 OS= Leclercia adecarboxylata OX=83655 GN=folE PE=3 SV=1
MSSMSKEAALVHEALVAHGLETPLRPPVQDLDNETRKRLISGHMTEIMQLLNLDLSDDSLMETPRRIAKMYVDEIFSGLDYANFPKITVIENKMKVDEMVTVRDITLTSTCEHHFVTIDGKATVAYIPKDSVIGLSKINRIVQFFAQRPQVQERLTQQILIALQTLLGTNNVAVSIDAVHYCVKARGIRDATSATTTTSLGGLFKSSQNTRQEFLRAVRHHN

SEQ ID NO: 9718 - protein, 222 aa, Leclercia adecarboxylata
  misc_feature (1)..(222): tr|A0A5B7XG06|A0A5B7XG06_9ENTR GTP cyclohydrolase 1 OS= Leclercia adecarboxylata OX=83655 GN=folE PE=3 SV=1
MSSMSKEAALVHEALVAHGLETPLRPPVQDLDNETRKRLISGHMTEIMQLLNLDLSDDSLMETPRRIAKMYVDEIFSGLDYANFPKITVIENKMKVDEMVTVRDITLTSTCEHHFVTIDGKATVAYIPKDAVIGLSKINRIVQFFAQRPQVQERLTQQILIALQTLLGTNNVAVSIDAVHYCVKARGIRDATSATTTTSLGGLFKSSQNTRQEFLRAVRHHN

SEQ ID NO: 9719 - protein, 222 aa, Leclercia sp.
  misc_feature (1)..(222): tr|A0A2I8NWX3|A0A2I8NWX3_9ENTR GTP cyclohydrolase 1 OS= Leclercia sp. LSNIH1 OX=1920114 GN=folE PE=3 SV=1
MSSMSKEAALVHEALVAHGLETPLRPPVQEMDNETRKSLISGHMTEIMQLLNLDLSDDSLMETPRRIAKMYVDEIFSGLDYANFPKITVIENKMKVDEMVTVRDITLTSTCEHHFVTIDGKATVAYIPKDAVIGLSKINRIVQFFAQRPQVQERLTQQILIALQTLLGTNNVAVSIDAVHYCVKARGIRDATSATTTTSLGGLFKSSQNTRQEFLRAVRHVS

SEQ ID NO: 9720 - protein, 222 aa, Leclercia sp.; identical to SEQ ID NO: 7844
  misc_feature (1)..(222): tr|A0A0J6MFF2|A0A0J6MFF2_9ENTR GTP cyclohydrolase 1 OS= Leclercia sp. LK8 OX=1628210 GN=folE PE=3 SV=1

SEQ ID NO: 9721 - protein, 199 aa, Leeuwenhoekiella aequorea
  misc_feature (1)..(199): tr|A0A4Q0P2P1|A0A4Q0P2P1_9FLAO GTP cyclohydrolase 1 OS= Leeuwenhoekiella aequorea OX=283736 GN=folE PE=3 SV=1
MSPYKKFEEYNIDLKDEIKDSYSSIIKDLGEDVTRDGLLKTPERAAKAMMYLTSGYDVDPAEILKGAMFKEDYREMVIVKDIELYSLCEHHLLPFFGKAHIAYIPNGSIVGLSKLPRIVDVFSRRLQVQERLTHDILECINTTLKPEGVAVVIEASHMCMMMRGVQKQNSTTTTSGFRGQFEKIETRNEFLKLISSDLS

SEQ ID NO: 9722 - protein, 228 aa, Leeuwenhoekiella aequorea
  misc_feature (1)..(228): tr|A0A4V1KQU4|A0A4V1KQU4_9FLAO GTP cyclohydrolase 1 OS= Leeuwenhoekiella aequorea OX=283736 GN=folE PE=3 SV=1
MNMNFENEELKAIDEAGDDHHSASATTPLREDAFEMSDAEKIALIKEDVSHIMHTLGLDLTDDSLKGTPNRVAKMFVNELFAGLHPQRKPKASTFENNYKYGEMLVEKNITVYSTCEHHLLPIIGRAHVAYISNGTVVGLSKMNRIVDYYAKRPQVQERLTMQIVEELQIALGTQDVACVIDAKHLCVNSRGIRDIESSTVTSEFGGKFKEESVRREFLDYIKLDTTF

SEQ ID NO: 9723 - protein, 226 aa, Leeuwenhoekiella blandensis
  misc_feature (1)..(226): tr|A3XJQ3|A3XJQ3_LEEBM GTP cyclohydrolase 1 OS=Leeuwenh oekiella blandensis (strain CECT 7118 / CCUG 51940 / ME D217) OX=398720 GN=folE PE=3 SV=1
MNIENEELKAIDEIGDNHHNTSAETPLRDDAFELSDSEKIELIKEDVTRIMQTLGLDLEDDSLKGTPNRVAKMFVNEIFGGLNPQRKPKASTFKNNYKYGEMLVEKNITVYSTCEHHLLPIVGRAHVAYISNGTVVGLSKMNRVVDYYAKRPQVQERLTMQVVQELQKVLGTEDVACVIDAKHLCVNSRGIRDIESSTVTSEFGGKFKEEAVRREFLDYIKLETPF

SEQ ID NO: 9724 - protein, 199 aa, Leeuwenhoekiella blandensis
  misc_feature (1)..(199): tr|A3XM03|A3XM03_LEEBM GTP cyclohydrolase 1 OS=Leeuwenh oekiella blandensis (strain CECT 7118 / CCUG 51940 / ME D217) OX=398720 GN=folE PE=3 SV=1
MAPYRQFEEYNIDVKEDVKDRYKAIITDLGEDVTREGIVKTPERAAKAMMYLTSGYDMDASEILKGAMFKEDYREMVIVKNIELYSLCEHHLLPFFGKAHIAYIPDGHIVGLSKLPRVVDVFSRRLQVQERLTHDILECINNTLKPQGVAVVIEASHMCMMMRGVQKQNSTTTTSGFRGQFEHNETRNEFLKLIGSDLG

SEQ ID NO: 9725 - protein, 199 aa, Leeuwenhoekiella marinoflava
  misc_feature (1)..(199): tr|A0A4Q0PQ12|A0A4Q0PQ12_9FLAO GTP cyclohydrolase 1 OS= Leeuwenhoekiella marinoflava OX=988 GN=folE PE=3 SV=1
MRPYREFEEYNIEVQEGIKDRYKSIIADLGEDVNREGIVKTPERAAKAMMYLTSGYDVDASEILSGAMFKEDYNEMVIVKNIELYSLCEHHLLPFFGKAHIAYIPNGHIVGLSKLPRVVDVFSRRLQVQERLTHDILECINNTLKPQGVAVVIEASHMCMMMRGVQKQNSTTTTSGFRGQFEHNETRNEFLKLIGSDLS

SEQ ID NO: 9726 - protein, 228 aa, Leeuwenhoekiella marinoflava
  misc_feature (1)..(228): tr|A0A4Q0PJI6|A0A4Q0PJI6_9FLAO GTP cyclohydrolase 1 OS= Leeuwenhoekiella marinoflava OX=988 GN=folE PE=3 SV=1
MKMNFDNEELKAIDEIGDNHHGTSAETPLRDDAFKLSDSEKIELIKEDVARIMQTLGLDLTDDSLKGTPNRVAKMFVNEIFGGLNPARKPKASTFDNNYKYGEMLVEKNITVYSTCEHHLLPIVGRAHVAYISNGSVVGLSKMNRVVDYYSKRPQVQERLTMQVVQELQKVLGTQDVACVIDAKHLCVNSRGIRDIESSTVTSEFGGKFKEEAVRREFLDYIKLDTPF

SEQ ID NO: 9727 - protein, 226 aa, Leeuwenhoekiella nanhaiensis
  misc_feature (1)..(226): tr|A0A2G1VRZ1|A0A2G1VRZ1_9FLAO GTP cyclohydrolase 1 OS= Leeuwenhoekiella nanhaiensis OX=1655491 GN=folE PE=3 SV =1
MKIDNEELNTLDELGDNHHSTSAQTPLREDAFKLTDAEKIELIREDVNHIMQTLGLDLTDDSLKGTPNRVAKMFVNEIFGGLSPARKPKASTFKNNYKYGEMLVEKNITVYSTCEHHLLPIVGRAHVAYISNGTVVGLSKMNRIVDYYAKRPQVQERLTMQIVQELQEALGTEDVACVIDAKHLCVNSRGIRDIESSTVTSEFGGKFKEEAVRREFLDYIKLDTPF

SEQ ID NO: 9728 - protein, 199 aa, Leeuwenhoekiella nanhaiensis
  misc_feature (1)..(199): tr|A0A2G1VUP1|A0A2G1VUP1_9FLAO GTP cyclohydrolase 1 OS= Leeuwenhoekiella nanhaiensis OX=1655491 GN=folE PE=3 SV =1
MSPYQKFEEYNIEVQEDVKARYKSIIADLGEDVDREGIVKTPERAAKAMMYLTSGYDVDASEILRGAMFKEDYNEMVIVKNIELYSLCEHHLLPFFGKAHIAYIPNGHIVGLSKIPRIVDVFARRLQVQERLTHNILECINQTLKPQGVAVVIEASHMCMMMRGVQKQNSTTTTSGFRGQFENNETRNEFLKLISNDLS

SEQ ID NO: 9729 - protein, 199 aa, Leeuwenhoekiella palythoae
  misc_feature (1)..(199): tr|A0A1M5T476|A0A1M5T476_9FLAO GTP cyclohydrolase 1 OS= Leeuwenhoekiella palythoae OX=573501 GN=folE PE=3 SV=1
MAPYRKFEEYNISVQDDVKDRYKAIISDLGEDVNREGIVKTPERAAKAMMYLTSGYDMDASEILKGAMFKEDYNEMVIVKNIELYSLCEHHLLPFFGKAHIAYIPNGHIVGLSKLPRVVDVFSRRLQVQERLTHDILECINTTLKPQGVAVVIEASHMCMMMRGVQKQNSTTTTSGFRGQFEHNETRNEFLKLIGSDLS

SEQ ID NO: 9730 - protein, 228 aa, Leeuwenhoekiella palythoae
  misc_feature (1)..(228): tr|A0A1M5Z8R5|A0A1M5Z8R5_9FLAO GTP cyclohydrolase 1 OS= Leeuwenhoekiella palythoae OX=573501 GN=folE PE=3 SV=1
MKMNFENEELKEIDELGDNHHSTSAITPLRDDAFELSDLEKIELIKEDVTRIMQTLGLDLKDDSLKGTPNRVAKMFVNEIFGGLNPQRKPKASTFQNNYKYGEMLVEKNITVYSTCEHHLLPIVGRAHVAYISNGTVVGLSKMNRVVDYYAKRPQVQERLTMQVVQELQKVLGTEDVACVIDAKHLCVNSRGIRDIESSTVTSEFGGKFKEEAVKREFLDYIKLETPF

SEQ ID NO: 9731 - protein, 199 aa, Leeuwenhoekiella polynyae
  misc_feature (1)..(199): tr|A0A4Q0P407|A0A4Q0P407_9FLAO GTP cyclohydrolase 1 OS= Leeuwenhoekiella polynyae OX=1550906 GN=folE PE=3 SV=1
MTPYKQFEEYNVEVQEDVRDCYKSIIGGLGEDVNREGIVKTPERAAKAMMYLTSGYDVDASEILRGAMFKEDYNEMVIVKNIELYSLCEHHLLPFFGKAHIAYIPNGHIVGLSKLPRVVDVFSRRLQVQERLTHDILECINTTLKPQGVAVVIEASHMCMMMRGVQKQNSTTTTSGFRGQFEHNETRNEFLKLIGSDLN

SEQ ID NO: 9732 - protein, 228 aa, Leeuwenhoekiella polynyae
  misc_feature (1)..(228): tr|A0A4Q0NW29|A0A4Q0NW29_9FLAO GTP cyclohydrolase 1 OS= Leeuwenhoekiella polynyae OX=1550906 GN=folE PE=3 SV=1
MKMNFENEELKAIDEIGDNHHSTSAETPLRDDAFKLSDSEKIELIKEDVARIMQTLGLDLTDDSLKGTPNRVAKMFVNEIFGGLNPARKPKASTFDNNYKYGEMLVEKNITVYSTCEHHLLPIVGRAHVAYISNGSVVGLSKMNRVVDYYAKRPQVQERLTMQVVQELQKVLGTQDVACVIDAKHLCVNSRGIRDIESSTVTSEFGGKFKEEAVRREFLDYIKLDTPF

SEQ ID NO: 9733 - protein, 228 aa, Leeuwenhoekiella sp.; identical to SEQ ID NO: 9730
  misc_feature (1)..(228): tr|A0A2E0JPC3|A0A2E0JPC3_9FLAO GTP cyclohydrolase 1 OS= Leeuwenhoekiella sp. OX=1977054 GN=folE PE=3 SV=1

SEQ ID NO: 9734 - protein, 199 aa, Leeuwenhoekiella sp.
  misc_feature (1)..(199): tr|A0A4Q0NX69|A0A4Q0NX69_9FLAO GTP cyclohydrolase 1 OS= Leeuwenhoekiella sp. R-50232 OX=2249425 GN=folE PE=3 SV =1
MTPYKQFEEYNIEVQEDVKDCYKSIIGGLGEDVKREGIVKTPERAAKAMMYLTSGYDVDASEILRGAMFKEDYNEMVIVKNIELYSLCEHHLLPFFGKAHIAYIPNGHIVGLSKLPRVVDVFSRRLQVQERLTHDILECINTTLKPQGVAVVIEASHMCMMMRGVQKQNSTTTTSGFRGQFEHNETRNEFLKLIGSDLS

SEQ ID NO: 9735 - protein, 180 aa, Legionella adelaidensis
  misc_feature (1)..(180): tr|A0A0W0R0D8|A0A0W0R0D8_9GAMM GTP cyclohydrolase 1 OS= Legionella adelaidensis OX=45056 GN=folE PE=3 SV=1
MQQLYRELLIQLGEDINREGLKGTPERAATAMQYLTKGYNENIEDIINNALFESDMSEMVIVKDIEMYSLCEHHLLPFLGKCHVGYLPNGKVLGLSKIARIVDFYARRLQIQERLTTEIANCIAEITNARGVGVIIEAQHLCMMMRGVEKQNSVLTTSVMLGDMRTNPSSRSELLNLVKK

SEQ ID NO: 9736 - protein, 181 aa, Legionella anisa
  misc_feature (1)..(181): tr|A0A2Z3KU78|A0A2Z3KU78_9GAMM GTP cyclohydrolase 1 OS= Legionella anisa OX=28082 GN=folE PE=3 SV=1
MEKLYKELLTQLGEDVTREGLMDTPERAANAMRYLTKGYNESLEEIINNALFDSDMSEMVIVKDIEMYSMCEHHLLPFLGKCHVGYIPNGKVIGLSKIARIVDYFARRLQIQERLTTEIASCLESITGARGVAVVIEAKHLCMMMRGVEKQNSIMTTSVMLGEMRNNPTSRAEFLTLTHNK

SEQ ID NO: 9737 - protein, 179 aa, Legionella beliardensis
  misc_feature (1)..(179): tr|A0A378I4F8|A0A378I4F8_9GAMM GTP cyclohydrolase 1 OS= Legionella beliardensis OX=91822 GN=folE PE=3 SV=1
MHDLYKQILEQIGEDPEREGLRDTPQRAATAMHYLTKGYSEKLEDIINNALFISDMSEMVIVKDVELYSLCEHHLLPFIGKCHIGYIPHGKVLGLSKLARIVDYYARRLQIQERLTSEIAHCIEDITGARGVAVVIEAKHLCMMMRGVEKQNSSMVTSVMLGEMRDHSISRSEFLKLIR

SEQ ID NO: 9738 - protein, 204 aa, Legionella birminghamensis
  misc_feature (1)..(204): tr|A0A378IA93|A0A378IA93_9GAMM GTP cyclohydrolase 1 OS= Legionella birminghamensis OX=28083 GN=folE_1 PE=3 SV=1
MQANKYLIDIIQEKQKDDEQEAKNVITRMLQLIGEETGREGLVDTPRRVFESWKELYEGYFIDPEKILSTCFSNDKKYSQLVILRDIEIFSMCEHHMLPFYGQVHIGYIPDTKVVGLSKLARLAECFSRRLQIQEQLTVQIAEAIQKYLNPKGVGVMVECQHLCMVARGVNKKNPHMVTSHFMGVLETDPERRKEFNEQITRKL

SEQ ID NO: 9739 - protein, 180 aa, Legionella birminghamensis
  misc_feature (1)..(180): tr|A0A378IDR1|A0A378IDR1_9GAMM GTP cyclohydrolase 1 OS= Legionella birminghamensis OX=28083 GN=folE_2 PE=3 SV=1
MHELYKKILEEIGEDPNREGLKDTPKRAATAFQYLTKGYNEDLQEIINDALFESDMSEMVIVKDIELYSMCEHHLLPFLGKCHVGYIPNGKVLGLSKVARIVEYFARRLQIQERLTMEIASCIESITRAKGVAVVVEAKHLCMMMRGVEKQNSQMLTSVMLGDMRHNVSSRAEFLSLIGK

SEQ ID NO: 9740 - protein, 180 aa, Legionella brunensis
  misc_feature (1)..(180): tr|A0A0W0S084|A0A0W0S084_9GAMM GTP cyclohydrolase 1 OS= Legionella brunensis OX=29422 GN=folE PE=3 SV=1
MQELYKKILERIGEDPEREGLRDTPERAANALIYLTKGYNERLDEIINDALFESDMSEMVIVRDIEMYSMCEHHLLPFLGKCHVGYLPNGKVLGLSKVARIVDYFARRLQIQERLTAEIANCIESITGARGVAVVVEAKHLCMMMRGVEKQNSIMTTSVMLGEMRNNPSSRSEFLQLIHS

SEQ ID NO: 9741 - protein, 179 aa, Legionella busanensis
  misc_feature (1)..(179): tr|A0A378JMZ2|A0A378JMZ2_9GAMM GTP cyclohydrolase 1 OS= Legionella busanensis OX=190655 GN=folE PE=3 SV=1
MHDLYRQILKNIGEDPDREGLIDTPTRAANAMHYLTKGYQEKLEDIINNALFISDMSEMVIVKDIELYSMCEHHLLPFFGKCHIGYIPHGKVLGLSKFARLVDYYARRLQIQERLTSEIAHCIEDITGARGVAVVIEAKHLCMMMRGVEKQNSAMITSVMLGEMREHSISRSEFLKLIK

SEQ ID NO: 9742 - protein, 204 aa, Legionella cherrii
  misc_feature (1)..(204): tr|A0A0W0S8H7|A0A0W0S8H7_9GAMM GTP cyclohydrolase 1 OS= Legionella cherrii OX=28084 GN=folE_1 PE=3 SV=1
MQAEKYSIDMDEEQQKTDDQEAGDVIKKLLRLIGENPEREGLVDTPRRVVDSWKELYGGYSIDPAKVLSTCFSNKKQYNQLVLLRDIEMFSMCEHHMLPFYGRVHIGYIPDNKVVGLSKLARIVECFSRRLQIQEQLTVEIAEAIHTHLKPKGVGVMIECQHLCMVARGVNKQNPYMVTSHFMGILETESERRKEFNEQITRKL

SEQ ID NO: 9743 - protein, 181 aa, Legionella cherrii
  misc_feature (1)..(181): tr|A0A0W0SCS2|A0A0W0SCS2_9GAMM GTP cyclohydrolase 1 OS= Legionella cherrii OX=28084 GN=folE_2 PE=3 SV=1
MEKLYKELLTQLGEDITRQGLVDTPARAANAIRYLTKGYNENLDDIINDALFDSDMNEMVIVKDIEMYSMCEHHLLPFLGKCHVGYIPNGKVIGLSKMARIVDYYARRLQIQERLTTEIAKCLESITGARGVAVVIEAKHLCMMMRGVEKQNSVMTTSVMLGEMRNNPTSRAEFLTLTQRK

SEQ ID NO: 9744 - protein, 181 aa, Legionella cincinnatiensis
  misc_feature (1)..(181): tr|A0A378IFP9|A0A378IFP9_9GAMM GTP cyclohydrolase 1 OS= Legionella cincinnatiensis OX=28085 GN=folE PE=3 SV=1
MEQLYTELLKLIGEDVTREGLIDTPARAANAMHYLTKGYQENLEDIINGALFESDMSEMVIVKDIEMYSMCEHHLLPFLGKCHVGYLPHGKVIGLSKIARIVDYFARRLQIQERLTTEIANCIESITGARGVAVVVEAKHLCMMMRGVEKQNSVMTTSVMLGDMRNNPTSRAEFLTLIHGK

SEQ ID NO: 9745 - protein, 179 aa, Legionella clemsonensis
  misc_feature (1)..(179): tr|A0A222NZ51|A0A222NZ51_9GAMM GTP cyclohydrolase 1 OS= Legionella clemsonensis OX=1867846 GN=folE PE=3 SV=1
MQELYKQILKRIGEDPEREGLRDTPERAANALLYLTNGYHEQLDDIINDALFESDMSEMVIVKNIEMYSLCEHHLLPFLGKCHVGYLPNGKVLGLSKIARIVDYFARRLQIQERLTSEIANCIQSITGARGVAVVMEAKHLCMMMRGVEKQNSVMTTSVMLGDMRHNPSSRSEFLQLIS

SEQ ID NO: 9746 - protein, 112 aa, Legionella clemsonensis
  misc_feature (1)..(112): tr|A0A222P297|A0A222P297_9GAMM GTP cyclohydrolase 1 typ e 2 OS=Legionella clemsonensis OX=1867846 GN=clem_07145 PE=4 SV=1
MQYQVEKLINYKLSFYVPKSHLEQVKQAVFTAGAGRQGDYEYCCWQCLGQGQFKPLAGANPAVGTINTLTVVPEYKVEMICSANCIDKVVQALKFTHPYEEPAYEVVRLENY

SEQ ID NO: 9747 - protein, 185 aa, Legionella donaldsonii
  misc_feature (1)..(185): tr|A0A378J0I8|A0A378J0I8_9GAMM GTP cyclohydrolase 1 OS= Legionella donaldsonii OX=45060 GN=folE PE=3 SV=1
MQELYKEIIKRLGEDVNREGLRDTPERAANALRYLTKGYNENLEDIINNALFESDMSEMVIVKEIEMYSMCEHHLLPFLGKCHVGYLPNGKVLGLSKIARIVDYFARRLQIQERLTSEIAYCIASITGARGVAVVMEAKHLCMMMRGVEKQNSIMTTSVMLGEMRDNPASRSEFLRLISRVSSLS

SEQ ID NO: 9748 - protein, 181 aa, Legionella drancourtii
  misc_feature (1)..(181): tr|G9EU17|G9EU17_9GAMM GTP cyclohydrolase 1 OS=Legionel la drancourtii LLAP12 OX=658187 GN=folE PE=3 SV=1
MQELYKKLLTELGEDVTREGLVDTPERAANAMCYLTKGYHENLNDIINDALFDSDMSEMVVVKDIEMYSMCEHHLLPFLGKCHVGYIPNGKVLGLSKVARIVDFFARRLQIQERLTTEIANCVEAITGARGVAVVIEAKHLCMMMRGVEKQNSVMATSVMLGDMRNNATSRAEFLNLIRKS

SEQ ID NO: 9749 - protein, 190 aa, Legionella drozanskii
  misc_feature (1)..(190): tr|A0A0W0SX71|A0A0W0SX71_9GAMM GTP cyclohydrolase 1 OS= Legionella drozanskii LLAP-1 OX=1212489 GN=folE PE=3 SV =1
MASWLGQETMQELYKQILESIGEDVEREGLRGTPERAANALRYLTKGYHENLDEIINDALFDSDMSEMVIVKDIEMYSMCEHHLLPFLGKCHVGYLPNGKVLGLSKIARIVDYFARRLQIQERLTSEIADCIASITNARGVAVVIEAKHLCMMMRGVEKQNSIMTTSVMRGEMRDSSSSRSEFLRLISKS

SEQ ID NO: 9750 - protein, 185 aa, Legionella endosymbiont
  misc_feature (1)..(185): tr|A0A2D3R8C0|A0A2D3R8C0_9GAMM GTP cyclohydrolase 1 OS= Legionella endosymbiont of Polyplax serrata OX=2005262 GN=folE PE=3 SV=1
MATWIKMQELYKKILETIGEDVKRDGLKKTPERAAKTFRYLTNGYKKDLNKITNNSIFQSDIKDLILIKKIKIYSICEHHLLPFLGYCHIGYIPNGKILGISKIVEIIECYSRRLQIQERLTTEIANYISYILQAKGVGVMIEAKHLCIEMREFKKQNPYITTLSMTDEIKNKPYKRNEFLTLIK

SEQ ID NO: 9751 - protein, 179 aa, Legionella erythra
  misc_feature (1)..(179): tr|A0A0W0TFQ5|A0A0W0TFQ5_LEGER GTP cyclohydrolase 1 OS= Legionella erythra OX=448 GN=folE PE=3 SV=1
MQELYKKILEEIGEDPSREGLRDTPERAANALRYLTKGYAEDLNEIINNALFESDMSEMVIVKEIELYSMCEHHLLPFLGKCHVGYLPSGRVLGLSKIARIVDYFARRLQIQERLTAEIATCIESITGARGVGVVIEAKHLCMMMRGVEKQNSVMTTSVMLGDMRNNANTRLEFLKLIR

SEQ ID NO: 9752 - protein, 179 aa, Legionella fallonii
  misc_feature (1)..(179): tr|A0A098G9Z3|A0A098G9Z3_9GAMM GTP cyclohydrolase 1 OS= Legionella fallonii LLAP-10 OX=1212491 GN=folE PE=3 SV= 1
MEQLYTKLLQELGEDINREGLKDTPARASNAMRYLTKGYREDLDDIINGALFDSDMSELVIVKDIELYSMCEHHLLPFLGKCHVGYLPNGKVIGLSKIARIVDFFARRLQIQERMTGEIARCIESVTGARGVAVVIEAKHLCMMMRGVEKQNSVMTTSMMLGEMGSNHSSRSEFLNLIR

SEQ ID NO: 9753 - protein, 185 aa, Legionella feeleii
  misc_feature (1)..(185): tr|A0A0W0TN65|A0A0W0TN65_9GAMM GTP cyclohydrolase 1 OS= Legionella feeleii OX=453 GN=folE PE=3 SV=1
MQELYKEIIKRLGEDVNREGLRDTPERAANAIRYLTKGYNENLEDIINNALFESDMSEMVIVKEIEMYSMCEHHLLPFLGKCHVGYLPNGKVLGLSKIARIVDYFARRLQIQERLTSEIAYCIESITGARGVAVVMEAKHLCMMMRGVEKQNSIMTTSVMLGEMRDNPASRSEFLRLISRASSLY

SEQ ID NO: 9754 - protein, 189 aa, Legionella geestiana
  misc_feature (1)..(189): tr|A0A0W0U968|A0A0W0U968_9GAMM GTP cyclohydrolase 1 OS= Legionella geestiana OX=45065 GN=folE PE=3 SV=1
MATGLRNHRNMQELFKKLLTSIGEDPEREGLRDTPARAEAAWQFLTKGYRENLDDIINNALFESDMNEMVVVRDIELYSMCEHHLLPFIGKCHVGYLPGGKVIGLSKIARLVDFYARRLQIQERLTSEIAQTLVRITGARGVAVVVEAKHLCMMMRGVEKQNSVMTTSVMLGAMRDSPETRAEFLRLIR

SEQ ID NO: 9755 - protein, 179 aa, Legionella geestiana
  misc_feature (1)..(179): tr|A0A5E8QZ62|A0A5E8QZ62_9GAMM GTP cyclohydrolase 1 OS= Legionella geestiana OX=45065 GN=folE PE=3 SV=1
MQELFKKLLTSIGEDPEREGLRDTPARAEAAWQFLTKGYRENLDDIINNALFESDMNEMVVVRDIELYSMCEHHLLPFIGKCHVGYLPGGKVIGLSKIARLVDFYARRLQIQERLTSEIAQTLVRITGARGVAVVVEAKHLCMMMRGVEKQNSVMTTSVMLGAMRDSPETRAEFLRLIR

SEQ ID NO: 9756 - protein, 181 aa, Legionella gratiana
  misc_feature (1)..(181): tr|A0A378J1G7|A0A378J1G7_9GAMM GTP cyclohydrolase 1 OS= Legionella gratiana OX=45066 GN=folE PE=3 SV=1
MEQLYKDLLERIGEDVTREGLLDTPARAANAMHYLTKGYKENLEDIINDALFESDMSEMVIVKEIEMYSMCEHHLLPFLGKCHVGYLPHGKVIGLSKIARIVDYYARRLQIQERLTTEIASCIESITGARGVAVVIEAKHLCMMMRGVEKQNSVMTTSVMLGDMRNNPTSRAEFLTLIHGK

SEQ ID NO: 9757 - protein, 180 aa, Legionella hackeliae
  misc_feature (1)..(180): tr|A0A0A8UT98|A0A0A8UT98_LEGHA GTP cyclohydrolase 1 OS= Legionella hackeliae OX=449 GN=folE PE=3 SV=1
MQELYKQILKRIGEDPEREGLRDTPERAVNALLYLTKGYHEQLDEIINDALFESDMSEMVLVKDIEMYSMCEHHLLPFLGKCHVGYLPNGKVLGLSKIARIVDYFARRLQIQERLTSEIANCIQSITGARGVAVVMEAKHLCMMMRGVEKQGSVMTTSVMLGDMRNNTSSRIEFLQLIGS

SEQ ID NO: 9758 - protein, 179 aa, Legionella israelensis
  misc_feature (1)..(179): tr|A0A516MYN0|A0A516MYN0_9GAMM GTP cyclohydrolase 1 OS= Legionella israelensis OX=454 GN=folE PE=3 SV=1
MQEYYRKIIEEIGEDPAREGLRDTPERASNALKYLTKGYSESLKEIINNALFESDMSEMVIVKDIEMYSMCEHHLLPFLGKCHIGYLPNGKVIGLSKLARIVDYFARRLQIQERLTAEIAECIESITGARGVAVVIEAKHLCMMMRGVEKQNSIMTTSVMLGEMKNNPPSRSEFLNLIR

SEQ ID NO: 9759 - protein, 179 aa, Legionella israelensis
  misc_feature (1)..(179): tr|A0A0W0W8R7|A0A0W0W8R7_9GAMM GTP cyclohydrolase 1 OS= Legionella israelensis OX=454 GN=folE PE=3 SV=1
MQEYYRKIIEEIGEDPAREGLRDTPERAANALKYLTKGYSESLKEIINNALFESDMSEMVIVKDIEMYSMCEHHLLPFLGKCHIGYLPNGKVIGLSKLARIVDYFARRLQIQERLTAEIAECIESITGARGVAVVIEAKHLCMMMRGVEKQNSIMTTSVMLGEMKNNPPSRSEFLNLIR

SEQ ID NO: 9760 - protein, 179 aa, Legionella jamestowniensis
  misc_feature (1)..(179): tr|A0A0W0UHZ6|A0A0W0UHZ6_9GAMM GTP cyclohydrolase 1 OS= Legionella jamestowniensis OX=455 GN=folE PE=3 SV=1
MHELYKQILKRIGEDPEREGLRDTPERAANALLYLTKGYHEQLDDIINDALFESDMSEMVIVKDIEMYSMCEHHLLPFLGKCHVGYLPNGKVLGLSKIARIVDYFARRLQIQERLTSEIANCIQSITGARGVAVVMEAKHMCMMMRGVEKQNSVMTTSVMLGDMRNNPSSRSEFLQLIG

SEQ ID NO: 9761 - protein, 179 aa, Legionella jordanis
  misc_feature (1)..(179): tr|A0A0W0VDE1|A0A0W0VDE1_9GAMM GTP cyclohydrolase 1 OS= Legionella jordanis OX=456 GN=folE PE=3 SV=1
MQELYKEILTRIGEDPNREGLRDTPERAANAFRYLTKGYHEHLDDIINEALFESDMSEMVIVKDIEMYSMCEHHLLPFLGKCHVGYLPDGKVLGLSKVARIVDYFARRLQIQERLTTEIAHCIESITNARGVAVVMEAKHLCMMMRGVEKQGSVMTTSVMLGEMRNNPSSRSEFLRLIR

SEQ ID NO: 9762 - protein, 183 aa, Legionella lansingensis
  misc_feature (1)..(183): tr|A0A0W0VIW6|A0A0W0VIW6_9GAMM GTP cyclohydrolase 1 OS= Legionella lansingensis OX=45067 GN=folE PE=3 SV=1
MNLQRVEALIQELLIEMGEDISRKGLKRTPTRFAKALEFLTSGYTEDFKTIINETYFPHNSGLVINKNIAIYSLCEHHLLPFFGICHIGYIPKHQVIGLSKLTRISQTYARRLQVQERLTEQIAKTLMEEINAIGVGVMLNCRHLCNEMRGVEQNQSVMITCSTVGNLGLSEKEFIHFITSLE

SEQ ID NO: 9763 - protein, 179 aa, Legionella lansingensis
  misc_feature (1)..(179): tr|A0A0W0VRL4|A0A0W0VRL4_9GAMM GTP cyclohydrolase 1 OS= Legionella lansingensis OX=45067 GN=folE PE=3 SV=1
MQELYKQILKRIGEDPEREGLLDTPERAASALQYLTKGYHERLEEIINDALFESDMEEMVIVKDIEMYSLCEHHLLPFLGKCHVGYIPNGKVLGLSKVARIVDYYARRLQIQERLTTEIANCIESITGARGVAVVIEAKHLCMMMRGVEKQNSTMTTSVMLGEMRANASSRSEFLRLID

SEQ ID NO: 9764 - protein, 179 aa, Legionella londiniensis
  misc_feature (1)..(179): tr|A0A0W0VIY6|A0A0W0VIY6_9GAMM GTP cyclohydrolase 1 OS= Legionella londiniensis OX=45068 GN=folE PE=3 SV=1
MQELYKQLLEQIGENIDREGLKDTPERAANAIRYLTKGYREDLNEIINDALFESDMSEMVIVKDIEMYSMCEHHLLPFLGKCHVGYLPHGKVLGLSKIARIVDYFARRLQIQERLTTEIANCIAHITNARGVAVVIEARHLCMMMRGVEKQNSIMTTSVMLGDMRNNPSSRMEFLNLIR

SEQ ID NO: 9765 - protein, 179 aa, Legionella longbeachae
  misc_feature (1)..(179): tr|A0A378L355|A0A378L355_LEGLO GTP cyclohydrolase 1 OS= Legionella longbeachae OX=450 GN=folE PE=3 SV=1
MQDLYKTLLIEIGEDVAREGLRDTPERAAKAMRFLTKGYQEDLNEIINDALFESDMSEMVIVKDIELYSMCEHHLLPFLGKCHVGYLPNGKVLGLSKIARIVDYFARRLQIQERLTSEIANCISTITGAHGVAVIIEARHLCMMMRGVEKQNSVMSTSVMLGAMRNNASSRLEFLNLVR

SEQ ID NO: 9766 - protein, 181 aa, Legionella longbeachae
  misc_feature (1)..(181): tr|D3HP13|D3HP13_LEGLN GTP cyclohydrolase 1 OS=Legionel la longbeachae serogroup 1 (strain NSW150) OX=661367 GN =folE PE=3 SV=1
MEQIYTELLKLIGEDVTREGLVDTPARAANAMHYLTKGYQENLDDIINGALFESDMGEMVIVKDIEMYSMCEHHLLPFLGKCHVGYLPHGKVIGLSKIARIVDYFARRLQIQERLTTEIANCIESITGARGVAVVIEAKHLCMMMRGVEKQNSVMKTSVMLGEMRNNPTSRAEFLTLIHGK

SEQ ID NO: 9767 - protein, 181 aa, Legionella maceachernii
  misc_feature (1)..(181): tr|A0A0W0W6U1|A0A0W0W6U1_9GAMM GTP cyclohydrolase 1 OS= Legionella maceachernii OX=466 GN=folE PE=3 SV=1
MQELYKQILESIGEDIEREGLRSTPERAANALRYLTKGYHENLDEIINDALFDSDMSEMVIVKEIEMYSMCEHHLLPFLGKCHVGYIPNGKVLGLSKIARIVDYFARRLQIQERLTLEIADCISSITNARGVAVVIEAKHLCMMMRGVEKQDSVMTTSVMLGEMRDNASSRSEFLRLISKN

SEQ ID NO: 9768 - protein, 181 aa, Legionella massiliensis
  misc_feature (1)..(181): tr|A0A078KS91|A0A078KS91_9GAMM GTP cyclohydrolase 1 OS= Legionella massiliensis OX=1034943 GN=folE PE=3 SV=1
MRELYKKILEELGEDVNREGLRDTPERAANAIRYLTKGYNENLSDIINDALFASDMDEMVIVKDIELYSLCEHHLLPFIGKCHVGYLPNGKVIGLSKIARIVDYYARRLQIQERLTSEIATCIESITGARGVAVVIEAKHLCMMMRGVEKQHSIMTTSIMLGEMRSQQSSRSEFLLLAKGQ

SEQ ID NO: 9769 - protein, 179 aa, Legionella moravica
  misc_feature (1)..(179): tr|A0A378K2P4|A0A378K2P4_9GAMM GTP cyclohydrolase 1 OS= Legionella moravica OX=39962 GN=folE PE=3 SV=1
MEQLYKKLIEEVGEDVQREGLVDTPARAANAMRYLTKGYHESLDDIINNALFDSDMSEMVIVKDIELYSLCEHHLLPFIGKCHVGYLPSGKVIGLSKIARIVDFYARRLQIQERMTGEIAHCIEDITGARGVAVVIEAKHLCMMMRGVEKQNSVMTTSVMLGEMHHNSNCRLEFLNLVR

SEQ ID NO: 9770 - protein, 181 aa, Legionella nautarum
  misc_feature (1)..(181): tr|A0A0W0WLB6|A0A0W0WLB6_9GAMM GTP cyclohydrolase 1 OS= Legionella nautarum OX=45070 GN=folE PE=3 SV=1
MQELYKQILESIGEDVEREGLRGTPERAANAFRYLTKGYQENLDEIINDALFDSDMAEMVIVKDIEMYSMCEHHLLPFLGKCHVGYLPNGKVLGLSKIARIVDYFARRLQIQERLTLEIADCIASITNARGVAVVIEAKHLCMMMRGVEKQNSIMTTSVMRGEMQESSLSRSEFLRLISKG

SEQ ID NO: 9771 - protein, 179 aa, Legionella norrlandica
  misc_feature (1)..(179): tr|A0A0A2SXB4|A0A0A2SXB4_9GAMM GTP cyclohydrolase 1 OS= Legionella norrlandica OX=1498499 GN=folE PE=3 SV=1
MEKLYSNLLKELGEDITREGLKDTPGRAANALRYLTKGYNENLDEIINEALFDSDMSEMVIVKDIELYSLCEHHLLPFLGKCHVGYLPHGKVIGLSKIARIVDFYARRLQIQERLTGEIAHCIESITGARGVAVVIEAKHLCMMMRGVEKQNSVMTTSVMLGEMRNSPSSRIEFLNLIS

SEQ ID NO: 9772 - protein, 179 aa, Legionella oakridgensis; identical to SEQ ID NO: 9765
  misc_feature (1)..(179): tr|A0A0W0X4R1|A0A0W0X4R1_9GAMM GTP cyclohydrolase 1 OS= Legionella oakridgensis OX=29423 GN=folE PE=3 SV=1

SEQ ID NO: 9773 - protein, 179 aa, Legionella oakridgensis; identical to SEQ ID NO: 9765
  misc_feature (1)..(179): tr|W0BED7|W0BED7_9GAMM GTP cyclohydrolase 1 OS=Legionel la oakridgensis ATCC 33761 = DSM 21215 OX=1268635 GN=fo lE PE=3 SV=1

SEQ ID NO: 9774 - protein, 181 aa, Legionella parisiensis
  misc_feature (1)..(181): tr|A0A1E5JME8|A0A1E5JME8_9GAMM GTP cyclohydrolase 1 OS= Legionella parisiensis OX=45071 GN=folE PE=3 SV=1
MEKLYKELLIQLGEDVTREGLVDTPLRAANAMRYLTKGYNESLEEIINDALFDSDMSEMVILKDIEMYSMCEHHLLPFLGKCHVGYIPNGKVIGLSKIARIVDYFARRLQIQERLTTEIASCLEAITGARGVAVVIEAKHLCMMMRGVEKQNSIMTTSVMLGDMRNNPTSRSEFLTLTRNN

SEQ ID NO: 9775 - protein, 179 aa, Legionella pneumophila
  misc_feature (1)..(179): tr|A0A140IZ67|A0A140IZ67_LEGPN GTP cyclohydrolase 1 OS= Legionella pneumophila subsp. pascullei OX=91890 GN=fol E PE=3 SV=1
MEKLYSNLLKELGEDISREGLKDTPGRAANALRYLTKGYNENLDEIINGALFDSDMSEMVIVKDIELYSLCEHHLLPFLGKCHVGYLPDGKVIGLSKIARIVDFYARRLQIQERLTGEIAHCIESITGARGVAVVIEAKHLCMMMRGVEKQNSVMTTSVMLGEMRNNSSCRLEFLNLIR

SEQ ID NO: 9776 - protein, 188 aa, Legionella pneumophila
  misc_feature (1)..(188): tr|Q5ZRW0|Q5ZRW0_LEGPH GTP cyclohydrolase 1 OS=Legionel la pneumophila subsp. pneumophila (strain Philadelphia 1 / ATCC 33152 / DSM 7513) OX=272624 GN=folE2 PE=3 SV=1
MAARLGILAMEKLYSNLLKELGEDINREGLKDTPGRAANALRYLTKGYNENLDEIINGALFDSDMSEMVIVKDIELYSLCEHHLLPFLGKCHVGYLPDGKVIGLSKIARIVDFYARRLQIQERLTGEIAHCIESTTGARGVAVVIEAKHLCMMMRGVEKQNSVMTTSVMLGEMRNNSSCRLEFLNLIR

SEQ ID NO: 9777 - protein, 179 aa, Legionella quateirensis
  misc_feature (1)..(179): tr|A0A378L0A0|A0A378L0A0_9GAMM GTP cyclohydrolase 1 OS= Legionella quateirensis OX=45072 GN=folE PE=3 SV=1
MEQLYKKLLEEVGEDIKREGLVDTPARAANAMRYLTKGYTESLDDIINGALFDSDMNEMVIVKDIELYSLCEHHLLPFIGKCHVGYLPNGKVIGLSKIARIVDFYARRLQIQERMTGEIARCVEDITGARGVAVVVEAKHLCMMMRGVEKQNSVMTTSVMLGEMRQNSNSRLEFLNLVR

SEQ ID NO: 9778 - protein, 180 aa, Legionella quinlivanii
  misc_feature (1)..(180): tr|A0A364LLE0|A0A364LLE0_9GAMM GTP cyclohydrolase 1 OS= Legionella quinlivanii OX=45073 GN=folE PE=3 SV=1
MHELYTKILEEIGEDPNREGLKDTPKRAATAFQYLTKGYNEDLQDIINNALFESDMSEMVIVKDIELYSMCEHHLLPFLGKCHVGYLPNGKVLGLSKVARIVEYFARRLQIQERLTMEIASCIESITGAKGVAVVIEAKHLCMMMRGVEKQNSSMLTSVMLGAMRQNVSSRAEFLSLIGK

SEQ ID NO: 9779 - protein, 180 aa, Legionella quinlivanii
  misc_feature (1)..(180): tr|A0A0W0Y4M4|A0A0W0Y4M4_9GAMM GTP cyclohydrolase 1 OS= Legionella quinlivanii OX=45073 GN=folE PE=3 SV=1
MHELYTKILEEIGEDPNREGLRDTPKRAATAFQYLTKGYNEDLQDIINNALFESDMSEMVIVKDIELYSMCEHHLLPFLGKCHVGYLPNGKVLGLSKVARIVEYFARRLQIQERLTMEIASCIESITGAKGVAVVIEAKHLCMMMRGVEKQNSSMLTSVMLGDMRQNVSSRAEFLSLIGK

SEQ ID NO: 9780 - protein, 179 aa, Legionella rubrilucens
  misc_feature (1)..(179): tr|A0A0W0XQJ5|A0A0W0XQJ5_9GAMM GTP cyclohydrolase 1 OS= Legionella rubrilucens OX=458 GN=folE PE=3 SV=1
MQELYKKILEEIGEDPSREGLRDTPERAANAIRYLTKGYTEDLNDIINNALFESDMSEMVIVKEIELYSMCEHHLLPFLGKCHVGYLPSGKVLGLSKIARIVDYFARRLQIQERLTAEIAACIENITGARGVGVVIEAKHLCMMMRGVEKQNSVMTTSVMLGDMRNNSNTRSEFLKLIR

SEQ ID NO: 9781 - protein, 181 aa, Legionella sainthelensi
  misc_feature (1)..(181): tr|A0A0W0YND7|A0A0W0YND7_9GAMM GTP cyclohydrolase 1 OS= Legionella sainthelensi OX=28087 GN=folE PE=3 SV=1
MEQLYTELLKLIGEDVTREGLIDTPARAANAMHYLTKGYQENLEDIINGALFESDMSEMVIVKDIEMYSMCEHHLLPFLGKCHVGYLPHGKVIGLSKIARIVDYFARRLQIQERLTTEIANCIESITGARGVAVVIEAKHLCMMMRGVEKQNSVMTTSVMLGDMRNNPTSRSEFLTLIHGK

SEQ ID NO: 9782 - protein, 181 aa, Legionella sainthelensi
  misc_feature (1)..(181): tr|A0A447SUK2|A0A447SUK2_9GAMM GTP cyclohydrolase 1 OS= Legionella sainthelensi OX=28087 GN=folE PE=3 SV=1
MEQLYTELLKLIGEDVTREGLIDTPARAANAMHYLTKGYQENLEDIINGALFESDMSEMVIVKDIEMYSMCEHHLLPFLGKCHVGYLPHGKVIGLSKIARIVDYFARRLQIQERLTTEIANCIESITGARGVAVVIEAKHLCMMMRGVEKQNSVMTTSVMLGDMRNNPTSRAEFLTLIHRK

SEQ ID NO: 9783 - protein, 181 aa, Legionella santicrucis
  misc_feature (1)..(181): tr|A0A0W0Z8J2|A0A0W0Z8J2_9GAMM GTP cyclohydrolase 1 OS= Legionella santicrucis OX=45074 GN=folE PE=3 SV=1
MEQLYTELLKLIGEDVTREGLVDTPTRAANAMHYLTKGYQENLEDIINGALFESDMSEMVIVKDIEMYSMCEHHLLPFLGKCHVGYLPHGKVIGLSKIARIVDYFARRLQIQERLTTEIANCIESITGARGVAVVIEAKHLCMMMRGVEKQNSVMTTSVMLGDMRNNPTSRAEFLTLIHGK

SEQ ID NO: 9784 - protein, 179 aa, Legionella shakespearei
  misc_feature (1)..(179): tr|A0A0W0YQT4|A0A0W0YQT4_9GAMM GTP cyclohydrolase 1 OS= Legionella shakespearei DSM 23087 OX=1122169 GN=folE PE =3 SV=1
MEQLYKKLLKELGEDVTREGLIDTPARATNAMRYLTKGYTENIDDIINGALFESEMSEMVIVKDIELYSLCEHHLLPFLGKCHVGYLPNSKVIGLSKIARIVDFYARRLQIQERLTGEIAQCIESITGAHGVAVVIEAKHLCMMMRGVEKQNSVMTTSVMLGEMRSNADSRMEFLNLTR

SEQ ID NO: 9785 - protein, 182 aa, Legionella sp.
  misc_feature (1)..(182): tr|A0A1Q4BDY1|A0A1Q4BDY1_9GAMM GTP cyclohydrolase 1 OS= Legionella sp. 40-6 OX=1895903 GN=folE PE=3 SV=1
MHELYKKILLEIGEEPNRQGLIDTPERAANAMRYLTKGYQEDIHDIINNALFDSEMSELVIVKDIELYSLCEHHLLPFFGKCHVGYIPNGKVLGLSKIARIVDLFARRLQIQERLTSEIAHCIEDATQAQGVGVVIEARHLCMMMRGVEKQNSIMSTSVLLGDLRLNPTSRAEFLTLIQSKN

SEQ ID NO: 9786 - protein, 204 aa, Legionella sp.
  misc_feature (1)..(204): tr|A0A1Q3TYH6|A0A1Q3TYH6_9GAMM GTP cyclohydrolase 1 OS= Legionella sp. 39-23 OX=1895902 GN=folE PE=3 SV=1
MQAQKYSIDLDQEQERLDDQDAGDVIKQMLELIGENPDREGLVDTPRRVVDSWKELYEGYSIDPAKVLSTCFSNKKQYNQLVLLRDIEMFSMCEHHMLPFYGRVHIGYIPDNKVVGLSKLARIVECFSRRLQIQEQLTVQIAEAIQTHLNPKGVGVMIECQHLCMVARGVNKQNPYMVTSHFMGILETDPERRKEFNEQITRKL

SEQ ID NO: 9787 - protein, 179 aa, Legionella spiritensis
  misc_feature (1)..(179): tr|A0A0W0Z7H1|A0A0W0Z7H1_LEGSP GTP cyclohydrolase 1 OS= Legionella spiritensis OX=452 GN=folE PE=3 SV=1
MQELYKKILTEIGEDPSREGLRDTPERAANALRYLTKGYHENLYDIINNALFESDMSEMVIVKDIEMYSMCEHHLLPFLGKCYVGYLPNGKVLGLSKIARIVDFFARRLQIQERLTTEIAKCLESITNARGVAVVIEAKHLCMMMRGVEKQNSTMTTSVMLGEMRDNPGSRNEFLRLIR

SEQ ID NO: 9788 - protein, 181 aa, Legionella steelei
  misc_feature (1)..(181): tr|A0A0W0ZP14|A0A0W0ZP14_9GAMM GTP cyclohydrolase 1 OS= Legionella steelei OX=947033 GN=folE PE=3 SV=1
MEKLYKELLTQLGEDVTRQGLVDTPARAANAIRYLTKGYNENLDDIVNDALFDSDMNEMVIVKDIEMYSMCEHHLLPFLGKCHVGYIPNGKVIGLSKMARIVDYFARRLQIQERLTTEIATCLESITGARGVAVVIEAKHLCMMMRGVEKQNSIMTTSVMLGEMRNNPTSRAEFLMLTQGK

SEQ ID NO: 9789 - protein, 181 aa, Legionella steigerwaltii
  misc_feature (1)..(181): tr|A0A378LEQ9|A0A378LEQ9_9GAMM GTP cyclohydrolase 1 OS= Legionella steigerwaltii OX=460 GN=folE PE=3 SV=1
MEKLYKELLTQLGEDVTRQGLIDTPERAANAIRYLTKGYNENLEDIINGALFDSDMSEMVIVKDIEMYSMCEHHLLPFLGKCHVGYIPNGKVIGLSKIARIVDYFARRLQIQERLTTEIANCLQSITGARGVAVVIEAKHLCMMMRGVEKQNSIMTTSVMLGDMRNNPTSRAEFLTLTHGN

SEQ ID NO: 9790 - protein, 179 aa, Legionella taurinensis
  misc_feature (1)..(179): tr|A0A3A5LKD9|A0A3A5LKD9_9GAMM GTP cyclohydrolase 1 OS= Legionella taurinensis OX=70611 GN=folE PE=3 SV=1
MQELYKKILEEIGEDPSREGLRDTPERAANAMRYLTKGYAEDLNDIINNALFESDMSEMVIVKEIELYSMCEHHLLPFLGKCHVGYLPSGKVLGLSKIARIVDYFARRLQIQERLTTEIAACIESITGARGVGVVIEAKHLCMMMRGVEKQNSIMTTSVMLGDMRNNSNTRSEFLKLIR

SEQ ID NO: 9791 - protein, 181 aa, Legionella tucsonensis
  misc_feature (1)..(181): tr|A0A0W0ZTE9|A0A0W0ZTE9_9GAMM GTP cyclohydrolase 1 OS= Legionella tucsonensis OX=40335 GN=folE PE=3 SV=1
MEKLYKELLIQLGEDVTREGLVDTPLRAANAMRYLTKGYNESLEEIINDALFDSDMSEMVIVKDIEMYSMCEHHLLPFLGKCHVGYIPNGKVIGLSKIARIVDYFARRLQIQERLTTEIASCLESITGARGVAVVIEAKHLCMMMRGVEKQNSIMTTSVMLGDMRNNPTSRAEFLTLTLNK

SEQ ID NO: 9792 - protein, 183 aa, Legionella wadsworthii
  misc_feature (1)..(183): tr|A0A378LQF3|A0A378LQF3_9GAMM GTP cyclohydrolase 1 OS= Legionella wadsworthii OX=28088 GN=folE PE=3 SV=1
MEKLYKELLSQLGEDVNRQGLIDTPARAANAMRYLTKGYNESLEEIINGALFDSDMSEMVIVKDIEMYSMCEHHLLPFLGKCHVGYIPNGKVIGLSKIARIVDYFARRLQIQERLTTEIANCLESITGARGVAVVIEAKHLCMMMRGVEKQNSIMTTSVMLGDMRNNPTSRGEFLTLTHNYNK

SEQ ID NO: 9793 - protein, 179 aa, Legionella waltersii
  misc_feature (1)..(179): tr|A0A0W1AK27|A0A0W1AK27_9GAMM GTP cyclohydrolase 1 OS= Legionella waltersii OX=66969 GN=folE PE=3 SV=1
MEQLFSKLIKEIGEDLNREGLRDTPERAANALRYLTKGYFENLDDVINGALFDSDMSEMVIVKDIELYSLCEHHMLPFLGKCHVGYMPNGKVIGLSKIARIVDYFARRLQIQERLTGEIASCIESITGARGVSVVIEAKHLCMMMRGVEKQNSIMTTSVMLGDMRNSASSRAEFLNLIR

SEQ ID NO: 9794 - protein, 179 aa, Legionella worsleiensis
  misc_feature (1)..(179): tr|A0A0W1AF57|A0A0W1AF57_9GAMM GTP cyclohydrolase 1 OS= Legionella worsleiensis OX=45076 GN=folE PE=3 SV=1
MEQLYKKLLEDIGEDIQREGLVETPARAANAMRYLTKGYSESLDDIINGALFESDMSEMVIVKDIELYSLCEHHLLPFIGKCHVGYLPNGKVIGLSKIARIVDFYARRLQIQERLTGEIAHCIEQITGARGVAVVVEAKHLCMMMRGVEKQNSVMTTSVMLGEMRHNSSCRLEFLNLIR

SEQ ID NO: 9795 - protein, 187 aa, Legionellaceae bacterium
  misc_feature (1)..(187): tr|A0A2E5Y7R4|A0A2E5Y7R4_9GAMM GTP cyclohydrolase 1 OS= Legionellaceae bacterium OX=2026753 GN=folE PE=3 SV=1
MATRLGFFMQTLYRQIITELGEDAEREGLVNTPLRAANAMRYLTKGYTENLDEILNNALFDSDMSEMVIVKDIELYSMCEHHLLPFIGKCHIGYLPDKKVLGLSKIARIVDHFAKRLQIQERLTSEIAHCMNDVTHARGVAVVVQAKHLCMMMRGVEKQNSSMVTSVMLGDMRHNPVSRAEFLKLID

SEQ ID NO: 9796 - protein, 225 aa, Legionellaceae bacterium
  misc_feature (1)..(225): tr|A0A2E2WLD7|A0A2E2WLD7_9GAMM GTP cyclohydrolase 1 OS= Legionellaceae bacterium OX=2026753 GN=folE PE=3 SV=1
MDLEKQLKDIEAMGNAHAGSSSDTPLRDDAFELSDMEKIAAIKEDVKHILETLGMDLTDDSLKGTPSRVAKMFVQEIFAGLHPDRKPKASTFENKYKYGEMLVEKNITLYSTCEHHLLPIVGKAHIAYISNGTVVGLSKMNRVVDYFAKRPQVQERLTMQIVKELQGILGTDDVACVIDAKHLCVNSRGIRDIDSSTVTSEFGGKFKDPAVRSEFLDYIKLETEF

SEQ ID NO: 9797 - protein, 180 aa, Legionellales bacterium
  misc_feature (1)..(180): tr|A0A1G0X354|A0A1G0X354_9GAMM GTP cyclohydrolase 1 OS= Legionellales bacterium RIFCSPHIGHO2_12_FULL_37_14 OX=1 798568 GN=folE PE=3 SV=1
MQHLFKEILKSIGEDPTREGLVRTPERAADALSYLTQGYKQNFNEIINGAIFESTMNEMVIVKNIEMYSMCEHHLLPFHGQCHVGYLPNGKIIGLSKIARIVDYYARRLQVQERLSLEIAECIESITGARGVGVVIEAKHLCMMMRGVTKQNSTMATSVMLGEMRNNPSSRMEFIQLIHS

SEQ ID NO: 9798 - protein, 185 aa, Legionellales bacterium
  misc_feature (1)..(185): tr|A0A2E2TIX9|A0A2E2TIX9_9GAMM GTP cyclohydrolase 1 OS= Legionellales bacterium OX=2026754 GN=folE PE=3 SV=1
MQEKLITNFREIISSIGEDLNRDGLKKTPERAASAFEFLTQGYQQNLDEIINEAVFESDNDEMVIVRNIELYSLCEHHLLPFTGKCHVAYIPTGKVLGLSKIARIVDYFARRLQIQETLTKEIADTIMQATNAEGVGVIIEAKHLCMMMRGVEKQNSTMTTSMMLGSFRHEASTRNEFLTLAMKD

SEQ ID NO: 9799 - protein, 191 aa, Leifsonia aquatica
  misc_feature (1)..(191): tr|U2RRL7|U2RRL7_LEIAQ GTP cyclohydrolase 1 OS=Leifsoni a aquatica ATCC 14665 OX=1358026 GN=folE PE=3 SV=1
MTGFDRARIEAAVAEILAAIGEDPSRPGLASTPSRVADAYAEFFSGVGVDASALLGEPVPLESDHADTVILRDIAFRSVCEHHLLPFVGVAHVAYLPGESVVGLGRIPRVIDALAARPQLQERLTEQIADAVESGAGARGVLVVLDASHACVTTRGPRQTAATTVTVATRGAYTDPVARAELMALIGSGAA

SEQ ID NO: 9800 - protein, 198 aa, Leifsonia flava
  misc_feature (1)..(198): tr|A0A4Y9RAJ8|A0A4Y9RAJ8_9MICO GTP cyclohydrolase 1 OS= Leifsonia flava OX=2561933 GN=folE PE=3 SV=1
MTGVDRPRIEAAVTELLLAIGEDPSRPGLVKTPKRVADSYAEFFGGLEVDPVSHLLDAVPLGSSDDGLPQTSDAVIVRGIDFRSICEHHLLPFVGIVHVAYLPGERIVGLGKLADVVETLSTRPQLQERLTEEIADALETGLAARGVLVVMDAVHRCVVARGSRQAGSSTVTVASRGELTDAVARAELMALIGESPRG

SEQ ID NO: 9801 - protein, 195 aa, Leifsonia rubra
  misc_feature (1)..(195): tr|S7VY00|S7VY00_9MICO GTP cyclohydrolase 1 OS=Leifsoni a rubra CMS 76R OX=1348338 GN=folE PE=3 SV=1
MSIDVARIEAAVAEMLSAVGEDPARAGLTATPRRVAEAYSEFFAGNELNALDHLSDSIEFTAKADQTGELVLVRDIEFRSMCEHHLLPFLGVAHVAYVPDERIIGLGNIARVVETISARAQLQERLTEEITDAINDGLSPRGVLVVIDAVHGCVSTRGPRQTASSTVTLASRGILGDPLERAEVMALIGSRGGDG

SEQ ID NO: 9802 - protein, 192 aa, Leifsonia sp.
  misc_feature (1)..(192): tr|A0A1H4BVN6|A0A1H4BVN6_9MICO GTP cyclohydrolase 1 OS= Leifsonia sp. 21MFCrub1.1 OX=1798223 GN=folE PE=3 SV=1
MSGIDRPRIEAAVAEILAAIGEDPARPGLESTPSRVADSYAEFFAGIGRDAEADLGEPVPLEEGRQAETVLLRDIEFRSVCEHHLLPFVGVAHVAYLPGDTVIGLGRIPRAIDTLASRPQIQERLTEQIADTIEQGAAARGVLVVLDAAHSCVTTRGPRQTGSTTVTVAARGAYTDPVVRAELIALIGRGVK

SEQ ID NO: 9803 - protein, 220 aa, Leifsonia sp.
  misc_feature (1)..(220): tr|A0A421AEY0|A0A421AEY0_9MICO GTP cyclohydrolase 1 OS= Leifsonia sp. M321 24_2 OX=2183919 GN=folE PE=3 SV=1
MSLTTESHEDDPPLHPVPDPLPGPRTAAVDRLRAEAAIADLLNALGRDTRDPQLADTPRRVAAAFAELLDAPPLRPTTFPNDEQYDDLVLVRGIPFTSLCAHHLLPFRGVAHVGYLPGDRLLGLSKLARAVEHFSRDLQLQERLTAQVADWLDTELAPRGVGVVLEAEHLCMAIRGVRAPGAVTRTSRFTGELASTGARRFAEASSFDAASPFDEWRAER

SEQ ID NO: 9804 - protein, 191 aa, Leifsonia xyli
  misc_feature (1)..(191): sp|Q6ACQ1|GCH1_LEIXX GTP cyclohydrolase 1 OS=Leifsonia xyli subsp. xyli (strain CTCB07) OX=281090 GN=folE PE=3 SV=1
MTGFDRARIEAAVAEILAAVGEDPSRPGLSATPSRVADAYAEFFAGLGRDAEAELGEPVPLEQGQAETVILREISFRSVCEHHLLPFIGVAHVAYLPGEAVIGLGRIPRVIDTLAARPQVQERLTEQIADTFEAGAGARGVLVVLSAEHGCVTARGPRQVAATTVTLAARGEFAEPAARAELIALIGCGAA

SEQ ID NO: 9805 - protein, 191 aa, Leifsonia xyli; identical to SEQ ID NO: 9804
  misc_feature (1)..(191): tr|A0A1E2SIU1|A0A1E2SIU1_LEIXY GTP cyclohydrolase 1 OS= Leifsonia xyli subsp. xyli OX=59736 GN=folE PE=3 SV=1

SEQ ID NO: 9806 - protein, 367 aa, Leisingera aquaemixtae
  misc_feature (1)..(367): tr|A0A0P1H8U4|A0A0P1H8U4_9RHOB GTP cyclohydrolase FolE2 OS=Leisingera aquaemixtae OX=1396826 GN=folE2 PE=3 SV= 1
MNIHNRDAVEAPDREAAAAALDVLRAWAGTVTETEIAELDPAVARLLPGREVGNYPELSRQYPEDFKSDEAYRATLPDLQNGPTSLIRGAKEQIQHVGISNFRLPIRFHTRDDGDLTLETSVTGTVSLDAGKKGINMSRIMRTFYKHAERTFSFEVMARALDDYLSDLDSPDARIQMRFSFPARVESLRSGLSGYQYYDFALELVDHDGVREKIMHLDYVYSSTCPCSLELSEHARQARGQLATPHSQRSVARISVQSVPGSQCLWFEDLIELCRKAVPTETQVMVKREDEQAFAELNAANPIFVEDAARLFCEALQGDPRIGDFRVVASHQESLHSHDAVSVLTQGPLFKAMSLDPKLFATLIHHG

SEQ ID NO: 9807 - protein, 367 aa, Leisingera methylohalidivorans
  misc_feature (1)..(367): tr|V9VQL5|V9VQL5_9RHOB GTP cyclohydrolase FolE2 OS=Leis ingera methylohalidivorans DSM 14336 OX=999552 GN=folE2 PE=3 SV=1
MNIHNRDAAGAPDREAAAAALDVLRAWAGTVTETEIAQLDPAVARLLPGREVGNYPDLSRHYPEDFKSDEAYRATLPDLQNGPTSLIRGAQEQIQHVGISNFRLPIRFHTRDDGDLTLETSVTGTVSLDAAKKGINMSRIMRTFYNHAERTFSFEVMAAALDDYLSDLDSPDARIQMRFSFPARVESLRSGLSGYQYYDFALELVDHDGVREKIMHLDYVYSSTCPCSLELSEHARQSRGQLATPHSQRSVARISVQSVPDSGCLWFEDLIELCRQAVPTETQVMVKREDEQAFAELNAANPIFVEDAARLFCEALQGDARIGDFRVIASHQESLHSHDAVSVLTQGPLFKAMSLDPKLFATLIHQG

SEQ ID NO: 9808 - protein, 367 aa, Leisingera sp.
  misc_feature (1)..(367): tr|A0A0C1G8A4|A0A0C1G8A4_9RHOB GTP cyclohydrolase FolE2 OS=Leisingera sp. ANG-M7 OX=1577902 GN=folE2 PE=3 SV=1
MNMHNRDAAEAPDREAAAAALDVLRAWAGTVTETEIAELDPAVARLLPGREVGNYPELSRQYPEDFKSDEAYRATLPDLQNGPTSLIRGAKEQIQHVGISNFRLPIRFHTRDDGDLTLETSVTGTVSLDAGKKGINMSRIMRTFYKHAESTFSFEVMASALDDYLSDLDSPDARIQMRFSFPARVSSLRSGLSGYQYYDFALELVDHDGVREKIMHLDYVYSSTCPCSLELSEHARHARGQLATPHSQRSVARISVQSVPGSECLWFEDLIELCRKAVPTETQVMVKREDEQAFAELNAANPIFVEDAARLFCEALQADDRIGDFRVIASHQESLHSHDAVSVLTQGPLFKAMSLDPKLFSTLIHQG

SEQ ID NO: 9809 - protein, 367 aa, Leisingera sp.
  misc_feature (1)..(367): tr|A0A481PJ27|A0A481PJ27_9RHOB GTP cyclohydrolase FolE2 OS=Leisingera sp. NJS204 OX=2508307 GN=folE2 PE=3 SV=1
MNIHNRDAAEAPDREAAAAALDVLRAWAGTVTETEIAQLDPAVARLLPGREVGNYPDLSRHYPEDFTSDEAYRATLPDLQNGPTSLIRGAQEQIQHVGISNFRLPIRFHTRDDGDLTLETSVTGTVSLDAGKKGINMSRIMRTFYKHAERTFSFEVMAAALDDYLSDLDSPDARIQMRFSFPARVQSLRSGLSGYQYYDFALELVDHDGVREKIMHMDYVYSSTCPCSLELSEHARQSRGQLATPHSQRSVARISLQSVPGSDCLWFEDLIELCRQAVPTETQVMVKREDEQAFAELNAANPIFVEDAARLFCEALQGDARIGDFRVVASHQESLHSHDAVSVLTQGPLFKAMSLDPKLFSTLIHQG

SEQ ID NO: 9810 - protein, 222 aa, Lelliottia amnigena
  misc_feature (1)..(222): tr|A0A1A9FEB8|A0A1A9FEB8_LELAM GTP cyclohydrolase 1 OS= Lelliottia amnigena OX=61646 GN=folE PE=3 SV=1
MPSLSKEAALVHEALVARGLETPLRPPVNELDNETRKRLISGHMTEIMQLLNLDLSDDSLMETPQRIAKMYVDEIFSGLDYANFPKITVIENKMNVDEMVTVRDITLTSTCEHHFVTIDGKATVAYIPKDTVIGLSKINRIVQFFAQRPQVQERLTQQILTALQTLLGTNNVAVSIDAVHYCVKARGVRDATSATTTTSLGGLFKSSQNTRQEFLRAVRHHN

SEQ ID NO: 9811 - protein, 222 aa, Lelliottia amnigena
  misc_feature (1)..(222): tr|A0A3S5XR66|A0A3S5XR66_LELAM GTP cyclohydrolase 1 OS= Lelliottia amnigena OX=61646 GN=folE PE=3 SV=1
MPSLSKEAALVHEALVARGLETPLRPPVTELDNETRKRLIAGHMTEIMQLLNLDLSDDSLMETPQRIAKMYVDEIFSGLDYANFPKITVIENKMKVDEMVTVREITLTSTCEHHFVTIDGKATVAYIPKDTVIGLSKINRIVQFFAQRPQVQERLTQQILTALQTLLGTNNVAVSIDAVHYCVKARGVRDATSATTTTSLGGLFKSSQNTRQEFLRAVRHHN

SEQ ID NO: 9812 - protein, 222 aa, Lelliottia nimipressuralis
  misc_feature (1)..(222): tr|A0A4Q0W576|A0A4Q0W576_9ENTR GTP cyclohydrolase 1 OS= Lelliottia nimipressuralis OX=69220 GN=folE PE=3 SV=1
MPSLSKEAALVHEALVARGLETPLRPPVNELDNETRKRLISGHMTEIMQLLNLDLSDDSLMETPNRIAKMYVDEIFSGLDYANFPKITVIENKMKVDEMVTVRDITLTSTCEHHFVTIDGKATVAYIPKDTVIGLSKINRIVQFFAQRPQVQERLTQQILTALQTLLGTNNVAVSIDAVHYCVKARGVRDATSATTTTSLGGLFKSSQNTRQEFLRAVRHHN

SEQ ID NO: 9813 - protein, 222 aa, Lelliottia nimipressuralis; identical to SEQ ID NO: 7844
  misc_feature (1)..(222): tr|A0A1J5WNQ6|A0A1J5WNQ6_9ENTR GTP cyclohydrolase 1 OS= Lelliottia nimipressuralis OX=69220 GN=folE PE=3 SV=1

SEQ ID NO: 9814 - protein, 222 aa, Lelliottia sp.
  misc_feature (1)..(222): tr|A0A2S5C851|A0A2S5C851_9ENTR GTP cyclohydrolase 1 OS= Lelliottia sp. 7254-16 OX=2080842 GN=folE PE=3 SV=1
MPSLSKEAALVHEALVARGLETPLRPPVNELDKETRKRLISGHMTEIMQLLNLDLSDDSLMETPNRIAKMYVDEIFSGLDYANFPKITVIENKMKVDEMVTVRDITLTSTCEHHFVTIDGKATVAYIPKDTVIGLSKINRIVQFFAQRPQVQERLTQQILTALQTLLGTNNVAVSIDAVHYCVKARGVRDATSATTTTSLGGLFKSSQNTRQEFLRAVRHHN

SEQ ID NO: 9815 - protein, 223 aa, Leminorella grimontii
  misc_feature (1)..(223): tr|A0A085HKD9|A0A085HKD9_9GAMM GTP cyclohydrolase 1 OS= Leminorella grimontii ATCC 33999 = DSM 5078 OX=1005999 GN=folE PE=3 SV=1
MSSLSQEAILVHAALEAKGLETPLRGTPVDADTRKQKIEEHMTAIMGLLNLDLTDDSLAETPSRIAKMYVDEVFSGLDYANFPKITLIENKMRVDEMVTVRDITLTSTCEHHFVTIDGKATVAYIPKDYVIGLSKINRIVRFFSQRPQVQERLTQQILVALQTLLGTTNVAVSIDAIHYCVKSRGVCDATSSTSTTSLGGIFKSNPSTRQEFLRSVRHAPHHP

SEQ ID NO: 9816 - protein, 223 aa, Leminorella grimontii; identical to SEQ ID NO: 9815
  misc_feature (1)..(223): tr|A0A485AFJ2|A0A485AFJ2_9GAMM GTP cyclohydrolase 1 OS= Leminorella grimontii OX=82981 GN=folE PE=3 SV=1

SEQ ID NO: 9817 - protein, 223 aa, Leminorella richardii
  misc_feature (1)..(223): tr|A0A2X4V3U9|A0A2X4V3U9_9GAMM GTP cyclohydrolase 1 OS= Leminorella richardii OX=158841 GN=folE PE=3 SV=1
MSSLSQEAMLVHAALEAKGLETPLRGAPVDAATSKQQIEEHMTAIMRLLNLDLTDDSLAETPSRIAKMYVDEIFSGLDYANFPKITLIENKMSVDEMVTVRDITLTSTCEHHFVTIDGKATVAYIPKDYVIGLSKINRIVRFFSQRPQVQERLTQQILVALQTLLGTTNVAVSIDAIHYCVKSRGVCDATSSTSTTSLGGLFKSNPSTRQEFLRSVRHAPHHP

SEQ ID NO: 9818 - protein, 308 aa, Lentibacillus amyloliquefaciens
  misc_feature (1)..(308): tr|A0A0U4F2T6|A0A0U4F2T6_9BACI GTP cyclohydrolase FolE2 OS=Lentibacillus amyloliquefaciens OX=1472767 GN=folE2 PE=3 SV=1
MNKVRSISNKQLPNKAQRHKLFGSVEPGPRTKPSEKSKMADLQNSKEDFLFDLDEVGIANVKHPITVASSLEPKSQTTIGTFEFSSSIDKSSKGTNMSRFTEQLQAFHQKGFVIDIKTLKIFTKDLAERLDQKDAEIKVSFPWFYERRGPQSDLPGMNHADITICVNYDQSAGYTVEASMSALITTLCPCSKEISEYSAHNQRGEVSINVSLIEDFDEESADWKAFLLEAAESNASARLHPVLKRPDEKMVTEQAYENPRFVEDLARLVAADLYEMPFVAKFQVKCRNEESIHMHDAIASITYDKSQQ

SEQ ID NO: 9819 - protein, 314 aa, Lentibacillus halodurans
  misc_feature (1)..(314): tr|A0A1I0VHB3|A0A1I0VHB3_9BACI GTP cyclohydrolase FolE2 OS=Lentibacillus halodurans OX=237679 GN=folE2 PE=3 SV =1
MDKVRTISKKQLPDKAQRHKLFGSVEPGPRTKPREKSKMADLQNTREDFLFDLDAVGIANVKHPITVASNLEPKTQTTVGTFEFSSSIDKSSKGTNMSRFTEQLQAFHQKGFVINLKTLKRFAKDLAERLDQKDAEIKVSYPWFYERRGPQSDLSGMNHADITIRVNYDTSAGCSIEASMSSLITTLCPCSKEISEYSAHNQRGEVTMTVSLTEGFDEETMDWKELLLEAAESNASARLHPVLKRPDEKMVTEQAYENPRFVEDLARLVAADLYEMPFVTRFQVQCRNEESIHMHDAIASITYDKLEDDESQEG

SEQ ID NO: 9820 - protein, 312 aa, Lentibacillus persicus
  misc_feature (1)..(312): tr|A0A1I1V5K4|A0A1I1V5K4_9BACI GTP cyclohydrolase FolE2 OS=Lentibacillus persicus OX=640948 GN=folE2 PE=3 SV=1
MNKVTSISKKQLPDKAQRHKLFGSVEPGPRTKPSEKSKMADLQNSKEDFLFDLDAVGIANVKHPITVASSLEPKTQTTIGTFEFSSRIDKSSKGTNMSRFTEQLQSFHQKGFIIDIKTLKRFAKDLAERLDQKDAEIKVSFPWFYERRGPQSDLSGMNHADITIHVNYDRTKGYTVEASMSALITTLCPCSKEISEYSAHNQRGEVSMKVSLTADFEEEATDWKELLLEAAESNASSRLHPVLKRPDEKMVTEQAYENPRFVEDLTRLVAADLYEMPFVAKFQVKCRNEESIHMHDAVASVTYDKQQEKLEG

SEQ ID NO: 9821 - protein, 313 aa, Lentibacillus salicampi
  misc_feature (1)..(313): tr|A0A4Y9AI51|A0A4Y9AI51_9BACI GTP cyclohydrolase FolE2 OS=Lentibacillus salicampi OX=175306 GN=folE2 PE=3 SV= 1
MDKARTIAKKQLPDKAQRHKLFGSVEPGPRTKPSKKSQMADLQNTKKDFLFDLDAVGIANVKHPITIASNQEPKTQTTIGTFEFSSSIEKSSKGTNMSRFTEQLQEFYQKGLVIDLKTLKGFTKNLAERLDQKDSEIKVQFPWFYERRGPQSGLSGMNHADITIRVKYDTEAGYTIEVSLSSLVTTLCPCSKEISEYSAHNQRGEVTITVSLAEDFDEESMDWKEWLLDAAESNASARLHPVLKRPDEKMVTEHAYENPRFVEDLARLVAADLYEMSFVNKFHVHCRNEESIHMHDAVASITYDKLQSESQEG

SEQ ID NO: 9822 - protein, 189 aa, Lentibacillus sp.
  misc_feature (1)..(189): tr|A0A549YJ65|A0A549YJ65_9BACI GTP cyclohydrolase 1 OS= Lentibacillus sp. NKC851-2 OX=2584959 GN=folE PE=3 SV=1
MAVDHEKIEQAARMMLEAIGEDPDREGLIDTPSRIARMYEEVFQGLNQDPKEYFATIFGEDHEELVLVKDIPFYSMCEHHLVPFYGVAHVGYIPKGGRVTGLSKLARAVEAVTRRPQLQERVTATIADSLKETLDPHGVIVVVEAEHMCMTMRGVKKPGSKTVTSAVRGIFQTDAASRAEVFSLIKGNN

SEQ ID NO: 9823 - protein, 190 aa, Lentibacillus sp.
  misc_feature (1)..(190): tr|A0A4Q3X3G9|A0A4Q3X3G9_9BACI GTP cyclohydrolase 1 OS= Lentibacillus sp. SSKP1-9 OX=2510307 GN=folE PE=3 SV=1
MAVDHAKIEQAARMILEAIGEDPDREGLVETPSRIARMYDEVFQGMNQDPKEYFATIFGEDHEELVLVKDIPFYSMCEHHLVPFYGVAHVGYIPKGGKVTGISKLARAVEAVTRRPQLQERVTATIADSLKETLDPHGVIVVVEAEHMCMTMRGIKKPGSKTVTSAVRGTFQTDAASRAEVFSLIKGNNG

SEQ ID NO: 9824 - protein, 366 aa, Lentibacter algarum
  misc_feature (1)..(366): tr|A0A1H3HVZ4|A0A1H3HVZ4_9RHOB GTP cyclohydrolase FolE2 OS=Lentibacter algarum OX=576131 GN=folE2 PE=3 SV=1
MNKQVGHMIAAPDRAEAKAALARLRAWAQCATPEEVADLDPVISRLLPSGEVQNYPALARAYPDEFEVSEAYKATLPDLQNGPSSLIKGAPRVIQHVGISNFRLPLKFHTRDNGDLTLETSVTGTVSLEAGKKGINMSRIMRSFYKHSASTFSFDIIEAALDDYKTDLESFDARIQMRFSFPMKVASLRSGLEGYQYYDFALELIEVEGVRRKIMHLDYVYSSTCPCSLELSEHARQTRGQLATPHSQRSVARISAEAAQGDCLWFEDLIEMCRAAVPTETQVMVKREDEQAFAELNAANPIFVEDAARLFAQRLEQDERVGDFRVIASHQESLHSHDAVSVLTEGELFESESLDPKLFSTLFHVG

SEQ ID NO: 9825 - protein, 205 aa, Lentimicrobiaceae bacterium
  misc_feature (1)..(205): tr|A0A2E2XZN1|A0A2E2XZN1_9BACT GTP cyclohydrolase 1 OS= Lentimicrobiaceae bacterium OX=2026756 GN=folE PE=3 SV= 1
MEKPLNLLGYEKIEKFNPENLNKLEYHYKEILKLIGEDVNREGLIQTPKRVAKSIQFLTQGHDHDPEEILMSAMFKEDYRQMVLVKDIEIFSMCEHHMIPFIGKAHVAYIPDGYITGLSKIARVVEAYSRRLQVQERLTTQIKNAIQTTLKPLGVAVVIEARHLCMAMRGIQKQHSVTITSDFTGAFERAQTRAEFISLISTSLS

SEQ ID NO: 9826 - protein, 221 aa, Lentimicrobium saccharophilum
  misc_feature (1)..(221): tr|A0A0S7C246|A0A0S7C246_9BACT GTP cyclohydrolase 1 OS= Lentimicrobium saccharophilum OX=1678841 GN=folE PE=3 S V=1
MSSEIVKDMIIENMMDDYEIKDGYQKRDLYNQKTIKKLAGHYREILKLIGEDPTREGLEKTPERVSKAMQFLTHGYDLNPEDILRSAMFKEDYKQMVLVKDIEVYSMCEHHMIPFFGRAHVAYIPNGYIVGLSKIPRIVDAFARRLQVQERLTTQIKECIQNTLKPLGVAVVIEAQHMCMSMRGIQKQNSVTTTSDFTGAFLGEKTRAEFIHLIGSRLHGN

SEQ ID NO: 9827 - protein, 223 aa, Lentisphaera araneosa
  misc_feature (1)..(223): tr|A6DNS0|A6DNS0_9BACT GTP cyclohydrolase 1 OS=Lentisph aera araneosa HTCC2155 OX=313628 GN=folE PE=3 SV=1
MLDTSKTDITLGHEVEAYLASKGQSTPLVKSDLGAKQKIQKIESLFGEIMETLGLDLKDDSLMDSPSRVAKMYVNEIFWGLNPDNFPKCTAIENKMAYDEMVTVSDIKVMSNCEHHFVVIDGFAHVSYIPNKKVIGLSKINRIVDYFSRRPQVQERLTHQIFHTLCYILDTQDVAVVIDATHYCVKSRGIQDASSRTSTSKIGGQFKRNPATRAEFFSQINNK

SEQ ID NO: 9828 - protein, 180 aa, Lentisphaerae bacterium
  misc_feature (1)..(180): tr|A0A1G0Z4N1|A0A1G0Z4N1_9BACT GTP cyclohydrolase 1 OS= Lentisphaerae bacterium GWF2_44_16 OX=1798571 GN=folE P E=3 SV=1
MKKAIREILLKIGEDPDREGLRETPARAAKSFEFLTKGYRENEKDIIKNAIFTEACDDMVILKDIEFYSMCEHHLLPFFGKCSIGYIPKGKIFGVSKLARIVEMYSRRLQLQERLTKQIAQTICDTIQPEGVGVVMQAQHLCMVMRGVEKQHSEMVTSAMLGSFRKEIATRNEFLNLIKM

SEQ ID NO: 9829 - protein, 252 aa, Lentisphaerae bacterium
  misc_feature (1)..(252): tr|A0A1V6FQP6|A0A1V6FQP6_9BACT Putative GTP cyclohydrol ase 1 type 2 OS=Lentisphaerae bacterium ADurb.Bin082 OX =1852899 GN=BWX73_01118 PE=4 SV=1
MLLHDFCAHLETYFTDLHFDDCSNNGLQVEASTEVTKVAFAVDACQATFQQAAAVGAELLVVHHGLSWGSGVRRFKGCIGWRLAELFRNGVSLYACHLPFDAHPTLGNNAGLAAMLGLQDPQPFFQYGGGLIGLYGGLAAPASLEALANILNRKLPTTCRLFPIEKQGLVSRIGVVSGGGADAIPECQELGLDCLVTGEMEHKFYHEARESGIAVIAGGHYATETVGVKLVMQRIQADLGLECVFLDAPTGM

SEQ ID NO: 9830 - protein, 191 aa, Lentisphaerales bacterium
  misc_feature (1)..(191): tr|A0A524N3L3|A0A524N3L3_9BACT GTP cyclohydrolase 1 OS= Lentisphaerales bacterium OX=2448604 GN=folE PE=3 SV=1
MNHERVKDLVTQLLIEIGEDPNREGLRDTPRRVAEVFECLTSGYKSNPDDIVKNAAFTAEANNMIILRDIEVYSLCEHHMLPFFGKCHVGYIPSKTILGISKVARVVDCYARRLQMQERLTAQIADAIRSSVDAEGVGVVMECRHLCMMMRGVEKQNSVMTTSSVLGTFHSSVATRTEFLRLIDGRQPRSA

SEQ ID NO: 9831 - protein, 180 aa, Lentisphaeria bacterium
  misc_feature (1)..(180): tr|A0A3D1K8G9|A0A3D1K8G9_9BACT GTP cyclohydrolase 1 OS= Lentisphaeria bacterium OX=2053569 GN=folE PE=3 SV=1
MKEQIRKILKAIGEDPDRPGLRHTPLRVEKSYQFLTNGYKQDVKKLINNAIYEEECNDMVIVKNIEFYSMCEHHMLPFYGKCHIGYIPDGKVFGVSKLARIVDCYARRLQLQERLTRQIANTILESICPEGVGVVMEAQHMCMRMRGVEKQESLMVTSAMLGSFRKEQSTRMEFLNLIRG

SEQ ID NO: 9832 - protein, 180 aa, Lentisphaeria bacterium
  misc_feature (1)..(180): tr|A0A3D1UP01|A0A3D1UP01_9BACT GTP cyclohydrolase 1 OS= Lentisphaeria bacterium OX=2053569 GN=folE PE=3 SV=1
MEEEIKNILLQLGEDPEREGLKKTPERVRKSLEYLTRGYQQDLEKVVNGAIFEVESQDMVIVRDIEFYSMCEHHMLPFFGKCSIGYIPKGKIFGVSKLARIVDMFARRLQIQERLSNQIARTIYETIQPEGVGVVMEAQHLCMLMRGVQKQNSTMVTSAMFGSFRSQQSTRMEFLKLIKN

SEQ ID NO: 9833 - protein, 214 aa, Lentzea aerocolonigenes
  misc_feature (1)..(214): tr|A0A0F0H6I0|A0A0F0H6I0_LENAE GTP cyclohydrolase 1 OS= Lentzea aerocolonigenes OX=68170 GN=folE PE=3 SV=1
MNDHKDLVAARLLSSRDTEVRTTGTVDLARIEDAVRDILVAVGEDPDRHGLKETPKRVAHAYAELFAGLRVDPIDALGTTFEEGHQELVMVCDIEVQSFCEHHLLPFIGKAHIGYVPGLSGCVAGLSKLARLVDIYARRPQVQERLTTQIADCLHAALDAAGVIVVIECEHTCMTMRGIRKAGARTITSAVRGTLQSDPRTRNEAMELLRRGAA

SEQ ID NO: 9834 - protein, 202 aa, Lentzea aerocolonigenes
  misc_feature (1)..(202): tr|A0A0F0H4C7|A0A0F0H4C7_LENAE GTP cyclohydrolase 1 OS= Lentzea aerocolonigenes OX=68170 GN=folE PE=3 SV=1
MTVITVSRADSGVAEAAEHARAMFTALGIPCDTTSTERTPLRFVRALAELTSGLRLDPTRHLRVQFPPESVNQGVIAAVDVPFVALCEHHVLPFLGRATVAYLPSPGGQIVGLSKLARVIQEFAARPQVQERLGEQVVEALMGHLAASGAACLIRSEHACLTMRGAEAHGAVMVTSHLAGDFTTDAALRTQVMGLAPTCIRR

SEQ ID NO: 9835 - protein, 215 aa, Lentzea albida
  misc_feature (1)..(215): tr|A0A1H9AY90|A0A1H9AY90_9PSEU GTP cyclohydrolase 1 OS= Lentzea albida OX=65499 GN=folE PE=3 SV=1
MTEQQQLDGDAGLTHNGEAGVSARRVFDQARAEAAVRELLLACGEDPDREGLRETPARVARAYRELFAGLYTDADSVLAKTFDESHEELVLVTDIPMFSFCEHHLLPFHGVAHVGYIPNEQGRVTGLSKLARLVDLYSKRPQVQERLTSQVADALVRKLEPRGVIVVMEAEHLCMGMRGVRKPGSRTTTSAVRGLLRTSASTRAEAIELIRGRTR

SEQ ID NO: 9836 - protein, 215 aa, Lentzea albidocapillata
  misc_feature (1)..(215): tr|A0A1W2FHJ3|A0A1W2FHJ3_9PSEU GTP cyclohydrolase 1 OS= Lentzea albidocapillata OX=40571 GN=folE PE=3 SV=1
MTEQNQLDGDAGLTHDGEAGVSARRVFDHARAEAAVRELLIACGEDPDREGLRETPARVARAYRELFAGLYTEPDSVLAKTFDESHEELVLLTDIPMFSFCEHHLLPFHGVAHVGYIPNEHGRVTGLSKLARLVDLYSKRPQVQERLTSQVADALVRKLEPRGVIVVMEAEHLCMGMRGVRKPGSRTTTSAVRGLLRTSASSRAEAIELIRGRSR

SEQ ID NO: 9837 - protein, 182 aa, Lentzea albidocapillata
  misc_feature (1)..(182): tr|A0A1W2F7B0|A0A1W2F7B0_9PSEU GTP cyclohydrolase 1 OS= Lentzea albidocapillata OX=40571 GN=folE PE=3 SV=1
MDLEAAQQAVTDLLKALGKDPYSVHLADTPRRVAEAYAEMLTPREFTMTTFPNDEGYDELVLARSIPVQSLCEHHMLPFHGVAHVGYLPGERILGLSKLARVVEMFARDLQVQERLTKQVADWLQDQLQPLGVGVVIEAEHMCMAHRGVRVSGSRTITSALKGVLRKDPASRQEFFTLVHAA

SEQ ID NO: 9838 - protein, 182 aa, Lentzea flaviverrucosa
  misc_feature (1)..(182): tr|A0A1H9XW75|A0A1H9XW75_9PSEU GTP cyclohydrolase 1 OS= Lentzea flaviverrucosa OX=200379 GN=folE PE=3 SV=1
MDVEAAQQAVTDLLKALGKDPYSVHLADTPRRVAEAYAEMLTPRAFTMTTFPNDEGYDELVLARSIPVQSLCEHHMLPFHGVAHVGYLPGERILGLSKLARVVEMFARDLQVQERLTKQVADWLQDRLQPLGVGVVIEAEHMCMAHRGVRVSGSSTVTSALKGVLRTNPASRQEFFALVHAA

SEQ ID NO: 9839 - protein, 215 aa, Lentzea flaviverrucosa
  misc_feature (1)..(215): tr|A0A1H9X4K6|A0A1H9X4K6_9PSEU GTP cyclohydrolase 1 OS= Lentzea flaviverrucosa OX=200379 GN=folE PE=3 SV=1
MTEQHQRDGDAGLTQDGEAGVSARRVFDHARAEAAVRELLIACGEDPEREGLRETPARVARAYQELFAGLYTDADSVLAKTFDESHEELVLVTDIPMFSFCEHHLLPFHGVAHVGYIPNEHGRVTGLSKLARLVDLYSKRPQVQERLTSQVADALVRKLEPRGVIVVVEAEHLCMGMRGVRKPGSRTTTSAVRGLLRTSASSRAEAIELIRGRSR

SEQ ID NO: 9840 - protein, 208 aa, Lentzea guizhouensis
  misc_feature (1)..(208): tr|A0A1B2HE54|A0A1B2HE54_9PSEU GTP cyclohydrolase 1 OS= Lentzea guizhouensis OX=1586287 GN=folE PE=3 SV=1
MTNTLDRPAPSGSQDLASPGLVDTERVADLVGQLLAAIGEDPGREGLSDTPARVAAWWLSFLSPQPSATPTCFPEQHLSGQLVVIGGMSVWSLCEHHLLPMNLDVAVGYVPDGEVMGLSKFGRIAQQYAGRLQVQERFTREVANEIAAVLGSNDVAVAVRGTHLCMSARGVRMEAARTTTVQSGGRFESDPVLSQQFLTLATDRWRTA

SEQ ID NO: 9841 - protein, 215 aa, Lentzea guizhouensis
  misc_feature (1)..(215): tr|A0A1B2HGD4|A0A1B2HGD4_9PSEU GTP cyclohydrolase 1 OS= Lentzea guizhouensis OX=1586287 GN=folE PE=3 SV=1
MTEHHQLDADAGLTHNGEAGVSARRAFDHARAEAAVRELLIACGEDPEREGLRETPARVARAYRELFAGLYTDADSVLAKTFDESHEELVLVTDIPMFSFCEHHLLPFHGVAHVGYIPNERGRVTGLSKLARLVDLYSKRPQVQERLTSQVADALVRKLEPRGVIVVVEAEHLCMGMRGVRKPGSRTTTSAVRGLLRTSASSRAEAIELIRGRLR

SEQ ID NO: 9842 - protein, 215 aa, Lentzea jiangxiensis
  misc_feature (1)..(215): tr|A0A1H0ND77|A0A1H0ND77_9PSEU GTP cyclohydrolase 1 OS= Lentzea jiangxiensis OX=641025 GN=folE PE=3 SV=1
MTEQHQLDGDAGLTRNGEAGVSARRVFDQARAEAAVRELLVACGEDPEREGLRETPARVARAYRELFAGLYTDADSVLAKTFDESHEELVLVTDIPMFSFCEHHLLPFHGVAHVGYIPNEHGRVTGLSKLARLVDLYSKRPQVQERLTSQVADALVRKLEPRGVIVVVEAEHLCMGMRGVRKPGSRTTTSAVRGLLRTSASSRAEAIELIRGRTR

SEQ ID NO: 9843 - protein, 213 aa, Lentzea sp.
  misc_feature (1)..(213): tr|A0A563EUW2|A0A563EUW2_9PSEU GTP cyclohydrolase 1 OS= Lentzea sp. FXJ1.1311 OX=2591470 GN=folE PE=3 SV=1
MSERTDVDAGLSPNGEAGVAAQRTFDHARAEAAVRELLLACGEDPEREGLRETPARVARAYRELFAGLYTDPDSVLARTFDESHEELVLVTDIPMFSFCEHHLLPFHGVAHVGYIPNEAGRVTGLSKIARLVDLYAKRPQVQERLTSQVADALVRRLEPRGVIVVIEAEHLCMGMRGVRKPGSRTTTSAVRGLLRSQASSRAEAIELIRGRLR

SEQ ID NO: 9844 - protein, 215 aa, Lentzea violacea
  misc_feature (1)..(215): tr|A0A1G9HP69|A0A1G9HP69_9PSEU GTP cyclohydrolase 1 OS= Lentzea violacea OX=128104 GN=folE PE=3 SV=1
MTEQNQLDGDAGLTHDGEAGVSARRVFDHARAEAAVRELLIACGEDPDREGLRETPARVARAYRELFAGLYTEPDSVLAKTFDESHEELVLVTDIPMFSFCEHHLLPFHGVAHVGYIPNEHGRVTGLSKLARLVDLYSKRPQVQERLTSQVADALVRKLEPRGVIVVMEAEHLCMGMRGVRKPGSRTTTSAVRGLLRTSASSRAEAIELIRGRSR

SEQ ID NO: 9845 - protein, 182 aa, Lentzea violacea
  misc_feature (1)..(182): tr|A0A1G9EZM0|A0A1G9EZM0_9PSEU GTP cyclohydrolase 1 OS= Lentzea violacea OX=128104 GN=folE PE=3 SV=1
MDLEAAQQAVTDLLKALGKDPYSVHLADTPRRVAEAYADMLTPRAFTMTTFPNDEGYDELVLARSIPVQSLCEHHMLPFTGVAHVGYLPGERILGLSKLARVVEMFARDLQVQERLTKQVADWLQDQLQPLGVGVVIEAEHMCMAHRGVRVSGSRTITSALKGVLRKNPASRQEFFTLVHAA

SEQ ID NO: 9846 - protein, 215 aa, Lentzea waywayandensis
  misc_feature (1)..(215): tr|A0A1I6ECH2|A0A1I6ECH2_9PSEU GTP cyclohydrolase 1 OS= Lentzea waywayandensis OX=84724 GN=folE PE=3 SV=1
MTENHQLDADAGLTHNGEAGVSAQRVFDHARAEAAVRELLIACGEDPDREGLLETPARVARAYRELFAGLYTDPDSVLAKTFDESHEELVLVTDIPMFSFCEHHLLPFHGVAHVGYIPNEQGRVTGLSKLARLVDLYAKRPQVQERLTSQVADALVRRLEPRGVIVVIEAEHLCMGMRGVRKPGSRTTTSAVRGLLRTSASSRAEAIELIRGRLR

SEQ ID NO: 9847 - protein, 187 aa, Leptolinea tardivitalis
  misc_feature (1)..(187): tr|A0A0P6XDM7|A0A0P6XDM7_9CHLR GTP cyclohydrolase 1 OS= Leptolinea tardivitalis OX=229920 GN=folE PE=3 SV=1
MKNSVSTILKAIGEDPNREGLVNTPSRVAKSYDELLSGYRVDPYKLINGALFEVEYDEMVIVRDIEFYSMCEHHMLPFIGRAHVAYLPDKKVIGLSKIPRIVDMFARRLQVQERMTQQVAQFLDEALHPHGVAVVIEALHLCSMMRGVKKHDSRMTTSAMLGYFRKNLATRTEFLDNISRSAEPLHF

SEQ ID NO: 9848 - protein, 245 aa, Leptolyngbya antarctica
  misc_feature (1)..(245): tr|A0A2W4WJV4|A0A2W4WJV4_9CYAN GTP cyclohydrolase 1 OS= Leptolyngbya antarctica OX=268115 GN=folE PE=3 SV=1
MTIASSNSLNDKTTNGAGSNGAGSNGAVSKGKAHEIRPDRTHSDRKEADQYPIPETSLEDMSDAVHTMLLSVGEDPEREGLLKTPKRVAEAMRFLTSGYQQSLEELVNGAIFNEGHNEMVLVRDINLFSLCEHHMLPFMGRAHVAYIPNQRVVGLSKLARIVEMYSRRLQVQERLNRQIAEAVQEILDPKGVAVVVEASHMCMVMRGVQKPGSWTVTSAMLGSFQEDPKTREEFLSLIRHQPSFF

SEQ ID NO: 9849 - protein, 218 aa, Leptolyngbya boryana
  misc_feature (1)..(218): tr|A0A1Z4JNR8|A0A1Z4JNR8_LEPBY GTP cyclohydrolase 1 OS= Leptolyngbya boryana NIES-2135 OX=1973484 GN=folE PE=3 SV=1
MNPQSSSDLVLPDSSETFAALKTQSKPPVSDAEMMQAVRTLLLGLGEDPDREGLRDTPKRVVKALKFLTQGYNQSLDELLNGAVFHENANEMVLVRDIDLFSSCEHHILPILGRAHVAYIPNGKVIGLSKIARICEMYARRLQVQERLTSQIADALQGLLKPQGVAVVVEASHMCMVMRGVQKPGSWTVTSAMKGVFADDAKTRQEFMDLIRHSPKFN

SEQ ID NO: 9850 - protein, 225 aa, Leptolyngbya boryana
  misc_feature (1)..(225): tr|A0A1Z4JNI4|A0A1Z4JNI4_LEPBY GTP cyclohydrolase 1 OS= Leptolyngbya boryana NIES-2135 OX=1973484 GN=folE PE=3 SV=1
MTLATPNGFSSKNLESRPDRNTQNGQEAKITPPSDETREQMMDAVRTMLVGVGEDPEREGLLKTPKRVADAMRFLTSGYNQSLEELVNGAIFDEGHNEMVLVRDINFFSLCEHHMLPFMGRAHVAYIPNEKVVGLSKLARIVEMYSRRLQVQERLTRQVAEALQEVLQPRGVAVVMEASHMCMVMRGVQKPGSWTVTSAMVGVFQDDQKTREEYLNLIRHQPSFW

SEQ ID NO: 9851 - protein, 231 aa, Leptolyngbya foveolarum
  misc_feature (1)..(231): tr|A0A2W4TY83|A0A2W4TY83_9CYAN GTP cyclohydrolase 1 OS= Leptolyngbya foveolarum OX=47253 GN=folE PE=3 SV=1
MTLSDSIATANGKPGPEVRPSRETKHGHPQCQISQVDPTQDNGPMMDAVHTMLLSVGEDPEREGLLKTPHRVAEAMRFLTQGYSQSLETIVNGAIFDEGHNEMVLVRDINFFSLCEHHMLPFMGRAHVAYIPNQRVVGLSKLARIVEMYARRLQVQERLNRQIADAVQEVLEPRGVAVVMEASHMCMAMRGVQKPGSWTVTSAMVGVFEEDAKTREEFLSLIRHQPGFANY

SEQ ID NO: 9852 - protein, 233 aa, Leptolyngbya frigida
  misc_feature (1)..(233): tr|A0A2T1DX50|A0A2T1DX50_9CYAN GTP cyclohydrolase 1 OS= Leptolyngbya frigida ULC18 OX=2107698 GN=folE PE=3 SV=1
MTIASSQGSNGSESTAKKTKGLTTRPDRNTLGGGQEPKLQTPPEALQDDMMDAVKTILLGVGEDPDREGLLKTPKRVAEAMRFLTSGYHQSLEELVNGAIFDEGHNEMVLVRDITAFSLCEHHMLPFMGKVHVAYIPNQKVVGLSKLARIVEMYSRRLQVQERLTRQIAEAVQTILEPQGVAVVMEATHMCMVMRGVQKPGSWTVTSAMVGVFQEDQKTREEFLNLIRHQPSW

SEQ ID NO: 9853 - protein, 212 aa, Leptolyngbya sp.
  misc_feature (1)..(212): tr|K9EP51|K9EP51_9CYAN GTP cyclohydrolase 1 OS=Leptolyn gbya sp. PCC 7375 OX=102129 GN=folE PE=3 SV=1
MTLSISSDDIRSQLISTETEAPVSDEDMQQAVRTLLLGLGEDPDREGLRDTPKRVVKALKFLTSGYHQSLDELLNGAVFHEDANEMVLVRDIDLFSSCEHHILPILGRAHVAYIPNGKVIGLSKIARICEMYGRRLQVQERLTQQIANALQGLLQPQGVAVVVEASHMCMVMRGVQKPGSWTVTSSMQGVFADDARTRQEFMDLIRHSPSFH

SEQ ID NO: 9854 - protein, 226 aa, Leptolyngbya sp.
  misc_feature (1)..(226): tr|A0A0S3U2R4|A0A0S3U2R4_9CYAN GTP cyclohydrolase 1 OS= Leptolyngbya sp. NIES-3755 OX=1752064 GN=folE PE=3 SV=1
MTIASPNGFSAKNKLESRPDRNTQNGLEAKIKPPSEETSEEMMEAVRTMLVGVGEDPEREGLLKTPKRVADAMRFLTSGYNQSLEELVNGAIFDEGHNEMVLVRDINFFSLCEHHMLPFMGRAHVAYIPNEKVVGLSKLARIVEMYSRRLQVQERLTRQVAEALQEVLQPRGVAVVMEASHMCMVMRGVQKPGSWTVTSAMVGCFQDDQKTREEYLNLIRHQPSFW

SEQ ID NO: 9855 - protein, 314 aa, Leptolyngbya valderiana
  misc_feature (1)..(314): tr|A0A168TJM1|A0A168TJM1_9CYAN GTP cyclohydrolase FolE2 OS=Leptolyngbya valderiana BDU 20041 OX=322866 GN=folE 2 PE=3 SV=1
MPDIASQAKAQVAGKLDWVGMNHIEMPLILETEGQRPVQASARISAFVDLGKEDTRGIHMSRLYLHLDRTLGEQPLSPLMLRRILKDFMASHADLSSQAMVRMDFDYLIKRKSLVSDNAGWKNYPFSLIASMRDGEFALEMAYQVVYSSTCPCSAALARQLIQDQFRKDFAGQDRLDPAQVIEWLGTEEGILATPHSQRSHADIRLQLSPGFEAFPFVEMIDAIEDALKTPVQAAVKREDEQAFALLNGQNLMFCEDAARRVQDALNAKEKVVDFWARCSHFESLHPHNAVSIVTKGIKDGYEPIDGHPSAWHS

SEQ ID NO: 9856 - protein, 216 aa, Leptolyngbya valderiana
  misc_feature (1)..(216): tr|A0A166TTG8|A0A166TTG8_9CYAN GTP cyclohydrolase 1 OS= Leptolyngbya valderiana BDU 20041 OX=322866 GN=folE PE= 3 SV=1
MTSQFSSEFLPSEAAIANIPEATRTQVSTEEMERAVRTLLVGLGEDPDREGLRDTPKRVVKALKFLTQGYNQSLDELLNGAVFHEDTDEMVLVRDIDIFSSCEHHILPIIGRVHVAYIPNGRVIGLSKIARICEMYARRLQVQERLTNRIAEALESILKPQGVAVVVEATHMCMVMRGVEKPGSWTVSSAMRGVFAEDVRTRQEFMSLIRHTPAFH

SEQ ID NO: 9857 - protein, 308 aa, Leptonema illini
  misc_feature (1)..(308): tr|H2CFG0|H2CFG0_9LEPT GTP cyclohydrolase I OS=Leptonem a illini DSM 21528 OX=929563 GN=Lepil_3122 PE=4 SV=1
MTPKELASLRESFPIQDESGLNDFQKLPDETGIAIEEVGINRFRVPLNYRHADGSVMNHDTEATMSVRLRAGKTGINMSRLCLILQDEGNKDTVRSQMIHRLLGRFQTEMRDEPDEDPFEEAHVRLDFSYPVRQQSLKSDNSGWQYYRSFIEGRKIGNEVKLYFGLQYEYSSTCPCSLSLAHQYEDEYRRGLTTEGNGIAAAHAQRSVARVTVEVDPEENFYLEELVQILRGAIPTETQVLVKRVDEQAFAILNGSHPIFVEHVARKLYQTLNNDERILDWSAEVEHQESLHSHNARARIRKGLPGGL

SEQ ID NO: 9858 - protein, 183 aa, Leptospira adleri
  misc_feature (1)..(183): tr|A0A2M9YS55|A0A2M9YS55_9LEPT GTP cyclohydrolase 1 OS= Leptospira adleri OX=2023186 GN=folE PE=3 SV=1
MEEEVVKILKSIGEDPNREGLRDTPKRVSKAYDFLTSGYRADINTLVNGAIFDEPTEGMVLVRDIEMYSLCEHHLLPFYGRAHVAYLPNKKIIGISKIPRIVDVFARRLQVQERLTEQIAYAIQEVLDPQGVAVVIKAKHLCMMMRGVEKQNSELFTSCMLGAFKDNMVTRSEFLDLIRTGST

SEQ ID NO: 9859 - protein, 183 aa, Leptospira alexanderi
  misc_feature (1)..(183): tr|V6HUH8|V6HUH8_9LEPT GTP cyclohydrolase 1 OS=Leptospi ra alexanderi serovar Manhao 3 str. L 60 OX=1049759 GN= folE PE=3 SV=1
MEENIVNILKSIGEDPTREGLLNTPKRVKKAYDFLTSGYHVDITKVVNGAIFEEPTEGMILVRDIEVYSLCEHHLLPFYGRAHVAYLPNKKIIGISKIPRIVDVFARRLQVQERLTEQIAYAVQEVLDPQGVAVVIKAKHLCMMMRGVEKQNSELFTSCLLGAFKENMVTRSEFLDLIRTGST

SEQ ID NO: 9860 - protein, 183 aa, Leptospira alstonii
  misc_feature (1)..(183): tr|M6D9T8|M6D9T8_9LEPT GTP cyclohydrolase 1 OS=Leptospi ra alstonii serovar Sichuan str. 79601 OX=1218565 GN=fo lE PE=3 SV=1
MEEDIVNILKSIGEDPNREGLLDTPKRVKKAYDFLTSGYRADITKIVNGAIFEEPTDGMVLVRDIEMYSLCEHHLLPFYGRAHVAYLPNKKIIGISKIPRIVDVFARRLQVQERLTEQIAYAIQEVLEPQGVGVVIKAKHLCMMMRGVEKQNSELFTSCMLGAFKENMVTRSEFLDLIRTGST

SEQ ID NO: 9861 - protein, 183 aa, Leptospira alstonii; identical to SEQ ID NO: 9860
  misc_feature (1)..(183): tr|T0HBE2|T0HBE2_9LEPT GTP cyclohydrolase 1 OS=Leptospi ra alstonii serovar Pingchang str. 80-412 OX=1218564 GN =folE PE=3 SV=1

SEQ ID NO: 9862 - protein, 194 aa, Leptospira andrefontaineae
  misc_feature (1)..(194): tr|A0A4R9H1D0|A0A4R9H1D0_9LEPT GTP cyclohydrolase 1 OS= Leptospira andrefontaineae OX=2484976 GN=folE PE=3 SV=1
MHFRSEERRDTLENEVTSILKAIGEDPNREGLLNTPKRVRKAYEFLTSGYKADIDTIVNGAIFEEDSQGMVLVRDIEMYSLCEHHLLPFFGKAHVGYIPNKKIIGISKIPRIVDVFARRLQVQERMTEQIAYALMEVLDPLGVAVVIKAKHLCMMMRGVEKQNSELFTSCMLGEFKTNMVTRSEFLDLIRTGST

SEQ ID NO: 9863 - protein, 183 aa, Leptospira bandrabouensis
  misc_feature (1)..(183): tr|A0A4Z1AXL3|A0A4Z1AXL3_9LEPT GTP cyclohydrolase 1 OS= Leptospira bandrabouensis OX=2484903 GN=folE PE=3 SV=1
MENLIEEILKQIGEDPSREGLVKTPNRVKKAYDFLTSGYKADLNQIVNGAIFEESTTGMVLVRDIEMYSLCEHHLLPFYGRAHVAYIPNKKIIGISKIPRIVDVFARRLQVQERLTDQIAQAIQETLDPLGVGVVIKAKHLCMMMRGVEKQNSELFTSSLLGLFKTDPTTRSEFLDLIRTGSH

SEQ ID NO: 9864 - protein, 183 aa, Leptospira barantonii
  misc_feature (1)..(183): tr|A0A2M9YXJ4|A0A2M9YXJ4_9LEPT GTP cyclohydrolase 1 OS= Leptospira barantonii OX=2023184 GN=folE PE=3 SV=1
MEEDIVNILKSIGEDPTREGLLNTPKRVKKAYDFLTSGYRADITKIVNGAIFEEPTDGMVLVRDIEMYSLCEHHLLPFYGRAHVAYLPNKKIIGISKIPRIVDVFARRLQVQERLTEQIAYAIQEVLEPQGVAVVIKAKHLCMMMRGVEKQNSELFTSCMLGAFKENMVTRSEFLDLIRTGST

SEQ ID NO: 9865 - protein, 183 aa, Leptospira barantonii
  misc_feature (1)..(183): tr|A0A5F2BRD3|A0A5F2BRD3_9LEPT GTP cyclohydrolase 1 OS= Leptospira barantonii OX=2023184 GN=folE PE=3 SV=1
MEEDIVNILKSIGEDPTREGLLNTPKRVKKAYDFLTSGYRADITKIVNGAIFEEPTDGMVLVRDIEMYSLCEHHLLPFYGRAHVAYLPNKKIIGISKIPRIVDVFARRLQVQERLTEQIAYAIQDVLEPQGVAVVIKAKHLCMMMRGVEKQNSELFTSCMLGAFKENMVTRSEFLDLIRTGST

SEQ ID NO: 9866 - protein, 183 aa, Leptospira biflexa
  misc_feature (1)..(183): sp|B0SRX6|GCH1_LEPBP GTP cyclohydrolase 1 OS=Leptospira biflexa serovar Patoc (strain Patoc 1 / ATCC 23582 / P aris) OX=456481 GN=folE PE=3 SV=1
MENLIEEILKQIGEDPNREGLVKTPNRVKKAYDFLTSGYKADINQLVNGAIFEENTTGMVLVRDIEMYSLCEHHLLPFYGRAHVAYIPNKKIIGISKIPRIVDVFARRLQVQERLTDQIAQAIQETLDPLGVGVVIKAKHLCMMMRGVEKQNSELFTSSLLGLFKTDPTTRSEFLDLIRTGSH

SEQ ID NO: 9867 - protein, 183 aa, Leptospira biflexa; identical to SEQ ID NO: 9866
  misc_feature (1)..(183): tr|A0A5F2CG89|A0A5F2CG89_LEPBI GTP cyclohydrolase 1 OS= Leptospira biflexa OX=172 GN=folE PE=3 SV=1

SEQ ID NO: 9868 - protein, 183 aa, Leptospira borgpetersenii
  misc_feature (1)..(183): sp|Q04P36|GCH1_LEPBJ GTP cyclohydrolase 1 OS=Leptospira borgpetersenii serovar Hardjo-bovis (strain JB197) OX= 355277 GN=folE PE=3 SV=1
MEENIVNILKSIGEDPTREGLLNTPKRVKKAYDFLTSGYHVDITKVVNGAIFEESTEGMILVRDIEVYSLCEHHLLPFYGRAHVAYLPNKKIIGISKIPRIVDVFARRLQVQERLTEQIAYAVQEVLDPQGVAVVIKAKHLCMMMRGVEKQNSELFTSCLLGAFKENMVTRSEFLDLIRTGST

SEQ ID NO: 9869 - protein, 183 aa, Leptospira borgpetersenii; identical to SEQ ID NO: 9859
  misc_feature (1)..(183): tr|M6WJ65|M6WJ65_LEPBO GTP cyclohydrolase 1 OS=Leptospi ra borgpetersenii serovar Pomona str. 200901868 OX=1192 866 GN=folE PE=3 SV=1

SEQ ID NO: 9870 - protein, 183 aa, Leptospira bourretii
  misc_feature (1)..(183): tr|A0A4R9IRJ1|A0A4R9IRJ1_9LEPT GTP cyclohydrolase 1 OS= Leptospira bourretii OX=2484962 GN=folE PE=3 SV=1
MENLIEEILKQIGEDPSREGLVKTPNRVKKAYDFLTSGYKADLNQLVNGAIFEESTTGMVLVRDIEMYSLCEHHLLPFYGRAHVAYIPNKKIIGISKIPRIVDVFARRLQVQERLTDQIAQAIQETLDPLGVGVVIKAKHLCMMMRGVEKQNSELFTSSLLGLFKTDPTTRSEFLDLIRTGSH

SEQ ID NO: 9871 - protein, 183 aa, Leptospira bouyouniensis
  misc_feature (1)..(183): tr|A0A4R9HM12|A0A4R9HM12_9LEPT GTP cyclohydrolase 1 OS= Leptospira bouyouniensis OX=2484911 GN=folE PE=3 SV=1
MENLIEEILKQIGEDPNREGLVKTPNRVKKAYDFLTSGYKADINQLVNGAIFEENTTGMVLVRDIEMYSLCEHHLLPFYGRAHVAYIPNKKIIGISKIPRIVDVFARRLQVQERLTDQIAQAIQETLDPLGVGVVIKAKHLCMMMRGVEKQNSELFTSSLLGLFKTDSTTRSEFLDLIRTGSH

SEQ ID NO: 9872 - protein, 183 aa, Leptospira brenneri
  misc_feature (1)..(183): tr|A0A2M9Y5Y9|A0A2M9Y5Y9_9LEPT GTP cyclohydrolase 1 OS= Leptospira brenneri OX=2023182 GN=folE PE=3 SV=1
MENLIEEILKQIGEDPAREGLVKTPNRVKKAYDFLTSGYKADLNQIVNGAIFEESTTGMVLVRDIEMYSLCEHHLLPFYGRAHVAYIPNKKIIGISKIPRIVDVFARRLQVQERLTDQIAQAIQETLDPLGVGVVIKAKHLCMMMRGVEKQNSELFTSSLLGLFKTDPTTRSEFLDLIRTGSH

SEQ ID NO: 9873 - protein, 183 aa, Leptospira broomii
  misc_feature (1)..(183): tr|T0F984|T0F984_9LEPT GTP cyclohydrolase 1 OS=Leptospi ra broomii serovar Hurstbridge str. 5399 OX=1049789 GN= folE PE=3 SV=1
MEEEVTKILKAIGEDPSREGLRDTPKRVKKAYEFLTSGYKADIHHIVNNAIFEEDSQGMVLVRDIEMYSLCEHHLLPFFGKAHVGYIPNKKIIGISKIPRIVDIFARRLQVQERMTEQIGNALMEVLDPLGVAVVIKAKHLCMMMRGVEKQNSELFTSCMLGEFKTNMVTRSEFLDLIRTGST

SEQ ID NO: 9874 - protein, 183 aa, Leptospira congkakensis
  misc_feature (1)..(183): tr|A0A4Z1A9R5|A0A4Z1A9R5_9LEPT GTP cyclohydrolase 1 OS= Leptospira congkakensis OX=2484932 GN=folE PE=3 SV=1
MENLIEEILKQIGEDPSREGLVKTPNRVKKAYDFLTSGYKADLNHIVNGAIFEESTTGMVLVRDIEMYSLCEHHLLPFYGRAHVAYIPNKKIIGISKIPRIVDVFARRLQVQERLTDQIAQAIQETLDPLGVGVVIKAKHLCMMMRGVEKQNSELFTSSLLGLFKTDPTTRSEFLDLIRTGSH

SEQ ID NO: 9875 - protein, 183 aa, Leptospira dzianensis
  misc_feature (1)..(183): tr|A0A5F2AS66|A0A5F2AS66_9LEPT GTP cyclohydrolase 1 OS= Leptospira dzianensis OX=2484905 GN=folE PE=3 SV=1
MEDNIVNILKSIGEDPNREGLLNTPKRVKKAYDFLTSGYHADITKIVNGAIFEEPTDGMVLVRDIEMYSLCEHHLLPFYGRAHVAYLPNKKIIGISKIPRIVDVFARRLQVQERLTEQIAYAIQDVLEPQGVAVVIKAKHLCMMMRGVEKQNSELFTSCMLGAFKENMVTRSEFLDLIRTGST

SEQ ID NO: 9876 - protein, 183 aa, Leptospira dzianensis
  misc_feature (1)..(183): tr|A0A5F2EBJ4|A0A5F2EBJ4_9LEPT GTP cyclohydrolase 1 OS= Leptospira dzianensis OX=2484905 GN=folE PE=3 SV=1
MEDNIVNILKSIGEDPNREGLLDTPKRVKKAYDFLTSGYHADITKIVNGAIFEEPTDGMVLVRDIEMYSLCEHHLLPFYGRAHVAYLPNKKIIGISKIPRIVDVFARRLQVQERLTEQIAYAIQDVLEPQGVAVVIKAKHLCMMMRGVEKQNSELFTSCMLGAFKENMVTRSEFLDLIRTGST

SEQ ID NO: 9877 - protein, 194 aa, Leptospira dzoumogneensis
  misc_feature (1)..(194): tr|A0A4Z1AL33|A0A4Z1AL33_9LEPT GTP cyclohydrolase 1 OS= Leptospira dzoumogneensis OX=2484904 GN=folE PE=3 SV=1
MHFQSEERRDNLENEVTSILKAIGEDPNREGLLNTPKRVRKAYEFLTSGYRADIDTLVNGAIFEEDSQGMVLVRDIEMYSLCEHHLLPFFGKAHVGYIPNKKIIGISKIPRIVDVFARRLQVQERMTEQIAYALMEVLDPLGVAVVIKAKHLCMMMRGVEKQNSELFTSCMLGEFKTNMVTRSEFLDLIRTGST

SEQ ID NO: 9878 - protein, 183 aa, Leptospira ellinghausenii
  misc_feature (1)..(183): tr|A0A2P2DFN9|A0A2P2DFN9_9LEPT GTP cyclohydrolase 1 OS= Leptospira ellinghausenii OX=1917822 GN=folE PE=3 SV=1
MENLIEEILKQIGEDPNREGLVKTPNRVKKAYDFLTSGYKADINQLVNGAIFEESTTGMVLVRDIEMYSLCEHHLLPFYGRAHVAYIPNKKIIGISKIPRIVDVFARRLQVQERLTDQIAQAIQETLDPLGVGVVIKAKHLCMMMRGVEKQNSELFTSSLLGVFKTDPTTRSEFLDLIRTGSH

SEQ ID NO: 9879 - protein, 194 aa, Leptospira elllisii
  misc_feature (1)..(194): tr|A0A2N0BPR0|A0A2N0BPR0_9LEPT GTP cyclohydrolase 1 OS= Leptospira elllisii OX=2023197 GN=folE PE=3 SV=1
MREKRTEESFTLEEEVVKILKSIGEDPNREGLLNTPSRVKKAYDFLTSGYRADITKIVNGAIFEEPTEGMVLVRDIEMYSLCEHHLLPFYGKAHVAYLPNKKIIGISKIPRIVDVFARRLQVQERLTEQIAYAIQEVLDPQGVAVVIKAKHLCMMMRGVEKQNSELFTSCMLGAFKENMVTRSEFLDLIRTGST

SEQ ID NO: 9880 - protein, 217 aa, Leptospira fainei
  misc_feature (1)..(217): tr|S3URH5|S3URH5_9LEPT GTP cyclohydrolase 1 OS=Leptospi ra fainei serovar Hurstbridge str. BUT 6 OX=1193011 GN= folE PE=3 SV=1
MKHNWISRDLAFSSSKYCSFYIRVKRFTIQRRFGLEEEVTKILKAIGEDPSREGLRDTPKRVKKAYEFLTSGYKADIHHIVNNAIFEEDSQGMVLVRDIEMYSLCEHHLLPFFGKAHIGYIPNKKIIGISKIPRIVDIFARRLQVQERMTEQIGNALMEVLDPLGVAVVIKAKHLCMMMRGVEKQNSELFTSCMLGEFKTNMVTRSEFLDLIRTGST

SEQ ID NO: 9881 - protein, 183 aa, Leptospira fletcheri
  misc_feature (1)..(183): tr|A0A4V3JDY7|A0A4V3JDY7_9LEPT GTP cyclohydrolase 1 OS= Leptospira fletcheri OX=2484981 GN=folE PE=3 SV=1
MEEEVTKILKAIGENPSREGLLDTPKRVKKAYEFLTSGYTADIHKIVNNAIFEEESRGMVLVRDIEMYSLCEHHLLPFFGKAHVGYIPNKKIIGISKIPRIVDVFARRLQVQERMTEQIGNALMEVLEPLGVAVVVKAKHLCMMMRGVEKQNSELFTSCMLGEFKTNMVTRNEFLDLIRTGST

SEQ ID NO: 9882 - protein, 183 aa, Leptospira fluminis
  misc_feature (1)..(183): tr|A0A4R9GSM3|A0A4R9GSM3_9LEPT GTP cyclohydrolase 1 OS= Leptospira fluminis OX=2484979 GN=folE PE=3 SV=1
MEEEVTKILKAIGENPSREGLLDTPKRVKKAYEFLTSGYTADINKIVNNAIFEEESRGMVLVRDIEMYSLCEHHLLPFFGKAHVGYIPNKKIIGISKIPRIVDIFARRLQVQERMTEQIGNALMEVLEPLGVAVVVKAKHLCMMMRGVEKQNSELFTSCMLGEFKTNMVTRNEFLDLIRTGST

SEQ ID NO: 9883 - protein, 183 aa, Leptospira gomenensis
  misc_feature (1)..(183): tr|A0A5F1YZ75|A0A5F1YZ75_9LEPT GTP cyclohydrolase 1 OS= Leptospira gomenensis OX=2484974 GN=folE PE=3 SV=1
MEEEIVKILKSIGEDPNREGLLNTPSRVKKAYDFLTSGYRADITKIVNGAIFEEPTEGMVLVRDIEMYSLCEHHLLPFYGKAHVAYLPNKKIIGISKIPRIVDVFARRLQVQERLTEQIAYAIQEVLDPQGVAVVIKAKHLCMMMRGVEKQNSELFTSCMLGAFKENMVTRSEFLDLIRTGST

SEQ ID NO: 9884 - protein, 194 aa, Leptospira haakeii; identical to SEQ ID NO: 9862
  misc_feature (1)..(194): tr|A0A2N0C0N7|A0A2N0C0N7_9LEPT GTP cyclohydrolase 1 OS= Leptospira haakeii OX=2023198 GN=folE PE=3 SV=1

SEQ ID NO: 9885 - protein, 183 aa, Leptospira harrisiae; identical to SEQ ID NO: 9863
  misc_feature (1)..(183): tr|A0A2N0AGU5|A0A2N0AGU5_9LEPT GTP cyclohydrolase 1 OS= Leptospira harrisiae OX=2023189 GN=folE PE=3 SV=1

SEQ ID NO: 9886 - protein, 193 aa, Leptospira hartskeerlii
  misc_feature (1)..(193): tr|A0A2M9XHA7|A0A2M9XHA7_9LEPT GTP cyclohydrolase 1 OS= Leptospira hartskeerlii OX=2023177 GN=folE PE=3 SV=1
MFEAKNGETTLENEVTSILKAIGEDPNREGLLNTPKRVRKAYEFLTSGYRADIDTIVNGAIFEEDSQGMVLVRDIEMYSLCEHHLLPFFGKAHVGYIPNKKIIGISKIPRIVDVFARRLQVQERMTEQIAYALMEVLDPLGVAVVIKAKHLCMMMRGVEKQNSELFTSCMLGEFKTNMVTRSEFLDLIRTGST

SEQ ID NO: 9887 - protein, 183 aa, Leptospira idonii
  misc_feature (1)..(183): tr|A0A4V3JYI8|A0A4V3JYI8_9LEPT GTP cyclohydrolase 1 OS= Leptospira idonii OX=1193500 GN=folE PE=3 SV=1
MEDLIEGIIKQIGEDPQREGLVKTPNRVKKAYEFLTSGYKADMNSLVNGAIFEESTTGMVLVRDIEMYSLCEHHLLPFYGRAHVAYIPNKKIIGISKIPRIVDVFARRLQVQERLTDQIAQAIQETLDPLGVGVVIKAKHLCMMMRGVEKQNSELFTSSLLGVFKSDPTTRSEFLDLIRTGSH

SEQ ID NO: 9888 - protein, 183 aa, Leptospira ilyithenensis
  misc_feature (1)..(183): tr|A0A4R9LTF4|A0A4R9LTF4_9LEPT GTP cyclohydrolase 1 OS= Leptospira ilyithenensis OX=2484901 GN=folE PE=3 SV=1
MEDLIEGIIKQIGEDPHREGLLKTPSRVKKAYEFLTSGYKADLDSLVNGAIFEENTTGMVLVRDVEMYSLCEHHLLPFYGRAHVAYIPNKKIIGISKIPRIVDVFARRLQVQERLTDQIAQAIQETLDPLGVGVVIKAKHLCMMMRGVEKQNSELFTSSLLGLFKSDPTTRSEFLDLIRTGSH

SEQ ID NO: 9889 - protein, 183 aa, Leptospira inadai
  misc_feature (1)..(183): tr|V6HQM2|V6HQM2_9LEPT GTP cyclohydrolase 1 OS=Leptospi ra inadai serovar Lyme str. 10 OX=1049790 GN=folE PE=3 SV=1
MEEEVTKILKAIGENPNREGLRDTPKRVKKAYEFLTSGYKADIHHIVNNAIFEEDSQGMVLVRDIEMYSLCEHHLLPFFGKAHVGYIPNKKIIGISKIPRIVDIFARRLQVQERMTEQIGNALMEVLDPLGVAVVIKAKHLCMMMRGVEKQNSELFTSCMLGEFKTNMVTRNEFLDLIRTGST

SEQ ID NO: 9890 - protein, 183 aa, Leptospira interrogans
  misc_feature (1)..(183): sp|Q72LY8|GCH1_LEPIC GTP cyclohydrolase 1 OS=Leptospira interrogans serogroup Icterohaemorrhagiae serovar cope nhageni (strain Fiocruz L1-130) OX=267671 GN=folE PE=3 SV=1
MEEDVINILKSIGEDPTREGLLNTPKRVKKAYEFLTSGYRADITKIVNGAIFEEPTEGMVLVRDIEMYSLCEHHLLPFYGKAHVAYLPNKKIIGISKIPRIVDVFARRLQVQERLTEQIAYAIQEVLDPQGVAVVIKAKHLCMMMRGVEKQNSELFTSCMLGAFKENMVTRSEFLDLIRTGST

SEQ ID NO: 9891 - protein, 183 aa, Leptospira interrogans; identical to SEQ ID NO: 9890
  misc_feature (1)..(183): tr|A0A0E2CP07|A0A0E2CP07_LEPIR GTP cyclohydrolase 1 OS= Leptospira interrogans serovar Bataviae str. L1111 OX=1 049804 GN=folE PE=3 SV=1

SEQ ID NO: 9892 - protein, 183 aa, Leptospira jelokensis; identical to SEQ ID NO: 9866
  misc_feature (1)..(183): tr|A0A4Z0ZRY4|A0A4Z0ZRY4_9LEPT GTP cyclohydrolase 1 OS= Leptospira jelokensis OX=2484931 GN=folE PE=3 SV=1

SEQ ID NO: 9893 - protein, 183 aa, Leptospira johnsonii
  misc_feature (1)..(183): tr|A0A2P2D5B6|A0A2P2D5B6_9LEPT GTP cyclohydrolase 1 OS= Leptospira johnsonii OX=1917820 GN=folE PE=3 SV=1
MENEVTSILKAIGEDPNREGLLNTPKRVRKAYEFLTSGYRADIDTIVNGAIFEEDSQGMVLVRDIEMYSLCEHHLLPFFGKAHVGYIPNKKIIGISKIPRIVDVFARRLQVQERMTEQIAYALMEVLDPLGVAVVIKAKHLCMMMRGVEKQNSELFTSCMLGEFKTNMVTRSEFLDLIRTGST

SEQ ID NO: 9894 - protein, 183 aa, Leptospira kanakyensis; identical to SEQ ID NO: 9870
  misc_feature (1)..(183): tr|A0A4R9HNW3|A0A4R9HNW3_9LEPT GTP cyclohydrolase 1 OS= Leptospira kanakyensis OX=2484968 GN=folE PE=3 SV=1

SEQ ID NO: 9895 - protein, 183 aa, Leptospira kemamanensis; identical to SEQ ID NO: 9866
  misc_feature (1)..(183): tr|A0A4R9JNX0|A0A4R9JNX0_9LEPT GTP cyclohydrolase 1 OS= Leptospira kemamanensis OX=2484942 GN=folE PE=3 SV=1

SEQ ID NO: 9896 - protein, 183 aa, Leptospira kirschneri
  misc_feature (1)..(183): tr|M6IAC8|M6IAC8_9LEPT GTP cyclohydrolase 1 OS=Leptospi ra kirschneri serovar Bim str. 1051 OX=1049941 GN=folE PE=3 SV=1
MEEDIINILKSIGEDPTREGLLNTPKRVKKAYEFLTSGYRADITKIVNGAIFEEPTEGMVLVRDIEMYSLCEHHLLPFYGKAHVAYLPNKKIIGISKIPRIVDVFARRLQVQERLTEQIAYAIQEVLDPQGVAVVIKAKHLCMMMRGVEKQNSELFTSCMLGAFKENMVTRSEFLDLIRTGST

SEQ ID NO: 9897 - protein, 183 aa, Leptospira kirschneri; identical to SEQ ID NO: 9896
  misc_feature (1)..(183): tr|A0A0E2B3P2|A0A0E2B3P2_9LEPT GTP cyclohydrolase 1 OS= Leptospira kirschneri str. H1 OX=1049966 GN=folE PE=3 S V=1

SEQ ID NO: 9898 - protein, 190 aa, Leptospira kmetyi
  misc_feature (1)..(190): tr|A0A2M9XN93|A0A2M9XN93_9LEPT GTP cyclohydrolase 1 OS= Leptospira kmetyi OX=408139 GN=folE PE=3 SV=1
MKRREFNLEDEIVNILKSIGEDPTREGLLNTPKRVKKAYDFLTSGYTADITKIVNGAIFEEPTDGMVLVRDIEMYSLCEHHLLPFYGRAHVAYLPNKKIIGISKIPRIVDVFARRLQVQERLTEQIAYAIQDVLEPQGVAVVIKAKHLCMMMRGVEKQNSELFTSCMLGAFKENMVTRSEFLDLIRTGST

SEQ ID NO: 9899 - protein, 183 aa, Leptospira kmetyi
  misc_feature (1)..(183): tr|A0A5F1XQH4|A0A5F1XQH4_9LEPT GTP cyclohydrolase 1 OS= Leptospira kmetyi OX=408139 GN=folE PE=3 SV=1
MEDEIVNILKSIGEDPTREGLLNTPKRVKKAYDFLTSGYTADITKIVNGAIFEESTDGMVLVRDIEMYSLCEHHLLPFYGRAHVAYLPNKKIIGISKIPRIVDVFARRLQVQERLTEQIAYAIQDVLEPQGVAVVIKAKHLCMMMRGVEKQNSELFTSCMLGAFKENMVTRSEFLDLIRTGST

SEQ ID NO: 9900 - protein, 183 aa, Leptospira kobayashii
  misc_feature (1)..(183): tr|A0A2P2DSR9|A0A2P2DSR9_9LEPT GTP cyclohydrolase 1 OS= Leptospira kobayashii OX=1917830 GN=folE PE=3 SV=1
MEDLIEGIIKQIGEDPGREGLLKTPSRVKKAYEFLTSGYKADLDSLVNGAIFEENTTGMVLVRDIEMYSLCEHHLLPFYGRAHVAYIPNKKIIGISKIPRIVDVFARRLQVQERLTDQIAQAIQETLDPLGVGVVIKAKHLCMMMRGVEKQNSELFTSSLLGLFKSDPTTRSEFLDLIRTGSH

SEQ ID NO: 9901 - protein, 194 aa, Leptospira koniamboensis; identical to SEQ ID NO: 9862
  misc_feature (1)..(194): tr|A0A4R9J8U0|A0A4R9J8U0_9LEPT GTP cyclohydrolase 1 OS= Leptospira koniamboensis OX=2484950 GN=folE PE=3 SV=1

SEQ ID NO: 9902 - protein, 183 aa, Leptospira langatensis
  misc_feature (1)..(183): tr|A0A5F1ZVD5|A0A5F1ZVD5_9LEPT GTP cyclohydrolase 1 OS= Leptospira langatensis OX=2484983 GN=folE PE=3 SV=1
MEEEVTNILKAIGEDPSREGLVNTPKRVRKSYEFLTSGYRADMNSIVNGAIFEEDSQGMVLVRDIEMYSLCEHHLLPFFGKAHVGYIPNKKIIGISKIPRIVDVFARRLQVQERMTEQIAYALMEVLDPLGVAVVIKAKHLCMMMRGVEKQNSELFTSCMLGEFKTNMVTRSEFLDLIRTGST

SEQ ID NO: 9903 - protein, 183 aa, Leptospira levettii
  misc_feature (1)..(183): tr|A0A2N0AWM0|A0A2N0AWM0_9LEPT GTP cyclohydrolase 1 OS= Leptospira levettii OX=2023178 GN=folE PE=3 SV=1
MENLIEEILKQIGEDPNREGLVKTPNRVKKAYDFLTSGYKADINQLVNGAIFEESTTGMVLVRDIEMYSLCEHHLLPFYGRAHVAYIPNKKIIGISKIPRIVDVFARRLQVQERLTDQIAQAIQETLDPLGVGVVIKAKHLCMMMRGVEKQNSELFTSSLLGVFKSDPTTRSEFLDLIRTGSH

SEQ ID NO: 9904 - protein, 183 aa, Leptospira licerasiae
  misc_feature (1)..(183): tr|I0XV40|I0XV40_9LEPT GTP cyclohydrolase 1 OS=Leptospi ra licerasiae serovar Varillal str. VAR 010 OX=1049972 GN=folE PE=3 SV=1
MENEVTSILKAIGEDPNREGLLNTPKRVRKAYEFLTSGYKADIDTIVNGAIFEEDSQGMVLVRDIEMYSLCEHHLLPFFGKAHVGYIPNKKIIGISKIPRIVDVFARRLQVQERMTEQIAYALMEVLDPLGVAVVIKAKHLCMMMRGVEKQNSELFTSCMLGEFKTNMVTRSEFLDLIRTGST

SEQ ID NO: 9905 - protein, 194 aa, Leptospira licerasiae
  misc_feature (1)..(194): tr|A0A5F2DXJ6|A0A5F2DXJ6_9LEPT GTP cyclohydrolase 1 OS= Leptospira licerasiae OX=447106 GN=folE PE=3 SV=1
MYFQSEERRETLENEVTSILKAIGEDPNREGLLNTPKRVRKAYEFLTSGYKADIDTIVNGAIFEEDSQGMVLVRDIEMYSLCEHHLLPFFGKAHVGYIPNKKIIGISKIPRIVDVFARRLQVQERMTEQIAYALMEVLDPLGVAVVIKAKHLCMMMRGVEKQNSELFTSCMLGEFKTNMVTRSEFLDLIRTGST

SEQ ID NO: 9906 - protein, 183 aa, Leptospira macculloughii; identical to SEQ ID NO: 9863
  misc_feature (1)..(183): tr|A0A2N0C3Q5|A0A2N0C3Q5_9LEPT GTP cyclohydrolase 1 OS= Leptospira macculloughii OX=2023202 GN=folE PE=3 SV=1

SEQ ID NO: 9907 - protein, 183 aa, Leptospira macculloughii; identical to SEQ ID NO: 9903
  misc_feature (1)..(183): tr|A0A2N0CIR0|A0A2N0CIR0_9LEPT GTP cyclohydrolase 1 OS= Leptospira macculloughii OX=2023202 GN=folE PE=3 SV=1

SEQ ID NO: 9908 - protein, 183 aa, Leptospira mayottensis
  misc_feature (1)..(183): tr|A0A3Q9DXA1|A0A3Q9DXA1_9LEPT GTP cyclohydrolase 1 OS= Leptospira mayottensis 200901116 OX=1192864 GN=folE PE= 3 SV=1
MEENIVNILKSIGEDPTREGLLNTPKRVKKAYDFLTSGYHADITKVVNGAIFEEPTEGMILVRDIEVYSLCEHHLLPFYGRAHVAYLPNKKIIGISKIPRIVDVFARRLQVQERLTEQIAYAVQEVLDPQGVAVVIKAKHLCMMMRGVEKQNSELFTSCLLGAFKENMVTRSEFLDLIRTGST

SEQ ID NO: 9909 - protein, 183 aa, Leptospira mayottensis; identical to SEQ ID NO: 9908
  misc_feature (1)..(183): tr|A0A5F2E802|A0A5F2E802_9LEPT GTP cyclohydrolase 1 OS= Leptospira mayottensis OX=1137606 GN=folE PE=3 SV=1

SEQ ID NO: 9910 - protein, 183 aa, Leptospira meyeri; identical to SEQ ID NO: 9863
  misc_feature (1)..(183): tr|A0A4R8MV24|A0A4R8MV24_LEPME GTP cyclohydrolase 1 OS= Leptospira meyeri OX=29508 GN=folE PE=3 SV=1

SEQ ID NO: 9911 - protein, 183 aa, Leptospira montravelensis
  misc_feature (1)..(183): tr|A0A4Z0ZEP4|A0A4Z0ZEP4_9LEPT GTP cyclohydrolase 1 OS= Leptospira montravelensis OX=2484961 GN=folE PE=3 SV=1
MENLIEEILKQIGEDPSREGLVKTPNRVKKAYDFLTSGYKADLNQIVNGAIFEENTTGMVLVRDIEMYSLCEHHLLPFYGRAHVAYIPNKKIIGISKIPRIVDVFARRLQVQERLTDQIAQAIQETLDPLGVGVVIKAKHLCMMMRGVEKQNSELFTSSLLGLFKTDPTTRSEFLDLIRTGSH

SEQ ID NO: 9912 - protein, 183 aa, Leptospira mtsangambouensis; identical to SEQ ID NO: 9874
  misc_feature (1)..(183): tr|A0A5F2DEA7|A0A5F2DEA7_9LEPT GTP cyclohydrolase 1 OS= Leptospira mtsangambouensis OX=2484912 GN=folE PE=3 SV= 1

SEQ ID NO: 9913 - protein, 195 aa, Leptospira neocaledonica
  misc_feature (1)..(195): tr|A0A2N0A0Y0|A0A2N0A0Y0_9LEPT GTP cyclohydrolase 1 OS= Leptospira neocaledonica OX=2023192 GN=folE PE=3 SV=1
MHFSKRRTERYTLENEVTSILKAIGEDPNREGLLNTPKRVRKAYEFLTSGYKADIDTIVNGAIFEEDSQGMVLVRDIEMYSLCEHHLLPFFGKAHVGYIPNKKIIGISKIPRIVDVFARRLQVQERMTEQIAYALMEVLDPLGVAVVIKAKHLCMMMRGVEKQNSELFTSCMLGEFKTNMVTRSEFLDLIRTGST

SEQ ID NO: 9914 - protein, 183 aa, Leptospira noguchii
  misc_feature (1)..(183): tr|V6GM55|V6GM55_9LEPT GTP cyclohydrolase 1 OS=Leptospi ra noguchii str. Cascata OX=1193054 GN=folE PE=3 SV=1
MEEDIINILKSIGEDPTREGLINTPKRVKKAYEFLTSGYRADITKIVNGAIFEEPTEGMVLVRDIEMYSLCEHHLLPFYGKAHVAYLPNKKIIGISKIPRIVDVFARRLQVQERLTEQIAYAIQEVLDPQGVAVVIKAKHLCMMMRGVEKQNSELFTSCMLGAFKENMVTRSEFLDLIRTGST

SEQ ID NO: 9915 - protein, 183 aa, Leptospira noguchii; identical to SEQ ID NO: 9914
  misc_feature (1)..(183): tr|T0GYH7|T0GYH7_9LEPT GTP cyclohydrolase 1 OS=Leptospi ra noguchii serovar Panama str. CZ214 OX=1001595 GN=fol E PE=3 SV=1

SEQ ID NO: 9916 - protein, 183 aa, Leptospira noumeaensis; identical to SEQ ID NO: 9911
  misc_feature (1)..(183): tr|A0A4R9I6V5|A0A4R9I6V5_9LEPT GTP cyclohydrolase 1 OS= Leptospira noumeaensis OX=2484964 GN=folE PE=3 SV=1

SEQ ID NO: 9917 - protein, 183 aa, Leptospira ognonensis
  misc_feature (1)..(183): tr|A0A4R9KAR9|A0A4R9KAR9_9LEPT GTP cyclohydrolase 1 OS= Leptospira ognonensis OX=2484945 GN=folE PE=3 SV=1
MEDLVEEILRQVGEDPSREGLVKTPNRVKKAYEFLTSGYIADIGQIVNGAIFEEKTTGMVLVRDIELYSLCEHHLLPFFGRAHVAYIPNKKIIGISKIPRIVDVFARRLQVQERLTDQIAQAIQETLDPLGVGVVIKAKHLCMMMRGVEKQNSELFTSSLIGLFKSDATTRSEFLDLIRTGSH

SEQ ID NO: 9918 - protein, 183 aa, Leptospira perdikensis
  misc_feature (1)..(183): tr|A0A4R9JH64|A0A4R9JH64_9LEPT GTP cyclohydrolase 1 OS= Leptospira perdikensis OX=2484948 GN=folE PE=3 SV=1
MENLIEEILKQIGEDPTREGLMKTPNRVKKAYDFLTSGYKADLNQIVNGAIFEENTTGMVLVRDIEMYSLCEHHLLPFYGRAHVAYIPNKKIIGISKIPRIVDVFARRLQVQERLTDQIAQAIQETLDPLGVGVVIKAKHLCMMMRGVEKQNSELFTSSLLGLFKTDPTTRSEFLDLIRTGSH

SEQ ID NO: 9919 - protein, 198 aa, Leptospira perolatii
  misc_feature (1)..(198): tr|A0A2M9ZKK6|A0A2M9ZKK6_9LEPT GTP cyclohydrolase 1 OS= Leptospira perolatii OX=2023191 GN=folE PE=3 SV=1
MEWGNRSWRRVRRFDLEQEVINILKEIGEDPNREGLIDTPKRVKKAYEFLTSGYRANIETIVNNAIFEEDSQGMVLVRDIELYSLCEHHMLPFFGKAHVGYIPNKKIIGISKIPRIVDVFARRLQVQERMTEQIAYALMEVLDPLGVAVVIKAKHLCMMMRGVEKQNSELFTSCMLGEFKTNMVTRSEFLDLIRTGST

SEQ ID NO: 9920 - protein, 183 aa, Leptospira putramalaysiae
  misc_feature (1)..(183): tr|A0A4V3JVH1|A0A4V3JVH1_9LEPT GTP cyclohydrolase 1 OS= Leptospira putramalaysiae OX=2484984 GN=folE PE=3 SV=1
MEEEVVKILKAIGEDPNREGLRDTPKRVSKAYDFLTSGYRADITTIVNGAIFDEPTEGMVLVRDIEMYSLCEHHLLPFYGRAHVAYLPNKKIIGISKIPRIVDVFARRLQVQERLTEQIAYAIQEVLDPQGVAVVIKAKHLCMMMRGVEKQNSELFTSCMLGAFKDNMVTRSEFLDLIRTGST

SEQ ID NO: 9921 - protein, 183 aa, Leptospira ryugenii
  misc_feature (1)..(183): tr|A0A2P2E395|A0A2P2E395_9LEPT GTP cyclohydrolase 1 OS= Leptospira ryugenii OX=1917863 GN=folE PE=3 SV=1
MENLIEEILRQVGEDPDREGLVKTPNRVKKAYEFLTSGYKANIDELVNGAIFEESTTGMVLVRDIELYSLCEHHLLPFFGRAHVAYIPNKKIIGISKIPRIVDVFARRLQVQERLTDQIAQAIQETLDPLGVGVVIKAKHLCMMMRGVEKQNSELFTSSLLGLFKTDATTRSEFLDLIRTGSH

SEQ ID NO: 9922 - protein, 194 aa, Leptospira saintgironsiae; identical to SEQ ID NO: 9862
  misc_feature (1)..(194): tr|A0A2M9YFZ5|A0A2M9YFZ5_9LEPT GTP cyclohydrolase 1 OS= Leptospira saintgironsiae OX=2023183 GN=folE PE=3 SV=1

SEQ ID NO: 9923 - protein, 219 aa, Leptospira santarosai
  misc_feature (1)..(219): tr|M6YWY6|M6YWY6_9LEPT GTP cyclohydrolase 1 OS=Leptospi ra santarosai str. 200702252 OX=1049977 GN=folE PE=3 SV =1
MGMKRWIRKTDPEFSERNPTKRPPNRIGIIERREFNLEENIVNILKSIGEDPTREGLLNTPKRVKKAYDFLTSGYHADIKKVVNGAIFEERTEGMILVRDIELYSLCEHHLLPFYGRAHVAYLPNQKIIGISKIPRIVDVFARRLQVQERLTEQIAYAVQEVLDPQGVAVVIKAKHLCMMMRGVEKQNSELFTSCLLGAFKENMVTRSEFLDLIRTGST

SEQ ID NO: 9924 - protein, 218 aa, Leptospira santarosai
  misc_feature (1)..(218): tr|A0A2P1QQG2|A0A2P1QQG2_9LEPT GTP cyclohydrolase 1 OS= Leptospira santarosai OX=28183 GN=folE PE=3 SV=1
MGMKRWIRKTDPKFSERNPTKRLPSRIGIIEREFNLEENIVNILKSIGEDPTREGLLNTPKRVKKAYDFLTSGYHADIKKVVNGAIFEERTEGMILVRDIELYSLCEHHLLPFYGRAHVAYLPNQKIIGISKIPRIVDVFARRLQVQERLTEQIAYAVQEVLDPQGVAVVIKAKHLCMMMRGVEKQNSELFTSCLLGAFKENMVTRSEFLDLIRTGST

SEQ ID NO: 9925 - protein, 195 aa, Leptospira sarikeiensis
  misc_feature (1)..(195): tr|A0A4R9K4C0|A0A4R9K4C0_9LEPT GTP cyclohydrolase 1 OS= Leptospira sarikeiensis OX=2484943 GN=folE PE=3 SV=1
MHLKSEERRRDALEHEVTNILKAIGEDPSREGLLNTPKRVRKAYEFLTSGYKADIDTIVNGAIFEEDSQGMVLVRDIEMYSLCEHHLLPFYGKAHVGYIPNKKIIGISKIPRIVDVFARRLQVQERMTEQIAYALMDVLDPLGVAVVIKAKHLCMMMRGVEKQNSELFTSCMLGEFKTNMVTRSEFLDLIRTGST

SEQ ID NO: 9926 - protein, 194 aa, Leptospira selangorensis; identical to SEQ ID NO: 9862
  misc_feature (1)..(194): tr|A0A4V3JDB3|A0A4V3JDB3_9LEPT GTP cyclohydrolase 1 OS= Leptospira selangorensis OX=2484982 GN=folE PE=3 SV=1

SEQ ID NO: 9927 - protein, 183 aa, Leptospira semungkisensis
  misc_feature (1)..(183): tr|A0A4R9G6K0|A0A4R9G6K0_9LEPT GTP cyclohydrolase 1 OS= Leptospira semungkisensis OX=2484985 GN=folE PE=3 SV=1
MEQEVTNILKAIGEDPSREGLLNTPKRVRKSYEFLTSGYRADMNSIVNGAIFEEDSQGMVLVRDIEMYSLCEHHLLPFFGKAHVGYIPNKKIIGISKIPRIVDVFARRLQVQERMTEQIAYALMEVLDPLGVAVVIKAKHLCMMMRGVEKQNSELFTSCMLGEFKTNMVTRSEFLDLIRTGST

SEQ ID NO: 9928 - protein, 225 aa, Leptospira sp.
  misc_feature (1)..(225): tr|A0A2M8HRC4|A0A2M8HRC4_9LEPT GTP cyclohydrolase 1 OS= Leptospira sp. OX=178 GN=folE PE=3 SV=1
MILNPEYDTFTSQGDNHSMTSIETPLREDAFVKTDEEKIQNIQKYFALIMGELGLDLTDDSLRGTPYRVAKMYVQEIFSGLNPANKPVISTFDNKYQYDKMLVESNISFSSSCEHHFLPIVGKSHVGYISNGRVIGLSKINRIVDYFAKRPQVQERMTVQIIEELKKVLNTEDVIVVVEAGHMCVSTRGINDKSSMTTTIEYSGKFMSPSLRNEFFQLIAKKSIS

SEQ ID NO: 9929 - protein, 183 aa, Leptospira sp.; identical to SEQ ID NO: 9859
  misc_feature (1)..(183): tr|M6EN06|M6EN06_9LEPT GTP cyclohydrolase 1 OS=Leptospi ra sp. serovar Kenya str. Sh9 OX=1242991 GN=folE PE=3 S V=1

SEQ ID NO: 9930 - protein, 183 aa, Leptospira stimsonii; identical to SEQ ID NO: 9920
  misc_feature (1)..(183): tr|A0A396ZD73|A0A396ZD73_9LEPT GTP cyclohydrolase 1 OS= Leptospira stimsonii OX=2202203 GN=folE PE=3 SV=1

SEQ ID NO: 9931 - protein, 183 aa, Leptospira terpstrae
  misc_feature (1)..(183): tr|N1W4N1|N1W4N1_9LEPT GTP cyclohydrolase 1 OS=Leptospi ra terpstrae serovar Hualin str. LT 11-33 = ATCC 700639 OX=1257025 GN=folE PE=3 SV=1
MENLIEEILKQIGEDPKREGLTKTPSRVKKAYDFLTSGYKADLNQIVNGAIFEENTTGMVLVRDIEMYSLCEHHLLPFYGRAHVAYIPNKKIIGISKIPRIVDVFARRLQVQERLTDQIAQAIQETLDPLGVGVVIKAKHLCMMMRGVEKQNSELFTSSLLGLFKTDPTTRSEFLDLIRTGSH

SEQ ID NO: 9932 - protein, 183 aa, Leptospira tipperaryensis
  misc_feature (1)..(183): tr|A0A1D7V2X3|A0A1D7V2X3_9LEPT GTP cyclohydrolase 1 OS= Leptospira tipperaryensis OX=2564040 GN=folE PE=3 SV=1
MEEEVVKILKSIGEDPNREGLRDTPKRVAKSYEFLTSGYRADITTIVNGAIFEEPTEGMVLVRDIEMYSLCEHHLLPFYGRAHVAYLPNKKIIGISKIPRIVDVFARRLQVQERLTEQIAYAIQEVLDPQGVAVVIKAKHLCMMMRGVEKQNSELFTSCMLGAFKDNMVTRSEFLDLIRTGST

SEQ ID NO: 9933 - protein, 183 aa, Leptospira vanthielii
  misc_feature (1)..(183): tr|N1W5R5|N1W5R5_9LEPT GTP cyclohydrolase 1 OS=Leptospi ra vanthielii serovar Holland str. Waz Holland = ATCC 7 00522 OX=1218591 GN=folE PE=3 SV=1
MENLIEEILKQIGEDPTREGLMKTPSRVKKAYDFLTSGYKADLNQIVNGAIFEENTTGMVLVRDIEMYSLCEHHLLPFYGRAHVAYIPNKKIIGISKIPRIVDVFARRLQVQERLTDQIAQAIQETLEPLGVGVVIKAKHLCMMMRGVEKQNSELFTSSLLGLFKTDPTTRSEFLDLIRTGSH

SEQ ID NO: 9934 - protein, 183 aa, Leptospira vanthielii; identical to SEQ ID NO: 9933
  misc_feature (1)..(183): tr|A0A4R9LEX4|A0A4R9LEX4_9LEPT GTP cyclohydrolase 1 OS= Leptospira vanthielii OX=293085 GN=folE PE=3 SV=1

SEQ ID NO: 9935 - protein, 183 aa, Leptospira weilii
  misc_feature (1)..(183): tr|M6FTW8|M6FTW8_9LEPT GTP cyclohydrolase 1 OS=Leptospi ra weilii str. 2006001855 OX=996804 GN=folE PE=3 SV=1
MEENIVNILKSIGEDPNREGLLNTPKRVKKAYDFLTSGYHVDITKVVNGAIFEEPTEGMILVRDIEVYSLCEHHLLPFYGRAHVAYLPNKKIIGISKIPRIVDVFARRLQVQERLTEQIAYAVQEVLDPQGVAVVIKAKHLCMMMRGVEKQNSELFTSCLLGAFKENMVTRSEFLDLIRTGST

SEQ ID NO: 9936 - protein, 183 aa, Leptospira weilii
  misc_feature (1)..(183): tr|N1WJA0|N1WJA0_9LEPT GTP cyclohydrolase 1 OS=Leptospi ra weilii serovar Ranarum str. ICFT OX=1218598 GN=folE PE=3 SV=1
MEEDIVNILKSIGEDPTREGLLDTPKRVKKAYDFLTSGYRADITKIVNGAIFEEPTDGMVLVRDIEMYSLCEHHLLPFYGRAHVAYLPNKKIIGISKIPRIVDVFARRLQVQERLTEQIAYAIQEVLEPQGVGVVIKAKHLCMMMRGVEKQNSELFTSCMLGAFKENMVTRSEFLDLIRTGST

SEQ ID NO: 9937 - protein, 183 aa, Leptospira wolbachii; identical to SEQ ID NO: 9933
  misc_feature (1)..(183): tr|R9A1W4|R9A1W4_9LEPT GTP cyclohydrolase 1 OS=Leptospi ra wolbachii serovar Codice str. CDC OX=1218599 GN=folE PE=3 SV=1

SEQ ID NO: 9938 - protein, 183 aa, Leptospira wolffii
  misc_feature (1)..(183): tr|S3UXW0|S3UXW0_9LEPT GTP cyclohydrolase 1 OS=Leptospi ra wolffii serovar Khorat str. Khorat-H2 OX=1193069 GN= folE PE=3 SV=1
MEQEVTNILKEIGEDPKREGLLNTPKRVKKAYEFLTSGYRANIDTIVNGAIFEEDSEGMVLVRDIEMYSLCEHHLLPFFGKAHVGYIPNKKIIGISKIPRIVDVFARRLQVQERMTEQIANALMEVLDPLGVAVVIKAKHLCMMMRGVEKQNSELFTSCMLGEFKTNMVTRSEFLDLIRTGST

SEQ ID NO: 9939 - protein, 203 aa, Leptospira wolffii
  misc_feature (1)..(203): tr|A0A2M9ZF05|A0A2M9ZF05_9LEPT GTP cyclohydrolase 1 OS= Leptospira wolffii OX=409998 GN=folE PE=3 SV=1
MRPENRLNTESRFSKGRRETLEQEVTNILKEIGEDPKREGLLNTPKRVKKAYEFLTSGYKADIDTIVNGAIFEEHSEGMVLVRDIEMYSLCEHHLLPFFGKAHVGYIPNKKIIGISKIPRIVDVFARRLQVQERMTEQIANALMEVLDPLGVAVVIKAKHLCMMMRGVEKQNSELFTSCMLGEFKTNMVTRSEFLDLIRTGST

SEQ ID NO: 9940 - protein, 183 aa, Leptospira yanagawae
  misc_feature (1)..(183): tr|A0A4R9IZ63|A0A4R9IZ63_9LEPT GTP cyclohydrolase 1 OS= Leptospira yanagawae OX=293069 GN=folE PE=3 SV=1
MENLIEEILKQIGEDPNREGLVKTPNRVKKAYDFLTSGYKADINQLVNGAIFEENTTGMVLVRDIEMYSLCEHHLLPFYGRAHVAYIPNKKIIGISKIPRIVDVFARRLQVQERLTDQIAHAIQETLDPLGVGVVIKAKHLCMMMRGVEKQNSELFTSSLLGLFKTDPTTRSEFLDLIRTGSH

SEQ ID NO: 9941 - protein, 183 aa, Leptospira yanagawae; identical to SEQ ID NO: 9866
  misc_feature (1)..(183): tr|A0A5E8HEJ2|A0A5E8HEJ2_9LEPT GTP cyclohydrolase 1 OS= Leptospira yanagawae serovar Saopaulo str. Sao Paulo = ATCC 700523 OX=1249483 GN=folE PE=3 SV=1

SEQ ID NO: 9942 - protein, 183 aa, Leptospira yasudae; identical to SEQ ID NO: 9876
  misc_feature (1)..(183): tr|A0A418AEF0|A0A418AEF0_9LEPT GTP cyclohydrolase 1 OS= Leptospira yasudae OX=2202201 GN=folE PE=3 SV=1

SEQ ID NO: 9943 - protein, 191 aa, Leptospiraceae bacterium
  misc_feature (1)..(191): tr|A0A357IUP2|A0A357IUP2_9LEPT GTP cyclohydrolase 1 OS= Leptospiraceae bacterium OX=2026757 GN=folE PE=3 SV=1
MNKEVSREQALDAVRTLLRYIGDDPDREGLQDTPDRVVRSYEHIYSGYQKDHKEILGKTFTSSTEEMVVLSNIELYSMCEHHMLPFTGKCHIGYIPKGKVLGISKLARVMEVFARRLQIQEELCHQIATAIDTELKPAGVGVVIEARHMCMTCRGVEKQHSIMTSSTLLGSFREDPRTRQEFFDLIRSNGN

SEQ ID NO: 9944 - protein, 191 aa, Leptospiraceae bacterium
  misc_feature (1)..(191): tr|A0A2E5S4I6|A0A2E5S4I6_9LEPT GTP cyclohydrolase 1 OS= Leptospiraceae bacterium OX=2026757 GN=folE PE=3 SV=1
MKKEVSREEALDAVRTLLRYIGDDPEREGLLETPDRVVRSFEHIYSGYRKDHKEILGKTFTSSTEEMVVLSNIELYSMCEHHMLPFTGKCHIGYIPKGKVLGISKLARVMEVFARRLQIQEELCHQIATAIDTELRPAGVGVVIEARHMCMTCRGVEKQHSIMTSSTLLGSFREDPRTRQEFFDLIRSNGN

SEQ ID NO: 9945 - protein, 191 aa, Leptospirillum ferriphilum
  misc_feature (1)..(191): tr|J9ZB45|J9ZB45_LEPFM GTP cyclohydrolase 1 OS=Leptospi rillum ferriphilum (strain ML-04) OX=1048260 GN=folE PE =3 SV=1
MIDPEKIEQGVRLILEGIGEDALRPGLKETPRRIAELYRDLFRGLDPSLPRPLSLIEGEEFDEMIALAGVPFHSMCEHHFLPFFGKAHIAYIPKEGRMTGLSDLARMLDLYARRPQIQERLTSQLADRIVETLTPQGVMVVLEAEHLCLSMRGIKKPGVPIVTSAVRGIFRKNAKTRQEFLSLIRLDGPGR

SEQ ID NO: 9946 - protein, 191 aa, Leptospirillum ferriphilum
  misc_feature (1)..(191): tr|A0A094WBD6|A0A094WBD6_9BACT GTP cyclohydrolase 1 OS= Leptospirillum ferriphilum OX=178606 GN=folE PE=3 SV=1
MIDPEKIEQGVRLILEGIGEDALRPGLKETPRRIAELYQDLFRGLDATLSRPLSLIEGEEFDEMIALAGVPFHSMCEHHFLPFFGKAHIAYIPKEGRMTGLSDLGRMLDLYARRPQIQERLTSQLADRIVETLTPQGVMVVLEAEHLCLSMRGIKKPGVPVVTSAVRGIFRKNAKTRQEFLSLIRLDGPDR

SEQ ID NO: 9947 - protein, 187 aa, Leptospirillum ferrodiazotrophum
  misc_feature (1)..(187): tr|C6HTR5|C6HTR5_9BACT GTP cyclohydrolase 1 OS=Leptospi rillum ferrodiazotrophum OX=412449 GN=folE PE=3 SV=1
MVDREKIERGFRMVLEGLGEDLSRPGLAETPARVATLYADLFSGLFQKPAETLSLIEGESFDEMVVLKRLPFYSMCEHHFLPFFGHASIAYIPDHGRMTGLSDLGRVVETYARRAQIQERMTSQIADCLMETLTPQGAMVILEAEHLCLSMRGLKKPGVPVVTSAVRGIFLKNAKTRQELLSLIRSS

SEQ ID NO: 9948 - protein, 190 aa, Leptospirillum ferrooxidans
  misc_feature (1)..(190): tr|I0IN73|I0IN73_LEPFC GTP cyclohydrolase 1 OS=Leptospi rillum ferrooxidans (strain C2-3) OX=1162668 GN=folE PE =3 SV=1
MIDQKKIAEGFRLILEGLGENPGRPGLQETPRRVAELYAEILGGIHENPTEILRPIKGEDFDEMVALAGIPFHSMCEHHFLPFFGKGHIAYIPKEGRMTGLSSLARLLDIFARRPQIQERLTAEVADGIMEGLSPQGVMVVLEAEHLCLSMRGIKKPGVPVVTSAVRGIFRKNAKTRQEFLSLISMKNHG

SEQ ID NO: 9949 - protein, 191 aa, Leptospirillum sp.
  misc_feature (1)..(191): tr|A0A0K0WLS8|A0A0K0WLS8_9BACT GTP cyclohydrolase 1 OS= Leptospirillum sp. Group II 'CF-1' OX=1660083 GN=folE P E=3 SV=1
MIDPEKIEQGVRLILEGIGEDALRPGLKETPRRIAELYRDLFRGLDPALPRPLSLIEGEEFDEMIALAGVPFHSMCEHHFLPFFGKAHIAYIPKEGRMTGLSDLARMLDLYARRPQIQERLTSQLADRIVETLTPQGVMVVLEAEHLCLSMRGIKKPGVPIVTSAVRGIFRKNAKTRQEFLSLIRLDGPGR

SEQ ID NO: 9950 - protein, 90 aa, Leptospirillum sp.
  misc_feature (1)..(90): tr|T0XT80|T0XT80_9BACT GTP cyclohydrolase 1 OS=Leptospi rillum sp. Group IV 'UBA BS' OX=1260983 GN=D084_Lepto4C 00657G0002 PE=3 SV=1
MTGLSDLGRVVEIFARRAQIQERMTSQIADCLMETLTPQGAMVILEAEHLCLSMRGLKKPGVPVVTSAVRGIFLKNAKTRQELLSLIRSS

SEQ ID NO: 9951 - protein, 250 aa, Leptothrix cholodnii
  misc_feature (1)..(250): tr|B1XZX0|B1XZX0_LEPCP GTP cyclohydrolase I OS=Leptothr ix cholodnii (strain ATCC 51168 / LMG 8142 / SP-6) OX=3 95495 GN=Lcho_1830 PE=4 SV=1
MTTHHSLPILAAERGLAVQETDDSGVPVSVRIRERIKAARQRFHANDNIAEFIRPGELEALLDEVSGKMSAVLSSLVIDTESDHNTQDTARRVAKMYLKEVFRGRYVEQPPVTEFPNVERLNELMIVGPVTVRSACSHHLCPIVGKLWIGVMPNEHSNLIGLSKYARLAEWIMSRPQIQEEAVTQVADLLQDKMQPDGLAVVMEADHFCMSWRGVKDMDSKMINSVMRGSFLKDPNLRREFLSLLQHKKT

SEQ ID NO: 9952 - protein, 198 aa, Leptotrichia buccalis
  misc_feature (1)..(198): tr|C7NAF7|C7NAF7_LEPBD GTP cyclohydrolase 1 OS=Leptotri chia buccalis (strain ATCC 14201 / DSM 1135 / JCM 12969 / NCTC 10249 / C-1013-b) OX=523794 GN=folE PE=3 SV=1
MTENKNLDIDKKTRLENIENAVRKILINIGEDINREGLIETPKRVAKMYEEILSTKSINDFDNYKLFEVDLDNSQEMILIKDIPFFSMCEHHMLPFFGKVHVAYIPRENKVIGLSKIPRLVEFVSRKLSVQEEITVNVAKKLIEILNPLGVAVVVEARHMCIEMRGINKIGSVTKTSFYSGEFKVNVDRKKEFLDGIK

SEQ ID NO: 9953 - protein, 196 aa, Leptotrichia hofstadii
  misc_feature (1)..(196): tr|A0A510JHE3|A0A510JHE3_9FUSO GTP cyclohydrolase 1 OS= Leptotrichia hofstadii OX=157688 GN=folE PE=3 SV=1
MKKNKNIDKETRLKNIENAVREILINIGEDVDREGLIETPKRVAKMYDEILSTKSVDNFENYKLFDVDLGDSQEMVLVKEIPFFSMCEHHMLPFFGKVHVAYIPRENKVIGLSKIPRLVEFVSRKLSVQEEITVNVAKKLIEILNPLGVAVVVEARHMCIEMRGVNKIGSVTRTSFYSGEFKENVDRKKEFLEGIK

SEQ ID NO: 9954 - protein, 151 aa, Leptotrichia hofstadii
  misc_feature (1)..(151): tr|C9MW76|C9MW76_9FUSO GTP cyclohydrolase 1 OS=Leptotri chia hofstadii F0254 OX=634994 GN=GCWU000323_00797 PE=3 SV=1
MYEEILSTKSVDDFENYKLFDVDLGDSQEMVLVKEIPFFSMCEHHMLPFFGKVHVAYIPRENKVIGLSKIPRLVEFVSRKLSVQEEITVNVAKKLIEILNPLGVAVVIEARHMCIEMRGVNKIGSVTRTSFYSGEFKENADRKKEFLDGIK

SEQ ID NO: 9955 - protein, 196 aa, Leptotrichia hongkongensis
  misc_feature (1)..(196): tr|A0A510L6C5|A0A510L6C5_9FUSO GTP cyclohydrolase 1 OS= Leptotrichia hongkongensis OX=554406 GN=folE PE=3 SV=1
MKKNKNIDKETRLKNIENAVREILINIGEDADREGLIETPKRVAKMYEEILSTKSVDDFENYKLFDVDLGDSQEMVLVKEIPFFSMCEHHMLPFFGKVHVAYIPRENKVIGLSKIPRLVEFISRKLSVQEEITVNIAKKLIKILNPLGVAVVVEARHMCIEMRGVNKIGSVTRTSFYSGEFKENVDRKKEFLDGIK

SEQ ID NO: 9956 - protein, 196 aa, Leptotrichia sp.
  misc_feature (1)..(196): tr|U2PWP9|U2PWP9_9FUSO GTP cyclohydrolase 1 OS=Leptotri chia sp. oral taxon 879 str. F0557 OX=1227268 GN=folE P E=3 SV=1
MKKNKNIDKETRLKNIENAVREILINIGEDADREGLIETPKRVAKMYDEILSTKSVDNFENYKLFDVDLGDSQEMVLVKEIPFFSMCEHHMLPFFGKVHVAYIPRENKVIGLSKIPRLVEFISRKLSVQEEITVNVAKKLIEILNPLGVAVVVEARHMCIEMRGVNKIGSVTRTSFYSGEFKENVDRKKEFLDGIK

SEQ ID NO: 9957 - protein, 196 aa, Leptotrichia sp.
  misc_feature (1)..(196): tr|U2V9I8|U2V9I8_9FUSO GTP cyclohydrolase 1 OS=Leptotri chia sp. oral taxon 225 str. F0581 OX=1321774 GN=folE P E=3 SV=1
MKKNKNIDKETRLKNIENAVREILINIGEDADREGLVETPKRVAKMYEEILSTKSVDDFENYKLFDVDLGDSQEMVLVKEIPFFSMCEHHMLPFFGKVHVAYIPRDNKVIGLSKIPRLVEFISRKLSVQEEITVNVAKKLIKILNPLGVAVVVEARHMCIEMRGVNKIGSVTRTSFYSGEFKENADKKKEFLDGIK

SEQ ID NO: 9958 - protein, 196 aa, Leptotrichia trevisanii
  misc_feature (1)..(196): tr|A0A510KLB4|A0A510KLB4_9FUSO GTP cyclohydrolase 1 OS= Leptotrichia trevisanii OX=109328 GN=folE PE=3 SV=1
MKKNKSIDKETRLKNIENAVREILISIGEDVNREGLVETPKRVAKMYDEILSTKSVDDFENYKLFDVDLGDSQEMVLVKEIPFFSMCEHHMLPFFGKVHVAYIPRDNKVIGLSKIPRLVEFISRKLSVQEEITVNVAKKLIEILNPLGVAVVVEARHMCIEMRGVNKIGSVTRTSFYSGEFKENVGRKKEFLEGIK

SEQ ID NO: 9959 - protein, 196 aa, Leptotrichia trevisanii
  misc_feature (1)..(196): tr|A0A510K299|A0A510K299_9FUSO GTP cyclohydrolase 1 OS= Leptotrichia trevisanii OX=109328 GN=folE PE=3 SV=1
MKKNKSIDKETRLKNIENAVREILINIGEDVYREGLIETPKRVAKMYEEILSTKNVNDFENYKLFDVNLGESQEMVLVKEIPFFSMCEHHMLPFFGKVHVAYIPRDNKVIGLSKIPRLVEFISKKLSVQEEITVNIAKKLIEILNPLGVAVVVEARHMCIEMRGINKIGSVTRTSFYSGEFKENADRKKEFLDGIK

SEQ ID NO: 9960 - protein, 201 aa, Leptotrichia wadei
  misc_feature (1)..(201): tr|A0A510KT16|A0A510KT16_9FUSO GTP cyclohydrolase 1 OS= Leptotrichia wadei OX=157687 GN=folE PE=3 SV=1
MEKNKNNLDKKTRLKNIENAVREILINVGEDVDREGLIETPKRVAKMYEEILSTKNVDDFKNYKLFDVDLGDSQEMVLVKEIPFFSMCEHHMLPFFGKVHVAYIPQDNRVIGLSKIPRLVEFVSRKLSVQEEITVNVAKKLIEILNPLGVAVVVEARHMCIEMRGVNKIGSVTRTSFYSGEFKENADRKREFLDGIRDGKF

SEQ ID NO: 9961 - protein, 199 aa, Leptotrichia wadei
  misc_feature (1)..(199): tr|U2PVJ8|U2PVJ8_LEPWF GTP cyclohydrolase 1 OS=Leptotri chia wadei (strain F0279) OX=888055 GN=folE PE=3 SV=1
MKKNKNNLDKETKLKNIENAVREILINIGEDVNRKGLIETPKRVAKMYEEILSTKKGDDFENYKLFDVDLGDSQEMVLVKEIPFFSMCEHHILPFFGKVHVAYIPRDNKVIGLSKIPRLVEFVSRKLSVQEEITVDVAKKLIEILNPLGVAVVVEARHMCVEMRGINKIGSITRTSFYSGEFKENTDKKREFLVGIRKE

SEQ ID NO: 9962 - protein, 195 aa, Leucobacter chromiiresistens
  misc_feature (1)..(195): tr|A0A1H0Z7R2|A0A1H0Z7R2_9MICO GTP cyclohydrolase 1 OS= Leucobacter chromiiresistens OX=1079994 GN=folE PE=3 SV =1
MGDTVDRERIASAVRELISAIGENPDSPELASTPFRVADSYAEFFAGVGRDPAVLLSDSVPVGDDTGELVVVRDISLRSMCEHHLLPFRGRAHIAYRPNERVVGLSAIPRVVDVLAARPQMQERLGEQIAQTLDDGLRPHGVLVVLEASHGCVADRGVRQSDSTIITVASRGSLEGAAEQAAVFALIGRPEGGAA

SEQ ID NO: 9963 - protein, 195 aa, Leucobacter chromiiresistens
  misc_feature (1)..(195): tr|A0A147EBV1|A0A147EBV1_9MICO GTP cyclohydrolase 1 OS= Leucobacter chromiiresistens OX=1079994 GN=folE PE=3 SV =1
MGDTVDRERIASAVRELISAIGENPDSPELASTPFRVADSYAEFFAGVGRDPAVLLSDSVPVGDDTGELVVVRDISLRSMCEHHLLPFRGRAHIAYRPNERVVGLSAIPRVVDVLAARPQMQERLGEQIAQTLDDGLRPRGVLVVLEASHGCVADRGVRQSDSAIITVASRGSLADAAEQAAVFALIGRPEGGAA

SEQ ID NO: 9964 - protein, 196 aa, Leucobacter komagatae
  misc_feature (1)..(196): tr|A0A542Y5Y7|A0A542Y5Y7_9MICO GTP cyclohydrolase 1 OS= Leucobacter komagatae OX=55969 GN=folE PE=3 SV=1
MSAGVDRDRVARAVRELLGAIGADPESDELRATPSRVAESYAEFFAGVGVDPQQFLADAVPVDGETGELVLMRDIALRSVCEHHLLPFRGKAHVAYQPRDRVVGLSALPRVVDTLAARPQVQERLGEQIAQTLQDGLDPLGVLVVLEASHGCVSDRGVREADAEAVTIASRGSLADPAARAEVVALIAPAGSRSAL

SEQ ID NO: 9965 - protein, 196 aa, Leucobacter komagatae
  misc_feature (1)..(196): tr|A0A0D0IJD3|A0A0D0IJD3_9MICO GTP cyclohydrolase 1 OS= Leucobacter komagatae OX=55969 GN=folE PE=3 SV=1
MNAAVDRDRVARAVRELLGAIGADPESAELRETPARVAESYAEFFSGVGVDPQQFLADAVPVDGETGELVLMRDISLRSICEHHLLPFRGRAHVAYQPSERVVGLSALPRVVAALAARPQVQERLGEQIAQAIDDGLSPRGVLVVLEASHGCVADRGVRETDAAAVTIASRGGLSEPAARAEIMALIGTGGDRRAL

SEQ ID NO: 9966 - protein, 198 aa, Leucobacter luti
  misc_feature (1)..(198): tr|A0A4V3CYI9|A0A4V3CYI9_9MICO GTP cyclohydrolase 1 OS= Leucobacter luti OX=340320 GN=folE PE=3 SV=1
MNETVDRERIAAAVRELLSAIGSDPDSPELASTPFRVADSYAEFFAGVGQDPSGFLSDAVPVGEDTGELVLVRDIVLRSVCEHHLLPFRGRAHVAYRPGGRVVGLSAIPRIVDVLAARPQVQERLGEQIAQTLVDGLDPLGVLVVLEASHGCVADRGVRQTEALAVTVASRGTLSDPQAQAAVFALLGRATALGSSSA

SEQ ID NO: 9967 - protein, 198 aa, Leucobacter luti
  misc_feature (1)..(198): tr|A0A4Q7U480|A0A4Q7U480_9MICO GTP cyclohydrolase 1 OS= Leucobacter luti OX=340320 GN=folE PE=3 SV=1
MGETVDRERIVAAVRELLSAIGSDPDSAELASTPGRVADSYAEFFAGVGQDPAALLSDAVPVGADTGELVLVRDISLRSVCEHHLLPFRGRAHIAYRPGERVVGLSAIPRVVDVLAARPQVQERLGEQIAQTLADGLDPLGVLVVLEASHGCVADRGVRQIDATVATVASRGSLSDPREQAAVFALLGRGAAGGSGAA

SEQ ID NO: 9968 - protein, 198 aa, Leucobacter massiliensis
  misc_feature (1)..(198): tr|A0A2S9QSS0|A0A2S9QSS0_9MICO GTP cyclohydrolase 1 OS= Leucobacter massiliensis OX=1686285 GN=folE PE=3 SV=1
MGESIDRVRIAAAVRELLSAIGADPDSPELAATPGRVADSYAEFFAGVGKDPLGLLADSVPVGADTGELVLVRDIALRSVCEHHLLPFRGRAHVAYRPGERVVGLSAIPRVVEMLAARPQVQERLGEQIAQALYDGLAPRGVLVVLEASHGCVADRGVRQGEALAVTVAARGVLGDPAEQAGVFALLGGGAGWAGAHA

SEQ ID NO: 9969 - protein, 195 aa, Leucobacter sp.
  misc_feature (1)..(195): tr|A0A373DLW1|A0A373DLW1_9MICO GTP cyclohydrolase 1 OS= Leucobacter sp. wl10 OX=2304677 GN=folE PE=3 SV=1
MGETVDRERIAAAVRELLSAIGSDPDSPELSSTPFRVAEAYAEFFSGVGQDAGRLLSDAVPVGDDTGELVLVRDIVLRSVCEHHLLPFRGRAHVAYRPGDRVVGLSAIPRVVEVLAARPQVQERLGEQIAQTIEDRLGPRGVLVVLEASHGCVADRGVRQSGALAVTVASRGSLGDPAEQAGVFALLGRAEGGEP

SEQ ID NO: 9970 - protein, 196 aa, Leucobacter sp.
  misc_feature (1)..(196): tr|A0A1R4HT02|A0A1R4HT02_9MICO GTP cyclohydrolase 1 OS= Leucobacter sp. 7(1) OX=1255613 GN=folE PE=3 SV=1
MNETVDRERVAAAVRELLHAIGADPDSPELASTPARVAESYTEFFAGMGQDPAAFLSDAIPVGADTGELVLVRDITLRSMCEHHLLPFRGRAHIAYRPGRSVVGLSAIPRVVDALAARPQVQERLGEQIAQTLADGLDPEGVLVVLEARHGCVSDRGVRQADAVTVTVASRGVLADPTQQAAVFALLGHGGSEGAQ

SEQ ID NO: 9971 - protein, 198 aa, Leucobacter triazinivorans
  misc_feature (1)..(198): tr|A0A4P6KDS1|A0A4P6KDS1_9MICO GTP cyclohydrolase 1 OS= Leucobacter triazinivorans OX=1784719 GN=folE PE=3 SV=1
MGDTVDRERIAAAVRELLSAIGSDPDSPELGSTPFRVAEAYAEFFSGVGQDAGRLLSDAVPVGSDTGELVLVRDIALRSMCEHHLLPFRGRAHVAYLPDARVVGLSAIPRVVEALAARPQVQERLGEQIAQTIDDGLAPRGVLVVLEASHGCVADRGVRQTEALAVTVASRGALSEPTQQAGVFALLGGEIERTTDRA

SEQ ID NO: 9972 - protein, 262 aa, Leuconostoc carnosum
  misc_feature (1)..(262): tr|A0A2U3MNP6|A0A2U3MNP6_LEUCA Putative GTP cyclohydrol ase 1 type 2 OS=Leuconostoc carnosum OX=1252 GN=LCAC16_ 130067 PE=4 SV=1
MIKAQDLITKIEQFAPKQLAEAGDPTGLQIGDPNQVIKRVMTVLDVRPEVVQEAINHQVDFIWAHHEVMFFPAKNLDLTNPQNKMYADLLQHHIVVYASHTNLDSAKGGMNDWLAQAIGLQNTQPLEPNADGETGLGRIGELPKTVSVKDYAARLRDLFHVKAVRVIAKDLNRPIKKIAVLGGDGGKWWAVAQAAGADAYVTADIYYHIGHDILAADFVVIDPDHHMEAIANAQMAVKVHDWFGDALLVSPTNTNTDPYTYI

SEQ ID NO: 9973 - protein, 191 aa, Leuconostoc citreum
  misc_feature (1)..(191): tr|B1MZ42|B1MZ42_LEUCK GTP cyclohydrolase 1 OS=Leuconos toc citreum (strain KM20) OX=349519 GN=folE PE=3 SV=1
MKTFNQEQTETLVQGVKYLLTAVGDDPERTGLLETPERVIKAHAEIYAHTGETTFKDYKLFDTTDDADMVIVEDIPFYAMCEHHLLPFFGTIDVAYVPDGEVIGLSKIPRLVDWASRRPSVQENLTALIADQMQRIVHPKGLAVNVTARHMCMEMRGINRPGTQTNTTIHRGLLQTDTFLKDSFSRRVRGH

SEQ ID NO: 9974 - protein, 191 aa, Leuconostoc kimchii
  misc_feature (1)..(191): tr|D5T0F4|D5T0F4_LEUKI GTP cyclohydrolase 1 OS=Leuconos toc kimchii (strain IMSNU 11154 / KCTC 2386 / IH25) OX= 762051 GN=folE PE=3 SV=1
MTMFNDEKTTTLMQGVTNLLRVIGDDDKREGLIETPMRVVKAQAEIFAHTGEAQFDDFKLFSTTNDADMVIVESIPFYSMCEHHLLPFFGTVDVAYVPDGQIIGLSKIPRLIEWASRRPNVQENLTHLIASEMNRIVAPKGVAVNVTARHMCMEMRGINQPGTQTNTAIYRGLLQTDTFLKESFTHRVNKH

SEQ ID NO: 9975 - protein, 191 aa, Leuconostoc lactis
  misc_feature (1)..(191): tr|A0A5B8T9M8|A0A5B8T9M8_LEULA GTP cyclohydrolase 1 OS= Leuconostoc lactis OX=1246 GN=folE PE=3 SV=1
MKTFNNEQILKLQTGVTDLLAAIGDDPDRSGVIETPERVVKAHAEIFAHTGETQFSDYKLFDTTQDADMVVVEGIPFYSMCEHHLLPFFGTVDVSYVPDGEIIGLSKVPRLVDWASRRPSVQENLTHLIADEMQRIVHPKGLAVNVTARHMCMEMRGINQPGTQTNTSIYRDLLKTDTFLRDSFARRVSQR

SEQ ID NO: 9976 - protein, 191 aa, Leuconostoc lactis
  misc_feature (1)..(191): tr|A0A5B8TH70|A0A5B8TH70_LEULA GTP cyclohydrolase 1 OS= Leuconostoc lactis OX=1246 GN=folE PE=3 SV=1
MKTFNNEQILKLQTGVTDLLAAIGDDPNRSGVIETPERVVKAHAEIFAHTGETQFSDYKLFDTTQDADMVVVEGIPFYSMCEHHLLPFFGTVDVAYVPDGEIIGLSKVPRLVDWASRRPSVQENLTHLIADEMQRIVHPKGLAVNVTARHMCMEMRGINQPGTQTNTSIYRDLLKTDTFLRDSFARRVSQR

SEQ ID NO: 9977 - protein, 215 aa, Leuconostoc sp.
  misc_feature (1)..(215): tr|W1UXY2|W1UXY2_9LACT GTP cyclohydrolase 1 OS=Leuconos toc sp. DORA_2 OX=1403934 GN=folE PE=3 SV=1
MTTNNDHYNEAELLASYFFETANNSELLQQKLTDVQQIEQALQTLMALCGQDDNNPDLDKTPFRVVKAFLEYTSGYREDPTAHLEKVFDIQQNDPIIVKDIEFYSMCEHHFAPFFGVAHVAYLPDQKVTGLSKIARVVEGYARRFQVQERLTNQIADAIDTVLQPKGVMVAIEAKHLCVSSRGAKKEQAQTFTLASRGAYIKDSQLRSEFMTAIK

SEQ ID NO: 9978 - protein, 190 aa, Leuconostoc suionicum
  misc_feature (1)..(190): tr|A0A2N9KGU7|A0A2N9KGU7_9LACT GTP cyclohydrolase 1 OS= Leuconostoc suionicum OX=1511761 GN=folE PE=3 SV=1
MKIFDTETNQRLEKDVKNVLTTIGDDVSRDGLLETPARVSRAYAEIFAHTGERIFQDYKVFSTESDTDIVIVENIPFYSMCEHHLLPFFGTVDIAYVPNHKIIGLSKLPRLVDWSARRPSVQESLTTLVADEVTRIVEPKGVAVNITARHMCMEMRGINRPGTQTNTSVYRGVLKTDALLRQQFMQRVIR

SEQ ID NO: 9979 - protein, 261 aa, Leuconostoc suionicum
  misc_feature (1)..(261): tr|A0A2N9K9S5|A0A2N9K9S5_9LACT GTP cyclohydrolase 1 typ e 2 OS=Leuconostoc suionicum OX=1511761 GN=LES9216_0089 9 PE=4 SV=1
MIAQELINKIELFAPKQLAEEGDPTGLQIGDPKQPVHRVMTALDVRPEVVQEAIDNQVDFIWAHHEVMFFPAKNLDLSQPQNRMYADLIQHHIVVYASHTNMDSAQGGMNDWLAEALGIQNAVPLVPNVDKRTGLGRIGQLVQPISVQEYAVKIRDLFQVQAVRVIANDVTKPIQKIAVLGGDGGRWWRVAQQAGADAYVTADVYYHVGHDILASNFIVIDPDHHMEAIANKKMVAKVKEWFGDTVDVVATKINTDPYKYI

SEQ ID NO: 9980 - protein, 324 aa, Leucothrix pacifica
  misc_feature (1)..(324): tr|A0A317C176|A0A317C176_9GAMM GTP cyclohydrolase FolE2 OS=Leucothrix pacifica OX=1247513 GN=folE2 PE=3 SV=1
MSTTNCAQDNCNVLPDIANEPHTGPNGLLNWVGMSEIEMPVKMTTGNGETMQTVARIQAYVNLTDPASKGIHMSRLYLTVDQMLGNEVLTPALLQKVVQQFVKTHDGISDNAYLECRFEFLERRRALISDNTGWKGYKVRAIASLRKGVLTSELGIEVPYSSTCPCSAALARDLIQQGFRNQFGSEGMVSLDEVHQWLGTKEGISATPHSQRSLAQVRVNLSDEVGELPISQLIDSIEDALQTPVQAAVKREDEQEFARLNGQNLMFCEDAARRLHEALDKQDSLKDFWIRVNHMESLHPHDAVAIVVKGVENGYRDDPREFPH

SEQ ID NO: 9981 - protein, 315 aa, Leucothrix sp.
  misc_feature (1)..(315): tr|A0A317CM78|A0A317CM78_9GAMM GTP cyclohydrolase FolE2 OS=Leucothrix sp. IMCC9719 OX=1481894 GN=folE2 PE=3 SV =1
MSNTMPDIANEPHTGPNSLLNWVGMSEIEMPIRILNGNGDNMQTVGRIQAYVNLIDPKSKGIHMSRLYLAVDQMMGNEVLNPKLLHKIVKQFVQTHDGISNNAYLECRFEYLERRKALVSDNTGWKGYKVRTICVYRDGEISTELSVEVPYSSTCPCSAALARDLIQQGFSKAFGTEGSVSLEDVHAWLGTKEGISATPHSQRSLAQVRVKLDESVDSLPISALIDRIEDALQTPVQAAVKREDEQEFARLNGQNLMFCEDAARRLHEALDTDSTLKDFWVRVNHLESLHPHDAVAIVVKGLEDGYRDDPREFPH

SEQ ID NO: 9982 - protein, 187 aa, Levilinea saccharolytica
  misc_feature (1)..(187): tr|A0A0P6Y4V7|A0A0P6Y4V7_9CHLR GTP cyclohydrolase 1 OS= Levilinea saccharolytica OX=229921 GN=folE PE=3 SV=1
MQDAVRKILSAVGEDPQREGLQRTPERVARAYDELLAGYRMDPEALINGALFEDSYDEMVIVRDIEFYSLCEHHMLPFIGRAHVAYMPNGRVLGLSKIPRVVDLFARRLQVQERMTRQIADFLNELLKPRGVAVVVEALHLCSMMRGVKKHDSRMTTSAMLGAFRNNMATRMEFLDNISRSSMPLHF

SEQ ID NO: 9983 - protein, 198 aa, Lewinella agarilytica
  misc_feature (1)..(198): tr|A0A1H9L0M0|A0A1H9L0M0_9BACT GTP cyclohydrolase 1 OS= Lewinella agarilytica OX=478744 GN=folE PE=3 SV=1
MAFTKTLNYDDKVTDQLSKNFTDIISGVGEEVSREGLLKTPERAAKAMQFLTQGYEQDAEAILRSAMFAEDYSEMVIVKDIELYSLCEHHLLPFFGKAHVAYIPDGYIVGLSKIPRVIDVYARRFQVQERLTDQILQAIQTTLNPLGVAVVIEARHMCMMMRGVQKQNSATTTSAFTGAFKAERTRNEFLKLITGDLG

SEQ ID NO: 9984 - protein, 198 aa, Lewinella marina
  misc_feature (1)..(198): tr|A0A2G0CFB1|A0A2G0CFB1_9BACT GTP cyclohydrolase 1 OS= Lewinella marina OX=438751 GN=folE PE=3 SV=1
MPLQQVLNYDEETTDTISDHYTRILQDLGEDPSRDGLLKTPVRAAKAMQFLTQGYEMNAENILRSAMFAENYSEMVIVKDIEFYSLCEHHMLPFFGKAHVAYIPDGYIVGLSKIPRVIEVFSRRLQVQERLTDDVLKAIHTTLNPLGVAVVMEARHMCMMMRGVQKQSSVTTTSAFTGAFESERTRNEFLKLITSNLH

SEQ ID NO: 9985 - protein, 198 aa, Lewinella nigricans
  misc_feature (1)..(198): tr|A0A2D0N5R2|A0A2D0N5R2_9BACT GTP cyclohydrolase 1 OS= Lewinella nigricans DSM 23189 = NBRC 102662 OX=1122177 GN=folE PE=3 SV=1
MVMNELEKSQLEALEELKEHYEGVLTLVGEDPDREGLVKTPERAAKAMQFLTAGYEQDGEAILRSAMFKEDYSEMVLVKDIELYSLCEHHMLPFFGKAHVAYIPNGHIVGLSKIPRVIDVFARRLQVQERLTDQILQCIHQTLQPLGVAVVIEARHMCMMMRGVQKQNSVTTTSAFTGEFKNSETRSEFLTLIGSKLH

SEQ ID NO: 9986 - protein, 198 aa, Lewinella sp.
  misc_feature (1)..(198): tr|A0A5C7FJ99|A0A5C7FJ99_9BACT GTP cyclohydrolase 1 OS= Lewinella sp. SSH13 OX=2602767 GN=folE PE=3 SV=1
MPFSQQLNYDDAITEKLSDNFANIIDGVGEDKDREGLIKTPERAAKAMQFLTQGYEQDAEAILRSAMFAEDYSEMVIVKNIELYSLCEHHLLPFFGKAHVAYIPDGYIVGLSKIPRVIDVFARRFQVQERLTDQVLQAIHKTLNPLGVAVVIEARHMCMMMRGVQKQTSVTTTSAFTGAFKAERTRNEFLKLITSDLG

SEQ ID NO: 9987 - protein, 198 aa, Lewinella sp.
  misc_feature (1)..(198): tr|A0A180EPU1|A0A180EPU1_9BACT GTP cyclohydrolase 1 OS= Lewinella sp. 4G2 OX=1803372 GN=folE PE=3 SV=1
MPFSKDLKYDPAITEALAENYTSIIEGAGEDVNREGLLKTPERASKAMQFLTQGYEQDAEAILKGAMFAEDYSEMVIVKNIEFYSLCEHHLLPFFGKAHIAYIPEGYIVGLSKIPRVVDVFARRFQVQERLTDQILNSIQKTLNPMGVAVVIEAQHMCMMMRGVQKQASVTTTSAFTGAFKSERTRNEFLKLITSDLT

SEQ ID NO: 9988 - protein, 198 aa, Lewinella xylanilytica
  misc_feature (1)..(198): tr|A0A2S6I0L6|A0A2S6I0L6_9BACT GTP cyclohydrolase 1 OS= Lewinella xylanilytica OX=1514080 GN=folE PE=3 SV=1
MPHDKALVTDKAVTDQLSDHYSSIITELGEDVSRDGLLKTPVRAAKAMQFLTQGYEMDAENILRSAMFAEDYSEMVIVKDIEFYSLCEHHVLPFFGRAHVAYIPDGYIVGLSKIPRVIEVFARRLQVQERLTDQILQAIHTTLNPLGVAVVIEARHMCMMMRGIQKQSSVTTTSAFTGAFKSERTRNEFLKLITSNLH

SEQ ID NO: 9989 - protein, 198 aa, Lewinellaceae bacterium
  misc_feature (1)..(198): tr|A0A2C6B794|A0A2C6B794_9BACT GTP cyclohydrolase 1 OS= Lewinellaceae bacterium SD302 OX=2014804 GN=folE PE=3 S V=1
MAYTKTEEYDEAVTENISKCFTSIIADIGEDAQREGLIKTPERAAKAMQFLTQGYDMDAKAILRSAMFAEDYSEMVIVKNIELYSLCEHHMLPFFGKAHVAYIPNGHIVGLSKIPRVIDVFARRLQVQERLTDQILDAIQDTLKPLGAAVVIEASHMCMMMRGVQKQNSVTTTSAFTGAFERVQTRNEFMKLISNDLS

SEQ ID NO: 9990 - protein, 205 aa, Liberibacter asiaticus
  misc_feature (1)..(205): tr|C6XG54|C6XG54_LIBAP GTP cyclohydrolase 1 OS=Liberiba cter asiaticus (strain psy62) OX=537021 GN=folE PE=3 SV =1
MKCLRTGVFNMKLKKPTVEEAKEAIRVILRWIGDDPDREGLKDTPDRVIKSYKELFAGYKQIPTTQDTSRFHFGEASKYQDMVLIKDISFFSYCEHHILPIWGKIHLAYIPKKHVIGLSKLVRILEVYSRRLQIQERLTMQIAHAIESSTDSKGVAVLIEGQHMCMSMRGIKRDGLTTVTTAFTGEFSRDKGKTDFFLKMTHNQR

SEQ ID NO: 9991 - protein, 198 aa, Liberibacter crescens
  misc_feature (1)..(198): tr|L0EW24|L0EW24_LIBCB GTP cyclohydrolase 1 OS=Liberiba cter crescens (strain BT-1) OX=1215343 GN=folE PE=3 SV= 1
MSYSDLKPVKPTLKEVEEAVKTIIRWIGDDPEREGLKDTPARVVKSYAELFDGYNKSIDNMAASSFEEVGGYNDIVLLKDIPFFSHCEHHIVPIIGKAHIAYFPEKRVIGLSKIVRIVNLYAHRLQTQEKITAQIANGMEKVLHSRGVAILVEGEHMCMSMRGIRTVNVKTITTSFTGVFSNISENQSRFMKMVGYDR

SEQ ID NO: 9992 - protein, 195 aa, Liberibacter solanacearum
  misc_feature (1)..(195): tr|E4UDL9|E4UDL9_LIBSC GTP cyclohydrolase 1 OS=Liberiba cter solanacearum (strain CLso-ZC1) OX=658172 GN=folE P E=3 SV=1
MKSKNPTSEEAKEAIRVILRWIGDDPEREGLKDTPERVIKSYKELFSGYEQDFIVQDTSRFYFGEVSNYGDMVLIKDISFSSYCEHHILPIFGKIHLAYIPKKRVIGLSKLIRILEIYSRRLQIQERLTMQIANEIGNVADSKGVAVLIEGQHMCMSMRGIKREGLTTVTTSFTGEFNSNKENKDIFIRMINNKR

SEQ ID NO: 9993 - protein, 188 aa, Lihuaxuella thermophila
  misc_feature (1)..(188): tr|A0A1H8F9A6|A0A1H8F9A6_9BACL GTP cyclohydrolase 1 OS= Lihuaxuella thermophila OX=1173111 GN=folE PE=3 SV=1
MEVDHQKIEEAVRMILEAVGEDPNREGLIDTPKRVARMYQEIFSGLREDPKEHFSVIFSEDHEELVLVKDIPFFSTCEHHLVPFFGKAHVGYIPRGGRVTGLSKLARAVEAVARRPQLQERITATVADAIMEKLDPHGVIVVVEAEHMCMTMRGVRKPGAKTVTSAVRGVFAKDPTTRAEALSLIGIK

SEQ ID NO: 9994 - protein, 372 aa, Limimaricola cinnabarinus
  misc_feature (1)..(372): tr|A0A2G1MJA4|A0A2G1MJA4_9RHOB GTP cyclohydrolase FolE2 OS=Limimaricola cinnabarinus OX=1125964 GN=folE2 PE=3 SV=1
MTQATRDLHRAQTSQPVPDRDDAATALRLLRSWAAHATPEEVAALDPMVGRLVPGQDVSNYPALARAYPEDFVVDEAYRAMLPDLQNGPSSLIRGAARAIQHVGISNFRLPIRFHTRDGGDLALEASVTGTVSLEAEKKGINMSRIMRSFYRHADKTFSFDVIEAALADYITDLESFDARIQMRVRFPMLRPSLRSGLSGYQYYDLTLELVEQAGVAKKIIHLDYVYSSTCPCSLELSEHARQSRGQLATPHSQRSVARLSVVAQPGPVLWFEDLVEMARAAVPTETQVMVKREDEQAFAELNAANPIFVEDAARLFAEQLMADPRIGDFRIMASHQESLHSHDAVSLLTEGPTFAQESLDPQLFASLLHAG

SEQ ID NO: 9995 - protein, 372 aa, Limimaricola cinnabarinus
  misc_feature (1)..(372): tr|U2YHJ8|U2YHJ8_9RHOB GTP cyclohydrolase FolE2 OS=Limi maricola cinnabarinus LL-001 OX=1337093 GN=folE2 PE=3 S V=1
MTQATRDLHRSNDSHPVPNRDDAAAALRLLRSWATLATPEEVATLDPLIGRLVPGQELSNYPALARAYPEDFVVDDAYRAMLPDLQNGPSSLIRGAARAIQHVGISNFRLPIKFHTRDGDDIALEASVTGTVSLEAEKKGINMSRIMRSFYRHADKTFSFDVIEAALADYIADLKSFDARIQMRVRFPMLRPSLRSGLSGYQYYDLTLELVEQAGVAKKIIHLDYVYSSTCPCSLELSEHARQFRGQLATPHSQRSVARLSVVAEPGPVLWFEDLVEMARAAVPTETQVMVKREDEQAFAELNAANPIFVEDAARLFAEQLMADPRIGDFRVMASHQESLHSHDAVSLLTEGTTFANESLDPQLFASLLHAG

SEQ ID NO: 9996 - protein, 376 aa, Limimaricola hongkongensis
  misc_feature (1)..(376): tr|A0A017H9C7|A0A017H9C7_9RHOB GTP cyclohydrolase FolE2 OS=Limimaricola hongkongensis DSM 17492 OX=1122180 GN= folE2 PE=3 SV=1
MTQATRELHRAAPPATAKAGGPGRDDAAAALKLLRDWAAAATPEEVATLDPLVGRLVPGRELPNYPALARAYPEDFVVDEAYRDMLPDLQNGPSSLIRGAARAIQHVGISNFRLPIRFHTRDGEDIALEASVTGTVSLEAEKKGINMSRIMRSFYRHADKTFSFEVIEAALADYIADLKSFDARIQMRVRFPMLRPSLRSGLSGYQYYDLTLELIEQKGVAKRIVHLDYVYSSTCPCSLELSEHARQFRGQLATPHSQRSVARLSVVAEPGPVLWFEDLVEMARRAVPTETQVMVKREDEQAFAELNAANPIFVEDAARLFAEQLMADPRVGDFRVMASHQESLHSHDAVSLLTEGPTFAAESLDPKLFASLLHAG

SEQ ID NO: 9997 - protein, 372 aa, Limimaricola pyoseonensis
  misc_feature (1)..(372): tr|A0A1G7D3U5|A0A1G7D3U5_9RHOB GTP cyclohydrolase FolE2 OS=Limimaricola pyoseonensis OX=521013 GN=folE2 PE=3 S V=1
MTHADRELHRQPDQPRAPGREDAAEALKLLRDWAARATPEEIATLDPLVGRLVPGREVSNYPALARAYPEEFAVDDAYRAALPDLQNGPASLIRGAARPIQHVGISNFRLPVRFHTRDNGDLSLEASVTGTVSLEAEKKGINMSRIMRSFYRHAGKTFSFDTVRAALADYKTDLGSFDARIQMRFRFPMLRPSLRSGLEGYQYYDIALELVEQGGVEKTIVHLDYVYSSTCPCSLELSEHARQFRGQLATPHSQRSVARLSVVTQPGPRLWFEDLIDLARAAVPTETQVMVKREDEQAFAELNAANPIFVEDAARLFAEQLLADPRIGDFRVMASHQESLHSHDAVSLLTEGPTFAAESLDPRLLASLIHPG

SEQ ID NO: 9998 - protein, 374 aa, Limimaricola soesokkakensis
  misc_feature (1)..(374): tr|A0A1X6YAD1|A0A1X6YAD1_9RHOB GTP cyclohydrolase FolE2 OS=Limimaricola soesokkakensis OX=1343159 GN=folE2 PE= 3 SV=1
MTQATRDLHRPAAPANPDAPGRDDAAAALRLLRVWAAQASPEEVATLDPLVGRLLPGQELSNYPALARAYPEDFVVDEAYREMLPDLQNGPASLIRGAARPIQHVGISNFRLPIKFHTRDGGDIALEASVTGTVSLEAEKKGINMSRIMRSFYRHADKTFSFEVIETALADYIADLKSFDARIQMRVRFPMLRPSLRSGLSGYQYYDLTLELIEQAGVAKRIVHLDYVYSSTCPCSLELSEHARQFRGQLATPHSQRSVARLSVVVNPGPVLWFEDLVEMARAAVPTETQVMVKREDEQAFAELNAANPIFVEDAARLFAEQLLADERVGDFRVMASHQESLHSHDAVSLLTEGPTFAQESLDPQLFASLLHAG

SEQ ID NO: 9999 - protein, 220 aa, Limimonas halophila
  misc_feature (1)..(220): tr|A0A1G7U1N5|A0A1G7U1N5_9PROT GTP cyclohydrolase 1 OS= Limimonas halophila OX=1082479 GN=folE PE=3 SV=1
MNDSQATHPAATGGDQLTEAADTARPTRDEAEQAVRTLLKWAGDDPDREGLLDTPKRVARAYEDWFSGYFENPVEILQRTFEEVEGYDEMVVLRDVRVESHCEHHLAPIIGRAHVAYMPSKRVVGISKLARVVEIYAKRMQIQEKLTAQIANCINEVLEPRGVAVVVEAEHQCMTTRGIQKPGVTMVTSRMLGSFRKNEATRREVLAFISNSGGAAHHVG

SEQ ID NO: 10000 - protein, 267 aa, Limnobacter sp.
  misc_feature (1)..(267): tr|A0A151QGT4|A0A151QGT4_9BURK GTP cyclohydrolase FolE2 OS=Limnobacter sp. CACIAM 66H1 OX=1813033 GN=folE2 PE= 3 SV=1
MNAPDGLFLPDEQSRADKRNIAIQRVGVRSIKHPIIVETLEGPQPSVATIDMSVFLPSDVKGTHMSRFLEILQTQESALTPVGMKQMMRDMLQRLDSNAGTITMKFPYFVRKVAPVSGVASLLDYEVTLEADNNGSNTDVFMTVVVPVTSLCPCSKKISEYGAHNQRSHITIRALVADGIAVEELIRMAEESASCELWGLLKRPDEKYVTERAYDNPKFVEDLVRDVAIRLRANKKVLAYRIESENFESIHNHSAVAWIEEDKRKQN

SEQ ID NO: 10001 - protein, 284 aa, Limnobacter sp.
  misc_feature (1)..(284): tr|A0A520TIZ2|A0A520TIZ2_9BURK GTP cyclohydrolase FolE2 OS=Limnobacter sp. OX=2003368 GN=folE2 PE=3 SV=1
MPRTHEEVMNTRDKGLENAVATNPIDQAIPDVQSTIDTRHIAIQSVGIRSVKYPVLIELQGQKPMPSVAEFEMTVFLPADQKGTHMSRFIALLEEAQGTVLTVSGFRAMLVEMLQRLDAPSGRIKMELPYFLSKVAPISGVSSLMDYQLTLEGSATATGQDIYLTVVVPVTSLCPCSKKISEYGAHNQRSHVTARVQLKEDVDIAQFISAIEQQASCELYGLLKRPDEKYVTERAYDNPKFVEDLVRDVAIAMNKFSQVGQYTVEAENFESIHNHSAYARIDRA

SEQ ID NO: 10002 - protein, 223 aa, Limnobaculum parvum
  misc_feature (1)..(223): tr|A0A2Y9TVN9|A0A2Y9TVN9_9ENTR GTP cyclohydrolase 1 OS= Limnobaculum parvum OX=2172103 GN=folE PE=3 SV=1
MSSLSKEAMLVHAALEARGLETPLRGQPLDANTRKQKIEEHMTSIMQLLNLDLSDDSLAETPKRIAKMYVDEIFSGLDYANFPKITLIENKMKVDEMVTVRDITLTSTCEHHFVTIDGKATVAYIPKDYVIGLSKINRIVQFFSQRPQVQERLTQQILLALQTLLGTANVAVSIDAIHYCVKSRGVCDATSSTSTTSIGGIFKSNPSTRQEFLRAVRHSPHHM

SEQ ID NO: 10003 - protein, 204 aa, Limnochorda pilosa
  misc_feature (1)..(204): tr|A0A0K2SFX3|A0A0K2SFX3_9FIRM GTP cyclohydrolase 1 OS= Limnochorda pilosa OX=1555112 GN=folE PE=3 SV=1
MRVDAERNGTTRVRPGVALERIEAAVREIIEAIGEDPGREGLQETPRRIAEMYAELFSGLREDPARHLAVSFEEGHDEMVIVKEIPFYSMCEHHFMPFHGAVHVGYLPRGRVVGISKVARVVEDLARRPQLQERLTTQVADTLMQGLEPRGVGVVIEAEHTCMTARGVRKPGSRIVTSATRGLFRENMATRHEFLSLIGRGLKG

SEQ ID NO: 10004 - protein, 252 aa, Limnohabitans sp.
  misc_feature (1)..(252): tr|A0A0P0ME55|A0A0P0ME55_9BURK Putative GTP cyclohydrol ase 1 type 2 OS=Limnohabitans sp. 103DPR2 OX=1678129 GN =ybgI PE=4 SV=1
MTDFKTLLQAFDQLLQPERFKDYGPNGLQVEGKPSVGKLVSGVTASRELIDAAIEVKADAIFVHHGLFWRGQDGRVVGWMKERLQRLLAHNINLYAYHLPLDAHPELGNNAQLGKVLGLQAHAWCGDQNLVSVGHSLNPQGFQNAEALASHVQSVLGRHITCVAPTAKPIQRIAWCSGGAQSYFEAAIAEGVDAFITGEISEPQAHIAKETGVAFLACGHHATERYGAPAVAAHVAAELGLSHQFIDIHNPA
